United States Patent Application Publication US 2017/0009304 A1 - sequence listing, part 37

SEQ ID NO: 777152 - DNA, 100 bp, Homo sapiens
tggcgttcctgttacctctcatcattgtgttaatggtgaagcacagcgattcccgaatcaagtactggaaatgtttgatcatgcttatggtaactatatg

SEQ ID NO: 777153 - DNA, 83 bp, Homo sapiens
cgcagacgaggttgacgggctgggcgtggcccggccgcactatggctgcacctctaagatactgatggctctgcagaggaccc

SEQ ID NO: 777154 - DNA, 100 bp, Homo sapiens
atttgttcttcatgtgcagtgtcgacaattgcaggatgcacagattctggaatttgctcgccctgatacatcgaatgatagagtttgttgtacgtgaagg

SEQ ID NO: 777155 - DNA, 100 bp, Homo sapiens
gcagtgattggaaaaggaggcaagaatattaaggctctccgtacagacattgttcagattccattctgtggggaaattgactgtgaggactggatcaaaa

SEQ ID NO: 777156 - DNA, 90 bp, Homo sapiens
ttcaaagaatgatatttccaaagtttgcagaaaagaatatgagaagctgagaaatgatctcctgaatattattcgagaaaagaacttggc

SEQ ID NO: 777157 - DNA, 88 bp, Homo sapiens
cacaagtagctgctcttccaagcaaggaagtcgacagaatcggtcgaggtggacggtttggccgtaaaggtgtggctattaacatggt

SEQ ID NO: 777158 - DNA, 101 bp, Homo sapiens
tggaccacagcattcctgaaatacatccaggaaagacatggagattctcttaaaaaggacgtggtgctgatgagggccttgcgagacatgaacttgcccaa

SEQ ID NO: 777159 - DNA, 100 bp, Homo sapiens
agctaatgtgattacagcaggagattatgaccttaacatcagtgtggagtgcagtgacaacctcttcactcaaaggactggggtgatcaccagccctgac

SEQ ID NO: 777160 - DNA, 100 bp, Homo sapiens
cagaacctcaagcttttcaggcatcctcatataattaaactgtacagaatgagcacatgttgttggtgtacgccaggtggtgcttccaccattgacttcc

SEQ ID NO: 777161 - DNA, 100 bp, Homo sapiens
cagaagcctctgccccagcctgtcttctggcccctcctgaaagctgtcacccccaaatggtgaaaggcttttctaaccgtgctcggaaagcccgacttgc

SEQ ID NO: 777162 - DNA, 121 bp, Homo sapiens
tcctcctcttcctcctcatcctcctcatcttcttcatcctcctcctcctcagatctttaatctcatgaagtacgacagctacagccgcttcttaaagtctgacttgtttttaaaacacaag

SEQ ID NO: 777163 - DNA, 75 bp, Homo sapiens
gggaactccccatcgcgttttgccagcgataatacgcctcagttggtatatgatgggatccccaagggtgacctg

SEQ ID NO: 777164 - DNA, 83 bp, Homo sapiens
ggcggcggcgcgtcctccagcggcggcagcggcgctcgcagcgcccgacaatgcagatcttcgtgaagactctgactggtaag

SEQ ID NO: 777165 - DNA, 100 bp, Homo sapiens
gaaaaaaagacgaaagaagaagaagagcaaagggccttctgcaggttgtctaccttcataacaacaatatctctgtagttggatcaagtgacttctgccc

SEQ ID NO: 777166 - DNA, 75 bp, Homo sapiens
ccggcctgtacatcggcaacttcaaaggcaagaaactatattcagtctttgactcagatgccgaagatgaacttt

SEQ ID NO: 777167 - DNA, 87 bp, Homo sapiens
tggccagacctgcagttgctctacactttcagttggcactctatgtgctttcattcctggaacccaaagacctgctacaagcagctc

SEQ ID NO: 777168 - DNA, 97 bp, Homo sapiens
ggacagcaggttcaacttcccagggtacccagtgtgttgaacaaattcaagagttggttctacgcttctgtgagaagaactgtgaaaagagcatggt

SEQ ID NO: 777169 - DNA, 95 bp, Homo sapiens
gagggtctgaagttcacgactactagaaggggaggggagtggaaaggctctcagtgaaaaagcggggatctgacgagcttttctctacttgtgtc

SEQ ID NO: 777170 - DNA, 75 bp, Homo sapiens
aaggattccaagtaactcttatttgcacgcactcctggctttaaagtttatacttgcatttgccatacctgataa

SEQ ID NO: 777171 - DNA, 101 bp, Homo sapiens
ccgcatgtctactgggctcagcgacaccgcgagctatatctgcgcgtggagctgagtgacgtacaggtctctaattaacagaagatggcaaagcccagcca

SEQ ID NO: 777172 - DNA, 129 bp, Homo sapiens
ggggaagcggcgccgaagtttgcctcggactcgccgggcgctgcggtggctccctgggccgagtgtccgagctgcaggaggagggaatgaacgccatcaacctgcccctcagcccaattccctttgagc

SEQ ID NO: 777173 - DNA, 101 bp, Homo sapiens
gcgagcgtctgggcgggtggtagtctgcgctcctcagaccaccggcaggtgaacagcctgatgcagaccgaggagtgcccacctatgctagacgccacaca

SEQ ID NO: 777174 - DNA, 100 bp, Homo sapiens
ctagcgcaatgaggcgggcagcactgcggtgaaagaacttgtcctggacaacagtcggtcgaatgaaggcaaactcgaaggcctcacagatgaatttgaa

SEQ ID NO: 777175 - DNA, 100 bp, Homo sapiens
ttgactactcgcatcgcgcactttttggatcggcatctagtctttccgcttcttgaatttctctctgtaaaggaggtatgcttcagaagtgtccttctgt

SEQ ID NO: 777176 - DNA, 83 bp, Homo sapiens
cgaaaccatcgcacgggggaccaggaggagcggcaggactatatcaacctggatgagagtattgaaaaccttccctttgaatt

SEQ ID NO: 777177 - DNA, 75 bp, Homo sapiens
ccctgagagaacagggtggccgcttggtccagcaaccatgtccaagggacctgcagttggtattgatcttggcac

SEQ ID NO: 777178 - DNA, 75 bp, Homo sapiens
gacggcctggggttgctgcccgtcagtctcgaaagtcctcaaccactgaagaagaagcttgatgcttggctgtca

SEQ ID NO: 777179 - DNA, 101 bp, Homo sapiens
gtgatgaggagaaaaaggtggcgagcaggacttggacgaggacgactttgacgtggggaagccgaagaagcagcggagatcgattgtaagaacgacgtcca

SEQ ID NO: 777180 - DNA, 89 bp, Homo sapiens
agcgagcgcgccttcggcattggccgccgcgatgtcagctcagtgctgtgcgggccagacatgtcatgctgcccaaggacatagccaag

SEQ ID NO: 777181 - DNA, 100 bp, Homo sapiens
ggaggagaaggcaagccggaaagagcgaaagaaagaagtggtggaggaggaggatcctttcttcaaagtccccgtgaacaagctggcagcggctgtctcc

SEQ ID NO: 777182 - DNA, 83 bp, Homo sapiens
cgagggccagctgacggagatggtgcagaagatggaggaggaattgaatgatctggcacgggaccctccagcacagtgttcag

SEQ ID NO: 777183 - DNA, 98 bp, Homo sapiens
gttctactgtgggtctggactgatctccatgtcctgttgtggggcttttacagcctttggttacatggacacagaacagtatgaagaagcagtacgag

SEQ ID NO: 777184 - DNA, 100 bp, Homo sapiens
aaacggagagcagcagccgcccgcttcaaccccaggggaccagaggaactcagccctgattgcggcagctgcaatatttaattcagcctttggaagtttt

SEQ ID NO: 777185 - DNA, 90 bp, Homo sapiens
cgaagcctcccgggtggcttacagacgctgccagcatcgccgccgccaggacctggtgacgatggtggagcagctggccagattcctggg

SEQ ID NO: 777186 - DNA, 88 bp, Homo sapiens
ttgctgctgatcccaaaaaacctattggaggaaatatcatcgcccatgcatcaacaaccagaccccaccaacaactgaacgctttggt

SEQ ID NO: 777187 - DNA, 82 bp, Homo sapiens
ggaaaagggaggagcgctccggtggtctggcgcgctgggctcgctaggtcgtttaggccaattgggtttgaaagaaggattt

SEQ ID NO: 777188 - DNA, 74 bp, Homo sapiens
cgcaaaaccatgtccaaaccaggaaatggacagcctgccaggagtgaagaaagctttgggcaaatatggtcctg

SEQ ID NO: 777189 - DNA, 100 bp, Homo sapiens
cagcctgcatgtttctctcattctctcgttcgaggagttggaggatagctgctgcctgataccagagtgaactccgagcaggaacacttcctcattgtcc

SEQ ID NO: 777190 - DNA, 100 bp, Homo sapiens
ctttttttggatccagaatgtcagtcttaagtttcagcaacaccagcaaacagtgttcccatcaccagaatgggacacggtaactcctgaagccaagaac

SEQ ID NO: 777191 - DNA, 82 bp, Homo sapiens
attttggaccagctttttcgtttcatttcctcactttgcgttgtagtcgtctcaaaggggaatgggtaccacagaccatgtc

SEQ ID NO: 777192 - DNA, 97 bp, Homo sapiens
acgtgttgcagagaccatgtgctatgcctacatgaagcagaataacaagcctttgtattcatttgaagataatgcagactatgtttatgatgttatg

SEQ ID NO: 777193 - DNA, 130 bp, Homo sapiens
ctaaattatcgatgtcctatccagttaaatgaaggagtttctttccaagatctagacacagctaaattactgagtgcagattgatgtacagctatatattttgtcctttctttcacctcatgatctgtgt

SEQ ID NO: 777194 - DNA, 75 bp, Homo sapiens
agatgacccattatttccacctattgaattgatctggatactattgatgtaagcaacctcaacagacagtttttg

SEQ ID NO: 777195 - DNA, 50 bp, Homo sapiens
cttttccacagggaattgagttgggatagctgggagtatggccaccctgc

SEQ ID NO: 777196 - DNA, 50 bp, Homo sapiens
gagagaggccggtttcccccaccattctgaaagtcaagaagacatcatcc

SEQ ID NO: 777197 - DNA, 100 bp, Homo sapiens
gggcctcctggaccagacaaaaaccaccttctggcagatggagggagctttggagactgggcatccactatgaacttagtgatttggcccgtgaccctcc

SEQ ID NO: 777198 - DNA, 90 bp, Homo sapiens
tgggagcctagaatgcatcagtgcccttgtggcgaatggggctcacgtcgactcattcttggaatcccagaacaggccttaagtcttctc

SEQ ID NO: 777199 - DNA, 99 bp, Homo sapiens
gaaaggagattccaacctacttcaggaacacagcctattggatccctaggctcaatatgtcctaatagttatggaagtgtgaaagatgtgtgcactgca

SEQ ID NO: 777200 - DNA, 75 bp, Homo sapiens
gatttttccctctaccttaaggatgtgcaggatcttgatggtggcaaggaggaggcctcgtgggtctggtagatt

SEQ ID NO: 777201 - DNA, 100 bp, Homo sapiens
gatgccagaagcaaagaggctactgataaatctttacaagcttgtaaaatctcagatcatagcagaacttcagacaaccatttcctctctgaaagaagag

SEQ ID NO: 777202 - DNA, 100 bp, Homo sapiens
ttacatttagccaacaccacactttcaggtccacatcgacaccaagagtgcttcccagatgtttgagttgatccacaagaagctgaagtacacggaggcc

SEQ ID NO: 777203 - DNA, 115 bp, Homo sapiens
ggaagaccgcgcgcagggcctgcagcgggagctggacggcgagcgcgagcggcgcgagaaaacgccgcaccaggctgcaggccagcccttcaagttcactatcccggagtccctg

SEQ ID NO: 777204 - DNA, 75 bp, Homo sapiens
cgcgaatatcgtcatcgttagaaggaggcagtccagtgcgtgcaggagctggcctcaccctccttgctcttcatc

SEQ ID NO: 777205 - DNA, 75 bp, Homo sapiens
gcgcagccccggcctctcggcctctgccggagaaacaggagccttcacgtaaatgggtccagtcatgcctcccag

SEQ ID NO: 777206 - DNA, 101 bp, Homo sapiens
gtccatatgctccttatttactgcaatgttctttgcatgttactgtgcactccggactaacgtgaagatgccttcaattaagttgcagagttctgatggag

SEQ ID NO: 777207 - DNA, 100 bp, Homo sapiens
ggagagcccaggagcaggggagacatgaattcagtttgcctgttctgtatgcaagttccgtagctttgatgacgaagagatccagaagcatctgcaaagc

SEQ ID NO: 777208 - DNA, 98 bp, Homo sapiens
ggtcccctgctttaaccatcgaaaatgaggtcttgggcgtctttggtactggcttttttaggggtctgcctggggattacccttgctgtggatagaag

SEQ ID NO: 777209 - DNA, 90 bp, Homo sapiens
gactttgaaggaaaagaatgtagaatgaggatagaagagaggaaatcccaacatttaacagtcctcaaccactgaagaagaagcttgatg

SEQ ID NO: 777210 - DNA, 101 bp, Homo sapiens
caaggttccgcgccgggcgtggacggtgtggggcggtcccggccccgcaggtatcgagaaccttccctgcgaacttcagaggaacttccagctgatgcgag

SEQ ID NO: 777211 - DNA, 100 bp, Homo sapiens
ggttgctatggtgacagactatggggcctttatcaaaatcccaggctgtcggaagcaagcagctcttgccaggtaaaaagttttgggaaacagatgaatc

SEQ ID NO: 777212 - DNA, 82 bp, Homo sapiens
ccgtgctctccgggcacgtcaaccccttcctcccgtatatcagtttaatggatcgagaagtggcgttgcttgctgaaatgga

SEQ ID NO: 777213 - DNA, 100 bp, Homo sapiens
cggcgctacagcaagttttttgacctccaggtgcacttacagagtgctacgatgaactggggaacagatatcagcttccagtgtattgcttggcaccgcc

SEQ ID NO: 777214 - DNA, 75 bp, Homo sapiens
cccggccgcccgccctttcccacacaccggcccggggaggttgagaactggaagcggggagaggtggtgagagat

SEQ ID NO: 777215 - DNA, 96 bp, Homo sapiens
cacgggggctccgcggcgtcctcggcgctgaaggggttaattcaacagttcaccaccattaccgaaatgggatttgaccgatacaaaatggtggtg

SEQ ID NO: 777216 - DNA, 80 bp, Homo sapiens
caactcttttctctcgggcttcatctcttgtgtggggagtttcatcctagcgggtcaaaatgcagatcttcgtgaaaacc

SEQ ID NO: 777217 - DNA, 100 bp, Homo sapiens
tggcattatcggcaaaatagaactgaaaaggatgttagccgaaaagtcactcatagacgttggtactacagtttaacaccggcccgctggggctggaggc

SEQ ID NO: 777218 - DNA, 101 bp, Homo sapiens
ctaaaccactatgcttaccgagatgcggttttcctcgcagaacgcctttatgcagaagaaatcatgaccaccccaggaaaagagaactttcgcctgaaaag

SEQ ID NO: 777219 - DNA, 101 bp, Homo sapiens
aattcatgaagaaggggctggatccgtgggtcagagaacacaggaccagtttgccatcccaaggccgaaggagagaaactgagtccgagggatgtcaacat

SEQ ID NO: 777220 - DNA, 100 bp, Homo sapiens
cgtttctgtcgctgcagtcgtccgcgggacctgctgtcctttgagctgttggatataaacattgttcaagagttggagagagtgccccacaacacccctg

SEQ ID NO: 777221 - DNA, 100 bp, Homo sapiens
cgccaccgccgcctccgccgctgcctcaggagcggaacaacgtcggcgagcgggaccattcctcaagaattttgtatccaaggcccaaaagtttgttacc

SEQ ID NO: 777222 - DNA, 100 bp, Homo sapiens
caggaccaagaccctctccttccaccaaggagcgcccagaggccggcgggagctccaggttcacctcctcctcctccagagccaagagctgggtagagct

SEQ ID NO: 777223 - DNA, 101 bp, Homo sapiens
gggagaagagccatgggtcctcgacctgcagggagcagaggggacagaggcaccaaggacctccaagacaggtcaataactgggagatggacaaactagag

SEQ ID NO: 777224 - DNA, 75 bp, Homo sapiens
gcctgctgaactgggtgctttatatagggagcatctttccttgaagaagtacattattgacattgtggttgaaag

SEQ ID NO: 777225 - DNA, 89 bp, Homo sapiens
ccaaaatggaggagccaggcccccgcttcagtcaagacctgcctagaaaaaggagccagcaccgctctttgaccttgccatgcttgcct

SEQ ID NO: 777226 - DNA, 75 bp, Homo sapiens
cagagagttaacttctgtttacatggaactcagacatctgcaaatcatgtggtgatttacaagtcaagttaaaat

SEQ ID NO: 777227 - DNA, 90 bp, Homo sapiens
gagctactggcgtggtagttaaaggcccagatgataggaatcccatctcatttaggagctaaattgaagaaggagcgagcgcagcttttg

SEQ ID NO: 777228 - DNA, 75 bp, Homo sapiens
ggctgctgtcggaggcttttgtcatcaaagtgagtgacctgcaggaagaaggcaagaatgccatcaactcaccga

SEQ ID NO: 777229 - DNA, 75 bp, Homo sapiens
atgagggcgcggcagtatccttggggcactgtgcagggtgaaaggaagcatgtttacaccaatgccaaaaagcag

SEQ ID NO: 777230 - DNA, 98 bp, Homo sapiens
ctcagttcccggccaggacacggtctgggccgccgaatctccggccgaagagcggcggcggcagcggcgtctcaaaccatgaattatgtgggacagct

SEQ ID NO: 777231 - DNA, 78 bp, Homo sapiens
ccgcgaggtggcggtgctgaggcacctggagaccttcgagcaccccaacgtggtcagtcaaaccggcacgatgtccag

SEQ ID NO: 777232 - DNA, 123 bp, Homo sapiens
gttgctgttgcttggcctggtgggcccagtcctcggtgcggcgcggccagagacaaagcatggaggacacaagaatgggaggaaaggcggactctcaggaacttcattcttcacgtggtttat

SEQ ID NO: 777233 - DNA, 83 bp, Homo sapiens
agaagaggagagacctcccagggacgtgcactcagaaagataacgaaggaggcccaacttcattcaataaggagcctgacgga

SEQ ID NO: 777234 - DNA, 100 bp, Homo sapiens
tcttctcagacccgggagcgtccgggacgcggagcccggagctggggcgacgaggcgattgcgggggcctgggctagtatcctagaaggaaaacatcacc

SEQ ID NO: 777235 - DNA, 95 bp, Homo sapiens
agtgtggcgtgaatttggtcctcagcaaccacctactctattactccacaggatccgctgaacataggatgttgccacaaaatctacctcgtgta

SEQ ID NO: 777236 - DNA, 76 bp, Homo sapiens
ggtggctactctgcctcggggacgaaagcagatttatcagcaagactgttgaacgcataactgcccaagatgcctg

SEQ ID NO: 777237 - DNA, 87 bp, Homo sapiens
cttctgggccacatcttctatgtgctgggaaaccacaggattcggtttatgctagagacgatgttggccctgaagaacaatgacatg

SEQ ID NO: 777238 - DNA, 75 bp, Homo sapiens
cagatttgctggatacgtgacatcaattgctgcaactgaacttgaagatgtggtaaattcactccagcagcaacc

SEQ ID NO: 777239 - DNA, 89 bp, Homo sapiens
accgtcattctcactttccagctgaggacacgggcattaaacgtcgtctttgaaaaaatcccggaaaacgagagtgcagatgtctgtcg

SEQ ID NO: 777240 - DNA, 100 bp, Homo sapiens
gctcctgggcgagaggcttctggcactcagggctcgtgcaatccgcttcagacaggatggtaacgaagccgtcggaggattcttctctcagattgggcag

SEQ ID NO: 777241 - DNA, 100 bp, Homo sapiens
cctcagcctcccgagtggctgggattacagtggattccaaagcatgagttgggctgcttttgaatagtgggagacgggagtttaccccgatcacagaaac

SEQ ID NO: 777242 - DNA, 75 bp, Homo sapiens
cactgattagcaatttaaagatcctctccaaggtcaacgtggaggtaccaggccaccatgctcagtctcaagctg

SEQ ID NO: 777243 - DNA, 100 bp, Homo sapiens
ggccttcccatcaccatcacagagagcgatggagaagagaagtttacctttattgagaaatgtaacaaccctcgttctgtcacattattgatcaaaggac

SEQ ID NO: 777244 - DNA, 98 bp, Homo sapiens
tctgatgtgatctctcagctggagcaagaagaggacctgtgcagggcagagcaggaggccccccgagacattaaagtatgtgtcctttgtggatgaat

SEQ ID NO: 777245 - DNA, 50 bp, Homo sapiens
cggggaggtcacctgacgaggaggccaacagagattttgagaaacacatt

SEQ ID NO: 777246 - DNA, 82 bp, Homo sapiens
tgaagataggcaacaagatgatgagggcgcggcagtatccttggggcactgtgcagggatggacactccacagctgaccttg

SEQ ID NO: 777247 - DNA, 100 bp, Homo sapiens
tgatcgagaggatctggtgtaccaggcgaagctggccgagcaggctgagcgatacgacgatccagagacaatggccccgatgggatggagcccgaaggcg

SEQ ID NO: 777248 - DNA, 75 bp, Homo sapiens
ctgtctgctcctggcatgccctgccacagccactgccaaagtggaacaggtgaagttcgatgccacatccatgca

SEQ ID NO: 777249 - DNA, 100 bp, Homo sapiens
gctccgagaggacccggaggaggcagactttttcaattcctgataaagaggaacaaaggtcacagatcaatggtgtgtgcctactttttgtagcaatggg

SEQ ID NO: 777250 - DNA, 100 bp, Homo sapiens
gtgaccctcttgaatgagacagatatcttgagccagtacctggaaaaggaggaacagaatgggtagacccagaggaccccacagtcattgctgagaatga

SEQ ID NO: 777251 - DNA, 111 bp, Homo sapiens
cttgcggtccaagctctcagtgatccctcaagatccagtgctgctctcaggaaccatcagagtgaaagtgtccccaggccaaaagcccagggctccaggctgccatcagga

SEQ ID NO: 777252 - DNA, 75 bp, Homo sapiens
tccagatctccaaggagagccctcaggaaatcgccaggaaagtagaagtcaacgaaacggaatattccaatgctc

SEQ ID NO: 777253 - DNA, 82 bp, Homo sapiens
gagaccgcggccggagtgggccgcttcaagaccaagccaagactaaggggctgcagagcggggtggacattggcgtcaagta

SEQ ID NO: 777254 - DNA, 50 bp, Homo sapiens
gacataaaattagtgattactttgagtgagaaagatcagtctaaagaaaa

SEQ ID NO: 777255 - DNA, 50 bp, Homo sapiens
ctcctgagtagctgggactgcaggaacttaaaaggagtctagaaaatcca

SEQ ID NO: 777256 - DNA, 75 bp, Homo sapiens
gatttctggagagcttgacattctcaaagactggtgctatgaagctctcatgatggagcagtccaagaagtcctc

SEQ ID NO: 777257 - DNA, 50 bp, Homo sapiens
cggtcccaccgcccaggagacacgtgaaatggagtttcactcttgttacc

SEQ ID NO: 777258 - DNA, 73 bp, Homo sapiens
tcagagttctctaaaaaaactggctgtgaataatatagctggtattgaagagagtgatagattcgtgtggcct

SEQ ID NO: 777259 - DNA, 107 bp, Homo sapiens
cgggaagggccggcccgcctccctggccggggcgcagttcggaggttcaggtgagaagccctaccactgcaactgggacggctgcggctggaagtttgcgcgctcag

SEQ ID NO: 777260 - DNA, 82 bp, Homo sapiens
ccggtaccaagaaggggagtgcccgcggcagatatgtaactggttcatcaatgcccggcggcggcttctcccagacatgctt

SEQ ID NO: 777261 - DNA, 83 bp, Homo sapiens
ggggggtaccacacaacaccccagcaaacctccgggcccccaggcatggctagctcgaaatgagccgtcagactgctacagca

SEQ ID NO: 777262 - DNA, 76 bp, Homo sapiens
aagtcatctctggacagaaaaccacattgtttacacaggttcaacagagtttggaaaagatttctaaactggagca

SEQ ID NO: 777263 - DNA, 83 bp, Homo sapiens
aagaaacaagagtgcttatcccagctaagctccagggtacgtacctgtgggcatcatgttccttgttggaagcaagatcgtgg

SEQ ID NO: 777264 - DNA, 82 bp, Homo sapiens
gctgtgcagccgcgaggaggcgcgggaggtgttcgagaacgaccccgagacggtgtacgaagccatcgacagcagagatgga

SEQ ID NO: 777265 - DNA, 82 bp, Homo sapiens
ggcagagggcacctgagcggctggagagcctgttggagaaacacaaagaggagaactatgccatttttgggtcaggactgga

SEQ ID NO: 777266 - DNA, 96 bp, Homo sapiens
cttacgtgtactttaccaacgagctgaagcaggacttcactgaggatgtcaactgtgcttttgagttcctgctgaagctcacccccttgttggaca

SEQ ID NO: 777267 - DNA, 83 bp, Homo sapiens
cctttgaccacgttatcaaggagcttttatgacaagaagacagcaattcacaaagccctctgtgacaatgttgacacccgcac

SEQ ID NO: 777268 - DNA, 100 bp, Homo sapiens
attaaacctgaaccagaagatcgagagcctaactttgcaaccattggtctgcaggacatcactttagatgatgacggaatcttgcactgtctcccaggct

SEQ ID NO: 777269 - DNA, 78 bp, Homo sapiens
acaagtatgggtctccgtacaccaaaaactcaggcttcgccacctgcgtgcaaagtatagctgtggaccaactgtata

SEQ ID NO: 777270 - DNA, 100 bp, Homo sapiens
tagaggccctattggacaaatttggtggggagcataatccaccatcaatatatctggagcatttgacattgtgcagcaaagaaatggttatggagaagcc

SEQ ID NO: 777271 - DNA, 90 bp, Homo sapiens
ccgcagtcgtgcaggatctgaaggaggttaccaccaaagaatatgattttggtctaggggctccagtttctgaagctgaaaactaccaga

SEQ ID NO: 777272 - DNA, 98 bp, Homo sapiens
tgcgcatggtgcccgaacaccgcgccttcggaagcccgttcggcctggaggagccgcagtgggtcccggacaaggagaaggaagaggcccagcagaag

SEQ ID NO: 777273 - DNA, 113 bp, Homo sapiens
cttcgcgtctgcccggccaagaggcaaaggggaggttacgcagcaaaccatccagaaggtgaccatggaggaagaagatgagtctcgagggaagacagaggagtcgggggagg

SEQ ID NO: 777274 - DNA, 80 bp, Homo sapiens
cagagacagatcaaagcagctcgctcttctcaaccatctgtgagtccaggggaaccgtctccaccatccatccatccagg

SEQ ID NO: 777275 - DNA, 95 bp, Homo sapiens
taatcaagttgataaggaaagtactgtccaaatgaattatgtcagcaacgtatccaagtccgatacatacttctgcatgtctatgcgaataccag

SEQ ID NO: 777276 - DNA, 90 bp, Homo sapiens
tgaaaaacaccacaatcaaccttattgtggcattgcgccgtacattcgagagtttgaggttgatgccggcccaggatggatcagacctgt

SEQ ID NO: 777277 - DNA, 100 bp, Homo sapiens
atggcggccggcaagagcggcggtagcgcaggggagattacttttctggaagaatgatatggaacctagcaaagctgttccactgaatgcatctaagcaa

SEQ ID NO: 777278 - DNA, 75 bp, Homo sapiens
ccctgtggaaatgagacgcattaacttccagactccagtgagtgagatcattggccgagacctgagtggcttccc

SEQ ID NO: 777279 - DNA, 50 bp, Homo sapiens
gattgagaggcccccagcctcttaagggccctgttacataaaccagagat

SEQ ID NO: 777280 - DNA, 50 bp, Homo sapiens
cgcgagctggtggacaaagcgttatatcttaagtgtggtgctgctaacat

SEQ ID NO: 777281 - DNA, 100 bp, Homo sapiens
cagtgagggtgtacaaatacccctttgaattaattatggctagcaatgttgatcccagggatgatgtatttggatatcctcaacaatttgaagataaacc

SEQ ID NO: 777282 - DNA, 82 bp, Homo sapiens
acagggacagcgacttccttgcagcctcttctccggactgggatcagatccagacaatagactccttgctcaggaaaggtgg

SEQ ID NO: 777283 - DNA, 75 bp, Homo sapiens
atcatcctcgggccagcacaatattcctcagtaaatctcagacggacggtttggcaaacatcgaaaagatgacaa

SEQ ID NO: 777284 - DNA, 75 bp, Homo sapiens
gagcgagcctagggcccgacagacaccagagccggaagtggaaccgcccagtgcccccgagctcaagcaagggct

SEQ ID NO: 777285 - DNA, 116 bp, Homo sapiens
ggcaagatccagatcgggatttacgtggagatcaagcgcagcgatggtaagtaaggaggtctctgtaccatggctcgtacaaagcagactgcccgcaaatcgaccggtggtaaagc

SEQ ID NO: 777286 - DNA, 48 bp, Homo sapiens
cacgggaattatgaatacaactgtggacccccaaaagtacaagggcat

SEQ ID NO: 777287 - DNA, 100 bp, Homo sapiens
ccagcgggccctggccgctcacccgtggaaagtacaggtcctgacagctgaagcctaaagaaactgttccaactcttgctccaaaaactctttcagtagc

SEQ ID NO: 777288 - DNA, 100 bp, Homo sapiens
cttggtttcgggatctcggtgctgcagacggcgagacctcctgcacaggtatgtgaggagcagcgctgtgaggaggaagtcttccccctggccatgaact

SEQ ID NO: 777289 - DNA, 80 bp, Homo sapiens
gaggaatgttccctgacaatttcgttaaggaatgtatcctgtcaggtataatgtcagtgaatggcaagaaagttcttcat

SEQ ID NO: 777290 - DNA, 100 bp, Homo sapiens
gctcagggtgccagacctcatcatttcagccttccaagttctgatgtaacaaacaacttaaaacccagtcttcatccacagatgaacttgctagccttgg

SEQ ID NO: 777291 - DNA, 98 bp, Homo sapiens
tttattgagaatagaagacaatagtctactttaccagtacttagaaatcaagagttttcttactgtacctcagcctccctccttgaggatgagcaggg

SEQ ID NO: 777292 - DNA, 74 bp, Homo sapiens
caaccatcagtccctgctttaaggtcctggacccaagccagaagcctctgcaaagcttccttccagacctgcag

SEQ ID NO: 777293 - DNA, 100 bp, Homo sapiens
tcccacctgaacctcccaagtagcgggactgcaggaactttcgaaagaaggtaccacctatcataggtattaccacacaatttcatgcatggtggcatat

SEQ ID NO: 777294 - DNA, 50 bp, Homo sapiens
cttaccttgtgcctttcctgaagggtgatcagcccatgacctaaacctcc

SEQ ID NO: 777295 - DNA, 75 bp, Homo sapiens
agaacggagcgcccgggatgcaggaggagagcctgcaggacagcccacctgaggatattgaccataaggactcat

SEQ ID NO: 777296 - DNA, 82 bp, Homo sapiens
gccaccggccgcttctgtcctcggtggccagcatcgaaatgttcagccttttagtgatgaagatgcatcaattgaaacaatg

SEQ ID NO: 777297 - DNA, 75 bp, Homo sapiens
cctgttacttccaagtcatcaccagaaaggtccaggtcaagacctcgtctccgttctcatagtcgtagcagtgaa

SEQ ID NO: 777298 - DNA, 75 bp, Homo sapiens
ttccggtcacgccatcgttgctgccttcttcgtcaagcctgactggctcatggagaaagcctacctaagaatgaa

SEQ ID NO: 777299 - DNA, 50 bp, Homo sapiens
aggagagcttgaggagagcaggaaagggagtacagaagtaggtttacgag

SEQ ID NO: 777300 - DNA, 75 bp, Homo sapiens
caggagtacgcacctgctggggacctgtttgacatcatccctccccagacatatctgaagagatggattaagaat

SEQ ID NO: 777301 - DNA, 75 bp, Homo sapiens
cctaatgtcagggaccttctggatattttacgggaaagagccatggccatgcagaaaatctttgcccgggaaatc

SEQ ID NO: 777302 - DNA, 100 bp, Homo sapiens
ggagagctcctgggccacccctcctttcaggtcaagggatgatggcgccacttcctcagtttcggcactcaagcgcctggaacggagtcagtggacggat

SEQ ID NO: 777303 - DNA, 98 bp, Homo sapiens
ctcagcctcccaagcagatgggactacagatgttacagaagcacagagaggttaagtaacttgcccagtgctgcacagaaactaagtggtggagctgg

SEQ ID NO: 777304 - DNA, 100 bp, Homo sapiens
ccgaccgtgtgcgctccttatattcccccgcagagcttcaaggttactgactttttatgatgtttggtggctatgagactatagaagcatacgaagatga

SEQ ID NO: 777305 - DNA, 100 bp, Homo sapiens
gtggagatggcggctcagaagataaacgaggggctggaacacctcgccaaagcagagaaataattactacaagggaagacataaattcaaagcaggttgc

SEQ ID NO: 777306 - DNA, 87 bp, Homo sapiens
aaactcttagataaaatgacgacgtccttctggaagaggcgaaactgaataactgaagtgaagtgatggactccgatttggagagta

SEQ ID NO: 777307 - DNA, 101 bp, Homo sapiens
aagagagcagagggagacatcaagccatactcctctagtgaccgagaatcttaagatctccttcagcgagacagccctggagaccacgtaccaatacccct

SEQ ID NO: 777308 - DNA, 96 bp, Homo sapiens
cctccaccgagtcgtgctctcgccccaacccgcgcgccagtcaggatggctaaaggtgaccccaagaaaccaaagggcaagatgtccgcttatgcc

SEQ ID NO: 777309 - DNA, 83 bp, Homo sapiens
cagaagtccagagctgaggactgcctgtttgcagaaataacatctgctttgctgccgagctcagaggagaccccagacccctc

SEQ ID NO: 777310 - DNA, 97 bp, Homo sapiens
cccggggcggcgaggctcggcacggagatggcggcgcgctcggcgcagccttgatgacttacaagccctcaaggggaagcattttctcctggactcc

SEQ ID NO: 777311 - DNA, 100 bp, Homo sapiens
ggtccacgctgcagtgctgctgctgtttggaggtctgtgcatgcatgttcagctcgagagtcaggatgtctcagatttaacaacagttgaaagggaagac

SEQ ID NO: 777312 - DNA, 100 bp, Homo sapiens
gcagaacctgaatgacgcctacggaccccccagcaacttcctcgagatcgatatgaagggcgccctaatggagatcatccagctcgccagcctcgactcg

SEQ ID NO: 777313 - DNA, 100 bp, Homo sapiens
cgaggatgatgcggaaattaaccccaaggagatcgtgctggtggtgttcttcgggacggagtacgtggtccgcctctggtccgccggctgccgcagcaag

SEQ ID NO: 777314 - DNA, 75 bp, Homo sapiens
ggtttgcaacatccttcttctggataacactgtacaagctttcaaagtcaataacaaaatccagtctcatagcag

SEQ ID NO: 777315 - DNA, 98 bp, Homo sapiens
ctgaaaaagaatgaaattcttcatctgaaattacctctcagactttctgtaaaggaaaacaagccccagccacgtaccccatgtttgctcaatcgatc

SEQ ID NO: 777316 - DNA, 99 bp, Homo sapiens
gtctgaatcaggctttaaactgttgtgccagtgcttaggctttggaagtggtcatttcagatgtgattcatctagtgaatgtaaaagctttaaagagaa

SEQ ID NO: 777317 - DNA, 90 bp, Homo sapiens
gcagaaaccacttcacctcatcccagccatgatggaagttcatttaagtcaccagacacacttttaacctggagacttgccggcttatgg

SEQ ID NO: 777318 - DNA, 75 bp, Homo sapiens
aggcctccccagccacgtggaacttgatgggcccccgacatgaaactggcactcagaatgaagaatgccttttcc

SEQ ID NO: 777319 - DNA, 101 bp, Homo sapiens
agccgggctaggacgccgagcggtgactccccgccgctcccgggggccgtgacgtgtatgggtttcgacagaccatgatgaaattgagaatgtggccaaac

SEQ ID NO: 777320 - DNA, 135 bp, Homo sapiens
ctcaagttgaatgaaaatgccatctccaggctccaggctaaccaaaagtctgttctggttgcaaaagcttctcatttcagagagatgccaggatcctaagtgcctgccaaacttaccaattctaaggaataagtg

SEQ ID NO: 777321 - DNA, 98 bp, Homo sapiens
tcttcaactataatccagtggaggacttctcgatgccaccccacttaggtgccagctattcaacagaaaagaacggtggcttttctaaaccaatttgt

SEQ ID NO: 777322 - DNA, 98 bp, Homo sapiens
gagaagcgcgttaaggagctggctcaggaaccatcactgttgctggaggcacctgacaaatcctagcgaatttttggagcatctccacccaggaacct

SEQ ID NO: 777323 - DNA, 75 bp, Homo sapiens
atcatagtcaactgcgtggaagagaaggtatcagtgtcatttgaggatgtgactgtggacttcagtagagaggag

SEQ ID NO: 777324 - DNA, 75 bp, Homo sapiens
aaccccctaggaagataataccagagaagaattcacttagacagctgagatctgtatctgtggacctgaatgttg

SEQ ID NO: 777325 - DNA, 100 bp, Homo sapiens
gcagtcggcatcatcgagataaagaaagacagtctccatttcatggcaaccatgcagctattaaccagtgtcaggaaccagcacctatgacagaagatct

SEQ ID NO: 777326 - DNA, 73 bp, Homo sapiens
gcagggaggatgtcgggacaccccggaagctgggaaatggataaaagaatcagagtgtctcaacccttgacaa

SEQ ID NO: 777327 - DNA, 100 bp, Homo sapiens
ggaccagcaagggctctgtgtgcccaggatgcgccggcctccagggctgtgggacagatgatgtctaccatgttctacccactggtcacctttgtcctcc

SEQ ID NO: 777328 - DNA, 80 bp, Homo sapiens
ggtcggcgacagcttcggacccacgtggaacggcacatgtgtgatggggacattgttatcttcaaccggcagccaactct

SEQ ID NO: 777329 - DNA, 100 bp, Homo sapiens
agcctcaggcgtgcgcggacggtgtgcggagccaagaaaatgatgagctaagagatgcccatgaaaaacgcaaggaacggctacagatgttacagaccaa

SEQ ID NO: 777330 - DNA, 100 bp, Homo sapiens
ccttcgtccccgcagaggaccccccgacaccagcatggactgctgcaccacgaagttatacggaagcgtctcctcattgatggagatggtgctggagatg

SEQ ID NO: 777331 - DNA, 101 bp, Homo sapiens
gaaataaagagattagctgaaaaagaagactggattgttgacaatgaaggactgacttctctaaatgcagtaatagtggccttgtcttcaaaatcatggga

SEQ ID NO: 777332 - DNA, 100 bp, Homo sapiens
cttacaacgccaaaatcggttacagccatgaaaatgtgtcgtactccaaagattcaggtttactcacgtcatccagcagagaatggaaagtcaaatttcc

SEQ ID NO: 777333 - DNA, 75 bp, Homo sapiens
taccaaggccattcgcacaactgcccactacgatcctgccactgagaccctgtattcagtggatcagctggcacc

SEQ ID NO: 777334 - DNA, 100 bp, Homo sapiens
gaagacggttgtgggcggtgccatgttcttcatcggtttcaccgcgctcgttatcatgtggcagaagcactatgaaactggcgatggaatatgagaggag

SEQ ID NO: 777335 - DNA, 89 bp, Homo sapiens
gactggtggactgttcatcattctgttgaagaaacgcttaacccaagtcctgtgtatggaaactcacatgagtcagctcagtctagaag

SEQ ID NO: 777336 - DNA, 98 bp, Homo sapiens
gaagattcgcaggaactccgaggcgatacgtggttgcagtaggattggagtgtggaaagatttgcttatatacctggaaaaagactgatcaagttcca

SEQ ID NO: 777337 - DNA, 100 bp, Homo sapiens
cgctgcagttggagcaacagtccaagctcaaagctgcagagagactaagggcacttcctgaggttcattaccacctggggcagaaggacagggagacagc

SEQ ID NO: 777338 - DNA, 98 bp, Homo sapiens
ttcgtccgcggagatctctctcatctcgctcggctgcgggaaatcgggctgaagcgactgagtccgcgatggagagctcaggccccggggcctccagc

SEQ ID NO: 777339 - DNA, 82 bp, Homo sapiens
tggctgcagggacccggtgacagcgtgagagtggaagcatcagttcacagcagtaatgcacactgtacagataagacaattg

SEQ ID NO: 777340 - DNA, 75 bp, Homo sapiens
agcaaagatggtacaaaagagtctttggaggatgcggctttgatggtccaatggatgggaccccaatgaaatgtt

SEQ ID NO: 777341 - DNA, 50 bp, Homo sapiens
gatcatcctgctgctccccggaatgtccagctctgaagggcaaagtgcag

SEQ ID NO: 777342 - DNA, 90 bp, Homo sapiens
ccggccgaacccgcgatggaataatgcccagcggcccgccaggtcccggtgaaaggtgtagcagtcactcggcctacacccacagcatcg

SEQ ID NO: 777343 - DNA, 80 bp, Homo sapiens
actcttcccggttgatcgtggattatttgagctgtcggaaaaggtaacagaagatggaactcgaaatcccaatgaaaaac

SEQ ID NO: 777344 - DNA, 82 bp, Homo sapiens
gccagcggccgagcgggcggcttcctggcctgggcgctccggtggcggcggagacagggcctcagacctaaggcaggagcac

SEQ ID NO: 777345 - DNA, 75 bp, Homo sapiens
aaaagtggcatgatcctttgcagaaatgactacattaggtctcctaaaaacccagaacagaagatcattaagaga

SEQ ID NO: 777346 - DNA, 83 bp, Homo sapiens
cgtaaatgcaaaggacatggccggccggaagtcttctcccctgcacttcgctgcagtctgaagatgatgagaaactgaaaaag

SEQ ID NO: 777347 - DNA, 100 bp, Homo sapiens
gggaatgtttctaatgatgaaagttctgccattactgcaatagccacatctgtgtgtcacggcccaccctgtcgccagcttcatcatgccctcatgcctc

SEQ ID NO: 777348 - DNA, 100 bp, Homo sapiens
ccagctatagctactacaaagaaaagtggctgatgataagcatgtaactcaaaagaacagcccatcttcaccacccgagcgcatgtcttccagattgacc

SEQ ID NO: 777349 - DNA, 82 bp, Homo sapiens
cgaaactggggtgtccaggcggaacagcagagcccagagcaagtgcaccggcacctggaccaacacgaagtgagatacctgc

SEQ ID NO: 777350 - DNA, 75 bp, Homo sapiens
tttaagaaataaaccaatcaccaattccaaattggtttatccagcatccaaaaaactttggactaattgcatcat

SEQ ID NO: 777351 - DNA, 50 bp, Homo sapiens
agagtcacagtctagtagaagaaaggttccaggaagaaggtgcattttgg

SEQ ID NO: 777352 - DNA, 115 bp, Homo sapiens
agagcctggagtctgcgaaggccgggacccggttccccggcccacagtgggggtgtgcaaacccgagagaactggtgtactaatggtcacttgatgtgcgctggctgttttatcc

SEQ ID NO: 777353 - DNA, 75 bp, Homo sapiens
agacaatgctgagataagagtccacacagttgaggctacggaaacaggccgagaagaacgtggagaagaaaattg

SEQ ID NO: 777354 - DNA, 98 bp, Homo sapiens
ctcctcccagcttgcaggcttagatgcaacgccaggagcagcatcagccacgctgtaaacaagggggaaacgccaagcgcattacagaggacgtcagc

SEQ ID NO: 777355 - DNA, 83 bp, Homo sapiens
gacggtcaagagggtttgggtttatcctgttcaaagatgcagccagtgtggagaagaacactcgtgaaactgctcaggccatc

SEQ ID NO: 777356 - DNA, 100 bp, Homo sapiens
gtgtatccgcggccgtagcagccgggctggtcctgctgcgagccggcggcccggagtggggcggcgggcattgaagttgatatcgatgtggagcacggag

SEQ ID NO: 777357 - DNA, 85 bp, Homo sapiens
tggctagtaaaaaggacagaattgaatcacttgaaaagaggctcgaggtacggacattgctgcaggagaagaggttgccatcaag

SEQ ID NO: 777358 - DNA, 80 bp, Homo sapiens
agctgctcccttcgccttcgccctttccacctcgcggcagttcgcggtcttgcgagtggctggttccctgcagaagagca

SEQ ID NO: 777359 - DNA, 74 bp, Homo sapiens
cacctcctttccaactgggcaaaccccgcttccagcaggaagatgtagattccttcatgaaacagcctgggaat

SEQ ID NO: 777360 - DNA, 50 bp, Homo sapiens
caagagaagcatggaaaatctgggcagattagggacggggtttcaccatg

SEQ ID NO: 777361 - DNA, 98 bp, Homo sapiens
aaatgaaaagctacttagagaacttaggaacttggattcaaggcagtgctgttcaacggttttgtgtatagcatttgaggttcttcagggcttgcagt

SEQ ID NO: 777362 - DNA, 74 bp, Homo sapiens
cgggccgcgccgccgctgccgccgccgcgcgcggttaccttatcccatatcacacaactggtcctcagccataa

SEQ ID NO: 777363 - DNA, 100 bp, Homo sapiens
ccgcagaagagccagcggggtcgcctagtgtcatgaccagggcgggagatcacaaccgccagagaggatgctgtgttttctgaacgcctgaaagtagtag

SEQ ID NO: 777364 - DNA, 98 bp, Homo sapiens
gctgctcgagctgctgctggattgaactcagagaagccgggaactgccattggatgtccagaatcccctgtagttgataatgttgggaataagctctg

SEQ ID NO: 777365 - DNA, 101 bp, Homo sapiens
ttcctggttctgcgggcagagttggacctccaggccctgctgacctgcaaatgcaactggttgatcctgaagacataccagctatggaacgcctgacccag

SEQ ID NO: 777366 - DNA, 82 bp, Homo sapiens
accagttcgcccgtccccctgccccgttcacaatattctacaagggggttgctcctctctggatgagacagataccatacac

SEQ ID NO: 777367 - DNA, 100 bp, Homo sapiens
cagaagctctgaatcgtgttcctgaatgaaagaagtcagtcatggctgagtacgggaccctcctgcaagacctgaccaacaacatcacccttgaagatct

SEQ ID NO: 777368 - DNA, 80 bp, Homo sapiens
tctgcctaagaagaccgagagtcaccacaaggccaagggcaagtgatttgacagatgatatcatcaagttgaatcgaaag

SEQ ID NO: 777369 - DNA, 100 bp, Homo sapiens
aaaaagtaaaacttgctgctgatgaagatgatgacgatgatgatgaagaggatgatgatgaagagtacaccaggggttggaaaaaccacactaggcaaag

SEQ ID NO: 777370 - DNA, 100 bp, Homo sapiens
gaaaatgcagatgatttgcagtgaccattttgttgcagttgactcacgattatagtcatagaatcaaccttgtcctatgttaggcagctggaggcaagag

SEQ ID NO: 777371 - DNA, 100 bp, Homo sapiens
gacccgtgctggcagtagggggcgtgggaggcacaagaccagttgcacaatgccctgaatcttaataggcacgatctgacttatataatgctggggaaga

SEQ ID NO: 777372 - DNA, 75 bp, Homo sapiens
ctcacattggccggcaacttgttccagttgctctaggtcgtaaccagcctttgaaaaaggagaaaccaaaatgga

SEQ ID NO: 777373 - DNA, 97 bp, Homo sapiens
atttcgcctgaccattacacgcaaagatattcaaactctaaaccatctgaattggctcaatgatgagaggcggggtttcaccatgttgcccagactg

SEQ ID NO: 777374 - DNA, 100 bp, Homo sapiens
tggatggtgcgttgcgtgccctacttcaaggataagggcgacagcaacagctctgccggctggaagctcctacagaagaatggtcagctgtccaccatca

SEQ ID NO: 777375 - DNA, 101 bp, Homo sapiens
ccaccgaaccgccggcgggccatggccactctgccgagcgcagagcgccgcgcgttcgcgctcaagatcaacaggaggaacatatgcagcagaaaaaagag

SEQ ID NO: 777376 - DNA, 117 bp, Homo sapiens
ggccaaggctgggctgggcactgccatgctgtatgaactcattgaggtgcttttctgctttgggccaagtagcaaaagctcgattcctgcatgagaccaatgagattgcagatcaag

SEQ ID NO: 777377 - DNA, 98 bp, Homo sapiens
tccccaggctacacattctgtcagtgctgttctccaagaggcccagagacatgctgaaacatcgaagggccgcgatgggcctcttggaacattggtgt

SEQ ID NO: 777378 - DNA, 100 bp, Homo sapiens
gaggccagtggcactcccagctcgaggacgatctctttgggggctggtgaccggcaggtcatccagactccactggccgactcgctgcccgtcagccgct

SEQ ID NO: 777379 - DNA, 99 bp, Homo sapiens
gtcacttccggttctctgtcagtcgcgagcgaacgaccaagagggtgttcgactgctagagccgagcgaagcgccacccagaggagaaggccaccccgc

SEQ ID NO: 777380 - DNA, 50 bp, Homo sapiens
tcaaataaggaaattgacacctggcgtggcatccgtgtacaagatttgca

SEQ ID NO: 777381 - DNA, 152 bp, Homo sapiens
tttcagggcgcacaacgtgcctttgaagctgccgatgccagagccaggtgaactggaggagcgatttgccatcgtgctgctgttccaaagacctaatgcgcttgctgtccagcagttgacagctgctcagcagcagcagtatgcactggcag

SEQ ID NO: 777382 - DNA, 127 bp, Homo sapiens
gaatctccagatggccgcgctgcgtcgaatgctccacttgccgagcctgatgatggggacgtgccgcccctttgcgggctgggcttggagcccacaggaccctagaagtcctttaagaacatttaac

SEQ ID NO: 777383 - DNA, 90 bp, Homo sapiens
atccagatgaagccgagaaggcgctgaagcacatggatggaggtcttatcgaatgttacttagcctccaacagtattcgagaagcaatgg

SEQ ID NO: 777384 - DNA, 98 bp, Homo sapiens
gcagcaacgcatggggcgagcttcagtgtcgccagcagtgaccacagagcatcctggccagaacaagccaaggagccaagacgagagggacacacgga

SEQ ID NO: 777385 - DNA, 82 bp, Homo sapiens
gccagcaagcggaggtgctgggagcgagttggctggtacctaaaacagatccaggacctgcccccaactggcctccctgaga

SEQ ID NO: 777386 - DNA, 100 bp, Homo sapiens
ctcccgagtagctgggactgcagccctgagaagtcgttctggacgctccatcatcaatgggaactgggcaattgatcgaccaggaaaatacgagggcgga

SEQ ID NO: 777387 - DNA, 100 bp, Homo sapiens
gggagccgcgcgcctttgtgcgcgcgccgagcatcctgaggttagcattacacttctcccagtggagcccatgacttctgatcaggacgctaaggttgtg

SEQ ID NO: 777388 - DNA, 98 bp, Homo sapiens
gctttgttgtggaaatcccggttacctggtgaccatggaggctggtggcctccccttggagctgtggcgcatgatcttagcctacttgcaccttcccg

SEQ ID NO: 777389 - DNA, 82 bp, Homo sapiens
atcccggatctcaagctcgctatggagaattacgttttaattgactatgacaccaaaaggattatatctgtccaagatgcga

SEQ ID NO: 777390 - DNA, 75 bp, Homo sapiens
cgggtaccggccgtggaagcggccaccgactactgtcagcagctgtgccagataacgaaggaggcccaacttcat

SEQ ID NO: 777391 - DNA, 75 bp, Homo sapiens
gggccatccctcgaggaagtttcatcagatgccagaagtgggtggagaactgtaggagagcagacttagaagata

SEQ ID NO: 777392 - DNA, 75 bp, Homo sapiens
ccaggacttggatcaacacctttaacttcaagaagacaggatgaagatttgataaagtggaaggcactgtttgag

SEQ ID NO: 777393 - DNA, 100 bp, Homo sapiens
agcgatctgaactttctggggaacagaccagttgtgttttgtgcaccgagggcggcctgagcctctggatcttcacttgggcatgttcctgcccaccttg

SEQ ID NO: 777394 - DNA, 101 bp, Homo sapiens
gcagaggaccccccgacaccagcatggactgctgcaccgtcctcaagtatgttccacataatgaagcacaatcattacagctctcgattcggcagcaaact

SEQ ID NO: 777395 - DNA, 138 bp, Homo sapiens
ggagccgggacccagggcccgggatcgccgagcccgacctcgggcgccccgccggtcacctccgcgcggacaccagcttcggaaccaaaaagaagcttcccagagccggggccaggagccccaagcgccctctagcag

SEQ ID NO: 777396 - DNA, 75 bp, Homo sapiens
ctgcgatcccgggtcatctccagatgctagggttatgggcttggtccagcatagtttatcagctgattcccaatg

SEQ ID NO: 777397 - DNA, 100 bp, Homo sapiens
ctgagtggttgtgtggtcgcgtctcggaaaccggtagcgcttgcagcatgtgacaatgtcagtgcctactgcctgcatattgctgaggatgatggggagg

SEQ ID NO: 777398 - DNA, 50 bp, Homo sapiens
atggaaaaagtgacttgagcaggcccaaggatgtgaccttctcttggatt

SEQ ID NO: 777399 - DNA, 82 bp, Homo sapiens
tcctaggtcactggcgcgatgcgggccgtcctctcggctgatggtgagaagccctaccactgcaactgggacggctgcggct

SEQ ID NO: 777400 - DNA, 98 bp, Homo sapiens
ttcatttaccgtcccattcgacagcgggtctactcactcttactggaggactgtcaagaaaatcctgacttccgagaaatccgctcctttgtggagac

SEQ ID NO: 777401 - DNA, 110 bp, Homo sapiens
ggaacctactgaagccgcagacaacgccagttatccaggctctgcgaaggacccgcatccgcgccgtcatggtgacagactctggcgaaaaagatgacggttctgtataa

SEQ ID NO: 777402 - DNA, 99 bp, Homo sapiens
tggtgagacatttttcttccttctgtcacatcacacccaatgcagcagccgctcttctaaaacattcaaaccaaagaagaatatccctgaaggatctca

SEQ ID NO: 777403 - DNA, 98 bp, Homo sapiens
atttgcttcatcacaagatcttggaaacattatataccttggggaaagctgatttggttgaatctggcgatgtggaacccatggatatggagggctga

SEQ ID NO: 777404 - DNA, 85 bp, Homo sapiens
ctcggagacgagtggtgggagaaccagccgactggagcaggcagcagcccagatcatggggaatttcagaggtcatgccctccct

SEQ ID NO: 777405 - DNA, 83 bp, Homo sapiens
cagaatcgaatctcttctccctccccttcttggtacaccaggggttggaaaaaccacactaggcaaagaacttgcgtcaaaat

SEQ ID NO: 777406 - DNA, 89 bp, Homo sapiens
cagaagaaatgattgtggcattgagagaagctttgaagctaatgtcaaaccccgaaattccacaccacctagtttggcaagaaatcctg

SEQ ID NO: 777407 - DNA, 100 bp, Homo sapiens
tgaaactgaaggcacagctgggtcctgatgaaagcaaacagaaatttgtgctcaaaacccccaagctgtccgcaggcttgtccaaaaggaaacatcggaa

SEQ ID NO: 777408 - DNA, 90 bp, Homo sapiens
cctcagcgtgccctggacatcaacaaagtgcctcctgacaaggtgatccgggcgggccccgcaggaattttatcccctcaccggcctcac

SEQ ID NO: 777409 - DNA, 100 bp, Homo sapiens
gtccccagtccccaggacctgctgcttgtggagcactgacctggccaaggcctcatcctggaccctcgagatgcccctcctccaactcgtgctgaaaccc

SEQ ID NO: 777410 - DNA, 78 bp, Homo sapiens
ccagaatcaaaagcagacctcattttgattgtagtagcagtggagcaatgcagttgcaggcgagagtgctctagatcg

SEQ ID NO: 777411 - DNA, 75 bp, Homo sapiens
gacaagaaactagagcaaataaccgttttgaaattcatgaaaacattccttttgaagacaagactgcatcagtta

SEQ ID NO: 777412 - DNA, 99 bp, Homo sapiens
aagtctgtgtcagaaggccacctcaagaggaacatcgtggtgaagaccgtggagatgcgggatggagaggtttgaagttgatcagctccagggtttgag

SEQ ID NO: 777413 - DNA, 100 bp, Homo sapiens
atttataaccgcgacttcaagatcaggtatcagtttttggaagaagcttttcaaaatcagaagggtgcaattgagaatctactggcgaaacttcttgaga

SEQ ID NO: 777414 - DNA, 83 bp, Homo sapiens
gtttgtggcaagacaagctcagaactgagaagctgtcaccacagacaatgcagatcttcgtgaagactctgactggtaagacc

SEQ ID NO: 777415 - DNA, 85 bp, Homo sapiens
caaatccaagactttggacttcattgatgtactcctgctgagcaaggaaagaccacagcaagattctttcattcgtctcctccta

SEQ ID NO: 777416 - DNA, 100 bp, Homo sapiens
cacagctgaaggctgcgagggactaagagcagacatcagaggctccttgaaatgctagatacagagaaggaactgttaaaagaaaaaataaaggaagctt

SEQ ID NO: 777417 - DNA, 75 bp, Homo sapiens
gggggtactgagaatatgtttgtgatgtaccttggaaataaagattgtctgtgtttcactgatggcaagactgtg

SEQ ID NO: 777418 - DNA, 100 bp, Homo sapiens
cgccgaagcaggacccgaagcctaaattccaggagggtactaggttttgacaagcttgcatcatgcgtgagtataagctagtcgttcttggctcaggagg

SEQ ID NO: 777419 - DNA, 97 bp, Homo sapiens
ggacatcatgcaaaagcaaagaccagaaagagtgtctcatcttcttcaagataacttgccaaaatgaggagatgttaaagtaacccatcttgcagga

SEQ ID NO: 777420 - DNA, 80 bp, Homo sapiens
catccagccttagcaaaccagagccccaaactggataccacccacatgtccatcatcagtagaatggataaataaattgt

SEQ ID NO: 777421 - DNA, 98 bp, Homo sapiens
ctcgccacagcggcctcggcctccccttggattcagacgccgattcgcccagatatcgggaggcaattcagaagtgggatgaagcactacagttaact

SEQ ID NO: 777422 - DNA, 100 bp, Homo sapiens
aagaggaaggagcgatttgggattgtcacaagttcagctggaactggaaccacagaggatacagagtccgcaaccatccctctgttcatgcgaaacaaag

SEQ ID NO: 777423 - DNA, 75 bp, Homo sapiens
aaaatgtcaacaaattgatgggtacccactgatggtaatgctggcctgctggctgaaccccagattgccatgttc

SEQ ID NO: 777424 - DNA, 80 bp, Homo sapiens
gtggagccggagctgggcgcggattcgccgaggcaccgaggcactcagaggaggtatgtgacgcattcccagactcttca

SEQ ID NO: 777425 - DNA, 100 bp, Homo sapiens
aaagtggcactgaggctctggaacttctgcccagctctccttgggctcccgcactggcgcttgcctcctccgcctcagactcttgctcttgctggacctt

SEQ ID NO: 777426 - DNA, 98 bp, Homo sapiens
ggcagtgctcaaactcaccgaccaggtctgccatcatggatgttctcgcagaagcaaatggcacctttgccttaaaccttttgaaaacgctgggtaaa

SEQ ID NO: 777427 - DNA, 75 bp, Homo sapiens
aaaggtgtactgcaaggaacaaaatgtttgtaaattctccttttaccaagattacaccaccaccttcactgtcag

SEQ ID NO: 777428 - DNA, 101 bp, Homo sapiens
acgacgagtttgaagagttccctgccgaagccctggcttgaaaaacagtccaattgatgaaagtgaggtgcaaacagcaactgatagtccctctgttaaac

SEQ ID NO: 777429 - DNA, 75 bp, Homo sapiens
ggcgccgccaataaccacggagccggcagcggcgcgggaggccgtgcggaaactggcgatggaatatgagaggag

SEQ ID NO: 777430 - DNA, 75 bp, Homo sapiens
agtgacacttcacatttgtgcttctacaaaaaacaatgtgacagaactgacagatctgctcaaggcaagaaactc

SEQ ID NO: 777431 - DNA, 73 bp, Homo sapiens
ggccgtgccccagatgcccaccgggatggagaaggaggaggaatcggactgctgcagatcaatgacaaaatcg

SEQ ID NO: 777432 - DNA, 100 bp, Homo sapiens
atactggacagagaggcctgaaaatgtgacaggatcatgaatgtcaaagggaagtgttcgccagttactacatgaaaagataagagatgcttatactcac

SEQ ID NO: 777433 - DNA, 74 bp, Homo sapiens
tttccctcagcacacagaggatgatgctgactttgatgaagatacagatgtggtgtataaaagcgagaatggac

SEQ ID NO: 777434 - DNA, 100 bp, Homo sapiens
ctgaagagtaaataaagtgagcaagaatactctcttgtcaccagattactgaggtgtactggagtactaaggctcgtacgtctgcatcgattatcttacg

SEQ ID NO: 777435 - DNA, 83 bp, Homo sapiens
tccctgagtctttgaggacacagcctcgctggaggcagtttctggctcttgtcaggatggtgaagctgttcatcggaaacctg

SEQ ID NO: 777436 - DNA, 98 bp, Homo sapiens
ggacattgagaaggaccagattattgagatggcctgtctgataactgactctgatctcaacattttggctgaagcactgacatggccgtcttctgtct

SEQ ID NO: 777437 - DNA, 101 bp, Homo sapiens
gcagagggcacctgagcggctggagagcctgttggagaaacacaaagaggctcatccattctttagacacattaactgggaagaacttctggctcgaaagg

SEQ ID NO: 777438 - DNA, 74 bp, Homo sapiens
cccgtggccatcggcagctgcggccacacaacccagcgggtgccgcttctccacccgaggcttccacctccaac

SEQ ID NO: 777439 - DNA, 83 bp, Homo sapiens
agagagagaggtggacagatctgagagatactgaggtgactggctactagggaaataaatgaatgtggaattgaggatggaac

SEQ ID NO: 777440 - DNA, 83 bp, Homo sapiens
ggagcagatccgatggagaggctgagctgctccaggacttggggaggatcagctgatttattcggaggatttgctgactttgg

SEQ ID NO: 777441 - DNA, 50 bp, Homo sapiens
aaacagtcacgtccatagaacagttcacttcttcaactgagatggacatg

SEQ ID NO: 777442 - DNA, 50 bp, Homo sapiens
ggccgcgtgtcccaaaggccagtacctttgtgttggatgaatttaagcgc

SEQ ID NO: 777443 - DNA, 98 bp, Homo sapiens
atcacgagaggaagcttaaatctgtcgtttgaatttaggaccacctcggaaaatgtttataggaggccttagctgggacactacaaagaaagatctga

SEQ ID NO: 777444 - DNA, 96 bp, Homo sapiens
ttgtgtctgcgctggacttctgccacagctactccatctgttacatggacacagaacagtatgaagaagcagtacgagactatgaaaaagtatacc

SEQ ID NO: 777445 - DNA, 100 bp, Homo sapiens
tttaccttggcgaggcctttcaccaagtccatgccaatcctgaggcaaaagaaacattttaattcactgcacattccaaaagccttgcagaaggccctgc

SEQ ID NO: 777446 - DNA, 75 bp, Homo sapiens
caagcacgtggtgggctatggccaccttgcttcggaaccaaaaagaagcttcccagagccggggccaggagcccc

SEQ ID NO: 777447 - DNA, 100 bp, Homo sapiens
ccctcattgaccggcctgcacccttctttgagcgttcttccagcaaacggtacaccatgtcccgcagccttgatggaggagtctctgcattagttggaca

SEQ ID NO: 777448 - DNA, 100 bp, Homo sapiens
ggagggggaaaaaatcccaaggtctgcaaaggaactcgaatcatttatgacagaaagtttctgttggatcgtcgcaattctcccatggctcagaccccac

SEQ ID NO: 777449 - DNA, 138 bp, Homo sapiens
ccagccggcagctccggagctgcccgcgccatgtccgcgcacaatcggggcaccgagctcggtactaggttttgacaagcttgcatcatgcgtgagtataagctagtcgttcttggctcaggaggcgttggaaagtct

SEQ ID NO: 777450 - DNA, 83 bp, Homo sapiens
tctacgtcattgactccaccgacgaggagaggctggctgagtccaagcaggcgtttggctaccggctctctgaccagttccac

SEQ ID NO: 777451 - DNA, 100 bp, Homo sapiens
aggtggactatgaggctatccgcagcgagatggagcagctcaaggagatcagtgtgcgtgtgaccaccatggatgcagagctggagtttgccatccagcc

SEQ ID NO: 777452 - DNA, 76 bp, Homo sapiens
attttatttttgtgggacaccacaatcccaaatccaaaggacgcatcagattcatcttggaggcatagtcaagttc

SEQ ID NO: 777453 - DNA, 74 bp, Homo sapiens
gcagcggcggcggcggaagtggccggcgagcccggtccccgccggcaccatgattttctggcatccttaaatct

SEQ ID NO: 777454 - DNA, 101 bp, Homo sapiens
attgatgcgtgtgaaatgttggcaggggaggatgacctggaggcactcaaggccaagaacatcaagcagacggaactggtggctgacctccgggaagccat

SEQ ID NO: 777455 - DNA, 100 bp, Homo sapiens
aaaatgtctctctatccatctctcgaagacttgaaggtgctgcggatggcaatcctgctgtcttactgctctatcctgtgtaactacaaggccatcgaaa

SEQ ID NO: 777456 - DNA, 98 bp, Homo sapiens
attttagttttggaaagatcctcttcagaaataccactatcttcctgaagtgtgcgcgtctacagcccgtaccaagactactacgaggtggtgccccc

SEQ ID NO: 777457 - DNA, 75 bp, Homo sapiens
gggccctggatgagggggaagggcctcaaagccagaaggttttgcgtgtgaagctgtgtggaaatgtgaaatact

SEQ ID NO: 777458 - DNA, 109 bp, Homo sapiens
caggccactgatgatgcctcactattgattgtcaaccgatactggagtcaggtttgatgaggcggcactctctattcagaaagaaaaaaatatttataaggaaattgag

SEQ ID NO: 777459 - DNA, 82 bp, Homo sapiens
caggcggatctcagaaggccagttcaaagctaatataatgccttcgtcgtctcatctctttggctcaatgccatggggacca

SEQ ID NO: 777460 - DNA, 75 bp, Homo sapiens
atcgactccatggccaactccttcgtgggcacgcgctcctacatggctcaggttcaggagaagtggcacctggtg

SEQ ID NO: 777461 - DNA, 100 bp, Homo sapiens
agtcatgagcgacagcggcgagcagaactacggcgagcggaatactctggagcagtgcaatgtgtgttccaagcccatcatggagcggattctccgagcc

SEQ ID NO: 777462 - DNA, 123 bp, Homo sapiens
agatgaagatccattggtaaattgatcaggatttttggcctaccctccaaagaaaagaatttcgctaaggagtttgtgatcagtgatcggaaggagctggaggaagatttcatcaagagcgag

SEQ ID NO: 777463 - DNA, 100 bp, Homo sapiens
agaatgatagccagtccctggagctggtgcacaggttccagcattactctactgactggcagagacaggagaggtagatgtccacgcccacagaccctgg

SEQ ID NO: 777464 - DNA, 50 bp, Homo sapiens
cgctgattggatttccctctgtggtgcttaccccagagtgaagagaaggg

SEQ ID NO: 777465 - DNA, 50 bp, Homo sapiens
atgacaccttgcattccctatttagaatcttcctcggtcacccaggatgg

SEQ ID NO: 777466 - DNA, 75 bp, Homo sapiens
ttggaaaaccgaaagcagagacagcagtgtgcctgtatggagtggaatgaatgttgctggtgtctctctgaagac

SEQ ID NO: 777467 - DNA, 100 bp, Homo sapiens
acctgaaggtgctgccaccccctctgcccactatgcccactctcaccagcctcccatcttccaccgacaagccgtcgggaagcagaatctggtaatataa

SEQ ID NO: 777468 - DNA, 100 bp, Homo sapiens
tcatctacccctcgggccccagtgtgcctgtgcccgtcttctgtgacatgaccaccgagggcgggaagtggacggtccgtgggctgctggacaccctggt

SEQ ID NO: 777469 - DNA, 78 bp, Homo sapiens
gctcaatgcctcagaaattcattgttcacttcttcaactgagatggacatgatataatctccattgagtcaaagaatg

SEQ ID NO: 777470 - DNA, 90 bp, Homo sapiens
aaaaaatttattaaaggaagcacacctaagataagccaatggacacgtcagtgttatctgaagaaggaggagagccttttcagaagaaac

SEQ ID NO: 777471 - DNA, 51 bp, Homo sapiens
acgttcctgacgaagcaggagatcctcctccctgcctgatgtggctctggg

SEQ ID NO: 777472 - DNA, 74 bp, Homo sapiens
ggcatcgatggagccatgacaatttgggatttcaagatgtggcctcatggatgagctggtacacgacttagcct

SEQ ID NO: 777473 - DNA, 51 bp, Homo sapiens
aatcaatgaaacagacacacctgcacaggctggagggcagtggcatgatct

SEQ ID NO: 777474 - DNA, 90 bp, Homo sapiens
ggaaatgtcatccgatggcacaatcaggtcacaagctacctaactaagaagtttgctgaactacgcagccccaatgagttcaaggtgtac

SEQ ID NO: 777475 - DNA, 75 bp, Homo sapiens
ggctgcgagaccctagaggcctgcggcctgcgggtttggaaatcccttgtctccaggttgctgggattgacttct

SEQ ID NO: 777476 - DNA, 75 bp, Homo sapiens
accacaggccctcgttgcccagatgatatcaatgcttacaattgtgaagagcccacagaaaagttaccttttccc

SEQ ID NO: 777477 - DNA, 89 bp, Homo sapiens
gcgggtatctgcccaccatggccctggtgctgatcctccagctgctgaccctctaaccccgagatgcccctgtccttcacaataagccg

SEQ ID NO: 777478 - DNA, 101 bp, Homo sapiens
gggagacgagaagcctgaaaagtcgcagcgagctggagccgccggaggaggatgcagcattcaaggttctatcttggaagcagagactgtgccctcaccag

SEQ ID NO: 777479 - DNA, 101 bp, Homo sapiens
ccttcagagcgtcacggcgtacgccctcatggggaaaatctccccggtgactttcaggttgaaatcacaaagattagacacctttttagataggtgttctt

SEQ ID NO: 777480 - DNA, 75 bp, Homo sapiens
cacggccactccagtgccaacagccaattctacaggcggccttctgatctgtttaccacgtgagcaagcagctcg

SEQ ID NO: 777481 - DNA, 51 bp, Homo sapiens
tccagcctgcggagcctgtggggcaggcatctccttggaaacaatgccatc

SEQ ID NO: 777482 - DNA, 100 bp, Homo sapiens
gcagaataaagctcgagccgaaggacatatggagtctaccatggctcaagaatctcccaaaaattcagcagcagaaattccagtgactagtaatggagaa

SEQ ID NO: 777483 - DNA, 82 bp, Homo sapiens
cctgatgaaggtttggctaaaatctttggtctaggcgttttacactgagattctccactgccaccctttctactcaagcaaa

SEQ ID NO: 777484 - DNA, 100 bp, Homo sapiens
cgcaatattgtcttcttcgctttagacaagtgatctttagacagtgactgagtatggatcatttgaacgaggcaactcaggggaaagaacattcagaaat

SEQ ID NO: 777485 - DNA, 100 bp, Homo sapiens
agcggctccggcagcggtagcacgagtgcgggcagcagcagccccggggcccggagagcccaccttgggacaccttgactccaagcccagcagtaagtcc

SEQ ID NO: 777486 - DNA, 75 bp, Homo sapiens
gaagtaatcgctgtttatcaaaccaatgatgcgagctcagagtcaatagcatccttctctaaacaggaggtcatg

SEQ ID NO: 777487 - DNA, 82 bp, Homo sapiens
cgtcccctttgatccctgtgtgctgaagaggtctcggcgcggaagatggccggcggcgtggacggccccatcgggatcccgt

SEQ ID NO: 777488 - DNA, 138 bp, Homo sapiens
ctccggagaagacaagggcatcgccgcctcagccgccgccgccgccgttttcgcctgcagctgctcaccgacagagtctcactcccatcgcccagacttgagtgtagtgatgtgatcactgctcactgcagtctcagc

SEQ ID NO: 777489 - DNA, 101 bp, Homo sapiens
gaaaccgaccctgattacgaggatgtatctgtggcccttccaaataagcggcataaagcaattgagaattcagcgttctcccggggaagtacttggaagag

SEQ ID NO: 777490 - DNA, 100 bp, Homo sapiens
tgcagctgcagtgagtggcggggaagcagcagcggccaggatgaatcccaggtgctctggagctggatggtgaagtgctggagaatctggtaaaagcacc

SEQ ID NO: 777491 - DNA, 90 bp, Homo sapiens
ctggtgttttagaggataccttggtcccagagtcatcatgaagagttgagaattatggctgcaggaaaatttgcaagccttcccagaaac

SEQ ID NO: 777492 - DNA, 98 bp, Homo sapiens
gcgaccacgactcgctgcagccttgacctccctgggctcaggaacccttctctgaagcaacagctcttctcctacgccattctgggctttgccctctc

SEQ ID NO: 777493 - DNA, 74 bp, Homo sapiens
caagtcaaacgcagaaggactgcctcactgagcaaccaagagatctcccattaaccagtcataatgaagtaaga

SEQ ID NO: 777494 - DNA, 100 bp, Homo sapiens
aaactctggagtaattggagccaagaaatgagtataggagaaatgccggtggttagcttcatcaaaaggaaaacaagtgagaaatttcagctagatttgg

SEQ ID NO: 777495 - DNA, 75 bp, Homo sapiens
ctttgcattcttaaacctactgcctgtagaagcagacattttagcagatcatgttctaattgagctcacccaggc

SEQ ID NO: 777496 - DNA, 75 bp, Homo sapiens
tgaaagagcgagtgctgatacctgtcaagcagtatcccaagaccccatgccacagctggatgtgactgaggccaa

SEQ ID NO: 777497 - DNA, 51 bp, Homo sapiens
aaacatttggagggataaaaagctcttcacagatggaatcacaaataaact

SEQ ID NO: 777498 - DNA, 75 bp, Homo sapiens
cttttggatagtgatgggaaaagtgattacagtggcgagatcttgaacaactgctgcgtcatggagtaccaccaa

SEQ ID NO: 777499 - DNA, 100 bp, Homo sapiens
gcgattacaagacgattcacctgtccagcatccgaccaccgaggctggagggggagaacacccaggcctgggaacactccgtggggatcatctgctttcc

SEQ ID NO: 777500 - DNA, 90 bp, Homo sapiens
ttaatcctgaaagccatgcagcggtagctgctgctggtggtgacaatgtcaaataacggcctagacattcaagacaaacccccagcccct

SEQ ID NO: 777501 - DNA, 108 bp, Homo sapiens
gaaagagtggatttcagcctgcacggatggtcttgaaacacaaatggtttttgtgcctgaaacagtacatgcagctggcaatccgagaaggatgtgggtctcccatca

SEQ ID NO: 777502 - DNA, 83 bp, Homo sapiens
gaagttggtgacaccccaaaagaccgagctctcttcaacggagcccaaaagttgataaatgctgctcattctttctacaatgg

SEQ ID NO: 777503 - DNA, 74 bp, Homo sapiens
acccctggacccctgcagctctcatccctgaggcacttagagaaaagctcagcacctgaactcctggggggacc

SEQ ID NO: 777504 - DNA, 100 bp, Homo sapiens
ctgctggcagcaccgacgaacccccaatgctgaccaaggaggagcctgttccagaactgctggaagctgagatgctgtgagagaagtaaggaaatattcc

SEQ ID NO: 777505 - DNA, 82 bp, Homo sapiens
ccggacccagtccctgagccgcccctacacccacagtttggtgccctggttgtcagatgttggaaagcagtaggacggaaca

SEQ ID NO: 777506 - DNA, 83 bp, Homo sapiens
cggtggcggctgcgctggcgcggcttttggcggcctttctgctcctcgcggcccaggtgctggagaatctggtaaaagcacca

SEQ ID NO: 777507 - DNA, 83 bp, Homo sapiens
cacgcttggcctggatgaaggtgcccctcgtcacagtaatctaagttggcagttctgttttgaacccaaagtggatgatgctg

SEQ ID NO: 777508 - DNA, 100 bp, Homo sapiens
tcatccaatggaacagaaaattattcaaagacatttacaacacagcttgtggatatgggggcaaaggctgcaggggacagcgctggaccgtacagacctg

SEQ ID NO: 777509 - DNA, 100 bp, Homo sapiens
cgtccccagccctgcctctccctgggctctggaggaaacaccaattggaagcctccgctcaactgtaagatttataactacctgaacaggattggatgct

SEQ ID NO: 777510 - DNA, 75 bp, Homo sapiens
tgtggctcaagggagtcaccttcaatgttaccaccgttgacaccaaaaggttgtaagcaggggttccagttaata

SEQ ID NO: 777511 - DNA, 96 bp, Homo sapiens
agcacttcacgttgcagctgctaaaggctatacggaagttttaaaagctgacctgtcctggacgcagcataactaacgaagctgctgcaggatgag

SEQ ID NO: 777512 - DNA, 76 bp, Homo sapiens
cagcctcccaagaagctgggattacaggatgtggagctggccgagcacctcaacgccagcctggctttcttcctca

SEQ ID NO: 777513 - DNA, 100 bp, Homo sapiens
aggcactccttggagcaaaagcccactgacgctccaccgaaagatggggaaactgaggctcggctcggaaaggtgaagtaacttgtccaagatcacaaag

SEQ ID NO: 777514 - DNA, 98 bp, Homo sapiens
aaaggtacagatgattttgactttgctggctcatttcaaggttgtctgcattcaaaagagcattctattaaagctaccttaatttggcgcttattttt

SEQ ID NO: 777515 - DNA, 75 bp, Homo sapiens
ttgctgtcccacagataccctcttacaggatgattcaaagccgccttactcctacgcgcagctgatagttcaggc

SEQ ID NO: 777516 - DNA, 76 bp, Homo sapiens
ccgaaatgagacttggtgcactctatacctactgggttcccctggaccctgatgctcccataagacagaaaatgcc

SEQ ID NO: 777517 - DNA, 75 bp, Homo sapiens
ctgctaacagaactggaccttttcggagatgagtatgatgtatgtgccatttgtttggatgagtatgaagatgga

SEQ ID NO: 777518 - DNA, 50 bp, Homo sapiens
ccccgataacgtcgtgtcgaccacagtcctcaggactacagaagcagttc

SEQ ID NO: 777519 - DNA, 75 bp, Homo sapiens
ctgaagagcgacaagccgctggcagccgcggatctcaccgccgctcagggatgataatgaagataattcaaatga

SEQ ID NO: 777520 - DNA, 126 bp, Homo sapiens
agaacctgtcattgcaccctggctcatcagctttgcactatgcagtggaactctatcaaggcttgtcaagcagtgtgctcatcacatggtaaatcatgcagcgtggaacctcataaaatctccaag

SEQ ID NO: 777521 - DNA, 153 bp, Homo sapiens
gaccttacctcacaggacagtggccacgggatcctcatgttcactacccttcatgcatgaaagacaaagctactcaggagactataaatattcaggaagagatagtttgatttttttggttgatgcctccaaggctatgtttgaatctcagag

SEQ ID NO: 777522 - DNA, 100 bp, Homo sapiens
aaggaaacaaagctctgctcacgtttcccttcctccatatttactggacagagtgctgtctgttgctgtgttggacacttgctcccatctattttcttct

SEQ ID NO: 777523 - DNA, 100 bp, Homo sapiens
tggaagctgatcttcctaactacaagagcaagatcttaaggcttctttgtacagtgctctatcaaagaaagcaagagatggaaaattgttgcctgaagaa

SEQ ID NO: 777524 - DNA, 100 bp, Homo sapiens
agttcagcagctggaaggaagatggcgcctggtggacagcaaaggctttgatgaatacatgaaggagctaggttctgcacttttaaaagaaaagcaaagg

SEQ ID NO: 777525 - DNA, 83 bp, Homo sapiens
ccggaccctggaagagaagagggtggctaatgattaaggtgagctggacccagaaagaatgggctcaggtattcagtacggag

SEQ ID NO: 777526 - DNA, 83 bp, Homo sapiens
ctcagctcctggggctgctaatgctctgggtctctgttctccatggcaactcagtcctccagcagacccctgcatacataaag

SEQ ID NO: 777527 - DNA, 80 bp, Homo sapiens
ggacgggccatacccaataaccaggtgcttggcaaaatcgagcgggccattgaattcagaaggagctggcggacatcact

SEQ ID NO: 777528 - DNA, 83 bp, Homo sapiens
gcgctaaccccggagcccggccccggggaactagggagcgtctccggctgcacagcgctcagaacaccttccaccatgaccac

SEQ ID NO: 777529 - DNA, 89 bp, Homo sapiens
gtagacgcccgcccctgcctcagagaaggtcattagtaattatcagcactttagatgggagaattgctgccttggatcctgaaaatcat

SEQ ID NO: 777530 - DNA, 90 bp, Homo sapiens
gaaagtttttccaaatattcatctgtacaggtctctgagcggcccctgatgttcctgttggacactcctggcgtgctggctcctcggatt

SEQ ID NO: 777531 - DNA, 101 bp, Homo sapiens
gcgggcacgcacggcccgggccggcgctccaaggcccgcccgggagggccggggccgcgctcagatacaatggctcaaatcatggcagaacaagaagtgga

SEQ ID NO: 777532 - DNA, 100 bp, Homo sapiens
agaggaccatgtgagtgggctccggagcctcagcgccgcgcagataagcgtgtggaaaattggcctctgatgcagtctccttggcctacactaagtataa

SEQ ID NO: 777533 - DNA, 98 bp, Homo sapiens
ccaagctatagtatgccagtgcatgctgcagtacagatgacaactgaacagactacgcgtttgttcacatggagaaggaagcagatgccaaagccgca

SEQ ID NO: 777534 - DNA, 82 bp, Homo sapiens
gctgaagcaggccggctctggcgtccacggtccggcctctttggcctacccccgttggctccgctgccccaggtcgatgagt

SEQ ID NO: 777535 - DNA, 50 bp, Homo sapiens
cgccaccacccactccggacacaggtccttctctgcattccaggcagctc

SEQ ID NO: 777536 - DNA, 101 bp, Homo sapiens
gctggggcccgccgccccgcgggggagggcggagctggcgcggcccctagctttctccttctggtgtggggcccgagttgttagagttggaagcttggcag

SEQ ID NO: 777537 - DNA, 110 bp, Homo sapiens
ttctttcggttctacctgggagaatccaccgccatccgccaccatggaggtggtccaggccacgctggtggtcctggccttggccatggtgcccatcctgctgcttggca

SEQ ID NO: 777538 - DNA, 51 bp, Homo sapiens
cagaagggtgcaagaagaatcagtgcacatgccaaaatttaattcaatttc

SEQ ID NO: 777539 - DNA, 75 bp, Homo sapiens
tccgggggtcgtcgccccgcaggaaaatgcttggacagaagagatgagtactatttccactaaggcctagaattg

SEQ ID NO: 777540 - DNA, 100 bp, Homo sapiens
ttcattgcagtctgagttgctcagctttattttggatcatgtcttcattgaacaggatgatgataataatagtgcaggcataatcaccagcaacacccgg

SEQ ID NO: 777541 - DNA, 90 bp, Homo sapiens
gctaaatttgaaaaggagaaaatgaatgccaaatgggacacgcttctcctcttaagaacaatgatgaaggctcactggacatatacgctg

SEQ ID NO: 777542 - DNA, 89 bp, Homo sapiens
gagaccggcaaagttcacgtgactgtggatctcaagtactaccggccaactgaagtggtgagaagccctaccactgcaactgggacggc

SEQ ID NO: 777543 - DNA, 80 bp, Homo sapiens
cacttttgagtgcaactgccttccaggaggagagacttcagcatgcaaaccttcatctgttcggcttgcaccgtcatttt

SEQ ID NO: 777544 - DNA, 90 bp, Homo sapiens
ctcttacacacctgatgtctcctgcagttggtgctggagaatctggtaaaagcaccattgtgaagcagatgaggatcctgcatgttaatg

SEQ ID NO: 777545 - DNA, 83 bp, Homo sapiens
tccgttttcgcgtggttcttttgcaaggattcagcaccatggcggaagacatggagaccaaaatcaagaactacaagaccgcc

SEQ ID NO: 777546 - DNA, 82 bp, Homo sapiens
ctcttcgagttcttcgtgctgctcaagataacgaaggaggcccaacttcattcaataaggagcctgacggatttatcccaga

SEQ ID NO: 777547 - DNA, 51 bp, Homo sapiens
gcagggagaaggaagaggtgtttgaaaagttaatatgatcctctgttgaag

SEQ ID NO: 777548 - DNA, 75 bp, Homo sapiens
tgaagagatggctgacagtgtcaaaacctttctccaggaccttgccagagaggagatgttaaagtaacccatctt

SEQ ID NO: 777549 - DNA, 76 bp, Homo sapiens
gcttcacttgacaaggtcctgctaaggttatcaatactctggctgaccatcatcatcgtgggactgactttggtgg

SEQ ID NO: 777550 - DNA, 97 bp, Homo sapiens
atcgccatcctgtctatcctcctggccgtcctcctcacggtcctcctggctgtgctcatatacacctgaggcggggtttcaccatgttgcccagact

SEQ ID NO: 777551 - DNA, 83 bp, Homo sapiens
ctgagctccggcagagcgtgtctgaggccgtgcggggctccgtggtgctggagactccatcctctgccaatggcccttcccgg

SEQ ID NO: 777552 - DNA, 51 bp, Homo sapiens
ggtcaccagtgagctggagaagttccaggagctcatatccttattttccat

SEQ ID NO: 777553 - DNA, 99 bp, Homo sapiens
cgcagtggtcgcttcttctccttgagagtcctgtgttcccagccagtctctattctctcacctaacactctcaaggagatagaagcttcagctgaagtc

SEQ ID NO: 777554 - DNA, 74 bp, Homo sapiens
agcccagtgctggtccgcattcttctcagagaactggagaagcatggagatatggaccaaaaggaacgagacgt

SEQ ID NO: 777555 - DNA, 133 bp, Homo sapiens
tctgggcggacgcacttggcgcgcggcgcgggctgcagacggctgcgaggcgctgggcacaggcatgctgcagacagacctttccgtccttcatgaacacacgtgtggtagacagatgactgtcctgtaccct

SEQ ID NO: 777556 - DNA, 117 bp, Homo sapiens
tgaatactcgggccggaccctctcaacacagcagcccagcagtctcagattcacttccaagcaatagacaatccatggacacaagggaccaatcactgcagtggcttttgctcctga

SEQ ID NO: 777557 - DNA, 107 bp, Homo sapiens
gggctgtgccgggcggagagaactcagcgaggattctgagaatataacaccagcaatcctgacttgttgctagtcatatttcaagtgacaggcatcagcctcctgcc

SEQ ID NO: 777558 - DNA, 99 bp, Homo sapiens
gacgcaacggcggcgggagcatgaacgcccctccagccttcgagtcgttcttgctcttcgagggcgagaaaataactgaagtgaagtgatggactccga

SEQ ID NO: 777559 - DNA, 98 bp, Homo sapiens
gacccccatggaaactggaatagcagagactccggaggggcgtcggaccagccggcgcaagcgggcgaagataaggatgacattcggctgctgccgtc

SEQ ID NO: 777560 - DNA, 96 bp, Homo sapiens
ttttacattggctgttttcctcacattcctcaagcagacatggagattaagtagcttgcccaagatcacccagccagtaaagtggcagagctgaag

SEQ ID NO: 777561 - DNA, 139 bp, Homo sapiens
cactgatcgaccagcaggtggtctatatccatccttccagtgccctcttcaacagacagccagaatggtgatggaggagttgcaggccgcctccgtgcacagtgatgagagggagctgctccagctgctgtccaccccg

SEQ ID NO: 777562 - DNA, 82 bp, Homo sapiens
tccaggtggccatcaaagtgattccccggaatcgtgtgctgggctggtcccccttgggtgcgagagaagaaagtgttcacct

SEQ ID NO: 777563 - DNA, 99 bp, Homo sapiens
tgtgctcacagcttttgtcagaagtgtattgataaatgggagttgaccacatttggccatttcccagaagggccccaccccaagggtgagtggccaatg

SEQ ID NO: 777564 - DNA, 100 bp, Homo sapiens
caaggcaattgatcccaagttgtcgacgaccgacagggtggtgaaaggagtctactcttcatcttgtgttgagacttcgtggtggtgctaagaaaaggaa

SEQ ID NO: 777565 - DNA, 83 bp, Homo sapiens
ctgggatccggagcaagcgggcgagggcagcgccctaagcagatgtgaagttcatttccaatccgccctccatggtggcagcg

SEQ ID NO: 777566 - DNA, 99 bp, Homo sapiens
atggccgctgagaacagcaagcagttttggaagaggagcgctaagctgccggggagtccacctggaaggccgctgtggtggaaggatgtttgactgcag

SEQ ID NO: 777567 - DNA, 82 bp, Homo sapiens
gattcaggcagcagactgtgggattgggattgagggaaagaattaaacaaccaccatgtcgagcaaaaaggcaaagaccaag

SEQ ID NO: 777568 - DNA, 101 bp, Homo sapiens
cctgggagcttgctgcagcttcaggaacaacaacctgaccttcctgcggccgtactaccagacggaggagggcgaggagaacccgttcatctgctcctcac

SEQ ID NO: 777569 - DNA, 100 bp, Homo sapiens
ctggcggacaggcgacagcgacctgcggcaggtactaccgtggtgcagtgggcgccctgctggtgtacgacatcgccaagcacctgacctatgagaacgt

SEQ ID NO: 777570 - DNA, 50 bp, Homo sapiens
acgacgggccgagcctgccactcccagctcaacattggcaatgtgctccc

SEQ ID NO: 777571 - DNA, 100 bp, Homo sapiens
atcgtgaccgagaccgtgaccgagagcgtgaccgagagcgcgaatatcgtcatcgttagaagttgcctgctaataaagatgcctttcgaaagacatggaa

SEQ ID NO: 777572 - DNA, 50 bp, Homo sapiens
tatgaagaaagccatggtggagtatgagcgggtattcccctacatctcag

SEQ ID NO: 777573 - DNA, 89 bp, Homo sapiens
ggcaccagcagtaacaacagcgaggaagaagaggacgacgacgacgaggaagaggaggtttctgaggtgtggatgaggtcaccattgtc

SEQ ID NO: 777574 - DNA, 90 bp, Homo sapiens
ttcagtttgctacaaagaacatcttcagaggcagcaaaatagtggcagaatgagcccaatgggccaagatcaaggctcgagatcttcgcg

SEQ ID NO: 777575 - DNA, 74 bp, Homo sapiens
ttcaactgaaattgtcttcataacagatcaaggaatcgaattttaccagaaacctctgcgccatgagagccaag

SEQ ID NO: 777576 - DNA, 120 bp, Homo sapiens
caagtgacttggtttagagaagggcacaagattattccaagcaacagaataagaggaatcaattctggaccagaggatgtctccctgcctttgccctgcctgcctccccccacatccttc

SEQ ID NO: 777577 - DNA, 74 bp, Homo sapiens
cggtattctggtgcttatggtgcctcaggtcaagaacccagtatggaagggagaagtgaaaagttgaagaaaaa

SEQ ID NO: 777578 - DNA, 100 bp, Homo sapiens
cagaaggatacagttcatgacaatgactttgagccctaccttactggacagtcaaatcagaaatgcactcggtgatggaaagagagccactattctgaag

SEQ ID NO: 777579 - DNA, 75 bp, Homo sapiens
gcaaaaccctgcagaacggctgcctaatttacagcaaccatgagggaccgtaagaagaagcggtttgtgggacag

SEQ ID NO: 777580 - DNA, 100 bp, Homo sapiens
cccctcggggctccatggaatccctggccctgtctaatgcaacaggtcccaggaaggtggcgtcagcatctgcagccgcgtcgacgttgtcggagcctcc

SEQ ID NO: 777581 - DNA, 98 bp, Homo sapiens
gagtgttgagcagcccatcgtgcttaaagaaggactcggtgaaatacctggagtgctcagctctcacccagagaggcctgaaaaccgtgttcgacgag

SEQ ID NO: 777582 - DNA, 101 bp, Homo sapiens
tttaacattccaacacataaaaattatttatccaacagctcctcccagggaacctcagaacctgttctggatccacagcaaatccaagcatttgatcagct

SEQ ID NO: 777583 - DNA, 100 bp, Homo sapiens
caccaggacccacttcggcacaggttggtgttcgaggaagagacattgttgttcttggtgtggagaagaagtcagtggccaaactgcaggatgaaagaac

SEQ ID NO: 777584 - DNA, 82 bp, Homo sapiens
gcgctcccatggcgcacattaccattaaccagtacctgcagcaggtgacttaagagattaaaattaatttggttgctgttgg

SEQ ID NO: 777585 - DNA, 82 bp, Homo sapiens
cctggagagagccaaagtaccataggttaaagatcgaggtccggaagccactaggagattttttaattggttttattggagc

SEQ ID NO: 777586 - DNA, 98 bp, Homo sapiens
cagatgaagacgaacctgctttgaaacgccagcgactagaaatcaattgccaggatccatctataaagaatatatacagccctgctctgggacacacc

SEQ ID NO: 777587 - DNA, 100 bp, Homo sapiens
gctggagcaccagccagacaacatcaaggctctcttccgcaagggcaaggtgctcatctgccggaactaccgtggcgacgtggacatgtcagaggtggag

SEQ ID NO: 777588 - DNA, 100 bp, Homo sapiens
caaacatcgatggcctactggggataacattcatgcagaacatcagatccattttcagtcaagaggaatgttgcacggagcttaaacagccagctggttt

SEQ ID NO: 777589 - DNA, 75 bp, Homo sapiens
gacagaacagttaatcctcaatttaagcctgatctaacccctagaaacagtgagaaagatcagtctaaagaaaag

SEQ ID NO: 777590 - DNA, 76 bp, Homo sapiens
cttgaagtaccatggcgtggattaaaagtgttccttgcctgtatctccccttggttcaatagctaccagatttttg

SEQ ID NO: 777591 - DNA, 114 bp, Homo sapiens
attttactcatattagtagccaatgcaattgtgggtgtatggcagtggtggacttgctttgtgaagagacagttcatgaacaagagtctttcaggacctggacagtgaagggag

SEQ ID NO: 777592 - DNA, 97 bp, Homo sapiens
catggattgtctagatagaaccaatgtgatccagagtttgttagctcgtcgttcacttcaggcccaacttcagcaaattatgcgcacagccatgaag

SEQ ID NO: 777593 - DNA, 75 bp, Homo sapiens
ccaaagacgctaaacgtgccctactctgccccgggggagagcagcccctgtcaaagggaacaggaagcagtccac

SEQ ID NO: 777594 - DNA, 75 bp, Homo sapiens
ctcaaacgtggagatcaactcctctctgttaatggagtgtttcttatcaccacaggagaaaatctagattatctt

SEQ ID NO: 777595 - DNA, 51 bp, Homo sapiens
ccatgaggccaaaggcagttgtattgaataactgtgtagaatacattgagg

SEQ ID NO: 777596 - DNA, 83 bp, Homo sapiens
agcgctcgcgagcggctgcgggacgcgaggtttccgggcctccggtgtggctgtctctgatggtgtcatcaaggtgttcaacg

SEQ ID NO: 777597 - DNA, 75 bp, Homo sapiens
ttagttcgtctttcctagagagaagaagctcattcacacagaagacccatttaatgatgaacatcaggagaggca

SEQ ID NO: 777598 - DNA, 100 bp, Homo sapiens
cgtagtggcagacacgcccgagctccagagaatcaagaagacccaggaccagatcagtaacatgtcgacgtacaagcgggccacgctggacgaggaggac

SEQ ID NO: 777599 - DNA, 83 bp, Homo sapiens
cgtggaacggctgcttttggaagcatgctaatcacctacgacgatgtggtgaagatctcagattttggcacttccaaggagct

SEQ ID NO: 777600 - DNA, 98 bp, Homo sapiens
aaagcagctaccaaatgcttattttctgcttccaaaggtccagagcattcagctgtctcaaatgcagctccagaaacatgacaaggaggactttcctg

SEQ ID NO: 777601 - DNA, 75 bp, Homo sapiens
ggaaaatatcccaaggactaatctgatcgggtcttccttcatggaggtggggaagacagggctccagctaccaca

SEQ ID NO: 777602 - DNA, 82 bp, Homo sapiens
ggaccttaaaatacccgcaacagccccttcgtcccaagtgtcgtgaaaactacccctaaaagccaaaatgggaaaggaaaag

SEQ ID NO: 777603 - DNA, 98 bp, Homo sapiens
tccggcggcagggcaagctgtgcgacgtgaccctcaaggtcaccctgctgattgccttcatctgtgtgcggagctccctgtggaccaactacagcgcc

SEQ ID NO: 777604 - DNA, 50 bp, Homo sapiens
ctttaccatctcatctcaagaatggaggttttgacacatgatgaactcta

SEQ ID NO: 777605 - DNA, 94 bp, Homo sapiens
aggagtagtcgctggagtccgcgcctccctgggtgttggtaaatcatgcttattgctacagtttacagacaagaggtttcagccagtgcatgac

SEQ ID NO: 777606 - DNA, 100 bp, Homo sapiens
cctgcctactgggtcgtcttctcggcgacaactgccctgctcttcatcccaggtgaccctggcagcaaccccaacaaacgccagaggcagccccctctcc

SEQ ID NO: 777607 - DNA, 75 bp, Homo sapiens
ctatgtactgcgcctggatgtggccagatccgagctggatccagagttgcatacagaccaatttctgcatcagtg

SEQ ID NO: 777608 - DNA, 100 bp, Homo sapiens
cgcagtgattgaagctttgataaatgaaatcttcctaagtatagttaatagaagatgaaattgcaaccattcttaaatctacattgaaaggactagaata

SEQ ID NO: 777609 - DNA, 100 bp, Homo sapiens
attcaatacggcacaacctttctctcaacaagtgtttccggaaggtgcccagacctcgggatgaccctgggaagcttttcaggctgcctttcgagctcag

SEQ ID NO: 777610 - DNA, 100 bp, Homo sapiens
tgaataacacaggagaatggataaggcaaaacggaggctggttgtcactcagcccagtccatcagtttctcagcccagtacttctcagagtgaagaaaaa

SEQ ID NO: 777611 - DNA, 82 bp, Homo sapiens
caacggcaaagttttgcagatcttcaacaagaggacccaggagaaattcgccctcaaagtttggtgcacctcgatttggagg

SEQ ID NO: 777612 - DNA, 75 bp, Homo sapiens
gtcctcctccgtcatcgagcagctcttcttcgtccgtttgggtccccagccccaccccagccccaaaggaggctg

SEQ ID NO: 777613 - DNA, 100 bp, Homo sapiens
ggtcagcgtgaacgcgcccctcggggctccagtggagagttcttacggctcagagcccctacctcccacacagtggaggagtagatgtccatttctcagg

SEQ ID NO: 777614 - DNA, 101 bp, Homo sapiens
accacaacagggacacctggttccagctgcagcacgtggacgctgactcggaagtgcagtttctcctggcggcgctggtcctgtctctcattctgccgagg

SEQ ID NO: 777615 - DNA, 100 bp, Homo sapiens
gtttgataccagagagcgatgggaaaatcctttgatgggttgggcatcaacattgctagtgcaactactgctccatcgatcccttcacatttgtctcctg

SEQ ID NO: 777616 - DNA, 100 bp, Homo sapiens
tgatttaacaacgttaccagcatccattgcaaaccttattaatctcagggaactggatgtcagcaagaatggtgctgatacctgtgttcgcgctgggccg

SEQ ID NO: 777617 - DNA, 100 bp, Homo sapiens
aacctgaggctgatgacccaaagacaagcaagcagttggcagcagccttccaagaggagttcacagtgcgagaggacctgatgggactggcaattgggac

SEQ ID NO: 777618 - DNA, 50 bp, Homo sapiens
atcaacaaggacatccgttgcaagttcaaatctgaacatcaatgatgtac

SEQ ID NO: 777619 - DNA, 140 bp, Homo sapiens
tccgcagctgccgcttcagtccgaaggaggaagggaaccaacccactttctcggcgccgcggctcttttctaaaagtcttcctgcagatttcacaaaactgcatcttactgacagtctccacccacaggtgacccacgtt

SEQ ID NO: 777620 - DNA, 138 bp, Homo sapiens
ccaggggctacgacccttgggatctgccctccgctcagctcgagcttccctcgtggccgacggaacaatgaagaccttagctggatctccaaaatacaagtgaatcacccggcagttctgaggcgtgcggaacaaatc

SEQ ID NO: 777621 - DNA, 100 bp, Homo sapiens
tggagaactacaggaacctgctttctctcgatgaggataacatccctccagaagatgatcgcagcctgcagctgagcgcatgggagagcagcatcgtgga

SEQ ID NO: 777622 - DNA, 98 bp, Homo sapiens
cgatccctgcgcgggctcgagagctcgccccgaacgggggtcttcctcctccgccgttgacaggggtagaaatatttctgtcatggctcattcaaaga

SEQ ID NO: 777623 - DNA, 50 bp, Homo sapiens
tgaaaatccgcagcaggaagcttgggatcctgactttaaggaccttggag

SEQ ID NO: 777624 - DNA, 100 bp, Homo sapiens
atgttcccctcgcggaggaaagcggcgcagctgccctgggaggacggcagcctaccgtatgtgaacgggagctgtgtgtgtttgcttttcaaaccctggg

SEQ ID NO: 777625 - DNA, 75 bp, Homo sapiens
aggaacttgactggagatgtgtgtgctgtgatgaggttaaaaaggccttctttgctttggtagccaacggtgtcc

SEQ ID NO: 777626 - DNA, 74 bp, Homo sapiens
ggaaatcgggctgaagcgactgagtccgcgatggaggttcgtgctgtaagacctaaagttcttatgagattgtc

SEQ ID NO: 777627 - DNA, 75 bp, Homo sapiens
ggcccacagtgggggtgtgcaaacccgagagaactgggtatgaaaatgaaagtcttcagaatggaaggaagtcaa

SEQ ID NO: 777628 - DNA, 75 bp, Homo sapiens
aacgaatacggcgacgacatgtatgggccagaaaagcaagatggaaagttgccttttgttcctccggaggaagaa

SEQ ID NO: 777629 - DNA, 82 bp, Homo sapiens
aacagaacgagtcctttactacactggcagaattgcaaagatgcatgaggcagttacaggccatgaagaatgtgtagatgca

SEQ ID NO: 777630 - DNA, 75 bp, Homo sapiens
gagcatccgacaggccttcatccgcaagaggaggaacccgttttcactagacaagacagcaatcgcagtgaaaag

SEQ ID NO: 777631 - DNA, 98 bp, Homo sapiens
agcctccctctccacctccctgccccccggagatacctccaaagccggtacgcctgttcccagagttcgtttgccagtgctctgagcaagttcgtgga

SEQ ID NO: 777632 - DNA, 102 bp, Homo sapiens
ggccctccttcagtttagttgaggataccacattagagccagaagtgtaatgttcaagctcagaaatgccttatgtggatcgtcagaatcgcatttgtggtt

SEQ ID NO: 777633 - DNA, 75 bp, Homo sapiens
cgtcattcagctgtacgagatccagcacggggacctgaagctgcttcgggaggaaagttcacatccttggctcct

SEQ ID NO: 777634 - DNA, 74 bp, Homo sapiens
tgtcttgttccgaggcggccccagagcttgcttggctcaggaacaacagaagagaataaagaaaatgacctcag

SEQ ID NO: 777635 - DNA, 101 bp, Homo sapiens
agcgtctgcattgctccggactcagccaagttccccaacggctccccgtcgtcctggtgctgcagcgcttccttcaaaatgtctactgttcacgaaatcct

SEQ ID NO: 777636 - DNA, 100 bp, Homo sapiens
cgcgggtcttgcgagatatctggccgcctctgccgcagctggagttctttgatcgtctaaagctctttgggatgcccgcaaagcaccagccagatttcat

SEQ ID NO: 777637 - DNA, 51 bp, Homo sapiens
agaatacagagatatggaatcaggcaaagccaaagctaattgagccactcg

SEQ ID NO: 777638 - DNA, 100 bp, Homo sapiens
caccgatatcaccgatgccatcaagctggactcgggagtggtgaaacgcctgtacacgttggatgggaaacaggtgacagtgttcttacacttcctgtgg

SEQ ID NO: 777639 - DNA, 75 bp, Homo sapiens
tgatcgaactggcagacggatatttacttaatctatgccagcaattatgacaatgttagcagaccatgcagctcg

SEQ ID NO: 777640 - DNA, 100 bp, Homo sapiens
gctgcgttaatgtttgcaaatgcagaggaagaatttttctatgagagcaatggtggaacaaagcggcaaaagatatcccatcaaaattatatagcctatc

SEQ ID NO: 777641 - DNA, 74 bp, Homo sapiens
ttgggcttcggagcatttactctctgattctgggccaagataatgcatataggttgctgtagatgaatgttctt

SEQ ID NO: 777642 - DNA, 100 bp, Homo sapiens
tttgaggagcactggaggaagcacaccctgtcctatgtggacgttggcactgggaaggatgatggcttggaaaaaagtccaatgaaaaaaaaacagaaga

SEQ ID NO: 777643 - DNA, 83 bp, Homo sapiens
cgcggattcgccgaggcaccgaggcactcagaggagctacgtcaaaagctacctcctcccggataagcagagcaagcgcaaga

SEQ ID NO: 777644 - DNA, 100 bp, Homo sapiens
ctcatctggaattttgccgatttcatgactaaccagtgctctgattgtactttctccacaagcttcagcatggcagtatctctcaccacttgttttggtc

SEQ ID NO: 777645 - DNA, 80 bp, Homo sapiens
ctgccttctgccgccggccggcgcgtcgtccccacagagtgaagacatttccacctggacacctgaccatgtgcctgccc

SEQ ID NO: 777646 - DNA, 90 bp, Homo sapiens
gagcgcttggaccccggcttctgggacgcgtcagctgcggttggatttctcacgatgtccagtgttatctccatgtctgcccctttcttc

SEQ ID NO: 777647 - DNA, 75 bp, Homo sapiens
agacaagctaaaaatgattcgggaatatcggcaaatgagctggactggccattatggaggaggagctgcagcatt

SEQ ID NO: 777648 - DNA, 74 bp, Homo sapiens
gcctatgtgggcttccacggagcgagttcctggggaaaaccccagggcaaaacgctcagaaatggattcctgca

SEQ ID NO: 777649 - DNA, 83 bp, Homo sapiens
tcacattcggaggctggtgtccagggtctcagcgcgggggacgactcaggtggatagatacttctcaagacatcacacagcgt

SEQ ID NO: 777650 - DNA, 100 bp, Homo sapiens
gattttgttgaagatgactcggacattttacatgatggtgatggaatttcctgataatgtgttaaatctcgatggacatcagaataatggtgcacagcta

SEQ ID NO: 777651 - DNA, 100 bp, Homo sapiens
atcaatccagatggcagccagtcagtggtggagctctgcttatgataatgtcaacaaagttcgagtagctatcaagaaaatcagcccctttgagcaccag

SEQ ID NO: 777652 - DNA, 75 bp, Homo sapiens
aaccaagaaaaattaccgagccagccagcaggaaatacagcatgcctgaagctgcccagcaggcattccaaggcc

SEQ ID NO: 777653 - DNA, 74 bp, Homo sapiens
tcttggtctcactgacttcaagaatgaagccacggacccttgcgaaaaagcttgtggtgaaggggggcaaaaaa

SEQ ID NO: 777654 - DNA, 75 bp, Homo sapiens
ctggagttcacgactctgagtgctgggccatgttctgcaacgatttaaaggaaaagtatgagaaaaggatcatta

SEQ ID NO: 777655 - DNA, 75 bp, Homo sapiens
ttttggataagcagtttcacccattaccagtcaaccaggaagggcccaagggatgcagacagtgatgaaaacgac

SEQ ID NO: 777656 - DNA, 74 bp, Homo sapiens
aggacctggcctgaagacatttcctctcctcccctctggatttctcagagcaaattgtggctactaatttgccc

SEQ ID NO: 777657 - DNA, 83 bp, Homo sapiens
aggaagtactgagcctgttggaggaactggcccggaaacaggaggacgtgactgggaagttccgcgggggtgtgaaccctttc

SEQ ID NO: 777658 - DNA, 98 bp, Homo sapiens
ttgaatcatgaagctactaaccagagccggctctttctcggcgcatattaaatttcctattgactacccctattcaccacctaccttcagattcttga

SEQ ID NO: 777659 - DNA, 82 bp, Homo sapiens
gaaccgcagtatcatgctggccaagaagatcatcattaaggacggaggcacgtatgaagtgtaacagaacagactttaccac

SEQ ID NO: 777660 - DNA, 74 bp, Homo sapiens
ggcttgccctggtcttgctcggccgatgaagtgcagaggtttttttctgggaacagtgttgataaagactgctg

SEQ ID NO: 777661 - DNA, 100 bp, Homo sapiens
ctgaggttgtgctttctcagggatatgcactctgcacttccattcctgcagtgaaattaactcgagcttggcagactccaagcaaaggctaccaagaaac

SEQ ID NO: 777662 - DNA, 82 bp, Homo sapiens
ggcggacagtgcggaactaaagtgtactaatggtcacttgatgtgcgctggctgttttatccacctactagcagatgcccgg

SEQ ID NO: 777663 - DNA, 100 bp, Homo sapiens
agatggagttcaaacgcggccgcttccgactcagcctcttcagcgacctgcccgaggttagctcccagcgatgccagatgggatcagcacagccctgcct

SEQ ID NO: 777664 - DNA, 74 bp, Homo sapiens
tgtcctgttgtggggcttttacagcctttggatgaagactcttaagatgacagaaggtgatttttctggtgatc

SEQ ID NO: 777665 - DNA, 98 bp, Homo sapiens
gcccggcccggggcgcgttgaaggatcctcagtcttccacaatgaaccctgtttacagccccgtgcagcctggggctccttatggcaaccctaagaac

SEQ ID NO: 777666 - DNA, 89 bp, Homo sapiens
ctcacatggtgtggtgaattcaacacttccaattctacttcaaagaaatcctgccacccgatgattaaacagtgaataaaatgtcatgg

SEQ ID NO: 777667 - DNA, 100 bp, Homo sapiens
gcagcaggaccgacggcagacccagcagccagagagtgaaaggaccgccgggagagcctgcccacctccccaccctggacgccgggcgcgtcccggcccc

SEQ ID NO: 777668 - DNA, 90 bp, Homo sapiens
aatggaaaatcgcttggttaaaacctgacacttttaacagggagagtcccgtattctcagagtaaaagttgtttctggaattgatctcgc

SEQ ID NO: 777669 - DNA, 74 bp, Homo sapiens
ctggggcgacgaggcgattgcgggggcctgggctaggccaaatttgagtttcatcatggtgactatgaaaaaca

SEQ ID NO: 777670 - DNA, 74 bp, Homo sapiens
ttcgagatggagcgggcgcactgggaggtggaacgggccgaactgcaggtggcagtagagaagagcatcacaga

SEQ ID NO: 777671 - DNA, 100 bp, Homo sapiens
gttttatagaaagcttttaaacaagcatggaattaaaaccgtttctcaggtatcacagatgtcgtaagaatctgaatcctccaaaagacagatgatgcgg

SEQ ID NO: 777672 - DNA, 83 bp, Homo sapiens
ggtgaatggagatgcagctcagcaggccaagcagatagaacttcagttcactattggcgaagccattaccagtgctgcaatag

SEQ ID NO: 777673 - DNA, 75 bp, Homo sapiens
gggactggaacaagacttcaggtcacgctcggtgtatttatgggacccacaaatataccatttacctcacaagca

SEQ ID NO: 777674 - DNA, 82 bp, Homo sapiens
cccggctccccggacgcctcggtcgcgtggggcaggcagtggcgctgcgggccaaggccttcggcttcaacgtgctcttcta

SEQ ID NO: 777675 - DNA, 50 bp, Homo sapiens
gaagaacctgaaggacacactagaagttttcagcaaactcggattatctc

SEQ ID NO: 777676 - DNA, 100 bp, Homo sapiens
cgccgacgcctcagccgcttggggcccgcacggaccctctacttcagtgactagcatgcagatacccatgctctgactttctgcccctccactgacatgg

SEQ ID NO: 777677 - DNA, 80 bp, Homo sapiens
ctgggatttttgagctggtggaagtggttggaaatggcacctatggacaagtctataagtggtgaactatgacaatgtag

SEQ ID NO: 777678 - DNA, 119 bp, Homo sapiens
ggcaaacgcctggatcagccacaaatgtacccccagtacacttactactatcctcattatctccaaaccaagggtatttgaagtataccatacaactgttttgaaaatccagcgtggac

SEQ ID NO: 777679 - DNA, 114 bp, Homo sapiens
ccagtggccacctctgcagtgtcttccacaacctggcaattctgtggtgttcttggtcacacatttatggagtttctgaagggcagtggagattactgccaggcacagcacgac

SEQ ID NO: 777680 - DNA, 96 bp, Homo sapiens
cagaagaagggaaggcgcgagtgaggaaaggaggtactgtagaatgagatgctggaggaaggacatgagtatgcggtcatgctgtacacctggcgc

SEQ ID NO: 777681 - DNA, 75 bp, Homo sapiens
gccaggggtctgctctagcatcaacccggcggcaggagaggggatgaagatggcggacgcgaagcagaagcggaa

SEQ ID NO: 777682 - DNA, 90 bp, Homo sapiens
gccgggctcggcccgaggcccccaggacctccatctcccaatgttggagcactgccatctccccacaccctccaggaagttcaggtcgcc

SEQ ID NO: 777683 - DNA, 101 bp, Homo sapiens
cttgggctcagtgccaggaggatgggccaactcaaaatctgaagcctgatttgctctttacccaggactctgaagtgagttattctccccacctcagaagt

SEQ ID NO: 777684 - DNA, 98 bp, Homo sapiens
ctacctcccgttaatggaaccgcgactcacaggcctccggtgtggctgtctctgatggtgtcatcaaggtgttcaacgacatgaaggtgcgtaagtct

SEQ ID NO: 777685 - DNA, 100 bp, Homo sapiens
gacttggaccctggaaaacctggccctcttcaatttctgacaaaagagggtgcagagtcggaggagtccagcggtgaggcagacggggacactgaggccg

SEQ ID NO: 777686 - DNA, 96 bp, Homo sapiens
cccgccaccgcaaggaggtggactacagcgactcactgacggagaagcagtggctcaagggggtccactggacggggcctgagctacaacttcacc

SEQ ID NO: 777687 - DNA, 100 bp, Homo sapiens
ggttcaacagcgggaaaatgagaagcttcgaagtgtgtcccaggccaaccagttcctaagaagccagaatctacggatgatgaagaaaaaattggaaacg

SEQ ID NO: 777688 - DNA, 101 bp, Homo sapiens
acagatttgagctcagccctggtgggcagagaggtgtgcatcaccttcgaccaggccaacctgaccgtcaagctgccagatggatacgaattcaagttccc

SEQ ID NO: 777689 - DNA, 101 bp, Homo sapiens
gacacatccgccagcatgcccaagctcttcctgcacctggaaaagaggcatgaccattcggcccctggtagacctgttggctgtgaagaaaaagcaagaga

SEQ ID NO: 777690 - DNA, 50 bp, Homo sapiens
gaccagaccatgggcctgagcatcagggggggccctcagcctcttggcct

SEQ ID NO: 777691 - DNA, 82 bp, Homo sapiens
tggctgggcagtgggcagcgtctgcagtcgtggctgcttgaagttggaatcgaagcctcttaaaatggcagatgacttggac

SEQ ID NO: 777692 - DNA, 101 bp, Homo sapiens
ataatcacagcgggactcttggcctgtccctcacatccgatgcaccctttttgtcagattatcaggatgaggtggtgccaccgaacatcgcagaactgaag

SEQ ID NO: 777693 - DNA, 100 bp, Homo sapiens
aatcacaaacggcgcacattggtatgatgtggaaggtgccgtgctgggcagtgaatgaatgaaccttgccctggggttaacactccagtgggatgaacag

SEQ ID NO: 777694 - DNA, 101 bp, Homo sapiens
ccacttcctcagaatgtgaaggattatttactcgatgatggaactctggtggtttcaggaaggtaccagcaactaaggtttcagagctgaaccctaatgca

SEQ ID NO: 777695 - DNA, 101 bp, Homo sapiens
ctggggaaactgccgacgctcaaggatggtgatttcatcttgaccgaaagttatctccagaagaagaagagaaaaggagaatccgaagggaaaggaataag

SEQ ID NO: 777696 - DNA, 100 bp, Homo sapiens
gggatacagtggagctacaacttctgaaggttgagagaatatcagcagaggaatagccctggtgttcctacaggagcgaaaaagaagaagaaaataaaaa

SEQ ID NO: 777697 - DNA, 75 bp, Homo sapiens
tggacccaaggacatggtggtcggtttcagaatggcttcggttattgcctttccttggtgtactcgcacttcttg

SEQ ID NO: 777698 - DNA, 82 bp, Homo sapiens
tccgatcaataggcatttcaagtatgcaactcaattgatgaatgagggaggagattggacaggctggactccccattgcttt

SEQ ID NO: 777699 - DNA, 100 bp, Homo sapiens
aaaacagctcttcagcatctacgggaggcaaacttgtaaaacctggaacagcagcatcattgtcaaagcacctgtggaatcctctcaagaggaacagtca

SEQ ID NO: 777700 - DNA, 100 bp, Homo sapiens
acaccttcttcagcttccttcgacgcaaaacagactttttcattggaggagaagaagggatggcagagaagatcatcacgggggaattctaccggatcta

SEQ ID NO: 777701 - DNA, 75 bp, Homo sapiens
gaattatgcaagcacagatttgcttttacaccaataaggaagagcccaacactgctggaagtgagcatgccccat

SEQ ID NO: 777702 - DNA, 75 bp, Homo sapiens
gtttcgggatctcggtgctgcagacggcgagacctcctgcacaggtaattggtacgcctcagagaccggcagcgt

SEQ ID NO: 777703 - DNA, 74 bp, Homo sapiens
attgctccgcccaatgccattctggaaaaggtcttcactgcaattacaaaggctgaccggttccctgatgtgtt

SEQ ID NO: 777704 - DNA, 83 bp, Homo sapiens
gccagagatggcgtgtccagtgtgaaggtgtcagaccacgagatcctggcagggtgcccgtggggcaggaggtggaggggatg

SEQ ID NO: 777705 - DNA, 96 bp, Homo sapiens
accaatcagctcatgtggtttttcttcttgtgcccaaacctctgggctatgccagtacagttaagtgggcagaccaacatccacctcagcaaaaac

SEQ ID NO: 777706 - DNA, 100 bp, Homo sapiens
gagcaatcactttggattgaagatactacaaaatcagtttatcaagtctatgttaacaatgaatgggcaaccagtgttggggaaggagggagctttggag

SEQ ID NO: 777707 - DNA, 75 bp, Homo sapiens
tccactgtggaaataccgaaaaaggtctcgatctagaagacggtcacgaagtaggagtcgcaggagcagccgcag

SEQ ID NO: 777708 - DNA, 90 bp, Homo sapiens
tgacgcagtaagaaggccatcagtagatgccagtccctcaaccttgaactttccagacgcagaactgtagtcggtcttctcttgcccaac

SEQ ID NO: 777709 - DNA, 100 bp, Homo sapiens
ggaggatcaccatgatgtcccgacccccagtgcttctggaaaagtaaagatgagcccagcagctacacatgtacaacttgcaaacagccattcaccagtg

SEQ ID NO: 777710 - DNA, 98 bp, Homo sapiens
gcggaccgcttctcccgcttcaacgaagaccgagactttcaggtgtgatgaatgcagactctgctaccattttggctgtttggatcctcctttgaaaa

SEQ ID NO: 777711 - DNA, 74 bp, Homo sapiens
tgaccaggtaaactctgtgcacagatcaaggactaccgaccagactcccggaaatcatgttggtaggatcccag

SEQ ID NO: 777712 - DNA, 83 bp, Homo sapiens
ctaaggatcatgtctgcgagccaggattcccgatgtggacgagtgctcactagcagaaaaaacctgtgtgaggaaaaacgaaa

SEQ ID NO: 777713 - DNA, 50 bp, Homo sapiens
cttctcagacgtgcacaccatggatctggagacagggtttcgccgtgttg

SEQ ID NO: 777714 - DNA, 98 bp, Homo sapiens
ctccgctcccaccttctttcttcagccgaggccgccgccgcctctccttgctgcagccatggagaaatcatcgagttccccatcctaaagctaaatgg

SEQ ID NO: 777715 - DNA, 101 bp, Homo sapiens
ccgactgccgaggaacgagagcgcgaagctaagcaggaggatgcattagcacaacaggcctttgaagaggctcggagaaggacacgcgaatttgaagatag

SEQ ID NO: 777716 - DNA, 104 bp, Homo sapiens
ctcacggcgcctgccttggcgctggccggctacatcgaggcatgctgcagacagacctttccgtccttcatgaacacacgtgtggtagacagatgactgtcctg

SEQ ID NO: 777717 - DNA, 75 bp, Homo sapiens
tagcatacagctctgcagtttccagcaaaatgcagaaggtgatttactacctctgcatcttattgaaagatccag

SEQ ID NO: 777718 - DNA, 100 bp, Homo sapiens
tcatcgagcgccatgtggagcaccgggtccgcgcgggcgacacgctgcagggcatcgcgctcaagtacggtgtcacgaactgataaatttcaaacggaag

SEQ ID NO: 777719 - DNA, 90 bp, Homo sapiens
gagagagcgagctgagtggttgtgtggtcgcgtctcggaaaccggtagcgcttgcagcatggttttgcacactagggaccaagaagccct

SEQ ID NO: 777720 - DNA, 74 bp, Homo sapiens
ccgtggagtcggctgagggaaaagcgaggcaaggcaggcgggcccgataaaagtgaaggatgtaatagatcgtg

SEQ ID NO: 777721 - DNA, 75 bp, Homo sapiens
agataaccagaaaacatcggatttacattttaaggaatgtatcctgtcaggtataatgtcagtgaatggcaagaa

SEQ ID NO: 777722 - DNA, 100 bp, Homo sapiens
tccccgccaggcgctctgaccactctccagcaccagcttccagttagtggatatagcacaccatccccagccaggatgttcaatagcccagaaatgcaag

SEQ ID NO: 777723 - DNA, 50 bp, Homo sapiens
gaagagcaagatgcagtcagtggaggaacacagcctattggatccctagg

SEQ ID NO: 777724 - DNA, 75 bp, Homo sapiens
gaccccagccggaagccgctggacagccgggtcctgaacgctgtgaaatataacgaaggaggcccaacttcattc

SEQ ID NO: 777725 - DNA, 100 bp, Homo sapiens
gcctcctcagccatgtggaactagtcttgctgtgtcgtccaggctggagtgcagtggtatgatcttggctcactgcaacctctgcctccagggttcaagt

SEQ ID NO: 777726 - DNA, 74 bp, Homo sapiens
tcctgtacagcctgcagaactggcgagagaggctggctgaggatcgtgaccagcacctataaggatgggaaggg

SEQ ID NO: 777727 - DNA, 117 bp, Homo sapiens
cttgctggaacttgtgattgagcagtttgaagacttgctagttaggattttattactggcagcatgtatatcttttacaatgcagatcttcgtgaagactctgactggtaagaccat

SEQ ID NO: 777728 - DNA, 100 bp, Homo sapiens
tagatgataaagatgatgatatccttctcaaccttgtgggatgtgaaaactctgttactgaagaagatattgatgctgatggacagggattttgtcaagg

SEQ ID NO: 777729 - DNA, 80 bp, Homo sapiens
gagcggaggctgtacaacctggcactctgcttgggtgtctttcctgaagactatcttcccgtctcaaaatggacatgatg

SEQ ID NO: 777730 - DNA, 76 bp, Homo sapiens
caccatgaggtgcctgccgtcgatacatcctatcttcaagatgggtgttcctgataaagaagggttaccaagacgt

SEQ ID NO: 777731 - DNA, 75 bp, Homo sapiens
cactgaagttggatggtctgttagaagaaaatattgggaaaatgaggtacgttagtgttcgcgattttaaaggca

SEQ ID NO: 777732 - DNA, 100 bp, Homo sapiens
cgaccggaacgggaaccaagcgtttaatgaagacaatctcaaattcatcctcatggactgcatggtcccgttcaagaagttcttccagttcgcagtcaag

SEQ ID NO: 777733 - DNA, 90 bp, Homo sapiens
agctgaagacatcaagaagatcttcgagttcaaagagaccctcggaacctcattcttggaatcccagaacaggccttaagtcttctccac

SEQ ID NO: 777734 - DNA, 90 bp, Homo sapiens
ctttcttcctccgcacggatgctgagagtgtctcactttgtcgcccaggctggagtacagtggtgcgatcttgactgactgcaacctgca

SEQ ID NO: 777735 - DNA, 75 bp, Homo sapiens
taaagtctttccaaaaggtcaaggttcacaaggttggagtcagttagctgctatgcactgtgttatgctgccaga

SEQ ID NO: 777736 - DNA, 82 bp, Homo sapiens
cttcggcagtccacccaccgccgccgcctcccagtgtgccgtgcaggtgaagctggagctggggcaccgcgcccaggtgagg

SEQ ID NO: 777737 - DNA, 123 bp, Homo sapiens
cgacctcaagaagcagctccacgaaaggcagccgcggatcgccgcgctcagcgacaaacaagttaatttggagtggcccctggagtcagtttcctacaccatccgaggccccacccagcacga

SEQ ID NO: 777738 - DNA, 51 bp, Homo sapiens
cccgagatggaagacgcgacaggtcagcaatctgaagatggtcttacggag

SEQ ID NO: 777739 - DNA, 75 bp, Homo sapiens
aatgcttcttaataccgatctacatggccacgaaccttttgaggatggctttgcaaatggggaagaaagtactcc

SEQ ID NO: 777740 - DNA, 100 bp, Homo sapiens
caccattagcttataagaaatggggtctacaagatattgacactattattgatcatgctagtgttgatgaccctcatgttcagtattctgcagtgagcag

SEQ ID NO: 777741 - DNA, 90 bp, Homo sapiens
cggcgtgctactgtgcgctcgatccagcaccatggggaagcgggacaatcgggtgaggctcacaggacacctgcatgcccaaggcactcc

SEQ ID NO: 777742 - DNA, 74 bp, Homo sapiens
tggtgcggaccctccggccgcagccatgtgggacccgcgggcagctagcatgaatacaactttgtctgagagcc

SEQ ID NO: 777743 - DNA, 87 bp, Homo sapiens
ccctggagtacaccccgcagcacagccgcgacttcaagatgatcgttgccagcccaacagaaaatggacaggtacttcgtgtaattc

SEQ ID NO: 777744 - DNA, 101 bp, Homo sapiens
gaggcaccgaggcactcagaggagatccgcgtccgagtgattgagggccgacagttaagtggtaacaacataaggcctgtggtcaaagttcacgtctgtgg

SEQ ID NO: 777745 - DNA, 99 bp, Homo sapiens
gcccaccgactttgaggatctggaggacggagaggacctgttcaccagcactgtctccaccctagagtgcttagatgagtacgaagatgatgaagcagg

SEQ ID NO: 777746 - DNA, 83 bp, Homo sapiens
ccccgcgctgacaggggggcctggccgcgcagccggtgaaaatgagttcttcagtaagaagaaaaggcaagccaggcaaagga

SEQ ID NO: 777747 - DNA, 98 bp, Homo sapiens
caggtggtgcagcatgacacggcctgtaccatcgcagccacggccagcgtggtcaaggagaagctggctggcacctgtgctggttgcacttgctttga

SEQ ID NO: 777748 - DNA, 75 bp, Homo sapiens
tggggaaaatctccccggtgactttcaggacttggatgttgtgggtgatggtatgcagtgtcctccttcaccttt

SEQ ID NO: 777749 - DNA, 49 bp, Homo sapiens
agaagagagctctggggtcgacacgatgtccagctcgccgctgtccaag

SEQ ID NO: 777750 - DNA, 100 bp, Homo sapiens
tgtccctggggcggcagcgcggacccgcccggagatgagccaacacatatctctttatggtacaagctcgaggtataatgttgagagaaaatgtgaaaac

SEQ ID NO: 777751 - DNA, 100 bp, Homo sapiens
agcgggcttcccaacaccatgccgtccgccttctctgtcagctctttccccgtcagcatcccagccgtgctcacgaagtccattggaatattaagcccag

SEQ ID NO: 777752 - DNA, 87 bp, Homo sapiens
aacggaggcctgcaacaaccatgagccagctagatattaacaacaagaagagtgtaactgattcaatccgtgatgagtatgcttttc

SEQ ID NO: 777753 - DNA, 75 bp, Homo sapiens
ctccctgccatagggacgtgcaaagctctctacacatttgaaggtggcttctggcacagcagcttaattgaccgg

SEQ ID NO: 777754 - DNA, 90 bp, Homo sapiens
ctgttgtgcctcttcatattggcgatcctgttgtgtggagccgccaccaaaatgcagattttcgtgaaaacccttacggggaagaccatc

SEQ ID NO: 777755 - DNA, 75 bp, Homo sapiens
gttacttcatggcagctatcccacagactcctgaggaagaagagattttaaacaaaaaacgatctaaaaaaattc

SEQ ID NO: 777756 - DNA, 96 bp, Homo sapiens
ttgagggggactggcctggcgtgcactccgcacctcggggacattattgcgcgtggaacggctgcttttggaagctggacgcacagaacagtctct

SEQ ID NO: 777757 - DNA, 90 bp, Homo sapiens
gatgaactggcgggtgtggacgccactacagttcatcaacatcaactacgtccctctgaagattgttgaacagataaatacgaaactgcc

SEQ ID NO: 777758 - DNA, 82 bp, Homo sapiens
accatgggggcccagctcagcacgggcgccctgcgtccggcagaggaggcgagcatcccgctcaggtgatgaggaacccctc

SEQ ID NO: 777759 - DNA, 74 bp, Homo sapiens
agaaatgtaatgcacgttggactacagaagagcagcttctcgccgtacaagtgtcttcatacagtttggagcaa

SEQ ID NO: 777760 - DNA, 100 bp, Homo sapiens
ctttgccaggactgatgcagatgcccctcctccaccagaggactgggaggagcatgtcaacaggtcacagtgctgtcgatatcaccaaggtggctagaag

SEQ ID NO: 777761 - DNA, 75 bp, Homo sapiens
agaactacaggaacatggtcttgctgggagcagcatttctttctattactactatctatgctgagactggttcag

SEQ ID NO: 777762 - DNA, 75 bp, Homo sapiens
cagtccggaggtgaggcggaactctgagaagcacgagttctctgtggacatgacctgtggaggctgtgctgaagc

SEQ ID NO: 777763 - DNA, 98 bp, Homo sapiens
ttggggaggaacgggccacggccatttccttgatgcgcaagttcattgcctaccagttcacagacacggatcaccattcccgtgcagaccttctccaa

SEQ ID NO: 777764 - DNA, 75 bp, Homo sapiens
ctggaggtgctggtgcaggacaaagcacacttcatagctgccacgatatagttttacgaagaagttacttgggaa

SEQ ID NO: 777765 - DNA, 75 bp, Homo sapiens
ctaaacaccccttcagtaaatttgggacagggagacttgcagctcctctgctgaaacgtttaagcctctccacat

SEQ ID NO: 777766 - DNA, 87 bp, Homo sapiens
gaaccccaggactgcgcccccgggagcgggcgcccagagatgagcctgaagtcttgacagaacctccaagtgccacaaccactacta

SEQ ID NO: 777767 - DNA, 80 bp, Homo sapiens
aagaacagaaggcgatcaaggccaagtatccgccagtcaataggaagtacgagtgccctagaaagtgaatttgtttcttg

SEQ ID NO: 777768 - DNA, 95 bp, Homo sapiens
agtgtcagaattacaaggtgagatcagccgcccggccaagctatcttctcgctagcaggtgtcatggagaaactccagctgggcccagagattct

SEQ ID NO: 777769 - DNA, 75 bp, Homo sapiens
agctcagcaattcttaccttccatgaatcatcttaatggacagaaaatgtatggaaaaattattcgtgttactct

SEQ ID NO: 777770 - DNA, 100 bp, Homo sapiens
cacagccatcactcatgtccataaggagggaactgggaacagccaggtgccccaaagcaaatacgcggagctgctggccatcattgaagagctggggaag

SEQ ID NO: 777771 - DNA, 73 bp, Homo sapiens
cgggagccccagggcagccgccccgccgagtcgcagactcggagccgtgggtcccgactgaacatcatcatca

SEQ ID NO: 777772 - DNA, 83 bp, Homo sapiens
cttcggcagtccacccaccgccgccgcctcccaggagacatatactgcctggactgcctggctgatgtgagctagtttgtctg

SEQ ID NO: 777773 - DNA, 96 bp, Homo sapiens
tttctttctcgctgatcgcctaacttctactgacgaagcttggaagttgcagaaggtcccttcaccgatgttgtcaccaccaacctaaagcttggc

SEQ ID NO: 777774 - DNA, 108 bp, Homo sapiens
ggaggcagaggccaactgctccgtggcgttcgctgaggctcagagatgggtggagttcaatttcaccatttagtattgagagcacaagacgccagagacggtctgaat

SEQ ID NO: 777775 - DNA, 100 bp, Homo sapiens
atagcattccatcagggaggaaacagaaaaaaatcccagctgctctcaaagaagacccctatggtgtagccgtgggtggaactgtggggcactgcctgtg

SEQ ID NO: 777776 - DNA, 75 bp, Homo sapiens
ctgggggcgagctgagcacctgtagtcaatcacacgcagatccctttgttgatctagcaagtggccaagttcctt

SEQ ID NO: 777777 - DNA, 100 bp, Homo sapiens
tgaaaagggtagaaccacagactgaggacgacctcttcccttgtacttgccataggaaaaagggttcagcaccacccccttctccaacacctaacaaaga

SEQ ID NO: 777778 - DNA, 100 bp, Homo sapiens
ccactgttaccaacatgaagctgctcgcagcaactgtgctactcctcaccatctgcagccttgaagccctggaggctgcccgaatttgtgccaataagta

SEQ ID NO: 777779 - DNA, 75 bp, Homo sapiens
ccaagctctgtctgggttctgctgtcaatggtgttgtccagttttgcacactagggaccaagaagccctcgggga

SEQ ID NO: 777780 - DNA, 75 bp, Homo sapiens
gatatcagctacagactttcctgagtcaggtgtggacactgccagcggctgcagccgacttggaatgacctggga

SEQ ID NO: 777781 - DNA, 75 bp, Homo sapiens
attttagcaaggcaacaagcacaagttgaggtactccaaagattcaggtttactcacgtcatccagcagagaatg

SEQ ID NO: 777782 - DNA, 75 bp, Homo sapiens
actgggggctgaagagcgcgccgccctctcgtcccactttccaggacagagcgggatgccaccagcttgtccaaa

SEQ ID NO: 777783 - DNA, 99 bp, Homo sapiens
tatagatattcagaagaaggatgctgttaaaagggaacatccttctgtatcagaaattcccatgtttccatatccagatttcttcaccaaggcagataa

SEQ ID NO: 777784 - DNA, 74 bp, Homo sapiens
tacacaacaagacagtttatcttgtccatggggtcatcatgaggtcctgctcgggcatcaactttgaagagttt

SEQ ID NO: 777785 - DNA, 83 bp, Homo sapiens
gcgcggatgggatccagctgttagtcgggtaggcataggacttgatagacgacctgaagtcagaactgagtggcaacttcgag

SEQ ID NO: 777786 - DNA, 114 bp, Homo sapiens
aagtcgcgtgtctaggtgagtcgcggtgggtcctcgcttgcagttcagcgaccacgcaagagtgagccatggagctacgtgtggggaacaagtaccgcctgggacggaagatcg

SEQ ID NO: 777787 - DNA, 96 bp, Homo sapiens
gcgatgctgcccggtttggcactgctcctgctggccgcctggacggctcgggcgctggagatcataaggcctatgggttttctgccccaaaagacc

SEQ ID NO: 777788 - DNA, 100 bp, Homo sapiens
cagggactggcagctccactgccgtcaactcctgttctcctcagagcctggtagggaagacatatgagctactcaactgtgacaagcacaagtctatatt

SEQ ID NO: 777789 - DNA, 100 bp, Homo sapiens
ctgcggctctgtgagcgcccctgagcgccggcagcggccgcggtgggttcttcagcaatggctgccatccggaagaaactggtgattgttggtgatggag

SEQ ID NO: 777790 - DNA, 83 bp, Homo sapiens
cacagctaagactccaggaccctctggaagcctagaaatgggcacagtgacttttgaagatgtggctgtgaactttacctggg

SEQ ID NO: 777791 - DNA, 96 bp, Homo sapiens
ggctggaccaggatgtgcgggtgctgaaggtagtcaaggcaggcattcaacaacatgttttgctgtaccttgcagtgttccgagttctaccttttt

SEQ ID NO: 777792 - DNA, 75 bp, Homo sapiens
agcaagtagcggaggcatatgaagtgctgtcggatggaccgcctgagccaggtgctgcgagacctcgaggacgag

SEQ ID NO: 777793 - DNA, 75 bp, Homo sapiens
gttaccattgtgaaagaaggttgggttcagaagaggggtcttcaggcaccatggaggacaaacgcaacatccaga

SEQ ID NO: 777794 - DNA, 74 bp, Homo sapiens
ggagctaaagcagcgtgcgttcagccctgggatcattgagaagcagccaggccacattcggagcagggttttca

SEQ ID NO: 777795 - DNA, 100 bp, Homo sapiens
atccgctctccctgcgctctccgcaccgcggcttaaatgatgtattttgtgatcgcagcgatgaaagacccaagcaccagccgccgcttcacacctccct

SEQ ID NO: 777796 - DNA, 96 bp, Homo sapiens
aaaagcaatacaaactgggtggacattacccaagattttgaagaagcttgtcgagagttcctgagttggaggtagaagaagaaacccaagttcaag

SEQ ID NO: 777797 - DNA, 100 bp, Homo sapiens
gttttggatcctggagtacctgtctggtacctggtacccggcacactgtgagttcctggacatcaagggctggaactttatattgctgttggaatatctg

SEQ ID NO: 777798 - DNA, 90 bp, Homo sapiens
cccagaagcaatttaaggagcaggttcatgtgtgcccagctgcccaaccccgtcctggacagcatcagcatcatcgacacccccgggatc

SEQ ID NO: 777799 - DNA, 100 bp, Homo sapiens
ttggacaaataatggaaattcgagtctttccagataaaggatattcatttgttcggccataggaaaaggatacagagtagagtttcatgaacctgaaact

SEQ ID NO: 777800 - DNA, 98 bp, Homo sapiens
ggaaaacaagctcagggcttccactgattctacattatgctattgtggaaaacatggctgagttccggcctgagatgtgtacagagggtgcccagcag

SEQ ID NO: 777801 - DNA, 100 bp, Homo sapiens
tgctggacccgaagaaggacgtgctgacccgcctgaagcacctgcgggcgctgctgggtacccgcaagatggagtacaagggcagcagctggcatgagac

SEQ ID NO: 777802 - DNA, 88 bp, Homo sapiens
aattgttaggcgtggagagggagtgatgtcttccagactcggaagggaacctgattggattaccccttctgattgacaactatgtgcc

SEQ ID NO: 777803 - DNA, 75 bp, Homo sapiens
cgggagctgggcggccatttaccaggaaacccagcgtttgctggcagaaccagttcctggcatcaaagccgaacc

SEQ ID NO: 777804 - DNA, 98 bp, Homo sapiens
ggggaaactaggtcgatggtcggcggcgcccggatgggcagctgaggtggagaagccgaggcctggagaggggcacctggcaagttgttgactggggg

SEQ ID NO: 777805 - DNA, 97 bp, Homo sapiens
tctatctctgagaatgacccgttctggaatcagcttctctcattttctttccctgcaccaactagcaggtaaaataccatgaagattttgaaaaaac

SEQ ID NO: 777806 - DNA, 100 bp, Homo sapiens
cgggcggagacatggccaacatcgcggtgcagcgaatcaagcgggagttcaaggaggtgctgaagagcgaggagttgcctttccccatcttcctggttct

SEQ ID NO: 777807 - DNA, 74 bp, Homo sapiens
atccagtgttcaccatcctggccccggaaggatcaaaatacttgctggatggtggactcagagaccaataaaaa

SEQ ID NO: 777808 - DNA, 75 bp, Homo sapiens
gctcttccagccaccccctctccagtctgctcaggtgtctttaatacatctggtggaagtcactccggtcagaat

SEQ ID NO: 777809 - DNA, 100 bp, Homo sapiens
cagtttgtcaagtggatgctgagcagaggtcaaaggtgaacgacgtgaatgagtacgcgcccgtgttcaaggagaagtcctacaaagccacggtcatcga

SEQ ID NO: 777810 - DNA, 100 bp, Homo sapiens
aaggaagcgtgcaaatgccagaaagaggatttggccagagcgttttgtctctccccaaagctcccgggactcccatggtgactgagaacacagccaccag

SEQ ID NO: 777811 - DNA, 100 bp, Homo sapiens
caagaactcaaactttttgtatctcgacactctgcaagattctctcctgaagtcccagtttatagaaggatcatttgaagaatatttaaagcgtttggaa

SEQ ID NO: 777812 - DNA, 100 bp, Homo sapiens
tccatcaaacacagaggaatgaccaccatggcagatggcaacagaggatgtcaacaattttttggaggaaaccgaatgcggtgctacaactgtggtggaa

SEQ ID NO: 777813 - DNA, 83 bp, Homo sapiens
ctggggtcttagatacagaactacgatataagccaggaagaagcattgcatgcatttattcagccagagattctggatggccc

SEQ ID NO: 777814 - DNA, 100 bp, Homo sapiens
tcacattgctgttcatgagtggaatccatgtttctggacgcggatttttggcctcatactctgttatagataaacaagcacaacattctgaaattttttg

SEQ ID NO: 777815 - DNA, 90 bp, Homo sapiens
ccccgccggcagccggcagccagcggcagtggatcgaccccgttctgcggccgttgatgcccctctcagctgaggaggaaccgagagcgg

SEQ ID NO: 777816 - DNA, 90 bp, Homo sapiens
ccaggtattaagggagatatcccaaaggttatggaggttttgatgactatggtggctataataattacggctatgggaatgatggctttg

SEQ ID NO: 777817 - DNA, 100 bp, Homo sapiens
ggaagcgctccgctgtacctggatcctgctcctctgggttgaaacccgggcgccgccaagatgccggtcacagtcaaagtgcctcagaagaactcataag

SEQ ID NO: 777818 - DNA, 76 bp, Homo sapiens
ccattgataactctggacttctcaaagagtgttctgccagttctggataatccactgtccaagaaggttcgaggcc

SEQ ID NO: 777819 - DNA, 75 bp, Homo sapiens
acttatttcagaatggagaatttgcaactcatcatagtcctggtctacatgttcaagtgcgtgtggcggtgctac

SEQ ID NO: 777820 - DNA, 100 bp, Homo sapiens
gacatatacacgaaaagtggatattgaagtactgtctgtgctggctagcttgggggcatcagtgcacaagggcagatgattctggaccagatgaagcctg

SEQ ID NO: 777821 - DNA, 75 bp, Homo sapiens
accctgagtgcggatttctgctatgatgacagtttgttgcatattctaaggacccagacataggcttggtggccc

SEQ ID NO: 777822 - DNA, 75 bp, Homo sapiens
tcgggtccagaccaaacatttccacatcaagtgtttcacctgcaaaggagtggaaacaaaatgtcagtcagtgtg

SEQ ID NO: 777823 - DNA, 100 bp, Homo sapiens
cagagcttgattctgatgaagatgatgatgaattgggtagagagaccaaagatcttgatgagacttgttgagcccattaaagaaatggaagtctcgctat

SEQ ID NO: 777824 - DNA, 75 bp, Homo sapiens
gctggagcaccagagagtgaaaagagctggttatattctgggcactaaatgaaggcgtttctaggcaatttgatt

SEQ ID NO: 777825 - DNA, 92 bp, Homo sapiens
cccggggcgcgcccaccgcgccgcatccatgttcgaacaatgcagatcttcgtgaagactctgactggtaagaccatcaccctcgaggttga

SEQ ID NO: 777826 - DNA, 100 bp, Homo sapiens
gccgactctcatacaggcgggcgccagtgcatcttctaggaagcgcaacaggaaaggagagaagaatggcaagggcctacggcatttctccatgaaggtc

SEQ ID NO: 777827 - DNA, 80 bp, Homo sapiens
tcctccgggaccggagtcagaaccctccgcagagtaaagcctcacttgcctgccgataaggcccggggtacacagggccc

SEQ ID NO: 777828 - DNA, 85 bp, Homo sapiens
ccgatagtgtttgttcaagacaagggaaatgcagctctagctgagtccctctctgaaaagtattccaacgtgatattccttgaag

SEQ ID NO: 777829 - DNA, 100 bp, Homo sapiens
ggatgaggtgaaagactatgtggccaagtagaacttcatggaggaacacggagtgacccaaaccgaacatatggctaccatagaagcacatgcagtggcc

SEQ ID NO: 777830 - DNA, 76 bp, Homo sapiens
tcctcagggaatactttgagaggttggagaaggtgtgcaactgaggaacatggctcaagaaactaatcacagccaa

SEQ ID NO: 777831 - DNA, 82 bp, Homo sapiens
tgtcctcattgctccaaactgtgttgtttcagctgtattaggctggaagcctgtggcagaatacattgatcagcagtttgag

SEQ ID NO: 777832 - DNA, 75 bp, Homo sapiens
gttgatgaagatgaaagagactgcaggtagaggaggtcagtcagccttgcgttttgcccgtttaagaatggaaaa

SEQ ID NO: 777833 - DNA, 83 bp, Homo sapiens
gaaaaagaagatatgtatgacgagattattgagttaaagaaggctcttcttccggaggcattaccccgtgaacagtgtgattt

SEQ ID NO: 777834 - DNA, 97 bp, Homo sapiens
ttggagtgaaccggagaccccgaaaacggaagcgcagggagaaggaagaggtgtttgaaaaggatttggagttccatggagtgatgagattttattt

SEQ ID NO: 777835 - DNA, 100 bp, Homo sapiens
caaaagcagcttggaaaacattatttctaaagatcaactttacttagacattccactgcccttctcccaaaaagatgtcttttcgaaaaatggatcccag

SEQ ID NO: 777836 - DNA, 96 bp, Homo sapiens
gcaggagagacagatcacagccagagaaggggccagtcggaaattatactcagcgtgtggttggaaatggaatcaaagcccagtctggaaatcctg

SEQ ID NO: 777837 - DNA, 50 bp, Homo sapiens
gtttgcagtacacaactcccagctgaaagtatgccaccacgggctgttcc

SEQ ID NO: 777838 - DNA, 100 bp, Homo sapiens
ggatgaggcgtgcaggcctggtcagaatatcggtgaaagtattctttacctgtgggtggagaaaataagagatgttcttatacaaaaatctcagatgaca

SEQ ID NO: 777839 - DNA, 83 bp, Homo sapiens
ggaatatgaaatcaagactaatcatcctgattcagcaagtgaggtagaatgtaagaaagctcagccgaaagaagtcatgttcc

SEQ ID NO: 777840 - DNA, 75 bp, Homo sapiens
ctatacagggacgtgatgctggagaattataggaacctggtctccctggctgctgataaacttattaaaatttgg

SEQ ID NO: 777841 - DNA, 90 bp, Homo sapiens
ctggaggacacacctaaacatgtggaatcccaatgccgaggccagtcaccactgcacattttgggacaatatggcaaggagaatgcagcg

SEQ ID NO: 777842 - DNA, 95 bp, Homo sapiens
aggttggagtgggcgcatcttagcttgccccatccccatttgaggtctgtcggagctgcccttcagtgtggtggcgacatgtctaagaatgtgag

SEQ ID NO: 777843 - DNA, 100 bp, Homo sapiens
catgtcaggtccaaaaacagagacttttccctcccagtccctaagtttaaggctccttctcctgaaaaagccgaggaggagagtgagaggcttctgaggg

SEQ ID NO: 777844 - DNA, 75 bp, Homo sapiens
atcgtccattatatcttcatgttcagggccagacacgggaattagtggacacaaaccagtccagctacgggggcc

SEQ ID NO: 777845 - DNA, 74 bp, Homo sapiens
gtaaaagaagccgattccagttcctgtatgatgttcaggtcagacacattctatgtgaaaaacatggcaaaatc

SEQ ID NO: 777846 - DNA, 75 bp, Homo sapiens
ggagaactacagaaacctggtctccctaggttgagaacttgttgcttagtaaccaagggaccattaagctgtgtg

SEQ ID NO: 777847 - DNA, 98 bp, Homo sapiens
cccttatcatcccagcttactgccatatgtgttgactttgccaataccattcctggccatggaggcatcatggatcgctttgactgccagtatctgat

SEQ ID NO: 777848 - DNA, 100 bp, Homo sapiens
atggctatccagacgctctggtcatactaaagaacacatctggaaggtacaccaggggttggaaaaaccacactaggcaaagaacttgcgtcaaaatcag

SEQ ID NO: 777849 - DNA, 75 bp, Homo sapiens
attgacatttaattttagggtcctttatatagaagggagagtagtgagccaagccccccgagaggcccctgctcg

SEQ ID NO: 777850 - DNA, 75 bp, Homo sapiens
cggagaccgagggggagccccgcgcgcggcgtcgaatcatgtcaaccctgccatggacttcacgcagactccacc

SEQ ID NO: 777851 - DNA, 75 bp, Homo sapiens
cccatcgtggattccaagacatccctgctgagagagccaaggttgacctttgcagcaaaaaactagaacgagctg

SEQ ID NO: 777852 - DNA, 74 bp, Homo sapiens
accagctgaggtgtccgtaaagattccagagaagcctgtgaacaaagtcagagtggtgctgggaacaactgggc

SEQ ID NO: 777853 - DNA, 50 bp, Homo sapiens
ggagccagtttggctgaaaataaaagttacttggacataggagaaatcaa

SEQ ID NO: 777854 - DNA, 100 bp, Homo sapiens
aagcgtcctgcccggccgtaaaatctccggcctgtgaaactgtgaggggattcggccaagacgtcctcttccctctgcctcccacccaggccactcttca

SEQ ID NO: 777855 - DNA, 74 bp, Homo sapiens
atggtataaaaatggacactggagtagaagtctctgatattggaagccaaggatttaagcgagagcctcactgg

SEQ ID NO: 777856 - DNA, 100 bp, Homo sapiens
caggtcacgaaatggattggagtgaaccggagaccccgaaaacggaagcgcagggagaaggaagaggtgtttgaaaagctgacatagcccagagatacag

SEQ ID NO: 777857 - DNA, 73 bp, Homo sapiens
tttgttaaggattccaagtaactcttatttgtgtccatgaaactgggaggcgaccgtgttagctgccagttcc

SEQ ID NO: 777858 - DNA, 85 bp, Homo sapiens
agggaaatcgtgcacatccaggctggtcagtgtggcaaccagatcggtgccaaggtctaggcgttttacactgagattctccact

SEQ ID NO: 777859 - DNA, 100 bp, Homo sapiens
gctgctggcatatgggcaccataaccagggagtgggctactgccagatgaagatctccttcaacgacaaaagcctgcagaccacatttgagtacccttcc

SEQ ID NO: 777860 - DNA, 100 bp, Homo sapiens
ggcaccgcggatctggggccgtcctcaggagtgtacctcacagccttctaggatctccagagtggacaggaatctcacttggagggaccatggagcagta

SEQ ID NO: 777861 - DNA, 75 bp, Homo sapiens
cacggagctggtcctgagtgactgcatgctcagcgaggaagaggatggagatgaagatgaggaagctgagtcagc

SEQ ID NO: 777862 - DNA, 100 bp, Homo sapiens
ccgccggttgccggaggccatcgaggaagtgaagaagtacaggtttgcagattccgccagcagcacagcaagctctacagatgagtggctctttggcatt

SEQ ID NO: 777863 - DNA, 82 bp, Homo sapiens
tcttcggcaccgagaaagacaattgctctaggtcgtaaccagcctttgaaaaaggagaaaccaaaatggaaaagcgattatc

SEQ ID NO: 777864 - DNA, 80 bp, Homo sapiens
ccgcaactctcagttcgagagtaaaggttgacatcatggacatatgtgagtccatcctggagaggaagcggcatgacagc

SEQ ID NO: 777865 - DNA, 83 bp, Homo sapiens
tcagcctgagtgcctcagaagctgccaccttgtttggctgaccccgcactacatctacccaccagccatcgtgcagcccagcg

SEQ ID NO: 777866 - DNA, 75 bp, Homo sapiens
aaggtgtactgcaaggaacaaaatgtttgtaaattctccttttaccaagtgttctaagaacggaagcatctgggc

SEQ ID NO: 777867 - DNA, 50 bp, Homo sapiens
ccagcccctctccagctcgaaatcaaatgcactcggtgatggaaagagag

SEQ ID NO: 777868 - DNA, 96 bp, Homo sapiens
agagcagaacagtgaaccatgtgccggctctagttctgaatctgatctccaggctttggggtgaacctgttaatctccgtgaacaacatgatgcct

SEQ ID NO: 777869 - DNA, 110 bp, Homo sapiens
caccatggacaagttttggtggcacgcagcctggggactctgcctcgtgccgctgagcctggcgcagatcggtaactcgggaccaaatgaagatgtttatacagcaggaa

SEQ ID NO: 777870 - DNA, 100 bp, Homo sapiens
cgaaattctgggccgaaatgatccgcctgcctcagcctccaaagtagctgagactacagtttagaagaagaatgtgaatcctctctttgcacatctgcgt

SEQ ID NO: 777871 - DNA, 51 bp, Homo sapiens
cgctggggagcaagactatgagtacctgttggatcagactgatgtgttggt

SEQ ID NO: 777872 - DNA, 89 bp, Homo sapiens
ccggcgcgcgggagcgctacggccccaacgttggaatcgaagcctcttaaaatggcagatgacttggacttcgagacaggagatgcagg

SEQ ID NO: 777873 - DNA, 75 bp, Homo sapiens
cagaaacaaaatgtcaacaaattgatggccttggtcatctataatttcctgagcctgtgctatgagtacctagga

SEQ ID NO: 777874 - DNA, 50 bp, Homo sapiens
ccacaagttgcgctgctcgcgacgagacctgcgaccgcatcaagcagtcc

SEQ ID NO: 777875 - DNA, 100 bp, Homo sapiens
ggaaacctgtatttatcactgccttcttgggaattgcttcgtttgccattttcttatggagaactgtccttgttggtgtaccagtgatggcaataagaaa

SEQ ID NO: 777876 - DNA, 75 bp, Homo sapiens
gtgccaagttcatatcctgctggtttaacaggcactaactgtgacatctatgaccttttttatcatcgcacaagc

SEQ ID NO: 777877 - DNA, 100 bp, Homo sapiens
acgtggacctgtgggaagccgcacttacctatgaggccagcaagcggaggtgctgggagcgagttggctggtgctgccttcacctgcctggagactgcct

SEQ ID NO: 777878 - DNA, 76 bp, Homo sapiens
ctctgtagtgtttgccaatgttggagccgtctgcaaagtgtccccggcaagaagccatgaaccagagaatcagtca

SEQ ID NO: 777879 - DNA, 99 bp, Homo sapiens
gaaacacagagcggatacatcaggagactcttagaagactggaaagcagattttttgaagaaaagatgcttttactgactctgctatcagtgctaaagt

SEQ ID NO: 777880 - DNA, 97 bp, Homo sapiens
ttgctccgggcgctggcgcaagggtgaagagggaacagaaatctttgccccctgactttggaaatctcgtttaaccttcaaactggcgatgtcaagg

SEQ ID NO: 777881 - DNA, 98 bp, Homo sapiens
cactcatcagcaccccagaccttgtttttgctttctcagtttggcaggacctagatgtgaaggctggtggaggctgtgtaatgaccattggagaaatg

SEQ ID NO: 777882 - DNA, 84 bp, Homo sapiens
tggaaagtgcgtcatcctaaggaacatcgacatgaaggatttgggggcagagcacttggcaggtcatgaaggggtccaacttct

SEQ ID NO: 777883 - DNA, 95 bp, Homo sapiens
ctgtgctcgcgctactctctctttctggcctggaggctatccagccacttgcacctcctgcgccgccgccccccatccaaggatatgccttcaag

SEQ ID NO: 777884 - DNA, 75 bp, Homo sapiens
ttaacttgctctatggcttcttttttgcttcattgcaagatgatgcactggagtcagtgaccttcgaggatgtgg

SEQ ID NO: 777885 - DNA, 121 bp, Homo sapiens
aaaagcaaaggaaagctcactgatgcacaggatgaagatccagaatgcacacaagatggctgcaataggatctgtggctttggacacagcaaggtcacatggagagaaacaattagaagac

SEQ ID NO: 777886 - DNA, 99 bp, Homo sapiens
ctggaccacggcgcagacgcgggcgagctgcggctcggacgccagcggacacgcgggcgagatattgaaatggattccaggcgtgtgcctcgagacaag

SEQ ID NO: 777887 - DNA, 100 bp, Homo sapiens
actgaagatgaagcaaggcccaatgacccaggcgggagttctgggaaatcgttcattcatttacagatgaacagaaaagactcttcttgcagtttacaac

SEQ ID NO: 777888 - DNA, 98 bp, Homo sapiens
ctgtctctgatccgcaagcatgctcagaccttcattgctctgtgtgccaccgaggaggctggcagctgtgtgcaggatgggcagaggtataatgataa

SEQ ID NO: 777889 - DNA, 82 bp, Homo sapiens
attgacacactaaagatgtccagtaaggtatgtgagagtcaacctatttgatttcttgacaagaccacaatctgatcccaaa

SEQ ID NO: 777890 - DNA, 83 bp, Homo sapiens
gcaccctgtccccgaggaggggaccatgacacagtgcgcgcggagccatggttatcatgtcggagttcagcgcggaccccgcg

SEQ ID NO: 777891 - DNA, 78 bp, Homo sapiens
aggacagcaatggttgtatcaactatgaagaggctactacttgagaagaggcaaaggaaaaagcgccttgagccattt

SEQ ID NO: 777892 - DNA, 90 bp, Homo sapiens
gctggttgccttggctccctgtagctatagcagccgcggcggttaagtatgcggcgccaggagctccctccagaatacccatcatatagc

SEQ ID NO: 777893 - DNA, 80 bp, Homo sapiens
atccaacagcccagtgcttctgtctcgactgcactttgagaaggaagctgcagtaaaggaagatgaagaagaagtttcag

SEQ ID NO: 777894 - DNA, 83 bp, Homo sapiens
taaaacagtgcttaggccagtacctagtctgtttccaactgtgcgcggccctccaggcactgaagcgtaagaagaggtatgag

SEQ ID NO: 777895 - DNA, 80 bp, Homo sapiens
gatgtcgccgaaaccgggctgcaggcgggtgtggacactgccagcggctgcagccgacttggaatgacctgggagacaaa

SEQ ID NO: 777896 - DNA, 98 bp, Homo sapiens
ccggagggagcgaagagaatccagatggtggttgctatttcaggcccagacataatcaaatccatgtgaagaaaagagatttcttcctgcgtggccct

SEQ ID NO: 777897 - DNA, 75 bp, Homo sapiens
tggatacggagtacaaaaacggcccttggatgatggagcggggatctgatgagcttctttcttctggcatcatta

SEQ ID NO: 777898 - DNA, 98 bp, Homo sapiens
cctcttcctgaagcatgtggagtatgaggtttccagccaggttgtggcagcactgcctgaaggtatgagaccagattctaatctttatggttttccat

SEQ ID NO: 777899 - DNA, 82 bp, Homo sapiens
gggtctgctcgggggtctacttcgagggtgagttgctacagtggctggagagacgacatctgctccatgggctggtggccga

SEQ ID NO: 777900 - DNA, 98 bp, Homo sapiens
atcccacccaagagttccatccctcactacagtgccacagacacaaggccagaccacaggggccaagaaatgaagcttcaggcctgtgaagttggaga

SEQ ID NO: 777901 - DNA, 100 bp, Homo sapiens
cgcgggatcccagcctcaggcgtgcgcggacggtgtgcggatggctgatcactgggaaactgcacctcgtcacatgatgcgtctagatattcgttctttg

SEQ ID NO: 777902 - DNA, 75 bp, Homo sapiens
gcagtggtcgcttcttctccttggtccgcgggagagctgtggggcttggtgagtgtttcgtggcctctcgggttg

SEQ ID NO: 777903 - DNA, 90 bp, Homo sapiens
ggcttgcagctggtgtacaggacggagattatcgcaatctgacctttgatccagtcagcgccaaccgtcacttctatctgtcgcgccagg

SEQ ID NO: 777904 - DNA, 90 bp, Homo sapiens
ctccatcacccaccaacaacaccacaataatccacagccaaggatgaatttcacccattcatcgaggcacttcttccacatgtccgtgca

SEQ ID NO: 777905 - DNA, 50 bp, Homo sapiens
cgcagacctgtcaccaggagacaaggaccccactgaaaatcggactgttc

SEQ ID NO: 777906 - DNA, 90 bp, Homo sapiens
agagaattcaggaaaatcaggccaagagaatgtctactagagtccttttagccactctttccatccctattactcctgagcgtacggata

SEQ ID NO: 777907 - DNA, 50 bp, Homo sapiens
cacggcctctgatttcatagaagcttcgagagctgtgcccaggagtgaac

SEQ ID NO: 777908 - DNA, 75 bp, Homo sapiens
ttgcatccggagagtggacaagaaaatctacggaatccagaggcagcattgtctccaaccttccgtagtgacagc

SEQ ID NO: 777909 - DNA, 100 bp, Homo sapiens
ggaagcagtacggcgtccctgcctcaggcctgcccggacggtgtgcggccgctgtacaaccagccctccgacacccggcagtatcatgagaacatcaaaa

SEQ ID NO: 777910 - DNA, 74 bp, Homo sapiens
gcccgccgctcgcgccgggcccgtggccggactggtcaaacaaatggattttacagaggcttacgcggacacgt

SEQ ID NO: 777911 - DNA, 90 bp, Homo sapiens
gtgcaccaacaagaacctgctttaaatttccatggcaatttacaacccccatactgtaccaggcaagtggtatcattggtcgtagcagga

SEQ ID NO: 777912 - DNA, 100 bp, Homo sapiens
aagagacctctacttagctcagcaattcttaccttacatatctgaagagatggattaagaatgctttggattaaggattgtggagcacatttcaatcatt

SEQ ID NO: 777913 - DNA, 74 bp, Homo sapiens
tggaaaaacaagcccaagtggctcctccagggcatcttgctactatatcggggccacagatgatgcagccacca

SEQ ID NO: 777914 - DNA, 80 bp, Homo sapiens
gtctggggcaaagggaccacggtcaccgtctcctcaggttaatttggagtggcccctggagtcagtttcctacaccatcc

SEQ ID NO: 777915 - DNA, 90 bp, Homo sapiens
ggtttttggttgtatttaggatttcagggaaaagtgtccaagctttcagtgttggagcagacaggttctcactatgttgcccacgctggt

SEQ ID NO: 777916 - DNA, 100 bp, Homo sapiens
tgccatctccttgcccaagggtgtggtggaggtgacccatgacctgcagtgggagcgcctctggttcctgctcctcaccttcacctttggcctcacgctc

SEQ ID NO: 777917 - DNA, 98 bp, Homo sapiens
tacctggaagctgagcagcagcttgccgctctagaagggtaaagcatgaatcatcctccagtgatgaggagcgcgcagctgccaagccatcaaacgca

SEQ ID NO: 777918 - DNA, 75 bp, Homo sapiens
gatgctgccagggtccctgaagagggaagacacgcggaaacaggcggtggaagaagatatccccatagcgaaaga

SEQ ID NO: 777919 - DNA, 97 bp, Homo sapiens
atctgaacactcctcacttcttccccagaacattgatgatggcacctcagatcgcccctacagccatgctctggtggctggaattgaccgctacccc

SEQ ID NO: 777920 - DNA, 48 bp, Homo sapiens
caagaaatttcaaaacttgatcaaggattatatctgtccaagatgcga

SEQ ID NO: 777921 - DNA, 103 bp, Homo sapiens
ctgctattccggcgcctccactccgtcccccgcgggtctgctctgtgtgccatggacgggtctcggcgcggaagatggccggcggcgtggacggccccatcgg

SEQ ID NO: 777922 - DNA, 75 bp, Homo sapiens
aaggtgctttgaaacctgcatttgattaagcaagaattcgcttgcaagttaaggactaagaaaaatggctttgtc

SEQ ID NO: 777923 - DNA, 96 bp, Homo sapiens
tcccagcagatctccagggttctaggaaagggtcacttagttctgtaacgccatctcccaccccagagaacgagaatatcctccgaatcctaaatc

SEQ ID NO: 777924 - DNA, 135 bp, Homo sapiens
ggcgccggggcccccgtcgttgctgccgggattttggaggccggggccgcgctgagggcgcccagctgaggaaggcgaatacttcctgaaggtgctgatccccagctacgcggcgggctccatcattggcaaggg

SEQ ID NO: 777925 - DNA, 100 bp, Homo sapiens
aacaaatagcactttcttattccaagggtcttgctccattgaccaggctggagtgcagtggcgtgatcttggctcactgcaacgtcctcttcccaagctc

SEQ ID NO: 777926 - DNA, 83 bp, Homo sapiens
ctcagttggaagcagccgatccagcctgcggagcctgtggggcaggtcaccgaggaggagcccagctccaaccacacggtcat

SEQ ID NO: 777927 - DNA, 108 bp, Homo sapiens
gtccaacttgcctggaccagcttaatggttctggggccagctggagatcagcagcctggtgcccctggggcccaagtatgtggtgaagtggaacacggcgctgcccca

SEQ ID NO: 777928 - DNA, 75 bp, Homo sapiens
ggcagagatggagcactacggccagtggtcaggcggccggcatgagttaacttaccaagactggttacacctgga

SEQ ID NO: 777929 - DNA, 82 bp, Homo sapiens
gctctcagcaagcaactttgagctgcacgttgcacaaggaatcaaccctgcctaccggactgaggatgccaatgaggacacc

SEQ ID NO: 777930 - DNA, 82 bp, Homo sapiens
cctggatcatggctgccgcgccgccgctacgggaccgcctgagctttctacaccgggccactcttcacctccaccatgagcc

SEQ ID NO: 777931 - DNA, 51 bp, Homo sapiens
gaaatcctggatactgcagggacagtatgtgaaagcaagaacagagctaac

SEQ ID NO: 777932 - DNA, 104 bp, Homo sapiens
cttgagaagagagaaccactaaagggcagagcaaagactccagtaacactcaagcaaagaagagttgagcacaatcagagtacagttgtgaatttggctccgcg

SEQ ID NO: 777933 - DNA, 101 bp, Homo sapiens
ggatccggggatcaaagagcagtgggggttgctgacccagaggagagttctccaaacatgatcgtttactgcaaagataagttctgaacgtcgaaaagaaa

SEQ ID NO: 777934 - DNA, 98 bp, Homo sapiens
ctcacccgtggaaagtacaggtcctgacagctgatgttgctaaatttgcataagaagagttggatggaaggtttgacacttcaggactacagtgaaca

SEQ ID NO: 777935 - DNA, 75 bp, Homo sapiens
cgtctggtttgatcacaagacgggcaagtatgtccgtggttcagaccctgtattaaagcttttggacgacaatgg

SEQ ID NO: 777936 - DNA, 97 bp, Homo sapiens
gctcttcaaacccagtctgatctcttggctggaacaagaagagtctaggacagtgcagagaggtgatttccaaggtcaatggccacaatccggggtc

SEQ ID NO: 777937 - DNA, 100 bp, Homo sapiens
ctctggtcatcctggctaaaggagcagaggaaatggagacggtcatccctgtagatgtcatgaggcgagctggggttggaagtgtatcctcccttcttat

SEQ ID NO: 777938 - DNA, 100 bp, Homo sapiens
tctcctcctttgacagggacatcagtggagccttctcagacccacaggtgcagattcactttataggaacagcttcagcttcagtgatgaaaaactgaat

SEQ ID NO: 777939 - DNA, 100 bp, Homo sapiens
gggtggtctgtctgctcctggcatgccctgccacagccactgactggcacagcctccaggttggcgggctcatctgcgctggggttctgtgcgccatggg

SEQ ID NO: 777940 - DNA, 74 bp, Homo sapiens
tgaaggactccgggtgaggccggccacgccccgcacggtgccagaaccctgtggagcatcatgaactgggaaga

SEQ ID NO: 777941 - DNA, 83 bp, Homo sapiens
cggggccccgggatctcggctgtccttcctcccgcaagagtgagccatggagctacgtgtggggaacaagtaccgcctgggac

SEQ ID NO: 777942 - DNA, 83 bp, Homo sapiens
cagtcacttgtacagcgccggtcaacatcgcggtcatcaagtactgttcctgcacttggccatcatccatgaagaaaaggcac

SEQ ID NO: 777943 - DNA, 80 bp, Homo sapiens
gtgcggccgctgccaatcactcccattggggtgacagcggccatgagactactgttttccaaagtgaagttgcagtcact

SEQ ID NO: 777944 - DNA, 100 bp, Homo sapiens
atttgctaatgccacacctctctcaactctctcccttaagcactgggatcagctgtcggaaaaggtaacagaagatggaactcgaaatcccaatgaaaaa

SEQ ID NO: 777945 - DNA, 71 bp, Homo sapiens
cctacgcagagctcatcgtccttgacttaattcagtgcacaaatgagatgaatgtgaacatcccacagttg

SEQ ID NO: 777946 - DNA, 50 bp, Homo sapiens
ttttccagctctcatttactcctgtctgtccagggttttggtggctggcg

SEQ ID NO: 777947 - DNA, 82 bp, Homo sapiens
cccggagtggggtgtcggcgcctcattcgggtggagctgagccggagacaggtgagaagccctaccactgcaactgggacgg

SEQ ID NO: 777948 - DNA, 50 bp, Homo sapiens
gcgatgagtgccaacgaggaccaggagaattcagcttagagaactatcaa

SEQ ID NO: 777949 - DNA, 101 bp, Homo sapiens
tacgaggagtgaccaatgatcaggttgacccttcagtgctgggtaggccaggtttcagcatcgcagacaagaagcgcaggacaggctgcattggggccaaa

SEQ ID NO: 777950 - DNA, 75 bp, Homo sapiens
cccgagagcgtggagcgggctgggccagtgcagggctcgcggcctggcaagaatgtacagctgacagagaacgag

SEQ ID NO: 777951 - DNA, 101 bp, Homo sapiens
acggacccccgcactgtctttgtatctgagcgggagctggactgggccaaggtgatggtggagaagagcagaattctcaatcacaatcctctgacaactgt

SEQ ID NO: 777952 - DNA, 75 bp, Homo sapiens
ctggatcttcagatgcacatgttcaaaccttgtactactcagctgatcacaagctgcttgatgggaacctactag

SEQ ID NO: 777953 - DNA, 90 bp, Homo sapiens
tctgaaagttttccttccatctctgctgctctctcatttgctggccatcggattgggtggtgaagcagcgcttgcagatgtacaactcgc

SEQ ID NO: 777954 - DNA, 100 bp, Homo sapiens
tatgaagagaaaaatggcacctgtcaagaccagcatctcagacatgtcgaaaaagatgttttgatccctaaaataatgagagaaaaggccaaagagaggt

SEQ ID NO: 777955 - DNA, 100 bp, Homo sapiens
gccaccacgcctggcctcactcaaacagtaaacgaggacactcatgaggaccatgatacttccactgagaatacagacgagtccaaccatgaccctcagt

SEQ ID NO: 777956 - DNA, 100 bp, Homo sapiens
ggctacacctggactggcgtcgcgttcctgcgcagggattcttgagtatcagaacaccaccttctttggtggaacctgtatatccatgattgattacctc

SEQ ID NO: 777957 - DNA, 100 bp, Homo sapiens
cgcggcgccgccacaagttgcgctgctcgcgacgaggtgtcatggagaaactccagctgggcccagagattctgcagcgggaaaatccaaggcttattta

SEQ ID NO: 777958 - DNA, 100 bp, Homo sapiens
catgcggaagaatttgaagacaaagagtggacatttgtcatagaaaatatctatccatactaatggaaatgtaactggaactgactctgatgataaaatc

SEQ ID NO: 777959 - DNA, 50 bp, Homo sapiens
tggatggggacctgcctgctgatgagctctctccggaacagcacaacctt

SEQ ID NO: 777960 - DNA, 90 bp, Homo sapiens
atgacattctccaagacatggagaaaagctttctggtaaagcaggcaccaccaggtttttataggtctgcgaggctaagtgtctccgcgg

SEQ ID NO: 777961 - DNA, 100 bp, Homo sapiens
gaaaatttgagatggaagaaagagcagacacattggcggcaagctaatgagaagctagataagatattaaaggactcagcaaaaagagaaagatgtattc

SEQ ID NO: 777962 - DNA, 90 bp, Homo sapiens
gcggcagtatgaccgggtttctttgatgcgacctcaggaaggagatgagaataacagataccattggaccaacagaaacctcaattgcac

SEQ ID NO: 777963 - DNA, 101 bp, Homo sapiens
caaaaagctctgaaggacttgctgaaatgggtcttagagcggagcgggcactggacacaatgaactttgagatgctcaaaggccagcctattcgcatcatg

SEQ ID NO: 777964 - DNA, 100 bp, Homo sapiens
gaatcagacagtgatggggaggcaccggcagctgtgacctctgcccagtctctgctggatgaaccgaatcctaacagtccagccaatagccaggcagcac

SEQ ID NO: 777965 - DNA, 100 bp, Homo sapiens
tcggcttcatgggcaatcagagtagaagtcgaaatggcagaagaagaggagaggacatgatgcatccactcaagcgcacctatgttggcagcatgcctgg

SEQ ID NO: 777966 - DNA, 101 bp, Homo sapiens
gaaggagaaaatgtataacgtcttgttgtttgttgatggagggtggatggtggatgttagagagatgagccccgctagggccgccccgcgctgagagccca

SEQ ID NO: 777967 - DNA, 100 bp, Homo sapiens
acaccatgggaggtgtggtttattggcaaagaaaaagaagaacgtgaccggctgcaactgaaagctctagaggaacttcggtagttatgtgacacatgaa

SEQ ID NO: 777968 - DNA, 90 bp, Homo sapiens
aaaacttttaaatgcaaaacactcagagaaatcaccaccttctacagattagctttatttgctcaccgtgaagatggacctggaatccca

SEQ ID NO: 777969 - DNA, 50 bp, Homo sapiens
cttgtgctcagtgacatcattcagagttcgaaatttgagcaacccagcca

SEQ ID NO: 777970 - DNA, 75 bp, Homo sapiens
gaacagttggccaatactggtgcccaagcctggattaaaaaggctgctgatactttggctgtgaggcaaaaaagg

SEQ ID NO: 777971 - DNA, 100 bp, Homo sapiens
atggccaaggggtccttctactcctaagccatttgtgtaggaccagaaaacatgcagataatgtatccagctatatttgaccagttgttggcatttgtag

SEQ ID NO: 777972 - DNA, 95 bp, Homo sapiens
cccaaaaagcgtggacccaagcccaaaaccttcctcctcaaaggactcggagatcatgcagcagaagcagaaaaaggcaaacgagaagaaggagg

SEQ ID NO: 777973 - DNA, 83 bp, Homo sapiens
gggatccttctgtcatagaaactcacatgagacaaatgcgctcagcttcaattggaactgggcaggcaaaaggcttctcttcc

SEQ ID NO: 777974 - DNA, 98 bp, Homo sapiens
caccagaatgacaaaggcaagaacgtccgccagaggaactcttcctgaggcaggtggcccgctgcaagcagctgatctgtgaccccagctacatcccg

SEQ ID NO: 777975 - DNA, 100 bp, Homo sapiens
cctgttcaactttgtcctctctcaggtgcacattcaggttcccgagcacaaacatcaagataacgttcactgccctgtccagcgagaagagagagaagca

SEQ ID NO: 777976 - DNA, 83 bp, Homo sapiens
cccggagcccccagcgcagcggccgcggtcatcatcagatttgaaatatttaaagtggatacaaaactatttcagcaatgcag

SEQ ID NO: 777977 - DNA, 100 bp, Homo sapiens
cgcccgggacccagattgcgggttcagggggagctgatcaccttctattactattggaagaagacccccgaagcagccagctcccgagcccatcgtaggc

SEQ ID NO: 777978 - DNA, 50 bp, Homo sapiens
tgcccctgcattgttggtattgaaagtggagtctcgctctgttacccagg

SEQ ID NO: 777979 - DNA, 75 bp, Homo sapiens
agcctagtttgcatatgagtgctgctgcagcttcccgagacatcaccttgaaatgttgaaggaattgaaccagca

SEQ ID NO: 777980 - DNA, 74 bp, Homo sapiens
cctaatggaggtctccagtttcgatcaaagaccaagctcaccaattcgacatcagggaaggaatgacgagcttg

SEQ ID NO: 777981 - DNA, 82 bp, Homo sapiens
aagcgggccacgcacctcgtcaccaaggccaagatgcagcagcttttttatgagaattacgagcagaacaaaaaggggtaca

SEQ ID NO: 777982 - DNA, 75 bp, Homo sapiens
tcgtcccgaggccgtggctgaggtgaagagcttggcccagcgtgtgaggcggccgataccagggtcagatcagac

SEQ ID NO: 777983 - DNA, 88 bp, Homo sapiens
aagcactatcattgcgaatcctgacatcccagaggcctataagcttcgtggatgaacccagtgacttgattgtaaaaatttacagagc

SEQ ID NO: 777984 - DNA, 98 bp, Homo sapiens
gcgagcgtctgggcgggtggtagatactctggatgaatattttgaatatgatgcagaggagttcttggtctctttggccttgctgataacagaaggac

SEQ ID NO: 777985 - DNA, 100 bp, Homo sapiens
tctcgtcctccagcagcacgttggagagggaggagaaggaggacaagctctccagggacaggacaactggagatttactgaccttaagcactatagtgat

SEQ ID NO: 777986 - DNA, 100 bp, Homo sapiens
agccgcgagcgctgagggtgagtgccgggagctctgaggctgcaagctttcttcctggtggcagatgacatcatggattcatcccttacccgccggggac

SEQ ID NO: 777987 - DNA, 112 bp, Homo sapiens
ccgggcccagcacagccagcaccgcacgccctgcaagggaggtgctggagaatctggtaaaagcaccattgtgaagcagatgaggatcctgcatgttaatgggtttaatgga

SEQ ID NO: 777988 - DNA, 90 bp, Homo sapiens
cagcccccggccgcagcgcaggcagcccagcagggctgaagaagatgcagagcagcctgaagctggtggactgtatcatcgaggtccacg

SEQ ID NO: 777989 - DNA, 120 bp, Homo sapiens
taggctgccgggcgctggtcgtcagcgccgaggctgggctgaggcgccgcggtaccatgaggcgccgagcacagcaatggaggaaacagctatatgggaacaacatacagtgacgcttca

SEQ ID NO: 777990 - DNA, 75 bp, Homo sapiens
ggaggtgaagttgctgctgttggcttcgagagctgtgcccaggagtgaacaaccagccctacctctgtgagagtg

SEQ ID NO: 777991 - DNA, 100 bp, Homo sapiens
cgagcgcgccccaagcccgggcgccaccgctgccacctccgcgaggtacatgtcccagagcaagcacacggaggcccgggagctcatgtactcgggagcc

SEQ ID NO: 777992 - DNA, 98 bp, Homo sapiens
gacgtcatcctgatcttggaactgatccgagccagagacaacaacggctcctacgccctgtgcctgctgcacgaagggaaggtgctgcactatcgcat

SEQ ID NO: 777993 - DNA, 100 bp, Homo sapiens
agacaaaagctgtacttgacttagaatcagaaagaagatgggttttgacagctcctgaattcagaccacagatccacagccacagtccagatatgtagcg

SEQ ID NO: 777994 - DNA, 74 bp, Homo sapiens
aataaagagtgaagaagttccagcttttgggggatgatccaccaacacattctcagccagacagtgatgatgaa

SEQ ID NO: 777995 - DNA, 100 bp, Homo sapiens
cttttttcaaagacccaaatgttattcccaatttgaagttactttcagattcttctggacaatggatcatattagggcctgaaggccaggaggagtcaac

SEQ ID NO: 777996 - DNA, 75 bp, Homo sapiens
ctcgcgcttcagcgtcccggcgccgtcgcgccactcctccgagtggatggaagtttgcttagttgaagaattgcc

SEQ ID NO: 777997 - DNA, 95 bp, Homo sapiens
tgccttttctaagtttgagaaaggtgaaatgacaatggatgctctgttggctcgattgaaacttctgaatccagatgaccttagagaagaaatcg

SEQ ID NO: 777998 - DNA, 96 bp, Homo sapiens
gatgtttgcgacatcccagagagcttccagaggtttacagccgtctatgaaagcataggatccctcaggcaagttctcgaggccaagatgaagctg

SEQ ID NO: 777999 - DNA, 49 bp, Homo sapiens
aggaggcagtagccaaacacccagatctcagtcatagtggattggcaga

SEQ ID NO: 778000 - DNA, 100 bp, Homo sapiens
agagagggagagataaaccaccgcttacagatattgggttagagcagccagcgggtacagaatggattttggaagagggagtcaccactggacctccaag

SEQ ID NO: 778001 - DNA, 83 bp, Homo sapiens
gtttaactggcacccagtgctcatggtcaccggcttcgtcttcatccagggcatcgggactggtgattgcagctggaagtgcc

SEQ ID NO: 778002 - DNA, 101 bp, Homo sapiens
ccttgtgaacaccacccttggagttgctcaggtgtctggaatgcacaatgccagcaaagcatttttatttcaagacctagaggatcaagacataatgggag

SEQ ID NO: 778003 - DNA, 100 bp, Homo sapiens
ttacttcttcctcaacaccagcaccgcagatgttgtcaaggtggcctaccaggaggccaggggtgtcgccatggcaattgttctcttaactgaattaatt

SEQ ID NO: 778004 - DNA, 80 bp, Homo sapiens
ccggctcgcggggcccggcgaagggcagggccaattcctgtccccccagcagcatggcatcgtgtgctgaaccctctgag

SEQ ID NO: 778005 - DNA, 100 bp, Homo sapiens
cctgaagaagattccactcgtggtatgagagtggataatataatcaactcctctgcctgtttattggctcttctgaagccctgtaaagattttgaagtgg

SEQ ID NO: 778006 - DNA, 83 bp, Homo sapiens
ccgccaccgagcgtgctgagcaaccgcagcctccgcggccgagagtgcagcgatgctgctcacggccgtgaactgctacagcg

SEQ ID NO: 778007 - DNA, 100 bp, Homo sapiens
ttccagcactggactcatggaggctgagcatttattcagacttcagtattgatgctcctccatcctttaagccagctaagaagtattctgatgtttcagg

SEQ ID NO: 778008 - DNA, 100 bp, Homo sapiens
ctaaggcaaaggagtggaagtttgagagaagtttaagagaagaaatggacatgattgcctaaatcagccaaacacaggtatcttaaatagcgaagatgga

SEQ ID NO: 778009 - DNA, 83 bp, Homo sapiens
ccttcctgccgacgtcggggtggccgttcagcagccgagactcaagtttttagaacttcagccataaaaatgggcagaatttt

SEQ ID NO: 778010 - DNA, 75 bp, Homo sapiens
actgtttccgttgccaaacccaggacaaggcttctccagggaaagtgaccgaggcagtgaaagaggccattgacg

SEQ ID NO: 778011 - DNA, 100 bp, Homo sapiens
cagaatacaactgtttccttttctccggcactactgcagtcttcagttaagcaacaagtagaagctattgaaaaacagtacatttctgcaattgagaaac

SEQ ID NO: 778012 - DNA, 100 bp, Homo sapiens
tgcagccgagatgccgggggagcggggccttccacaccccctccgtgggtgtgtggctggtggaggaagtgaaggagctgtgtgatggcctggagttaga

SEQ ID NO: 778013 - DNA, 51 bp, Homo sapiens
cagattcgcagtggtcgcttcttctccttgtacgtggaagacaacctgggg

SEQ ID NO: 778014 - DNA, 75 bp, Homo sapiens
tcaaagtccagatctccatctccaaaaagaaggtgctgcgacaagagactttggacaaaaattgacttgagtagg

SEQ ID NO: 778015 - DNA, 49 bp, Homo sapiens
gccagaagaagacacaaggttatgcggccttctacaattatcatgtcct

SEQ ID NO: 778016 - DNA, 83 bp, Homo sapiens
ctggccctgatcatcctgctgggcttcgtccagatcgggaaggggcgtgatggtgggcatgggtcagaaggattcctatgtgg

SEQ ID NO: 778017 - DNA, 101 bp, Homo sapiens
agcgcaaccgtcggtgggtcggggatcggtcgcctgagaggatgagttccacccgttcatcgaggccctgctgcctcacgtccgcgccttcgcctacacct

SEQ ID NO: 778018 - DNA, 97 bp, Homo sapiens
ttccacgtgaagctcaccgacagtgccctgagggccttcgagagctaccgcgccagacagggaaagcaggcaggatgggagagtcgccgatagaacc

SEQ ID NO: 778019 - DNA, 90 bp, Homo sapiens
gaatgacaaccagggccaggctcctgatggacagtctcagccccccctccaacagaatcaggttgcccccaagtttcctggcagtgtgtg

SEQ ID NO: 778020 - DNA, 75 bp, Homo sapiens
ccgtgacatccgaggtgcctttctccaaaagcagcccctgtcaaagggaacaggaagcagtccacggagggtgac

SEQ ID NO: 778021 - DNA, 50 bp, Homo sapiens
gggttccaaagggctgactgcgaaactgcctccagaatgagttgagaaga

SEQ ID NO: 778022 - DNA, 82 bp, Homo sapiens
agatacaggcttggaccagagctggaaatatggtgtccctggccagtgtccttccacctgtccacaagcatggggaacatct

SEQ ID NO: 778023 - DNA, 75 bp, Homo sapiens
agtgaaaagtgcagctgcaaccaatctctcagccctgtattatatggacatggatttgattgacatactttggag

SEQ ID NO: 778024 - DNA, 73 bp, Homo sapiens
atggggaggcgggaagagaccctcctgccaaggacgtgtatgacaaagtggactatctgagctccctgggcaa

SEQ ID NO: 778025 - DNA, 83 bp, Homo sapiens
ggactttcttttggccctaggccccttcctgcccctgtcgtcagcagacaatgcagatcttcgtgaagactctgactggtaag

SEQ ID NO: 778026 - DNA, 82 bp, Homo sapiens
gtgaggtcaacctgcgcccccagatgtcccaggagcccgacctgcccctgacctctgcttcgagaaggtgaatgtggcagga

SEQ ID NO: 778027 - DNA, 82 bp, Homo sapiens
aatccagctagcaaagtaattgcactgaaagactgaaactgttgaggagcccatggaggaagaagaagcagccaaagaagag

SEQ ID NO: 778028 - DNA, 100 bp, Homo sapiens
agtaacggcactgcggctggcgtggcagatcaggggaggagccccagccccgcgacgaggaggaagcggagctggagctgctgaggcagtttgacctggc

SEQ ID NO: 778029 - DNA, 90 bp, Homo sapiens
cgacaagcacatcaccactctgcagaattttccaatgagaaaagtgccctgtaagaaagatgctgcatcaggttcattctttgctcggga

SEQ ID NO: 778030 - DNA, 98 bp, Homo sapiens
taccaacctccacgcctgggaaatgaagccctatgcagtcatggaatacattcctgacctgtacaaccacttcctggatataagccttgaagcacaca

SEQ ID NO: 778031 - DNA, 75 bp, Homo sapiens
cataggaattatcattgtgaatcccaattattgccttggtccatggccaggaaggaatactgggagaatcttcgg

SEQ ID NO: 778032 - DNA, 83 bp, Homo sapiens
gcctcggcagtcctgtttccctgtaaggtcgctttggtcatcttggcttagccatcaacttgatcacatatgatgatcgcttc

SEQ ID NO: 778033 - DNA, 100 bp, Homo sapiens
agacgctgggcgcgtcgaggactggaggttggaaagaaccatgactgtattcaggaaggcacatgaactgaagcttctgtcagaatgccaatacaagcag

SEQ ID NO: 778034 - DNA, 83 bp, Homo sapiens
gccgagcaggctgagcgatacgacggagatgaccaggatagtgaaaagtcaaaaccagcaggctcagatggtgagcggcgggg

SEQ ID NO: 778035 - DNA, 76 bp, Homo sapiens
agtggcaggaggaggaggaggggctccggctggtctgtggtgagatcaaagatccagctaacaggcgctacgaggt

SEQ ID NO: 778036 - DNA, 74 bp, Homo sapiens
cttgccaaagtgtcccttttaaaagactcacagatgaatgcttctcacccggaaacaaacttgccagttgggta

SEQ ID NO: 778037 - DNA, 98 bp, Homo sapiens
gactggacacctttctgggactgcagcaccagggtggctacgcctcccggctggactggacctacagagacatctgggattttctgcgtcagctgttt

SEQ ID NO: 778038 - DNA, 99 bp, Homo sapiens
gacttgactactcgcatcgcgcactttttggatcggcatctagtctttccgcttcttgaatttctctctgtaaaggaggcttatgggataaaagcacaa

SEQ ID NO: 778039 - DNA, 98 bp, Homo sapiens
gaggacgagccggcgcccgcggccccgctgaggggccgcaaggacgaggacgcctttctgggagaccccgacaccggagaataaaggcagccccgttg

SEQ ID NO: 778040 - DNA, 74 bp, Homo sapiens
tggaagttacttgtggacatgattcatgttacatgtaaagctgtcctcatttgtgactatggacctatggagtt

SEQ ID NO: 778041 - DNA, 100 bp, Homo sapiens
cctcccgggctccggctccggcttctgctgttgctcttctccgccgcggcactgatccccacaggtatggcagcagccaaacttctgcatgactctggac

SEQ ID NO: 778042 - DNA, 83 bp, Homo sapiens
tgagcgggccaagatcgatgatcccacagactccaagcctgaggtggctgaatccacagaggagcctgctggttctaatcggg

SEQ ID NO: 778043 - DNA, 100 bp, Homo sapiens
tttaacgtcacagtttttgaagaccaaggcgagtttataccgaggtggctacagccgatttgccccctactgaagtgacgtgagacccctgcaaatggga

SEQ ID NO: 778044 - DNA, 75 bp, Homo sapiens
gagctggtggtggaagtgcggggctccaatggcgctttctacaaggctttgaaatttctgaaaaccagaagaggc

SEQ ID NO: 778045 - DNA, 97 bp, Homo sapiens
gggggaaacctcaagatataatcttcacttccgggggcactgaggcctcttcaacctgcgccagatcgtcctcgccaaggtggaccaggccctgcac

SEQ ID NO: 778046 - DNA, 90 bp, Homo sapiens
tggtgattggtgcaagcgacgtgggatgaggagaggagaggcagcagcatggcgagtgtcctgtcccgacgccttggaaagcggtccctc

SEQ ID NO: 778047 - DNA, 74 bp, Homo sapiens
tcagaagaaaatcggcacctgagaaaagaatcttcaagagggagacatagggaaaaggaagacataaaaatcac

SEQ ID NO: 778048 - DNA, 75 bp, Homo sapiens
gggatctttcagtagaactgcaactcacccgacgactgccacccatcaaagaagctaagcctcggttacagaagc

SEQ ID NO: 778049 - DNA, 50 bp, Homo sapiens
cgcctcccgagaagaagttgaggcgctatttctgggaggtgatcagtgat

SEQ ID NO: 778050 - DNA, 83 bp, Homo sapiens
aagagaggtccgaaacccaagcggcttctgctgcaggttaatttggagtggcccctggagtcagtttcctacaccatccgagg

SEQ ID NO: 778051 - DNA, 98 bp, Homo sapiens
agttcaaggaggccttccagctgtttgaccgaacagattgtagaaacactgtttaatgctctcaaccaaaatttggtccagtttgagctgaagccggg

SEQ ID NO: 778052 - DNA, 100 bp, Homo sapiens
gttttataaactgcctggccgaatcagccttttcacgctcaaggtatggaacgccgtggactccgggcactgcctgcagacctactccctgcacacagag

SEQ ID NO: 778053 - DNA, 90 bp, Homo sapiens
cgcgcgggacaagtcgccggcggcgcccgacggagcagatcttgcaggagagagagttactgcctgtgaagaaatttgaaagtgagattc

SEQ ID NO: 778054 - DNA, 101 bp, Homo sapiens
gttgggagcatgagtgggaagtgctgctcccggaggtgcttggagggtgaatgaggtgctggagaatctggtaaaagcaccattgtgaagcagatgaggat

SEQ ID NO: 778055 - DNA, 100 bp, Homo sapiens
gggcggcatccctggagaatctgctggaagacccagaaggcgtgaaaagatttaggggaaacagatggccaagcctcggggggcagtgattctggggact

SEQ ID NO: 778056 - DNA, 100 bp, Homo sapiens
tgtacttcaggacaacaaatttcgcctgcttactcagatgtctgcaggaaaacagtatttagaacatgcatctaagcgtctgcttctgcgctttgcctgg

SEQ ID NO: 778057 - DNA, 82 bp, Homo sapiens
ggactgcagccgcgagctcctggaggcggcgggatggaggcggcggccggctgaccccgcactacatctacccaccagccat

SEQ ID NO: 778058 - DNA, 82 bp, Homo sapiens
tgatgtttgtggaatgaactgcttttgggaagcggcttttagtttctgctgaaaacttgcaaaagaacctagatcagatgaa

SEQ ID NO: 778059 - DNA, 83 bp, Homo sapiens
cattgactggaaagcaatgtgtcaaccgcattattactgaaaagaaccaaaaacttttgctagaaaatcagcttttacgagag

SEQ ID NO: 778060 - DNA, 100 bp, Homo sapiens
ttcagtgatcttacatcgaggactgtgcatctttatgataattggatcaaagatgctgatctccgcaaatgacttcattgccaagaagagaagaaaatgc

SEQ ID NO: 778061 - DNA, 96 bp, Homo sapiens
gtgactatgaaaggcttatatttccaacagagttccacagatgaagaaataacatttgtatttcaagaaaaggaggaggagaacggggctgaggag

SEQ ID NO: 778062 - DNA, 101 bp, Homo sapiens
cttggttaaaacctgacacttttaacaggttcaaatggtgaaagacgatgacccctcctggaagcccacttttatcgtgaaacctgatggtggttgtcagg

SEQ ID NO: 778063 - DNA, 73 bp, Homo sapiens
ggagttccgatcgacccggtaccaagaaggggagtgcccgcggcaggatgaaacaggcgcctatttaatcgac

SEQ ID NO: 778064 - DNA, 75 bp, Homo sapiens
aattatcaacaccaaaaagctttctgctaggggtatattacagctaatactgacacagaagaacagagttttcca

SEQ ID NO: 778065 - DNA, 80 bp, Homo sapiens
gatgtgatgttggagaactacagaaacctggtctccctagctgcagaaccttggcctgaaaatgctacattatatcagca

SEQ ID NO: 778066 - DNA, 100 bp, Homo sapiens
ctcagtttgcacaagggaggcgacagagacagcagcagatgccagcacgagccgccgcttcacgccgccttccaccgcgctgagcccaggcaagatgagc

SEQ ID NO: 778067 - DNA, 50 bp, Homo sapiens
tggacggtcactcagcctatggagtaatagctcttcaagtctgcaataaa

SEQ ID NO: 778068 - DNA, 101 bp, Homo sapiens
ttcaggaattctcctgccaccgcgtggtgcttgccgcagccagcaactatttcagcaacatggccaacgccctggccagcgccacttgcgagcgctgcaag

SEQ ID NO: 778069 - DNA, 100 bp, Homo sapiens
tcaagaaccatttccaaacaaggacatggagggaaggcttcctaagcgaagaaagctaccgtgaatttactgggtgaagaaaagaagagcacctaaacca

SEQ ID NO: 778070 - DNA, 100 bp, Homo sapiens
gttcaacagtgttgtgccagcctacaggaggaaaggccagactcacagaaggccatgggtatcaatgatctgctgtcctttgatttcatggatgccccac

SEQ ID NO: 778071 - DNA, 87 bp, Homo sapiens
tttgtggaatattcattgtactgaatattacccttgtgcttgccgcaaagagaagatgctctatgaggaggagacacctaagtccca

SEQ ID NO: 778072 - DNA, 100 bp, Homo sapiens
atcgtggcaggttcaaatggctggtataattataggcaccagtcagaaattggctttggaaaaatggaaacctacatcaaattggaaaagcttggagagg

SEQ ID NO: 778073 - DNA, 90 bp, Homo sapiens
tttggctgactggggagtcggcaggcggcaggaataagttcccctgtcagtggaggatgggatacttcaacctgggggttgaaatcaaac

SEQ ID NO: 778074 - DNA, 83 bp, Homo sapiens
ctcagtttgtgcaggacaccgacatggaacagggactcactggggaaggtagaagatagcaccatgccgattcgtcgaactgt

SEQ ID NO: 778075 - DNA, 100 bp, Homo sapiens
gctctctccgctcgattttgtcaccgttatgtgggaagcgaatccaacaaaaagccttggcatccacgggaggaagaagtgttcaggcagcatgtgactg

SEQ ID NO: 778076 - DNA, 100 bp, Homo sapiens
atgtcatctccctgctggagcaagaggcagagctgtgggcggtggagtctagacttccccaaggcgtgtacccaggtcctggatggtcgccggcccacag

SEQ ID NO: 778077 - DNA, 115 bp, Homo sapiens
tgcagctctgcggggcgcaggaggcggtgcacagcgccaagatgccttcaattaagttgcagagttctgatggagagatatttgaagttgatgtggaaattgccaaacaatctgt

SEQ ID NO: 778078 - DNA, 101 bp, Homo sapiens
accgggcctcaaaatggccacacgcgtacccccgtagcggaaaaacctgcaccacctcgtgagcgatgacgtctgcctgaaggtggtggagctctacctga

SEQ ID NO: 778079 - DNA, 90 bp, Homo sapiens
ttcttgatgatctgttatatgcagtaggaggccatgatggatcctcttatctcaatagtgttgaaagggtttgtggatatagaaaccccc

SEQ ID NO: 778080 - DNA, 79 bp, Homo sapiens
gcaagtttaatcagacctgctcacacttcagaatagagaagcactggatgtgtgtgagaagtggggagaaatgccacca

SEQ ID NO: 778081 - DNA, 73 bp, Homo sapiens
ttccagggagggaacaaagcccacagcaccgtgccggtggtggtgtgcacattgagccccggtatagacagtt

SEQ ID NO: 778082 - DNA, 80 bp, Homo sapiens
agaacgagtccctcttcactttcctcggcaagaaatgtgtgcagaaaaagtcctacctggagcgaagcgttaaggaagct

SEQ ID NO: 778083 - DNA, 89 bp, Homo sapiens
ctgagatctgatgatatttacaaccaggtgggtctggtgagctggggtctttacaacccctgccttggctctgctgacaaaaactcccg

SEQ ID NO: 778084 - DNA, 75 bp, Homo sapiens
gtaatggtgcaaagcctgaagccactgcagaacaaattagacttgcacagatgatttcggaccataatgatgctg

SEQ ID NO: 778085 - DNA, 78 bp, Homo sapiens
tggactctacactcttcatgttaccattgatggcattgaaatcgcacacggaccctgactactcggctgcctatgtcg

SEQ ID NO: 778086 - DNA, 75 bp, Homo sapiens
ccaacatgctgctggagctcgcaaggtgccctggcctccaagagcaagaagccatgtgttcagtacctgcccccc

SEQ ID NO: 778087 - DNA, 88 bp, Homo sapiens
gaccccgactgccgctggtgcccggccccggactgcggactccagcgggaggaagaagaggcctttgccagcagtcagagcagccaag

SEQ ID NO: 778088 - DNA, 103 bp, Homo sapiens
aaaacacttcatagaaaactatccaagaatgtgacttcctggagtagagtcttttttcactgagggtactaggttttgacaagcttgcatcatgcgtgagtat

SEQ ID NO: 778089 - DNA, 100 bp, Homo sapiens
gtcttgcagtttgcagggcctggagcccaacttgaggtgtggatgaggtcaccattgtcaacattttgaccaaccgcagcaatgcacagagacaggatat

SEQ ID NO: 778090 - DNA, 101 bp, Homo sapiens
ataaaccagtgggtcaaaggacagacagaaggaatgtcgttgtctgctgggtcttcccctcttcattcccccaagattactccacatacttctcctgctcc

SEQ ID NO: 778091 - DNA, 100 bp, Homo sapiens
ccttaacgcctttcaccattaagaggaaagcgatggaggagctgagcgctgatgaggtgagctacatggaaatttactgtgaaagagtacgagatttgct

SEQ ID NO: 778092 - DNA, 97 bp, Homo sapiens
ctcaagactggtccacggagtgtatgaccacaaacagccatcaagatcactgtgtccactactatgatcttcgtaacactaaacagccaatcatggt

SEQ ID NO: 778093 - DNA, 75 bp, Homo sapiens
caccgccatggcaggcatcaaagatatttcagttgaaggaagaaatagctcttctcctaagatggaatctgtggt

SEQ ID NO: 778094 - DNA, 100 bp, Homo sapiens
ctatgcctgtgcgaactgccaagtccctcgtcactgtgctaggtgacctcacaaagttcggccgtggggatgcctcctccccagccccggccacaacctt

SEQ ID NO: 778095 - DNA, 90 bp, Homo sapiens
gcacttccgagccgcccggccacccttcgtcatctgcgtgaagctggtcccacgtacctcggagatttatgtccaccgaagtggtcgaac

SEQ ID NO: 778096 - DNA, 101 bp, Homo sapiens
tcacagtcaccgctgtcattgtgggtcttcctccttcccttacggaattacatcttgatggcaacaaaatcagcagagttgatgcagctagcctgaaagga

SEQ ID NO: 778097 - DNA, 98 bp, Homo sapiens
actcggggactctgccttttaccgatgtatcggcaagcagtgtaaacggaggacttggggaaaaaggaccacatagtccatcgaagaagagtccttgg

SEQ ID NO: 778098 - DNA, 90 bp, Homo sapiens
tgaagcagaagctcttcaccgaggtggaggggacctgcacagggaagcgggcagggctgggcagcggcctgagtctcagcggacttgtcc

SEQ ID NO: 778099 - DNA, 101 bp, Homo sapiens
ctccaacgaccagaatattctacccaaatgtcaggaccaagattttctaccaaaatatcagcttattaatgtggctttgggtaaatgcatttccattgaaa

SEQ ID NO: 778100 - DNA, 90 bp, Homo sapiens
tggtcagtgtggcaaccagatcggtgccaaggaatagccaggccagaagaaggaaggcctgtggtgagtgggacaggaaatgacatcacc

SEQ ID NO: 778101 - DNA, 74 bp, Homo sapiens
cgacacttacatgccatggccttctacgttgtgaaaatggtaaagatgagcccagcagctacacatgtacaact

SEQ ID NO: 778102 - DNA, 74 bp, Homo sapiens
ttcgaaagcagctaggccaggaccctttctttgcagcaggtggggaatcagctctggctcccagtgtatttaaa

SEQ ID NO: 778103 - DNA, 128 bp, Homo sapiens
tagtaagaaaacaaaaactgatgaccaagagaatgtgtcagccgatgcaccgagtccagcccaggaaaatggagaggtatcttggagatggccgcttccatctggagtctgtcatgattgccaacccc

SEQ ID NO: 778104 - DNA, 83 bp, Homo sapiens
ttcccctcggcactaggcagcggaggagcccgaccgacccggcgccatgtcagaaccggctggggatgtccgtcagaacccat

SEQ ID NO: 778105 - DNA, 75 bp, Homo sapiens
gaggcagcctgggggccacagctgcttcagttttgaagtacaggaagaaggttatctggcaaaaatcctggtccc

SEQ ID NO: 778106 - DNA, 74 bp, Homo sapiens
taccatctaaaatacgaaggtttctggctggatgtgaatttcttcggagtaagaaatcctcagaggaaattacc

SEQ ID NO: 778107 - DNA, 75 bp, Homo sapiens
ggcgtccaacatggaccgggagatgatcctggcggattttcaggtgctggcccaggccctgactccctgaagaga

SEQ ID NO: 778108 - DNA, 100 bp, Homo sapiens
ccgcggggcagttcgggccggctgtcctggcgcgttgaaaacgaggcccactgcgactttgtgaagctgcgggagatgctgattcgggtcaacatggagg

SEQ ID NO: 778109 - DNA, 90 bp, Homo sapiens
attgtgggcaagcaccattgttgcatcagcctcttccttggttgtgccactactgagttctccagttctctttcagcgattgttcagcat

SEQ ID NO: 778110 - DNA, 100 bp, Homo sapiens
caggagctattcttgaagtttgtggatgaaaattgggaaggttccctcaagtccaaggtgggtcatgataactgggtacgtggagttctgttccattctg

SEQ ID NO: 778111 - DNA, 102 bp, Homo sapiens
tgcgcctcggcccgctcttctccctgcttaacgagaaccataggggcatatgatattttcctgaatgcaaaagagcaaaacattgtgtttaatgctgaaacc

SEQ ID NO: 778112 - DNA, 98 bp, Homo sapiens
gcaggcgggggtgctgcagaggacacgaggcggcgggctggagacatggaccgcggcgagcaagcatcaacaacagcaacttgtgattggcggtgacc

SEQ ID NO: 778113 - DNA, 100 bp, Homo sapiens
cagcactttgtggagaaagtcgtcttccacttgcacgaaagctttcctaggccaaaaagaggcatgctggaagatggactgccctccaatggtgtgcccc

SEQ ID NO: 778114 - DNA, 73 bp, Homo sapiens
tacccggagaagcaggagccctactcggcagagctgaagaagcaggtggagagtgccgagctgaagaaccagc

SEQ ID NO: 778115 - DNA, 111 bp, Homo sapiens
agaaattccccccgaagaagactcccccacatctgggtactccaaagattcaggtttactcacgtcatccagcagagaatggaaagtcaaatttcctgaattgctatgtgt

SEQ ID NO: 778116 - DNA, 90 bp, Homo sapiens
gcgggcttccctgtcgccgttcgctgcgctgccggcatcctgaggttagcattacacttctcccagtggagcccatgacttctgatcagg

SEQ ID NO: 778117 - DNA, 50 bp, Homo sapiens
cttcactcctcttcacttcttcagggtgagcccctccagactccgaatag

SEQ ID NO: 778118 - DNA, 100 bp, Homo sapiens
tcccgcgtggctgagtgggattccaccgagaagatcggggacctcttcgtggcctcgagtccacctgcaaagaatcacatcaagcaactttcttcattat

SEQ ID NO: 778119 - DNA, 89 bp, Homo sapiens
gatcgtattacacttttgcgaggaaatcatgagagtagacagataacacaggtctatggattttatggatcagtgaatgcttgtgaaaa

SEQ ID NO: 778120 - DNA, 98 bp, Homo sapiens
tcatggtcccagaaacgtcactatcaagaagatgatggatgcaataaaaggaacaatgacagaaatatacaacgatctttctaaaaacactactggaa

SEQ ID NO: 778121 - DNA, 75 bp, Homo sapiens
gcagtccttggacttcgtaaagatcatcaccatcctgaacgcggcaggcaaagatggcaaagagcgcttgggcgg

SEQ ID NO: 778122 - DNA, 100 bp, Homo sapiens
ttttgcattgtttgtttgaaattgcattgacgactgcttgctgatgaccgtatggcactggtgtcaggcatcagcttagatccagaagcagcgattggtg

SEQ ID NO: 778123 - DNA, 73 bp, Homo sapiens
ttgtgtggtcgcgtctcggaaaccggtagcgcttgcagcatgggagatgtcctttgcttctcagatgtaaatg

SEQ ID NO: 778124 - DNA, 87 bp, Homo sapiens
gggattaatttcaacgagaaggcgatccataaggagccactcccatggttcaagctttgactacaaccagaattcagaggcaggcag

SEQ ID NO: 778125 - DNA, 100 bp, Homo sapiens
tgtgcgcgcgaaggagcggaagaatggcagtgctcaaactcaccgaccagagaccatcatgcagacatcagagactgggtcggacacaggctcgacagtg

SEQ ID NO: 778126 - DNA, 100 bp, Homo sapiens
gcccaccgacatggcccggaggcagcagaagttggtgtacatgggttttgatgcactcgtggccgaagctgcgctgagagtgttcagaggcaacgtccag

SEQ ID NO: 778127 - DNA, 50 bp, Homo sapiens
ctcgcggagcccgcgcgccgagccccacgctgtctgtccccagaccccag

SEQ ID NO: 778128 - DNA, 90 bp, Homo sapiens
tggacggatcaccaagcgagtgacacgagagctcaaggacaggcctgccaggatggaggggcatgctgggatggaggggcatgctgaaat

SEQ ID NO: 778129 - DNA, 90 bp, Homo sapiens
cacgtgtttgcggttcagccctttgatgaccgcagcagaacacaccacagccatcagcactggaatgcaaagaccagaacaaacagaagg

SEQ ID NO: 778130 - DNA, 82 bp, Homo sapiens
cctggctcttgccctcatcctggttctggaatcctcagttcaaggtggaaattctttgtgagcacccacgtttccgagtgtt

SEQ ID NO: 778131 - DNA, 90 bp, Homo sapiens
aaaattgaaggaactttctgtatctgaatgttatagaatcactgatgatggaattcaggcagtccagaacgtgggcaacatggacacgcc

SEQ ID NO: 778132 - DNA, 89 bp, Homo sapiens
agagtgtgtatcagcagagaccaccgaagactgcatcgccaagatcatgctcagagagtggcaacagtgtgaaaagactgaaaccggac

SEQ ID NO: 778133 - DNA, 100 bp, Homo sapiens
ccatttgtatttattcctgaagatgacccattatttccacctattgaattcagaatctgataattcagataacaacacaatctttgtgcaaggacttggg

SEQ ID NO: 778134 - DNA, 95 bp, Homo sapiens
gaaccattgaagcttgagagaaaagcccccaaaagcagctattcagagtgcagcagctgccccgagccccgtgcttggcaacattccccccaacg

SEQ ID NO: 778135 - DNA, 100 bp, Homo sapiens
gcggtcgcggggcccgcgcccggagctggcgccaggggccacctacagatgctcctgcagtggacacagcagaacaagtctatatctcttccctggcact

SEQ ID NO: 778136 - DNA, 100 bp, Homo sapiens
catcccggccacgcgggtggaggtgtccgtgtcctgcaggacttctgcacggacctggccgtctccagtgccaacttcattcccacggtcactgccatct

SEQ ID NO: 778137 - DNA, 100 bp, Homo sapiens
agtcccagccttctgttccagccaagctgaggccccagcggatacaccagtgggaatgtaagacggacttagatattgcatacaaatttggaaaaactgt

SEQ ID NO: 778138 - DNA, 90 bp, Homo sapiens
tgaggcagcggcaggctcaggtgcagccgctggtaggtgagctcgtgaaacaatatgaagaggagaaaatagccttttaaggaaattggc

SEQ ID NO: 778139 - DNA, 50 bp, Homo sapiens
aagaatggatccactatagcagtgctgctacccccgtatgatgatgccac

SEQ ID NO: 778140 - DNA, 90 bp, Homo sapiens
ggaaataggatttaaccgctctctgcctcccagccttcctctccggttctgggtgaacatcctgaagaacccccagtttgtctttgacat

SEQ ID NO: 778141 - DNA, 139 bp, Homo sapiens
atgggcgccccgtgaggacccagtccttctccagggcattcgagtctccattgcacaatggccagccctggaaatagtagaacacttggaggaaagcactgcctttcgctatctggcccagtactattttaagtgcaaa

SEQ ID NO: 778142 - DNA, 100 bp, Homo sapiens
cggcaaccgcgagaaggcccagcgcttcctgcagaaggccgagaagctctacccactgccctcggcccgcggtgggatagtaacatctttttgagggaag

SEQ ID NO: 778143 - DNA, 90 bp, Homo sapiens
tccccaggggagttctctgtgtctgtgaagtcagcccaagactaccccgtcggtcattctgttcctgccgtcctgtgaggagccccaagc

SEQ ID NO: 778144 - DNA, 76 bp, Homo sapiens
tattaaatgtagtgttctcaattctgaggagattcattatgtcattaaacaggatcagcggcaaactgaagccatc

SEQ ID NO: 778145 - DNA, 85 bp, Homo sapiens
ctgctgtagtcacaggagctgtagagaggaccccggtacatctgaaagccgggaaatgatcgccggggagtggcctgtacagcaa

SEQ ID NO: 778146 - DNA, 100 bp, Homo sapiens
gctagtgttttcttatttagccggagtgagaagcaagaaggccctggacacagcaatatctctgggctttcacaggacacattcagctaacgtattttag

SEQ ID NO: 778147 - DNA, 75 bp, Homo sapiens
gggactgcggcggcgccggcctccggggagaaacggatgtggggcaatcaagttggggatgaaggagcaaaagcc

SEQ ID NO: 778148 - DNA, 75 bp, Homo sapiens
ggagtgtctgaaggactcgccccgcttcagaacatctgctcaaattaatgaccatgggggatatgaagaccccag

SEQ ID NO: 778149 - DNA, 101 bp, Homo sapiens
aggaggggaaatctggcacaacggctgggagaggaaacttgatgcttctgggccaccatttgccagggcctcgctcgagagattatggagaagtctggcga

SEQ ID NO: 778150 - DNA, 100 bp, Homo sapiens
ttctgaccatttctcatgaacagaaacacctaggaagggagaactgggtgtttctgtggcctgggactggttagcaccaacaagtcctgctcgatgccac

SEQ ID NO: 778151 - DNA, 75 bp, Homo sapiens
tcctcgtcagcactgactttcagctatggaatcggtaacagttgacaaatgggaacctttgttgaacaacttggg

SEQ ID NO: 778152 - DNA, 132 bp, Homo sapiens
agaaagcagaagccactggagaaaaacggccaagaggcagacctaggaaatggccatgtgacaaatctgcagcccctttgccatgattaaaggtctcctgaggccctgaccagaagcaaacgctagtgccag

SEQ ID NO: 778153 - DNA, 100 bp, Homo sapiens
gtccctgaagagggaagacacgcggaaacaggatgagcaattcttaggttttggctcagatgaagaagtcagagtgcgaagtcccacaaggtctccttca

SEQ ID NO: 778154 - DNA, 80 bp, Homo sapiens
cgcgggctctgaggatgagctggaggaggggggaacccaccaagaccaacctggtcacattcttccataccgacctcagc

SEQ ID NO: 778155 - DNA, 75 bp, Homo sapiens
caccgacctaaattaaatgaaggcttctgacaaggcttctaaagagcaaccaccccgaggaccttcaggctgcaa

SEQ ID NO: 778156 - DNA, 98 bp, Homo sapiens
gctgggcgctgggttcgcggcgcgccctcctgctgcctccccggagctcccgggccagtaggtacagcagggaagaactggaaactcagagaaagaaa

SEQ ID NO: 778157 - DNA, 90 bp, Homo sapiens
atcctccaaaaccagtcatgaccactagacccacagctgttaaagcaacagagctgccatcagtcatgctcttaaacggggactgcccag

SEQ ID NO: 778158 - DNA, 75 bp, Homo sapiens
cagggatgctgagcctgcacaagtggaagaaactggcgatggaatatgagaggagccctctggaaagaaaaggac

SEQ ID NO: 778159 - DNA, 100 bp, Homo sapiens
ctaacagattccattcagagagcaggtgtccttaagtttgctcgcttggtcaagtcctacgaagcccaggatcctgagatcgccagcctgtcaggcaagc

SEQ ID NO: 778160 - DNA, 100 bp, Homo sapiens
cgggtacaacaagctctgtgattggtggtcgcttggggtgatcatgtatgagatgctcatcggttaatacaaaagctgaaccagcaaacaatattacaag

SEQ ID NO: 778161 - DNA, 100 bp, Homo sapiens
gactaaccatctgcaatactagaagccatggctgagactatgaatcaaagttgagaccaagaaattatttctgaaaaaggatatggaaaaccttacaaaa

SEQ ID NO: 778162 - DNA, 100 bp, Homo sapiens
ggatggtcgtgcggaactgctccagtttcctgatcaagaggaataagcagacctacagcactctccagtgatccacaagctcagaaatacatcgcggaaa

SEQ ID NO: 778163 - DNA, 100 bp, Homo sapiens
ctatgacctatctgacaagagcatcaaccctctgcctcctgagtagctgggactgccattgtgtaccacagtgcccagctgagggatctgtgccttaagt

SEQ ID NO: 778164 - DNA, 51 bp, Homo sapiens
aagggccttactccttcacagatcggtgattgaaatctctgaatatcgaac

SEQ ID NO: 778165 - DNA, 82 bp, Homo sapiens
aagagctctcctccttcttcctcaactatctcgctgacacgcagcaagagtgagccatggagctacgtgtggggaacaagta

SEQ ID NO: 778166 - DNA, 75 bp, Homo sapiens
ttgtggaaccgacatgacccactctttggtttgtccagagacagtgagcaggaacctggagcaagagatttcttt

SEQ ID NO: 778167 - DNA, 98 bp, Homo sapiens
tggtgtatagagaacaaaaaacaccacagtactatcgtctatcattggatgaagtggctccggagatgatgctccagaccttgtatgattacttctgg

SEQ ID NO: 778168 - DNA, 100 bp, Homo sapiens
aacgagtttcggacagtgccattatccacaccagcatgggagacattcacaccaaactttttcctgttgatgatgcggctgactaagcctactttattca

SEQ ID NO: 778169 - DNA, 90 bp, Homo sapiens
atgaagaatatactagaacatcccagggaaatgctccaaggctggaattttctacgacttcagtgattactgaatgtctgataagttcaa

SEQ ID NO: 778170 - DNA, 75 bp, Homo sapiens
cggaagttagacccacggcgtgaaggggcagaaattcggaatgcctcggctggggtggagcgcctcttgctgggg

SEQ ID NO: 778171 - DNA, 100 bp, Homo sapiens
agacgcctcacttaggacaagagcctgcagacagggggatttgcctgggaaggagaagtagaaaacaacgtgtacagccaggctacaggggtggtccccc

SEQ ID NO: 778172 - DNA, 102 bp, Homo sapiens
catcaaatgcagaattcacaagatccaatcccttgtccttaaaagtggaaaagcgagattgtctttgaccatttgctatggacattgtcagggatggtgcag

SEQ ID NO: 778173 - DNA, 90 bp, Homo sapiens
ctggcggccatggtgttgctgctgtactccttctccggtggctattatcatggaaaactaatttttcccagagaatttcctttcaaacct

SEQ ID NO: 778174 - DNA, 100 bp, Homo sapiens
attgcagttgcgtgttgttcagaaagatggcccactgcgtgaccttggttcagctgtccatttcctgtgaccatctcattgacaaggacatcggctccaa

SEQ ID NO: 778175 - DNA, 83 bp, Homo sapiens
gcttaatccgtctccaccaccagatctttctccgtggattcctctgctaagaccgctggaagaagaagaattttcagttcttg

SEQ ID NO: 778176 - DNA, 100 bp, Homo sapiens
gggcacagggcaaggcggcggacggctgcgtcgcccgaggcgaggaggagcgctggcgtgtacccgtgtaatgtggacaccacctctccgtgaaagcttc

SEQ ID NO: 778177 - DNA, 90 bp, Homo sapiens
tacgtcatcttcgacagagcccagaagagggtgggcttcgcagcgagcccctgtgcagaaaagcttcactggcctgagcaagaacttgct

SEQ ID NO: 778178 - DNA, 100 bp, Homo sapiens
gtgtatcgacaggacagaaagagtgtgcagcggattaaagctaaagacatagttcctggtgatattgtagaaattgctgaaatttctgaataaattggca

SEQ ID NO: 778179 - DNA, 100 bp, Homo sapiens
tcgggaagcctcatctagcccagaggatcggaatgacagatatatgaaacacaggcctccttgtcaggcccctacttaacctccgtgatggggaaagcgg

SEQ ID NO: 778180 - DNA, 94 bp, Homo sapiens
gatctatctgtggaacaacccgtgcagttcagatcttttgacaggaaaatgtttataggaggccttagctgggacactacaaagaaagatctga

SEQ ID NO: 778181 - DNA, 100 bp, Homo sapiens
ggcggagaaggatgacaccggagtttgacgaagaggtggtttttgaggaagatgatccctatgatcttgaagatgtttctgcacagaaatgagggaaata

SEQ ID NO: 778182 - DNA, 51 bp, Homo sapiens
gtctctgctacgggatgccaaagactgtgagaacattctctttgaagggaa

SEQ ID NO: 778183 - DNA, 98 bp, Homo sapiens
gtgtgcattggcctaagtgagatcatgaagtccaccagccgggatgccgtggagctggacaacgtgaccgggcttctcagccagtccgacagcaagtc

SEQ ID NO: 778184 - DNA, 101 bp, Homo sapiens
gctttgtctccttcgacttggagtctttgtccaggacggaatgctccaaaatgggaagaagtttgattcatccagagacagaaacaaacctttcaagttca

SEQ ID NO: 778185 - DNA, 83 bp, Homo sapiens
gccactgtcttctcttcctcctccaccgagtcgtgctctcgccccaacccgcgcgccaggctggacggcagtctggaaacgac

SEQ ID NO: 778186 - DNA, 100 bp, Homo sapiens
ctggccaaggatatgggagcaaccaccatggaccagaagtctctctgggcaggacctgatcccaaccttgaagaaagtcctaaaagaaaaaatattacat

SEQ ID NO: 778187 - DNA, 90 bp, Homo sapiens
cccgccgccacccggcccggctgtggctgaggagccgctgcaccgaccgtagttaaaccagagagcaatgacaaagaaacagaagctgcg

SEQ ID NO: 778188 - DNA, 51 bp, Homo sapiens
aagcagcacgtgctcatccacactcatagagacggggtttcaccatgttag

SEQ ID NO: 778189 - DNA, 100 bp, Homo sapiens
tcagcccaggacgccaagcaagcaggacaaggtgttgtgttggagcgctccatcttcagtgactttgtgttcctggaggcgatgtacaaccagggattca

SEQ ID NO: 778190 - DNA, 86 bp, Homo sapiens
tggaccgacgtggtggaggacaagatctaccgcgggaagctgctggacaacggaggactgtacttgatgaaaatgccaacacacta

SEQ ID NO: 778191 - DNA, 90 bp, Homo sapiens
gagcagtacgcttgggagtcctcagcagggggatcattcacagtgaggacagacacaggtgaacggctgggacatgaccatggtcacaca

SEQ ID NO: 778192 - DNA, 100 bp, Homo sapiens
cagcgtggattttaaccgaggcacggacaacatcaccgtgaggcagggggacacagccatcctcaggtatgccattgcattggccttaagggaaaagcag

SEQ ID NO: 778193 - DNA, 76 bp, Homo sapiens
atgtttgaggtggccagagatcacctacaccaaacagattttgtggaagtataatactttgtcattatgagatgtc

SEQ ID NO: 778194 - DNA, 75 bp, Homo sapiens
cagctttgcttggacctgaccactacagtccagaagttgattatggaagattcccacaagagtaccacgtcagag

SEQ ID NO: 778195 - DNA, 75 bp, Homo sapiens
gccatcgttgctgccttcttcgtcaagggctgtgatgaaaatcagttgagatcatctatgtgaaagcacttaacc

SEQ ID NO: 778196 - DNA, 89 bp, Homo sapiens
ggccagtcgcctccaggccaagagggatccttcacccgtgtctgctcatgatggagcagtccaagaagtcctccctcatggtggcccgc

SEQ ID NO: 778197 - DNA, 100 bp, Homo sapiens
acccgggacgcctgcaagacccgccccagggagctgcggctcatctgtatctacttctccaacacccactttttcaaggaagaattgtatttgcaacggg

SEQ ID NO: 778198 - DNA, 100 bp, Homo sapiens
gcttgcagtaaccttatgcctagcaacatgccaatctccaaagacaacaggccctccctctgccctcccgtctgtgagctccctgcccagcaccacctcc

SEQ ID NO: 778199 - DNA, 50 bp, Homo sapiens
gaagatgtgtctgcggctcttcagtacaaaattggacagctgtacatgat

SEQ ID NO: 778200 - DNA, 90 bp, Homo sapiens
gcggcagcaggtccagctgggattgatgccaagaaggaacagctagcagatgcccggagagacctgaaaagtgctaaggctgatgccaag

SEQ ID NO: 778201 - DNA, 101 bp, Homo sapiens
caggaaccagctcgggggccaactctgaggagtccactgcagcagacccagtcatggcagcctccagcatcagttcaccatggggaaagcatgtgttcaaa

SEQ ID NO: 778202 - DNA, 103 bp, Homo sapiens
gcacgagcagatcctggtcctcgatccgcccacagacctcaaattcaaagcctgaaaactggttttttaaaatggaagccagattatgacagtgccgcttctg

SEQ ID NO: 778203 - DNA, 100 bp, Homo sapiens
ggagaccttacgacgggttggggatggcgtgcagcgcaaccacgagacggccttccaaggtctcgtctacagaggactggtctttcaatagcaagttttc

SEQ ID NO: 778204 - DNA, 100 bp, Homo sapiens
ccatctttaccggctgtggctcagcatggtcagtgccgtttaacctttattgtggtggagtccaccccgctgtggatcctgatggtgaacatgccaggag

SEQ ID NO: 778205 - DNA, 86 bp, Homo sapiens
atggtttcaatcaagtccccagagaacacatttgtcttctgagctgctggcagttttgaggaaacacaaagatggtgcagacccag

SEQ ID NO: 778206 - DNA, 50 bp, Homo sapiens
gcaggcatcatccgctatgcaattggggtggtcgtcggttttctgagggt

SEQ ID NO: 778207 - DNA, 100 bp, Homo sapiens
ccgctgttcccaggatggtgatccgtgtatatattgcatcttcctctggctctacagcggtttggcttgagcaacaagtttgatactgaatttccctccg

SEQ ID NO: 778208 - DNA, 90 bp, Homo sapiens
aggaggagaggtgctgtgctgtgtatgaagaggcagtgaagactctgccaacagataagccaatggacacgtcagtgttatctgaagaag

SEQ ID NO: 778209 - DNA, 90 bp, Homo sapiens
gcctcctgagtagctggtattacagccaagacaatgcaaactccagtgaacattcccgtgcctgtgctccggctgccccggggccctgat

SEQ ID NO: 778210 - DNA, 100 bp, Homo sapiens
gccatttaggagctctgctcaaagccagacggtcgcaatggaagaagagatcgccgcgctggtcattgacaatggctccggcatgtgcaaagctggtttt

SEQ ID NO: 778211 - DNA, 82 bp, Homo sapiens
caaagacgctaaacgtgccctactctgccccgggggagagtatttttcagtgctgtacaagcgtcttgaattactctggtag

SEQ ID NO: 778212 - DNA, 90 bp, Homo sapiens
aaagaaaagaaaacttgaaactaatcctgatattaagccatcaaatgtggaacctatggaaaaggaaccattggcactggcaagtggggc

SEQ ID NO: 778213 - DNA, 100 bp, Homo sapiens
aaagacttagcttttaaattaaaaaggaagctattcaccattgaggctcttacagcactactttcagatgatagcaagtttggattcattgtaatagatg

SEQ ID NO: 778214 - DNA, 100 bp, Homo sapiens
ctgggatccgtatgtccattaaacttcatcaggctgttaatgccagtgaaaaaacagttgtggaagcgttatttcagagggattcacttgttcgacaaag

SEQ ID NO: 778215 - DNA, 131 bp, Homo sapiens
ctccagccacctaattactacgaggtaatggagtttgatcccttagctcctgctgtcactacagagtttaccttatgggtgggaggaagcttacacagcagatggaatcaagtacttcatcaagtaagtac

SEQ ID NO: 778216 - DNA, 80 bp, Homo sapiens
ttggtcccggcggagatccagtgggaagagccggcggctgcccgggcaataacaagcctttgtattcatttgaagataat

SEQ ID NO: 778217 - DNA, 74 bp, Homo sapiens
agggacaaaaagcaatgcaagagtcgctttgttacacctttcaagtgtctcggcaacgcggtaaaaatattgct

SEQ ID NO: 778218 - DNA, 83 bp, Homo sapiens
acgccagggcctgggactaccaggaatctgcaggagtctgaagaggaggaagtcccccaggagtcctgggatgaaggttattc

SEQ ID NO: 778219 - DNA, 83 bp, Homo sapiens
cttcacgccgcagagccgctgcagtacctggagtagaacagaaaaattattatgtctgtgttcccttgggactcattggaaat

SEQ ID NO: 778220 - DNA, 75 bp, Homo sapiens
gcggtcacctacccccagcaccacctccagcccctgcgcctcgatggacggggagtccgaggaggagcaggagtc

SEQ ID NO: 778221 - DNA, 100 bp, Homo sapiens
gagaggctgcggctgaaacagcaagaactgcttcggcaggctctcaccacacacttgttcatgggcgcagcaaagaagagggatccacagagctggagcc

SEQ ID NO: 778222 - DNA, 96 bp, Homo sapiens
gtgaaaggcactatcgagattggaaccacagaagtctcaaatatctatcagtgtagaagagtgggaagacaccaaagactccaaagaacaagggca

SEQ ID NO: 778223 - DNA, 100 bp, Homo sapiens
acagcatactgaagtggtttgcaacatccttcttctggataacactgtacaagctttcaaagtcaatatatgaatgccacaatacgaaggattgaccagt

SEQ ID NO: 778224 - DNA, 75 bp, Homo sapiens
cctacttgcagcatattacctatcaggagaggagaccaatgatgcgagctcagagtcaatagcatccttctctaa

SEQ ID NO: 778225 - DNA, 100 bp, Homo sapiens
tacccgagtgtgcgaagctagccaagtagtttatgccaacgtgacttcattcatacagatgaaccaaggatcgggatagcagtataaaattagaatcaag

SEQ ID NO: 778226 - DNA, 90 bp, Homo sapiens
aattcaacaaatataagtatacagcatctgtcctcatagcagatgaagattatggaagagattcgggccctcccactaagaaaattcgat

SEQ ID NO: 778227 - DNA, 100 bp, Homo sapiens
gcccgagagctcgcccgtggtcgtccgcaccgacgaggatgaggagcccaaggtgggcatcaagaccatcaaggtgtactgccagcgcatgcaggaggag

SEQ ID NO: 778228 - DNA, 90 bp, Homo sapiens
agactcctgaccctcagaatgatgctgtgccacttttcctgaggcttctccattcaccccatcagaatgtctgtgagcaagcagtgtggg

SEQ ID NO: 778229 - DNA, 83 bp, Homo sapiens
gtatgattaggccacaatcttcaatgagtaaacatattcctggctgggttacgacccctacaaccctgagctgcccaagcccc

SEQ ID NO: 778230 - DNA, 50 bp, Homo sapiens
ctttgacctttttgaagcctttgcaaaagagtacatcgatgcccaccctg

SEQ ID NO: 778231 - DNA, 97 bp, Homo sapiens
ccgcccaacctggtccgctgcctcttcggccatggaagctgccggcagccctgcggctacggagacaggtcccccccgcctccagccagcctgtgca

SEQ ID NO: 778232 - DNA, 83 bp, Homo sapiens
gtaaactaagcttcaagaggaaaagatttcttatcaaacttcatccagaggttcatgtaatagcagtgagtgcccgcctccag

SEQ ID NO: 778233 - DNA, 100 bp, Homo sapiens
agcagaaagtgaaaccctggtgctccagacaaagatcttagtcgggactagccggccaaggatgaagcctcacttcaggcggggcctaatgggaacgtat

SEQ ID NO: 778234 - DNA, 100 bp, Homo sapiens
ggaggagcagttgtctgatgaagagaagattttgagaagagggggaaaaaggaagtttgtcctgtcctggatcagtttctttgtcatgtagccaagactg

SEQ ID NO: 778235 - DNA, 100 bp, Homo sapiens
tatcacagtatcagttaaggagcttgatttgtttttggcatactacgtgcaggagcaagccgaacaacaacgtatccttacacagagacacagatgtaca

SEQ ID NO: 778236 - DNA, 74 bp, Homo sapiens
gtggtgtttggagaggtcaccgaaggcctagatgtcttgcggcaaattgaggtctgcgcaggcatggcactaag

SEQ ID NO: 778237 - DNA, 110 bp, Homo sapiens
aaaaccttgtccaagcctgctttcaacaggacagggtgtgggccaatgtggggaagagcctgaactgcattattgctatggtggacaaactgattgaaagagatggtggc

SEQ ID NO: 778238 - DNA, 100 bp, Homo sapiens
atatagggatgtgatgttagagaactacagaaacctgatcttccttgttgctctaggtcgtaaccagcctttgaaaaaggagaaaccaaaatggaaaagc

SEQ ID NO: 778239 - DNA, 75 bp, Homo sapiens
atcaacaagatgttgtcctgtgctggggctgacaggttgcctggcagagcagtggtccggcaagaagggagacac

SEQ ID NO: 778240 - DNA, 90 bp, Homo sapiens
ggagaatcgcttgaacccaggaggcggaggtcagagagcagctctcctcgacgggagagaaagaaaagctcaaagaagaagaagcacagg

SEQ ID NO: 778241 - DNA, 82 bp, Homo sapiens
gatcaggcgtgtgtccagttctgaaagcataacccctactgtagaactaaatgcactgtgcatgaaacttggaaaaaaacca

SEQ ID NO: 778242 - DNA, 75 bp, Homo sapiens
tagtcgcgggagccacgcagaggacgccggaacaccctggaagccgagaaatggccctggccaacgtcaacattg

SEQ ID NO: 778243 - DNA, 74 bp, Homo sapiens
gtacggccaacgccaagtaggggattgcgttccctccagtcgcaggtattacatcaaataccaataacggatct

SEQ ID NO: 778244 - DNA, 82 bp, Homo sapiens
ctcaccttagccccgcgcccgaggttgcctgttcactctgatcgtagtattggaagttctggccaaggcaatcagacaagag

SEQ ID NO: 778245 - DNA, 90 bp, Homo sapiens
gggagccggggcggcccttggccgcattcccgcccgtcccgcagcggcgcgcggagccagtaagactttgaccccgacgcaggcttcagt

SEQ ID NO: 778246 - DNA, 98 bp, Homo sapiens
gcatttgtaaaggatgttcatgaagattcaataacagttgcatttgaaaacaagtgagtgctccagttgtaacatctaccactcaggaaaagccgaag

SEQ ID NO: 778247 - DNA, 74 bp, Homo sapiens
gcaaacgagagctgaggctaatgaaaaacaggtttcctatcctgggagcaggagagtgtgcctatttgaatgac

SEQ ID NO: 778248 - DNA, 75 bp, Homo sapiens
gcagggacaggagaatgagaggcctccgctggcgttacactcggctgattctgcctgatcaatgcaggagtcctg

SEQ ID NO: 778249 - DNA, 83 bp, Homo sapiens
cggatctcttcgtctttgcagcgtagcccgagtcggtcagcgccggagcttgaccctcaacaccaaccatgggcatatcctgg

SEQ ID NO: 778250 - DNA, 83 bp, Homo sapiens
gtcccacttgttcgcggcctataggacttgggaccctggaggactgacgctgctggcctgggcgtccccttccgctgagccat

SEQ ID NO: 778251 - DNA, 100 bp, Homo sapiens
cttgtgttcccagctgtgccctcacggggcccaggcattggccctggggcgggacaaaccagtccagctacgggggcccagccagccagcagctgagtgg

SEQ ID NO: 778252 - DNA, 98 bp, Homo sapiens
agctcctcaagtgcaacaagtcccacttccgaaaccacaagtttgccgatcaggttcaggagaagtggcacctggtggaggacctgtcgcgactgctg

SEQ ID NO: 778253 - DNA, 75 bp, Homo sapiens
aaaatactcagtttcctgcttactgcttcattatggattatacaggaatctttgtgacattctctctcagcattc

SEQ ID NO: 778254 - DNA, 82 bp, Homo sapiens
cagggcgacggccccacctccggccactgggacggcggcgcggagaaggcagatgcgagccacccctctggctgctcctgcg

SEQ ID NO: 778255 - DNA, 75 bp, Homo sapiens
aatgctttgagtgatgcaaccatgaaaatcgttcagatcatcatgtggttcaactactcaatttcatgctggcat

SEQ ID NO: 778256 - DNA, 74 bp, Homo sapiens
ggatgttaagtgtcaagttttacagtcgccagggacaagaacaggaggcaggtggaagtcatcataaagtttct

SEQ ID NO: 778257 - DNA, 100 bp, Homo sapiens
agagcggccggaagcgcggagggagccgcgggatggaccgcaggtgaccccaaaggagccatgataacccatcaaaatattgtttcaaatgctgctgcct

SEQ ID NO: 778258 - DNA, 75 bp, Homo sapiens
gttcatccctgagccttgagctcccagtcgcagggaaaagtctgaagacgcttatgtccaaggggatcctgcagg

SEQ ID NO: 778259 - DNA, 98 bp, Homo sapiens
aagatgcagttttttgatgctgaggagctcctggtcgatgaagaggatgatgtttttggtgaaggatcttttgccagaaatgagggcatactggcctg

SEQ ID NO: 778260 - DNA, 50 bp, Homo sapiens
gccagaccagtatggatgaactattaccctgggcatttccagctcgagag

SEQ ID NO: 778261 - DNA, 90 bp, Homo sapiens
gaaacattgtccgaatcagtatcagatctacagtgagtcattcaaacagcatgacataactggattttgcctaccattttacagtatttg

SEQ ID NO: 778262 - DNA, 82 bp, Homo sapiens
tggttgtgtggtcgcgtctcggaaaccggtagcgcttgcagcatggagggtgaggacaaaatcttcttaatcaacaagcttc

SEQ ID NO: 778263 - DNA, 100 bp, Homo sapiens
gcggaactcggccaagggaaaggtgcccaagtcggcactggccaccaaaaccctcaacaggggcatctctgagttcatcgtgatggctgcagacgccgag

SEQ ID NO: 778264 - DNA, 100 bp, Homo sapiens
ccagatactctgcccaaccgcacggtcaccctatcttcctcagaactgtgatcctaacattcccctagttgctcaggaattaatgaaaaagatgatacgt

SEQ ID NO: 778265 - DNA, 90 bp, Homo sapiens
cttgtggactactatgtgaagatacaagacacaaatgtaacttctgaggacaaaaagctatctctgaagggcacaaatcagaaggcacca

SEQ ID NO: 778266 - DNA, 100 bp, Homo sapiens
tgaaaatagctgatttcgagctatcaacattactgaagatggagctgggaagaggccctccagggaaacgaggtaagagaggccgaagaggagaatctgg

SEQ ID NO: 778267 - DNA, 100 bp, Homo sapiens
gtagcagcagctgccttcttggacgcctttcagaaagtggctgacatggccaccaacacacgtgctctggatgagggggatattgccttgttgaaaactt

SEQ ID NO: 778268 - DNA, 75 bp, Homo sapiens
cgcgtcgtatgcggccagcactaaggctgtaacagaggaggaaatgattttgaatagcctctctctgtgttacca

SEQ ID NO: 778269 - DNA, 90 bp, Homo sapiens
atctttatgtcagaaacacaaagcagcccaaccaaaggtgcctatgttgaaaaatatctactggagaagtccagactcgtttatcaggag

SEQ ID NO: 778270 - DNA, 83 bp, Homo sapiens
cttttgagccaaaccaagaagttcctgtagcaccttcacagtccaggcaaggctggaaacactctttttgtagaacatacaaa

SEQ ID NO: 778271 - DNA, 75 bp, Homo sapiens
gcacagctacgtctgcgagctgcagcccggaggacgtggtgggtcctctggtgcgaaattccggatttccttggg

SEQ ID NO: 778272 - DNA, 100 bp, Homo sapiens
caccagcactcctttaaagtgggcactgcaaaagtgagaacaatagtcaagggacgacacagtcaaacgtggatatttgggtgagtggggtgaagcctgg

SEQ ID NO: 778273 - DNA, 98 bp, Homo sapiens
cctggatgccctgaagatcagcatccgccagctcaagtggaaggagccatatcagcgggaacaagattggctgggagaagacgggaagccactcagag

SEQ ID NO: 778274 - DNA, 98 bp, Homo sapiens
aagaaggcaacacagcaagacttaaccaacctgtttgaagagtttggacagattgaatccattaatgatttaagtcgtggaactgaacatttatttgg

SEQ ID NO: 778275 - DNA, 100 bp, Homo sapiens
agcagcctctgggagtgacagtgctgacaagaaggctcaaggtcccaaaggtggtggcaatgcagtaaagctactacccacagatggcatgatccgaaaa

SEQ ID NO: 778276 - DNA, 100 bp, Homo sapiens
ttctgccgcaccaggctcatcctgtccatcgtgtgcctgatgatcacgcagctggctggcttcagtggaccagaatccctttgcccacgtccagctgaag

SEQ ID NO: 778277 - DNA, 100 bp, Homo sapiens
aggctcgcgagcctccttcgccgcgccccacttgctcgtgcactttacacacatgagaaaggagatgaagttgctggagcaggcaggttctctgaaaggc

SEQ ID NO: 778278 - DNA, 103 bp, Homo sapiens
agacagagctgagggagcaagaggtgtcggaggtctcatctttgaactactgccggagcttctgccaggtcaaaatgcagatcttcgtgaaaacccttaccgg

SEQ ID NO: 778279 - DNA, 75 bp, Homo sapiens
atcaacaatgctgacttcatagtgcctatagagattgaggggaccactcaccagtttgggagagcccatggtgac

SEQ ID NO: 778280 - DNA, 100 bp, Homo sapiens
aagattcagtggatgctaagccagaccggtcctcgtttgtaccgtccctcttcagggctgggaagaaacggtggatgccgccatttcccacctgttgaag

SEQ ID NO: 778281 - DNA, 50 bp, Homo sapiens
agaaccaagtctcttcactaaactgtgggccaccagatgacttcagatgt

SEQ ID NO: 778282 - DNA, 98 bp, Homo sapiens
gatgtgtctggtgtgggtttcccaagcaaggttccttggaagaagatgtctgcagagtcattcctgtattccatcaaccagacaatctgcttgcggtt

SEQ ID NO: 778283 - DNA, 82 bp, Homo sapiens
gcagaaggtctctggagacatcttcagcaggtcttgagtcaccacgtccgaatataattcttgggttagtaatctgccaaaa

SEQ ID NO: 778284 - DNA, 90 bp, Homo sapiens
ctattatataagcacacagcaagcaccttctgaggaaacagagcaaatgcagcgttacaatcaaagacttattgaggaattgaaaaacag

SEQ ID NO: 778285 - DNA, 82 bp, Homo sapiens
gtgtggacgttgtctaaatttcggtagccatggcacaagaatatatgtggcaaaggagcagagaactttgacaagttcttca

SEQ ID NO: 778286 - DNA, 100 bp, Homo sapiens
gatcgccggagtcatattatcgacgtagttaaagcccactagcctaaagccgggcggactgcgcatttgttcagtgctcagcacaggagtttgaccagac

SEQ ID NO: 778287 - DNA, 89 bp, Homo sapiens
gaacttgtgaacaaggatctggatatttattataagactcttgaccagttcgttaccgtgaacgcatcaccattcttcgagggaatcat

SEQ ID NO: 778288 - DNA, 100 bp, Homo sapiens
cctccttgtggccctgggaggaagccatggactctaccaagtctgaacccctgaagggatcaccagagcaagacagatcggcttgccaaaggatcagaat

SEQ ID NO: 778289 - DNA, 98 bp, Homo sapiens
tatggacagatggacttcaaatgctgtttgtattccagagactaggtcaaaatgcaacttcattggggaccggaggttactatggccacagtccagga

SEQ ID NO: 778290 - DNA, 76 bp, Homo sapiens
caacacatggtggaatgtatccgggaggtcaacgaggtcatccagggggcagctggcattttatgctatgtgggag

SEQ ID NO: 778291 - DNA, 110 bp, Homo sapiens
aagtagaagcatcgaaagcgttggagaggtgttaccggaacggcggcgacaagggtgttcccgaactagagtggttcaattttgtggggaaattgcttggaccaagagga

SEQ ID NO: 778292 - DNA, 83 bp, Homo sapiens
ctcacagccaccggtaccttcttccaggttgtgaaggagctcctgacccagggagctgaccccaacctgcccctgaccaaagg

SEQ ID NO: 778293 - DNA, 82 bp, Homo sapiens
tccgcgacggtcgccgcccacggcgaggttatggaaacaaaggacatgctttacatcgtcactgaatttgctaaaaatggag

SEQ ID NO: 778294 - DNA, 82 bp, Homo sapiens
gtgtttggggaattggctattctttacaactgtacccggacagcgaccgtcaagaagtctcgccctgtcgcccaggctggag

SEQ ID NO: 778295 - DNA, 82 bp, Homo sapiens
cgcgcagccccgcacggcccgggcccacggagtgcatccgccccaacccttttccccctcgtctcctgtgagaattccccgt

SEQ ID NO: 778296 - DNA, 96 bp, Homo sapiens
gacaattcttcagcttcagctgaccttgtagtgagaggtgatggcagttttggatcagtttaccgagcagcctatgaaggagaagaagtggctgtg

SEQ ID NO: 778297 - DNA, 100 bp, Homo sapiens
ttcgagtgtaatttagagagcagcgtggagagtatcatctcaccaaaggtctcttgatgttttaagcgatggtgttttgaaggatctttctgagttttac

SEQ ID NO: 778298 - DNA, 98 bp, Homo sapiens
cgggggaggtgaaggaccggatcctggagaacatctcgctgtcggtgaagaagttccagccaccaagttaaacacgatgagcaaaaccagccttggcc

SEQ ID NO: 778299 - DNA, 76 bp, Homo sapiens
agggtggacaaatcgccagagatgtgaccatggtgaatccgggcagcagctcgcagccgcccccggtgacggccgg

SEQ ID NO: 778300 - DNA, 90 bp, Homo sapiens
ccaatcccactgatgaggatcagcccatggtctttcatggtgctgattcagacatagaatggctacagaaagactttgggttgtatgtag

SEQ ID NO: 778301 - DNA, 100 bp, Homo sapiens
tttgtggaagcatttggcggcataccaccctgcactgtgaggtaggagatcaaatcattgaaatcaatggggaaagcacaagggacatgacacatgccag

SEQ ID NO: 778302 - DNA, 75 bp, Homo sapiens
tcaagctgagacactggcagtggtggcggctgtttaccaagggtacagaagtgcaggtggatgacatcaagcggg

SEQ ID NO: 778303 - DNA, 82 bp, Homo sapiens
cgagcgcgagcggcgcgagaaatatggtttgaagtggtgaacatggatttttctcggcttcacatgtacagtcctccccagt

SEQ ID NO: 778304 - DNA, 50 bp, Homo sapiens
tggaagtgctgctgatgtgcaacaacggagctccctgggtcctcagcagt

SEQ ID NO: 778305 - DNA, 100 bp, Homo sapiens
gggtaggcaagacctgcctcctgttccgcttctcagaggacgccttcaacaccaccttcatctccaccatcgggccacccgttcatcgtgcagttcaatg

SEQ ID NO: 778306 - DNA, 75 bp, Homo sapiens
attcaacatgcccctaagctctcagctttgaaacaagcttgaagtagaaaatgccatgatgagaaaaactattaa

SEQ ID NO: 778307 - DNA, 98 bp, Homo sapiens
cacagtttgcgggactcagtcccatcactccaaggagagaagaggttggaaagaaccatgactgtattcaggaaggcacatgaactgaagcttctgtc

SEQ ID NO: 778308 - DNA, 100 bp, Homo sapiens
tgtgatcttcaggttgggaccaggtgaagagtcctggatggcagatggggggaccccggtacggacctgtgcagatattaataaggcagcggaaagaaga

SEQ ID NO: 778309 - DNA, 100 bp, Homo sapiens
agaagaggtcccaatcccccactctttccgccctaatggaggtctccagtttcggttttaaaatcaaagatgggaaaatcggagaaaattgcccttcccc

SEQ ID NO: 778310 - DNA, 97 bp, Homo sapiens
acaaccttcgatctcctgacgatcagaaattggctttggaaaaatggaaacctacatcaaattggaaaagcttggagaggtaagtaaatatctcaaa

SEQ ID NO: 778311 - DNA, 100 bp, Homo sapiens
cgagggcaaagagctggtggcctcaggtgaaaaatattgatgatgttaagaagttcaaaccgggttacctggaagctactcttaattggtttagattata

SEQ ID NO: 778312 - DNA, 100 bp, Homo sapiens
cgcttatcagctccgccaccgcccaagggggaaacttctgcagaaaccccaaccgagcttccgtcgaaagaccacagcaagattctttcattcgtctcct

SEQ ID NO: 778313 - DNA, 100 bp, Homo sapiens
ctgatcccgagcagcgtcatgtacccctggtgtggatgaatggaacatagctcgcctcaatacagtcttggatgtggttgaagaagagtgtggcatttct

SEQ ID NO: 778314 - DNA, 129 bp, Homo sapiens
cagattttggggcaaagcctttccaactggacagcaccatgtccaccaaagcggagcagtgatagcattgggcagctggagaatgatctgaggaacaccaagagtgagatggcacgccaccttcgggaa

SEQ ID NO: 778315 - DNA, 75 bp, Homo sapiens
cagggcccggaggtcaagatggtggctgtaaaactaggatccctgacgattgttggttgaatctggcgatgtgga

SEQ ID NO: 778316 - DNA, 75 bp, Homo sapiens
ctgctggtatacagctacatccaggagagaatgctgacagtcctgcagagtacatccagaaatacgccacggagg

SEQ ID NO: 778317 - DNA, 75 bp, Homo sapiens
gtttccagtccaggtcaggggatgccatggggatgaacatgatttcaaaggtggatgggaagagagtcccaaggg

SEQ ID NO: 778318 - DNA, 100 bp, Homo sapiens
atcgctaactcttcttttgcttctccagctcaggaccactccaatgacccacctaacaagacacatcatctcagagttggagcacctgacgtttgtcaac

SEQ ID NO: 778319 - DNA, 76 bp, Homo sapiens
ggggctttggcatctctcattcgatccgtggcctccttctccatctacagaacatccatgatagcagtcttctgta

SEQ ID NO: 778320 - DNA, 83 bp, Homo sapiens
cctggctcacattcggaggctggtgtccagggtctcagcgcgggggacgactcagagaagaaaatcttcattggcctcatccc

SEQ ID NO: 778321 - DNA, 75 bp, Homo sapiens
gcctgcacagccgcggcggcagcagcagtgagaggcggccggcgcggggcgcaggcggcgcggccatgggctcgc

SEQ ID NO: 778322 - DNA, 124 bp, Homo sapiens
cgaggacgaggagtcggaggagccgcgggcggcgcggcccagctcgttccagacaatgcagatcttcgtgaagactctgactggtaagaccatcaccctcgaggttgagcccagtgacaccatc

SEQ ID NO: 778323 - DNA, 82 bp, Homo sapiens
tacctactgatggtgctgtaaccacctcacagattccagcttcggaacaagagaccctggtgcacatgaacttgaacagatg

SEQ ID NO: 778324 - DNA, 74 bp, Homo sapiens
gccgacgctgcatcttcgcactggctgtgcgggagccggtgaaacctgaagaaggcagagatatggcaaacagg

SEQ ID NO: 778325 - DNA, 100 bp, Homo sapiens
ccaatttttggactgtgctctcaaactttactttgcctcatttgaggagtgggaacaggcttcggcgaacacaaagatcatgacaagatgtttaagatga

SEQ ID NO: 778326 - DNA, 90 bp, Homo sapiens
tgaaatggttgtaaatactgcctgtaaagaaaatacatctcaatactttttcataacaccaaaggccatgggtgtgtacctctacgggga

SEQ ID NO: 778327 - DNA, 99 bp, Homo sapiens
tagaataagactgattttatgggaaaattaagcagatgctccagtttgagaaacctggatctgcgatctgtttgtggaatctctgaaggaagaagatga

SEQ ID NO: 778328 - DNA, 97 bp, Homo sapiens
gagctgagcatttgggccaacaccagagtggttcgggaacaggatgcagacattgtcctcaacgaccagcgggtcctgcagttctgagcttgggttc

SEQ ID NO: 778329 - DNA, 74 bp, Homo sapiens
catgcgcgtccgtgtgaagagaccaccaaacaggctttgtctctcttggcctcctagtttctacctaatcatgt

SEQ ID NO: 778330 - DNA, 90 bp, Homo sapiens
aattaagtttagtagtgctcctattaagaatagctctccagacccccagctggccatgtggtgagttcagggcccaaatcaagtagtacc

SEQ ID NO: 778331 - DNA, 82 bp, Homo sapiens
cgggtccgtgcgcccagcgtcccagggcccaggccgagcaggtgtctgacttccagcaactgctggcctgtgccagggtgca

SEQ ID NO: 778332 - DNA, 100 bp, Homo sapiens
ataagactgattttatgggaaaattaagcagatgctccagtttgagaaacctggatctgcgatctgtttgtggacataccgagggattgcatatgttaaa

SEQ ID NO: 778333 - DNA, 100 bp, Homo sapiens
aagtatgttgtaccttgtgacagaatatgccaaaaatggagaaatttttgggggaagttgctgaagttatatttgtaggtgctaacccgaagaattcagt

SEQ ID NO: 778334 - DNA, 98 bp, Homo sapiens
gggcgagtgcatgatccgccacgggaaggagctgggcggcgagtccaactttgagctccacgcaggagatcggtgaggagctgatcaacggagtcatc

SEQ ID NO: 778335 - DNA, 75 bp, Homo sapiens
atatgtttattttgcaagaccagacagtatgttcgaagtaccgggaccctctggtgataatggcatcagtgttac

SEQ ID NO: 778336 - DNA, 75 bp, Homo sapiens
ctttctgggcaaacgttccaaggttcttgttaaacctttgggagaccgaggatacctttttcttctctcccctta

SEQ ID NO: 778337 - DNA, 100 bp, Homo sapiens
actgatagatggtccacatctcaactaacagtattgacgctgtaagagcatcagcactgccagtgaaagatgtagaagataaacctgaacaacaaaccag

SEQ ID NO: 778338 - DNA, 82 bp, Homo sapiens
ctgctcgcctacttcctgccggcgcaggaaatgcgtgtactgccggaagcggatgaagaaggtgtcaggtgcctgtatccag

SEQ ID NO: 778339 - DNA, 74 bp, Homo sapiens
ccctacgccgtggacttccagcgcaggaacttgtaatagctggcatcgttgagaatgaatggaaaagaacgtgc

SEQ ID NO: 778340 - DNA, 82 bp, Homo sapiens
caaaatatggcaaagaaacctattctgagactactccaaaggattcggcgggaagtatggggtgcagaaggatcggatggat

SEQ ID NO: 778341 - DNA, 100 bp, Homo sapiens
ccagtactaccaaggacagcttttttcctgcaaggtgttcttcttttgggagacgcatataatatgaggcatccacttactggtggaggaatgactgttg

SEQ ID NO: 778342 - DNA, 100 bp, Homo sapiens
tttagtacagtcgccaactgatgtctacagaatcttctgctgactctcaacttttcctggaaaaaatggatcattcccaccatatggggatgagctatat

SEQ ID NO: 778343 - DNA, 145 bp, Homo sapiens
tagagaggagtataaaatccagtcctttgatgcagagacccagcagctgctgaagacagcactcaaagataaagccaccaatccttccaaccgccaggaggactgggaatacataattggcttctgtgatcagatcaacaaggag

SEQ ID NO: 778344 - DNA, 98 bp, Homo sapiens
agacgttagcgtgagtgatcactctcaatcccgggtgaaagaaaagatgttgtcccggttaagagtagtttccaccacttgtactttggcatgtcgac

SEQ ID NO: 778345 - DNA, 98 bp, Homo sapiens
ggaggagacgcacgcagctgactttgtcttctccgcacgactgttacagaggtctccagagccttctctctcctggaatgttttaaaggaagttgggc

SEQ ID NO: 778346 - DNA, 100 bp, Homo sapiens
aacttcaagaaaattacggtggtgccgtccgccaaggcggtacaagccctcaatggccagcaaactctgagtcctgaagaattcatcaacttggtgttcc

SEQ ID NO: 778347 - DNA, 50 bp, Homo sapiens
tcaagtaatggtgcaaagcctgaagactgaaaactggatatttggtcccc

SEQ ID NO: 778348 - DNA, 101 bp, Homo sapiens
tcctactgtcccacggccaccgaagagacaggagactggggagaaccttccattaccttgcgacctccgaatgaagccacagcctctaccccggtacagta

SEQ ID NO: 778349 - DNA, 75 bp, Homo sapiens
cagctgtaccagtccgccattttgctaccaagaaagccaaaggaaaaccagcattggaatcagctgattcaggat

SEQ ID NO: 778350 - DNA, 82 bp, Homo sapiens
tataccaccgaggagcgaaggaaattggtaatagccagccactggagcatctactactgtatatgcgattgaagctaatggc

SEQ ID NO: 778351 - DNA, 50 bp, Homo sapiens
ggaaaggagaggatcccggagccgaggagaaggcagagcccccccaggct

SEQ ID NO: 778352 - DNA, 75 bp, Homo sapiens
gccgctgacagcagccatcgaggcgagccagagcctgcagtcccacacggaaataactacgtgtttgccagatta

SEQ ID NO: 778353 - DNA, 83 bp, Homo sapiens
gcgccatggcgaccggagcgaacgccacgccgttggatgaggacgatgtgcacagatgcggccgctgccaggcagagttcacc

SEQ ID NO: 778354 - DNA, 98 bp, Homo sapiens
acagcttctaaaaattaataattcaaagcacagatggttctggttgttgccagttaaggagggctctaactccgtgaggaccccagcattatttctat

SEQ ID NO: 778355 - DNA, 75 bp, Homo sapiens
ggctgtgaataatatagctggtattgaagagaatgaccagtcaacaggggacataaaagtaattggtggagatga

SEQ ID NO: 778356 - DNA, 75 bp, Homo sapiens
tccaaggttaccagatacctgtgtttcacaagatcattttccaaagaaaatgtatgtatattaggttaggctggg

SEQ ID NO: 778357 - DNA, 49 bp, Homo sapiens
gtggctgaagagttccttaagaatgatctgctgtatatccttccaactc

SEQ ID NO: 778358 - DNA, 75 bp, Homo sapiens
cttctagactgattaaaaatcttggtgccttagctccgggcgctgctgctacttcgccgccggctcagccaccag

SEQ ID NO: 778359 - DNA, 96 bp, Homo sapiens
tcccaaagcactaacagttggaggattcattgaggaagaaaaagaagacttgcttcagcatttctcaaaaaaccagcagatactccctctgaggaa

SEQ ID NO: 778360 - DNA, 51 bp, Homo sapiens
tacctgccacggataccagtcagtgatggaatggggagaagatattaaagc

SEQ ID NO: 778361 - DNA, 50 bp, Homo sapiens
gtgagaagaccaccacagcggcagcctacgaggacaagcagaaactcaag

SEQ ID NO: 778362 - DNA, 75 bp, Homo sapiens
attccttctcagaacttatgcataccgtaaaatcccagaggaatccaaagccctctctttattggctcctgctcc

SEQ ID NO: 778363 - DNA, 98 bp, Homo sapiens
gagattgggccacattcagtcctcgcttccctgggagggggaaggatttccatcaccaaggagtaagaagaccttcgggcagagactgttgggtatgc

SEQ ID NO: 778364 - DNA, 50 bp, Homo sapiens
aaatacccctttgaattaattatggctttcctccgtgtcacaaagcagta

SEQ ID NO: 778365 - DNA, 82 bp, Homo sapiens
tagttccaatggagaaaacacacttgaaccactcgttttgactattattttatcactctttgtgaaacttcacaatgttcgg

SEQ ID NO: 778366 - DNA, 95 bp, Homo sapiens
atattttgctaaatacagaaggacatgcaaaacttgcagattttggggtagcaggtcaacttacattccaaaagctgagacaagatcttgaaatg

SEQ ID NO: 778367 - DNA, 74 bp, Homo sapiens
ggtcaagacatcagagacttttatgaaatgttagccgaaagaaggtctccaaagcggcgtctgacctcatgagc

SEQ ID NO: 778368 - DNA, 83 bp, Homo sapiens
cagctctgcagccacatactatccgtttgttcaggaaccaccagtgacagaacaatgcagatcttcgtgaagactctgactgg

SEQ ID NO: 778369 - DNA, 100 bp, Homo sapiens
agtgtgtgaagctgaatgatggtcacttcatgcctgtcctgggatttggcacctatgcgcctgcagagccacaagtatatggttatgatgacttgcagat

SEQ ID NO: 778370 - DNA, 82 bp, Homo sapiens
gcgcgggcggacgacagaggatgccgaaccactccatgtgttccatgggaaccggtacaagcagactctatagtgctctcgc

SEQ ID NO: 778371 - DNA, 83 bp, Homo sapiens
gtgggccagtacagcaccggcaagaccaccttcatcaggtccatattcaagcctttcatctttgttgatgacgtaaaacttgt

SEQ ID NO: 778372 - DNA, 98 bp, Homo sapiens
gcgcgcccgggcccgagaggaggaggccggggctctccgggcctcccgccgcttagcctgatgctggaaggacgaagactggaaagctacccttgagg

SEQ ID NO: 778373 - DNA, 74 bp, Homo sapiens
gccgtcccgtccgacagccaggcccgggagaaagaaccatggagtctggcagtaccgccgccagtgaggaggca

SEQ ID NO: 778374 - DNA, 75 bp, Homo sapiens
cgccgctctccgagctcgatccgctgctcgcacgggagccagctgggtggttatatcttaagtgtggtgctgcta

SEQ ID NO: 778375 - DNA, 75 bp, Homo sapiens
atggtcacagccaccaacagtatggaagagactctgatgcaaatagttcagacttggttccttcaacctagagaa

SEQ ID NO: 778376 - DNA, 96 bp, Homo sapiens
actgaagagcccttttagtgttcatcctaaaacaggagaccttaatggacagaatcaagaaacagctacgtgaatgggatgaaaatctaaaagatg

SEQ ID NO: 778377 - DNA, 99 bp, Homo sapiens
catcaagctgtctaagtccaaagatttttacccagctgccactggtgacatgccaacttaccagatccgagctcctactgctgctttgccacagggagt

SEQ ID NO: 778378 - DNA, 75 bp, Homo sapiens
ggagtgccgctgcccgccaggctacatcggtctgtcctgccaggttgatgcccactgctctgccggccactcctg

SEQ ID NO: 778379 - DNA, 75 bp, Homo sapiens
acaaaaccaagttggatcctaacaagtggtaggagtgaaggtggcaggaattcccgggtcacccctgcagctgcc

SEQ ID NO: 778380 - DNA, 100 bp, Homo sapiens
cacacctcgggactccataatattggacaaggctggaaggcccatttggctcctgcagcctcttatgcagcctccagaggtgaagtccccagtggagcct

SEQ ID NO: 778381 - DNA, 100 bp, Homo sapiens
cagggacctgcccgactcagtgagttctctgtggcccatgaccttcggcctggcctgctgcgccgtggagatgatgcacatggcagcaccccgctacgac

SEQ ID NO: 778382 - DNA, 75 bp, Homo sapiens
gcgggcgccaggaccggccgaacgcagagagactgatggagaggcagaaacggaaggcggacatcgagaaagggc

SEQ ID NO: 778383 - DNA, 98 bp, Homo sapiens
cgcgtccctgcgaccgccgcggcgaagatgtttgtgaatagcacaatggaagaagctggactttgtgggttaagagagaaagcagatatgttgtgtaa

SEQ ID NO: 778384 - DNA, 90 bp, Homo sapiens
gcttgatatcacagaggaaactctgcattctcgcttcctggaggtgactgaaaactcctgaggcatttcctggactagaatgggtagtga

SEQ ID NO: 778385 - DNA, 100 bp, Homo sapiens
taccgtcgccagcggagcgaacccgagagcgtggagcgggctgggccagtttgaacgccatgaccctgtggatgggagaattactgagaggcagtttggt

SEQ ID NO: 778386 - DNA, 95 bp, Homo sapiens
caactccttcctggagttaagtgggcgcaagtcccagaagatgtcggagcccatagcaggtttattgttggccaaaaccaggctttgattgaacc

SEQ ID NO: 778387 - DNA, 88 bp, Homo sapiens
tttagatgtagagcctatctacacatttagggcccacatttataacagagattcggatcagttaaccaagtggttggaatcttcccag

SEQ ID NO: 778388 - DNA, 82 bp, Homo sapiens
tgctgttgcttctgggccagaggaagagaatgaggtactccaaagattcaggtttactcacgtcatccagcagagaatggaa

SEQ ID NO: 778389 - DNA, 75 bp, Homo sapiens
aatgaatccttctagagacgtccacgcagacggttgatgatgaagcgccggccgtgtaaatgaagatcgggtgag

SEQ ID NO: 778390 - DNA, 75 bp, Homo sapiens
tctggagagattctgaggtgtttgaggatacagacgtccctcaccagtgccagcttggggtctgcagatgagaac

SEQ ID NO: 778391 - DNA, 83 bp, Homo sapiens
cagagggagatgtcaggtgggagaaaggatcgctacggttcctactgatccgagctctgtgactcaggcttacgatggtgacg

SEQ ID NO: 778392 - DNA, 51 bp, Homo sapiens
gagcgttgtcgccgccgctatggggctattccgcgaagtaagaataatgaa

SEQ ID NO: 778393 - DNA, 75 bp, Homo sapiens
ctcgtccagcagctcgtccagcacgaaggccacgctgtacccgccggtaatagcctgcagctggtgttttgagaa

SEQ ID NO: 778394 - DNA, 100 bp, Homo sapiens
cccggggaaggagcacaagatcatggtggggagtacggacgaccccagcgtgttcagcctccctgactccaagagtctcactgtcgcccaggctgcagtg

SEQ ID NO: 778395 - DNA, 51 bp, Homo sapiens
ggaccatcttgcctggagcaagagtggagactgctgcacggactctggaac

SEQ ID NO: 778396 - DNA, 100 bp, Homo sapiens
ggctgttcaaaggtgtgtggtgcgaatccgttcagatttgaaagctgagaacttttcaaaagggatttcaacctctgaccacctggagacaggcgactgg

SEQ ID NO: 778397 - DNA, 100 bp, Homo sapiens
atgacccagtccctgtccgtgcctggccccacgggactgcattataaggagatttactgaccttaagcactatagtgatgaactgcagtctgtcatctca

SEQ ID NO: 778398 - DNA, 99 bp, Homo sapiens
aagtgcatccatgccccagattcctgttgcttcagtcactcctacagcatcactatcaggtagaggaggtcagtcagccttgcgttttgcccgtttaag

SEQ ID NO: 778399 - DNA, 48 bp, Homo sapiens
cgataatgcagttcttattactaggatttgttaaggattccaagtaac

SEQ ID NO: 778400 - DNA, 98 bp, Homo sapiens
cgcctgtcctgatcatggccaccaaccgtggcatcacgcgcaccacaccccactctggccggagcacgccaagcagctccccatcgctccggaaacgg

SEQ ID NO: 778401 - DNA, 97 bp, Homo sapiens
catcgactttggaggcacttccgtttggtaccatgttttccggggtgggaaggtttgtaaaagaatggacttggtctgccagagaatgttgaatcag

SEQ ID NO: 778402 - DNA, 75 bp, Homo sapiens
ccccccagccttggggtcatatgcttctgtggacagctgtgctattcctgggcattcccatcaagagcaccatgg

SEQ ID NO: 778403 - DNA, 101 bp, Homo sapiens
acagtatccattagaagtgctttgtttgcatttaattgaatcaggtttcaccaaaactcatgccaatgcagcagatcgcaaattgaaatatggatatttgt

SEQ ID NO: 778404 - DNA, 100 bp, Homo sapiens
caaagcgctagcaacttctaccaacaacagtgcaccaattccagctggacatcactgtgaaaatgggacgggataaagtccgagaaatgtttatgaagaa

SEQ ID NO: 778405 - DNA, 75 bp, Homo sapiens
cagcaggcggtgacccgctaccggaaggccatcgccaagtaagactttgaccccgacgcaggcttcagtgattgc

SEQ ID NO: 778406 - DNA, 100 bp, Homo sapiens
cggacgtgggggcggcagccagctcgcaggtacataccgagcatcaaatattaaggcacccggagaacagacagtaccagccttgaaccttcagaatgct

SEQ ID NO: 778407 - DNA, 95 bp, Homo sapiens
ccaggtgtaagcgcagaaagcaggcgaacccgcggcgcaataacgcttcgagagctgtgcccaggagtgaacaaccagccctacctctgtgagag

SEQ ID NO: 778408 - DNA, 90 bp, Homo sapiens
gttccatcccacctttgagtcagcattgacaagatatctaaagtcacctctcctgtgttggtcattcatggtacagaggatgaggtcatc

SEQ ID NO: 778409 - DNA, 100 bp, Homo sapiens
gctgagagagagcaagcgtttcagcgcctacaattacagttttatagcagaggcttcttagaagcttaaacccctgtcccaatgacgtcaagttcgcccg

SEQ ID NO: 778410 - DNA, 100 bp, Homo sapiens
cgcatcaggtgctgtttcaggcctggcacgtagtagagtgccttcgtgcatcgctgcggtcgcacagctcgcattggccacgggggcagcgctctggtgt

SEQ ID NO: 778411 - DNA, 85 bp, Homo sapiens
gacatgcgcgggagggcgccgcggggcagccgccgctcctccggggttatcctgaatacatgtctaacaattttccttgcaacgt

SEQ ID NO: 778412 - DNA, 98 bp, Homo sapiens
ctgcacgttgcagatcgtttgcgtcctccgcggggcagagcgcagggcgggaatggcggcgctagatagtaaggcatcagggaagatgggaatgcgag

SEQ ID NO: 778413 - DNA, 96 bp, Homo sapiens
cgcctgaagcacctgcgggcgctgctggtattaattttaaagacccacagtttgctgaagattacatttttaaagctgtaatgcttccaggagcaa

SEQ ID NO: 778414 - DNA, 50 bp, Homo sapiens
tctccacctggggaatgtggggttcatggcccctgaatgtgacagtgatc

SEQ ID NO: 778415 - DNA, 100 bp, Homo sapiens
ttcaacagaagagtgagagatggaacccgaagaagaaaggattcgttacagccagagattgacctaatctgggagcctgcaagtgacaacagcctttgcg

SEQ ID NO: 778416 - DNA, 74 bp, Homo sapiens
ggacgccggtctctgttccgcaggatgctcttcatcacggtcatggacaagctgcgcctggagatccgcgccat

SEQ ID NO: 778417 - DNA, 100 bp, Homo sapiens
ctagtactatatttagtagtgaaaccaaatacatcctctaaaagaagttcattatcacacaagatgaagactggcccatttgcagagcactccaaccagc

SEQ ID NO: 778418 - DNA, 99 bp, Homo sapiens
caacagtatttggggcaagaagtttgaggatgaatacagtgaatatcttaaggtttctaagcatgaattgaggaacagaagaagcagagcagatgatcg

SEQ ID NO: 778419 - DNA, 90 bp, Homo sapiens
ctgctcctccttcatctcccaaggtggtggaggtggatacagcagtcggagaacatctggcagagacaaatacggaccacctgttcgtac

SEQ ID NO: 778420 - DNA, 101 bp, Homo sapiens
cttgattcaaaacatctatcgtaatccccaaaacagtgcacagacggctgacggctcacactgtgctggacgtcattgctcctccttatacctctgacttc

SEQ ID NO: 778421 - DNA, 48 bp, Homo sapiens
tgcgctcggagaacgactatctcaagaataccctctaccatctgcttt

SEQ ID NO: 778422 - DNA, 92 bp, Homo sapiens
ggcgagtttccgatttaaagctgagctgcgaggaaaatggcggcgggaggtgcgcgcggagccatggttatcatgtcggagttcagcgcgga

SEQ ID NO: 778423 - DNA, 75 bp, Homo sapiens
tgcatgctgcttttgatgtctgacaacgtggatcgttgttttgaaacgtggatccataaagaacccagccaaccc

SEQ ID NO: 778424 - DNA, 74 bp, Homo sapiens
aaaatgaaactgatgagacgacaacttttctctgcaggtggatattgttcccagccagggggagatcagcgttg

SEQ ID NO: 778425 - DNA, 98 bp, Homo sapiens
tggcaccagcgacttcgccctcagcaaccgctacatgcaggtctggttctcaggccttactgggctcctcaagggtgattctgggggtccacttgtct

SEQ ID NO: 778426 - DNA, 106 bp, Homo sapiens
ggctcgacaagttcaagcagctgcttgccggccccaacacggaccttggaactgtggctgcaccatctgtcttcatcttcccgccatctgatgagcagttgaaatc

SEQ ID NO: 778427 - DNA, 100 bp, Homo sapiens
atgagctgtcctttcaggaaggagccattatttatgtcatcaagaagaatgacgatgccttgccaaactgaagcccgagaagagatgaacaacaaagcga

SEQ ID NO: 778428 - DNA, 75 bp, Homo sapiens
ggagcgggagcgggatccccagcaggagcaggagcgggagcggggaaatcctcattgacgattcaatttgttgaa

SEQ ID NO: 778429 - DNA, 98 bp, Homo sapiens
ctgcagcgctgtatcgtgtcgccggcagggaggcatagcgcctctctgatcttcctgcatggctcagtgctgtgttaaatgagaataatgtgcccctc

SEQ ID NO: 778430 - DNA, 108 bp, Homo sapiens
ggacaacctgctgcgggatcccaaatcggaagtgaattcggattgtttgctggtaacccaggtttttctgccttttatgtgccatttgcaaaggctttatactctttg

SEQ ID NO: 778431 - DNA, 98 bp, Homo sapiens
ctcataataattcagatggagaatatatggctggacagctagctgcttatggctataaaattacagatatggatgtaatgaggcccttgataaatgag

SEQ ID NO: 778432 - DNA, 100 bp, Homo sapiens
tgtgctcttgctgaggacccacaagaacttcgagatggattccaacatcctgctagacttgttaagactaccatgccggggatgaagcgagactgcgggg

SEQ ID NO: 778433 - DNA, 100 bp, Homo sapiens
taggaattcaatgaaaacgtattcttaaaggcgaaaaaggtggatttgctaggacaggcgacactaacaggtgaagatctcgggagaccatgactaagaa

SEQ ID NO: 778434 - DNA, 101 bp, Homo sapiens
ctagaccctgcccaacagaatttatatagagatgtgatgttggagaactacagaaacctcgtctccctggatttcctcctctgatgctcctcttcagcctt

SEQ ID NO: 778435 - DNA, 80 bp, Homo sapiens
acatttaattttagggtcctttatatagaagggagagtaggaccgtgtttcttcgcctcgcctccctggtggtcctgctc

SEQ ID NO: 778436 - DNA, 100 bp, Homo sapiens
ctgccaggccagctcgaagaaggcgagcagggtgcgggagagccccttgcagaagacgccgtacgaggagaagatggtataaactggtccatcagtgaca

SEQ ID NO: 778437 - DNA, 75 bp, Homo sapiens
ctatagtctggtatcaaaagaagaatcttgtggaagaagaatgaagttgctgattatgaagctacaacattttcc

SEQ ID NO: 778438 - DNA, 83 bp, Homo sapiens
cctggaatggcaagcgcagcaacaacagagagcacgtgtgggtaattccagaattgattggccataccattgtcactgtatta

SEQ ID NO: 778439 - DNA, 80 bp, Homo sapiens
actaggaggagtaataagtaactgagacacttctaaaggaggcatagctaaagttactcaatccaacttgaagtcaggca

SEQ ID NO: 778440 - DNA, 82 bp, Homo sapiens
gctcgcgctactctctctttctggcctggaggctatccagcagccccacagtcttcgttataacctcacggtgctgtcctgg

SEQ ID NO: 778441 - DNA, 82 bp, Homo sapiens
tttgcagtctcgacataagtgtaccatgcatttcacggtggccttgtggagacaacgccttaacccaaggaagtgactcaaa

SEQ ID NO: 778442 - DNA, 100 bp, Homo sapiens
gtcgcgggagcctttggggcaccacagagatgcggggtcccgggattcttgagctgtgcccagctgacgagcttttgaagatggcacaataaccgtccag

SEQ ID NO: 778443 - DNA, 105 bp, Homo sapiens
catcaaaaagtgattaagcagagaatggagaagaaggttgattccagatactttggtgttgaacatttgggatagaagagagaaatttaaaattaaaaattttcc

SEQ ID NO: 778444 - DNA, 100 bp, Homo sapiens
cactccccagggcagaaatagcgaccatggcgaggtaccagcaactaaggtttcagagctgaaccctaatgcagaagtgtggggggctcctgtgttacat

SEQ ID NO: 778445 - DNA, 87 bp, Homo sapiens
ttcctgctcacagcccgacgaaaggatgccaaatgaataggatgagtgataatccacccagaatggaagtgtgtccttactgtaaga

SEQ ID NO: 778446 - DNA, 100 bp, Homo sapiens
cggcggcggagactgcgggcccgtagctgggctctgcgaggtcactggaaggactgagcgcattcaggagcctggaggaactcatcttggacaacaatca

SEQ ID NO: 778447 - DNA, 82 bp, Homo sapiens
actggcgtggacccaggctctgaagcagaaggcagcgggctcaagagccgagactgtctgaagctgggcccacctgctgagg

SEQ ID NO: 778448 - DNA, 106 bp, Homo sapiens
cgcagggctttggggaggagtccagggagcccagcacaggtacaggtttgcagattccgccagcagcacagcaagctctacagatgagtggctctttggcatttgg

SEQ ID NO: 778449 - DNA, 83 bp, Homo sapiens
ttgatcttaggaggaggtgatgtacttatggtggatagatacttctcaagacatcacacagcgtgagtcaatcaaggagggaa

SEQ ID NO: 778450 - DNA, 100 bp, Homo sapiens
gtgggttcttggtctcactgagttctagaatgaagctgcagaccctcgcactggagatggagctgaagatgctgaagtctcagtccagctctgccgaaca

SEQ ID NO: 778451 - DNA, 82 bp, Homo sapiens
aggatttctccgcctcagcccaacggggagctgcctgtggaggaaccgattgtgtccacagatgaggtcatcttcccactca

SEQ ID NO: 778452 - DNA, 90 bp, Homo sapiens
ggatgataaccacccaaggcccaaaagcgtcaaactcaccaaaaacaacatctttccagaaagagacaacaagggaggtgtcacagtttt

SEQ ID NO: 778453 - DNA, 50 bp, Homo sapiens
cagcgctgctggcgggcgttaggatacttcggggataaaatacagaacat

SEQ ID NO: 778454 - DNA, 82 bp, Homo sapiens
ctcatcgagggctgcttcgagggctataatgccacggtgctggcctatgggcaggacgactgggtttggattcagaagagga

SEQ ID NO: 778455 - DNA, 75 bp, Homo sapiens
cttcggtggactccttcggcagtccacccaccgccgccgcctcccagggggcaaatatggccaaacagattggag

SEQ ID NO: 778456 - DNA, 100 bp, Homo sapiens
tgtcaacaaccgtggctcacaagatgaaagagcacgacatatttgacagtgattggtacacttctcgaaatctaattgggggcgctgacatcattgtgat

SEQ ID NO: 778457 - DNA, 100 bp, Homo sapiens
ctcatcgtgatcccggcgacatactacctctggccccgagatcagaatgccggcatgaacaaccgggaggtgctggagcaggtggagcgaggctacagga

SEQ ID NO: 778458 - DNA, 82 bp, Homo sapiens
gcggcgaggaggcgctcatcatcccccccgacgccgtcgcggtggactgcaagggggatatgagactttctactcggaatat

SEQ ID NO: 778459 - DNA, 95 bp, Homo sapiens
tggctcatagttccctccagattgtcctcgcaataccatgtttgtgtggaagtgccccgtgtttgctatgccgatgctgtcctagtggaaacaac

SEQ ID NO: 778460 - DNA, 75 bp, Homo sapiens
agagagaaggaatccaccttcttacgctatggcaggtgaccatggaggaagaagatgagtctcgagggaagacag

SEQ ID NO: 778461 - DNA, 100 bp, Homo sapiens
gttcattgtgaattgcacggtgaacgttcaagacatgtgtcagaaagaagtgatggagcaaagtgccgctctttccaacaactgatcctgtgggtacttt

SEQ ID NO: 778462 - DNA, 75 bp, Homo sapiens
cccagacaagctgaaggaccacagtcagaagaagaagttgtagaaggagagaaggaagtcgaggctttgaagaaa

SEQ ID NO: 778463 - DNA, 83 bp, Homo sapiens
tgatgatatccttctcaaccttgtgggatgtgaaaactctgttactgaaggtgacttaagagattaaaattaatttggttgct

SEQ ID NO: 778464 - DNA, 90 bp, Homo sapiens
cacctgggagcgacgggcggcccaggcgcgcagctgggcgcctccttcctgcaggccagcgcctagaagcctgcagctccggagcagtgg

SEQ ID NO: 778465 - DNA, 75 bp, Homo sapiens
cctcagccccctgagtagctgggattacaggcacgcgccaccactcccaggatgcttgaagcccacatgcagagc

SEQ ID NO: 778466 - DNA, 73 bp, Homo sapiens
gccgcgttggcctcgccgcccctgctcggctgagtgactgctaccgaggagtggtgtttgatggcctcgacac

SEQ ID NO: 778467 - DNA, 101 bp, Homo sapiens
ccggggacccttccgtatctgcctaggcattttgctgtctcctcctaatacggttgtgggattcaagaacttagcattaatggactcatcttctagtcttt

SEQ ID NO: 778468 - DNA, 50 bp, Homo sapiens
tgtacccggtggactcggtgaaggacatgctgggcctgcgccccccactg

SEQ ID NO: 778469 - DNA, 83 bp, Homo sapiens
tctgcgtcctcatcgggcttatgttcgaggaagagcccgatgcccttggtttgactctactaagagcccctcagttgctgaac

SEQ ID NO: 778470 - DNA, 73 bp, Homo sapiens
tcatcatgtctgcaggcccccaggcaataaacctgtgaaggtcgaaacagctgcgtttcctgttttaatgtta

SEQ ID NO: 778471 - DNA, 98 bp, Homo sapiens
gaagaaataatggcaaataacttttccttggagagtcataacatatcactgactggtttcctatcctgggagcaggagagtgtgcctatttgaatgac

SEQ ID NO: 778472 - DNA, 75 bp, Homo sapiens
ttaaagatatggactccagttatgcaaaaagaggtgcttcctttcacaactttttccagagggcaggcgtcctag

SEQ ID NO: 778473 - DNA, 98 bp, Homo sapiens
gcgcctgtaaccccagctacttaggaggctgaagcaggagaatcgcttgaaccccggaggtggaggctacacccctctgaaatcaaagagatcttgca

SEQ ID NO: 778474 - DNA, 96 bp, Homo sapiens
ctgacatggaggatgatttcatgtgcgatgatgaggaggactacgacctggtgacttaagagattaaaattaatttggttgctgttggttctgaac

SEQ ID NO: 778475 - DNA, 97 bp, Homo sapiens
cgggagggctgtacagctgcgacatcaccgcccgggggccatgcacgcggatcgagtttgataacgatgtggttggcacttaccatggttccccaga

SEQ ID NO: 778476 - DNA, 100 bp, Homo sapiens
cttcggaggcctatagcccgcagtgctgttgggacattcgccagagccctggattgcagcagttctgtgaggcagcctagtttgcatatgagtgctgctg

SEQ ID NO: 778477 - DNA, 100 bp, Homo sapiens
gcgcgctcgtctgcctggactgttgcgggccccgggacctgggctgggaacccgcggtggagcgggacacgaacgtgtgtgccgtgcaggtgaagctgga

SEQ ID NO: 778478 - DNA, 100 bp, Homo sapiens
aggagcctcaaggcggcccggcgggcgactggacggccggacaggtacaaagaacggcaccaggtgcagttgttagggcgaggcttcattgcaggcattg

SEQ ID NO: 778479 - DNA, 100 bp, Homo sapiens
gctcccccgcctcccgggctgagggggaggtggggaagacagggctccagctaccacaggacgggctctgggtatagccgttccagtcagggacagccgt

SEQ ID NO: 778480 - DNA, 50 bp, Homo sapiens
cagtgagctccagcagcagctcaagaatcccgtcacggggctgctgtcag

SEQ ID NO: 778481 - DNA, 75 bp, Homo sapiens
aggtcgccctcaaggccatgatcaaaactaatctcaggggcgatataatcaatgaggtggtcctaaagttgctca

SEQ ID NO: 778482 - DNA, 83 bp, Homo sapiens
gatgggatccagctgttagtcggctggacccgcaggccctgcaggacagagactggcagcgcgccgtcatcgccatgaatggg

SEQ ID NO: 778483 - DNA, 100 bp, Homo sapiens
gacaatccaatccagacagtttcccttggccagtccctgttcttccatttccccccactgctcagagacggcgaggagaagtttgaagtgcagcactctg

SEQ ID NO: 778484 - DNA, 75 bp, Homo sapiens
gcggagaggaaccggtggcatcgtctcccgagcctgctcctgccgccgaggagctctttgttcaatgcctagcca

SEQ ID NO: 778485 - DNA, 100 bp, Homo sapiens
ggaccagtgtgagttcctgcatgagtatgacatgaccaagatgcccgagtgctacttctactccaagttcgacacagagattgactggaaggcctacatg

SEQ ID NO: 778486 - DNA, 97 bp, Homo sapiens
aacgtgcggtgggaccacgagagcatcgtcagtatttaaacagatcacatcatgcgtgagtacaagctagtggtccttggttcaggaggcgttggga

SEQ ID NO: 778487 - DNA, 100 bp, Homo sapiens
cagaaagatggaaattaagcctttgcaatttgaaattatgattgacagacttgaaaaagccagttctaatcagattttcagctgaactctcatctctcaa

SEQ ID NO: 778488 - DNA, 99 bp, Homo sapiens
ttgggggccgaaggcagttctgcaagaggagctattctgatcttgagcgatcgtcttctgatcaaaggaggtaaaattgttaatgatgaccagtcgttc

SEQ ID NO: 778489 - DNA, 100 bp, Homo sapiens
tggaggaaacttcagtggtcgtggtggcggcgactttgaataaccttgcagtcctttatggtaaaagagggaagtacaaagaagcagagccgttgtgtaa

SEQ ID NO: 778490 - DNA, 75 bp, Homo sapiens
taccatcctgaaccccatttattcgatcaccacgctacgagagtacaaggtagtgggtcgctgcctgcccacccc

SEQ ID NO: 778491 - DNA, 100 bp, Homo sapiens
gtcctctccagactccacccttctccaagggggacataatctactctcatcagccagttttcagaatttgccattttcagtggaaaacaagtggtcgtta

SEQ ID NO: 778492 - DNA, 141 bp, Homo sapiens
cgcacgtctgctcggagatcatttgggagatccaagagattcagtatcactcgctcccttgatgatcttgagagaaccatggagtctggcagtaccgccgccagtgaggaggcacgcagccttcgagaatgtgagctctac

SEQ ID NO: 778493 - DNA, 75 bp, Homo sapiens
gtgtgaatttggaagggatcgtgtggcatgaaacagaagaaggagtgttgcatgtactgtggtagaaatgctaac

SEQ ID NO: 778494 - DNA, 121 bp, Homo sapiens
ggaacagcactgaaatcctttctcgcaatcttcctgcattgtacacagcagcgactgggaagaaaaataatccttctgacaacacatattcagacacatatggtcagcctcatgaagctct

SEQ ID NO: 778495 - DNA, 97 bp, Homo sapiens
ctacaagcaaaccatcttctgctggtggagaacttcttgatttgctgggagacatcaaccttacagggaccgacgtcatggttcggtgcctcaagct

SEQ ID NO: 778496 - DNA, 74 bp, Homo sapiens
gatggggccttcacctgctgcaccaatgacaaggccacccagaggccccacagtatcaaatatccgcctggctg

SEQ ID NO: 778497 - DNA, 97 bp, Homo sapiens
catagtccttgcgtctctctagaagatggcgaattagaagatggtgaaatagacgatgcaggatttgaagaaatacaagaaaaagaagcaaaagaga

SEQ ID NO: 778498 - DNA, 100 bp, Homo sapiens
tgcaggactctttcttaatgcagcctgagatagtggccagaactatagtgccagtagtaaaggtgaacgactaagtgccagactcagagctttacctggg

SEQ ID NO: 778499 - DNA, 90 bp, Homo sapiens
tgaagagcgacaagccgctggcagccgcggatctcaccgccgctcaggggtggcccagttgaaatccttcccttcctctaccttggaagt

SEQ ID NO: 778500 - DNA, 75 bp, Homo sapiens
tgaatatccagtttgagccatcggatctaagatccaaaagtattgaatttgaccgggattgtgactattttgcga

SEQ ID NO: 778501 - DNA, 83 bp, Homo sapiens
ctcactgagctggaagtcattcaacgggaattgaatagttcatggcctcccacgggaacgacgccgcgagagccaggtttgag

SEQ ID NO: 778502 - DNA, 82 bp, Homo sapiens
gcggacagcgggctggagcctgacgagctggcggagcctgtttaataaattagtagaactcactgaggaggccaggaaagca

SEQ ID NO: 778503 - DNA, 96 bp, Homo sapiens
tgaatgggcggatctcatatcttcacttggcaaactcaacaaggagtctcgctctcagtcaaaatctccaacgggaactcctgctcgtgtaaaatc

SEQ ID NO: 778504 - DNA, 51 bp, Homo sapiens
cgtaacgccacaaggaataatggagacattttaaatccaaaggatgtgatt

SEQ ID NO: 778505 - DNA, 83 bp, Homo sapiens
gcagaggctcccgggctggactcaggcttctcaggattttcaaaatggctgcagctcctcaagcaccggggcggggatctctc

SEQ ID NO: 778506 - DNA, 100 bp, Homo sapiens
gcgccaagagaacatggagctggctgagaggctcaagaagctgattgagcagtatgagctgcgcgaggaggtccagatggctgtggaggccaagtttgtc

SEQ ID NO: 778507 - DNA, 110 bp, Homo sapiens
gggccggccagaagcgggcggcgcgggggagatggtgacagagttagtccttgataattgcctgtgtgtcaatggggaaattgaaggcctgaatgatactttcaaagaac

SEQ ID NO: 778508 - DNA, 50 bp, Homo sapiens
caccagcaaactcagcaccagatcttagtgcaacattgctctgcaaactt

SEQ ID NO: 778509 - DNA, 83 bp, Homo sapiens
gccctgaggagtccccgctgcttgttgttgacctcctgtactggagagacattaagaagactggagtggtgtttggtgccagc

SEQ ID NO: 778510 - DNA, 98 bp, Homo sapiens
acttttgtaacaaatatttgcggtttcagcctcaacccagaggaatcgttactctttcaggtattgtcaatatggactcgccatatggttctgtaaca

SEQ ID NO: 778511 - DNA, 76 bp, Homo sapiens
aagctggccttggcagtttcggtgcatagaaaatcagatcatggaccaggccataacggtgggggctccagtgatt

SEQ ID NO: 778512 - DNA, 95 bp, Homo sapiens
caacgtgctggagagaccccgcggctgggcgttcatctaccacgctttcgtgctgccattggacctgtcaagtgcctgagtcatgtgataatggg

SEQ ID NO: 778513 - DNA, 80 bp, Homo sapiens
aagcaccagttcaagtggccctcagggcatccccgttttcgcccaagaagatgaaaggattgttcttgttgacaacaaat

SEQ ID NO: 778514 - DNA, 96 bp, Homo sapiens
gtggagagctactcaaaattctacgttagagagactgaaaagacatctaatttcattgctcggcagattgagtctgtttctcagccattggaaaac

SEQ ID NO: 778515 - DNA, 83 bp, Homo sapiens
actttgcattgactggaaacaatggcatttacagaaagagtcaacagcagtggcaacagtgaagctgtggtctaccaatctag

SEQ ID NO: 778516 - DNA, 100 bp, Homo sapiens
ggatcatgtctgcgagccaggattcccgggacctcaggatggaaaccagcagcctgcaccgcccgagaaggtcggctgggtccggaaattctgcgggaaa

SEQ ID NO: 778517 - DNA, 90 bp, Homo sapiens
ggatttgttaaggattccaagtaactcttatttggagatatgtcagtattgaattctcccagacatcagagctgtataatgcatgttgat

SEQ ID NO: 778518 - DNA, 75 bp, Homo sapiens
ctttacgattccaggacaagcttttgtccccaaaccagagattctttggatgggaagagaccttgaaaggacctc

SEQ ID NO: 778519 - DNA, 101 bp, Homo sapiens
tgggagccgcctccgtcgccgccgtcagagccgccctatcaggtgctgctacccccgtatgatgatgccactgtgaatggtgctgccaaggagccaccgcc

SEQ ID NO: 778520 - DNA, 98 bp, Homo sapiens
gctcattcataggatataaagagaaacctcaagatgtggatttaccttatcccctcaacaacttttcagtggcaagtcagcctcagatgtcacaacct

SEQ ID NO: 778521 - DNA, 75 bp, Homo sapiens
tccagcctgccagacagaaagttatggtgaaaggaggaacgctaaaggatggcagtcagtcaaaattaggaggag

SEQ ID NO: 778522 - DNA, 95 bp, Homo sapiens
acatcagccggctccaggctgagattgagggcctcaaaggccaggttatcaagactctgattctgccccggctgcagcaggaaggggagcggatc

SEQ ID NO: 778523 - DNA, 83 bp, Homo sapiens
acaaaagccaagaggaggacagttcgctacacagcaatgcatcgaggtgagatcggactggaactgttcggctgcgaccagaa

SEQ ID NO: 778524 - DNA, 88 bp, Homo sapiens
tgtcgaaaagaaatcagaaatggaaagtgttttggcccaggtagttgaactaaaattcggtgggaaagacatccctgtcaccagcgcc

SEQ ID NO: 778525 - DNA, 75 bp, Homo sapiens
gcaggaggaggaggaggggctccggctggtctgtggtgagatggagtcatcagaacccactgtgaggaagtgact

SEQ ID NO: 778526 - DNA, 100 bp, Homo sapiens
tggggacaacagtgacgaagagaactgtctcctggtgaccgagcacccgcctccgggcatcttcaactctaatcttccagtaccaacaattgcagcaata

SEQ ID NO: 778527 - DNA, 75 bp, Homo sapiens
acaaggtctggcagcaggcatgccaggatggacctggcttctatactaccaggtgtcttgcgcccatgatgtctg

SEQ ID NO: 778528 - DNA, 80 bp, Homo sapiens
gtctccattatttgagatgagttacatcttggaggtgttgagaagatatgtagcagccgagcacccatcttttgacaccg

SEQ ID NO: 778529 - DNA, 90 bp, Homo sapiens
gcggcgattgttagaggggctttcttactacaaacctcccagaaactggcgatggaatatgagaggagccctctggaaagaaaaggacag

SEQ ID NO: 778530 - DNA, 90 bp, Homo sapiens
ggcccagagatgaccccttatgaaggaaccgagctgtggcctggggttccatggagcaggtggggcgcggaggaactgagctgtggcctg

SEQ ID NO: 778531 - DNA, 100 bp, Homo sapiens
ccgttaagtcccccaaagatgagatttacctgtgagatgtttcatcccaacaagctacatgagcaactcctggcgcgcacctctcgtgtggaagatttag

SEQ ID NO: 778532 - DNA, 100 bp, Homo sapiens
aatacgtctgaacctttgctgtctatggatctgctctaaaccttatagcctgcttatgggggaagaaatgcactcggtgatggaaagagagccactattc

SEQ ID NO: 778533 - DNA, 100 bp, Homo sapiens
cgaagctggatgagaactcggccttccttcagttcaactggaaggcggacgtggtggagtcctggatcgacttaatgaacaagccagtgaggagattttg

SEQ ID NO: 778534 - DNA, 82 bp, Homo sapiens
gccagggcctggactacttctacgacctgctctagggaaatgatggcgggaacacagcaaaggagaccatgtcctggagagg

SEQ ID NO: 778535 - DNA, 75 bp, Homo sapiens
cttcagcggggcgctccaggaggcactcacaggatggatagaatgacagaagatgctcttcgcttgaatctgttg

SEQ ID NO: 778536 - DNA, 75 bp, Homo sapiens
catgaacggatggatgtgatgcctgctagccaaaaggacacgatgaggcgagtggtacgacagagcaagtttcgg

SEQ ID NO: 778537 - DNA, 74 bp, Homo sapiens
tgatggagagctgaacattactcttccagaagagatacttgccagaactaatacagctgatgaaatacctgacc

SEQ ID NO: 778538 - DNA, 100 bp, Homo sapiens
gaaaaactatgaagatgaagattcattgaagacgcttcgttatgggaagataatgattatgacagatcaggacctggaagaacagctagacgaggaggaa

SEQ ID NO: 778539 - DNA, 80 bp, Homo sapiens
agccgatccagcctgcggagcctgtggggcagttcaaaaggtgatgacctatcaacagccattctcaaacagaagaaccg

SEQ ID NO: 778540 - DNA, 51 bp, Homo sapiens
gagtggccctgacggaggggaggaatcacccacaaaagctgtatataatgc

SEQ ID NO: 778541 - DNA, 100 bp, Homo sapiens
ccttccacctcgacctctggttctacttcacactgcagaactgggttctggactttgggcgtcccattgccatgtctccctttcctggtgatgatgaaga

SEQ ID NO: 778542 - DNA, 100 bp, Homo sapiens
gtggggttggtgtgattagcttcgcagtctggaaagctttaggagttcacagtgttagaattgcccctactgtcactacctggagtaacaaaactcctac

SEQ ID NO: 778543 - DNA, 75 bp, Homo sapiens
cattatcacaggttcagaagatggaaccctaaggactctgcaatatgaataattccctagagaacaccatctcct

SEQ ID NO: 778544 - DNA, 74 bp, Homo sapiens
cccgaactgcaagttgcttattgtttcaaatccagaacattactactggatggaaatccattccgagttcctcg

SEQ ID NO: 778545 - DNA, 100 bp, Homo sapiens
ttcaagcaacattgtgattttaagactcataactagttcacatccaagcatttgggtaacaatgacttcagtgccctgaacggttagagaaattaatgaa

SEQ ID NO: 778546 - DNA, 82 bp, Homo sapiens
ggaagttaatgtttacggcgaagtctactcaacgtttccaagtttaagctatgaagaaggacatccctcacactctgaaaca

SEQ ID NO: 778547 - DNA, 100 bp, Homo sapiens
cctccgaaaaccacctcagccgcttcgtgtggttcttttctggcatcgtaggaggtggcctgctgattttcagctgaactctcatctctcaacactggca

SEQ ID NO: 778548 - DNA, 80 bp, Homo sapiens
aaatgtggagccccgaactgcagtggcttcttgggtgtaaggccaaaggtgtagagttcggtgctcgaatgataactatt

SEQ ID NO: 778549 - DNA, 75 bp, Homo sapiens
ctgggggccacagctgcttcaattcatgctggtcctggccagcaatctgcctgagcagttcgactgtgccatcaa

SEQ ID NO: 778550 - DNA, 100 bp, Homo sapiens
tgggtcctgccttcgcgctgaggagccctcgttttcgagatcaggcctgaccgggataagctccagttaccttatcccatatcacacaactggtcctcag

SEQ ID NO: 778551 - DNA, 50 bp, Homo sapiens
acttcgtcccactgtggttagggggtgaagctctgggcctcggcttttgg

SEQ ID NO: 778552 - DNA, 89 bp, Homo sapiens
ctccgctccgagcccgtccggactcccccgatcccagcacacagcaagaaggaggccatcagcaaactgggaagaggaccctcaccagg

SEQ ID NO: 778553 - DNA, 100 bp, Homo sapiens
taactcctgaagggctccaaatggtaaagaaaaactttgagtgggttgcagagagagtagagggatgccagtaaaactgtgagcagcccacccacctccc

SEQ ID NO: 778554 - DNA, 80 bp, Homo sapiens
caggctgaagacagagggctctgatctgtgcgacagaggcgtctctggccgagcctctttttgtggaaaacgacagcagc

SEQ ID NO: 778555 - DNA, 82 bp, Homo sapiens
ctgtccagcatcctttagaagaatccagcaattctgtggtgttcttggtcacacatttatggagtttctgaagggcagtgga

SEQ ID NO: 778556 - DNA, 100 bp, Homo sapiens
ttctgaatcctgagacgacagtggtggccatcttcccatctcccatgatgtatgctggaccaactgagaacttttgcgactttcaggaccagtcatgcag

SEQ ID NO: 778557 - DNA, 83 bp, Homo sapiens
ggggaatttctcctggggctcagagtccctgctgttcgtggcatttgccctgtgtatgttttgcctgtacagcttcatgccat

SEQ ID NO: 778558 - DNA, 75 bp, Homo sapiens
gacatgatgaagaattgatatcacattatagaagagaatgtttgctaatttaaagacttgtattgcaagtactac

SEQ ID NO: 778559 - DNA, 75 bp, Homo sapiens
gttttcttatatgtggtgctacgggccagtttctgtagaaaatgtttcctgactgcaatgagggaaagcggagca

SEQ ID NO: 778560 - DNA, 100 bp, Homo sapiens
attttaaccgaggcacggacaacatcaccgtgaggcagggggacacagccatcctcagttctagacctggaaggcctcctaagaggactcaaagtgtcac

SEQ ID NO: 778561 - DNA, 100 bp, Homo sapiens
gaactgtcaaagaggtgctgcccgctttggagaacaacaaggagcaggacttccatagcttggccacctatttgtctcagaatacctcatctgtgttctt

SEQ ID NO: 778562 - DNA, 50 bp, Homo sapiens
cacacctccggaccgagggacgcgggtggagctgatcagaataatgttca

SEQ ID NO: 778563 - DNA, 75 bp, Homo sapiens
ctagtggccacgctgcagagcctcggtctcatagatgatggtgaaaccccagaagcagctgctctccgggagctt

SEQ ID NO: 778564 - DNA, 75 bp, Homo sapiens
ttatcttcaagccgatgacggaaaaatagttatattccagtgggccgaattcattttgttttcctgcctcctgct

SEQ ID NO: 778565 - DNA, 100 bp, Homo sapiens
atttagttctggggagcgcctcgtcgacatgagtgatgtggaggaaaacaacttcgagggcagagctgtattcatcaccaaagaaaaaacttacaccaat

SEQ ID NO: 778566 - DNA, 98 bp, Homo sapiens
gcgccgccgctacgggaccgcctgagctttctacaccggactgggccagtgccattcgcgtcgcagctctggactgcatggaagagaagaaccaggcc

SEQ ID NO: 778567 - DNA, 74 bp, Homo sapiens
cgacaagcgcttcgtcatggaggtcgaagtggttctggaaactttggtggtggtcgtggaggtggtttcggtgg

SEQ ID NO: 778568 - DNA, 76 bp, Homo sapiens
gaaagccctgaagcagaagggcatcaccgtgaagcagaagagggacccagacatggagctgcgggaagaagcctgg

SEQ ID NO: 778569 - DNA, 74 bp, Homo sapiens
tccccggcggcagcacgaaagtaccatggaggtggttgactcaatggttcagcattttaaagtaactatatttg

SEQ ID NO: 778570 - DNA, 83 bp, Homo sapiens
acctgatccggagaatcgaggagctcaacaagagaggtggagaagagcgagtacttgagaaagaagaggaagaagatgatgat

SEQ ID NO: 778571 - DNA, 75 bp, Homo sapiens
gtgatgttctcggcaggagcggagagtttgctccaccaggccagcggacaaggcaaaatctcagcaagttcggac

SEQ ID NO: 778572 - DNA, 100 bp, Homo sapiens
agacccacaggagccccggacttcacctgagctacctcagatgatcaagcggtgctgattcacgagagtggaagcctccagagcttggggctttctggct

SEQ ID NO: 778573 - DNA, 100 bp, Homo sapiens
tgaaggacacagacagtgaggaggagatccgagaggcgttccgtgtctttgacaagccacagagctcctgatcctggcccatcattgcttcaccctgacg

SEQ ID NO: 778574 - DNA, 100 bp, Homo sapiens
tcacgcgcttctgcaatccaagccgactgatgactggagaggatggctactatttcaccaatctggagccaccatgttggtgataccccccggactgagc

SEQ ID NO: 778575 - DNA, 80 bp, Homo sapiens
aaagaagatgatgctccaagaacaatagcttgccctcataaagtcagcccaaggccaaccccactgtcactctgttcccg

SEQ ID NO: 778576 - DNA, 101 bp, Homo sapiens
aggcagtcggctcaactatgcagaaaacctcctgcggcacaaagagaatgacagagttgccctttacattgcaaatcactttgggaagcagtgacatccaa

SEQ ID NO: 778577 - DNA, 134 bp, Homo sapiens
ggagagcaagaccatcatgctgcgcggccttcccatcaccatcacagagagcgatcaacacagtcactcctggcggcaaaccaaacaaaaccagagtcatctggggaaaagtaactcgggcccatggaaacagt

SEQ ID NO: 778578 - DNA, 82 bp, Homo sapiens
ccggcacctgacggcgtgaccgacccgagccgcagcccctgtcaaagggaacaggaagcagtccacggagggtgacgcccta

SEQ ID NO: 778579 - DNA, 98 bp, Homo sapiens
tgctgcagaggatggcgtgcgaggtcgccgcggggctggccgccatgcacaagctgcacttcctgcacagggcactagctgacatgaataatgatgga

SEQ ID NO: 778580 - DNA, 75 bp, Homo sapiens
ctttccggatcaatccagatggcagccagtcagtggtggaggtttggctctttaaccatggatggtggccttcgc

SEQ ID NO: 778581 - DNA, 83 bp, Homo sapiens
gccgatccagcctgcggagcctgtggggcagggaactgtctgggacctttgctcatctgtgtcagcaagttgacgtcacccgg

SEQ ID NO: 778582 - DNA, 100 bp, Homo sapiens
gaggatgaagattcaccaaataagctatatactttggttacctatgtacctgttaccactttcaaaacaagctatagtcagcagactggacctcaacaac

SEQ ID NO: 778583 - DNA, 90 bp, Homo sapiens
agaatgtccacatcctagacactctcacgagtcgaatcaacaccccgtttcgggaatccaaccacccaggtcaaacaggaggttttgtgc

SEQ ID NO: 778584 - DNA, 100 bp, Homo sapiens
ctgcagtgaagattgctgtaaaaaatttcaggattggtactacaagcttcaacattgctttatggcatgtgtggtcgtttttcactccattgttgttgtt

SEQ ID NO: 778585 - DNA, 82 bp, Homo sapiens
ggcaccgaggcactcagaggagggcgccatgttttggaagtttgacctgcacacaagctcgcacctggacacgctgctggag

SEQ ID NO: 778586 - DNA, 90 bp, Homo sapiens
ttggtgccctcaacatctctcagagacgaaagccacaggaggaaattgctactaagaaactccgactaacaaaaccaagtaaatctgcag

SEQ ID NO: 778587 - DNA, 100 bp, Homo sapiens
aacctggaggactccattgacaacaaggctttatatgataccttctccacctttgggaacatcctctcttgcaagaggaacttcctgaagtgctccgaag

SEQ ID NO: 778588 - DNA, 100 bp, Homo sapiens
aaatggtcccggctgctgcagggcgggggcgtccccaggagccggacaggaaaccactgattgcttgtgtggagaaacagctattaggagaacatttaac

SEQ ID NO: 778589 - DNA, 100 bp, Homo sapiens
agtaaatgattttatcatcaaggcagcagctgttacccttaaaaaagctgatgtcctgaccactggagctggtaacccagtaggagacaaacttaatgtt

SEQ ID NO: 778590 - DNA, 82 bp, Homo sapiens
ccatcgccacgttctctgccaatccggaggcaaaaggtgtcgtgaaaactacccctaaaagccaaaatgggaaaggaaaaga

SEQ ID NO: 778591 - DNA, 100 bp, Homo sapiens
gcaggcagcaccggaggcccaggtctccgtgcagcccaacttccagcaggacaaggtgaatgggcttgcagcccagggcaagtatgaaggcagtggagaa

SEQ ID NO: 778592 - DNA, 74 bp, Homo sapiens
acccaataaccaggtgcttggcaaaatcgagcgggccattgagctagagccggtgcaggccacgcagaacaaga

SEQ ID NO: 778593 - DNA, 83 bp, Homo sapiens
ctatgagagaggaagaatatattttgacaattatcggcgctgtgtcagcagacagaaccaagttgtattgttagacacactgg

SEQ ID NO: 778594 - DNA, 50 bp, Homo sapiens
gaggaactggcccggaaacaggaggacgttgcacactgggccacagagga

SEQ ID NO: 778595 - DNA, 83 bp, Homo sapiens
gggaaatatctctggagaagccctcactccaaaggctgtccaggcgcaatcaaaagactgttgaagtagagagcattttgccc

SEQ ID NO: 778596 - DNA, 82 bp, Homo sapiens
gtgtattatggataccaaggaagagaagaaggaacggaaacaaagttattttgctcgttgcagataataatgaagatgttga

SEQ ID NO: 778597 - DNA, 74 bp, Homo sapiens
ggaaacaattttgggactggagccctcaaatgcaacactttgtgcaggaatttttatgtggtgggaagggcctg

SEQ ID NO: 778598 - DNA, 50 bp, Homo sapiens
gcgccgcagtcccgggaacggaggatcccaatgaagatacagaatggaat

SEQ ID NO: 778599 - DNA, 114 bp, Homo sapiens
gcggccgagtcaagccgccgcctcgacccagggcccgcgggccaggagagcgctcggcggggagtgcatccgccccaacccttttccccctcgtctcctgtgagaattccccgt

SEQ ID NO: 778600 - DNA, 75 bp, Homo sapiens
cccacagtgggggtgtgcaaacccgagagaactggggagaaacaaaggcagcgctgccctcgggggagcattggc

SEQ ID NO: 778601 - DNA, 90 bp, Homo sapiens
attggcgaccagcgcttcacgtcaagtccatcatctccagaaccagctagtcttcctgcagaagatattagtgcaaactccaatggccca

SEQ ID NO: 778602 - DNA, 82 bp, Homo sapiens
cgtacccaccggagcctggcgcagcctccctctattaccaggactttgtgttttatgccccacgtctgagaatcaacaagcg

SEQ ID NO: 778603 - DNA, 90 bp, Homo sapiens
ccggcacccagacaggtggcgaaggcagaggaagacacctatggctgccgatgaaggctcagcagagaaacaggcaggagaggcccacat

SEQ ID NO: 778604 - DNA, 75 bp, Homo sapiens
tcctcggcccctggctcctgctcctgggtacatcgagtacatgtgtgacatggtggcggaggagcccatcacacc

SEQ ID NO: 778605 - DNA, 101 bp, Homo sapiens
tatgaagcggttggcaccactgaagtgaccgaatgagtaagactttgaccccgacgcaggcttcagtgattgccgcggatcagaagcctgagcactttggc

SEQ ID NO: 778606 - DNA, 100 bp, Homo sapiens
tgcttctcgaaaaaaaccttcaggcggcccatggcattaaagggcagtatttaaagtcagttggcaagcagtggaataagatttttgtaaagaaaccttg

SEQ ID NO: 778607 - DNA, 83 bp, Homo sapiens
ccggatctcagctccgacgcccgaggagaaggaggagtggattaagtgcattaagtgcccgtggttgacacgagctgtgtccc

SEQ ID NO: 778608 - DNA, 50 bp, Homo sapiens
gatattcctcatgacattgctgtctgagttttccgtctgatgaaggttgg

SEQ ID NO: 778609 - DNA, 97 bp, Homo sapiens
gtggataccttggcctttgacgggcggacctttgtcgagtacctcaacgctgtgaccgagaggcatgtcgggccccaggcctgtggtgctgagcggg

SEQ ID NO: 778610 - DNA, 128 bp, Homo sapiens
cgcggctgcgcttccgacggggcggccgggggctcagagatccaagtgcgcgccctggcgggtccggaccaaggtgctggagaatctggtaaaagcaccattgtgaagcagatgaggatcctgcatgt

SEQ ID NO: 778611 - DNA, 101 bp, Homo sapiens
cgtggagcagaacgtgctgcagcagagcgcggcgcagaagatgtccagggtgctgcagaaggacgcggagcaggagtcacagatgagagcggagatccagg

SEQ ID NO: 778612 - DNA, 107 bp, Homo sapiens
agcctcatggagcggcggaggctcaaccagctgctcctgcccctgctgcagtggaatgcagtagccctctgggcctgggatattgtggttgataactgtgccatctg

SEQ ID NO: 778613 - DNA, 82 bp, Homo sapiens
ttgaaaaagctgccctgagacggtgtcccgccgaaagccacgccgcaatgaagagcttcttacagtgaaagcaaagtaggtc

SEQ ID NO: 778614 - DNA, 101 bp, Homo sapiens
ttgacagataaagatggtgaacaacctcaaatactgctggcaactatggtcctgagctccgcacacttctggttgggattatttctggttcctactgcctg

SEQ ID NO: 778615 - DNA, 90 bp, Homo sapiens
ggcggcggcggtgccggagcgcgagcagagcggagacccccaggtcctgcgggcgcgtacctggtgtgtaagaggaagctggagagtaag

SEQ ID NO: 778616 - DNA, 83 bp, Homo sapiens
gggaaccaacccactttctcggcgccgcggctcttttctaaaagtatagcaaagccattgtggatgggaacctgaagctcatc

SEQ ID NO: 778617 - DNA, 100 bp, Homo sapiens
tataaagaacaaggctttgaaacattgcagcagcggtgtggctacagcaaagcaaaacaagatccagaagaggaaaagatgcattttcataatgggcaca

SEQ ID NO: 778618 - DNA, 110 bp, Homo sapiens
ggggacaagtggttagatgaactggattctgggctccaaggagaactagtggctctgaagaaggtgagactagacaatgagaaagagggcttcccaatcacagccattcg

SEQ ID NO: 778619 - DNA, 98 bp, Homo sapiens
aagagttgggcaaaaaaatcaaggtatttggtcccggaacaaagcttatcattacaggggaacgcccttttgcttgtgactggcagggctgcgacaag

SEQ ID NO: 778620 - DNA, 100 bp, Homo sapiens
cgcgactgggaggagcgccggaacgccgaggcccagatcctgaaggacacagccctgcagaaagtgaagcgtggccagagctgcctggagccctgcctgc

SEQ ID NO: 778621 - DNA, 74 bp, Homo sapiens
aagaggaagaggaagaggaagatgaagaggaagactatgatgtttataaaagctccagtgatccacaagctcag

SEQ ID NO: 778622 - DNA, 102 bp, Homo sapiens
taagagaagtcacaaaacagcagatttcccaagagcagcggaaaatgatccagtcacaggtttgtgggggagagaaaccttatttgtctccagacattctag

SEQ ID NO: 778623 - DNA, 100 bp, Homo sapiens
cttgacgcggaaaaatctgctatattaggccttggacaagattcgctatgagagcctgacagacccttcgaagttggacagtggtaaagagctgaaaatt

SEQ ID NO: 778624 - DNA, 100 bp, Homo sapiens
gtataaacgattccacggggcctttagtggaggtttctctgctggatacttcaatactgttggctcaaaagaagcctagagtcctggggagcttctgtcc

SEQ ID NO: 778625 - DNA, 83 bp, Homo sapiens
ctccactgcctttaaccctcagcctcagagtcagatgcaggcaaaatgatgcttcaacacccaggccaggtctctgcctcgga

SEQ ID NO: 778626 - DNA, 90 bp, Homo sapiens
accgcgctgagcacgttcttccaagaaaccaacattcccaacagccaccaccaccaccagatgcacttctccaccgacccagtggccgcc

SEQ ID NO: 778627 - DNA, 82 bp, Homo sapiens
accacatagacatttacgcggatgtcggcgaagagttcaaccagggggggccctcagcctcttggccttgaacgggctgttc

SEQ ID NO: 778628 - DNA, 98 bp, Homo sapiens
tcggagctgcccttcagtgtggacagagcgggatgccaccagcttgtccaaagggaagttccaggagctcctggtgggcatcgttgtggagaatgacg

SEQ ID NO: 778629 - DNA, 76 bp, Homo sapiens
ctgcggcgcacgccttgcccgcccaggcctctggctgtacctggcagggagcagcctgccctgtctcacgctgatt

SEQ ID NO: 778630 - DNA, 75 bp, Homo sapiens
caagggagtcaccttcaatgttaccaccgttgacaccaaaagctttaccgatttgttacaactcaagcaagggcc

SEQ ID NO: 778631 - DNA, 75 bp, Homo sapiens
ttttgacctgagcagatgaaaggatgcagttaccatgaaggctgcagatgaggttttacagctctttaaaacact

SEQ ID NO: 778632 - DNA, 100 bp, Homo sapiens
ggtgaataaagaagtggagcgtgtcctgaaggagttccaccaggccgggaagcccatcggaatagcctaacatggcagaccagagacagcgctcactgtc

SEQ ID NO: 778633 - DNA, 71 bp, Homo sapiens
tctcggcctctgccggagaaacaggtacaagtatgagttctgcccgttccacaacgtgacccagcacgagc

SEQ ID NO: 778634 - DNA, 100 bp, Homo sapiens
atttcatggtacatgagtggctatcatactggctattatatggttctgtacagagtaatgagatgtgtgacggctgcaaaccaggtgtttttttctgagg

SEQ ID NO: 778635 - DNA, 83 bp, Homo sapiens
atactcctcccagtgacgggtctggagtgcgtgggggaccggctgttggcgggttcgtgctggccgtgggcagcgccgtcttt

SEQ ID NO: 778636 - DNA, 100 bp, Homo sapiens
ctgtcattcacaaccccctgaaagcttttatgtgatagaatatgcagcatgtgatgcaacttacaatgaaattgtcacaattgaacgtctaagatctgtt

SEQ ID NO: 778637 - DNA, 100 bp, Homo sapiens
aatgggaatgccaaataagaaatttctggttaaacaaaatccttctgaaacaagggctgttgcagatataactggtgaagatgaggtcatactggagtag

SEQ ID NO: 778638 - DNA, 75 bp, Homo sapiens
agacactgtgtactgtgtggcatatgcgaaggatggagatgttgcagtaaagatcctaaaggttgtcgacccaac

SEQ ID NO: 778639 - DNA, 100 bp, Homo sapiens
aatatttgtaggcgggttatctgcgaacacagtagtggaagatgtaaagcaatatttcgagcagtttggcaagcactgctcagcacgcaggcatgtgagg

SEQ ID NO: 778640 - DNA, 113 bp, Homo sapiens
agagatcggcggagaccctcgaagtgcgcaaacttgacactcaccctgaccggtattgctattgattgacattcaagtctcttacatcaacaccaaccatgaagacttcattg

SEQ ID NO: 778641 - DNA, 75 bp, Homo sapiens
aacatcctggccttggtgtacaggttggtcaaagaaaaagtgatgtatgaaaaagaggcaaaacaacaagaagaa

SEQ ID NO: 778642 - DNA, 83 bp, Homo sapiens
tatttctcttttgtctgcccctattgtaagtgcagatggaacacaacaggacatgtgaacttatatatttgacacaacccagc

SEQ ID NO: 778643 - DNA, 83 bp, Homo sapiens
cgacccgagttatgcccaccctccaactttgcgacggaaatgtgtcatcgaaagccagttccagttcctagcagatttaatag

SEQ ID NO: 778644 - DNA, 100 bp, Homo sapiens
ggagctgtgtgaggagatcgtggtctatgggatggtcagcgacagctactgcagatcgccacatcacagaatcgtatctatctcacagctgacaaccttg

SEQ ID NO: 778645 - DNA, 100 bp, Homo sapiens
agcgagaggcgaagcggtttaccatggaacccgtgaccaagtggagccccaaacaagtggtggactggactagagccttaatagaattacttgaaaaatt

SEQ ID NO: 778646 - DNA, 82 bp, Homo sapiens
tgagactcctgctcagtgtagcattaagctggagctctcaaacactgctgtcctgcaccagatgcggcgggaccaggtgaca

SEQ ID NO: 778647 - DNA, 75 bp, Homo sapiens
cttggaggaagcaaccatttcagtctgcaggtcattagaaataaactatcaatcttgcccagactggagaaagga

SEQ ID NO: 778648 - DNA, 82 bp, Homo sapiens
cagaatcgaatctcttctccctccccttcttgtatgtttgaacatagattgctaaaaatctcggtctccacagaggattggt

SEQ ID NO: 778649 - DNA, 100 bp, Homo sapiens
tcccattcacaaggcagctcgctctgggagcctagaatgcatcagtgcccttgtggcgaatggggctcacgtcgagggctccatccttgcctccctggac

SEQ ID NO: 778650 - DNA, 100 bp, Homo sapiens
tgcagcaaaaattcccgtaccaatgtcagtgctaggactccagttccaacaccatcttctgagatgatcctgattcccagaatgctcttggtgctgttcc

SEQ ID NO: 778651 - DNA, 97 bp, Homo sapiens
ggaagaaaacagtgcctatgagcagttgctgtctcgcttggaagaaatcgctgaggaaggttgctccttgagggcaggacagttcttatggctttat

SEQ ID NO: 778652 - DNA, 110 bp, Homo sapiens
gatgctgcctggtcaagtggatcctgtccagcacagccccacagggctcaggtctgaaagcttccctggagcgactgcagctggagtacgtggatgtggtgtttgccaac

SEQ ID NO: 778653 - DNA, 90 bp, Homo sapiens
tgaaatatggaaacgactcctcggccgagctgagtgagcgaagaatagccagaattcagcaaatcgaaaaggacatacttcgtatacgac

SEQ ID NO: 778654 - DNA, 100 bp, Homo sapiens
agaagggccgcggcgcggagaagacggccgccaagatggagaagaaggtgtctaagcgctcgcggaaggaggagtctctgctttctatccgtcaagatga

SEQ ID NO: 778655 - DNA, 101 bp, Homo sapiens
caaaggcaagagtaacagcagcgccgtcccgtccgacagccaggcccgggagaagtattgttgcagcatctggcagtgagactgaggatgaggacagcatg

SEQ ID NO: 778656 - DNA, 75 bp, Homo sapiens
gctcaagcgatctacccaccttaccctcccaaagtggtgagattacaggcctcaggcccaggcccaaggccaagt

SEQ ID NO: 778657 - DNA, 100 bp, Homo sapiens
gttacctacaaatggtcttagacaggcatgatcactatcccagcagccagtttggcaggagcacagattgttcaaacaggagccaataccaacacaacca

SEQ ID NO: 778658 - DNA, 100 bp, Homo sapiens
ttcccaacatcaagattgattgaaacatattcaatgggacatccaggcagaaattgatgcccacaatgacatatttaaaagcattgacggaaacaggcag

SEQ ID NO: 778659 - DNA, 83 bp, Homo sapiens
cttttcaagacaccaagtgagaggccaaccaggaggactggaatgaaattgaccccattaaaaagaaagaccttcatcacagc

SEQ ID NO: 778660 - DNA, 100 bp, Homo sapiens
aataaagatgaggaaggctccagcctgaagcgtgggtgaggtgtccagctgcccaaaggcgacaggcctcttctgaagagctgaaagctgcctaccggag

SEQ ID NO: 778661 - DNA, 74 bp, Homo sapiens
ctgcttatggcggcgctggagagggggcgctgagctgttgggaaatagagctgaggtcaaaggctggaaagtca

SEQ ID NO: 778662 - DNA, 74 bp, Homo sapiens
ggatgcacaagttccaaggttacgtttcagatgaatttcatcctttcatcgaagcacttctgccccacgtccga

SEQ ID NO: 778663 - DNA, 73 bp, Homo sapiens
ggctgaagcgactgagtccgcgatggagaggctgaggggatctggcggtggagcgctaggatcagacgccccc

SEQ ID NO: 778664 - DNA, 100 bp, Homo sapiens
cgcggagcctggaagagccccgagcttgtatatgaacacagatcaagattagagaaatccttgcaaaaagaaagacttgaacataaaaaagcaaaggaag

SEQ ID NO: 778665 - DNA, 100 bp, Homo sapiens
gctagcgcgaccctgagccggcgcccgtggtccggccatggacgacctcgtggcagaaatctgaagctatcatggaacaattgaagtcttttcaaataat

SEQ ID NO: 778666 - DNA, 75 bp, Homo sapiens
ctcctgagtagctgggactgcaggctgggctgggatcagatgggaagcggaagctcatcatgaccagaaactgtt

SEQ ID NO: 778667 - DNA, 75 bp, Homo sapiens
aaaccaaggatctggggatcttcgcactatcccaagagttgtctgctggttctcagcttgaagaagattctgcag

SEQ ID NO: 778668 - DNA, 50 bp, Homo sapiens
cttcaatactacctttatttccaccatagctgtcccctttcctccaaccc

SEQ ID NO: 778669 - DNA, 74 bp, Homo sapiens
gacgaccgacagggtggtgaaaggtattgccatcagagagtcagcaaaggtagttgaccaagctcaaaggagag

SEQ ID NO: 778670 - DNA, 96 bp, Homo sapiens
tttggctgaggagttttcaatcccagagtggacgcttctcttgtgagccagctggaggtcttacctctttgactgaaccacccaagggacctggat

SEQ ID NO: 778671 - DNA, 100 bp, Homo sapiens
ctggattgatacaaaaatacaaaactgggaaaggactgttcattgattgtaacctactgtcatcccaggctggaggcaaagctggaaaggacagtgggaa

SEQ ID NO: 778672 - DNA, 100 bp, Homo sapiens
gagcagctcttcttcgtccgtttggcattgaatgccccagaggagcccgaaacctcccaggcttggtgcaggaaggagagcccttcagcgaggaagctac

SEQ ID NO: 778673 - DNA, 75 bp, Homo sapiens
acaaggaagcgatctaccactacagaacagctctcaaggtaaaccagacttgaatacaacattgccaattagaca

SEQ ID NO: 778674 - DNA, 100 bp, Homo sapiens
gcggcctcgggaacggcccaggtccccgcccgcaggtcccgggcagggagttctgggaaatcgttcattcatttacagatgaacagaaaagactcttctt

SEQ ID NO: 778675 - DNA, 100 bp, Homo sapiens
cagactgaggagtgaaatgaaacagggccagatattcgaagcttacaacatggcagctttgtggaaattaccttgtattttcatctgtgagaataatcgc

SEQ ID NO: 778676 - DNA, 116 bp, Homo sapiens
tccgcgacgagctatccgggaaagggccgaatgcgatcaaacctaatccgcgagacttgctaagggatggcattcctactgtatttgtggcagtggcaggcagaagtaatggtttg

SEQ ID NO: 778677 - DNA, 83 bp, Homo sapiens
agagcaagaaaaaaaggaagacgatgacttcaggtggagccttttgccagcttgaccgaggccgtgcggagctcagttccccg

SEQ ID NO: 778678 - DNA, 100 bp, Homo sapiens
gacatgagtatacattcagtatcatggatgaatttcagaaatagatgatgaattcatcaaaaacttgaaaatactgattccttggctacttagtcccgag

SEQ ID NO: 778679 - DNA, 75 bp, Homo sapiens
gcggcaacttcggggagctccgcctagggagtgcatccgccccaacccttttccccctcgtctcctgtgagaatt

SEQ ID NO: 778680 - DNA, 51 bp, Homo sapiens
gacgaccgcgtccacctcgcaggtatgatctcgtgaaatcttgagagaaac

SEQ ID NO: 778681 - DNA, 75 bp, Homo sapiens
aaacgtggagatcaactcctctctgttaatggagtggtagtctatgccttgttaatgcctgctggtgcacctctg

SEQ ID NO: 778682 - DNA, 74 bp, Homo sapiens
agccgcccatcatccacagggacctcaagggggagtggccacagcaggtcctatctggtggtgagtggctgtca

SEQ ID NO: 778683 - DNA, 87 bp, Homo sapiens
ccactccccaactgtttcacaactccattacgtcaggcctggacaaccatggagaaggcaggggaaatggaaggtgatgcagtcgaa

SEQ ID NO: 778684 - DNA, 74 bp, Homo sapiens
ctgtgcgctcgatccagcaccatggggaagcgggacaatcgggtgattacctaggaacagtacgatttggggtt

SEQ ID NO: 778685 - DNA, 51 bp, Homo sapiens
agacgggagtattatgaaaagatctgcctggatcaaagtggaacagctgaa

SEQ ID NO: 778686 - DNA, 100 bp, Homo sapiens
ggccattttccagacctcatccaggttctgcggggagtgtctccagccctgcctgcaggtgccatccccgctgtgcccactctgccgcctgcccttcgac

SEQ ID NO: 778687 - DNA, 100 bp, Homo sapiens
cttttatttggctaattttttaggaaagattgaagaaggtattgttgtaatggaagatgattctccagtggaggctgtgagcacacctaatactccccga

SEQ ID NO: 778688 - DNA, 74 bp, Homo sapiens
agagcttccgcggtgtcattctgacctcggacagattgattcactttggagctgtaagtactgatgtattaggg

SEQ ID NO: 778689 - DNA, 80 bp, Homo sapiens
caacagccaaggactgaggatgctggtcacctgacttttgaatgccgcaattttctccgagtagaccctaaaagggacat

SEQ ID NO: 778690 - DNA, 100 bp, Homo sapiens
gtgtctagcccagtggaccttctgaagttgatgctgatgtaacagttataggttctggtcctggaggatatgttgctgctattaaagctgcccagttagg

SEQ ID NO: 778691 - DNA, 75 bp, Homo sapiens
cacgaggcggcgggctggagacatggaccgcggcgagcaaggctctgaagaaagctgataagcaagttttggagc

SEQ ID NO: 778692 - DNA, 83 bp, Homo sapiens
ttgaccacaacatcagccctactattggaatgatatggaacctagcaaagctgttccactgaatgcatctaagcaagatggac

SEQ ID NO: 778693 - DNA, 75 bp, Homo sapiens
cagaaacaaaatgtcaacaaattgatggtgatgcagccaacacgaacggttgtcatgtgtaacacaactttcgat

SEQ ID NO: 778694 - DNA, 89 bp, Homo sapiens
atcatcttcctcctgtgcaccctcttcatcagtatcttaaatttctggatcagctttctcagaaaatgaagttggaccagatggctgcc

SEQ ID NO: 778695 - DNA, 75 bp, Homo sapiens
ggcagggccaggacccagctgaggggggccagggaaacccctcctggagtttccccaaagccatggacagcccta

SEQ ID NO: 778696 - DNA, 100 bp, Homo sapiens
cagcagcagccagcccaacagcccaagaaaccctctccgcagcccagttctccccgacaggttaagcgagccgtggtactgctctccatctaccccagag

SEQ ID NO: 778697 - DNA, 100 bp, Homo sapiens
gactgctcacgttcatcatggtgcctggctgccaggcagaactcccccactggaaaggattctgaaagaaatgaagtcagccctcagaaatgaagttgac

SEQ ID NO: 778698 - DNA, 88 bp, Homo sapiens
agacagccaacaaaatattcatggttcttgagattcaagattggcaaagcatgtaccagtccactcatattccaatacccaagtttac

SEQ ID NO: 778699 - DNA, 100 bp, Homo sapiens
gtggcttgtggtgcggcctcaccatacaggaacagggcagacgttagcgtgagtgatcactctcaatcccggttccaatgacaggatttacacagagagc

SEQ ID NO: 778700 - DNA, 100 bp, Homo sapiens
cccacggacaccacctcaacggaatccgtgggcccactgcgggaggacttcagtctgagtagcagtgctctcattggcctgctggtcatcgcagtggcca

SEQ ID NO: 778701 - DNA, 101 bp, Homo sapiens
gatgcttctctctgctctgccctggctgggccactacaggcagaagtcaattcatctggaaagactatctctgagtcagacttaaaccactctttttcact

SEQ ID NO: 778702 - DNA, 82 bp, Homo sapiens
aaaagcatccccgaggaggaagacgaatcgttaaacatctgaaagggtcaggtgtggaaacaggaagagaactagaactgga

SEQ ID NO: 778703 - DNA, 90 bp, Homo sapiens
cacgcacctggacgacgcccggcgccagcacatcgcagtggagacctttggcgacttggcctttggcgacatcttcctccacctgctcac

SEQ ID NO: 778704 - DNA, 99 bp, Homo sapiens
ggagagaatctgcctcctttaacttatgaccaggtatctcagatgaagacatcatcaacattactcttcctactggagtccccattcttctggaattgg

SEQ ID NO: 778705 - DNA, 83 bp, Homo sapiens
ccaagtatccgccagtcaataggaagtacgagttcgtgagatggagaataaagaaactctcaaagggttgcacaagatggatg

SEQ ID NO: 778706 - DNA, 101 bp, Homo sapiens
cgacgtgtacctggacatcaccgatcagcttgaacgggtctttttacgacttggccatgctgaaacagatgaacaattacagaatattatatctaaattcc

SEQ ID NO: 778707 - DNA, 100 bp, Homo sapiens
atcggattcacaggatctgggcttggaaatgcctcaggtgcactggtggaccaaggtgtctttgaggagctagcacgagactacgtcccacagctgtacg

SEQ ID NO: 778708 - DNA, 100 bp, Homo sapiens
gatggtgtgacagttgctgtcatttctggagaagccctgggaataaagacactcttgcactcctgtaatgagcctggcactgtgatgaaacacttttccc

SEQ ID NO: 778709 - DNA, 100 bp, Homo sapiens
ttgttctcatctgtgtctggtggcaaaatggaggcaagtgaggcctatctggttggcctttttgaagacaccaacctgtgtgctatccatgccaaacgtg

SEQ ID NO: 778710 - DNA, 90 bp, Homo sapiens
aagcagctttatctcaggagtgtcattgctcatatagaagacccagaggacactaaccaaggacacagaatttccaggtgttgtggtgcg

SEQ ID NO: 778711 - DNA, 98 bp, Homo sapiens
gacaccctgaaggtcccggtgctcacttggacatggatgctcgtcagaagttccgctctgttctggttgaagcaacggtgaaactggatgaactggtg

SEQ ID NO: 778712 - DNA, 85 bp, Homo sapiens
ttccagcagggcaagcttcttggtccatgctgcctgatgtcattgacgacttccatctgaagcagccccacttccatggaaccga

SEQ ID NO: 778713 - DNA, 88 bp, Homo sapiens
caaagcctgaacaggcagggccagacccaggtggggcaggagaccctgtaggaggaccccgggccgcaggcccctgaggagcgatgac

SEQ ID NO: 778714 - DNA, 76 bp, Homo sapiens
tgaaatgaaagccattggaataggtcttccaggatttccaggatctcctggaccaatgggtataagaggtgaccaa

SEQ ID NO: 778715 - DNA, 83 bp, Homo sapiens
actggacttacgaggagcagtttaagcaggatgtcatgaccgggccgtcctgctctatgagtacgtgggcaagcggatcgtgg

SEQ ID NO: 778716 - DNA, 100 bp, Homo sapiens
cgaggaacgaagaaacagacattcaacatgattgcatttgaatctgaaatggttgtgacaaataatctcttggatctgccgcccccctctcctcccaaac

SEQ ID NO: 778717 - DNA, 50 bp, Homo sapiens
gctgaccctgggagacatcgacgggcgtgatggtgggcatgggtcagaag

SEQ ID NO: 778718 - DNA, 98 bp, Homo sapiens
tctcccgccttttcatcccgcatccgcaggacacccaatcaccgggcaacaggtccggaaggtccatttcgacacccaggagcacgggcctcaggcca

SEQ ID NO: 778719 - DNA, 96 bp, Homo sapiens
cacatcttccggccaacttccattgaacttcccagcactcgaaagggaccgaaatggagagcaaaggtttctgctttgggacaaccatacatctaa

SEQ ID NO: 778720 - DNA, 75 bp, Homo sapiens
ggaaggacaaggaattacataacatcaaacgtgggcacctgaatggacagaagaggacctcagccaactgacaag

SEQ ID NO: 778721 - DNA, 100 bp, Homo sapiens
ctggagcagaaactgagctggaccactggagcctcggtgagggtgaagatagtgatccggggagacaggaacacgggcaagacagcgctgtggcaccgcc

SEQ ID NO: 778722 - DNA, 90 bp, Homo sapiens
ctgctaacatggacccagctatgatgtttcgacagagaccatcattgaatgtctaaaatatatttgtactggagatttccctcctggaac

SEQ ID NO: 778723 - DNA, 75 bp, Homo sapiens
ctcagctccaagatgtccctttaggaggataacttcaaactaatgtgtactaatgccatgatttacaataaacca

SEQ ID NO: 778724 - DNA, 50 bp, Homo sapiens
agagtagctggtgcagaaactcggatacagtagagaagatttgtataaaa

SEQ ID NO: 778725 - DNA, 96 bp, Homo sapiens
gtccaccatcttcctcttgctgccagtggtagcgctcgtctggcggagctggaaactgttttggctgggcctacttcacctataccttctctggga

SEQ ID NO: 778726 - DNA, 82 bp, Homo sapiens
cacagcagcaaccttggagcaggcagcccgatctgctcaacttcaagaagggatggatgtcgatcttggacgagcctggaga

SEQ ID NO: 778727 - DNA, 100 bp, Homo sapiens
agtgaggagctgggtggtcccagcctggagctgtgccagcctgacatggcaccctggaggggtattatgtggatgatgccttgcagggccagggagttta

SEQ ID NO: 778728 - DNA, 80 bp, Homo sapiens
catgtcgggttattcgagtgaccgagaccgcggccgggaccgaggatatggctcgtggacagcagaaaattcagtctcag

SEQ ID NO: 778729 - DNA, 100 bp, Homo sapiens
gtcgtgcggaagctgcgacgcaggtactgggcctaatcgctacgtgcctctttggctatgatgcctatgtcaccttccccgttcggcagccaagacatac

SEQ ID NO: 778730 - DNA, 112 bp, Homo sapiens
ggcccccttaaagggacagggactgctgcaacctacggggtgtacttgggaacgaggggtgaagcggcccaggtgagggagaatgactatcttcaagactgcctcgatgcca

SEQ ID NO: 778731 - DNA, 100 bp, Homo sapiens
aagagctcacagtgtaataggggagacacacaccccaggtgtagtacagagcggactgcagcatcctctggtatcacgattccaaaacccccaaagccac

SEQ ID NO: 778732 - DNA, 100 bp, Homo sapiens
ctcgggattattgccgattgccagggtgctgaccgtgggagccgaccgagatggctattcatatgaaaaggaagcaatggaaaattggatcagcaaaaag

SEQ ID NO: 778733 - DNA, 82 bp, Homo sapiens
aactcttcggaaggctatgaaaggcttgggacaaggaaacaggtatcagcatgatggtagcagaaaccttatcaccaaggtg

SEQ ID NO: 778734 - DNA, 82 bp, Homo sapiens
ctgcactgaaaggaaatgacggattttgtcaccatccttgtcagcctggccctagctttccttgcgtgcatcgtgttcctgg

SEQ ID NO: 778735 - DNA, 100 bp, Homo sapiens
caggaggaggaggacgagaagcagcggctgcagaatgaggtgaggaagaggatggagatgaagatgaggaagctgagtcagctacgggcaagcgggcagc

SEQ ID NO: 778736 - DNA, 49 bp, Homo sapiens
caaagcccaacaccttcccccactggactaccgaccagactcccggaaa

SEQ ID NO: 778737 - DNA, 100 bp, Homo sapiens
cctcgtgcggcggcgaccggagaatccgcatctggggcacggaggctgtcttgtcgacggtctcactgatgcctcttctgcattcaaagttcctcgaccc

SEQ ID NO: 778738 - DNA, 98 bp, Homo sapiens
gaattgacagaaaaggattctgtgaaggtggatgagaatggcaaaattagtcgccttcgtcgagagtgcccttctgatgaatgtggtgctggggtgtt

SEQ ID NO: 778739 - DNA, 96 bp, Homo sapiens
tgcaagtgccagtaaatgatttaaatgcagaatccaagctgaacagcataaggaaggacattcttgcacacgtgcaaaatgagtgctggaacctca

SEQ ID NO: 778740 - DNA, 82 bp, Homo sapiens
ccgggaggaaggaacgaggcaaggagctaaagcagcgtgcgttcagccctggggtggacgacccaccggagcccgtgtacgc

SEQ ID NO: 778741 - DNA, 75 bp, Homo sapiens
ggaatctggaattttattaaacatgatagacgatcagctgaacactctcttgaaggagttccagctaacagagga

SEQ ID NO: 778742 - DNA, 100 bp, Homo sapiens
ccagaaggaagatggcggatctggaggagcagttgtctgatgaagagaagatggagtcatcagaacccactgtgaggaagtgacttctccttgaggtcac

SEQ ID NO: 778743 - DNA, 87 bp, Homo sapiens
tggagatgattgagccgcgcacgctacagtacaaggtggctctcgggggctggtccatgggcggctgtggcgtcaggatggagtcct

SEQ ID NO: 778744 - DNA, 78 bp, Homo sapiens
ttccaccaggccgggaagcccatcggcgcacgtaccgggtgccgaaggaggtccgcgtggagcctcagaagttcgcgg

SEQ ID NO: 778745 - DNA, 97 bp, Homo sapiens
cctgaccgggcacgaggagaaggtggagaacgccggggccatcggcccgtcccggttcgggctcaagagggccgaggtgttgggccacaagacgcca

SEQ ID NO: 778746 - DNA, 75 bp, Homo sapiens
tttgcctgttgctgctatacctcatcggggcggtgattgccggagatgaatgtgaaggtgctggactttgagcac

SEQ ID NO: 778747 - DNA, 75 bp, Homo sapiens
agttaatcctcaatttaagcctgatctaacccctagaaacaggtatcgcacaaccaaggacatcatccttccctt

SEQ ID NO: 778748 - DNA, 75 bp, Homo sapiens
attgactggaaagcaatgtgtcaaccgcattattactgaaaaggaaacttttgagaagaactttgaaagagaaac

SEQ ID NO: 778749 - DNA, 100 bp, Homo sapiens
tcttggtccaccttccagcacaaggagctgatggccgctgacaggggacgcaggaaatttcgatttgcacactgatttggcccaccattcctggagagat

SEQ ID NO: 778750 - DNA, 50 bp, Homo sapiens
gaggaactggcccggaaacaggaggacaaaactttagaaactgttccttt

SEQ ID NO: 778751 - DNA, 95 bp, Homo sapiens
tgcccgcgtccgaggctcgcgggcggcgggcccggaatgaagaaggagccccacaggaaggaattctggaagatatgcctgtggatcctgacaat

SEQ ID NO: 778752 - DNA, 100 bp, Homo sapiens
tgctttcagcaaggttatgtgctgctctcctgagcaacatctctgactgtgatgaaacattcaactactgggagccagcaagtgtcaattgaggagggag

SEQ ID NO: 778753 - DNA, 90 bp, Homo sapiens
cgcccaggcccgtgggcgcttcttccagcccaaggatgaggggggctacttctactttggcctactgaacttgacgcactggtatttggc

SEQ ID NO: 778754 - DNA, 75 bp, Homo sapiens
cgggaaaaggaggataagcaagtcgaatttttgtcttacgtgactcgccataatcacctcaaggacttcatgctg

SEQ ID NO: 778755 - DNA, 90 bp, Homo sapiens
tgaaaatttctccaaaaaggatgtcatgttcctggcctggacatgtctcaggaaggctatggaactagatctcaacctcctctggccccc

SEQ ID NO: 778756 - DNA, 100 bp, Homo sapiens
aggcctggggcgggaagaaggagaacctgaaggctgcgcaggaggagtatgtcaagcgagccctggtcatgctttcagaacgaaaaggcacagatgagct

SEQ ID NO: 778757 - DNA, 82 bp, Homo sapiens
gccgatccagcctgcggagcctgtggggcagacattcagtcccctgaagctgaatatgtagatttgcttcttaatcctgagc

SEQ ID NO: 778758 - DNA, 110 bp, Homo sapiens
tggagttgaagaaaagaaatcattagaaattctcctaaaagatgaccgtctggccagaataaaagctacttggccgtaaggctaaaagaccaagatctgagagattcaag

SEQ ID NO: 778759 - DNA, 89 bp, Homo sapiens
tgcacccgttgcagtccttcagggccattcagcttctattacttccatacagttaatcagctgtgttcagcgaatacttatgaacagaa

SEQ ID NO: 778760 - DNA, 136 bp, Homo sapiens
cggcgcggagaatctgctgtcgcctgcagctgctcgcctgtctccgtcggaagggagcccaagctttgcagagacggagccggtgggagaggagagcatctccgacgcagagaaggtggccatggatctcaaggac

SEQ ID NO: 778761 - DNA, 75 bp, Homo sapiens
caaagacaaaaggagattctgatgaagaagttattcaagatgggcaagttaaagtcttcagagccctgtatacgt

SEQ ID NO: 778762 - DNA, 100 bp, Homo sapiens
ccgagggtgcctgggaatcggtcgcctggaggaccagtatttcccatggagggacagtgtggcactgaaggggggccgtggcagtgcttccatggtccag

SEQ ID NO: 778763 - DNA, 75 bp, Homo sapiens
aagtcgacgccgcaacccggggaaagcaggtgtcgtgaaaactacccctaaaagccaaaatgggaaaggaaaaga

SEQ ID NO: 778764 - DNA, 75 bp, Homo sapiens
caccatctccatcacccaccaacaacaccacaataatccacagccaagattcaaccctatgaaaagataaaggcc

SEQ ID NO: 778765 - DNA, 82 bp, Homo sapiens
aaaaatccagaagtacaagcagtctgctggagaatgctggaggagaccttaaggatggccaccaccactatgaaggagctgt

SEQ ID NO: 778766 - DNA, 99 bp, Homo sapiens
tcgagcccggcgacatgttgctgcaggtgagcagtggtgtgtgagagccaggcgtccctctgcctgcccactcagtggcaacacccgggagctgttttg

SEQ ID NO: 778767 - DNA, 98 bp, Homo sapiens
ccaacctctcgcacacgggccgcggcatcctcagcatggccaactccgggcccaacagcaacaggtctcaattccctgaccctctattctgcaccctg

SEQ ID NO: 778768 - DNA, 100 bp, Homo sapiens
actctgcctgcccttcggaccagtcatggagaggtcatctcagttccacacaagatcatcacccaccttcgaaaagagttctccttcctgatgaccgagg

SEQ ID NO: 778769 - DNA, 75 bp, Homo sapiens
gttttatggagtaattcttgaacctcccaactatggcattgtcacaggcagtaagctcctacaggacattttaaa

SEQ ID NO: 778770 - DNA, 100 bp, Homo sapiens
gaatgaggctaccatgtgccaggtgttcattgaggatgtcagcagggagtttgtggaggagttcatctggccggccatccagtccagcgcactgtatgag

SEQ ID NO: 778771 - DNA, 50 bp, Homo sapiens
tcaaacatcttccaccacagcttagaggctgttcggctcttgaatcccag

SEQ ID NO: 778772 - DNA, 100 bp, Homo sapiens
attaccacagaactgaacagcgcaacagataatcctacattgtggatatcaagcctgccaatatggaagagctaacagaggtgattacagcagcagaatt

SEQ ID NO: 778773 - DNA, 83 bp, Homo sapiens
agtatttttcaacatattacttcctcctatcatattttatgcaggttatagcctgaaaaggggtgagaaggactggcagaaat

SEQ ID NO: 778774 - DNA, 83 bp, Homo sapiens
ctatcgtctatcattggatgaagtggctccggagatctaaattctgtccaacgtttaataaatcaatggaggaacagggtaaa

SEQ ID NO: 778775 - DNA, 76 bp, Homo sapiens
gtccgcatctacaaggatggcaaggtgttgtacacaattagggggaacctgggtgccctgcgagtgaaggtacgcc

SEQ ID NO: 778776 - DNA, 82 bp, Homo sapiens
gtagtcctgggagcacagcagaagtatttgttcctgatcttgaagatattgtaaattttgaagaactagtaaaagaagaagg

SEQ ID NO: 778777 - DNA, 100 bp, Homo sapiens
gaaatgtactctagtggaggagaccttcacctagaactcccaacgggtcaacaaggaggtaccagaaaactgtggttggataacagggcaagattcagag

SEQ ID NO: 778778 - DNA, 149 bp, Homo sapiens
cggcagcaatgctccgttgagagacgcggctttcggcaagaactggattcgtggcgccacaagctcattcactgtgtagactgaagcgttcccggctgaaggtgaggttctgcaccaacgagtcgcagaagtcccgggcagagctggtg

SEQ ID NO: 778779 - DNA, 75 bp, Homo sapiens
ttttactgtcaagacatttcttcggcattctgcaacaggcataatcaccagcaacacccgggacaataatacggg

SEQ ID NO: 778780 - DNA, 82 bp, Homo sapiens
gcagactgagaagccgacccactacaggattttttatcaagcagaaatgcatcgaacaacgagaatcaagatcactgagcta

SEQ ID NO: 778781 - DNA, 100 bp, Homo sapiens
tcctcgccagcagccgtccggagccagccaacgagcgtttgcctgagaatacagatcaacccacagaacaaagcggatttccaaggcatctccccagagc

SEQ ID NO: 778782 - DNA, 74 bp, Homo sapiens
atccttcagagcctcagccactagctgcgatgcatgtgatcaagcgaggacctgagggcactcgctttgctcct

SEQ ID NO: 778783 - DNA, 95 bp, Homo sapiens
ccgaagagttctacaacctggtgcgcttccggatcgggggcaagcggaaggtgatgcccaagatggaccaggctgaagccgacgtagcttctctg

SEQ ID NO: 778784 - DNA, 83 bp, Homo sapiens
ccgcgaccgtccgccagtcgtcccgagggagccccctaatgaaagtcttcagtaaatagtttttctgcatgcactgattttcc

SEQ ID NO: 778785 - DNA, 85 bp, Homo sapiens
acgccagaggaggaggccggggaatggccgcggtgtggcagcaagtcttagcagtggacgcgagtatgaggccaggtctcggctg

SEQ ID NO: 778786 - DNA, 100 bp, Homo sapiens
aacagcctcctccaacaaatccctcaacttgctaaaaatcaatgctgtccccggcataggtccatctctgcagaagccatttcaggagtacctggaggct

SEQ ID NO: 778787 - DNA, 90 bp, Homo sapiens
ggaaatcctaatgacagtctccaaattcgcctccatctgtaccatggtcaaaagaaatagactggcaaccttattttactacacgcattg

SEQ ID NO: 778788 - DNA, 100 bp, Homo sapiens
agtcaagcagggctacgtgaaaatccgcagcaggaagcttgggcctcctgacaaggtgatccgggcgggccccgcaggaattttatcccctcaccggcct

SEQ ID NO: 778789 - DNA, 98 bp, Homo sapiens
gcgagccgagcgaggcagctctgagccgcgcggttaattatagaaaatgccaagtaggaaatttgccgatggtgaagtggtaagaggtcgatggcctg

SEQ ID NO: 778790 - DNA, 98 bp, Homo sapiens
cgactacctcacttccctgaagagtgtcccttatggctcagaggagtacttgcagctgagatctaaggtggatacattgcaaatagcctagcaatcat

SEQ ID NO: 778791 - DNA, 100 bp, Homo sapiens
caccatcctcatctctcttggaaaccgtcacaggaacggggaaaaagtgcagcttgccggccgaggaggattctgtgttagaaaaactaggggaaaggaa

SEQ ID NO: 778792 - DNA, 50 bp, Homo sapiens
cgcgaatatcgtcatcgttagaaggttattgaagaaattgaagaaatgat

SEQ ID NO: 778793 - DNA, 75 bp, Homo sapiens
tttttaacaacagaggagtggcgggggagaatctcttggtcgttcttccctctttccaatagatgatggcttgct

SEQ ID NO: 778794 - DNA, 83 bp, Homo sapiens
aacgccttgttgcccagttccccagttctggcagattctggaaactgtacattgaagcagagcaccctccaagtggaagtcac

SEQ ID NO: 778795 - DNA, 51 bp, Homo sapiens
cttggacttctcagcctccagaatgttacacattcggcaaagtacagggca

SEQ ID NO: 778796 - DNA, 51 bp, Homo sapiens
ggaggaactggcccggaaacaggaggacgatgaagccccacccgcccttca

SEQ ID NO: 778797 - DNA, 100 bp, Homo sapiens
caaagagataagcagcctaatgcacagcctcagtatctgcatggatccaaggtacatcaggaacgtctctatcaagaatacaatttcagcaaggctgagg

SEQ ID NO: 778798 - DNA, 75 bp, Homo sapiens
cgcgccttctcctccgccggtcccatacgaattcagaaggagctggcggacatcactttagaccctccacctaat

SEQ ID NO: 778799 - DNA, 90 bp, Homo sapiens
agggagggaacaaagcccacaagcaccgtctctgctggatgaaccgaatcctaacagtccagccaatagccaggcagcacagctttatca

SEQ ID NO: 778800 - DNA, 83 bp, Homo sapiens
gtccatccatttcgtggttcacccgctgccgggcaccgaggaccagctcaatgacagtgcagagcagagcgggcggaggaccc

SEQ ID NO: 778801 - DNA, 76 bp, Homo sapiens
aagaaggcaacgacgttccatctgtggaaggacctaccaaccaggtcagcccaaggctgccccctcggtcactctg

SEQ ID NO: 778802 - DNA, 73 bp, Homo sapiens
aacatctttaccatctcatctcaagaatggaggacttaattcagtgcacaaatgagatgaatgtgaacatccc

SEQ ID NO: 778803 - DNA, 100 bp, Homo sapiens
acagccctgtcagaggcgagtgagaaggacgaaggggactcggatgaagaccccaccaacaactgaacgctttggtcaggctgctacaatggaaggaatt

SEQ ID NO: 778804 - DNA, 98 bp, Homo sapiens
cgatgcaagctcggatccgagactggcagcatgagcagcatgaggtcagtcatatcatttggatcaaaaaatagaacaatcggagttgcagccaaaaa

SEQ ID NO: 778805 - DNA, 82 bp, Homo sapiens
gaggaagctacacttttcaccaaggaactggtgctgcagcgagaggagcatattaatgaaaagtgccataaactgaaaaacc

SEQ ID NO: 778806 - DNA, 82 bp, Homo sapiens
cggaggcggaggcagaggtggaggcgctttgaaaggtgaaaggtgtagcagtcactcggcctacacccacagcatcgacctt

SEQ ID NO: 778807 - DNA, 99 bp, Homo sapiens
gaaaaacctgatagtaagaaggtggaggaagacttaaaggcagacgaaccatcaagtgaggaaagtgatctagatccttctgctgcaattggacctcat

SEQ ID NO: 778808 - DNA, 100 bp, Homo sapiens
aataacggctgcacctggagattgacgcagagtgggcggcggtggtgattcccaaatgctggaaaatcctctttgctaagttgtgtttctcatgcaaaac

SEQ ID NO: 778809 - DNA, 101 bp, Homo sapiens
gcaagaggaggcaattgacaggaactacgtcccggggaaggatttgtactgtgttcgcagtgacctggggaacctgctcaaagccctgggtcgcttggaag

SEQ ID NO: 778810 - DNA, 107 bp, Homo sapiens
ctctcttaagaaaggaaaatatcccaaggactaatctgatcgggtcttccttcatgatggctacaaagagatcttattttaaaagcagctgatggtttggaaatgag

SEQ ID NO: 778811 - DNA, 75 bp, Homo sapiens
tggcaccacctcacacagggaaacggcttgtgagaaggttggcatgcagatccctcgattctgttatcatgaaag

SEQ ID NO: 778812 - DNA, 82 bp, Homo sapiens
acaacccgacgaggaacgaatgggacaagatcccgtccatgaatcaggtgtcgtgaaaactacccctaaaagccaaaatggg

SEQ ID NO: 778813 - DNA, 99 bp, Homo sapiens
ccaaaagtttggaaatccggacgctaacagtggaaaggctgttggagccacttgttacacagatgcatttttgtagaagcattttgaggatgaatgttt

SEQ ID NO: 778814 - DNA, 100 bp, Homo sapiens
aaagattttgctgtcaaagttgtgtcagtgaatacaaacagcctaaaagtggtgatgccaaatcttcgagtaaatcaaagcgatctcagggtcctgtcca

SEQ ID NO: 778815 - DNA, 89 bp, Homo sapiens
tccgagtcctcccctgcaaccatgagttccacaccaagtgtgttgacaagtggttgaaggcatccagggcattgtggatgcctaccgcc

SEQ ID NO: 778816 - DNA, 98 bp, Homo sapiens
gacgcgcacacactagccatgatgcttcaggagcagctggacgccatcaacaaagagatcagggaaatcctcattgacgattcaatttgttgaaggcc

SEQ ID NO: 778817 - DNA, 90 bp, Homo sapiens
gacttactggggagagaaagaaaaggaacgggagctgagaggaagatgttaccgagtacttcagtgaattccttagtgcaggggaacgga

SEQ ID NO: 778818 - DNA, 90 bp, Homo sapiens
aagaaggacttcggaatgcactacaacaggaaaatcatattatagatggagtaaaggctttcatagaaaccatgttcaccagtaaagccc

SEQ ID NO: 778819 - DNA, 90 bp, Homo sapiens
ggaacttcatcatcatctacttcacaggaattgccatttaatcctcactatggatgggctcattgaggacattaagcatcggcggtatta

SEQ ID NO: 778820 - DNA, 50 bp, Homo sapiens
agctggaggccggcaaagccaagaactccctgaaggcttcaaatcggaag

SEQ ID NO: 778821 - DNA, 75 bp, Homo sapiens
attgatattattcaccggattgatagaactgcaagctatgaggagcctgtggacatctctacagcaatgagtgaa

SEQ ID NO: 778822 - DNA, 82 bp, Homo sapiens
ctgcagaagacgcagggctcaaggttaaaaataagaagttggttgagctgctgagaaggaaagttcgtctcgcccagcctta

SEQ ID NO: 778823 - DNA, 100 bp, Homo sapiens
caaagtgggacgcggcacctacggtcacgtctacaaggcgaggcggaaagatgggacaagatgaagctcatcatcctggagcactattctcaggcgagcg

SEQ ID NO: 778824 - DNA, 83 bp, Homo sapiens
gtttgtggatcgctgtgatcgtcacttgtaaaaaagcacgcttagattggaatactgatgctgcgtctttgattggagaagaa

SEQ ID NO: 778825 - DNA, 101 bp, Homo sapiens
acttacaaagtccatgctaacctactatgagggtcgagcagagcacgtcagctaactgttcagatgatgcaaaatcctcagattcttgcagcccttcaaga

SEQ ID NO: 778826 - DNA, 82 bp, Homo sapiens
aggaacgtttggggtttcctagctgatcttgcatctttaatggataaaacatttgagagaaagttgcctgttagttctttaa

SEQ ID NO: 778827 - DNA, 76 bp, Homo sapiens
catgtacctggccaagatcaagcccaacatcttcgccactgagggcgtcattgagatccgcgttccagccttcctg

SEQ ID NO: 778828 - DNA, 101 bp, Homo sapiens
ccagagtgctgagattacaggcgtgaggcaccactcctggtgagattaaatttacctacacctagagaaataattggagcacatgtctatttgggccaaga

SEQ ID NO: 778829 - DNA, 100 bp, Homo sapiens
aaagaaaacaatttctcctgctctgcagcttctgttcagggttgaaaggaggagcaggaggtactgatggacaaggaggtaccttccggtacacctttca

SEQ ID NO: 778830 - DNA, 118 bp, Homo sapiens
gctctgcgtgagtgtggtctacgagctgtttctcatctttatactcttccagccatcgacgagtacaagccccaggatgctaccaccaacccgtccctgatcctggccgcagcacaga

SEQ ID NO: 778831 - DNA, 100 bp, Homo sapiens
gattactaccgttacttggctgaggttgccgctggtgatgacaagaaaggagatgagtatgatgtatgtgccatttgtttggatgagtatgaagatggag

SEQ ID NO: 778832 - DNA, 74 bp, Homo sapiens
agctctttgacacacagcagttcttgtcagcatgacgacagagatgatggtgtggattattgggccaaaagagg

SEQ ID NO: 778833 - DNA, 75 bp, Homo sapiens
tccatgatggaggcagaggtaaacttggagagagaattttctctacatgtgcacccatttaaaggactcggcttc

SEQ ID NO: 778834 - DNA, 50 bp, Homo sapiens
ggagcagagcgtggactgccgggcaggacccacgcagaggccgtcggaca

SEQ ID NO: 778835 - DNA, 100 bp, Homo sapiens
tcggtgaaatcctgtcctgaagactgtaagccaaaccaaacaggaagcttacttttctctacctagccaatgatgtcatacagaacagcaagaggaaggg

SEQ ID NO: 778836 - DNA, 82 bp, Homo sapiens
cgccgtccgtgcccgcgggacctgacagccgggtcagagcccgtggaagccaccgatgatgccttttgggaccagttctggg

SEQ ID NO: 778837 - DNA, 73 bp, Homo sapiens
aaggggcagacccaaaaaactggagaagaaggaagttgtggaagaggcagaaaatggaagagacgcccctgct

SEQ ID NO: 778838 - DNA, 98 bp, Homo sapiens
gagaatgaagcaagtttacctaacacgtctttgcaagaggacaagaattttgggcagatttgaatgccatgaacgtgtatgaaacaactgaatttgac

SEQ ID NO: 778839 - DNA, 101 bp, Homo sapiens
ctccttgtgccacattcttgcagctgcctacaaattcaagagtgaccagggatggggcaagattcttgccaagagaattaatgtgcgtattgagcacatta

SEQ ID NO: 778840 - DNA, 82 bp, Homo sapiens
cggcgcagacgcgggcgagctgcggctcggacgccagcggacacgcgggcgaggtgttggagcgggccggagagaagtagag

SEQ ID NO: 778841 - DNA, 99 bp, Homo sapiens
cacagtcccctgttccgaggtcaggaggatgcaagtcctgacagattcagcaacactagagcccgagcccagcacattgtgccctgtactatatctcag

SEQ ID NO: 778842 - DNA, 95 bp, Homo sapiens
ggacatcatgtgggccctgcacgagctcaaaggacactatgcaatcacccgaaaggtgagcgagtgctgtgctttcatgggcctcttctttatga

SEQ ID NO: 778843 - DNA, 98 bp, Homo sapiens
ggctcctaattcttggtccagcttcttccagaataactgtgcttgaagaagaaaattcccaacatggacaaaccacgcaaagaaaatgaagaagagcc

SEQ ID NO: 778844 - DNA, 75 bp, Homo sapiens
ggggaaatggctgcgagaccctagaggcctgcggcctgcgtgaaaatgcctcgtgtaaaagcagctcaagctgga

SEQ ID NO: 778845 - DNA, 82 bp, Homo sapiens
ggcaacatcctgtcacaggccatgctctggcaaaaacctgtcgcctggttgggcccggaaatgggacgtcgcgctttctcag

SEQ ID NO: 778846 - DNA, 75 bp, Homo sapiens
gaccctaaaggatcaaccctctgcatacagtaaaaacattcagaagattctcggccttgccccttcacgagccgc

SEQ ID NO: 778847 - DNA, 75 bp, Homo sapiens
gttcggccgtgccctccgacagccaggcccgcgagaaaggctgggaggcggcagaatgcagccagaggagggcac

SEQ ID NO: 778848 - DNA, 100 bp, Homo sapiens
agcagtagctataatcaagtctgttggagaactatcagtaccagaaaaatacaaatctattcatcaaatcagagaaagatgaatgggagggctgattttc

SEQ ID NO: 778849 - DNA, 95 bp, Homo sapiens
agcacctggagggaaaacaacacacattgcagcactaatgcatgatcagatttcaggaaaccttactgtgccttggattacagggtgttctagaa

SEQ ID NO: 778850 - DNA, 75 bp, Homo sapiens
ggagacttcaaagatgtattatcagaagcaatcaagggagcagttgttggtattgatttgggtactaccaactcc

SEQ ID NO: 778851 - DNA, 100 bp, Homo sapiens
tgcgttgctcttgcttttcctcgctggggtgtacggcgtcgggtttggagttcaagtcggtagccgacagcgttctgtttttacgtgacaaaagatggga

SEQ ID NO: 778852 - DNA, 100 bp, Homo sapiens
ccctcggtggcccaggtgctggtggagcacaatgtcacgcacacctacgctgccccagactccgtgggaaggaggcttgtttaaactacggatgcttttc

SEQ ID NO: 778853 - DNA, 74 bp, Homo sapiens
catgatccgacacgccggggcgcccgcgcgcggggaccccacgggacctaatctgggagcctgcaagtgacaac

SEQ ID NO: 778854 - DNA, 100 bp, Homo sapiens
cacggcagcccacatcaagaagttcaccttcgtctgcatggctctgtcactcacgacaaatatggtctctttagaaggccttaccaaagtagttgatcct

SEQ ID NO: 778855 - DNA, 75 bp, Homo sapiens
gcctgcctcagcctccaaagtagctgagactacaggtgatggaactgtactggaacaatgggagaagctggtagc

SEQ ID NO: 778856 - DNA, 83 bp, Homo sapiens
atcatgtctgcgatagccttttagacgtcaacaccaaggaaaacctcggatcaattctcagctggtggcacaacaagtggcac

SEQ ID NO: 778857 - DNA, 100 bp, Homo sapiens
cgagcgcctcgacctcggtctgaggatccagtttatggaaaaggaaaacttggagaaatccagggacttatcttgggaatgttagatacctttaactatg

SEQ ID NO: 778858 - DNA, 98 bp, Homo sapiens
tgggggagctgctgggcgaagcacgctactacctggtgcagggcctgattgaggactgccagctggcgctgcaggcgagaagagggaagttggagagg

SEQ ID NO: 778859 - DNA, 93 bp, Homo sapiens
gaacccagccatgtggtcagcctgatctcggacttcacagccagcagaactaactaaagatgactcagagccatctggagaagaaacagtaga

SEQ ID NO: 778860 - DNA, 75 bp, Homo sapiens
gggcagccgggcacctgcaagtactggatcctcgacctaggtaagaatgattgatgttggctgatattggagtgc

SEQ ID NO: 778861 - DNA, 73 bp, Homo sapiens
gagaaccagaaacatatctattatatcacaggtgtacaagggagaagaagccacattccaaatctcaggcctc

SEQ ID NO: 778862 - DNA, 50 bp, Homo sapiens
ttctcgctaacaactgcccagctttgaggcccgatgagagaaagggaaag

SEQ ID NO: 778863 - DNA, 114 bp, Homo sapiens
agcatctgggccgagaccattccgtatggagagccgggaggatttgacagctaaggatattgaagaaattattgatgagctcaaggctggcaaaatcccaaaaccagggccaag

SEQ ID NO: 778864 - DNA, 88 bp, Homo sapiens
tctagaaatgaatgtttccatctcttcagagatgaaccagtgtttaactgctgaagagatcttttcccttcatggcttttcaaatgct

SEQ ID NO: 778865 - DNA, 80 bp, Homo sapiens
ccgtgcagcggggcatcatcaagatgttcaaactggaaacaagatggatgatgtgtcaagaagactaacagctgaaggaa

SEQ ID NO: 778866 - DNA, 71 bp, Homo sapiens
caggcgcagacccacccgccatgaagccccccgcagcatggaggagcaggacttggagcgaaggttcgagc

SEQ ID NO: 778867 - DNA, 100 bp, Homo sapiens
tacagaaacctcgtctccctgggagacggtggctcagggagtaaaggaaggccagttgagcaaacagaagtgttcctctgcatttcaaaaccttcttcct

SEQ ID NO: 778868 - DNA, 101 bp, Homo sapiens
tggaccaagatcgagcccagcgtcaacttcctcaagtcgcccaaagatgcggcattccaaaagaactcactgtcctgattgggatagcagagaaagctggg

SEQ ID NO: 778869 - DNA, 90 bp, Homo sapiens
cttgaacagactagaaattgcaccacagatatatgggttgttgggggccgtcccgctcctaaggcaggaagatggtggccgcaaagaaga

SEQ ID NO: 778870 - DNA, 80 bp, Homo sapiens
caagatcaagaccggcgtggtgaagcggtgatttgatgaaggctgctgcaggagagttcgcagatgatccctgctcttct

SEQ ID NO: 778871 - DNA, 75 bp, Homo sapiens
ggccatgtcacgggttttctgctggcactttttacccaccagtcttggcaaagtaatccttcccctctaccaccg

SEQ ID NO: 778872 - DNA, 100 bp, Homo sapiens
tacctctcatcattgtgttaatggtgaagcacagcgattcccgtgaagctcgtgtgtggagtgccacggtacaatcagacgacagatggacagtgtgaca

SEQ ID NO: 778873 - DNA, 100 bp, Homo sapiens
aacatctcttctgaactcaagaccagggccaattcctgtccccccagcagcatggcatcgtgtgctgaaccctctgagccctctgccccactgcccgccg

SEQ ID NO: 778874 - DNA, 98 bp, Homo sapiens
caaagctaaaagaatggccaagttatttgcaaaacagagatccagggatgcagtggaaactaatgagaagagaaacgatactggagtatttgtgtcag

SEQ ID NO: 778875 - DNA, 50 bp, Homo sapiens
aggagaagccgcccaaagaactgttggttgaatctggcgatgtggaaccc

SEQ ID NO: 778876 - DNA, 100 bp, Homo sapiens
gtcatggataggcagaagaaagaagaggagaaggagcagtccgtgctcaagagttaaagttcctcgtaattttcgcttgttggaagaacttgaagaagga

SEQ ID NO: 778877 - DNA, 82 bp, Homo sapiens
cgctgctgggcacccacggagcctccggggctggtggaggagaagatcaagcagacccaccgtaagtacctgctgcaggagc

SEQ ID NO: 778878 - DNA, 82 bp, Homo sapiens
tggttccgtccgctaggagtctgcgtgcgagtacatgctgctgttattgctattaatgaagctattgaccgtagaattccag

SEQ ID NO: 778879 - DNA, 54 bp, Homo sapiens
cctcctccatcactggggatctctcagatcccaaccttgattgaccggatgctt

SEQ ID NO: 778880 - DNA, 87 bp, Homo sapiens
gaggcgggagcaggagcccgcggccggccagccgaagatggtggcggctactcctcctgggtttccaggcctgaggtgcccgccctg

SEQ ID NO: 778881 - DNA, 75 bp, Homo sapiens
ggagatgggcagacggattcatttagagctgcggaacaggacgccctctgataattctctggtggttgagatccc

SEQ ID NO: 778882 - DNA, 74 bp, Homo sapiens
aaactatggcctccaggcttccgacggcctggtcctgtgtcacgagaagagaatgccttctagatgcaaaatca

SEQ ID NO: 778883 - DNA, 100 bp, Homo sapiens
ggaaagctgtgaaagttctcaagttcgtgtctgggatgtccggccatttgcccccaaagagagatgtgtaaagatatttcaaggaaatgtgcacaacttt

SEQ ID NO: 778884 - DNA, 94 bp, Homo sapiens
ttaaaagacagtcctcgtcagcactgactttcagctatggaatcgaactcccccactggaaaggattctgaaagaaatgaagtcagccctcaga

SEQ ID NO: 778885 - DNA, 83 bp, Homo sapiens
catccttcagaaaaagcatccccgaggaggaagacgaatcgttaaacatcttaggtcagggtgtcctgttcccaaagctgagc

SEQ ID NO: 778886 - DNA, 100 bp, Homo sapiens
aagggaccacggtcaccgtctcctcaggtttggtgcacctcgatttggaggaagtagggcagggcccttatctggaaagaagtttggaaaccctggggag

SEQ ID NO: 778887 - DNA, 100 bp, Homo sapiens
cttcgctgtggcatggcggacgaggggaagtcgtacagcgatgaatggattaagtttgatgatgacaaagtcagcatcgtaacaccagaagatatcttac

SEQ ID NO: 778888 - DNA, 101 bp, Homo sapiens
tagctggcaagagtattttcgtggtggcacaagaatggctcaactctccaaatagagagaatttctatcagttgcaagtacgaaaatttcctgccgattat

SEQ ID NO: 778889 - DNA, 74 bp, Homo sapiens
tgaaactcaagatccccatggacaacaaggagttggggtttgaagaagtctcagagctgcagggggaccccggc

SEQ ID NO: 778890 - DNA, 90 bp, Homo sapiens
gggccggacgctgagcggagcagctgcgccacggtgaaggccaatgactcagaccaaggtgccaatgcagaaatcgaatacacattccac

SEQ ID NO: 778891 - DNA, 122 bp, Homo sapiens
atcacatttaagagagctctggacaagctggaatgcatccaagagaatccctcaacatgctgttcagtgcattcagaacaagcccctgtattttgctgatcggctgtatgactccatgaagg

SEQ ID NO: 778892 - DNA, 100 bp, Homo sapiens
tacggctccgacaagaggctgagtgaaggccgggggctgccccctccccccagagttttgcggcctccaggtggtggatccaatttttcattaggttttg

SEQ ID NO: 778893 - DNA, 83 bp, Homo sapiens
tggaaatggctttaccgcagagggcgagaggtcaatgatcttaaaagaaaatctccttcagatctttggaaagaggatttagc

SEQ ID NO: 778894 - DNA, 75 bp, Homo sapiens
ctgaaacagaaattctggaacacctatatggcttcctggactgggtccccaagaagatgcagcgggtgggctgtg

SEQ ID NO: 778895 - DNA, 74 bp, Homo sapiens
ttgggagcagcgagactttcaacagtttcctgcgtcgggcacaacagggaagtgttcgccagttactacatgaa

SEQ ID NO: 778896 - DNA, 82 bp, Homo sapiens
caaagacaaaagacacagaagaaaaagtgggactgaagtacactgaagcagacaacgactgaaagacctttcattcagaagc

SEQ ID NO: 778897 - DNA, 100 bp, Homo sapiens
cgggcgcgcccagagccgccgggcggttcctaaaagtaaagctttagaggccaccaaattggcaattgaagctggcttccgccatattgattctgctcat

SEQ ID NO: 778898 - DNA, 75 bp, Homo sapiens
cggcgcggcagagtccccgtacgcctacagtaacggtggggaagaaaacatgacagaaacagatgccttctataa

SEQ ID NO: 778899 - DNA, 102 bp, Homo sapiens
ggaagtaaaaaaaggtctagataacctctacaagaaagttgataaacatttatgtgaagaagagaacttacttcaggtggtggaagctacaatgattttggg

SEQ ID NO: 778900 - DNA, 73 bp, Homo sapiens
gcgtttccacttcagagatctgacttaattcagtgcacaaatgagatgaatgtgaacatcccacagttggcag

SEQ ID NO: 778901 - DNA, 82 bp, Homo sapiens
actcttcatcctggacagtcccttactgtatgtcaagcagcggaggaggagaaagagatggacctcccggactcggcctcga

SEQ ID NO: 778902 - DNA, 99 bp, Homo sapiens
cacgaaaaatcaatgtcagcccaacaacttacagaccgcaacagatgaccaaggaagtttgggattatgttttcttcaaggaggctccatttcctaaga

SEQ ID NO: 778903 - DNA, 101 bp, Homo sapiens
gtctttgttccctgcagccctcccacggctttgggaacgatcactgcagtgcctgtcacgggtcctcaggtcagctccttgcagaggttggccgggcaagg

SEQ ID NO: 778904 - DNA, 75 bp, Homo sapiens
cagaaaaggcggcccagatgaaatcccagattcagccgttggtctttgaaatttcctgtgatgtgtttcaatcta

SEQ ID NO: 778905 - DNA, 100 bp, Homo sapiens
cctcttgggactgggctcgatttgaggtggaacggcacatgtgtgatggggacattgttatcttcaaccggcagccaactctgcacaaaatgtccatgat

SEQ ID NO: 778906 - DNA, 100 bp, Homo sapiens
ccaggagaaagtttcagactatgaaatgaagttgatggatttagatgttgaacaacttggaattccaggctcaaaatctccttcgccaagaccaaacatg

SEQ ID NO: 778907 - DNA, 75 bp, Homo sapiens
cgcaaaggcctgcagtgcgcgcccctgggcgctgcctatggcacagccaagagcggtaccggcattgcggccatg

SEQ ID NO: 778908 - DNA, 78 bp, Homo sapiens
ccaccacctcacagctgaggcctcggggcaagattcttgccaagagaattaatgtgcgtattgagcacattaagcact

SEQ ID NO: 778909 - DNA, 134 bp, Homo sapiens
aagaaaaagaaggccctgagtcaaagaagatgcctcgaactaaacaaattcatcccagaaatctaagagcatttaaatcaaacggtattgagatggattgggttatgaaacataatggtccaaatgacgctagt

SEQ ID NO: 778910 - DNA, 75 bp, Homo sapiens
ggagctccaggcccgtcggcgcggagctatccagtcagttcgctgctattcccatgggtcacaggagacagatga

SEQ ID NO: 778911 - DNA, 83 bp, Homo sapiens
gcggaagctgcccttcaccgcgggcgccaatggggagcagaaggactcggacacagcacttgcacctcctgcgccgccgcccc

SEQ ID NO: 778912 - DNA, 100 bp, Homo sapiens
acacagccttcctcggagaacaagactgcccacctccacaagggcttcctggccctctaccaaaccgtgggtaacctggatgaggacatcattgcagaag

SEQ ID NO: 778913 - DNA, 101 bp, Homo sapiens
agagactccttgggggtcgagcacataacggggttcgggtgtctcgtgtgtgaacatcacagctttggcgctgaccacaatgctgagcaggaagcagcagc

SEQ ID NO: 778914 - DNA, 119 bp, Homo sapiens
aacgaccaagagggtgttcgactgctagagccgagcgaagccacggggtcactctggtgcccattgaggagttcagcccggagttcgtggagccccgggtcagctgcatcagcagccac

SEQ ID NO: 778915 - DNA, 48 bp, Homo sapiens
cactctcgccaccaccgcgtggctttctgaaacaaagactcattttga

SEQ ID NO: 778916 - DNA, 75 bp, Homo sapiens
cgacagtacaaagaagactcttgtcacactaattgccaacaacaatggaagccctcctatgacactgaaacagat

SEQ ID NO: 778917 - DNA, 107 bp, Homo sapiens
tttcctgtggggatttgatcttaaaaaacaaaagatttagatccatgtggacagaaacttttggtatttgatagtcatcctgttctgcatgtatgtttgaaggtgag

SEQ ID NO: 778918 - DNA, 100 bp, Homo sapiens
accaccttcgtctgcacagtcaccaatgccgtgggcatgggccgcgctgagcaggtcatctttgtccgaggactttgtatctttgctaaagtcagtgatg

SEQ ID NO: 778919 - DNA, 100 bp, Homo sapiens
gtcgaacaaagtcagctttctccaatctttctacatcccagattattgccttgtctgtcaagatccgcagttatgaagaacacttggagaaacatcgaaa

SEQ ID NO: 778920 - DNA, 100 bp, Homo sapiens
ggcggggatggcgtcccccgggggcccgtactgcacatcgtggtggtcggatttcaccacaagaagggctgccagggaaatgatcttcattggttagcat

SEQ ID NO: 778921 - DNA, 90 bp, Homo sapiens
gagaaggactcgctcgacccgtccttcactcacgccatgcagctgctgacggcaggttttgacacaagggcgcatatcttcaaagcacct

SEQ ID NO: 778922 - DNA, 75 bp, Homo sapiens
agaagtagaatctgtagaccttccacactgccacctgattaaaggaattgcttccttcaaaatgtctactgttca

SEQ ID NO: 778923 - DNA, 123 bp, Homo sapiens
cagtacttgggcttgccagtggcggattacttcaagcagtggattaatctgaaaaagggaatgcagagagcaaccaatgtcacctaccaagcccatcatgtcagcaggaacaagagaggtcag

SEQ ID NO: 778924 - DNA, 83 bp, Homo sapiens
ggaaccttggggagaacacgggacaccgcggaagccgggaaatgccccccggtatgagattgtcatcatcactgtggtagcag

SEQ ID NO: 778925 - DNA, 100 bp, Homo sapiens
cacgagccagtacgtacgtctgacccctgacgagcgcagcaaagagggctctatctggaaccaccaggagatcatgcacgccctgaagatgacctggcac

SEQ ID NO: 778926 - DNA, 102 bp, Homo sapiens
ccggtcccctcccacctcgtctgggctcgcggcgtctccggggaaagccgtggccccgagggcggatccgagggcagcccaatggatccaatggtgatgaag

SEQ ID NO: 778927 - DNA, 50 bp, Homo sapiens
gggccccgagccggcccgggtcgaggtatctgctgtgcgtttcagtcaac

SEQ ID NO: 778928 - DNA, 97 bp, Homo sapiens
gtgctaccaaagtagaagatatgttgaccctcaatgagaaatacaggtatcaggatgaagatacacctcctcaagagcatatttccccacaaatcac

SEQ ID NO: 778929 - DNA, 50 bp, Homo sapiens
gctatcaaagagatgattgagaactgacggagtctcgctttgtcgcccag

SEQ ID NO: 778930 - DNA, 95 bp, Homo sapiens
ggagaggaagaagctgcttagttatatccagcgattggttcaaatccacgttgatacaatgaagaccctggaggaggagctatttgggaacaatg

SEQ ID NO: 778931 - DNA, 75 bp, Homo sapiens
caggatgtggagatgaaagaggaggcgcagacggggaagcggagccaacatgccagtggcccggagctgggtttg

SEQ ID NO: 778932 - DNA, 90 bp, Homo sapiens
cgcaggcgcccgtgcggaatggcagaaaggagaacctgactgctgtgcactctctctggagacaagcgagcagctcacctttgagatccc

SEQ ID NO: 778933 - DNA, 100 bp, Homo sapiens
agcaggtgcagagcactgcgctgtcagcgatagcccagtggatggccattccagagaagagaaggtgttcttagatcagaagatgccattgtattaggtg

SEQ ID NO: 778934 - DNA, 101 bp, Homo sapiens
atatggcagtggacgtggatttggggatggctataatgggtatggaggaggacctggagctttttttctcaaggtgcaatgaaagccttccacactttctg

SEQ ID NO: 778935 - DNA, 100 bp, Homo sapiens
aaaagccaaagccacagataaaccagtggaagcaggagaagcagcaattatcgtccgagcaggcatcagcaatgcagaagcacggcagccagggaaggcc

SEQ ID NO: 778936 - DNA, 100 bp, Homo sapiens
gcttaggaatctcttttatggagaactattccatggcagtatatcttgtaaaacagttgtcctcaacagttcttcttcagaggttacgagcaaagggaat

SEQ ID NO: 778937 - DNA, 75 bp, Homo sapiens
aacagtcgcttgaacagattggcacccgaattgccaaagttttggaaaagatgacacaattggtactgcctggca

SEQ ID NO: 778938 - DNA, 90 bp, Homo sapiens
ggacgctgaggggcggaggcgggagaggcgagctcgcgatgagtggtctcggcaggctcttcgggaaggattttccgcagatttccagtg

SEQ ID NO: 778939 - DNA, 100 bp, Homo sapiens
atggatcccagtttttcataacggtagtaccaacgtccgggaccatgtctggagaactaccaccaaacattaacatcaaggaacctcgatgggatcaaag

SEQ ID NO: 778940 - DNA, 75 bp, Homo sapiens
ctgttttgaggattcattatgaacaaagaagtctcccaggaggaagagttcatcgattggtggagcaaattcttt

SEQ ID NO: 778941 - DNA, 98 bp, Homo sapiens
ctggggtcagaaggacctctaccgagatgtgatgttggagaactacaggaacatggtcttgctgggttcaacagagtttggaaaagatttctaaactg

SEQ ID NO: 778942 - DNA, 98 bp, Homo sapiens
ggagcagagaacgatccaagaggagaatgcaggctcaacagtaccagcagcagcgtcgaaaatttgcagctgccttcttggcattcattttcatactg

SEQ ID NO: 778943 - DNA, 100 bp, Homo sapiens
acaaatcactggtgaacaagctccgaagaaacggattggagcctgtgacctaccacagggaccaagacccctggacctggggcccagtcggccctcagag

SEQ ID NO: 778944 - DNA, 90 bp, Homo sapiens
gtattccaactccaacgtcatcatgcacgagacctcgcagtaccacgtccaggatgccttcgtgaagatcgtgaggcacgagggcaccag

SEQ ID NO: 778945 - DNA, 100 bp, Homo sapiens
gagaacaagagcagcgcattgacatgaaggtcatcgagccctacaggagagtcatttctcacggagttggataacagggcaagattcagaggaagaaaag

SEQ ID NO: 778946 - DNA, 50 bp, Homo sapiens
gacgacatgttgcttttcgtggagggtttggacagaggagccaaaggcca

SEQ ID NO: 778947 - DNA, 100 bp, Homo sapiens
tgaggatgtaagtgcgtttgaaggcttccacaccctctactccagggacattctgagcatgtgagacctgaggactgcaaacagctataagaggctccaa

SEQ ID NO: 778948 - DNA, 74 bp, Homo sapiens
ctgtggataacgggaggtgaatttccatgtcaacatagtcctgagacattttaaatcctaaggatgtgatcaca

SEQ ID NO: 778949 - DNA, 100 bp, Homo sapiens
ccgcaacccggtgttcccgcgctttatcaagattatcgagtccccagcagtggcaccaacggggtcagcctcccagcagactgcacgggggcagtgcccg

SEQ ID NO: 778950 - DNA, 96 bp, Homo sapiens
gtttggagctcgtatggtcaacattgatggaaaacaaatcaaactgcaaatctgggatacggttatcaatactctggctgaccatcatcatcgtgg

SEQ ID NO: 778951 - DNA, 101 bp, Homo sapiens
accaaccccaaggaggacgagggccggttgccgggcgcgggcgagaaaggaatagcgggttttgcagcaattgttgcatatggattatataaactgaagag

SEQ ID NO: 778952 - DNA, 74 bp, Homo sapiens
aggagaaagaaagatttcagagggagactgaatgtggatgtcagttcacgtcaaaactggaaggaatgtttagg

SEQ ID NO: 778953 - DNA, 96 bp, Homo sapiens
cttctaccagggccacatcaccgccttcctgggccacaacggggccggcaagaccaccaccctgcaatctgaaagcaaatcctgtttagatgcagg

SEQ ID NO: 778954 - DNA, 100 bp, Homo sapiens
actatagaatctcatcccaaagactcattacactcttgtgaccatcctcttgccgaaaaaacccaggttccagcaacagatagaaatgctttaagttcac

SEQ ID NO: 778955 - DNA, 100 bp, Homo sapiens
tgcccctgcctctcgccctaagccccggcccagcccgagcagcaattaccagctctggctgggtcgccacaacttgtttgacgacgaaaacacagcccag

SEQ ID NO: 778956 - DNA, 88 bp, Homo sapiens
gccactgagatgaggaggcgtcgcgcgcgcctgtagctcgcgggcctcgcagtatgcagatctcaatcgccacgtggatgccttgaat

SEQ ID NO: 778957 - DNA, 82 bp, Homo sapiens
gccttggtattacagggtcttcatgcactctgtcaagctgaggctggttggaaggaaaatcatgcaacattcatgagcgaac

SEQ ID NO: 778958 - DNA, 100 bp, Homo sapiens
ggcaacttttattgacttctcagtgtacaacgccaacattaacctgttctgtgtggtcagggcccttatattctcaagaccgaatccttcaagccatggg

SEQ ID NO: 778959 - DNA, 82 bp, Homo sapiens
gcggcgggagtcctggcgctctgcagtctctgctttctatccgtcaagatgataaagtcgtgtgcccgagaaccaaagaagt

SEQ ID NO: 778960 - DNA, 100 bp, Homo sapiens
gcttgtgttggaggctgtggaccttctctgtgcactggtgtcatggagaaactccagctgggcccagagattctgcagcgggaaaatccaaggcttattt

SEQ ID NO: 778961 - DNA, 75 bp, Homo sapiens
gggagaagcgcgatgacggctacgaggccgattcccaggactccggctctctctgcttctgtttccggtggctgc

SEQ ID NO: 778962 - DNA, 85 bp, Homo sapiens
tctggggttctctctacagaagtctgttgcagagttcacagaggagaattccaggaattgaatgatctggcacgggaccctccag

SEQ ID NO: 778963 - DNA, 100 bp, Homo sapiens
ccggtctcggtgtagctgccgtggttgccaggagagctgcgccggcgagaagcggccgagccagcagcagttagttgaatccatggacatgaaacccaca

SEQ ID NO: 778964 - DNA, 75 bp, Homo sapiens
ggagacttcaaagatgtattgagccatgtgttcacatgtcatgtggaccagtatttaactgtggaaaccgcgggt

SEQ ID NO: 778965 - DNA, 90 bp, Homo sapiens
cagcagcagaaattccagtgactagtaatggagaagttgatgactctcgtgaacatagctttaataggctgatgttctaatcatgtcaga

SEQ ID NO: 778966 - DNA, 90 bp, Homo sapiens
cgggcactccacagattctgttgcgaaggcagccatctttagttcgtctttcctagagaggtaagaatgattgatgttggctgatattgg

SEQ ID NO: 778967 - DNA, 75 bp, Homo sapiens
ggtcccaacccggcccaggagcatctttctccgcagaccgtttcctggcgagatcttccaggagcaccccctgca

SEQ ID NO: 778968 - DNA, 75 bp, Homo sapiens
gggaccctcacgccggctcgccagactgaggctgatgtgaatccaaaggcctatccccttgccgatgcccacctc

SEQ ID NO: 778969 - DNA, 77 bp, Homo sapiens
atctatgccccagaagctccatatacttcccatgataaacttaaggagtggacgcttctcttgtgagccagctggag

SEQ ID NO: 778970 - DNA, 80 bp, Homo sapiens
tccagcctgcggagcctgtggggcaggtgtccctggtggtgaatgtggccagcgagtgcggcttcacagaccagcactac

SEQ ID NO: 778971 - DNA, 100 bp, Homo sapiens
tgtgtgctcggatggctcgggccaggccaccggacaggcagactgccagattcacttacagccccagctaattccaccaaacatggaggagtacatgaac

SEQ ID NO: 778972 - DNA, 83 bp, Homo sapiens
caaaccggggtctccctcccaggacacaggagtcaagagcttactcacatagcatattggtatatcaaaatgaaatgcaagga

SEQ ID NO: 778973 - DNA, 98 bp, Homo sapiens
agcgagcagacgcgcacaccggcgagccaagttccgcagcctggcatggcttctggggacctttacgagacagagattactgcagtttatgtgacaag

SEQ ID NO: 778974 - DNA, 101 bp, Homo sapiens
aaaagctgttgaaattgttacttcaacttctgctgaatgcatctactcatgcctcgaaatctcctgacagtgttaatggaagtgaaccaagcattcctcag

SEQ ID NO: 778975 - DNA, 100 bp, Homo sapiens
ttcaaagacagaatagtagtaatggtagaataagcccacctgaacggaaagatgctgaaggatgggagaccgttcagagaggaaggcctattcgttctcg

SEQ ID NO: 778976 - DNA, 87 bp, Homo sapiens
catgggtcctcgacctgcagggagcagaggggacagaggcaccaaggacctccaagacagattttcagctgaactctcatctctcaa

SEQ ID NO: 778977 - DNA, 101 bp, Homo sapiens
gttctcattccttctccagggagagtcgctgcagatgcttttactgactctgctatcagtgctaaagtgaatggcgaacacaaagagaaggacctggagcc

SEQ ID NO: 778978 - DNA, 99 bp, Homo sapiens
ctggcatccaagcgtttccgtgccgagcggcaggacaacaaggagaactggctgcatagctgacgagactaaactcaatacagtggatgaccagaaagc

SEQ ID NO: 778979 - DNA, 75 bp, Homo sapiens
tctctttataagaagaatattcagaggctaacaaagtttgaagaaaacaggtctgaaacaaggtcttacccccag

SEQ ID NO: 778980 - DNA, 75 bp, Homo sapiens
tggtgtccagatggacagagttgatcaggaggagatgttaaagtaacccatcttgcaggacgacattgaagattg

SEQ ID NO: 778981 - DNA, 50 bp, Homo sapiens
ctcggagcgcccggagccggaggttttaaaatcaaagatgggaaaatcgg

SEQ ID NO: 778982 - DNA, 98 bp, Homo sapiens
tccgccatgaacctgaggggcctcttccaggacttcaacccgaggtagtaaacctattgatggcaattttgctgactgtggaagtgactcatccaaac

SEQ ID NO: 778983 - DNA, 95 bp, Homo sapiens
aaaaagagaagcttctaacacagatgaaatcagacatcactgaaggagttgatattccaaagaaacctagattggagaaaccagaaacacagtca

SEQ ID NO: 778984 - DNA, 50 bp, Homo sapiens
aatttctcacctttgacaaacagcttcagaagctgcttaccatggaccca

SEQ ID NO: 778985 - DNA, 103 bp, Homo sapiens
tgcctccgccggggggctatgggcccatcgactacaaacggaacttgccgcgtcgaggactgtcggtggaatgcagtagccctctgggcctgggatattgtgg

SEQ ID NO: 778986 - DNA, 80 bp, Homo sapiens
gggaggagaaggaaggcatggaaagttccagccggttcgagagctagtaagactttgaccccgacgcaggcttcagtgat

SEQ ID NO: 778987 - DNA, 98 bp, Homo sapiens
gcgccgcctggctttcgtattcgttgttctcggcgggctgtggggcctccgcgccgcggccgttagtcatgtcgggtgaatgaaaactttgccattga

SEQ ID NO: 778988 - DNA, 100 bp, Homo sapiens
ctggatctttatctggcttactttgtccacactccggcaacgaaggttttgggaacagtaaaatggttcaatgtaaggaacggatatggtttcatcaaca

SEQ ID NO: 778989 - DNA, 100 bp, Homo sapiens
gtggtagcagaaggatttgattcagcaaatgggatcaatatttcacctgatgataaatatgaatatcgtgtagagatggttcaccagtcctgtaatgatc

SEQ ID NO: 778990 - DNA, 100 bp, Homo sapiens
caggtccttcacccacttcctgacaggtgtgtgcgccatcattgggggcatgttcacaggcgaccatggccttgctgggtaagcgctgtgacgtccccac

SEQ ID NO: 778991 - DNA, 97 bp, Homo sapiens
aaggacctttggacaaaactaaaagaatgtcatgatagagaagtacaagatagaagctttggagaaaatgaatgaagatcacgttcagaagaatgga

SEQ ID NO: 778992 - DNA, 98 bp, Homo sapiens
ttcagtctataataaagagatgtaattaaacaaccaccatgtcgagcaaaaaggcaaagaccaagaccaccaagaagcgccctcagcgtgcaacatcc

SEQ ID NO: 778993 - DNA, 51 bp, Homo sapiens
cgtcccctggactctctcaagaacttgtaatagctggcatcgttgagaatg

SEQ ID NO: 778994 - DNA, 83 bp, Homo sapiens
atctttccttcatgctacccaccacctcagtgctgaggtcaagatgccgcgtcactgctccgccgccggctgctgcacacggg

SEQ ID NO: 778995 - DNA, 51 bp, Homo sapiens
gacacagtgtcagaattacaagacttgccttcaaggtgtgcaagtaaggac

SEQ ID NO: 778996 - DNA, 100 bp, Homo sapiens
caagatggacgggtccaggaaagaggaggaggaagacagcacattcaccaacatttctcttgcagatgacataggttttacagaaggcgacacatgttgt

SEQ ID NO: 778997 - DNA, 100 bp, Homo sapiens
caaggacaacaatgagatcgtggacaagatcatgggcaaaggacagatccaggttctgcgttagacctgcatcttagcaatgtgaatattgcatccctag

SEQ ID NO: 778998 - DNA, 100 bp, Homo sapiens
gagagctctacgtggtgcaccatctctgggcactagaaagtttgggatttggctcttacatcagtgaagtaaaagaagtcttgcaagagtgtaaaacagt

SEQ ID NO: 778999 - DNA, 75 bp, Homo sapiens
attatgacagattacgccccctatcctatccgcaaacaaaaatgcttggacagaagagatgagtactatttccac

SEQ ID NO: 779000 - DNA, 100 bp, Homo sapiens
attgacagctgcattcaatcttttggcaggaatttgtggatgcttatgtgaattatgtcttccaaatctcagttcatgaatggtacacagccttctctag

SEQ ID NO: 779001 - DNA, 100 bp, Homo sapiens
ccccggggtccccaggtccctcaagcccctacatcccttcaccaggtggtactaatcaacgcagtgaaagatgtagccaaagccctgggagacctcatca

SEQ ID NO: 779002 - DNA, 90 bp, Homo sapiens
gtttcttcctgcctttgggccgtcaggcagttggttgggacccgctccaaccctcggcttcctgttggataaaaaaattggagtaaatca

SEQ ID NO: 779003 - DNA, 100 bp, Homo sapiens
ggcagagcctgaggaagctgaagcagaggtttcccagagaatttggatggagagacccggaactgccggaagtgattcagatgttgcagcaccagtttcc

SEQ ID NO: 779004 - DNA, 93 bp, Homo sapiens
tgcgagcagcgctactgcgccgtgtgccgcgaggagctgcgccagaacccttaggagaaatcttgagagtggacagcaattgtgaagatcgcc

SEQ ID NO: 779005 - DNA, 100 bp, Homo sapiens
gttaagcgcctccttgatcaccaggataatattctctcattgattaatgtcaatggtcatctaatacatgggagaaacatggattttggagtatttcttg

SEQ ID NO: 779006 - DNA, 75 bp, Homo sapiens
ggccgcctggccctcgagctcgccgaagatgtccccggcgcagcgcgacaggtgctggagaatctggtaaaagca

SEQ ID NO: 779007 - DNA, 85 bp, Homo sapiens
gaagcaacagagaatcaatttggatcggcttatcataaccagggaatccctggagatagagaaagtcaggctgtggttgaccccc

SEQ ID NO: 779008 - DNA, 82 bp, Homo sapiens
tccgggattcccagccatggcagattcctccgggcagcaggacctcctgccccccgaggtctgcagtctcctgaacccagca

SEQ ID NO: 779009 - DNA, 80 bp, Homo sapiens
tgccgctcctaagcctgcacagccgcggcggcagcagcagtgagaggtgctacctttttacccacacttaagtgacgcaa

SEQ ID NO: 779010 - DNA, 97 bp, Homo sapiens
tctacctgcccctcacctcccacatcctccgcgccttcgtcaactctcagatccaagggcacaaggaggctcagctgtcgcaggccctggaggagct

SEQ ID NO: 779011 - DNA, 100 bp, Homo sapiens
ccaagttagatgccgattacccacttcgagtcctttattgtggaggtggttatcactaggctaaaactggacaaagaccgcaaaaagatcctcgaacgga

SEQ ID NO: 779012 - DNA, 100 bp, Homo sapiens
cttttcgtaaagggaagtcatttctactggacttcatgcttagatacatgtataacaaggatacctccaaaagcagccatactttggagcagttattggg

SEQ ID NO: 779013 - DNA, 100 bp, Homo sapiens
cggacgaccatttggtttggtcatcaatctgaactacaaagatttgaactctctggaatctgttctgcgccacccggcagataatcgcacccagattcga

SEQ ID NO: 779014 - DNA, 75 bp, Homo sapiens
gaagaaagaggagaaggggaagaacatccaggtggtggtgagatgcaggatccacctcagaaaaagatggaatgc

SEQ ID NO: 779015 - DNA, 100 bp, Homo sapiens
cccgaactcgcccggccgggagccgccgcgggcaggacgcgcgctgcagataacgaaggaggcccaacttcattcaataaggagcctgacggatttatcc

SEQ ID NO: 779016 - DNA, 73 bp, Homo sapiens
gaaggcctcggcctttcacattcgggaagcgtcgggattaggtgaaagctcactagaagttaatggaaataaa

SEQ ID NO: 779017 - DNA, 80 bp, Homo sapiens
tggtggaacagctacgcatagaagccgggattgagcgcatcaaggtgacaccggaaactggtactcaagtgatgaggatg

SEQ ID NO: 779018 - DNA, 100 bp, Homo sapiens
ccctcacgttctttcgcttttttacctgccaatcaaactgctacaagacaacaccctgatctggcatggacatgttatgaagacagtatggagtttccag

SEQ ID NO: 779019 - DNA, 74 bp, Homo sapiens
caggattatggggtcttaaaggctgatgaaggcatctcgttcagatccccagaggagcaccctttctaacctgg

SEQ ID NO: 779020 - DNA, 100 bp, Homo sapiens
ctggagccagctgttgggcttcgcagtaagactttgaccccgacgcaggcttcagtgattgccgcggatcagaagcctgagcactttggctcgagacaat

SEQ ID NO: 779021 - DNA, 90 bp, Homo sapiens
ggacgcggaagaactggcccagcggaggttcccgcttctgaagcgtgggaggcggaagagactgcaggagaccagtatgatgtctgtgcc

SEQ ID NO: 779022 - DNA, 101 bp, Homo sapiens
cctgggcgcgggggcggcgtgtcaggtggttgcggagctgccagagactgctgctactttgaaacgtacgatagaggccctgatggacagaggagcaatag

SEQ ID NO: 779023 - DNA, 100 bp, Homo sapiens
gggacgcgaggacccgggctgggctttcctcacccggtttgagttcctgagatctagttggtgagagacatgatgttctaccggttgctgtcgattgttg

SEQ ID NO: 779024 - DNA, 109 bp, Homo sapiens
cgacaaccccacatggatcattgaccctattgatggaacaactaactttgtacataggtagttgatgtcacttggcgatattcctgcaaacatgaagaggtgattgcca

SEQ ID NO: 779025 - DNA, 100 bp, Homo sapiens
ggcgtagagaggaagagagaagacttggcgatagttccctttctagaaaggtcctggatgttctgaccaaagggaagcagcaggcattctttgtgccacc

SEQ ID NO: 779026 - DNA, 100 bp, Homo sapiens
gccctgtatgatgtcaggaccattctgctctccatccagagccttctaggagtactttttggggatcctgaaagccaaggggaccctgcgaccacctgag

SEQ ID NO: 779027 - DNA, 82 bp, Homo sapiens
ctgatttccattcttcttatagtctatggtagtttcagatgatgattattctccaccgtctaagagaccaaaggccaatgag

SEQ ID NO: 779028 - DNA, 100 bp, Homo sapiens
gtctctctccctgctctacaacgtgcctgcagtggccgaggagattcaggatgaagttggacaatcagagatgacttggttgtagtgtggaaaccagtag

SEQ ID NO: 779029 - DNA, 75 bp, Homo sapiens
ggggcctgggtccacgccgagggcaggacgaacttcaccaggtttacccaaggtccagcctagcccctaggcacc

SEQ ID NO: 779030 - DNA, 98 bp, Homo sapiens
agaatcacgttattgaagacatcaagggaaaatggggtgaggaagattttgaagacaatcgtcacttatacaggttgggggccgtcccgctcctaagg

SEQ ID NO: 779031 - DNA, 82 bp, Homo sapiens
gacggcgagcgcgagcggcgcgagaaaataatggcatcagctgctaaggaatttaaaatggacaacttttcacctaaagctg

SEQ ID NO: 779032 - DNA, 75 bp, Homo sapiens
gatatcgacgtcgtgatccagaagtccagagctgaggactgcctgtttgcagcccttcctggatctggagagagc

SEQ ID NO: 779033 - DNA, 90 bp, Homo sapiens
cccagccattttcctgagttccctgatccccacacctacatcaaaactccggatctccctaatactatgaacgcggcagagataacggac

SEQ ID NO: 779034 - DNA, 101 bp, Homo sapiens
agataccggaggaggatcttctgcggattgttggaatctaccgttgatgataattagaagcatgctttccactgaacttcccgacaacatttgttatgcag

SEQ ID NO: 779035 - DNA, 98 bp, Homo sapiens
gcgtctgcccggccaagaggcaaaggggaggttacgcagcaaaccatccagaagggccgcctgggcagaatgtcacgatggacgagggcggcacgccc

SEQ ID NO: 779036 - DNA, 90 bp, Homo sapiens
agagccaggtccagagcgccgaggagccggtctaggacgcagcaggctcacagaacatttcctgcctgttgctcacactctgttgtccac

SEQ ID NO: 779037 - DNA, 98 bp, Homo sapiens
ccggcttctcccctacgcgctacacaagtggagctccttttcctccacctaccttcccgatgagggagataaatctgcaggacatcaaggaagattta

SEQ ID NO: 779038 - DNA, 107 bp, Homo sapiens
agaaggacaaagagatcatagccgagtatgaaagtcaagtcaaagggacgacttgagaaggcatcctgaccctatgcagaaatgcagaaacacttccatgagctaaa

SEQ ID NO: 779039 - DNA, 74 bp, Homo sapiens
ttgatcttgcccaggaggaggagaatgtcttggatgcagaattcttaaagaggagttttctcgggtccgggagg

SEQ ID NO: 779040 - DNA, 75 bp, Homo sapiens
ctacaggaatggatcctgatgatatttggcagctgtcctccagtcttaaaagggcggcgactggcggcgcgatgg

SEQ ID NO: 779041 - DNA, 126 bp, Homo sapiens
atcaagcttggaatgatcatcaaacagctatggtgatgattagagacatactaatgtacatggtggcacgcactacccttcttcctggcctcctgaagaccatagcagcaaatcgtaagatgcccc

SEQ ID NO: 779042 - DNA, 100 bp, Homo sapiens
aataacaaggcttatctctaggatccataagaaaaggagagggagtttttaaatctgacaacatttctactatctccatcctaaaagatgtgctttctaa

SEQ ID NO: 779043 - DNA, 74 bp, Homo sapiens
tagggtcctttatatagaagggagagtaggaaatcactgaccaggacatgtttggagatgccagcacgagtctg

SEQ ID NO: 779044 - DNA, 50 bp, Homo sapiens
gtgccggcgccggagacgatgccgtttttctgtagaaaatgtttcctgac

SEQ ID NO: 779045 - DNA, 90 bp, Homo sapiens
catcacacaggatccgcccctggacatggaggagaaggtccgcttcaaagaatctcgatgctggcctggagcagaaactgagctggacca

SEQ ID NO: 779046 - DNA, 75 bp, Homo sapiens
tcagcgcctacccgagtgtgcgaagctagccaagggccgttgctccagggagaactgcaaatatcttcatccacc

SEQ ID NO: 779047 - DNA, 100 bp, Homo sapiens
gtagggacaacaggcaggagaattatgggagcgcatttccccaggaagttttcagcaaactcggattatctcgatcgtgcaatcaggcctcacagaggag

SEQ ID NO: 779048 - DNA, 82 bp, Homo sapiens
agacgctctgaactgactgccccgcatcaccggagcgtcccagctgcgaggaggtgtggtgctggaggctgtggcatggcta

SEQ ID NO: 779049 - DNA, 100 bp, Homo sapiens
ggagatggaggcgtcgggcgtgagcggaaatgaggaggagatggtggaggaggctgaaggttacctgggcttgtatgtgttctatgtggtcactgtgatt

SEQ ID NO: 779050 - DNA, 100 bp, Homo sapiens
atttttacctcattacttcaagggcgtgctcagtatctacaaagacccaggataaaagaatcagagtgtctcaacccttgacaagaggaccaagtgcctt

SEQ ID NO: 779051 - DNA, 83 bp, Homo sapiens
cgaagacataaaatctttaacatttgacgcagagcgtgaggatcatccccggagaggacgggaggatcggcagcacagggaac

SEQ ID NO: 779052 - DNA, 75 bp, Homo sapiens
tctcaaaatgattaaggagtgtgacatggctaaagataatcacagctggcttatcaatattgctgtttgatgcga

SEQ ID NO: 779053 - DNA, 82 bp, Homo sapiens
gtccgagccagccgctgttttgccggaggagcccctcaggcctgggtaattccagaattgattggccataccattgtcactg

SEQ ID NO: 779054 - DNA, 102 bp, Homo sapiens
aagatgaagcttccaaaatcaccatttggaaggaacagtacagagttgtacaggaggaaaaccagggatgtgtttggccaaatgggagagtggttacaacac

SEQ ID NO: 779055 - DNA, 98 bp, Homo sapiens
cgtcctcaagaaagtcctgtgccggcagctgtggccaacagcaacagagagagtccaggccggtctaattgaagccaacggagaactcaaggtcttca

SEQ ID NO: 779056 - DNA, 82 bp, Homo sapiens
gaatctttccaaaggagatgcccgacctgctcactctgtcaccgaggctagagtacagtggcacaatcacagctcattgcag

SEQ ID NO: 779057 - DNA, 75 bp, Homo sapiens
tcggacccatcgccgcttctagaccctactgcggtctcggatattgccggaatttattgttcaccgatgaaaatg

SEQ ID NO: 779058 - DNA, 75 bp, Homo sapiens
cagattcgcagtggtcgcttcttctccttggctttactgcagatggtgcgtgacgagagccaccagatcctggcg

SEQ ID NO: 779059 - DNA, 100 bp, Homo sapiens
gcggcggccgtggtcaccaggaaggggacgggacggacggtgatggtggtcgccgcggcggcgtgtgcgcccctcagattctggctgtgactcagtcact

SEQ ID NO: 779060 - DNA, 49 bp, Homo sapiens
gggattgtggatggcattttcacaaggaagttgacaaaagtgttgaaga

SEQ ID NO: 779061 - DNA, 100 bp, Homo sapiens
gtccttttctacaaatatcagagccatggctcagacttgccttcaaggtgtgcaagtaaggacttatctccagaaaagaacacttatgaaacagaattat

SEQ ID NO: 779062 - DNA, 75 bp, Homo sapiens
agcctgtggcagcctcccctgcaccggcaggatgataatgaagataattcaaatgatgggacccagccatccaaa

SEQ ID NO: 779063 - DNA, 75 bp, Homo sapiens
caagattcttctgaattgtgctgccttggccaaaagaggggctaagtgatggatcttgtactccgtgttgcagat

SEQ ID NO: 779064 - DNA, 74 bp, Homo sapiens
gaagtccaagtcaaacgcagaaggactgcctcactgagcaaccaagacctccaactggtacagatactatggtc

SEQ ID NO: 779065 - DNA, 75 bp, Homo sapiens
ggattaaaatctcccaagaggaatgacaaacaaccagctcttcaggtcctggatgcctcatcccttagtttcaac

SEQ ID NO: 779066 - DNA, 108 bp, Homo sapiens
tagtaacccgcgaaatgatgggatagcgttgcaaatccttaaaagagtcttaacgcatgattatgatatgagggtggatgatttccttcgtcgcacacaagctgttgt

SEQ ID NO: 779067 - DNA, 100 bp, Homo sapiens
tcctgaagcagttctgtgtatccaacattaatcagaaggtgaagtttcagaatcctaatgtacctggctagctggtggtgagtaggggctttggggccaa

SEQ ID NO: 779068 - DNA, 74 bp, Homo sapiens
tcttccacttgcacgaaagctttcctaggccaaaaagagtgtgcctacaagacagtgtgctagctttctggaaa

SEQ ID NO: 779069 - DNA, 100 bp, Homo sapiens
ctaggactcatgactactgaggattctgtggcagtgcccaggagtaaaccaagccaattcagcacttcctgtttacttccttgtcatatgtaccatagat

SEQ ID NO: 779070 - DNA, 100 bp, Homo sapiens
cggcgcccctcggggaagatggcgccctcggggctgaaggcggtggtgggggaaagagactccatcctctgccaatggcccttcccgggagggctctagg

SEQ ID NO: 779071 - DNA, 75 bp, Homo sapiens
atggaagcaggtttaaaattttacataagaagttacctttttcaggtatgatctcgtgaaaccttgagagaaact

SEQ ID NO: 779072 - DNA, 105 bp, Homo sapiens
ctggggactgcgggcggcgctgtgtccgtcgccatgacagattactacagcccggccatgctgggcctgaagaccgaccaggaggtcctcggggagctggtgcgg

SEQ ID NO: 779073 - DNA, 100 bp, Homo sapiens
cagtcggcgccgctgcccatggagggagtggacatcagccccaaacaggacgaaggcgtgctgaaggtggtatgcagatcttcgtgaagaccctgaccgg

SEQ ID NO: 779074 - DNA, 83 bp, Homo sapiens
tatctgtcttcggtggactccttcggcagtccacccaccgccgccgcctcccagggtggactccgacgaccagtggggagagt

SEQ ID NO: 779075 - DNA, 122 bp, Homo sapiens
atcattgaaaagtggtcgatggaacgattgcaggcacctccgaaacccgattcaggtttgctggatggatttatgacggaaacagaccttatcctgacttttaatatatcaatgcaccgatc

SEQ ID NO: 779076 - DNA, 89 bp, Homo sapiens
cggcgcggacgacaaaggcgcgggcccgggcagccgaggtcctcttcctgatggatgggaacaagccatgactcaggatggagaaattt

SEQ ID NO: 779077 - DNA, 90 bp, Homo sapiens
aaaataaaaaatggcagtaaccctgagacaaccacttctggtggttgccactcacctgaggatatgagggaatctcgctgggaagctgac

SEQ ID NO: 779078 - DNA, 89 bp, Homo sapiens
gcttgctggatcattgtattactcatcacagatcggaacggaggcctgtgaatcttcagctagatgaagaaacccaataccaaactgct

SEQ ID NO: 779079 - DNA, 98 bp, Homo sapiens
ttccacatggcctacaacgtcatcacgccctttctcttgctcaagagtggtgagatcaagtcggtagatcccagactaatccatgtgatgctgatgga

SEQ ID NO: 779080 - DNA, 74 bp, Homo sapiens
tgctgtgtgcggtgctgctgagcttggcctcggcgtcctcggatgttgacgatgagtatgaggacgaggaccag

SEQ ID NO: 779081 - DNA, 100 bp, Homo sapiens
cggccctggaggccggcagctggcgctggggatccctgctcttcgctctcttcctggctgcgtccctagatgcatcatcccattcagatgaaacctgcag

SEQ ID NO: 779082 - DNA, 101 bp, Homo sapiens
ggatgccatgatggccatgaatgggaaggtgaggatcccaaccccactgaacacaagcggggtgcaggtgatctgcatgaaggggaaggccaagtacaagg

SEQ ID NO: 779083 - DNA, 100 bp, Homo sapiens
tggagctgtgcctgtgccccgccagctaccggggggactcatgccagatctctcacttcaagattccgaagtacatcgtgtttgtcacaaactaccccct

SEQ ID NO: 779084 - DNA, 100 bp, Homo sapiens
gaagtactgccttgtaattcttaatcagcctttggacaactattttcgtcatctttggaacaaaggaaaaccagtagattcccagacatcgcgaagtgaa

SEQ ID NO: 779085 - DNA, 75 bp, Homo sapiens
cgcgaggagctcatcgggcagattagcgacatccgagtgcagaacctgcaagcgcaaatctgtccaaggctgcct

SEQ ID NO: 779086 - DNA, 89 bp, Homo sapiens
ccccagtatgggagatgctcctcagggaggaagccatgtgagggggccggctctgtggcaggaatataaatagtttctggaaaggacac

SEQ ID NO: 779087 - DNA, 101 bp, Homo sapiens
cggaagaccaagatcatcgagatggtctctaattaacagaagatggcaaagcccagccacagcagctatgtccttcagcagctaaacaaccaaagagaatg

SEQ ID NO: 779088 - DNA, 90 bp, Homo sapiens
gaaatagagataataaatgcaatggtggaggaggaagccaagaagaggatggagatgaagatgaggaagctgagtcagctacgggcaagc

SEQ ID NO: 779089 - DNA, 82 bp, Homo sapiens
gagcccggcaccccccgccgacaaggagggtatcatgatattagctggtttgacatcaagtcatttgtgagtcatcagatct

SEQ ID NO: 779090 - DNA, 100 bp, Homo sapiens
ctcggcgcctctgcgcgcgggaagatggcggaacaggctaccaagtccgtgctgtttgtgtgtctgggctcagtttatgaacctcttaaaagcattaatc

SEQ ID NO: 779091 - DNA, 50 bp, Homo sapiens
gggtgtaatacatcatgaactgcagggcacttcaggtggcaagacagctc

SEQ ID NO: 779092 - DNA, 101 bp, Homo sapiens
tatttgaggagaaagcatttggcagctgttgtgctgtgtatggacgtgggctttaccatgagtaactccattcctggtatagaatccccatttgaacaagc

SEQ ID NO: 779093 - DNA, 98 bp, Homo sapiens
tgatcatcctctaccaataagcaatccactaacaagcagtcaaccaatagatgatgaaatttatgaagaacttccagtgcatccactctgggagagcg

SEQ ID NO: 779094 - DNA, 96 bp, Homo sapiens
gcaaaagcctctgctctgcctccggggacaagaaactagagcaaataaccgttttgaaattgtcctgcagacattcgctttgtctgggagaagaat

SEQ ID NO: 779095 - DNA, 75 bp, Homo sapiens
ataactttcaaaacttctttttcaagaaactaagagacggtctggaaaatcccgaagcagaagcccgtattcatc

SEQ ID NO: 779096 - DNA, 100 bp, Homo sapiens
gatatggctttgtctcctttttcaacaaatgggttgctgatcagctctgtgccaagtatagcaaggaatatggcaagctatgtaggaccaaccagattgg

SEQ ID NO: 779097 - DNA, 130 bp, Homo sapiens
agccgctgattccccccgcatcgcctcccgtggaagcccaggcccgcttcgcaggtttggtgcacctcgatttggaggaagtagggcagggcccttatctggaaagaagtttggaaaccctggggagaaa

SEQ ID NO: 779098 - DNA, 75 bp, Homo sapiens
ttttcgtgatcttcagaccccaggttctttggtgtcgtgaaaactacccctaaaagccaaaatgggaaaggaaaa

SEQ ID NO: 779099 - DNA, 90 bp, Homo sapiens
agaagaagggaaggcgcgagtgaggaaaggaggtactgtagctcaaagcttggattctgccgtgccactcacgaatggcgacacagaaga

SEQ ID NO: 779100 - DNA, 83 bp, Homo sapiens
tgaatccccaggcccttgttggggcacaaggtggcagatgacagacaaccttctgtgccttcatcaagctggttgtgtaccca

SEQ ID NO: 779101 - DNA, 100 bp, Homo sapiens
gaaaataagggagttcctctgcatgggggtgatgaagacagaccctttccaggccaagtcatcaaggcatgggacattggggtggctaccatgaagaaag

SEQ ID NO: 779102 - DNA, 100 bp, Homo sapiens
gggcaactcttctcatattccacagtccagcagctactgtagcctgcatccacatgaacgtttggcccgcaatggatgccctgcaactagcaaattcggc

SEQ ID NO: 779103 - DNA, 100 bp, Homo sapiens
tgaagacctccatgatgagccatctccacttaatgactgtctcacattggccggcaacttgttccaggagtccaatgtgctgattgctgctaacagtcag

SEQ ID NO: 779104 - DNA, 82 bp, Homo sapiens
accagcaccgcagatgttgtcaaggtggcctaccaggaggccaggggtgtcgccatgaggcagaggagtcgtttgaatttgt

SEQ ID NO: 779105 - DNA, 75 bp, Homo sapiens
cgaacttttgacacggctttggaaacgacgtcatgtgttaggatgaccagtgtcccagtgaaggaacgagtgaag

SEQ ID NO: 779106 - DNA, 75 bp, Homo sapiens
agccctcatccctaacggtgaaagtgccctgtgggacatcgagaccggccagcagacgaccacgtttaccggaca

SEQ ID NO: 779107 - DNA, 74 bp, Homo sapiens
agcgcaggcgaaggagaatgctggcttcagcggttgtgggggagattcatgatgttgctatcaaaagttgagaa

SEQ ID NO: 779108 - DNA, 75 bp, Homo sapiens
gtcgacggtccccactttcccctgagcctcagcacctgcttgtttggaaggccttataatgggactaattttacg

SEQ ID NO: 779109 - DNA, 83 bp, Homo sapiens
cgcggattcgccgaggcaccgaggcactcagaggagcttcctgcctgacacagctcacttcaagaagtgcacaatgtcagaac

SEQ ID NO: 779110 - DNA, 100 bp, Homo sapiens
tatggaggcccctctgtcttttctgtgacgggagcaatgctgacctcggtttcctggacccattccgactcaggttgcatattcctatacctatgaactg

SEQ ID NO: 779111 - DNA, 100 bp, Homo sapiens
gagttttttgatcttccaagtctcaataaaaacatccccgtcatcgagtatgagcagttcatcgcagagggtggcctggaggagatggtggaggagctca

SEQ ID NO: 779112 - DNA, 83 bp, Homo sapiens
ctggagtccgcgcctccctgggatttgatcaaagatctgaaatctgaactgtcaggaaactttgagaagacaatcttggctct

SEQ ID NO: 779113 - DNA, 83 bp, Homo sapiens
cagtgatctgcataagattttcaattccctctggaacttggaccaaactaaagtggaagaagagcccgaagaagaacctgaag

SEQ ID NO: 779114 - DNA, 100 bp, Homo sapiens
atacgatgaaatcacagctacatatttgttattggggagaaaatcttcagaggtattttacatggagctggactttctcagcttcccaaacagcgccatc

SEQ ID NO: 779115 - DNA, 75 bp, Homo sapiens
ccagctctcgcttctgcaagaccacgaacacaggaccccaagatggccaggccagtctccaggacccgggacttc

SEQ ID NO: 779116 - DNA, 96 bp, Homo sapiens
ggactgaaccacatgggctggccagagcacacaccaggcactggtttccaggtcttggcaacctttgaaattccaattccatttgagagagctttg

SEQ ID NO: 779117 - DNA, 100 bp, Homo sapiens
atccaggctggacccacgtctgtctggtgataccaggggcagagggaccactctgacagggtactagatggaaacttgagaaaggactgcttattgataa

SEQ ID NO: 779118 - DNA, 78 bp, Homo sapiens
accttccgctcagtcctcggcgcccgcctgccgcctccggagcgcctgtgtgggtactgtctgatgagcgtgaaaggt

SEQ ID NO: 779119 - DNA, 74 bp, Homo sapiens
tcaagaaatctcaagatattaaagttactgctgttaaaaagcctatatatgcaaacagatttgcagtaccaacc

SEQ ID NO: 779120 - DNA, 96 bp, Homo sapiens
cagactcggacgtggacgcctttttccggacagcttgccctgcagggacattcaaggccagccaggaagctgaaggctgctcccactgcccctcca

SEQ ID NO: 779121 - DNA, 75 bp, Homo sapiens
gggtgtgcaaacccgagagaactgggccccctcccaccacctcctccagtaagcagaaacggcagcacatctcgg

SEQ ID NO: 779122 - DNA, 83 bp, Homo sapiens
gcctcatcaagaacccagcggagcgggcggacctgaagatgctcacagtcctgaacgaggctgtgggggccctgatgtaccac

SEQ ID NO: 779123 - DNA, 90 bp, Homo sapiens
cttgtggatggacttgctacctcttgggtgaactctagcaattacaaggatcgagcggtccacggaccaggtcatcaagcctgttaacct

SEQ ID NO: 779124 - DNA, 82 bp, Homo sapiens
gtgaatcctcgtccatgtcacctcatgcgggcttcgttgatattcactgatggactccaaagaatcattaactcctggtaga

SEQ ID NO: 779125 - DNA, 100 bp, Homo sapiens
tcactttagaccctccacctaattgcagcagacaactaaactggtaggtggcagcagaggaaggaattcttcagattgatggctactgacttaaagtctg

SEQ ID NO: 779126 - DNA, 100 bp, Homo sapiens
cagctgctgatccagaggagcttgctaaggaccaagagggcggagcatccagagctgctgttggcggattgtacccacggggagatgattcctcatgaag

SEQ ID NO: 779127 - DNA, 75 bp, Homo sapiens
tagccctgctccaggaatgggacctcgagtcactgtggtcaaaatgcagatcttcgtgaaaacccttaccggcaa

SEQ ID NO: 779128 - DNA, 78 bp, Homo sapiens
gcaagaactgaggagcaccaggagacgcaactcatcgggttactataacaacagtaccaaggtggctgtgaaaaccct

SEQ ID NO: 779129 - DNA, 82 bp, Homo sapiens
tcagacgcagccgtagacaccagctccgaaatcaccaccaagagagttaagaaagacgtggacaagggcacacggcactcag

SEQ ID NO: 779130 - DNA, 51 bp, Homo sapiens
cttcaggaacctgctgtcagtggattgagaggatccagaatccagatctct

SEQ ID NO: 779131 - DNA, 117 bp, Homo sapiens
gctatggctcccagcagcccccggcccgcgctgcccgcactcctggtcctgctcggggctctgttcccagcttgcgcgatctctggcctcttcaactgcatcaccatccaccctctg

SEQ ID NO: 779132 - DNA, 124 bp, Homo sapiens
cttgcttggccccagcttgttggatggaaactcgcgggactcatttgtgtccaggtccctggctgacgttgcagagtcaatgcagaccctgcaggacttgctcactgatcttcatgcactccag

SEQ ID NO: 779133 - DNA, 128 bp, Homo sapiens
ctgtgtgacagcaatgaggtgaacccaggggccgaagcccacccagggagttgatgggtgactgtcgttcctacagttacgtgtgtggaatctccagtaaagatgaacctgactgggaatcacttatt

SEQ ID NO: 779134 - DNA, 98 bp, Homo sapiens
ttcatgctgcccacatctcatccaaacagcaccagtggcagttcgcagcctccaggacttggctcgcatcgccatccggggcaccattaaaaagatta

SEQ ID NO: 779135 - DNA, 108 bp, Homo sapiens
ggagtacaatgtcagtgtttacactgtcaaggatgacaaggaaagtgtccctatctctgataccatcatcccagcaatgcctcctgcaccaccaactgcttagcaccc

SEQ ID NO: 779136 - DNA, 100 bp, Homo sapiens
aaggaggtttacaaaatagacatgccgcccttcttcccctccgaaatgacctacggcatgatgagctccaatgtgtactactacacccggatgatgtcac

SEQ ID NO: 779137 - DNA, 90 bp, Homo sapiens
ctggagttccgcgacaccatcttcgacaacatcctcaaggttgaaggtcgaggagctggaaggcgagcggagtcggctggaggaggaaaa

SEQ ID NO: 779138 - DNA, 50 bp, Homo sapiens
tcagtattgagccaggagttgaggtgaaagatattctctcaaaggtccag

SEQ ID NO: 779139 - DNA, 101 bp, Homo sapiens
ggaaccttctcatttacaccgagtttggcaagatgcttgtacagcccaatgagatctgcgtcattcaggagcttgatcctggatagtgtttgtatgatgtg

SEQ ID NO: 779140 - DNA, 75 bp, Homo sapiens
cgggatcggccaggaactgggtgctggtgcctatagcatgagggcttctttcgccgaagcatccagaagaacatg

SEQ ID NO: 779141 - DNA, 100 bp, Homo sapiens
cgaacatcccggtgctaggggtgcaggaggaggacggcagcaaccgcagcagcagccttcagattctacttgacacacctggcattatcagtcctggtaa

SEQ ID NO: 779142 - DNA, 98 bp, Homo sapiens
cggccttcatcgacatcagtgaagaagatcagattgcagagggaatggcatacatcgagcggaagaactacattcaccgggacctgcgagcagctaat

SEQ ID NO: 779143 - DNA, 75 bp, Homo sapiens
ttcttcgagtatttgtagaagggacacattggcgtgagacctgggagtacgttgtgccaaatcattgccacttgc

SEQ ID NO: 779144 - DNA, 50 bp, Homo sapiens
ctgaagtatgccattagttcccaggaaattgagaggctgactgagcgact

SEQ ID NO: 779145 - DNA, 121 bp, Homo sapiens
tatgaagaagtgctacataatttggaatttgccaaggagcttcaaaaaaccttttctgggttgagcctagattcctacaagattatcaattttgcccccagtttacttcggattatagtct

SEQ ID NO: 779146 - DNA, 100 bp, Homo sapiens
gggacttccgcaacaaaccctatcctgtccgagcaaagattacctattaccagaacacactgacacaaatgaagaaacacccctgccgccagtgtgacaa

SEQ ID NO: 779147 - DNA, 73 bp, Homo sapiens
cgccggaaggccatgaagcagggcttcgagttcaacatcatggtggtcggagtcagtggatcggtggggaaaa

SEQ ID NO: 779148 - DNA, 100 bp, Homo sapiens
aaaaagatgagcaggaatgttttgctacaaatggaggaggaggaggacgacgacgatggggatatcgttacctagaaaagtacgagaaagttcatcattt

SEQ ID NO: 779149 - DNA, 97 bp, Homo sapiens
gtggccagattgcagggagtatcaaatatgagaaagctaggccatctgaataactttactaagaaaccaagctctgtccgtatcgatcaactggatc

SEQ ID NO: 779150 - DNA, 98 bp, Homo sapiens
cgatcctggacctggcgcgcgactctcagcgttctcatctctcttccttcaccatgaagctgatggacaaattccactcacccaaaatcaagagaacg

SEQ ID NO: 779151 - DNA, 73 bp, Homo sapiens
tacatctcaagctcatattttgaagtgtttacgggtcctgtactcacatctctgcagatgaaaaagcagctga

SEQ ID NO: 779152 - DNA, 50 bp, Homo sapiens
gtcaattaccatcctttaccaggattttcacccgatggaagactaattgt

SEQ ID NO: 779153 - DNA, 75 bp, Homo sapiens
cgagccgatcgccgcggggcagttcgggccggctgtcctggcgcgggtgaaggttgccgaactgtccccctggct

SEQ ID NO: 779154 - DNA, 98 bp, Homo sapiens
aggaaacttacccaagaaaccacttatccaaatacttacatttttgacttgtttggaggtgttgatccagatgacgtgtactactgtggaataaagta

SEQ ID NO: 779155 - DNA, 51 bp, Homo sapiens
gggagggagatccgcctgcagctgaaggtgcctccggagccagcgtggtgg

SEQ ID NO: 779156 - DNA, 87 bp, Homo sapiens
ttaaatgtgtctctaagtgatgagatgaatgaagacttcagatctggttctttaccgatttgttacaactcaagcaagggccagcag

SEQ ID NO: 779157 - DNA, 73 bp, Homo sapiens
tcataacagatcaaggaatcgaattttaccagcctccttctgaagaaataaaaacaggtgaggatgaagatga

SEQ ID NO: 779158 - DNA, 97 bp, Homo sapiens
cagggctgcagcccaggagcctcaaggcggcccggcgggcgactggacggccggacaggtaatttcatctgtgccaaagcctccagaggacaagcca

SEQ ID NO: 779159 - DNA, 153 bp, Homo sapiens
agtactgtcctcgaccatgggcagaatcccagctgcccctcccagaacactccatgccactggaactcaggagcgcaggtgtgcaactgaggaacatggctcaagaaactaatcacagccaagtgcctatgctttgttccactggctgtggat

SEQ ID NO: 779160 - DNA, 82 bp, Homo sapiens
gaggatgatgatgatggggggtccagcaaatatgacatcttggcctcagaggatgtagaagatgtggacgagtgctcactag

SEQ ID NO: 779161 - DNA, 100 bp, Homo sapiens
aaagaaatgggaaacagcatgaaatccacccctgcgcctgccgagaggcccctgcccaacccggagggaatctgagaaaaaggggttgattgaaagaatc

SEQ ID NO: 779162 - DNA, 75 bp, Homo sapiens
gcaagcgggtggaagctgctctcagtgcctgccacctccccaaaggcaaaaacgcagatgtcatctgctgcacat

SEQ ID NO: 779163 - DNA, 75 bp, Homo sapiens
tcctgtcccaaaagaccatcctgctctcaactacaacatcgtttcaggagctacagagacttctgaagtggagag

SEQ ID NO: 779164 - DNA, 85 bp, Homo sapiens
tacggaaaagaatggcagcggaaacgcagacactgaactttgggcctgaatgaatgaactctggaagcccagccagggacaatgc

SEQ ID NO: 779165 - DNA, 96 bp, Homo sapiens
gggagctgtagaccggagctgttcctattgggccatcttggctccaccaccctggggatggagaagtttatgtttgggatgtgaactcaaggaagt

SEQ ID NO: 779166 - DNA, 74 bp, Homo sapiens
taatggcaagtccagactggggatatgatgacaaaaatggagttggtggtgaccccgcccagttggcccagagg

SEQ ID NO: 779167 - DNA, 75 bp, Homo sapiens
gtcccgagaccgcaccacccgcctctgggccccagacagttcaaaaggtgatgacctatcaacagccattctcaa

SEQ ID NO: 779168 - DNA, 96 bp, Homo sapiens
ggagaacatcatggaaaacaacactcagtggctaatgaaggattggcagccaccatttgcatgtgatgttgataaacttcattttacgccacgtat

SEQ ID NO: 779169 - DNA, 49 bp, Homo sapiens
ccagagtctagcattaactatggagatcagttggccttatttcctcagt

SEQ ID NO: 779170 - DNA, 90 bp, Homo sapiens
tcatgtcctggatgtggcagggaacaggtgccactgattaatgaacttgaatcagcaatacatcagctgtacaaacagcgagcttcccgc

SEQ ID NO: 779171 - DNA, 75 bp, Homo sapiens
cagtagcttttctgagaatacttgctgaaaaggaagttttctggaatggggccgttgctccagggagaactgcaa

SEQ ID NO: 779172 - DNA, 100 bp, Homo sapiens
ggaaaccaagatagatgtgtcctatgaataccgcttcctggagttcacgactctgagtgctgaacggtggcagccgaagttaggaagcagatctccggac

SEQ ID NO: 779173 - DNA, 100 bp, Homo sapiens
ctgaaggctgtcttgatcaggaaactgaagactctctgcttttgccacagcagttcctgcagcttccttgaggtgactcctgcacctgcgccggctcctg

SEQ ID NO: 779174 - DNA, 75 bp, Homo sapiens
aagagaagaattcagaagaaacaaaagtgccaccgaagagattgggctaatggatactacagacaacagagaaaa

SEQ ID NO: 779175 - DNA, 110 bp, Homo sapiens
ggcgctcgagggaccatggccgatcctcgcgtgagacagatcaagatcaagaccggcgtggtgaagcgttggttgaatctggcgatgtggaacccatggatatggagggc

SEQ ID NO: 779176 - DNA, 100 bp, Homo sapiens
gatcctggaaccgttgattggagatatgcccttagttggagctttgtctatcttcttccttaggaaaccagagtggggtttaatctggactgaattggag

SEQ ID NO: 779177 - DNA, 98 bp, Homo sapiens
gggatccagagcgccgcgcacttcgtcatgttcttcgcgccctggttagctttatacgtctacgaatatttactgcacgtaggagcacagaaatctgc

SEQ ID NO: 779178 - DNA, 98 bp, Homo sapiens
gcaatcaagtggacaaaccttcagatcgtggcaagcgagcccggggtagagatgatgaagaacgagagcttcaaatggatcctgcagactatggaaag

SEQ ID NO: 779179 - DNA, 73 bp, Homo sapiens
ggaactggagcgcagagtccgcggccggcacgggaaagggagtgttgacattcagggatgtggctgtagaatt

SEQ ID NO: 779180 - DNA, 82 bp, Homo sapiens
cgaggatatcagggcagccctggaggcttactgcaagaagtatgagcagctcaagatgtgaagttcatttccaatccgccct

SEQ ID NO: 779181 - DNA, 99 bp, Homo sapiens
tctagacagcgacatgcagaccctggtctatgagaactacaacaagttcatctcagccacagggttccccactgaaggacttggtccagctgtctggca

SEQ ID NO: 779182 - DNA, 90 bp, Homo sapiens
ttcgatcagagatcggcggagaccctcgaagtgcgcaaacttgacactcaccctgaccgcccagaagaatcagtgcggtttctgtggcag

SEQ ID NO: 779183 - DNA, 100 bp, Homo sapiens
tttcctcctggacttgaggctgacagagtttgatgctccaagccctctcccagagactacagagaacgtggtgtgtgccctgggcctgactgtgggtctg

SEQ ID NO: 779184 - DNA, 98 bp, Homo sapiens
ggagagccgccagggctctatcaaggggctggtgtactccagcaacttccagatgcttgtggttggtggcatcgaccgggtttatgaaattggacgcc

SEQ ID NO: 779185 - DNA, 50 bp, Homo sapiens
ggacagaggctgacatttcttgctgcctgagattgtgagggagacccagg

SEQ ID NO: 779186 - DNA, 83 bp, Homo sapiens
gagagtttgctccaccaggccagattctccggtgaagactcccatcaaggtgaaggtgatcgagaaggacatctctgtccagg

SEQ ID NO: 779187 - DNA, 83 bp, Homo sapiens
acacagagctcagtgcaggcactggcaacttctatttgtttccctgaaacctgggctcttgaagacgcatcactggagcagat

SEQ ID NO: 779188 - DNA, 78 bp, Homo sapiens
tgctcttggggagcccaggccaagccatccattcttgggtcctttggagacctacctggtggttctgtgccttcccct

SEQ ID NO: 779189 - DNA, 100 bp, Homo sapiens
gggcctcatcatcttcctcctgtgcaccctcttcatcagagacccctggcacaagatccctgccctggacccagagaagctcaatgtcttccggacagta

SEQ ID NO: 779190 - DNA, 90 bp, Homo sapiens
gcagccctggccgcgcactcgcctcagctgagcctgggttgcaaaggagtttggcttccaaaataatggcttctcggtttacatcaatag

SEQ ID NO: 779191 - DNA, 98 bp, Homo sapiens
gccagggaacggggcatcgcggttccaacggtcgggaactacaagcggactgtgaagcggatcgacgatggccaccgcctgtgcagcgacctcatgaa

SEQ ID NO: 779192 - DNA, 100 bp, Homo sapiens
ggctgctcggcttccagctcaatcctgccggttgcgccttcttcctggacatgaccaactgcaggttcaggagaagtggcacctggtggaggacctgtcg

SEQ ID NO: 779193 - DNA, 96 bp, Homo sapiens
aaaacaaagagtcagagagagatggaagagaaatatattgttagtgcctggtacaatatggcatttccggagagttcttttgaagtcacttcagaa

SEQ ID NO: 779194 - DNA, 97 bp, Homo sapiens
ccctcctgtgacctgcatgtactgggggattcgcagggaggatgtcgggacaccccggaagctgggaaatggataaaagtcttcatgttggcactca

SEQ ID NO: 779195 - DNA, 75 bp, Homo sapiens
gctgccctgtggggcctctacatgtccctggttaatgtgggccatgtctggtcaccgacgatgagggcgcacctg

SEQ ID NO: 779196 - DNA, 129 bp, Homo sapiens
gaaagccctaccacaagaagcggaagtatgagttggggcgcccagctgccaacaccaagattggcgctgttccactggctgctttgggggctcctactcttgatcctgcccttgctgcacttgggcttc

SEQ ID NO: 779197 - DNA, 82 bp, Homo sapiens
tgacgctgctgctgcccggcctcgggctgaataccactagaaacatacctgtaaccagagacagctgattatagctttctgc

SEQ ID NO: 779198 - DNA, 50 bp, Homo sapiens
tgggcaccttgcgcttcttgcagtcggccaccagcccctcgggttccaag

SEQ ID NO: 779199 - DNA, 74 bp, Homo sapiens
tagaggcagccagaaaaattgaaatcaatgtggactgaacataaatcacctgatggaaggacttactactacaa

SEQ ID NO: 779200 - DNA, 75 bp, Homo sapiens
cagctctcatgaaagccctggaaatgccacagttctgggaggtgatcagtgatgaacatggcatcgaccccaccg

SEQ ID NO: 779201 - DNA, 82 bp, Homo sapiens
gaacggggcgagcctggaggattgtcactccaacctcttttcgctgatggcagatgatcagggctgtattgaagagcagggg

SEQ ID NO: 779202 - DNA, 100 bp, Homo sapiens
gatgtacttcctgaagcagctgctctagtgaagccagcgatctgtacatgagacccaggaattatttccaaagcaagattcatatgctgaaggggtaaca

SEQ ID NO: 779203 - DNA, 89 bp, Homo sapiens
cttttgtccctttgcctcatcccaggttgccttggaaaatgccaacgccgtgtctgaagctggttatattctgggcactaaatgaaggc

SEQ ID NO: 779204 - DNA, 74 bp, Homo sapiens
ggaacctcagtgactcgccgataatcgaggacctgccaataacgcgatgaggtttcaatatggtgttcctgcta

SEQ ID NO: 779205 - DNA, 75 bp, Homo sapiens
ttgtctgcactggcagtgacgatggcacagttaagggaagtcagacctgacacccagtacaccggccgcaagcgc

SEQ ID NO: 779206 - DNA, 95 bp, Homo sapiens
tttatttttccccaattcagcagagaatattttcaaggggggttttaaaatcaaagatgggaaaatcggagaaaattgcccttccccatggccag

SEQ ID NO: 779207 - DNA, 75 bp, Homo sapiens
tggatttttgcatgagacgcttctggacagattcgattgaatagactattgaccattgatacagatttgttggag

SEQ ID NO: 779208 - DNA, 50 bp, Homo sapiens
gctttttggagcaaaggtcacaaatgagcggggatctgatgagcttcttt

SEQ ID NO: 779209 - DNA, 100 bp, Homo sapiens
gaaaaaatcccaaggtctgcaaagttccaatgacaggatttacacagagagcaactattgatccagaactgaatgaaatacacgtcttatctggactcag

SEQ ID NO: 779210 - DNA, 100 bp, Homo sapiens
gagatgtcgatgccctggatcctgacggaccacatcctggagaccaaggaggcatcgatgatggagtcagctttgtgaaagaagctatcatgaaggtgtt

SEQ ID NO: 779211 - DNA, 100 bp, Homo sapiens
gccgagaagctctacccactgccctcggcccgcggaggcatacaccatacatggtacagccagagtaccgaatctatgagatgaacaagagactgcagtc

SEQ ID NO: 779212 - DNA, 74 bp, Homo sapiens
cagtggaagatgatcacatcccagggattttgcttatgtagcaagagataaagatacaagaattttgaaatgtc

SEQ ID NO: 779213 - DNA, 100 bp, Homo sapiens
ttaacctggagacttgccggcttatggtttcaatgctggatctatacacagaatgggattttacatatgctggacagaaataagagaatcaagccccggc

SEQ ID NO: 779214 - DNA, 75 bp, Homo sapiens
cgagtcagattggagcatttgtgttgatgaagatgaaagagactgcaggagagaagatgactgaggaggaggtgg

SEQ ID NO: 779215 - DNA, 100 bp, Homo sapiens
aaaaagaaagaaaactacaggcggggacggcttctcggatcccaaaatggctgggcgaaaacttgctctaaaaaccattgactgggtagcttttgcagag

SEQ ID NO: 779216 - DNA, 82 bp, Homo sapiens
ccaagaccagcgcgagggccctgggcaaggcccgacaggtgatgtgtccaatctagatcccaacttctcatttgaaggcacc

SEQ ID NO: 779217 - DNA, 97 bp, Homo sapiens
tgcacctgtgtcccaccccacccacagacggccttctgcaattccgacctcgtgccaggcttctgttgcacagttggagtggactggaagtctctca

SEQ ID NO: 779218 - DNA, 98 bp, Homo sapiens
cgtgattctcgaccctgtcggaccggatggcaagaatcagctggggcagaagcgcgtggtcaaggcaaccatcggcttgatcaggaatctggccctgt

SEQ ID NO: 779219 - DNA, 100 bp, Homo sapiens
cggtcctgagcgcggcccgggctgtcagctggtaatgccgctgtcatcaaatatgaggagaaacctccaaaaccagcatttcagaatggttcctcaggat

SEQ ID NO: 779220 - DNA, 82 bp, Homo sapiens
gaaacccactgaagacgtctgcgtgagaatagagaccaccgagaggctgtgatcaatagccaggaatggactttgagccgct

SEQ ID NO: 779221 - DNA, 75 bp, Homo sapiens
taagctgctacttcaagctttggccatcaatagctctgaggttcgggatgagtatcggcaggactacgatgctgg

SEQ ID NO: 779222 - DNA, 75 bp, Homo sapiens
cctctccatctggttcgaagtctcagcggtattctggtgcttatggtgcctcagaactgataaatttcaaacgga

SEQ ID NO: 779223 - DNA, 100 bp, Homo sapiens
ggcgacgtccctgggcgcgtcagaacaggcgctgcggctgatcatctccatcttcctggggtcccttgccagctccatctttgacccactcagatatctt

SEQ ID NO: 779224 - DNA, 82 bp, Homo sapiens
ccgcgggtctgctctgtgtgccatggacggagacggggtttcaccatgttagccaggatggtctcaatctcctgacctcgtg

SEQ ID NO: 779225 - DNA, 88 bp, Homo sapiens
ctccaaattttggaacagcagtctcaggaagaatatcttagtgatattgcttataaatctactgagagatggggttttgctctgttgc

SEQ ID NO: 779226 - DNA, 100 bp, Homo sapiens
agaagttcccttgaggagcacaaggagcgctgccgtacatttcttcagagcactgacccaggggacactggtaagaatgattgatgttggctgatattgg

SEQ ID NO: 779227 - DNA, 75 bp, Homo sapiens
tgttgagattctacttattcatcagtttgttgtgcttgtcaagatcaggtgacttcatggtcatgacgattttct

SEQ ID NO: 779228 - DNA, 82 bp, Homo sapiens
ctttgggcgtcccattgccatgatggtgatggaatttcctgataatgtgttaaatctcgatggacatcagaataatggtgca

SEQ ID NO: 779229 - DNA, 75 bp, Homo sapiens
tctggaggagccttctcaagaacagaggtgtgactgcacagaaaagttacaaaacaaatttgactttttgcgctc

SEQ ID NO: 779230 - DNA, 100 bp, Homo sapiens
aggcgccaccatggcggcgcccccgcagcccgtcacccacctcatctttgacatggacggacttcttctggggaaacccccatcagcacctccccctgac

SEQ ID NO: 779231 - DNA, 101 bp, Homo sapiens
ccatggtatgacactgaaatctgtaacggtgctgacagctgcagaagaaattgtacatggtgctgtacagaaggtatttctccactgtgccatctgcagag

SEQ ID NO: 779232 - DNA, 100 bp, Homo sapiens
ccgatactgagcttcttcctatttgccatggaattggcagagggggtcgatttgggaggaaaggtgtggctataaactttgttactgaagaagacaagag

SEQ ID NO: 779233 - DNA, 82 bp, Homo sapiens
gcatcctcccctgcggctcgggcaacgcgctggccggagcagtgaaccagcacggggggtgaatacatcaagacctggaggc

SEQ ID NO: 779234 - DNA, 90 bp, Homo sapiens
caaatctggaacgggtggccgattactgcgagaacaactacatacagggaacactgactatgccaaatggagactacattgaaggttatt

SEQ ID NO: 779235 - DNA, 90 bp, Homo sapiens
gaaagatcctactggacatgtcagtgtcctttcacacccatgtgaaagagggtgttgattgcctttgctcagtatcttcagcagtgtcca

SEQ ID NO: 779236 - DNA, 82 bp, Homo sapiens
cagcaccgcagccttgggcctcgcgccggctatggccgtgccctggggctgagccctcagggccaccagatgcctccaccca

SEQ ID NO: 779237 - DNA, 100 bp, Homo sapiens
gctggcaccccgaacgggttgcttcccccgctgcgaggcccagctgagagccagcctggaggttacccagcagcaggccacccaggccgaaggccagcta

SEQ ID NO: 779238 - DNA, 111 bp, Homo sapiens
tgcagagacaggcgttcgaggagatcatcctgcagtccatgaagatggacctacagctaaaaaattaaagactgagcaagggggagcccacttcagcgtctccagtctggc

SEQ ID NO: 779239 - DNA, 100 bp, Homo sapiens
ctggactgtgggctggtgtgtggaactgatggacgacgaagacacgttgttacctaggaagttacaggcagctctggagcaggctctggagaggaagaat

SEQ ID NO: 779240 - DNA, 98 bp, Homo sapiens
ggagatgaacccaacctagtgggtgtaatacatcatgaactgcagggtttggcagttctctaccagtggaccaatcttttcatccccgtgtacctcac

SEQ ID NO: 779241 - DNA, 82 bp, Homo sapiens
tcattccatcttcattcatgactccagacagttggaactgataatgggagagaagcaattgaaagtggggctgcatttctct

SEQ ID NO: 779242 - DNA, 75 bp, Homo sapiens
gtatttattcctgaagatgacccattatttccacctattgactcgatcaagtcatccgccaaagaagcctgtcca

SEQ ID NO: 779243 - DNA, 100 bp, Homo sapiens
cagtgttgtccctactgcataggacatttattcagaacagctggggatcaaccgtttaacctgtccacagtgtcgagtgccttcccaatggtcagccacc

SEQ ID NO: 779244 - DNA, 100 bp, Homo sapiens
tgctcatcaatgcagttgaggcctcctgtatccgaacacgaacatggagaagatcctgatccgcccaacagccttcaagccagtgctgcccaaacctcga

SEQ ID NO: 779245 - DNA, 75 bp, Homo sapiens
agtacacgctcaagaaaaccaccacttacacccagggggtgccccccagccaagacaggggcaagtgtccgagtg

SEQ ID NO: 779246 - DNA, 87 bp, Homo sapiens
atgttcttcttcgagtatttgtagaagggcttctgactttggccaggtaggacttgacttagaggcagaatttgaaaaagatctcaa

SEQ ID NO: 779247 - DNA, 50 bp, Homo sapiens
cctggcaaccaccccgtctgagaaattcttcacggaaaaatccagcaaag

SEQ ID NO: 779248 - DNA, 51 bp, Homo sapiens
gcacagggtggaaacaagctgctctcagccacaacaagttgttcagaagaa

SEQ ID NO: 779249 - DNA, 75 bp, Homo sapiens
cgccgctgccgccgccgcagctgccaaaatacccctttgctgatgcaagtaagggtgatgacctgcttcctgctg

SEQ ID NO: 779250 - DNA, 82 bp, Homo sapiens
aaatgtccttcccgacttttccaaggcttcagaagcggcctcacctctgccaggaagcgaaatgtggtgattttaaagctgt

SEQ ID NO: 779251 - DNA, 101 bp, Homo sapiens
tcaggctgccccgcagtaccagggagcgactgaagtgcccatgccgcttgctccggagaagtggactgcccctgatggtgattattcataaatcctggtgt

SEQ ID NO: 779252 - DNA, 49 bp, Homo sapiens
gcggtcggggccgaggcgcgaggaggtagcagcaattgcagagacagat

SEQ ID NO: 779253 - DNA, 98 bp, Homo sapiens
aatttctgtctttgaagtaaatatacgctttgttggtggactactctcagcctactatctgtctggagaagagagctactccaccccactctggctgt

SEQ ID NO: 779254 - DNA, 100 bp, Homo sapiens
tgcccccagcccaccagagctcctaaattatacagatctgtgattgaagatgtcattaatgatgtgagagacatctttctggatgatggagtggatgaac

SEQ ID NO: 779255 - DNA, 99 bp, Homo sapiens
gtctttcagagcccggcaccacccatcttgagtatctgattctgtgaggagaccaggaggaattttgaagccaccttaggttggctacaagaacatgct

SEQ ID NO: 779256 - DNA, 100 bp, Homo sapiens
gttcttccaaagtgcccggacccaaaacaggaactccccgcagccaccgccacccattggaatggccaacaggggacctgcatatggcctgagccgggag

SEQ ID NO: 779257 - DNA, 100 bp, Homo sapiens
agatgaagatgctctcattgctgatgtaaagaataaaagccgccctcattctaggggagaatataatgtttacagcacctttcaaagtcatgaaccggag

SEQ ID NO: 779258 - DNA, 76 bp, Homo sapiens
ggcttcctccagacctctcggcgcggaaagcataacccctactgtagaactaaatgcactgtgcatgaaacttgga

SEQ ID NO: 779259 - DNA, 100 bp, Homo sapiens
tgtggggttggtgtgattagcttcgcagtctggaaagctttaggagttcacagtagtggaatgttggctgtccgtgaaaaccgctacattgtcctggcca

SEQ ID NO: 779260 - DNA, 101 bp, Homo sapiens
ctttgttattggagaaacatgcagattatatcgcatcctatggctcaaagaaagatgattatgttatctgagttcattggagtgggtgcttgtgcatatat

SEQ ID NO: 779261 - DNA, 100 bp, Homo sapiens
ctgcagcgggaaagagaacagagagtcctggggacagaagagctggatattctttcgcccagttatggcagacaagttaacgagaattgctattgtcaac

SEQ ID NO: 779262 - DNA, 98 bp, Homo sapiens
ggctggtgcatgagaaggcccggcagcttcgccgttctatggaaaacattgagctcgggctgagtgaggcccaggaggagatgttaaagtaacccatc

SEQ ID NO: 779263 - DNA, 98 bp, Homo sapiens
cgcccaagcagcagctgccggagcccgagtggatcggggacggagagaacacgagcccatcagactactgttttccaaagtgaagttgcagtcactct

SEQ ID NO: 779264 - DNA, 87 bp, Homo sapiens
taatactcctggacctgtgtgtcagttaatgtggtctcccatgtctcatgatggaagaccagtttgcagccctgcacgaaaatcccg

SEQ ID NO: 779265 - DNA, 90 bp, Homo sapiens
ctgccggtcaccaggacttctcacagagtctggaaagagcaatgaaagaaaaggcggtcgatctcgttcccatactcgctcaaaatccag

SEQ ID NO: 779266 - DNA, 97 bp, Homo sapiens
cggcggccgaaagcggagagatgctgggcgtggcggccgggatgacccacagaaggactccatgaaagatgacagaagaagttattgtgatagccaa

SEQ ID NO: 779267 - DNA, 75 bp, Homo sapiens
cagcctcccgagtggctgggattacaggttcaagcactgtcttcctgttggccctgacaatcatagccagcacct

SEQ ID NO: 779268 - DNA, 117 bp, Homo sapiens
tgggtattgaaactctaggaggtgtctttaccaaacttattaataggaataccactattccaaccaagaagagccagatcatggaagggaagtggttgctgtgtatgttactggtgc

SEQ ID NO: 779269 - DNA, 100 bp, Homo sapiens
atcgtgactctgcttctgaaaaacggtgcttccccaaacgaggtcagctcgtgggctaccttgagaatggagcgaggagccaaggagaagaaccaccagc

SEQ ID NO: 779270 - DNA, 90 bp, Homo sapiens
ggtggtagagggcatggatatctctactcgctccaaaggctgaccccgcactacatctacccaccagccatcgtgcagcccagcgtggtg

SEQ ID NO: 779271 - DNA, 98 bp, Homo sapiens
ggctccaaatggtaaagaaaaactttgagtgggttgcagagagagtagaggccagtcatggtttcattactcagcacccctgggctagcttgattcgt

SEQ ID NO: 779272 - DNA, 100 bp, Homo sapiens
gactcagcctcaggtagatggtttccgtagatggtggctttctttggacccttgacatcaaccagttactatttggatttcgaactcaacaatgaactaa

SEQ ID NO: 779273 - DNA, 83 bp, Homo sapiens
gagcgccgggaccatgtcccagctgcagctgtggctgcagtttgaggctctgaacaaggtgcacgtcggcgacgaggacttcg

SEQ ID NO: 779274 - DNA, 100 bp, Homo sapiens
gagagatccccctaactccaccgaacgatacacacgttggatcaaccagctgacgccggagcagctcctaacccagaaaactttagaaactgttcctttg

SEQ ID NO: 779275 - DNA, 82 bp, Homo sapiens
gccatgtccgaggagaagcccaagttccagatttcggaaggttcacgagtgttgccgacacgccctcccaactgcagacatc

SEQ ID NO: 779276 - DNA, 76 bp, Homo sapiens
gattttcagggctttgaatgcatcagaaccatgcacgcaactattctgtcaaccctggccaatttggaaggtgaag

SEQ ID NO: 779277 - DNA, 74 bp, Homo sapiens
ggcggctgaggaaagcaggaggaggtggcggcggcgggaagatgcaccagtttgtagaaaataatttaatacta

SEQ ID NO: 779278 - DNA, 100 bp, Homo sapiens
gaggagaagaatttggggagtcaaaatgggacagcaatatctgtgagctgcactacaccaggaatccctttgcccacgtccagctgaagccgacagtgac

SEQ ID NO: 779279 - DNA, 100 bp, Homo sapiens
gaagagtcctggatggcagatggggggaccccggtacggacctgtgcaggtgaggacaggccagtccaagtcaaggtccttgttgtacagcacagtgtgc

SEQ ID NO: 779280 - DNA, 84 bp, Homo sapiens
acccagaccctggagcctcagttggaagcagccgatccagcctgcggagcctgtggggcagatagggccagatttgagtgtgtg

SEQ ID NO: 779281 - DNA, 75 bp, Homo sapiens
acaacatcaccgtgaggcagggggacacagccatcctcagaaatctccgagaagcaagggataatgctgtggctg

SEQ ID NO: 779282 - DNA, 101 bp, Homo sapiens
ggaggactgggtatcaatctcactgctgcagacacattcacttcttcaactgagatggacatgatataatctccattgagtcaaagaatggcatctagtcc

SEQ ID NO: 779283 - DNA, 98 bp, Homo sapiens
gcctcaatctctactcgaagaagaaagagaagaaacgttttctcaggaaggatctgagtctctccctgcggagacagccctgaagaactcctgtaacg

SEQ ID NO: 779284 - DNA, 83 bp, Homo sapiens
caatgattcagatgtggaggagaatatatcctctaaatctgatgtgctggagaatctggtaaaagcaccattgtgaagcagat

SEQ ID NO: 779285 - DNA, 75 bp, Homo sapiens
acacagaagttctcagggggctggcgcatgcgtgtctccctggccagctctttcgacgtgtagcagcagctttgc

SEQ ID NO: 779286 - DNA, 114 bp, Homo sapiens
cggccaggggctacgacccttgggatctgccctccgctcagctcgagcttccctcgtggccgacggaacaatgaaggtggctgactgttcttgggatgaaacaataaagatcta

SEQ ID NO: 779287 - DNA, 75 bp, Homo sapiens
atttagagctgcggaacaggacgccctctgatcaaatgcagccctgaggatttggctactgcatataacaacagg

SEQ ID NO: 779288 - DNA, 100 bp, Homo sapiens
tgacaggtgcagcggagacttctaagagggaaaaccaagacccctttgctgatgcaagtaagggtgatgacctgcttcctgctggcactgaggattatat

SEQ ID NO: 779289 - DNA, 100 bp, Homo sapiens
cctggtgaggggccgcgctgtcaccctgggccagttcaaggagctgctgaccaaaaagggcagctacaggtaaattcgaaccaccattatttcacccgaa

SEQ ID NO: 779290 - DNA, 83 bp, Homo sapiens
ctacaaaggaagacttgtaacctggagaagagatgaagctactgaatctttacatcaaacgtgcacaaacaggttctggagga

SEQ ID NO: 779291 - DNA, 74 bp, Homo sapiens
tggattgaactcagagaagccgggggccagatattcgaagcttacaacatggcagctttgtggaaattaccttg

SEQ ID NO: 779292 - DNA, 74 bp, Homo sapiens
tgaactgaagaagcttgggctcacttccacaaatgcatttgcaagtaaaatcactggcatgttgttggaattat

SEQ ID NO: 779293 - DNA, 100 bp, Homo sapiens
tttcacctttgaattcagccagtggtcacagctggatgtttgcgacatcccagagagcttccagagcaatttgtgtatggtgattggtggagccaacctc

SEQ ID NO: 779294 - DNA, 100 bp, Homo sapiens
tacccaagtttaaatgacctgctatgcccacagagcttgatccagaagtgcacaggctactgaattcaaccaatggaagaatgttgtgtttatcctacag

SEQ ID NO: 779295 - DNA, 75 bp, Homo sapiens
agaatctgtcacagagggagatgtcaggtgggagaaaggttgttttctgcatggaccgtgccctagaatttgccc

SEQ ID NO: 779296 - DNA, 51 bp, Homo sapiens
gagctggggcacggagctgtgggaacttagtgatttggcccgtgaccctcc

SEQ ID NO: 779297 - DNA, 100 bp, Homo sapiens
gccaaaaggaatgaccctagccagactcagggatcaaagagcaaacagattcagtggcctgcattgggtgttttgaatgctgtatcaaatgcctgggggg

SEQ ID NO: 779298 - DNA, 100 bp, Homo sapiens
ctcagaaatttatagataacaggatcatttcatctaagatctgactgcagccatgagcagcaatgagtgcttcaagtgtggacgatctggccactgggcc

SEQ ID NO: 779299 - DNA, 75 bp, Homo sapiens
gccttgtcactggagtgcaagaagaaattcccacctgtcaaagaggctaatagctcgtcagcttgctaaaatcca

SEQ ID NO: 779300 - DNA, 100 bp, Homo sapiens
tccgagagctgaatgaggccttggaactcaaggatgcccaggctgggaaggagccaggggggagcagggctcactccagtagagacggggtttcaccgtg

SEQ ID NO: 779301 - DNA, 96 bp, Homo sapiens
ccttgtcaaagatgccagatgtgggagacacgccaaagctcccaagttgttgacctcctgtactggagagacattaagaagactggagtggtgttt

SEQ ID NO: 779302 - DNA, 100 bp, Homo sapiens
aaaaagattcccaggatgtgagcaacacgggaccggagtcagaaataccatcagaggaggggtactgtgactttaatagtaggccaaatgagaactctta

SEQ ID NO: 779303 - DNA, 51 bp, Homo sapiens
ccatttctcctattgaggagtcaacccctggtacctgacagtgtaaagaag

SEQ ID NO: 779304 - DNA, 100 bp, Homo sapiens
tgaacaaatatggagccattcttagtcaaaaagctcatcttgccttatcaaaatttcgctaaggagtttgtgatcagtgatcggaaggagctggaggaag

SEQ ID NO: 779305 - DNA, 50 bp, Homo sapiens
tttcagaagcacatgtattataacagagaagctgttgttttagggagcac

SEQ ID NO: 779306 - DNA, 100 bp, Homo sapiens
gagggaaagtgccgctttaaggagaactgcaggccatactggagatgttactattcaaacacagatgcagtcatttatgtagtagacagttgtgaccgag

SEQ ID NO: 779307 - DNA, 100 bp, Homo sapiens
gaatcctttcagcgttttcttgaaaatcatgagaaaatgacttctacaaccagatacaagggtgcaagatccagaacatgagtcgggagtactgcaaaat

SEQ ID NO: 779308 - DNA, 75 bp, Homo sapiens
cgagaggatgaacaacaagttcgacgcgtggtgatgatgtccagcaactctgtgaagcaggagaagaggagtttt

SEQ ID NO: 779309 - DNA, 96 bp, Homo sapiens
aaagagagagagcaagaactgttcaatcgcatagagaagagggaggtgttgaaaagaagaccttcttcaggaacaatttttaatgatgctttctgg

SEQ ID NO: 779310 - DNA, 75 bp, Homo sapiens
aggaaggcgccggcgggagtcggggatcctgctttggggctgcaccgtggtggccctcgtgcccccggcctcccc

SEQ ID NO: 779311 - DNA, 50 bp, Homo sapiens
ctgatgagcccttgaagcacagcagatatacctgtgtttcccacaatcac

SEQ ID NO: 779312 - DNA, 82 bp, Homo sapiens
ctgcggccggagcgggcggctgagacaaaggcgacgaaggacagaataacgggctcccagattcacaagccccaccaagagg

SEQ ID NO: 779313 - DNA, 100 bp, Homo sapiens
atccccacgagtggacctacgaggaacaattcaagcagtccatctcaggttttgcgcacagctgcttccagtatgccatccagaagaaatggccgctgta

SEQ ID NO: 779314 - DNA, 73 bp, Homo sapiens
aaatccctcctgcttacaaagatttagctgagccatggattcaggtggagccgccaccaaaatgcagattttc

SEQ ID NO: 779315 - DNA, 82 bp, Homo sapiens
tctgggtgcagttcctgcagtaccccactctacgatcagatagggccagatttgagtgtgtgaatttttgagtgaaacctgg

SEQ ID NO: 779316 - DNA, 80 bp, Homo sapiens
cgcccagggggtgcgaggataccccactggagtacgacaaggagttctcccctcgtcagcgacaccacaaagagttcaag

SEQ ID NO: 779317 - DNA, 100 bp, Homo sapiens
gtttgtaccagactatcaggctgaaagttctgcctgccttgtgcttggctgtatgattttccctgatggctgggactcagatgaagtaaaacggatgtgt

SEQ ID NO: 779318 - DNA, 100 bp, Homo sapiens
ctgggcctccctttgtgagttacgtgaccctcccagggggaagctgttttggcaactttcagaaaaaatgcctgtcttaaaggctgaagcgtcacattat

SEQ ID NO: 779319 - DNA, 100 bp, Homo sapiens
ttttgttaattatcttaaatacttgctttactggaaagacccagaatatgccaagtatctaaagttcaagggcagacggggtttttgaggaggattcgca

SEQ ID NO: 779320 - DNA, 100 bp, Homo sapiens
tgttaccacttctgtggctgctaccccactcctgggccgtccctgaaggaattgaatgatctggcacgggaccctccagcacagtgttcagcaggtcctg

SEQ ID NO: 779321 - DNA, 100 bp, Homo sapiens
agagtgcgctccaagagcgacacgccgtacctcgcagaggccaggatctcctttaacctgggggcaggaccagtggttttggcgagtgagaaacaacagg

SEQ ID NO: 779322 - DNA, 75 bp, Homo sapiens
gagagacgagccccgagcccggctggacgccgctgcctcaggctgcgctacatggtgaagcagttggagaatggg

SEQ ID NO: 779323 - DNA, 100 bp, Homo sapiens
cgtgttgctgcgagtgggacgcgcactggtcggtgccggctcaggagccgggtggaaaagcgagattgtctttgaccatttgctatggacattgtcaggg

SEQ ID NO: 779324 - DNA, 90 bp, Homo sapiens
caaactcagaagacagctctgtagtgcctgaagacgtacactggccacaagaatgagaaatactgcatatttgccaatttctctgttact

SEQ ID NO: 779325 - DNA, 83 bp, Homo sapiens
gctacttctcggcgctgccgtctctggaggagtactggcaacagccaagacaatgcaaactccagtgaacattcccgtgcctg

SEQ ID NO: 779326 - DNA, 73 bp, Homo sapiens
accttcagaacctatacattgcatcgtttgggcaaagtacttgttcaagactcagtggcctctgaggatgtgg

SEQ ID NO: 779327 - DNA, 132 bp, Homo sapiens
atttctctaagttaacagaagaggaactattggacagagaatttgaccttctaagatcaacactattcctgatcagagaactccagttgcttcaacacacagtatcagtagtgcagccaccccagatcgaat

SEQ ID NO: 779328 - DNA, 75 bp, Homo sapiens
aagaagtactccagggaaacctcccagatgccttattggaggaactggaacgctccacccttcaggacagtgatg

SEQ ID NO: 779329 - DNA, 97 bp, Homo sapiens
ccaacgtcaacaaggccctggatttcatagccagcaaaggcgtcaaactggtgtccatcggagccgaaggtatggcacagtcacaagggtgggtgaa

SEQ ID NO: 779330 - DNA, 100 bp, Homo sapiens
ccgtcttgcatctgaagaagttcatcgccaaaaaactcaacctttcatcctttaacgagacgaagggaacgtcatcgtttggaaagcgtcgcaataagac

SEQ ID NO: 779331 - DNA, 97 bp, Homo sapiens
gttttgacagtaattcttttgggccgagggaaatctggtttctggattaactactgaatagcaactgcagtcaacagctgatggaatcttgcaggaa

SEQ ID NO: 779332 - DNA, 51 bp, Homo sapiens
ggaaaatgtagcttcccggttaagttatgccccgtggtgccctgcttgtca

SEQ ID NO: 779333 - DNA, 100 bp, Homo sapiens
tgttccagtgcctcgagcgctcaggatggaggaagactcgatccgcctgcctgcgcacctgcgtgaggagcattacaactgcatctccgccctgcacaag

SEQ ID NO: 779334 - DNA, 100 bp, Homo sapiens
cgcagtggtcgcttcttctccttggaatgtatcctgtcaggtataatgtcagtgaatggcaagaaagttcttcatatggatcgaaacccttactacggag

SEQ ID NO: 779335 - DNA, 82 bp, Homo sapiens
ttcgctgccagccccaagaaggagaccctcatccagctgatgcccttcttcgtgtactccaaagattcaggtttactcacgt

SEQ ID NO: 779336 - DNA, 75 bp, Homo sapiens
tttctgtgtctccagggagaacttcaggtaaaggtatcagacttggtgataattctgaattatgaccgtgctgta

SEQ ID NO: 779337 - DNA, 90 bp, Homo sapiens
ctctcatccctctcgtcctggtgaagaagaagagtatacccagcggatataatgaagatctggaacttgaagatgccattcatacagcca

SEQ ID NO: 779338 - DNA, 82 bp, Homo sapiens
tacaagaagcgggccgcatgcctgtgtttccgcagcgagagcgaggaggaggtgagcatgggtttatgcgtcttaggcatta

SEQ ID NO: 779339 - DNA, 87 bp, Homo sapiens
aaaatttcgatattgaagtgtcaaaatccatagatggaaaagatgttgtggacatcggatacccaaggagacgaagctgaagcagga

SEQ ID NO: 779340 - DNA, 98 bp, Homo sapiens
ttcgggagaggatatgtagcgaggaggaacgcgctaaggcaaagcacctgcttgaacatgcgaaagtgacacagacagagttgatgcgtgagtcattt

SEQ ID NO: 779341 - DNA, 100 bp, Homo sapiens
agaggggaagacctccagtctataagcccaggaagccgtcttcgaactcaggagaagcacaggagaaaacgacgctccacacctttaacttcttccacac

SEQ ID NO: 779342 - DNA, 100 bp, Homo sapiens
gcacagcaaagggagacgtcatttgctactatgggaaccgaggggagcctgatcctatcgttttgacgccagatgtgaagttcatttccaatccgccctc

SEQ ID NO: 779343 - DNA, 88 bp, Homo sapiens
aagctttgtctccttcgacttggagtctttgtccaggacggggctttgaccacgacctttgaagagcttcattttgagatcaagcccc

SEQ ID NO: 779344 - DNA, 107 bp, Homo sapiens
gttttggagtcacacaagctaaagacgggccattttccagacctcatccaggttcgtgctggccgtgggcagcgccgtctttgatgccatgttcaacgggggaatgg

SEQ ID NO: 779345 - DNA, 100 bp, Homo sapiens
ggaagggcctcggcactggtaccctttacatcgctgagagaatgtgaaggctgtgtctgagactcctgcagtgccaccagtttcagaagatgaggatgat

SEQ ID NO: 779346 - DNA, 46 bp, Homo sapiens
gaacaccctggaagccgagaaatggaaggaaaagctgatgcgatgc

SEQ ID NO: 779347 - DNA, 100 bp, Homo sapiens
tgccacaatatgccctttcaggatggtaaaccatttaacctgtgcatctccgtgctggccgatgagtaccagaattcagacctaccttcagtcaacaaag

SEQ ID NO: 779348 - DNA, 75 bp, Homo sapiens
ctttgcagaggaatattggacctcaatacctataacgtcgcacaacattctgaaattttttggttattgtaatga

SEQ ID NO: 779349 - DNA, 100 bp, Homo sapiens
gtggattgcaaagggggcatcattgtgagtggctccagggacaggacggccaagttagcaaaaggtgtgacaagcaacctgcctatgccccaaccaccac

SEQ ID NO: 779350 - DNA, 83 bp, Homo sapiens
acagcaagaggcaaaacttcggacatagaggccaaccaacctttggaggttcacaataaaggtgctaagaaagagaatgtaag

SEQ ID NO: 779351 - DNA, 75 bp, Homo sapiens
cagtaaatggacaagaatatcatcttcaacttgtagacacagccgggcaagaactggcccaaataaggaaggagg

SEQ ID NO: 779352 - DNA, 75 bp, Homo sapiens
cttcaccctgcacagccttgttagtgccaccatggcaactgcaccatacaactactcttacatctttaaatatat

SEQ ID NO: 779353 - DNA, 99 bp, Homo sapiens
gaacccagaggtcgtggaggtggccgtggaggcagaggtggcatggggcctttccacagaagaaaacctgtctgcctccatcaccaaacaacctattca

SEQ ID NO: 779354 - DNA, 83 bp, Homo sapiens
aaatgatctcgtcactcctttctttgtggtcttcatttgtgaatacataggtgacagagctgaatgaacctctctccaatgaa

SEQ ID NO: 779355 - DNA, 83 bp, Homo sapiens
gagaactgtatcgagatttagcacttcactttgcaggttcctacaaacttgatgacttttgagtagaagcctgagaaaaaaag

SEQ ID NO: 779356 - DNA, 82 bp, Homo sapiens
ggagccaagcgtcctgcccggccggtgtcttttatgaataatcaaaagcagcaaaagccaacgctatcaggccagcgtttta

SEQ ID NO: 779357 - DNA, 51 bp, Homo sapiens
gaagcactgttgttttccacacagggaagactaggagagctggagttgcag

SEQ ID NO: 779358 - DNA, 100 bp, Homo sapiens
taccggtctgtcagtgagatggcttctaacaaggtgcagaccatgaattacgtggggcagttagccggccaggtgtttgtcaccgtgaaggagctctaca

SEQ ID NO: 779359 - DNA, 113 bp, Homo sapiens
ttatgtatcctcctccttacctagacaatgagaagagcaatggaaccattatccatgtgaaagctctagaggacaaaatcccagtccttggcacaaactcaggaaatggaagc

SEQ ID NO: 779360 - DNA, 82 bp, Homo sapiens
gcctgcctgaggaggcctcggttggatgcgaaggagctgcagcatccaggtacccagactcatggtatcgtgatatcacatc

SEQ ID NO: 779361 - DNA, 87 bp, Homo sapiens
aagaggcccagagacatgctgaaacatcgaaggccccttcacagatgtagtcactacaaatcttaaattgcgaaatccatcggatag

SEQ ID NO: 779362 - DNA, 74 bp, Homo sapiens
caaacttctctgcacagtcaaagccctgaaagcagcagatctcacctgcattggaggatgagacgccacatgaa

SEQ ID NO: 779363 - DNA, 100 bp, Homo sapiens
aagaagaatcacacctcattgcagtactcttgatgaaagaccgtgaaaccaacaaatcaagaggatttgcttttgtcacctttgaaagcccagcagacgc

SEQ ID NO: 779364 - DNA, 51 bp, Homo sapiens
ggaagcacaaaaagggacagtcgcggagccttaaacaacgcagtgagacag

SEQ ID NO: 779365 - DNA, 132 bp, Homo sapiens
ggacaggacaggggacgagggaggaacactctctgaggaagcccaactcctatgagctcctctctggcaggtgctggagaatctggtaaaagcaccattgtgaagcagatgaggatcctgcatgttaatggg

SEQ ID NO: 779366 - DNA, 83 bp, Homo sapiens
agcggcaggaccagcgggcgggggcccacgatgttatagttttgccgctggactcttccctcccttcccccaccccatcagga

SEQ ID NO: 779367 - DNA, 75 bp, Homo sapiens
gatgagaagttcgtctcggtctatgggactgaggagtacctgtgtcttctgtggcttcagcgtcacctagtgcag

SEQ ID NO: 779368 - DNA, 50 bp, Homo sapiens
cccggcagccaccccatctgggaagtgagactgctcctggtgccatgaac

SEQ ID NO: 779369 - DNA, 83 bp, Homo sapiens
ctcattgccacggctgaaccctccttctcaatcttggaacagcacccccttctttaaggtataatgggtctctcccaaatggc

SEQ ID NO: 779370 - DNA, 50 bp, Homo sapiens
acgccgtgcagctgcccatcgaccaggggcatggtctagtggcccagtca

SEQ ID NO: 779371 - DNA, 80 bp, Homo sapiens
ggaggctcctgggctccgtggtcttcatccaccgccagtcttctcaagtcttaggattgcagcaacacgctcggctgccc

SEQ ID NO: 779372 - DNA, 75 bp, Homo sapiens
ggggaggcagcgcgggatcccagcctcaggcgtgcgcggacggtgtgcggcgagtgcagtggtgagatcctgaac

SEQ ID NO: 779373 - DNA, 102 bp, Homo sapiens
tccatggccagtgaggaagtcttgaagaatagagccataaagaaagcaaagcgcagaaatgttggatttgaaagcaaaggatatgcgattggcaatgccccg

SEQ ID NO: 779374 - DNA, 50 bp, Homo sapiens
agccaagctgcacgatgtggagcggacaagctgtggggggtctgtgtctc

SEQ ID NO: 779375 - DNA, 73 bp, Homo sapiens
ggacggtgatggtggtcgccgcggcggcgtgtgcgcccctcaggataccatacttgcagagctccttcagata

SEQ ID NO: 779376 - DNA, 90 bp, Homo sapiens
gagagcggctctgacactctggcaagccagggctgagcaggaagaagaattcattagtaacactttattcaagaaaattcaggctttgca

SEQ ID NO: 779377 - DNA, 75 bp, Homo sapiens
ctggacttcaacatgaatatgcagctcctgctgagaaaatggctttgtaaagaagtttgaacctaaatctggctg

SEQ ID NO: 779378 - DNA, 75 bp, Homo sapiens
ggaggccaggaagaaggttctcaaacaaggtgccgtgagcgatgtggagatgcaggaacactatgatgagttttt

SEQ ID NO: 779379 - DNA, 82 bp, Homo sapiens
cagggtcgccagcgcctcagctctgtggaggagcagcagtagtcggagggtgcaggacgcccctaaatcgggtactagttgc

SEQ ID NO: 779380 - DNA, 127 bp, Homo sapiens
gtttcggagcatcggttaacagcctatgggtgaaatttggctttcattcatgaatgaggtaatagcctgcagctggtgttttgagaagccctactgctgaaaacttaacaattttgtgtaataaaaa

SEQ ID NO: 779381 - DNA, 82 bp, Homo sapiens
gctggaaattgcgctggaccgtcgccttgctcctcgccgcggcggggactgcaggtgctggagaatctggtaaaagcaccat

SEQ ID NO: 779382 - DNA, 100 bp, Homo sapiens
actggatcactggcaggattgatgacatgctcaatgtatctgtttgcctatctggggcgcctggctcacgaggttggctggaagtaccaggcagtgacag

SEQ ID NO: 779383 - DNA, 100 bp, Homo sapiens
ccgtcactagccgcgggaccatcaaagtcatcgacggcacctcgggggccacactgcaggcctccgcgctcagtgacgggctcatcttcgcttgtgcctg

SEQ ID NO: 779384 - DNA, 82 bp, Homo sapiens
ccccggccgggacgcgggtcgcgtcgttgtcctccgcgagcgtccggattgcaggtcaaaatgcagatcttcgtgaaaaccc

SEQ ID NO: 779385 - DNA, 100 bp, Homo sapiens
gactttctgggacaagtgttttgtacattgggagagatcgttggttcacagggaagtcgcctggaaaaaccaatagtgagatcatgaatcagacagataa

SEQ ID NO: 779386 - DNA, 90 bp, Homo sapiens
ggcgtgagcagcccctctggccttcaggttggtctccctggactgaagagagggagaatagaagcccaagactaagattctcaaaatggt

SEQ ID NO: 779387 - DNA, 100 bp, Homo sapiens
ctcaactctctatgtttgccagtggtttattttacaggttggatggcaagcatgtggtgtttggcaaagtgaaagaaggcatgaatattgtggaggccat

SEQ ID NO: 779388 - DNA, 98 bp, Homo sapiens
gttgccgcagccccaggctgagacagcaactccattcgagcgtgagaacagggaatcttgaaacctgtttgagactgttatctttaggagcacaagcc

SEQ ID NO: 779389 - DNA, 100 bp, Homo sapiens
gaaaagctgtggcaaccgaaatgagactccctcagatccagtgataattgacaggacccagatgatgtggtaccagttggccaaagaagagcctggtgtt

SEQ ID NO: 779390 - DNA, 51 bp, Homo sapiens
atctcaggaatctggtctcattgggaatgaatctgaagtctgctgcagtaa

SEQ ID NO: 779391 - DNA, 100 bp, Homo sapiens
tttaattcagcctttggaagttttttggtcacttttgaaatacacaaagaaaaccttgccaatatatttagggaacagcaaggaaaagttgatgaagaaa

SEQ ID NO: 779392 - DNA, 90 bp, Homo sapiens
agagcttgtgtagcgtcagatccttgagtgataaaggagtagagtgccggtggtggtgtgcacattgagccccggtatagacagttcccc

SEQ ID NO: 779393 - DNA, 100 bp, Homo sapiens
ctgtgttggaatctgttaactagtgtacgaagccatcgacagcagagatggagcatcttgtgcagagttggtgtcttttaaacatcctcatgttgcaaac

SEQ ID NO: 779394 - DNA, 83 bp, Homo sapiens
caaccaaacaaaagccaggttgaggcctctagcagcccctgtcaaagggaacaggaagcagtccacggagggtgacgccctag

SEQ ID NO: 779395 - DNA, 100 bp, Homo sapiens
gtgacgaggacgaggaggcagccacggggcccctggctcctgtccaaatatgacccccagaaggaggcagagctccgcacctggatcgagggactcaccg

SEQ ID NO: 779396 - DNA, 75 bp, Homo sapiens
tgcttcgcaccccaaaaacagtgtcgagaagaggtgctcaaattcgccatgaagtcagcgtaaataatgtaacac

SEQ ID NO: 779397 - DNA, 82 bp, Homo sapiens
cgcgtctcggaaaccggtagcgcttgcagcatggttgtgaccgagattcccgacgagagagactgaggggaagagaggaagg

SEQ ID NO: 779398 - DNA, 82 bp, Homo sapiens
ctcgactgcgaattactgtttatgaggagcatcagatccatgctgctgctgactcggagccccacagcttggcacaggctct

SEQ ID NO: 779399 - DNA, 83 bp, Homo sapiens
cctggggactctgcctcgtgccgctgagcctggcgcagatcggatattagaaatggctactccccagtcaattttcatctttg

SEQ ID NO: 779400 - DNA, 50 bp, Homo sapiens
catggctccctgcagtaccctttaacgtttccatagcaaggcgtgtacaa

SEQ ID NO: 779401 - DNA, 97 bp, Homo sapiens
caagtgaaaaaaatagactaatggattaacgtccctgtcgtgtgacattttctgctctcgtgggcgcctgcggtgggaactactcagccatgtcttc

SEQ ID NO: 779402 - DNA, 74 bp, Homo sapiens
aaattaattcatcattagagaaattagatctgggtgactgtgatctgatgatccagtattcctggaagaagcag

SEQ ID NO: 779403 - DNA, 74 bp, Homo sapiens
gccactgctgggccctgaggctgcaccaagtggcgaaggagccggctccaagaatagcctaacatggcagacca

SEQ ID NO: 779404 - DNA, 99 bp, Homo sapiens
gccatgtcgggttattcgagtgaccgagaccgcggccgggaccgaggacggccgaagccctgcagcccacgctacagccggagatgcagctcgagcacg

SEQ ID NO: 779405 - DNA, 82 bp, Homo sapiens
tgctaattccttgaaggacaataccaccctcttgacccagacaatgcagatcttcgtgaagactctgactggtaagaccatc

SEQ ID NO: 779406 - DNA, 83 bp, Homo sapiens
ggatatttgcttggaaaaacgtgtgggtacgaccttgtgagaaagatcagtctaaagaaaaggagaagaaagtgaaaaaaaca

SEQ ID NO: 779407 - DNA, 80 bp, Homo sapiens
atgatcttctgtcagtcatttgccatcatggaactgcaagtaggctacttctacaagtccgaacagccagtccagcaaaa

SEQ ID NO: 779408 - DNA, 100 bp, Homo sapiens
gatggccctgggtcctcgctgtggggcaatccgggcttgcagacgagttgccttagaagtggtgagatgggaagctgcagttggaagaccctggaggatg

SEQ ID NO: 779409 - DNA, 83 bp, Homo sapiens
catctctgtgctgccaggtcgcaggcgccgccgccgccgcacttccgggtgccattgcaggctccctggggaagggaatgcag

SEQ ID NO: 779410 - DNA, 100 bp, Homo sapiens
caagcattcaaattgctcacagctgatcctaagagccacataggactctggactgggttgccggatggttcctttttcttatttttggttctatgtagca

SEQ ID NO: 779411 - DNA, 90 bp, Homo sapiens
cgagagcgcgaatatcgtcatcgttagaaggtttggcagttctctaccagtggaccaatcttttcatccccgtgtacctcaccatcagag

SEQ ID NO: 779412 - DNA, 75 bp, Homo sapiens
tggaaggctctggataaggaccagtacctgcccaggaaactgggcactgtaaattggtctgttgatgacattgtc

SEQ ID NO: 779413 - DNA, 98 bp, Homo sapiens
aaactcatcaggacggaagcacaggggccactcagagtcgcccgagaagtgctatgcttacatttgaaaagatttcattggacagcatatttaagaaa

SEQ ID NO: 779414 - DNA, 75 bp, Homo sapiens
tggagtagaagggagcgatactacagggtctacatcaactattacgacatgaacgcggccaatgtgggctggaac

SEQ ID NO: 779415 - DNA, 100 bp, Homo sapiens
cctacacattggcaccagctacatcaatccttgagtatcctattgaacctagtggtgtattaggacccagacagttactcttggaggcatcttccagttg

SEQ ID NO: 779416 - DNA, 103 bp, Homo sapiens
ttgtggtttcttctgatttctgccattgggatctcagtggttcaatagcatccccagatgtcaaattaaatcttggtggagattttatcaaagaatctacagc

SEQ ID NO: 779417 - DNA, 80 bp, Homo sapiens
cacggtggctactctgcctcggggacgaaagcagctgtcaaagctcgaaaaacagcagcagaggaaagaaaagaccagag

SEQ ID NO: 779418 - DNA, 98 bp, Homo sapiens
cgctgcccgcgccccccgcccgtgccctcccgctcggccccgccagcagcactgtggaggccgtcctcggagctctgtgtgtcgtctgagcagtcgcg

SEQ ID NO: 779419 - DNA, 100 bp, Homo sapiens
atcccaagttgtcgacgaccgacagggtggtgaaagccatgaagactttgaatttatttcaggaacacgaatgcgcaaacttgctcgagaaggccagaaa

SEQ ID NO: 779420 - DNA, 98 bp, Homo sapiens
aagtcacaccattataagaaacattaccctaatgaggagagaaaatacaggctcaggaattgagtcatccaagttcacaagcctagcatcagagccaa

SEQ ID NO: 779421 - DNA, 100 bp, Homo sapiens
gcaaagacgacatccggtgcgccgaggctgctcacaaaacatggaagctccacaaagcagcagcctggtcaccttttctcttccaagtgcccagaacagc

SEQ ID NO: 779422 - DNA, 90 bp, Homo sapiens
gagtgaggagaccatagctgcacagccagatggggagtaggaggcaatgaggaagtcaagaggaaggggatctgaagtactccatcttgg

SEQ ID NO: 779423 - DNA, 100 bp, Homo sapiens
gccctgaaatgagattatctttcattgtgttttcttctcaagcaactattattttgccattaactggagacaggcaggaatttgtggatgcttatgtgaa

SEQ ID NO: 779424 - DNA, 100 bp, Homo sapiens
gctttgaagaaagatgacaccacctttgatgaggttttgagagattacctgaagttgcactcaaaagcaagatatactactaactttgaaatggaataag

SEQ ID NO: 779425 - DNA, 82 bp, Homo sapiens
ggatcatgtctgcgagccaggattcccgacgccgcaccaggctgcaggccagcccttcaagttcactatcccggagtccctg

SEQ ID NO: 779426 - DNA, 96 bp, Homo sapiens
gggacggctgcgcgggacggctctgtaggaaggaacttggttccccctccctcagcttccgccccaaaagtcttattgttacaggtatcgctgtgc

SEQ ID NO: 779427 - DNA, 76 bp, Homo sapiens
gggtttcccaggacctggaagtgcaccctggaggagaagaggttctgctggaacaagctggtgtagatgcaagtga

SEQ ID NO: 779428 - DNA, 75 bp, Homo sapiens
atagcagtctgccagacaatagagcatatggactctaaaatagagctcaagcttgagaagagagaaccactaaag

SEQ ID NO: 779429 - DNA, 90 bp, Homo sapiens
atttgagacagagaaaaacagtggatcgataccaagcacctccaataggtgctggagaatctggtaaaagcaccattgtgaagcagatga

SEQ ID NO: 779430 - DNA, 83 bp, Homo sapiens
caagtgcgctgtgtccaacgacctcacccagcaggagatacggaccctggagatttgataatgggctgcattaaaagtaaaga

SEQ ID NO: 779431 - DNA, 99 bp, Homo sapiens
cgccgccgacgacccagcagccgccatggctctgctccgagaactgataaatttcaaacggaagagagtggcagcatttagaaagaatctaattgaaat

SEQ ID NO: 779432 - DNA, 100 bp, Homo sapiens
ctcatccacaatgatttctccagtgctcatcttgttctcgagttttctctgccatgttgctattgcaggacggagctcactcgaaagtttggcataacta

SEQ ID NO: 779433 - DNA, 98 bp, Homo sapiens
gttctggtctcaggcaaggtggggactgggcacatcatcaatacgagagctattgcttaccttttcccaagtggtttgtttgagaaacgagccaggcc

SEQ ID NO: 779434 - DNA, 83 bp, Homo sapiens
cggaagcctgcgtaactttctcccttgatccgggagtctttccactggaaccgggctgtgggtcggcccaaggggaagctggg

SEQ ID NO: 779435 - DNA, 100 bp, Homo sapiens
ctggccaagaccaggctgcagaaccagcagaacggccagcgcgtgtacacgagcatgcctcctgaaccggcccaaccccttgctggcgttgccccccgcc

SEQ ID NO: 779436 - DNA, 89 bp, Homo sapiens
gccaggccagcgccgacctggaggttccttctgaccaaggggacatggctctgaagatgatgagactggtgactcagcaagaataggat

SEQ ID NO: 779437 - DNA, 102 bp, Homo sapiens
tgcggtggacgaggtggactacaagacggctgaggagaagtacatcaaggggccttcgctgagctaccgacagaagccctgggggatgcggaggaagatgag

SEQ ID NO: 779438 - DNA, 100 bp, Homo sapiens
gatgtgtctggtgtgggtttcccaagcaaggttccttggaagaagatgtctgcagagcttgctatggcattgttcaagtacccactggaccgtggttttg

SEQ ID NO: 779439 - DNA, 75 bp, Homo sapiens
gtcaagtatctttttacaggacttaaattggttctcttagaagcacaagatatggcagtgagagaccataacgtg

SEQ ID NO: 779440 - DNA, 89 bp, Homo sapiens
ctgttcagtactgtgggtgatatttgcctttagtgcactcttctccttcacagtaaagtggctgcttgaaccaggcagggctttgccat

SEQ ID NO: 779441 - DNA, 50 bp, Homo sapiens
taacagtctgcactttcacccgtttcagacatatctgaagagatggatta

SEQ ID NO: 779442 - DNA, 75 bp, Homo sapiens
gaagctacacttttcaccaaggaactggtgctgcagcgagagtatctccagatgaaatggccactgcttgatgtc

SEQ ID NO: 779443 - DNA, 100 bp, Homo sapiens
tggactcagagaccaataaaaataaactgcttgaacatcctttgactggttagccagcttaaccagctcgaaaaagcagtggaagcagctcacacatttt

SEQ ID NO: 779444 - DNA, 50 bp, Homo sapiens
caagtaatggtgcaaagcctgaaaatgagaagctgagccgcaatgagacg

SEQ ID NO: 779445 - DNA, 98 bp, Homo sapiens
ccaccgtttacaaggccagagataagaacaccaaccaaattgtcgccattaagaaaaagtgaccggggaggtgcgtcctcatcatgggaaggaggctg

SEQ ID NO: 779446 - DNA, 75 bp, Homo sapiens
cagcgtttcttgcaagaatgggaggaaattgacaatggcccttcagctatgctaggtctataatgggaagtgtca

SEQ ID NO: 779447 - DNA, 100 bp, Homo sapiens
gtcgtgagagtcgtcagtgccctattccttcacatgtaattcagaaattagggacaggaaaaggctccaagtagctcctctaactgtcctccatctgcac

SEQ ID NO: 779448 - DNA, 78 bp, Homo sapiens
gccatggccttcgtcgggggtttggtgggcggcccaccgggactcgccgttgtagagacggggtttcgccatgttggc

SEQ ID NO: 779449 - DNA, 82 bp, Homo sapiens
caggatcaacacatgttttacagtggtgtaatagatgtaatcacaaagacatggagagatcatcttcagacaccaacgaaag

SEQ ID NO: 779450 - DNA, 137 bp, Homo sapiens
gaacatagccttccctttggaggtagcctggcccggtgggcactgtgatctcagacttccagccttcagaacttacacctgaagcggcacttcatgttccggaaccacctgtgcctggtatttgagctgctgtccta

SEQ ID NO: 779451 - DNA, 100 bp, Homo sapiens
gtgcgtctaactgagttgctgaagcaaggacagtatttaaatggggagcaggagaaccgagtgcagaagggaaatggatattttcaagtgcccccacata

SEQ ID NO: 779452 - DNA, 100 bp, Homo sapiens
cgggagatggtgcgtgcccagaacaagaagaagaagaagtctggaggcttccagtccatggggatatcttctaaccataccgatgattctccgtatagct

SEQ ID NO: 779453 - DNA, 82 bp, Homo sapiens
agtcaaacgcagaaggactgcctcactgagcaaccaagagactctccttcagcaactccagaagcttcagactttggtgatg

SEQ ID NO: 779454 - DNA, 100 bp, Homo sapiens
cttggattcagcaaggaaccttccgcccgatggcaccagcaaggagtgtgtgttcatcgagaaggttctggagaacaactacacggccctgatgtcggct

SEQ ID NO: 779455 - DNA, 75 bp, Homo sapiens
ctgtatactatgccaaagcattctctaaagacttgccaagagctgtcggaaaaggtaacagaagatggaactcga

SEQ ID NO: 779456 - DNA, 113 bp, Homo sapiens
gggaattccagcaccgcagcaaccactccagaaactttccctccttcaggtggccaccagactttctctgcttgtatcctcccaggaccacagaactcatcgcatcccaaggc

SEQ ID NO: 779457 - DNA, 121 bp, Homo sapiens
aactcgggttctgacaagatggccgggctgccccgcaggatcatcaagtgtgctggaattgatgttcgtctgtgtgatgttggtgaggccatccaagaagttatggagtcctatgaagttg

SEQ ID NO: 779458 - DNA, 76 bp, Homo sapiens
tggtggtggagtgtagagatatagttggcaacctcactgagttagaatcagagggaaacacctttgtccaagtccc

SEQ ID NO: 779459 - DNA, 100 bp, Homo sapiens
tggaaattctccagggccgggatttcactggcaaagtggttgtggtcactggagctaattcaggaataggtcctactgctctgttggctcatgaaatagg

SEQ ID NO: 779460 - DNA, 100 bp, Homo sapiens
cgggccgcgctgcgagactacgagacggtcttctcagtacagcatggtggctggggcaggccgagagaatggcatggagacgccgatgcacgagaacccg

SEQ ID NO: 779461 - DNA, 74 bp, Homo sapiens
tgctaaaaggctccttcagtgagcaaggcatcaacgagtttctcaggttttgggatttgagattgacgcggtga

SEQ ID NO: 779462 - DNA, 76 bp, Homo sapiens
cggccgagacctgagacgtggcgctccctctctgccggcctcggcttcagctccatcaagtatgatggtgaaggat

SEQ ID NO: 779463 - DNA, 75 bp, Homo sapiens
caagatgggcatctattacattccaattgtcactgctgttccaagggcacacgcagagggatttggaattcctgg

SEQ ID NO: 779464 - DNA, 75 bp, Homo sapiens
tgaaagggaagcagaaccatactatgtcacgagaagagaatgccttctagatgcaaaatcacctccaaaccagac

SEQ ID NO: 779465 - DNA, 90 bp, Homo sapiens
gcacttcgcattttggcattgacatttaattttagggtcctttatatagaagggagagtagatgagtcctgccggcggtgaccatcttcc

SEQ ID NO: 779466 - DNA, 100 bp, Homo sapiens
ctgacaatgatagtgaaaattggaaggaagtgcataagatggtggttgaaaggcaactttggctttggggattcacgtggtggcggtggaaatttcggac

SEQ ID NO: 779467 - DNA, 100 bp, Homo sapiens
agaagggataaccctacacccagaccccagcctgaccctggattctggccttctcatgacctctgctgatcctcctctcctctcctgctgagccttccac

SEQ ID NO: 779468 - DNA, 95 bp, Homo sapiens
ctggcaagtatgatctttcggaaggagccatttttccatggacatgacaattatgatcagcaacctctgtcagtagtctgtctgaatctttacca

SEQ ID NO: 779469 - DNA, 88 bp, Homo sapiens
ggaacatggcgttgctggtgcgagtcctttcttaggaaaagtcctcagtgctgtgggcagtgcccagctactgatgtcccagaaattc

SEQ ID NO: 779470 - DNA, 80 bp, Homo sapiens
ggagagccagcggcagccagggacctacactttggctttaagccagtcggatgatgattctgggtcagcttcaggctctg

SEQ ID NO: 779471 - DNA, 50 bp, Homo sapiens
attcaagtaccttttcctacacagaaaaatccagttacactcttaaagga

SEQ ID NO: 779472 - DNA, 50 bp, Homo sapiens
atcctgaaccgcgcggccgaaccctccgggtgctttcttctgcgacctgg

SEQ ID NO: 779473 - DNA, 74 bp, Homo sapiens
ggcgtacgccctcatggggaaaatctccccggtgactttcagatccctacaatgttatatcatggaacccagga

SEQ ID NO: 779474 - DNA, 100 bp, Homo sapiens
tagatgatccaagtcaccaagaaattactgtctcaagtgatacgttgtattccctgaatgactataaaccacccatttcgaaagcgaaaatgacccaaat

SEQ ID NO: 779475 - DNA, 90 bp, Homo sapiens
ctgaagaacaaatcagcctggtcaccagcttttcggaacagcagagacacagagggcagtcatgaggttgtttacattcagagctctatc

SEQ ID NO: 779476 - DNA, 88 bp, Homo sapiens
gtgaccgagagcgcgaatatcgtcatcgttagaaggtgaaaagccatacaagtgtacctgggaaggctgcgactggaggttcgcgcga

SEQ ID NO: 779477 - DNA, 83 bp, Homo sapiens
aaaagatctgagaaatctgaagcaactgatggaggttttacttctcagattagaaagcttaccagaagtacctttactggttg

SEQ ID NO: 779478 - DNA, 151 bp, Homo sapiens
ctaaggcaaaggagtggaagtttgagagaagtttaagagaagaaatggacatgattgcctaaatcagccaaacacaggatgccttcaattaagttgcagagttctgatggagagatatttgaagttgatgtggaaattgccaaacaatctg

SEQ ID NO: 779479 - DNA, 82 bp, Homo sapiens
atagcaagaactgaggagcaccaggagacgcaactcatcgggcatgccagaatcactcttgtactgctccctgcacgatcca

SEQ ID NO: 779480 - DNA, 100 bp, Homo sapiens
ggagacgcagccgcccgtggcgcttaagaaagaaggatttgacgaaacgttcgagtcaaacgcagaataaagccagcaggaagaggcagcatgaggaacc

SEQ ID NO: 779481 - DNA, 100 bp, Homo sapiens
cggttcttctccagcgccctggcctccctcaccttggacacctcgcttggggtaagggacgagtcttctggaaggctctgccatggacatttgtcctcgg

SEQ ID NO: 779482 - DNA, 50 bp, Homo sapiens
agaaaactggtcaaggaagcttctctagtgatccctgaaaagttccagca

SEQ ID NO: 779483 - DNA, 100 bp, Homo sapiens
cctcaagcccccaacatcccagtcctcagtcctcagtcatcttggacggcagaagagaatgagagcaagcaggggaaatgccagatgcttataaaaccat

SEQ ID NO: 779484 - DNA, 73 bp, Homo sapiens
accaagcccgagaagacggaggaggactcagaggaggtcccgttcaagaagttcttccagttcgcagtcaaga

SEQ ID NO: 779485 - DNA, 100 bp, Homo sapiens
tgaaatgtccatccacttatccagacccaatggaacatcagcaatgcttctgagagttggccatggagataagaaccatgcagatgcagacagatcgcct

SEQ ID NO: 779486 - DNA, 90 bp, Homo sapiens
cggggtggcccattcccaggcaggctgctaccgcccctccgcttccagacattctcagctgtcagttaagtgggcagaccaacatccacc

SEQ ID NO: 779487 - DNA, 75 bp, Homo sapiens
ctagcgccgcaggaccgcggacccgagttccagctattcttcagatgctctggattttgagacggagcacaaatt

SEQ ID NO: 779488 - DNA, 100 bp, Homo sapiens
caagatgtctaagggacacatgttggcagatgtcgttgccatcatagctggtgaagctgtgcagtggcatggtggaagccggtaaggcctacgtcagcac

SEQ ID NO: 779489 - DNA, 82 bp, Homo sapiens
gtgctgaagctgctgcccctggacacctatgtggagagtccgacaatgcagatcttcgtgaagactctgactggtaagacca

SEQ ID NO: 779490 - DNA, 99 bp, Homo sapiens
cttcacttccctcggtctgggcttctctgaggcggcgagagatggtcaggtctggagctcgaccgggccagtcctgagaaacatctttgtcctcacctg

SEQ ID NO: 779491 - DNA, 95 bp, Homo sapiens
gctacctcgtggacaagtttgcagatcgggagcgcaaggtcgccctcaaggccatgatcaaaacggtcttgctctgttgcctaggctggagtgca

SEQ ID NO: 779492 - DNA, 74 bp, Homo sapiens
gtgcgaccgcgctgggtcggaagtgagcaggtaaccaaggagcagtgaacagcagctactacagtagtggaagc

SEQ ID NO: 779493 - DNA, 90 bp, Homo sapiens
ggtgggcaaggtgatccagcaaggtcggcagagcaaggggcttacgcagaaggacctggccacggtccccagcgggacgcccaggcggcg

SEQ ID NO: 779494 - DNA, 75 bp, Homo sapiens
ccaattcaaggcctgccgttggctatagcaaatgccccagggcagagcggcttgggtaaatccaccttaatcaac

SEQ ID NO: 779495 - DNA, 100 bp, Homo sapiens
caagaagatggttcagttgactattgcaaagtgattaagactggagaaagtggcatgatagttttccggcttcttacaaaaaacaaccgatggacttggg

SEQ ID NO: 779496 - DNA, 75 bp, Homo sapiens
tttgattccacagctgggctatgtggcaacaagcatgaaagatggccagaagataacattccatggtgaaggaga

SEQ ID NO: 779497 - DNA, 100 bp, Homo sapiens
atgccctgctgtagtcacaggagctgtagagaggaccccggtacatctgaaagccgggaaatggatgaagatgggtttcaagaactaaatgagaatggaa

SEQ ID NO: 779498 - DNA, 83 bp, Homo sapiens
gagcggagggagccccagacacggtagttgatgtcacttggcgatattcctgcaaacatgaagaggtgattgccagaagaact

SEQ ID NO: 779499 - DNA, 100 bp, Homo sapiens
ctgacttctgttgagttctgtgggggaacgctggcgaagaagtcctggtttgggaacttcatcagcctggagaaggaggagcagatcttcgtggtcatca

SEQ ID NO: 779500 - DNA, 75 bp, Homo sapiens
aggaagaggaagaaaaaggaccagtgtctcccaggaattactcaaggtgatgaggacaattgatgacagaatagt

SEQ ID NO: 779501 - DNA, 75 bp, Homo sapiens
gatttctgaggttctgcaaacagacagagggggaagacggtggggcctccccacctgccccgcagaagatgcagt

SEQ ID NO: 779502 - DNA, 100 bp, Homo sapiens
gaggaactctggtgactggtgtggatagctacacctgtgaaaatggtaacaaatttggccctgtctcagcgggaccctcctcacaacaacttcttcttct

SEQ ID NO: 779503 - DNA, 100 bp, Homo sapiens
agacatggaccgcggcgagcaagttaatgaaattatcaggaaggagttttcaggacctcctgccagaaatcagacgtaaaagaagccattatagcaagac

SEQ ID NO: 779504 - DNA, 96 bp, Homo sapiens
aggaccaagatgaaacgcatgagggagtttccttaatgacaacaaaaaagggagtaatcctacccactgtaagagtcatgactcttgattgcagct

SEQ ID NO: 779505 - DNA, 82 bp, Homo sapiens
gtcctgctgcttgctgaccaaatgagaggaggttcagatgagcccctgctgacttgagagagacagagagaccacgccgatt

SEQ ID NO: 779506 - DNA, 74 bp, Homo sapiens
ctgcgctgtgatgcctgcagagctgtggcttaccagggctggggtctcctggatacaatggagcagatgagccg

SEQ ID NO: 779507 - DNA, 82 bp, Homo sapiens
ggatctacattataccaataacgaggttgggcccatgagatgtgtgctctgtatattccggaggtacaatttgccagtgttt

SEQ ID NO: 779508 - DNA, 90 bp, Homo sapiens
ccagacatgagtatacattcagtatcatggatgaatttcagactcgctctttactgagcgtgtttgaagaagatgctggcaccctcacag

SEQ ID NO: 779509 - DNA, 75 bp, Homo sapiens
gtcgaatgccccccagccaccagctcgaccacagcaagctcctgggtcagactggttcttcagtgacgaagagga

SEQ ID NO: 779510 - DNA, 50 bp, Homo sapiens
agctatgactacgacctgcaggaacagatttggatcctacaaagaaggac

SEQ ID NO: 779511 - DNA, 90 bp, Homo sapiens
gcacggatggtcttgaaacacaaatggtttttgatcactccaagaactgaggcccctgtcagcagtgtcagtaatagtttggagaatgcc

SEQ ID NO: 779512 - DNA, 100 bp, Homo sapiens
cgagcggtgacctggaccacggcgcagacgcgggcgagctgcggctcggacgccagcggacacgcgggcgaggcaccacaccaaccccgtgggcactgag

SEQ ID NO: 779513 - DNA, 75 bp, Homo sapiens
tgaagaccacttacaaggcttccaccagcaagtcaccaggagactaaagtccatcaaaaacatccagaaaattac

SEQ ID NO: 779514 - DNA, 90 bp, Homo sapiens
gagcctctgactccaggttatcatggattcccagcgcgggacagccagatgtgactggagtgatttgcacccggatgcctagactcgcca

SEQ ID NO: 779515 - DNA, 100 bp, Homo sapiens
aggaagccctcacctttgccaggaactggggggccgactatatcctgaattatatccagatcgagagacagaagattctgaaagggttcaatgaaatgag

SEQ ID NO: 779516 - DNA, 78 bp, Homo sapiens
cttggaacaagcaactggctattgaaaagatgcttgtttgctactgatgggtgtgagcaagttagatattctataccg

SEQ ID NO: 779517 - DNA, 100 bp, Homo sapiens
tccatgaatcacaaatgttcttaatggcatctagaatgtgcatgactcctgatcagctgatgacattatgcaaagcaggcattcatagtagtaatgtcgg

SEQ ID NO: 779518 - DNA, 100 bp, Homo sapiens
cttccagaacatctgggagaatatttaatggaaaatcgcttggttaaaacctgacacttttaacaggtgaggacaccagtgatgaattctgaagcaaaag

SEQ ID NO: 779519 - DNA, 95 bp, Homo sapiens
acagtgaacatctcaagcgggagcattcgctcattaagccctaccaaggtgaagacccccttgtggacgatcaaaatgaacgagatatcaattca

SEQ ID NO: 779520 - DNA, 98 bp, Homo sapiens
gcagccgccgcctccgacctgggcgctcagcccccggatcagcctgcctctgggtctgtgcagacttttgcagacaaatcaaaacaagaagctctgaa

SEQ ID NO: 779521 - DNA, 96 bp, Homo sapiens
cacctagagccttggatccaggagaacggcggctgggtatgcagtggaactgatgaagaccctgatgataaaaacgcaccctttcggcaacggcca

SEQ ID NO: 779522 - DNA, 100 bp, Homo sapiens
gtgggggaactgctggggaaggcgattggcatcgatctctccatcccttccgaggcccgacttcgggagccagcgccggcagccaccatggcgtcacgca

SEQ ID NO: 779523 - DNA, 100 bp, Homo sapiens
ttctgttcaagttgcaaaccacaagagagtatcgtcagtgaagcaggagcatcaatctacagtgtcagccctgaagctaacaaagagatgccagggctgg

SEQ ID NO: 779524 - DNA, 75 bp, Homo sapiens
agctttcctaggccaaaaagaggttttcaaatggaacattttgatgcatcacttagtacctatttcaaggcattg

SEQ ID NO: 779525 - DNA, 98 bp, Homo sapiens
ctttgccaaaccagtgataatgccacctgaagtagccattggggcccttggatcaattaagcctcaaggaataggttctcctagtgtctatcatgcag

SEQ ID NO: 779526 - DNA, 83 bp, Homo sapiens
caaggtcgccctcaaggccatgatcaaaacgagtcgttcacgcctactgaggagcatgtgttggtggtgcgcctgctgctgaa

SEQ ID NO: 779527 - DNA, 75 bp, Homo sapiens
gacctccatggtccatgaactcaaccgccggctcagttcggggaagctgcaggagttcggcgtgggtgatggcag

SEQ ID NO: 779528 - DNA, 101 bp, Homo sapiens
caacagttttgctgtaacaaacgccttagctgctgctggtggtgacaatgtcaaataacggcctagacattcaagacaaacccccagcccctccgatgaga

SEQ ID NO: 779529 - DNA, 100 bp, Homo sapiens
cgaccgggacctggcactcgccgatgaggccagcagaagttcagttctgcaagcaagtatgctgctctctctgttgatggtgaagatgaaaatgagggag

SEQ ID NO: 779530 - DNA, 90 bp, Homo sapiens
ccgaggcaggcggatcacctgagcttttcaggctgcctttcgagctcaggggcccctggctatgctgcagcactttgatactatctacag

SEQ ID NO: 779531 - DNA, 101 bp, Homo sapiens
ttagcccgccgctgccgcctccgagcagcccgccagataagatgctcccaagtcccttgcagctctcttcagaagaaaaatcactagtgctctgctcttgc

SEQ ID NO: 779532 - DNA, 75 bp, Homo sapiens
gtggaggtggcgaaacgaggaggagataacgcggccttgggctctggccgctacctgtctgaggaacccgagccc

SEQ ID NO: 779533 - DNA, 51 bp, Homo sapiens
agaagccacccgagcggactcccgagggacaagaatccttcaagaaacagg

SEQ ID NO: 779534 - DNA, 90 bp, Homo sapiens
gggcgacagggccgattccggagtgggaaaaggggaagatagtgatgtactcagtataaatgcagatgcttatgacagcgacatagaagg

SEQ ID NO: 779535 - DNA, 75 bp, Homo sapiens
cagcggccgcgattcggggaggtaggcgctgggccgaggagtgccggtggtggtgtgcacattgagccccggtat

SEQ ID NO: 779536 - DNA, 75 bp, Homo sapiens
ctcaggtcctcgggggcggcggccacgccaaggacgggtacaccaggggttggaaaaaccacactaggcaaagaa

SEQ ID NO: 779537 - DNA, 74 bp, Homo sapiens
cctgaaccttgctccgagagggagtcctcgcggacgtcagccaagactggtgaattttcagctcgtttcctttt

SEQ ID NO: 779538 - DNA, 74 bp, Homo sapiens
cagccacgagcaggacctatcaaagcccagaaggaactgtgtgaaccacagagctactgccctatgcatcatca

SEQ ID NO: 779539 - DNA, 100 bp, Homo sapiens
caacctgctcatcagacaggtccgtcaaaatctttgatgtgcgcaatggagggcagatccttatcgccgacctcaggggatgacacctttgaggccctgt

SEQ ID NO: 779540 - DNA, 100 bp, Homo sapiens
ttcgaagtgacatgtacattctcaatgagagcctcacagacccagccatcgttaagggctgatgtggagaatctcaacagtcagaatgaagctgagctcc

SEQ ID NO: 779541 - DNA, 100 bp, Homo sapiens
acgccccggtggagaagctgaggcttgggcactgtttaaaggaaagttccgagaaggcatcgacaagccggaccctcccacctggaagacgcgcctgcgg

SEQ ID NO: 779542 - DNA, 90 bp, Homo sapiens
cccagagccaggcacaaggatgaacattctgccgaagagaacaagacgtgtgaagactcaggaaacaaacgtacttggatttaaaggtcc

SEQ ID NO: 779543 - DNA, 100 bp, Homo sapiens
atttggctgtgttacattctagaaaactttgtgtctactctgtctcaggaaacatggtagaatggtgcttacctcaagatattgaccttgaaggtgttga

SEQ ID NO: 779544 - DNA, 96 bp, Homo sapiens
tgagaatgcagccgtgtgacagtaactgaacattggtctaaagtctttccaaaaggtcaaggttcacaaggttcaccaagttgaagagtcttaacc

SEQ ID NO: 779545 - DNA, 75 bp, Homo sapiens
actgcttctccgtgggcagcattggcgaccagcgcttcacgtgaatgatttgggaggggacttcaaaggagttgg

SEQ ID NO: 779546 - DNA, 90 bp, Homo sapiens
gtggcccccgccccgtcgggcctcacgagacctgcaggctgggacaatgaaaagaaaatagctattttacatgaaaattttacaaccgtg

SEQ ID NO: 779547 - DNA, 83 bp, Homo sapiens
cagctgcacgccgtggagatcagcgcggtgcactcgcgcgaccacggcctggagatgaaggatttgggggcagagcacttggc

SEQ ID NO: 779548 - DNA, 50 bp, Homo sapiens
ctgctggaccacaaaccgctgccagaaaattggaaatctacatttctgaa

SEQ ID NO: 779549 - DNA, 74 bp, Homo sapiens
aattctggaagcgcagcaacagcaagctcccgggcaggtgggaggaggagctcgccaagcgcatgaaccttcag

SEQ ID NO: 779550 - DNA, 116 bp, Homo sapiens
ttgccaagaggaatgttaagttgattgccctttcaatagacagtgttgaggaccatcttgcctggagcaagttccagtctcatcagattttccatgtcctggtggtggcagcagcc

SEQ ID NO: 779551 - DNA, 100 bp, Homo sapiens
tccaaagagtgtctgacatttcttttgtgcaagatgagcctcaagtgcttctgcattacagcacccgagcagtgatagcgtggcccagactcctgaattg

SEQ ID NO: 779552 - DNA, 50 bp, Homo sapiens
gcaactttgagctgcacgttgcacaaggtgtggcagagaagacacagctt

SEQ ID NO: 779553 - DNA, 50 bp, Homo sapiens
cgctcgggtatgaagatcgggcggattggctggtctggaactcctgggct

SEQ ID NO: 779554 - DNA, 123 bp, Homo sapiens
gtgaaagccagaatggcatccagagagaggctctttgaactttggatgctttattgtacaaaggtggtatgtacagttacctacacagcaagctcatcagtatcatgaattagagactccctg

SEQ ID NO: 779555 - DNA, 74 bp, Homo sapiens
gtcatcaccatcaccttcaatccgctctactggaatgtgcacttttcaggattagaagaggctgtgtatagaaa

SEQ ID NO: 779556 - DNA, 75 bp, Homo sapiens
gaagacgacgagtttgaagagttccctgccgaaggctggaggctcccaggtgattttcacaaatcctttagaaat

SEQ ID NO: 779557 - DNA, 100 bp, Homo sapiens
agatcaccacggacgagatgatcaaacgcctgaaggtggagccgccaccaaaatgcagattttcgtgaaaacccttacggggaagaccatcaccctcgag

SEQ ID NO: 779558 - DNA, 74 bp, Homo sapiens
caacttcggggagctccgcctagttccagggtctccctccactgctgtagtaacccgggtccggggcctcggtg

SEQ ID NO: 779559 - DNA, 96 bp, Homo sapiens
gaatgaggccccgcgccgtcggccccaagggtgcccgggaaacatttgagaattactaccgaaaacagaggcgaaaacaggctcgtttggtacttc

SEQ ID NO: 779560 - DNA, 96 bp, Homo sapiens
gccaaaacgagaagaagaagaagtgttagaccagggacacagcattgttggttttgccatgtactattttacctatgacccgtggattggcaagtt

SEQ ID NO: 779561 - DNA, 82 bp, Homo sapiens
gcagacagcgagtggcgacgatcatgactatatgaaggaagaggaaggttttcctgaagatgaggcgactgaatcggaaaaa

SEQ ID NO: 779562 - DNA, 100 bp, Homo sapiens
ctaatcatcagcatttacatgacagaaatcacctatgtttacagcgacaggtgctgatccttttagaggcagccgtggaagaggaaaagagatcagaaga

SEQ ID NO: 779563 - DNA, 75 bp, Homo sapiens
ttccccggccggtccctcgcctcccggccgagctgacggattctggactctacttataatatccctaactgctgg

SEQ ID NO: 779564 - DNA, 75 bp, Homo sapiens
aacagacaatgccaatttacgtgtcattatggaactacttatgaggtctccatcacatttttgcccagaggtagg

SEQ ID NO: 779565 - DNA, 50 bp, Homo sapiens
ccgagctttgcgggaaagcagcggttttgagcaaaattttggactgtgaa

SEQ ID NO: 779566 - DNA, 100 bp, Homo sapiens
ttgtgtgtggacattcaggaattctcctgccaccgcgtggtgcttgccgcagccagcaactatttcaggttggagctgaaggagtgcccaggctgcggat

SEQ ID NO: 779567 - DNA, 125 bp, Homo sapiens
caccacccccggcctaagcagctaccatggcccaggtggccggcgcggcgttgtcccaggcgggttgtaattcgccaaaatgacgaacacaaagggaaagaggagaggcacccgatatatgttct

SEQ ID NO: 779568 - DNA, 87 bp, Homo sapiens
tgtctcttctaagctgaataaagctgttttggaactgtcaggtacctcaaagcgaatttcttcacatggctcctggagaagtgacca

SEQ ID NO: 779569 - DNA, 99 bp, Homo sapiens
cgtaaacttccttttactattagcccatcaagaaatgaagaacgagattcagacacaggagctgccactccgaaaccagtcccagaacccgagaaacag

SEQ ID NO: 779570 - DNA, 75 bp, Homo sapiens
cctggagcctcagttggaagcagccgatccagcctgcggagcctgtggggcaggaaagcgtctctagcagctgat

SEQ ID NO: 779571 - DNA, 74 bp, Homo sapiens
gttaaggattccaagtaactcttatttggtgttcctggtgaggaaggtgaaggggtccgacgctgggcagctct

SEQ ID NO: 779572 - DNA, 75 bp, Homo sapiens
gtggagctggtcgcagatcctgagacccggacagtggcagtgaaacagggaatgggtactgttcaaaaaggaatg

SEQ ID NO: 779573 - DNA, 82 bp, Homo sapiens
gcctcttcgagcgccgcggacgcgtcatcgagtgtgacgtggtgaaaggtacaatgactcttcttgcttttcacctaagttg

SEQ ID NO: 779574 - DNA, 94 bp, Homo sapiens
ggttattcgagtgaccgagaccgcggccgggaccgaggggacccagacatggagctgcgggaagaagcctggtctccggggccgctggattctg

SEQ ID NO: 779575 - DNA, 96 bp, Homo sapiens
gccatttaaaggggaggtcgtggatgctgttgtcactcaggtcaacaaggttatcagtgagctgaatggaaaaaacattgaagacgtcattgccca

SEQ ID NO: 779576 - DNA, 100 bp, Homo sapiens
gcggtcttccgtcctgaaggagtctctggatcagctggtacaaaaggaaaagggtctccaattgagaaacatggcactgtttttcctgcactctacccac

SEQ ID NO: 779577 - DNA, 90 bp, Homo sapiens
gggaacccgcggtggagcgggacacgaacgtgattttcagctgaactctcatctctcaacactggcaaatattcataagatctaccacac

SEQ ID NO: 779578 - DNA, 100 bp, Homo sapiens
ggctggtccatagggacggcttctcactggttatagctgaggtggtaccagtttaagaagtgagaacttcttcactgactgaaatttgcatatcaatcca

SEQ ID NO: 779579 - DNA, 75 bp, Homo sapiens
ggctaccaaggacagagtcagtgatttccataaattgaagcaaaataatgtacaacggccagccaattaccaaaa

SEQ ID NO: 779580 - DNA, 96 bp, Homo sapiens
gacgtccagaaaaatactgtgaaattttatattcatgaagaagaagagagtgtgctctgtaaagaaataaagcataaagatgcctatcaagtgata

SEQ ID NO: 779581 - DNA, 87 bp, Homo sapiens
cgaaaggaccaagtaacacagctttcacaagagcttggatttacactgggcaacgtggttggaatgtatctggctcagaactatgat

SEQ ID NO: 779582 - DNA, 89 bp, Homo sapiens
atgatgaaaatgagcaccagttatctttaagaacggaccgggactttgtagccaagcagaaggaggacctggagctggccatgaagagg

SEQ ID NO: 779583 - DNA, 75 bp, Homo sapiens
gtaagcgcagaaagcaggcgaacccgcggcgcaataacggaatgttccatttggctgctgcactcccatccaccc

SEQ ID NO: 779584 - DNA, 98 bp, Homo sapiens
aggagaccggcacccagacaggtggcgacggcagaggagtgccctacgagacgctgaacaaacgctttcgcgccgctcagaagaacattgaccgggag

SEQ ID NO: 779585 - DNA, 101 bp, Homo sapiens
cttacgaaaatttgtgcaacacatcaagatttttccagaaaggaggagtcaaggaagcccttagtgaacgagaactcttcaatgctgtttcaggcttaaac

SEQ ID NO: 779586 - DNA, 74 bp, Homo sapiens
accgtgaacggacagtcccccccagaggctgacccgcggctgattgagtccctctcccagatgctgtccatggg

SEQ ID NO: 779587 - DNA, 100 bp, Homo sapiens
cttgcttctggctgtcctggtcttctttctcttcgccttgccctcttttattaaggagcctcaaacaaagccttccagctgctgccttcctttgagattg

SEQ ID NO: 779588 - DNA, 95 bp, Homo sapiens
ggaggccatggcgtccggcagtaactggctctccggggtgaatgtcgtgctggtgatggcctacgggagcctgattatgtttgagaccttcaaca

SEQ ID NO: 779589 - DNA, 80 bp, Homo sapiens
ccccactgaccagtaggagcagcagggcgtcggcttgtgagaaaaatggctacaaacttcctagcacatgagaagatctg

SEQ ID NO: 779590 - DNA, 50 bp, Homo sapiens
gcctccccagctatgtggaactgctgaccggttccctgatgtgttacctg

SEQ ID NO: 779591 - DNA, 100 bp, Homo sapiens
cgagagccgcgagcgcccggccgaacccgcgatggaataatgcccagcggcccgccaggtcccgctgaccatactccctggagccttctcccgaggtgcg

SEQ ID NO: 779592 - DNA, 50 bp, Homo sapiens
gtcactaacaagctgcgtgatcttcgatggcagaaacggtggacacaagc

SEQ ID NO: 779593 - DNA, 100 bp, Homo sapiens
ccgtcctgagcgccatggctcactccccggtgcagtcgggcctgcccggcatgcaggccaagatcaaggctcgagatcttcgcgggaagaagaaggagga

SEQ ID NO: 779594 - DNA, 75 bp, Homo sapiens
ctcatcgattcctacgagtcttctagcttcatgttcctggtgtttgaccttctattatcctcccagtccacaacg

SEQ ID NO: 779595 - DNA, 100 bp, Homo sapiens
gcggggacccagaccctggagcctcagttggaagcagccgatccagcctgcggagcctgtggggcaggagtcagagtattcatcgaaaagaaagcacagc

SEQ ID NO: 779596 - DNA, 74 bp, Homo sapiens
tgcctgcagtttttcaccctcacgctgatgaacttgtacttcacgcaggccaagcatggggatcagcacgaggg

SEQ ID NO: 779597 - DNA, 76 bp, Homo sapiens
catggcatcatagttgtgtatgatgtgacagatcagatgccaggatagaagaatttgtttatgagaaactggatag

SEQ ID NO: 779598 - DNA, 82 bp, Homo sapiens
ggacaaacacccccaagcaacttagaatgcagcttcagcagaggctgcagggccagcagggtaaaccagacttgaatacaac

SEQ ID NO: 779599 - DNA, 51 bp, Homo sapiens
cagtctgcggccaagactccgtcctgcaagatcatgtttgagaccttcaac

SEQ ID NO: 779600 - DNA, 100 bp, Homo sapiens
ggacgctgccagtttgcacagcagcagacagccattgatatcctgacaacagtagtacgaaatacaaagcctcccctttcccagcttctcatctgccaag

SEQ ID NO: 779601 - DNA, 76 bp, Homo sapiens
tattagctttagtgaaatgggctaataatgctggcaaagtggaaaaatgtgcgatacagccccaagagcccctcgc

SEQ ID NO: 779602 - DNA, 100 bp, Homo sapiens
ctcaagtggttggcatcttgaaaattcagggaacctcagaacctgttctggatccacagcaaatccaagcatttgatcagctttgccgtctctaccgagg

SEQ ID NO: 779603 - DNA, 75 bp, Homo sapiens
ccggccgacccttcctgtcgctgacggcgactgcgggaggccaggaatcgggagcttgccatcctgttgggcatg

SEQ ID NO: 779604 - DNA, 80 bp, Homo sapiens
gagggcatggatatctctactcgctccaaagtcgagcaaaagatgtgataataccagcaaagccacctgtcagctttttc

SEQ ID NO: 779605 - DNA, 100 bp, Homo sapiens
ggcggggacagccggcagcgccgcctcctcgcggctaaagaacactctgctccagccaaggtggtgagggcagctgttcctaaacagcgcaaaggcagca

SEQ ID NO: 779606 - DNA, 113 bp, Homo sapiens
attgttctatgaaaacaagcaaatcgagtgcacctgggatgacaaaaagtcatagtggtgtgacaagatctaaaatgtccactgaggcacaaagagttgatgacagtccaagc

SEQ ID NO: 779607 - DNA, 50 bp, Homo sapiens
cagcagaagctgcatatcaaactgggatacttgactttcagagatgtggc

SEQ ID NO: 779608 - DNA, 100 bp, Homo sapiens
caacttctgccgacaacttttctcctgatttgaggacttaattcagtgcacaaatgagatgaatgtgaacatcccacagttggcagacagtttatttgaa

SEQ ID NO: 779609 - DNA, 75 bp, Homo sapiens
acagccggagctgttcctctttcccaaagctcagggcgaactttctgaccaagtatacaactacccagagggcct

SEQ ID NO: 779610 - DNA, 98 bp, Homo sapiens
cggccctcggcaaaacggccacggactctgacgaaagtttctccttggaccaagatgactgatggaaaactctccacctctacaaatggcgtagcctt

SEQ ID NO: 779611 - DNA, 85 bp, Homo sapiens
ctcactctgttaaagctggtctgttctaactgaggacatgttcccgatttgaggtgaaaccatgaagagaaaatagaatacttaa

SEQ ID NO: 779612 - DNA, 78 bp, Homo sapiens
agtgtgtgccctagccatcctgagatccaaaattatgacagccttaaaagaggttatcaatactctggctgaccatca

SEQ ID NO: 779613 - DNA, 83 bp, Homo sapiens
ggatcttcgaacttttgacacggctttggaaacgacgtcatgtgttagcaattctgtggtgttcttggtcacacatttatgga

SEQ ID NO: 779614 - DNA, 100 bp, Homo sapiens
cgacatggacaaagccatcaaggtttatgctaaaactatcgatgggcaacagactattattgcatgtattgaaagccaccagtttcagcctaaaaacttc

SEQ ID NO: 779615 - DNA, 100 bp, Homo sapiens
cagagtccggaagacagacaataatcgcattgctagtcctcgcagtccgcctgagagagtagagaagaccccctcccagaaccttcctgtaaggtctccc

SEQ ID NO: 779616 - DNA, 74 bp, Homo sapiens
gaggggccaaggcagaagaaatcttggagaagggtctaaaggaacgtcaaggtcgtgggaaataaaaggcagtt

SEQ ID NO: 779617 - DNA, 100 bp, Homo sapiens
atgacaagagcatccgacaggccttcatccgcaagatgggagaagaagttgtccatgttcacactgggtgaaggaagctgaaaccacagacatgactgag

SEQ ID NO: 779618 - DNA, 82 bp, Homo sapiens
cgggctgcggcgtgtgcgcgcccgccagctgctccggagatacgtgttctcaggcgctgtggtctcaccttccactggggca

SEQ ID NO: 779619 - DNA, 75 bp, Homo sapiens
ggcacttggagtccggacatctgaaacttggcaaagattacatgaggagtggttgctaagagagcagaaggcaca

SEQ ID NO: 779620 - DNA, 88 bp, Homo sapiens
caagaatggcacggtctgcctcagtccaccctgtaccctggcctcttcagaagaaacttgactccttcccagctcaggacccttgcac

SEQ ID NO: 779621 - DNA, 95 bp, Homo sapiens
gctgagcgtcggcgccggggttcggtggcctctagtgagatctggagcttgctcacttccgacagagaaaaacaaaaggtgacagttcgcattcg

SEQ ID NO: 779622 - DNA, 74 bp, Homo sapiens
tgtgtccagaacgtgccatggagacgcttaacgatgaggtggaaagtgagaaatggtacctgtctacagacttc

SEQ ID NO: 779623 - DNA, 90 bp, Homo sapiens
attgtatcacttcatctgcaaatatttcaataagtacccaaaaggttatgatgtgattgctcaagcccaatctgggactgggaaaacggc

SEQ ID NO: 779624 - DNA, 75 bp, Homo sapiens
ctcggctgtcggagtgggtgtcctcaagaaaggatcttttgccagaaatgagggcatactggcctgacgtaattc

SEQ ID NO: 779625 - DNA, 82 bp, Homo sapiens
agacatgcggtgatctcagggcaagggttgccacgaccacccagaacctcaccagtttctccacagacactacccaaagcag

SEQ ID NO: 779626 - DNA, 82 bp, Homo sapiens
cttgagcgaagttttatgcaagctcaaactggaggattataaggatcgcctgaaaagtggagagcatcttaatccagaccag

SEQ ID NO: 779627 - DNA, 82 bp, Homo sapiens
tgggagagaggtacctctccttttccctctccctttccctaagaatccacattcatctcaatggaaggatcctgccttaagt

SEQ ID NO: 779628 - DNA, 90 bp, Homo sapiens
gtacatcgcctcagggcattcatttcaggctccttctaaatggccaaggttatgatgtgattgctcaagcccaatctgggactgggaaaa

SEQ ID NO: 779629 - DNA, 82 bp, Homo sapiens
cgtctggcgccgccgccgccagcgcgtaacctttggaaacatcagaagctactctccattgacctggacaaggtggtgttac

SEQ ID NO: 779630 - DNA, 90 bp, Homo sapiens
tgggcttctctgaggcggcgagagatggtcaggtctggagctcgaccgggccagtttgaaagctgaatggctctatagtcaaggcaaggg

SEQ ID NO: 779631 - DNA, 75 bp, Homo sapiens
ggacccggtggtcgtccgcggctccggtcacgtcaccgtaaacagcacttcttctcagtctcagacaagtactgc

SEQ ID NO: 779632 - DNA, 83 bp, Homo sapiens
ccgcgtttcagccctagggaaggcaccatgactcctgtgaggatgcagcactccctggcaggtcagacctatgccgtgcccct

SEQ ID NO: 779633 - DNA, 100 bp, Homo sapiens
agccggccgtacgcggtgctgcgagggcagaacctgggtattatgccggctgggctgataagtaccacgggaaaaccatccccattgacggagacttctt

SEQ ID NO: 779634 - DNA, 75 bp, Homo sapiens
ggtatgaagatcgggcggattgaacctgctaaggctgcctcagacctgactgcctggttcagcctcttcgctgac

SEQ ID NO: 779635 - DNA, 96 bp, Homo sapiens
gttttagattagagacactggctggattgaggagtagaaggctcaaacaacccaagctgatattcagcaatgagtatacccaggcagaaaaccaga

SEQ ID NO: 779636 - DNA, 98 bp, Homo sapiens
acttcgtggtagaatccattggctctgaagtggggtctctggatcatgatgctgcgattaatagatatagccgtttatcaaaaaaaagagaaaatgac

SEQ ID NO: 779637 - DNA, 74 bp, Homo sapiens
aacaatatcgccaagaggacagcatctggatgcttgtggttggtggcatcgaccgggtttatgaaattggacgc

SEQ ID NO: 779638 - DNA, 50 bp, Homo sapiens
gctgctgctgccgctgctaggcaaaggaaactatgccccagacgtccgtt

SEQ ID NO: 779639 - DNA, 156 bp, Homo sapiens
cctcccatgccatcagtatgagcgcctatctgcgagaacagagaagggagctctatagtcggagtggagaactgcaagccaggagatgaaatataccctagagatgagaatggcaaatggttatatcacaagtcaaatctgtgtgccacttgggag

SEQ ID NO: 779640 - DNA, 73 bp, Homo sapiens
ttcgtctcggaaaccccgcctcttacagtcacgaggatgaccggaaagaagggatgaccgcgtttgtggaaaa

SEQ ID NO: 779641 - DNA, 95 bp, Homo sapiens
cgtcaggccgcgacgagggcgctgagagtgatcagcagctggactgtgccttggacctaatgaggcgcctgcctccccagcaaatcgagaaaaac

SEQ ID NO: 779642 - DNA, 77 bp, Homo sapiens
cactgtgaaattcttctagtgtgttcttcagctttatcaggttccagttacagctatatcagagaatgagttaatct

SEQ ID NO: 779643 - DNA, 101 bp, Homo sapiens
ggatttacgtggagatcaagcgcagcgatggacttaaccaccaccatgtcgagcaaaagaacaaagaccaagaccaagaagcgccctcagcgtgcaacatc

SEQ ID NO: 779644 - DNA, 75 bp, Homo sapiens
cggaattatggcggcggtggatatccgagtttctaagctgactaaacaactaatgctcctggaggcaaaaaccca

SEQ ID NO: 779645 - DNA, 146 bp, Homo sapiens
cgtttgctggttttgaaaatggagaaaaagagtgaggaactgagaaacatggatggccttgggaacgtggaaaagatactatcaaatcagcctgggaagcatcttttcgctcagcaagttcaagagaacaaatatgttacaatcct

SEQ ID NO: 779646 - DNA, 51 bp, Homo sapiens
agaagggccttactccttcacagatcgttaattcatctgcctacactattt

SEQ ID NO: 779647 - DNA, 82 bp, Homo sapiens
tctggccgggcagtaccttcttcaagagaaatggagcccttctccaagccacagctccggagcaagccccagccccggcccg

SEQ ID NO: 779648 - DNA, 51 bp, Homo sapiens
gtggagtggacttcctagcagagctgcagaaccttggcctgaaaatgctac

SEQ ID NO: 779649 - DNA, 75 bp, Homo sapiens
gtagaaacattttgggagattagagcaaagcagtaccgggtcatccaaaaactttatttaaaaaacaaaacagaa

SEQ ID NO: 779650 - DNA, 90 bp, Homo sapiens
gccgcagtcggggcagccgctcgcccctcttttccatgtatccgtccagtttcgccgtgaggaagatgcggaaaaggctgtgattgactt

SEQ ID NO: 779651 - DNA, 100 bp, Homo sapiens
attttgtaaactgggagacacctcaaggatgtggacttgggttccagaactcagagcagtcaagaagaattatctatgtaagagcacaatttgaatatga

SEQ ID NO: 779652 - DNA, 89 bp, Homo sapiens
atgaaacattaaattcttccgttcagagtattagggccatttctgagcagtggaggtttcaagtaatccactaacaaccagttccaaat

SEQ ID NO: 779653 - DNA, 82 bp, Homo sapiens
atcttctggcgaagatctgttttcaccaccatttttccggattttttatcaagcagaaatgcatcgaacaacgagaatcaag

SEQ ID NO: 779654 - DNA, 120 bp, Homo sapiens
aagcacaggacgtatgtctatgtgctcattgtcactgaagtgctggaagactgggaagattcagttaacattgggagcccagtggaggcgccctcccgaagcgccactgcccatgctgac

SEQ ID NO: 779655 - DNA, 100 bp, Homo sapiens
aacctcttgttcctcctgtcccaaaagaccatcctgctctcaactacaacatcgtttcaggagtaaccagagagcacagagaaatgctggtgaaactggc

SEQ ID NO: 779656 - DNA, 100 bp, Homo sapiens
aaacactggaagaagatgaagaggaactttttaaaatcccgagctacactggaaatcctcatccctgactttgttaaacagacctctgaagagaagccca

SEQ ID NO: 779657 - DNA, 85 bp, Homo sapiens
ttactggatggaaaaaccaagctaatattgtctccatatgatcacttttctccagagaatgcaaatgacacggccaaggaaacat

SEQ ID NO: 779658 - DNA, 87 bp, Homo sapiens
gcgtcttcccggtctcctttcccggccgcacaggctctactgagatgaagaaagaaaaagaatacctgctcagctccagagacacgt

SEQ ID NO: 779659 - DNA, 98 bp, Homo sapiens
ggcaccgaaggttcccagtggtgtgagtgacgggcggtggcactctgtgcaggtgcagtactacaacaagatcatgagcgtcttgttgttcatcgagc

SEQ ID NO: 779660 - DNA, 100 bp, Homo sapiens
gacgggaaaaatagtagcaccaaatgtggcagatcagattgcatttcaagctgctggtggattaacagcccttgaacacatccttcaagcagtagtccca

SEQ ID NO: 779661 - DNA, 83 bp, Homo sapiens
ccagcaacgtgtttgacgggctcctcaccgttgtcctgctgtaagactttgaccccgacgcaggcttcagtgattgccgcgga

SEQ ID NO: 779662 - DNA, 90 bp, Homo sapiens
tctatgagttcctggacaagctggatgtggtgcgcagtttcattgtactgacaacctcagctggcatcatggaccatgaagaagcaagac

SEQ ID NO: 779663 - DNA, 75 bp, Homo sapiens
agaaaatgataagaccgaagaaatgccaaatgattcagtccttgaaaacaagagactttagaagacagctttcca

SEQ ID NO: 779664 - DNA, 82 bp, Homo sapiens
ctggactaagagaagttgttaccgaacatctcataaataaggagggaaaacccctgatcctaaaatgaatgctaggacttac

SEQ ID NO: 779665 - DNA, 100 bp, Homo sapiens
tcgaattttacttctgaacgaaatggagaaactggaaaagaccctcttcagacttgaacaagcttgaagctcaactagagaaaaaggaccaacaatttaa

SEQ ID NO: 779666 - DNA, 82 bp, Homo sapiens
tgatttcttccaaagcacaggaatctcactctgttaaagctggtctgttctaactgaggcaggtgacagcagggacatgtct

SEQ ID NO: 779667 - DNA, 51 bp, Homo sapiens
tctcagcctccaaaagtgctggcattacagatcatgaagaagtcatgctac

SEQ ID NO: 779668 - DNA, 50 bp, Homo sapiens
gacgccgccgctgcctcccgcgttttgacaacaattcgttcagggcaccg

SEQ ID NO: 779669 - DNA, 87 bp, Homo sapiens
gaatcgtcactgaggttgcagttggcgtgaaggttcctgggtggagctacccatgaacagcagcaatggcaatgataatggcaatgg

SEQ ID NO: 779670 - DNA, 82 bp, Homo sapiens
agttctctaagtactctgaaatgagtgaggaaaaacgagccaaacttcgtgaaattgagaggctgacccgcggctgattgag

SEQ ID NO: 779671 - DNA, 75 bp, Homo sapiens
tctttacctgcttcccaatcccactgatgaggatcagcccatggtgactctcctattccatctgtttcttcggga

SEQ ID NO: 779672 - DNA, 74 bp, Homo sapiens
tttcatcatcaagcagacatactcaaggtccagtttctttacacatctctgctaaagcagcaagaagaacaaac

SEQ ID NO: 779673 - DNA, 100 bp, Homo sapiens
ctagatgaagatactggaacattcagaatctacggagagaattggcagagggggtcgatttgggaggaaaggtgtggctataaactttgttactgaagaa

SEQ ID NO: 779674 - DNA, 82 bp, Homo sapiens
gccctgacagcccccacctcgcaagagcagccgcggcgccactgttttaaaatcaaagatgggaaaatcggagaaaattgcc

SEQ ID NO: 779675 - DNA, 100 bp, Homo sapiens
ccttgagctccaggagttcgtctcttacgtctgcggaagtgcagctgcctcagttcttagcgcaggtccttctatatgatccactctttgactggaccat

SEQ ID NO: 779676 - DNA, 101 bp, Homo sapiens
tccgagttgccgccggagaggagtggcctcgcccgcttggtactccaaagattcaggtttactcacgtcatccagcagagaatggaaagtcaaatttcctg

SEQ ID NO: 779677 - DNA, 75 bp, Homo sapiens
agtaaagccaatgacccccaaggtggtcactctctggtgtatgtgctcaagaggccttatgtggatgagttcctg

SEQ ID NO: 779678 - DNA, 50 bp, Homo sapiens
gtcgatctggagcttttcccctccccggggaagacaccctctctggaccc

SEQ ID NO: 779679 - DNA, 104 bp, Homo sapiens
taatgaattcaatcccatgggggacacgctggcctctgcaatgggtgtcctgtcagaagaacagatccgcctgaagaaactgaagcggcaagaggaggaacagg

SEQ ID NO: 779680 - DNA, 75 bp, Homo sapiens
cttggagcctctttataagatcctcgcccagaaactaattctgaagcaagcccttatagttgtgctgcagtggtg

SEQ ID NO: 779681 - DNA, 74 bp, Homo sapiens
gcagcctgaacggagtgtgcgacggattgggagttctctttcaacatgttcgaccaccctattcccagggtctt

SEQ ID NO: 779682 - DNA, 83 bp, Homo sapiens
ttccagatggctctaacctcagtgtttgtgaagtgtggatatgcaggctctaactttccagaacacatcttcccagctttggt

SEQ ID NO: 779683 - DNA, 82 bp, Homo sapiens
gacagccttcatttctctgaacatactgccttatgggacagatcaagaccagagatcaagaagccccagaggatgtacaagt

SEQ ID NO: 779684 - DNA, 82 bp, Homo sapiens
ggctgcctaatttacagcaaccatgagcattccaagaatcaagcactacaaagtgatgagcgtaggacaaaactacactatt

SEQ ID NO: 779685 - DNA, 73 bp, Homo sapiens
cacgtctctaccgagcacaaactccacgaagccaacgcccaggtatggctgatggcaagcattgtacttttcc

SEQ ID NO: 779686 - DNA, 99 bp, Homo sapiens
ctgaattacatctgacccccaaagctcagcagttggctggggaacagaccagggaattggtggatttggagaagagccgggaattaaatcacagctaat

SEQ ID NO: 779687 - DNA, 51 bp, Homo sapiens
aactcttattggtgtaacaagtgagctgtcagggagaaatgtcgaaacagg

SEQ ID NO: 779688 - DNA, 75 bp, Homo sapiens
ctgtacccagaaagagtcatacctggagcagcagatgcggaaaacgccatgcggtacataaatgggacgcgtctg

SEQ ID NO: 779689 - DNA, 83 bp, Homo sapiens
ttgcggtttcggtcgctctcccgtgtttcccgggctgggtatttgcctcgcaccatggcgacagatttgaccagttttgggcc

SEQ ID NO: 779690 - DNA, 92 bp, Homo sapiens
aaacagccaccttcagtatctcagtcctccagtgtttggatattcaggtcaaaatgcagatcttcgtgaaaacccttaccggcaagaccatc

SEQ ID NO: 779691 - DNA, 89 bp, Homo sapiens
ggaccccagacctctgtctctctcggattcttacgctgtatgacagtattaatgttattgacgtaaataaagttgtggaatatgttaaa

SEQ ID NO: 779692 - DNA, 90 bp, Homo sapiens
tgagtcaacagactgagcgcgtccaggcctgacagctctgcggctcgggccctgagggacctcaagagagatgtggccaagaagctggag

SEQ ID NO: 779693 - DNA, 98 bp, Homo sapiens
gaacacggacagtgaggaacaccaggagcctcctgatctgccagtccctgagctcccagggaaggaagccatgctgaagcaccgggactacgagacgg

SEQ ID NO: 779694 - DNA, 80 bp, Homo sapiens
tgggcgaccaggaggtgccggtggccgcgctcggacccgcatgtttttggcccagaggagcctctgctctcttagcggta

SEQ ID NO: 779695 - DNA, 100 bp, Homo sapiens
caaacagcccccgaaaacgctacgtgagctgggccctgggccagaggcagaaaacggacggaagaaaaggtctggccgttgatcatggccttgccaggtt

SEQ ID NO: 779696 - DNA, 107 bp, Homo sapiens
gaaagcattggctcaggtcttctgtgaggaatctggattgtcacctttgctgcaaaaaattacggagtggcagaatttagtgacatttggaagcttttcaaacatgg

SEQ ID NO: 779697 - DNA, 100 bp, Homo sapiens
tggaggactacctggcaagtggttatcaggtgagaattatgaagatgatgacctagtaaattctgatgaggttatgaagaaaccatgtccagtacagatt

SEQ ID NO: 779698 - DNA, 83 bp, Homo sapiens
tctcgccagcatgtccttactagaattggtgttatgtctttgattcgcaagaagggcatcgagcgcctcaaacgaaagaacca

SEQ ID NO: 779699 - DNA, 76 bp, Homo sapiens
acaacaaccctaacgacacctccaacttttgccctggattacaggcgtattttggggtcaaagcagagtgaacacc

SEQ ID NO: 779700 - DNA, 101 bp, Homo sapiens
atctcagattcctgcagcatctgatcagctctgcaaggaagagagcttcacgtctctggtcagtgttatagttttgccgctggactcttccctcccttccc

SEQ ID NO: 779701 - DNA, 101 bp, Homo sapiens
cacctggagattgacgcagagtgggcggcggtggtgatacaaagccagcctgcgtatttaacaatgtggaatattatgatggagacatgtttcgaatggac

SEQ ID NO: 779702 - DNA, 98 bp, Homo sapiens
cttagctgtgctcgcgctactctctctttctggcctggaggctatccagcttactccacaggatccgctgaacataggatgttgccacaaaatctacc

SEQ ID NO: 779703 - DNA, 75 bp, Homo sapiens
aaggtggccaccaacatcatgcgagcctggttgttccagcacctctcgaatgactcccggcgtggctcgggctcc

SEQ ID NO: 779704 - DNA, 74 bp, Homo sapiens
cagaacactattaagaaggccaagcaggacgtaatagaggtcatcgagctggttaagaagtatggcacaaagca

SEQ ID NO: 779705 - DNA, 52 bp, Homo sapiens
agaaaatacaaaacaattcaaagctcttaagagatggagtttcactgtgtca

SEQ ID NO: 779706 - DNA, 74 bp, Homo sapiens
ctgaagatggctactctggagttgagtaacaacatgctgtaccccaaggaagacaaggagaaccgcattctgct

SEQ ID NO: 779707 - DNA, 100 bp, Homo sapiens
cgcgccggcgctcccttgtcacgcctcgggaagcgcgcacctgccaagcagcacatttgaggatgttcgtgatgctgaagacgctttacataatttggac

SEQ ID NO: 779708 - DNA, 113 bp, Homo sapiens
cgagggcatcctctacaccatcgacaccgaaaactccaccgtagcccttgccaaaggtgttggggcgatgtttcctgactgtggtgcaagtccatttccagtttttgactcat

SEQ ID NO: 779709 - DNA, 82 bp, Homo sapiens
agccttgtgctggagcaccagccagacaacatcaaggctctcttccgcaagggcaaggaatacaaacagaagcttgcacgag

SEQ ID NO: 779710 - DNA, 75 bp, Homo sapiens
agctccaaccatgggaggccgcgtctttctcggtctcctccgggctggggctgagcaagccctcggagtgaccgt

SEQ ID NO: 779711 - DNA, 100 bp, Homo sapiens
cggagtgcaacgccgtgcggcaggcgctccaggacctgctcagcgagtacatgaataataagaagctcattcacacagaagacccatttaatgatgaaca

SEQ ID NO: 779712 - DNA, 98 bp, Homo sapiens
ccggcagcggcggcgcgggcggaggcagcagcaggcgggtgggtatatggctgccaaggtccagaaattggaggaacagtttcgatcagatgctgcta

SEQ ID NO: 779713 - DNA, 75 bp, Homo sapiens
atttgtatagagatgtgatgttggagaactatagcaacttggtatcactagcaccttgcagagtgaagtcaagcc

SEQ ID NO: 779714 - DNA, 98 bp, Homo sapiens
gaaatgccatttataacttgtgatgagttcaatggtgttccttcgttatcctgaatacatgtctaacaattttccttgcaacgttagctgttgttttt

SEQ ID NO: 779715 - DNA, 100 bp, Homo sapiens
ctgggggagagtggatccaggtgaagggggcagagcgccatcatgaccgggtcctataacaacttcttcaggatgtttgatagagacacgcggagggatg

SEQ ID NO: 779716 - DNA, 98 bp, Homo sapiens
cttggtgctacttcttgctatgttggagacaatactgatatgatggatgatatctgtcaggagcaatttctagagctgtcctacttgaatggagtacc

SEQ ID NO: 779717 - DNA, 83 bp, Homo sapiens
ccgcaacgccgagcgcaccgacatctgcctgctcaaagttttccaagagataacttcaccaagatgtccagtgataggcaaag

SEQ ID NO: 779718 - DNA, 100 bp, Homo sapiens
cccagctctgcgcgtaccgcgctctttggaaacgaattgacggggaggtttactgcatcgacgcgcggttctacgggaacgtcagccggttcatcaacca

SEQ ID NO: 779719 - DNA, 89 bp, Homo sapiens
aacctccagagcaggagaccttctacgagcagcccccactggttttgggatttgagattgacgcggtgaactctgtccagttttcaaac

SEQ ID NO: 779720 - DNA, 100 bp, Homo sapiens
gcaaagaaacaaccaggtcagcttcggacaaggttagcagaggtgatgggctttggcctctacctaatggatggaaatgtcagtaacatttacaaactgg

SEQ ID NO: 779721 - DNA, 82 bp, Homo sapiens
tggatatcagcccccagcggcccaggcccagcgttaagatcatcttccgggtggccctggtcctgctgcgccacacgctggg

SEQ ID NO: 779722 - DNA, 75 bp, Homo sapiens
tgacatccgaggtgcctttctccaaaaggggcggccggcgagtcccagtgagagcggagggtgccagaggtaggg

SEQ ID NO: 779723 - DNA, 100 bp, Homo sapiens
gacaacttgacttctctggggactctgaacttccctggtcgaacagttttttctaatggctattcaagcagagtctccttggaggtgacatggatatggg

SEQ ID NO: 779724 - DNA, 90 bp, Homo sapiens
gcctccgcggctccggggagaagatggcagaaacggtggacacaagcgaaatggtcaacggcgctacagaacaaaggacgagctctaaag

SEQ ID NO: 779725 - DNA, 100 bp, Homo sapiens
ttagacttgtttcttatatgtgatgccattccagcactggactcatggaggctgagcatttattcagagctgattggtcagatggttgtatcctgacctt

SEQ ID NO: 779726 - DNA, 98 bp, Homo sapiens
ggacggacttgagaactgtccttacgtgacctaaagctggagtattttgagattggagaattaagtttctttcaagatggcttgaaaacagctgataa

SEQ ID NO: 779727 - DNA, 75 bp, Homo sapiens
gagcagtcacagatcaccagccaggtatcgagaaccttccctgcgaacttcagaggaacttccagctgatgcgag

SEQ ID NO: 779728 - DNA, 50 bp, Homo sapiens
ccttttccctctccctttccctaaggttctctacttaaaagacaatgact

SEQ ID NO: 779729 - DNA, 98 bp, Homo sapiens
gtgaagctcctcgacaccatggtggacacttttcttcagaagctggtcgccgccggcagcagtctgagctatcagctgaagaaagtccagaaaaatta

SEQ ID NO: 779730 - DNA, 98 bp, Homo sapiens
cggttcagcaagtatgttctcagaagctatacactcattatctgatacttgtaatcaggtcaacatggtgattggcattttggtatttaataaacttg

SEQ ID NO: 779731 - DNA, 100 bp, Homo sapiens
tcgaactgaagcgcatcgtcgagggcatcctcaagcggcctcctgacgagcagcggctgtacaaggtgaaaccagcccagagaagttacgggatttgccc

SEQ ID NO: 779732 - DNA, 96 bp, Homo sapiens
gctgaagacgctggaccacgtgctcacccacggctgcttcgacatcttcaccacggaggaggatgggctcgggatgagtttgaaggcctcttcaag

SEQ ID NO: 779733 - DNA, 88 bp, Homo sapiens
agaggagacttccttgcttctttggagaatgatatcaaaccagaccgtataattgatgccggcccaaaaggaaattattctcgcttca

SEQ ID NO: 779734 - DNA, 100 bp, Homo sapiens
gcaacagctccccacactgcaccatgagctcagttggctgcaggagcagctagcacagaacccttaggagaaatcttgagagtggacagcaattgtgaag

SEQ ID NO: 779735 - DNA, 75 bp, Homo sapiens
ttcaaccacctcgagcggctgctggacgaaggttgaaaggattgttgacaaaaggaaaaataaaaaagggaagac

SEQ ID NO: 779736 - DNA, 143 bp, Homo sapiens
aaaaatgaaaccatctggtatctgaagtatcattggccttgaggaagaagacatgctctacagtgctcagtctttgagagctggactggccattatggaggaggagctgcagcattcccattgtgtgaattgtgtcagtagac

SEQ ID NO: 779737 - DNA, 100 bp, Homo sapiens
ctgctcactgccgcgctcatcttcttcgccatttggcacgaagaaaaaatgctgggcatcttggtgcagcacaaagtccggagtggcgtctcgggcatcg

SEQ ID NO: 779738 - DNA, 100 bp, Homo sapiens
cactgtgtgtctccccggacgcgagcccgctcccctgagtgacttaagagattaaaattaatttggttgctgttggttctgaacaaataatgagttcttt

SEQ ID NO: 779739 - DNA, 82 bp, Homo sapiens
tacatgccctacctcaacaagtacatcctggacaagaacccccaaagacacacgtgacccaccaccccctctctgaccatga

SEQ ID NO: 779740 - DNA, 101 bp, Homo sapiens
aacctattacgaactcaaaagtcaaccgctgaagagcagttgatgctgatgtaacagttataggttctggtcctggaggatatgttgctgctattaaagct

SEQ ID NO: 779741 - DNA, 75 bp, Homo sapiens
gactcagaatacaacatcatgtttgccagggcccatacctccacccccagagagatcgggctcaggacctgtgag

SEQ ID NO: 779742 - DNA, 100 bp, Homo sapiens
aaagaagccaaagagaaaggtacctgggttcaactaaagcgccagctttatgctgaaaaggtggccactagaggtctgtgtgccattgcccaggcagagt

SEQ ID NO: 779743 - DNA, 98 bp, Homo sapiens
tactgcagcaccacccatatcattgtcaagagagcaggtgagtgtggtccaagattcagtaaacatatcaggacatactaatacaaatactttgaagg

SEQ ID NO: 779744 - DNA, 78 bp, Homo sapiens
cgggaaaggagaggatcccggagccggtgatctgtgaaaatggttcgctattcacttgacccggagaaccccacgaaa

SEQ ID NO: 779745 - DNA, 74 bp, Homo sapiens
caagcacacccaatggacagcatgcctcaccaagtcacatgacaagcaagagtgataatgaactctcaagtgga

SEQ ID NO: 779746 - DNA, 100 bp, Homo sapiens
cctgcactggtacacgggcgagggcatggacgagatggagttcaccgaggcccctcggctccctcccagatcccacccccagccccactggttgccaaac

SEQ ID NO: 779747 - DNA, 83 bp, Homo sapiens
aaacagcccgcccgaccccgtcccgaccctggccgccccgagcggagcctggaggcttcttccccgggagctcgcagggctgc

SEQ ID NO: 779748 - DNA, 100 bp, Homo sapiens
cctgggctggggcaggagccggcccagctcatcgcccagtctatcggccaggccttcagcgtggcctaccaggagttcctgcgagccaatggcatcaacc

SEQ ID NO: 779749 - DNA, 97 bp, Homo sapiens
tagttcctcatagatcttatgtttcaaccatgatcttggaagtagtgaagaataggaaagatactattcaagtccagtacatcataatgcagaattc

SEQ ID NO: 779750 - DNA, 89 bp, Homo sapiens
atgctaagaaagaatcttgtcactttagccactgctactacagcctgctataactgcggtagaggtggccacattgccaaggactgcaa

SEQ ID NO: 779751 - DNA, 98 bp, Homo sapiens
gtgggagggacagatcaacggcaggagaggtttgttccctgacaactttgtaagagtggatggaatggatatcctgtgcgtccgagaggcaacaaggt

SEQ ID NO: 779752 - DNA, 112 bp, Homo sapiens
actcctctctcaagagaagctgcaagagcaacatctttcctcaccccaaggagagttgtggactggggcaacctttgccagtgatgagaagtgatgctcgtggcagtgctga

SEQ ID NO: 779753 - DNA, 108 bp, Homo sapiens
attttgataatgtcagtgtggtatctctacagtggccacagatgtctttaattccaaaaacctggccgttcaggcacaaaagaagatcttgggtaaaatggtgtccaa

SEQ ID NO: 779754 - DNA, 74 bp, Homo sapiens
ctgcagccgcgagctcctggaggcggcgggatggaggcggcggccgtaaggttcgtgatcctcgggccaatttt

SEQ ID NO: 779755 - DNA, 121 bp, Homo sapiens
ctggtttggtgcagttaccatcaccctcaactcaaaacttcttggagggaacatatttcacaaaggagatgtcctcatcactgcgtcaactggaatgatgacagaagctgaaggagagaag

SEQ ID NO: 779756 - DNA, 103 bp, Homo sapiens
aaaaggcagaaccagtcccttgtgtatggcaaagtggatagcttctggaagtctcggcagacacctgagggtgagttccttccccttgaccaacttgaactgg

SEQ ID NO: 779757 - DNA, 75 bp, Homo sapiens
ccagaatctggacctatagtgcgggatcccaaggctattcttggtgccaccattgagaactccaggattgtcctg

SEQ ID NO: 779758 - DNA, 75 bp, Homo sapiens
ccgcagatgttgtcaaggtggcctaccaggaggccaggggtgtcgccatgatcaattctgaattctatactggct

SEQ ID NO: 779759 - DNA, 100 bp, Homo sapiens
cctctgctcgcggttagcccgtcagtccctgctctgtgcgcgcctccatctgggccatggatggtatctccagatgaaatggccactgcttgatgtccag

SEQ ID NO: 779760 - DNA, 97 bp, Homo sapiens
gatggcggatgccctgcagtacctgcagaaggtctctggagacatcttcagcaggcctgatcacttgaacggacatatcaagcaggtgcacacttct

SEQ ID NO: 779761 - DNA, 83 bp, Homo sapiens
caaaatcacgttataatcagattttgaccaagcattttgtaaggaagagtttgaagtttgaaatcccagaatgaggaaattca

SEQ ID NO: 779762 - DNA, 51 bp, Homo sapiens
tgtttgcacatgcccccctgaccaatagacggagtcttgctatgttgccca

SEQ ID NO: 779763 - DNA, 100 bp, Homo sapiens
ggctccaagccaagggccatcgtggtggatcctgttcatgggtgaaatgacaatggatgctctgttggctcgattgaaacttctgaatccagatgacctt

SEQ ID NO: 779764 - DNA, 82 bp, Homo sapiens
cggaggggcggcggccggggaggcggcggcggcggcaggatgttgcttcagagtgtgaagtcaaatgcatgccaacattcca

SEQ ID NO: 779765 - DNA, 99 bp, Homo sapiens
caatctcggcactttgggaggccaaggcaggctgcagtgccaccaggctgccaggtgacgggcagacgagcgccggagatgcgtccctgcaggaccccc

SEQ ID NO: 779766 - DNA, 100 bp, Homo sapiens
gggcttaagttccgtgaactcagtactgatgcccagtggggcattcgtcttggtaaacttggttgtcgagaagcacttacaacccgccaaaagctgattg

SEQ ID NO: 779767 - DNA, 98 bp, Homo sapiens
gctcgaagccagctctgcagctcagccaatcagtgacatcattggacccagatgatgtggtaccagttggccaaagaagagcctggtgttggtgcatg

SEQ ID NO: 779768 - DNA, 90 bp, Homo sapiens
ggcaatatatcccatcacaccacaaggcccagaaatctaaagatctttgttctataactgtaagtggagaagagatccctaatatgcctc

SEQ ID NO: 779769 - DNA, 87 bp, Homo sapiens
cttggattagaagaacaagaaagactccacctactatggagggacgggtaaattgaagcaaaaagcagacaagttctatgggatttg

SEQ ID NO: 779770 - DNA, 101 bp, Homo sapiens
ctccgggtcgctggcggcgtggacacctgagtcccggggtaggggtctcccgcgagaacatacatatgatagttgagaaagacacatattctgatcatgaa

SEQ ID NO: 779771 - DNA, 90 bp, Homo sapiens
ttgtgccagctctccagagagaaaagccccacaccagtgagaagcatcagcaccgtgaacttgtctgagaatagcagtgttgtcatcccc

SEQ ID NO: 779772 - DNA, 100 bp, Homo sapiens
catcggggagatctttgagctcatgtcggagctcttaggcctgctgaaaacctacaactgctaccatgagggcaagagcttccagctgagacaccgtgag

SEQ ID NO: 779773 - DNA, 100 bp, Homo sapiens
ttggcttctcccagcatagccccaggaaattatggaagtggaaattacaatgattttggaaattataaccagcaaccttctaactacggtccaatgaaga

SEQ ID NO: 779774 - DNA, 71 bp, Homo sapiens
gcattttgataccacagggttaccgtctccaattctcacagggactgcatcatgctctgttgcctgaacag

SEQ ID NO: 779775 - DNA, 100 bp, Homo sapiens
cgcgaggaggaactggcagccgtgcgggaggcggagcgcgaggcgctgctggccgccctgcttggccgatggtggagaatcaaagaggctcggaattctg

SEQ ID NO: 779776 - DNA, 98 bp, Homo sapiens
cctggggaatgagacccaaactgctcatacagaattacgcatttccacttctaatggagagaagatgactgaggaggaggtggagaccgttctggcag

SEQ ID NO: 779777 - DNA, 82 bp, Homo sapiens
cgcctgtgggcacagacaaggagctcagtgacctcctggacttcagcatgacctgcctagagctggaacgttacctccagag

SEQ ID NO: 779778 - DNA, 98 bp, Homo sapiens
tacttgaagccctacgccgtggacttccagcgcaggagttggtgtcctttgaggaggtagctgtgcacttcacctgggaggagtggcaggacctggat

SEQ ID NO: 779779 - DNA, 80 bp, Homo sapiens
gaaagttttccttcttacagagatgtgactctgtttgagttctttatagctccaagctctacagattcttcaaatatatt

SEQ ID NO: 779780 - DNA, 82 bp, Homo sapiens
ctgtggtcgtcagcactgctgagaggtatccaatgaacctgggaatcgctacaacctccagctcatcaatgcactggtgctc

SEQ ID NO: 779781 - DNA, 97 bp, Homo sapiens
tcatgattctgagatgattggagaccttcaagatttgggaatggatgatgaaggagatgatgacccagttcctctaccaaatgtgaatgcagcaata

SEQ ID NO: 779782 - DNA, 101 bp, Homo sapiens
gaaaagaggaactaaggcggaggaactgagacgtttcgaattccagggctggtgaattaccatatctccgtcaagtgcagtaaccagttcaagttggaagt

SEQ ID NO: 779783 - DNA, 75 bp, Homo sapiens
acctttttcagaaatgcgcagagcaaacatctttcaaagatgccttcaattaagttgcagagttctgatggagag

SEQ ID NO: 779784 - DNA, 100 bp, Homo sapiens
cggacccgcaagcatgcccaccactgccacaaacgccgcaccaggtcttgtagcagcgcctcctcgggactgccagggcccaaaggggaacgaggagaga

SEQ ID NO: 779785 - DNA, 100 bp, Homo sapiens
caggctcaagcaatcctaccatgtcagccttcccagtagctggaactacagattggagctggagtgagccttccaggaattttggctgccaaatgtggtg

SEQ ID NO: 779786 - DNA, 102 bp, Homo sapiens
ggaagaggagtgcggaacccgcgggagacaatgcagatcttcgtgaagactctgactggtaagaccatcaccctcgaggttgagcccagtgacaccatcgag

SEQ ID NO: 779787 - DNA, 82 bp, Homo sapiens
caagtatctgtctgagaaatgggtcttagacccaacatgagtgaagtttcctgcaagaaacgggacgactatttggaatggc

SEQ ID NO: 779788 - DNA, 75 bp, Homo sapiens
tcttctgggagctgaggaaccagatatcttgaaaagctgccagaaagggttactggacctggaggacgatgggga

SEQ ID NO: 779789 - DNA, 50 bp, Homo sapiens
gtcaggccaagaagcatccgagcacgcaggaggagggagacgcactgatg

SEQ ID NO: 779790 - DNA, 100 bp, Homo sapiens
catcatcatggacacctccaccttcctgctcaggccttcccttcttcttggtggtgttcttgagtaagataatctggactggcccccgtctttgcttccc

SEQ ID NO: 779791 - DNA, 100 bp, Homo sapiens
agacgggtgatttctgcatttccatctgaggtgcaggccctagcaggtgcaggtggagtagacaatctccatgtactggactttcagaagtataaagctt

SEQ ID NO: 779792 - DNA, 85 bp, Homo sapiens
ccctggccctgtacgccttctccaacagcagccaggcctatgagagctacaagaagaaggactacacccaggtggactacttaat

SEQ ID NO: 779793 - DNA, 50 bp, Homo sapiens
cgcggccggccggccgactagggaaaatgtttataggaggccttagctgg

SEQ ID NO: 779794 - DNA, 75 bp, Homo sapiens
cttggttccgcgttccctgcacaggagaactaatgccgacgtgatgaccgccctgtcccagggctacaggatgcc

SEQ ID NO: 779795 - DNA, 90 bp, Homo sapiens
agtccttatttgaacaccacaaagctctggatgaaaagagacggggttttgccacattggccaagctgatctcgaactcctggcttcaag

SEQ ID NO: 779796 - DNA, 74 bp, Homo sapiens
gaagagacatgagatcatggtggccaaacccacagattggtgctgaagacatggacggcttccaggcagacacg

SEQ ID NO: 779797 - DNA, 83 bp, Homo sapiens
aaaggcaagagtaacagcagcgccgtcccgtccgacagccaggcccgggagaagaaccatcactgttgctggaggcacctgac

SEQ ID NO: 779798 - DNA, 104 bp, Homo sapiens
ggtgtgattagcttcgcagtctggaaagctttaggagttcacagtgttctgctccagacgagcccttaccacgttgactcactcctgcagctcagcgatgcctg

SEQ ID NO: 779799 - DNA, 83 bp, Homo sapiens
cttcaatccgctctactggaatgtggtactggctgtgatcgaacttctcaaccctcagagacttagatcttccacctcactcc

SEQ ID NO: 779800 - DNA, 147 bp, Homo sapiens
gcaccgggatcgtgaccgagaccgtgaccgagagcgtgaccgagagcgcgaatatcgtcatcgttagaagagtgtgaacatggctacgcctcttcattcccgtccatgccgagcccccgactgcagcattcaaagcccccacggagg

SEQ ID NO: 779801 - DNA, 100 bp, Homo sapiens
cgcagggaggtggagagcctgccggccgtctgtcccagtgatggatgcacctggaaggggaccctgaaagaatacgagaacaatgtgagcttcgtggatg

SEQ ID NO: 779802 - DNA, 50 bp, Homo sapiens
cagctccagagctttgtcaaagagttggatggcaagcatgtggtgtttgg

SEQ ID NO: 779803 - DNA, 83 bp, Homo sapiens
cggcgggggcggcgtgggcaagtcggcgctcaccatccagttcatccagacctcctgccccccgaggtctgcagtctcctgaa

SEQ ID NO: 779804 - DNA, 80 bp, Homo sapiens
taccgcagcatccaagtcggccctggagcaggccgggctctcgccatgggtcactgtcgcctctgccacgggaagttttc

SEQ ID NO: 779805 - DNA, 87 bp, Homo sapiens
gggatctcaggtcctcgggggcggcggccacgccaaggacgggaactgcaagcacatgttgaccagataactgaaatggcagcagta

SEQ ID NO: 779806 - DNA, 75 bp, Homo sapiens
gcaggtggggaaaatggcggtgtctacagtgttctcgacttcgtcgctggattatggccactgcggtctgaccct

SEQ ID NO: 779807 - DNA, 127 bp, Homo sapiens
aggaggcaccttggataagctggagtctattcctggattcaatgtcatccagagcccagagcagacacctggatttcattagcatcatgacctacgattttcatggagcctggcgtgggaccacagg

SEQ ID NO: 779808 - DNA, 100 bp, Homo sapiens
ggtttagaaacgcatgaccgaaaatcagaagacaaacttgccaaagctacaagagacagatgatgattattccccaccttctaagagacaaagaccaacg

SEQ ID NO: 779809 - DNA, 75 bp, Homo sapiens
agaactgctgcatctgcaacaacagcagcccaagaagatgaaaggattgttcttgttgacaacaaatgtaagtgt

SEQ ID NO: 779810 - DNA, 109 bp, Homo sapiens
cggctaccatgtccgcccaggcgcagatgcgggccctgctggaccagctcatgggcacggctcgggacggaatgaatctgaagtctgctgcagtaaaacacagaaggct

SEQ ID NO: 779811 - DNA, 96 bp, Homo sapiens
agaaactggagccaccatcaagctgtctaagtccaaagatttttacccagaacaggcattctcgtcgcacatactggaaccaatagaagaactttc

SEQ ID NO: 779812 - DNA, 75 bp, Homo sapiens
cagagcaggagaagctgagcctttctggacagaccaacctgtcagtgctgcaaaaagatcaactgaaatcggcaa

SEQ ID NO: 779813 - DNA, 90 bp, Homo sapiens
aaccacaggcatcagttggtactcgccatgaaactcaaagatcgagagattgggatcaaagccactcacattaagttaccaagaacaacc

SEQ ID NO: 779814 - DNA, 97 bp, Homo sapiens
tctgtgactgaggattacccgctccatccatccaagatagaaactcagctcgtggtgggggcttgctggcaagacggtgtgaagggagacctgctga

SEQ ID NO: 779815 - DNA, 75 bp, Homo sapiens
gcgacgccgacagcgaagctgagcgtaaagttacattacttcgttcagaaccatttcacaagtgcaagaatggct

SEQ ID NO: 779816 - DNA, 95 bp, Homo sapiens
caagaaccaacccccaaattggctgggacagatccagacatttaatgtggatgcaccatgccagaccgtggaagatttaacgaatggggttgtga

SEQ ID NO: 779817 - DNA, 75 bp, Homo sapiens
ctcggtagcagccttcgccacgccggggtcttcagggtgcctctgccaactggtggaatcatcgccacttccagc

SEQ ID NO: 779818 - DNA, 75 bp, Homo sapiens
aaaattcataaatttgaggaagctttgaagagtattgtgaggattgagatgactggagtgtgtgtggcctggaga

SEQ ID NO: 779819 - DNA, 83 bp, Homo sapiens
ggccaagggacaatggtcaccgtctcttcaggggacggcaaaacagaacagaaaggcggagataaaaagaggggtgttaaaag

SEQ ID NO: 779820 - DNA, 75 bp, Homo sapiens
ccggaactggagccgaggcgcaggtggcgctggatgaggacggggacttggttgccttttccagtgacgaggaat

SEQ ID NO: 779821 - DNA, 100 bp, Homo sapiens
aattggtggaacttgttggaaatggaacatacgggcaagtttataagccaggcgggcaccacggcaggggctgagctaccctcatggaagggagaggacc

SEQ ID NO: 779822 - DNA, 82 bp, Homo sapiens
gctcctgtcgccttcgcctcctaatccctagccactatggcgatcagtgggtgaccgcggctgcgagggactttgtcatccg

SEQ ID NO: 779823 - DNA, 95 bp, Homo sapiens
ggaatgcatcacatctgcatcgaggttgtagcagataccaatataagcgccatagcagctcagcttgaaaacatgtctacaggctaccaccttgg

SEQ ID NO: 779824 - DNA, 101 bp, Homo sapiens
aatttggattttcttcccaggcagcaagtgcaattaacagttggggaatggcggtcaatgtgtattctacctcgataacccaagagactatgagcagacat

SEQ ID NO: 779825 - DNA, 105 bp, Homo sapiens
acgagggccagctgacggagatggtgcagaagatggaggaggtgctggagaatctggtaaaagcaccattgtgaagcagatgaggatcctgcatgttaatgggtt

SEQ ID NO: 779826 - DNA, 50 bp, Homo sapiens
tggaggagccttctcaagaacagagttaactctgctgtttgctgcatgct

SEQ ID NO: 779827 - DNA, 90 bp, Homo sapiens
gcgctggctggtcagctgtgccacagagattggaacagaagtgtgtcccggccagtggagaactctccccggagctccaggagtgggcac

SEQ ID NO: 779828 - DNA, 98 bp, Homo sapiens
gagcccgggaagtgcgttttgcacaacaccatggagtctctgttagagcgaggtgagaagctagatgacttggtgtccaaatccgaggtgctgggaac

SEQ ID NO: 779829 - DNA, 76 bp, Homo sapiens
tccgggaccggagtcagaaccctccgcagagtaaagattcttcgctgctgctgccttaccgccgagaaccaccacc

SEQ ID NO: 779830 - DNA, 98 bp, Homo sapiens
acttgagagtgagactttgaaatcagaggaattccagaagaggctgcacccttataagacttcatcacctgattcttccaatgagaattccgtagcaa

SEQ ID NO: 779831 - DNA, 75 bp, Homo sapiens
tcagactatttatcaccatatataaggatgctctaaaaggatgtagatgatttctttgagcacgaacgaacattt

SEQ ID NO: 779832 - DNA, 102 bp, Homo sapiens
agagtttgaaagtgcgattgtggaagctgctcgggaacaggagtacagctgtgtagtaaagatgccttctggtgaatttgcacgtatatgccgagatctcag

SEQ ID NO: 779833 - DNA, 101 bp, Homo sapiens
gctccgcggcgatggcgctctataacccctaccgccacggtttttcgttggaatatacgttgcacatttatggcgattctgagtgtgagggcagacttctg

SEQ ID NO: 779834 - DNA, 98 bp, Homo sapiens
taccggaatgtcatccagcgagtgattagtctgcagatctccaggggagcccaccagcctagtcaacatggcctcggaagacattgccaagctggcag

SEQ ID NO: 779835 - DNA, 100 bp, Homo sapiens
gcttcgatggacgaaatggagaaaagggtgaaacagggtaatgatggtggcaaagaaattcctggatgctgggcacaaactcaactttgctgtagctagc

SEQ ID NO: 779836 - DNA, 83 bp, Homo sapiens
caaaaaaggaggccaaagactttgtggattctccacagttttcctcgtgcgtactcacggtggaatccgatgtgcattgaagc

SEQ ID NO: 779837 - DNA, 82 bp, Homo sapiens
ccctacagccgctgattccccccgcatcgcctcccgtggaagcccaggcccgcttcgcaggaacaagatcactcaaggtgaa

SEQ ID NO: 779838 - DNA, 75 bp, Homo sapiens
ctccaagatgtagctaatgaccgtggttcccactgaggaccaaactcttacccaggatctactggagcagctgtt

SEQ ID NO: 779839 - DNA, 100 bp, Homo sapiens
tgtgagcttggccttggagcgaggctatcacaagctgcaccagcttctaaccgagatacttttgtggaactctatgggaacaatgcagcagccgagagcc

SEQ ID NO: 779840 - DNA, 97 bp, Homo sapiens
tgctggctgccgcgcggccgaggaatttggtgcattgatgagcaattactctctccccccacccctgcccacctatcatgtcctgctggagggggag

SEQ ID NO: 779841 - DNA, 50 bp, Homo sapiens
aaggattccaagtaactcttatttgcaccaagcaatatcatttatgctgg

SEQ ID NO: 779842 - DNA, 74 bp, Homo sapiens
agaacactgatcatgacaaccaacaatcagctcatgatggagcagtccaagaagtcctccctcatggtggcccg

SEQ ID NO: 779843 - DNA, 98 bp, Homo sapiens
ctccagtcggtgttgagcacggcgagcagtctcaggcctttagtgatgatggaccaggagctgcattatctattctagacaaatttcttgaagaatcc

SEQ ID NO: 779844 - DNA, 75 bp, Homo sapiens
tgcagaccctggtctatgagaactacaacaagttcatctcagccacagataatgttaattcaagactctcgaaga

SEQ ID NO: 779845 - DNA, 75 bp, Homo sapiens
ctttattatgcaggtggtctgtgaagccacacagtgtccagatacgagggcacccagattggctgaaaacttctg

SEQ ID NO: 779846 - DNA, 75 bp, Homo sapiens
ccggctctgagggcactggcctagttcccgacttgtttctcagtgctccatgtgcatccctcttgaagcttcgca

SEQ ID NO: 779847 - DNA, 100 bp, Homo sapiens
atgctatgagtgtggcgaaaagggacattatgcttatgattgtcatcgttacagccggcgaagaagaagcaggtccgatacctggaaattagcttagtac

SEQ ID NO: 779848 - DNA, 73 bp, Homo sapiens
agaaaaccagacctccacttccaaggatatagagcagacctagaggatcaagacataatgggagcatttttag

SEQ ID NO: 779849 - DNA, 96 bp, Homo sapiens
caagaaacgaggactgatgcctggcctcacattttctaatgaacttattagcagagatgagggagttacccagggagattatacacctatggaaga

SEQ ID NO: 779850 - DNA, 100 bp, Homo sapiens
gaagaagcagcctcatttgttttctggtgtcatcgtaggtggccacctatggcttttgggcattactctactgactggcagagacaggagaggtagatgt

SEQ ID NO: 779851 - DNA, 74 bp, Homo sapiens
aggctacaggctttaagaaaaatgcctcacattaaacatgtggatctaagtcggatatgttgcggtcactatct

SEQ ID NO: 779852 - DNA, 100 bp, Homo sapiens
cccagcccgcccggccgcaggaccgccggggcctggccgccggtccggcgtgcgccaagttcagcgccagcagccctgtggtggcgacgacgatggacca

SEQ ID NO: 779853 - DNA, 101 bp, Homo sapiens
catttaattttagggtcctttatatagaagggagagccacatccacgtcctccgagcctacatcaagacccaagtgaacaaagagctggagcagctccagg

SEQ ID NO: 779854 - DNA, 50 bp, Homo sapiens
gtcgctgggaggtggcattcaaaggtggttctaactttgatggtttgaga

SEQ ID NO: 779855 - DNA, 146 bp, Homo sapiens
ttgaaactatggctaaattacatattccagtaatggtggatgaagttgttcattgtttgtcaccacaaaaaggacagggaagaactgctaaagctttgaggtcattacaatttacgaatccaggaaggcaaactgaatttgctcca

SEQ ID NO: 779856 - DNA, 75 bp, Homo sapiens
tgctgacctgataatgaagaattattttgcaccactggatgttgtttactgagtcttgctgtgtggcccaggctg

SEQ ID NO: 779857 - DNA, 83 bp, Homo sapiens
atgaaatcttccaagtccaaggatgtgatttttagactctgaggagcagttggagctaatccacattatggaaatggaaacca

SEQ ID NO: 779858 - DNA, 74 bp, Homo sapiens
aaagatgggatgcctattgctacaacccacacggcatgaatgctttacagttgcagaacctggcgacgctggct

SEQ ID NO: 779859 - DNA, 90 bp, Homo sapiens
tcagtcactggctgcaacaggaccacagtcaagacgatcatagtcactgctactcccgagcccggagaggacccacgcgtgacccgggcc

SEQ ID NO: 779860 - DNA, 98 bp, Homo sapiens
ggtgtccgactttggcctctcccgctacctccaggatgacacctcagatcccacctacaccagctccttggttggaatgttgcatcagcaggtagaag

SEQ ID NO: 779861 - DNA, 75 bp, Homo sapiens
tactgtcttcgtgatgaataaaaacatttcaactccctacagttgtgccatgccagacagtgagcaagctgacat

SEQ ID NO: 779862 - DNA, 74 bp, Homo sapiens
aggatttgcaccacgagatgtcactccagagatggtggttgctatttcaggcccagacataatcaaatccatgt

SEQ ID NO: 779863 - DNA, 82 bp, Homo sapiens
ccgaatcttccttcaggatatcaagtaagcgcaaagcctcagaagacctggaacaagattctgccatctctgtgatcccaag

SEQ ID NO: 779864 - DNA, 83 bp, Homo sapiens
caaaatatcaccaagggcttcagtgaagacagcgagttcctggggaaaaccccagggcaaaacgctcagaaatggattcctgc

SEQ ID NO: 779865 - DNA, 75 bp, Homo sapiens
ccccggtgcaagaggcgcaaacaagccaatcccaggaggaaaaacgctgtggaaatacaaagaactctgaatcaa

SEQ ID NO: 779866 - DNA, 100 bp, Homo sapiens
aaaaaccatcagtgtttgggaatgattctgatgatgatgatgaggaaggcccgaacaagacaggaacgtcctgtgccctggactgtggagctggcattgg

SEQ ID NO: 779867 - DNA, 95 bp, Homo sapiens
agatggcagccaccacgggctcgggcctctagactcaggactcaacaatgctttacaaggtttatctgtcatagacacataccttgttgaagtgg

SEQ ID NO: 779868 - DNA, 82 bp, Homo sapiens
cgccgagaggctcggtgggcgcgggcggcgaggaacatcatttacagcgagcaatttcagcacagcaagtgtttagagaaaa

SEQ ID NO: 779869 - DNA, 100 bp, Homo sapiens
agcgctattgaccttagctgatgaggatgaccgggaaatttatgatattataggaaccaaggctttagccttctcaactcattgactggaacaaaccata

SEQ ID NO: 779870 - DNA, 74 bp, Homo sapiens
cggtggagcgcagagcgggcgagcgcgagttctaaagttcctgttgcttcagacaatggatgagcaatcacaag

SEQ ID NO: 779871 - DNA, 80 bp, Homo sapiens
gtcgccagcggagcgaacccgagagcgtggagcgggctgggccagcaaacggggattcagcgtccgatcctttggaacag

SEQ ID NO: 779872 - DNA, 90 bp, Homo sapiens
cattgggtatattttataacaacagggtccattcaaattttaagtaagtacaaggtggactgtgcatgcctcaaagaaaacccagagtgc

SEQ ID NO: 779873 - DNA, 50 bp, Homo sapiens
ctacctactgccaattggaaagctatgaagacggccaagtgggagatgca

SEQ ID NO: 779874 - DNA, 100 bp, Homo sapiens
caggccgattatgtccattgttctcttggagcagctggtcatcatggtgggtgcctgaacctgcctttcaaagagggttttcttagaccgtggccagaag

SEQ ID NO: 779875 - DNA, 75 bp, Homo sapiens
caggccaatgtgaccgtggggacttgctcgggcttttgttcccagaaacaaccgcctccacgtttgataaacttt

SEQ ID NO: 779876 - DNA, 89 bp, Homo sapiens
ctgagaagtgtttgcataaaattaatgggaaaccccttccaggagccacacctgtcgttccaggggtagaggaggcatgaaggatgacc

SEQ ID NO: 779877 - DNA, 76 bp, Homo sapiens
agagatcattgcaaagcagggaggagtacaagatatggagcaattttacgaactatggctcaagagtcaaaaaaat

SEQ ID NO: 779878 - DNA, 83 bp, Homo sapiens
tgagagatggaacccgaagaagaaaggattcgttacagccagagattgaccaaactagagtcagaacgaatactagcatcagt

SEQ ID NO: 779879 - DNA, 50 bp, Homo sapiens
agcctctgaacttttgaagaatatgatcgagacatgtaagcagcatcatg

SEQ ID NO: 779880 - DNA, 90 bp, Homo sapiens
cgggtggaggttcgagcgctgttctcgctccggagccgctgcacatttcggaatataaatagtttctggaaaggacactgacaacttcaa

SEQ ID NO: 779881 - DNA, 83 bp, Homo sapiens
ccgcgaaatgctgaagcgctgtaaaactcagcttaagacgcaaacatgcagatctttgtgaagaccctcactggcaaaaccat

SEQ ID NO: 779882 - DNA, 96 bp, Homo sapiens
ctcggattaaggaataatttatgaagctccgttgactaccgtggagagatcataatttggggttcaagattccagacaaagctctgatggcaccaa

SEQ ID NO: 779883 - DNA, 82 bp, Homo sapiens
cgctgccagaagggctgagggcttctgcagatgctaagaagttgagcattatgaaagatgagccagaagaggctgagttaat

SEQ ID NO: 779884 - DNA, 89 bp, Homo sapiens
gcgtggaagctgtgagcgcccccatcccggaggtctccgccggctcccggcttgttctcagaacacaaacaaaacctgtgaagagtgcc

SEQ ID NO: 779885 - DNA, 101 bp, Homo sapiens
atcaagggagatcagaaggagaatccaggcggtcaggtactttgacccagccaacggcaagttcagcaagtcagccaccagccccgaagggaagaagctgc

SEQ ID NO: 779886 - DNA, 82 bp, Homo sapiens
ccacggggccgctgctcaagttccagatttggagatcatgaatcagacagataaaaatcaacaagaaatcccatcatacctt

SEQ ID NO: 779887 - DNA, 50 bp, Homo sapiens
cccgggcccagcccggcctagttcaggctcatcagattcaagagatgttt

SEQ ID NO: 779888 - DNA, 74 bp, Homo sapiens
catcaggaagtgtgctttcatcagacaaccagtttaatgaagggaaatgaggcaagttatcctttggaaatgtg

SEQ ID NO: 779889 - DNA, 100 bp, Homo sapiens
agaggcaccgggatcgtgaccgagaccgtgaccgagagcgtgaccgagagcgcgaatatcgtcatcgttagaaggtatctctcctaaatgtgtgatcaag

SEQ ID NO: 779890 - DNA, 101 bp, Homo sapiens
tgaagttcgataaagggccgtggctcaagcaggacaatcgcactttataccacctgcgattactatccactgtgtgtggagagtaatgcagcatcatgcca

SEQ ID NO: 779891 - DNA, 100 bp, Homo sapiens
tgatcggggatttcctgattggtgctggcatcagcacagacaccgctttgccgataggagaaccaggtgcatcagcgcattgcggagctgaggaaagcag

SEQ ID NO: 779892 - DNA, 90 bp, Homo sapiens
ccaacggagcgctgaggcgggcgttttcttggatgaattgcttgctttggagatgaggacggggacttggttgccttttccagtgacgag

SEQ ID NO: 779893 - DNA, 100 bp, Homo sapiens
agagtgataaatgctctagtggagcgaatacagatgcagaaaggccatctccagatcaagaggaaattaacccaagattggttatatgggattagatctc

SEQ ID NO: 779894 - DNA, 95 bp, Homo sapiens
gaactaaacggggtgaggtcacattcggttatctctaacgttggaaaacggccaagtcctgtatctgccatgtctgtggcgtccacctcaacagg

SEQ ID NO: 779895 - DNA, 98 bp, Homo sapiens
ttgtgcacccgttgcagtccttcagggccattcagcttctattacttccatacaggatccctttgtggccttccacatcaacaagggccttgtgaaga

SEQ ID NO: 779896 - DNA, 101 bp, Homo sapiens
ggcatcttctacaaacccatttcagaccaatgccagaggagcaacagcctctatcagacccgtttcagaagttacactgaagacagtgcatgaaagacaac

SEQ ID NO: 779897 - DNA, 83 bp, Homo sapiens
gtcacagacctgcccaatgcctttgatggaccaattaccataatttccaacatggctagatccatcagaaactgaagccgtgg

SEQ ID NO: 779898 - DNA, 100 bp, Homo sapiens
ggggcatctatattaccggctcctccatcattggtggaggagtgaaggcccccaggatcaagaccaagaacctggtcagtgtgtgctgacttgataagag

SEQ ID NO: 779899 - DNA, 100 bp, Homo sapiens
gactaaactcaatacagtggatgaccagaaagcaggtgtgggcaggaactgaggaggtggacaaagccctgctagccactggctgtgggaacgtggctcc

SEQ ID NO: 779900 - DNA, 75 bp, Homo sapiens
atcgaatgcgagaagccaaacaacgacctgagtaggtttcgcggctgcatttttcggctttgtgagaaaccttac

SEQ ID NO: 779901 - DNA, 83 bp, Homo sapiens
gcagcgcgtcgtggggcgagcggcagatgctgtgggccctgagggaaaggatcacagaggcgctgagccgggatggctacgtg

SEQ ID NO: 779902 - DNA, 95 bp, Homo sapiens
aggccccctgcccccttttcctggtgcatgtgaagttatcaaaaacagggaaggacatggagcccaacggcccgtcgctgcccagggatgaaggg

SEQ ID NO: 779903 - DNA, 96 bp, Homo sapiens
aaagaaagaaaaacctcatctaggattcggttcatgcttcaagatgttatagacctaaggctgctgaagaaatcaggggagaaacccctgcttggt

SEQ ID NO: 779904 - DNA, 98 bp, Homo sapiens
cgggacagcggcggcggcggaccttttggccatcttctcgcagagtgctccctgctaacggggacagaattcatcccacaggcatttggaatgccctt

SEQ ID NO: 779905 - DNA, 50 bp, Homo sapiens
gtcgtggtggtcattaagcggagatccgcattctcccagatggtgatcag

SEQ ID NO: 779906 - DNA, 51 bp, Homo sapiens
tctgcagattctgtaactgaaaaggctggtgaattaccatatctccgtcaa

SEQ ID NO: 779907 - DNA, 97 bp, Homo sapiens
tttcaatgtagtcaatgtgacatgcgtttcatacagaagtacctgcttcagagacatgagaagattcatactgtgttaatgtaccgcggtgaggctc

SEQ ID NO: 779908 - DNA, 83 bp, Homo sapiens
cgcagaagtcgcgtgtctaggtgagtcgcggtgggtcctcgcttgcagttcagcgaccacgatacctttgtctggatatggag

SEQ ID NO: 779909 - DNA, 97 bp, Homo sapiens
tagtccgttgatgtatcagccacaaaaaatggacttgactatgcactcaggtgatgcagacagaaagcattgtaaatttaagcctgatcccaatatc

SEQ ID NO: 779910 - DNA, 106 bp, Homo sapiens
gctcggagaaacaggcgccgcgggctccgcgcccggccggacccgggcccgaggagagagttatgtatgtggctccatagagcccttcaagaaactggagtacacc

SEQ ID NO: 779911 - DNA, 82 bp, Homo sapiens
tgctctccagcgctctcagcaccaagctgtagcaaggtgctgctgaggccacggacgtcggaggaggtgtcccacatcctca

SEQ ID NO: 779912 - DNA, 74 bp, Homo sapiens
ggcgagaactgatcctggacctggagaagaatgagaaaatgtttataggaggccttagctgggacactacaaag

SEQ ID NO: 779913 - DNA, 100 bp, Homo sapiens
ctgccagcaacacgggcgaccatgctgatgagcaggacggcgattccagataatgctaagtttgcaacagagagcacagaaacgtgcaagttacatcttg

SEQ ID NO: 779914 - DNA, 100 bp, Homo sapiens
cctgctggtggcaaccgcctacgagacactcaaggaagctgaatatggtgggcatgatcagatagatttgtatgacgatgtcatatctccatctgcaaat

SEQ ID NO: 779915 - DNA, 100 bp, Homo sapiens
tcccctctgcagcctctctgacaagtgattgtgggattagtgatatgcttttctaaagagtagaaaagtcgaagatgtctagacagaacttagtggcttt

SEQ ID NO: 779916 - DNA, 90 bp, Homo sapiens
cgccactgccgcaggaggcgtgagggaaattcaactactgaggaggttacggcacaaaaatgtcatccagctggtggatgtgttatacaa

SEQ ID NO: 779917 - DNA, 75 bp, Homo sapiens
gaggacgttcccttcacggagaaagattttgagtactccaaagattcaggtttactcacgtcatccagcagagaa

SEQ ID NO: 779918 - DNA, 67 bp, Homo sapiens
agaagacatactggcagcaggaaaacgttgtgtgacgtgatcctcatggtccaggaaagaaagatac

SEQ ID NO: 779919 - DNA, 82 bp, Homo sapiens
gatgactgagtacctgaaccggcacctgcacacctggatccaggataacggaggctgggtgttcgaaatccgcaccactgat

SEQ ID NO: 779920 - DNA, 90 bp, Homo sapiens
ctggagaactactatgtccagcctatttgcacaccatccaggagtcagtttattactggaaagattgatttccagagacttatgttactt

SEQ ID NO: 779921 - DNA, 98 bp, Homo sapiens
gcctcggcgattatggacccggccgaggcggtgctgcaagagaaggcactcaagtttatggtcctctctagagaatccagaaccccgaactcgggcac

SEQ ID NO: 779922 - DNA, 137 bp, Homo sapiens
gcaccaatgactacatccgagcccgcacggagtccagggatgtggacagtcgccctgagatccagcgcctggacactgggaagatgccagaagtggactatgtagttctgtcggaatggtttgactggatcttgagg

SEQ ID NO: 779923 - DNA, 48 bp, Homo sapiens
aacgtagacagagctaaaaggggtggagagattcaaccagttagcgtg

SEQ ID NO: 779924 - DNA, 83 bp, Homo sapiens
attcaaggttatgaatgaactgcggagctccctcgtgaaagatgcttctgttcctctgattgatgttacaaacctccctactc

SEQ ID NO: 779925 - DNA, 82 bp, Homo sapiens
gcagctacacaaagagggtcatctcttctattgtacctgcaggtcagaagaggccaagtgatggaaatagtggattaatggc

SEQ ID NO: 779926 - DNA, 82 bp, Homo sapiens
gacaaacagcccgcccgaccccgtcccgaccctggccgccccgagcggagcctggagaaggatatggccctgaagccacatg

SEQ ID NO: 779927 - DNA, 100 bp, Homo sapiens
cttcggagcccctccacaagttccatctaggcctacgagggccccgcccagtgtcccaagcaatgatcgtgcgcttcctgaccaagagattcattggaga

SEQ ID NO: 779928 - DNA, 100 bp, Homo sapiens
caactgtacaccaaagaggagcggaaatatggctacacacacctttctgcaggagagctgcttcgtgatgaaaggaagaacccagattcacagtatggtg

SEQ ID NO: 779929 - DNA, 50 bp, Homo sapiens
ccagaaggagctcaccattggctcgattcaggtttactcacgtcatccag

SEQ ID NO: 779930 - DNA, 73 bp, Homo sapiens
accttgctggctgctgccagcattgcttacatcagccggttcttcgtgaactttgtggttgggcaggatccgg

SEQ ID NO: 779931 - DNA, 90 bp, Homo sapiens
cagacaccggagactgggaaatggatcttaagattgaaagtgatgttcaagaaccaactgaaccagaggatgaccttgacattatgcttg

SEQ ID NO: 779932 - DNA, 74 bp, Homo sapiens
gcagaagttgctgagtgtcctgatggacagttaaatctcacacagaaacagatgagaaacaaacagagagccgc

SEQ ID NO: 779933 - DNA, 75 bp, Homo sapiens
ctcttcctcccttcgctcgcaccatgatatggctcgtggacagcagaaaattcagtctcagcagaaaaatgccaa

SEQ ID NO: 779934 - DNA, 100 bp, Homo sapiens
agcagttcaaccgcatgaagcagctggctaaccagaccgtgggcagaacattgacatcaccaatttcagcagcagctggagcgatggcctggccttctgt

SEQ ID NO: 779935 - DNA, 80 bp, Homo sapiens
gagtgagccagaacaaaaaaaagtaaaagccagaagacctgtccccagaagagaatttgctgaagaggagaaggaaaaaa

SEQ ID NO: 779936 - DNA, 100 bp, Homo sapiens
cgagaaagtgccttggaaaaactcaggatggtgatgggaatctttgcaaattgtatcttctgtttgaaagtgaagtacttacctcagcagcagaagaaaa

SEQ ID NO: 779937 - DNA, 100 bp, Homo sapiens
cggaccagcccccctcacccggcaagcctttgaaaacggcgttagaatggtattgttgcagcatctggcagtgagactgaggatgaggacagcatggaca

SEQ ID NO: 779938 - DNA, 95 bp, Homo sapiens
ggcgcgtgtcgggttttgagctgccgcggtcccgggactgaggaaaaagagcctgtggatttctcagtcaaatctcaagcggatagagaatttca

SEQ ID NO: 779939 - DNA, 98 bp, Homo sapiens
caatcaaaagctattggctgtgtctttgctggactgtactgtgaaaattttctacgttgatactttaaagacctacctggtggttctgtgccttcccc

SEQ ID NO: 779940 - DNA, 100 bp, Homo sapiens
cacgagaattccgcagcccacacggaaatggcaactgctgacaggaagtttggcatccacctcccccagcctcctgagtggacaggggccctgggcacca

SEQ ID NO: 779941 - DNA, 100 bp, Homo sapiens
ctttaacttcaaacctgacaaatgtgcaatcttaaaagaaactgtgaagcaaattcgtcagatcaaagaacaaggcagtataactccaactgtggaactg

SEQ ID NO: 779942 - DNA, 100 bp, Homo sapiens
acgtacccgccgccgccgttggctggaggggtgagcccctccagactccgaataggagatcaagagtttgattcattgcctgctttactggaattctaca

SEQ ID NO: 779943 - DNA, 74 bp, Homo sapiens
gcggacggtgctggccccgggcaacgatcggaactcggacacggctgaaactgccgccaaccggatctgtaagg

SEQ ID NO: 779944 - DNA, 51 bp, Homo sapiens
gcacctagggggcggctaccccgtgggcactattcctgatcagagaactcc

SEQ ID NO: 779945 - DNA, 50 bp, Homo sapiens
gaggattcttatgtggctagtttgcaggctctagaccaagatagaacagc

SEQ ID NO: 779946 - DNA, 100 bp, Homo sapiens
ggtgccaaggagtcacggatcggattcctcagctacgaggaggcgctgaggagaggcaggtgacaaacattaccaccccagctgtgcacgatgcagcaga

SEQ ID NO: 779947 - DNA, 100 bp, Homo sapiens
attttaccggaacaacattttgtgttgcagttgactccctcaatggattggtttacataggtcaagattctggagtgaagcagatgttactcgacctttt

SEQ ID NO: 779948 - DNA, 100 bp, Homo sapiens
gaagcagcaactcgatggccttcctggcacacattcgcactcacacagtgaaatggacttcctcaaaaatgaacactttgccatcccagcagtttgtgac

SEQ ID NO: 779949 - DNA, 83 bp, Homo sapiens
tcagtctagaagggtagtaatttctcataatatggataaagctctgaaagaaggtaatagcctgcagctggtgttttgagaag

SEQ ID NO: 779950 - DNA, 75 bp, Homo sapiens
gtcgccgctggagaggggctcggcgcccggcggggactgcaggcgagctcggctctggactgtaaagacagcctg

SEQ ID NO: 779951 - DNA, 75 bp, Homo sapiens
aaggaaccgctctcgcttcgtcctacacttgcgcaaatgtctccgaaagcggcagcccagaatctcgtgttaatg

SEQ ID NO: 779952 - DNA, 100 bp, Homo sapiens
aacaaggtgaatattgtgcctgtcattgcaaaagctgacactctcaccctgaaggaacgggagcggctgaagaaaaggctagctgacgtggtggacagtg

SEQ ID NO: 779953 - DNA, 100 bp, Homo sapiens
ctgtgcgcgcgtgcgcggacatggcctcaaacggagaatggggtactaagagaaaagcacgaagctgtggatcatagttcccagcatgaggaaaatgaag

SEQ ID NO: 779954 - DNA, 76 bp, Homo sapiens
ctttgacaagtgatgagaagctgtcggagcttcccaagggaacaagctaccctctgagtcagcactggacttgaag

SEQ ID NO: 779955 - DNA, 51 bp, Homo sapiens
accaaggacagcttttttcctgcaagtgcctacaccaactaatgttacaat

SEQ ID NO: 779956 - DNA, 50 bp, Homo sapiens
cgtgacttagaaggtggtgcagaggtggtggcggtggaggacagcagcga

SEQ ID NO: 779957 - DNA, 75 bp, Homo sapiens
ctctcgaccccttctgcccggcgcttcggcccgggccgctcaggtgcaggaagaaccgggactatggtttgtgcc

SEQ ID NO: 779958 - DNA, 100 bp, Homo sapiens
cagacgatgaaactcagctgacattctacacggagcagtaccgcagtcgccgccgcagcaaagatacaccatcagttaagattataccatcgactccttt

SEQ ID NO: 779959 - DNA, 75 bp, Homo sapiens
tcaccctgtaccagtccaataccatcctgcgtcacctgggccgcacccttgcatcctgatggcgtacactgtggc

SEQ ID NO: 779960 - DNA, 80 bp, Homo sapiens
caataaccacggagccggcagcggcgcgggaggccgtgcggtgtggaagccagctctccaggccacggaagtcctctgag

SEQ ID NO: 779961 - DNA, 82 bp, Homo sapiens
ctgtccccgaggaggggaccatgacacacttcctgggtctgcaggtccagccggctggcaccctccatgtacccaggggaga

SEQ ID NO: 779962 - DNA, 98 bp, Homo sapiens
cctaatgacagtctccaaattcgcctccatctgtaccatggtcgtccctgatggcccctggaggcgaagctcatcacaggatgaggaaaggacagagg

SEQ ID NO: 779963 - DNA, 98 bp, Homo sapiens
ccgtcatggtggtcaccctggttgctcacccaatccggcccaagcctccctcagccaccagcatcccggccattctgaaagctttgcaggatgagtgg

SEQ ID NO: 779964 - DNA, 75 bp, Homo sapiens
gtctgcttcggagaccgtaaggcagcgtccgtctccaagagagtatgaagagagtgcgtctgtagggcagggaag

SEQ ID NO: 779965 - DNA, 90 bp, Homo sapiens
gatcaatccagatggcagccagtcagtggtggaggcaacagctgaacagatgcgtctcgctcaagtgatctttgataagaatgattcaga

SEQ ID NO: 779966 - DNA, 100 bp, Homo sapiens
tggagaactagtcctcgactcacgatgtctttggtggacttgggaaagaggttgctagaagcagcaagaaaaggccaagatgatgaagtgagaacgttga

SEQ ID NO: 779967 - DNA, 74 bp, Homo sapiens
gcagtggtcgcttcttctccttgccttttccccacgactctgaaagaggacagcgttcccaatgtcccagttta

SEQ ID NO: 779968 - DNA, 75 bp, Homo sapiens
gacttcaagaatgaagccacggaccctcgcggctggaggctcccaggtgattttcacaaatcctttagaaatcgt

SEQ ID NO: 779969 - DNA, 100 bp, Homo sapiens
ctgaatgacatctacctccatcaggaccccagatgtctgacagccctgtgtgacaccaagataagtaacagggctggttttcagttacacccgagaagat

SEQ ID NO: 779970 - DNA, 101 bp, Homo sapiens
agaagtttaagagaagaaatggacatgattgcctaaatcagccaaacacagggtactaggttttgacaagcttgcatcatgcgtgagtataagctagtcgt

SEQ ID NO: 779971 - DNA, 75 bp, Homo sapiens
agataggaaagccagcaaaggcaggaaacttcgcttatatagaattggtgataggatcacaacttctgaggtccc

SEQ ID NO: 779972 - DNA, 83 bp, Homo sapiens
ctcgtctcccgctccgccctcccttttccctgcttggcagcagcatgatgtacaagaactatgcagagtcatgtttgatgctt

SEQ ID NO: 779973 - DNA, 75 bp, Homo sapiens
caatgatgtagccacctcctaaccttcccttcttgaacccccagagatgcccgagtggtaaaagacatggcaaca

SEQ ID NO: 779974 - DNA, 83 bp, Homo sapiens
gtcggcggctcagttgtccatgaccctgaaggtccaggagtacccgaccctcaaggtatggatcctggcgggagccagtcaac

SEQ ID NO: 779975 - DNA, 83 bp, Homo sapiens
ttaaccagcgcgacgagggcgccgccgcggccgccccagtacctggagtagaacagaaaaattattatgtctgtgttcccttg

SEQ ID NO: 779976 - DNA, 101 bp, Homo sapiens
cttcgccgcgccatcctgctgctcagcccacagggagcccactccttcatcaacgaggacttcccggggttaagtgacgattattatggagcaaagaacct

SEQ ID NO: 779977 - DNA, 101 bp, Homo sapiens
gcctctcccgcccctgtctcccgctccgcagccccgggcacggcggaggcagcggagccctgggccatcggttagcactctacgtatatgaatatctgctc

SEQ ID NO: 779978 - DNA, 107 bp, Homo sapiens
gcaaagtaaatgctgtcttttcccaaaagacaggctcttcacctgaagacagtaaggattgtatcctggagccgctttccctgccagaaagtccaggtggcaccacc

SEQ ID NO: 779979 - DNA, 100 bp, Homo sapiens
acggcccgctataatggcttcaacgtgcgcccccgtgaggcccaggtgcagctgaacgtgcagtatgcagaggccaggatgtgggcccagccctgtgcca

SEQ ID NO: 779980 - DNA, 100 bp, Homo sapiens
atattgactccatttgaacgaaatttggacttttggcgccagctctggagagtcattgagagaagatgcagggggaggcacaccctagtgcttcccttat

SEQ ID NO: 779981 - DNA, 75 bp, Homo sapiens
gcctcggagcaacgagcgcagcgccggtcgcaatggaagaagagatcgccgcgctggtcattgacaatggctccg

SEQ ID NO: 779982 - DNA, 74 bp, Homo sapiens
acagcagggcggaggaaagtgcagaaatgcctccacggctgtgtacgcctgttgcaaccccatccaggagacat

SEQ ID NO: 779983 - DNA, 100 bp, Homo sapiens
ctcagatggccagtttgccctctcaggctcctgggatggaaccctgcgcctctgggatctcacaacgggctggctgtgggcaatggactctcctcctatg

SEQ ID NO: 779984 - DNA, 78 bp, Homo sapiens
caatacttgttggtttagtgctgttattcaggatgaggaagatggagagaatgcccacccatatagaaacagtgaccc

SEQ ID NO: 779985 - DNA, 90 bp, Homo sapiens
gcggcgccatggcagggcttgcagctccatgtgtcctaccagaagtacttcaagctggagcccctccaggcttaccatcgggtcatcagc

SEQ ID NO: 779986 - DNA, 100 bp, Homo sapiens
ccaggaccacctggaagcctagaaatgcatgctacaagtgaaaactgatgagaaactgaatgtgtctgatgagaatacagcaagttgccctttgagcccc

SEQ ID NO: 779987 - DNA, 95 bp, Homo sapiens
aacacctggacaaacagatatccagatgctaaaatggacccaatgaacatctgggatgacatcatcacaaatcgcaggagcgagaacccgagcag

SEQ ID NO: 779988 - DNA, 100 bp, Homo sapiens
ctgggagcgacgcggggcgggccctgggggtcctcagcgtggtctgcctgctgcactgctttgactatccccataaatacggtcctcaggggggctgtgc

SEQ ID NO: 779989 - DNA, 82 bp, Homo sapiens
tgtattttggaagacaatcccaggctgatgatagcactggctttcacagggattagccttctggtggtgggcacaactgtgg

SEQ ID NO: 779990 - DNA, 100 bp, Homo sapiens
agaccagcctgggcaacacagtgtggcatgggggaaaggaatatggctaataatcactatgcaaaataagaaatgcatttaaaagttgatacagtatgga

SEQ ID NO: 779991 - DNA, 74 bp, Homo sapiens
tatctcctgacagagctgaccctgaagctgcctgcatttgcatcaagtgtgggcttggcatctacggagcccag

SEQ ID NO: 779992 - DNA, 75 bp, Homo sapiens
gtcacattatttgaggtggtgaaactggggaaaagtgcaatgcaggcatgctgaggtgatgaagaaaatcattga

SEQ ID NO: 779993 - DNA, 100 bp, Homo sapiens
ttacttgttggggccctcttgataaaaagagatgtggggggattctcgacctgctaacagaactggaccttttcgaatggctgttgatggtgggtgtggg

SEQ ID NO: 779994 - DNA, 100 bp, Homo sapiens
gacagcgctggggccctgtgtagaagctccatcccccttgtctttgtgcttgcctgcgtccccagactcagaggagaacttgcgcctgtcaggggctgga

SEQ ID NO: 779995 - DNA, 100 bp, Homo sapiens
aaggcggagatccgctacgagggcatcctctacaccatcgacaccgaaaactccaccgtagcccttgccaaaggtactccaaagattcaggtttactcac

SEQ ID NO: 779996 - DNA, 82 bp, Homo sapiens
cgcgcgcagggcctgcagcgggagctggacggcgagcgcgagcggcgcgagaaatggagaccatcctgggcctcacaggagc

SEQ ID NO: 779997 - DNA, 83 bp, Homo sapiens
ggagaacatctcgctgtcggtgaagaagaggctgccattcgctgcaaggttgaacacccccatgggccctggacgaactgtcg

SEQ ID NO: 779998 - DNA, 100 bp, Homo sapiens
ctgtgagcctagggacccatttctcctcctttgacagggacatcagtggagccttctcagacccacaggatggcactggatctttaaaacgcagtggttc

SEQ ID NO: 779999 - DNA, 100 bp, Homo sapiens
tacaacaagcacattaacatcagcttccacagggccgagatggacgaaaaaatgtggttccttgtgttctctctgtaaatggggacctagaccgaggcat

SEQ ID NO: 780000 - DNA, 100 bp, Homo sapiens
tgcaaggagcatcctcaacaagttcatacctgatatctatatttacacagatcacatgaaaggagtcaactctgggaactgttgttggcctactgtaccc

SEQ ID NO: 780001 - DNA, 50 bp, Homo sapiens
agggcttcaacaagctagctgagcaagttggaattgacagaggtgatata

SEQ ID NO: 780002 - DNA, 75 bp, Homo sapiens
ccagaacctgaggagagaatggcatgccaggaaccaaccggtgagccctctcctaagagacccaggggaagaccc

SEQ ID NO: 780003 - DNA, 74 bp, Homo sapiens
ctcccacggattctacattatgaaacgcttcgttaagggactcaggcagtacgggaagaacttcttcagaatta

SEQ ID NO: 780004 - DNA, 75 bp, Homo sapiens
gtcagctttctccaatctttctacatcccagagacactgcccatctctaagataagaacctggaaaggggactct

SEQ ID NO: 780005 - DNA, 82 bp, Homo sapiens
ctgcaatatggcggaggcggaaggggaaagcctggagtcctggctcagcttgggcactgtttaaaggaaagttccgagaagg

SEQ ID NO: 780006 - DNA, 100 bp, Homo sapiens
caggaccagaccgtggtgtttgtggccacgaagcaccacgccgagtacctcactgaggttgctccttgagggcaggacagttcttatggctttatccgtt

SEQ ID NO: 780007 - DNA, 100 bp, Homo sapiens
gaacccaacctagtgggtgtaatacatcatgaactgcagggtgaagagcgattatatgttagagatagctgatcaagtggaccaggaaattgctttgaag

SEQ ID NO: 780008 - DNA, 100 bp, Homo sapiens
attcaatgaaaacgtattcttaaaggcgaaaaaggtggatttgctaggtctgtgggttctggcaccacctgagcccactgggcatctggtcatccctggc

SEQ ID NO: 780009 - DNA, 75 bp, Homo sapiens
gggaccttctccctgcctggacccctactattgcaacaaggttttactcaagtgaacatgaatacagtggattaa

SEQ ID NO: 780010 - DNA, 80 bp, Homo sapiens
actatggaaaagttgccaaattgggttttgacccaccacatcagagtgacacaagaaccatctacgtagccaacaggttt

SEQ ID NO: 780011 - DNA, 75 bp, Homo sapiens
ttgctggatattgatgcgccagtcactgcactattggaaataattatgaaaaatggaagcacggctggaaatagc

SEQ ID NO: 780012 - DNA, 96 bp, Homo sapiens
gcaggtcgaggacggtcggactcccgcggcgggaggagcctgttcccctgagggatgactggaaaccatacaagcttagaagactatactttattt

SEQ ID NO: 780013 - DNA, 98 bp, Homo sapiens
tccgggatgagcgcacggacggaaacctctgtagaggagcaggatgcaaccgacaggctgtggccggacagctgctgcccagcacatggagcctgcac

SEQ ID NO: 780014 - DNA, 102 bp, Homo sapiens
gccccagccaagcaatgcaggaatatatcgcagtagttaaaaaactagatccaggttggaatcctcagaaggacagaataacgggctcccagattcacaagc

SEQ ID NO: 780015 - DNA, 148 bp, Homo sapiens
agaaaaagacaaatacaagtgaaaaaaatagactaatggattaacgtccctgtcgtgtgacattttctgaaggagctggcaaacagccctgactgtccccagatgtgtgcctataagctggtgaccatcaaattcaagtggtggggac

SEQ ID NO: 780016 - DNA, 75 bp, Homo sapiens
cgtgttggaccttccggagcttctcagaagacagagggttttcttttgagtgagatggaagattttcgaggtata

SEQ ID NO: 780017 - DNA, 82 bp, Homo sapiens
agcgacaagccgctggcagccgcggatctcaccgccgctcagggccgagacgcatccagagctttcgtgaccggggactgtt

SEQ ID NO: 780018 - DNA, 98 bp, Homo sapiens
acactggcaactttgaaaatgtctgtacagccaacggatacgcagctccacctggatgatgccctccggggccaggaggacctgaaggagcagctggc

SEQ ID NO: 780019 - DNA, 98 bp, Homo sapiens
ctagtcctggtggatctgcagtacgaagataaggagggttcctgcccccaggtgaacattaactttccccagctcggcctctgtcgggaccagtgcca

SEQ ID NO: 780020 - DNA, 100 bp, Homo sapiens
tagtacctcctaccattgtcaactggtatggcatttcaaatatagatacaaccattgaaggaacgtcagatgacctgactgttgtagatgcagcttcact

SEQ ID NO: 780021 - DNA, 100 bp, Homo sapiens
aggctcctggaaaggaccgtccacccctccgcgctggcggtgtggacgcggaactcagcggagaaacgcgattgagggcaagaatatcacggcatgggca

SEQ ID NO: 780022 - DNA, 75 bp, Homo sapiens
tctggcccacccagcagtggccagctgaagataccgattacgatccacttcctcatgatactgtcttctaactgg

SEQ ID NO: 780023 - DNA, 82 bp, Homo sapiens
aacttcagggtttccaccgttcgttcaaggttaacacagaaatctgcctcctgggccatgccgcttctaaggcctgtttctt

SEQ ID NO: 780024 - DNA, 100 bp, Homo sapiens
ggagcccccgcgcgcccggccggcccggagcaccgagctcgcggcacggtaggaggtggtgaagctgctgctgcggtacggagggaacccgcagcagagc

SEQ ID NO: 780025 - DNA, 100 bp, Homo sapiens
agcaagaaggccctggacacagcaatatctctgggctttcacagagggaaccccttacctggaatctggaatcagcctcttctctgatgaccctgaatct

SEQ ID NO: 780026 - DNA, 75 bp, Homo sapiens
tggatagagccattgaagacaccagacctgctgggtgtaccaacagtaccgttattgccaccacaagtaaaccag

SEQ ID NO: 780027 - DNA, 100 bp, Homo sapiens
tacaggaacctggcctctgtggcttggaatgcactccctccacctccaaccagagctccccacaactgaccctgccttcttctgcaagctccatttcatc

SEQ ID NO: 780028 - DNA, 82 bp, Homo sapiens
tgtatgaacccagggcactgtggggacagggcgacgtgtgtccaggcgtttgccgttcgtaggtgtaaagctttgaaggaaa

SEQ ID NO: 780029 - DNA, 101 bp, Homo sapiens
tacacattgtgctattcactctgctttacaaggtggagattttcattttacctttatgtatttacctacggagtcagattcctgaaaaaggtaggatctct

SEQ ID NO: 780030 - DNA, 101 bp, Homo sapiens
agagactattacagacaatacaatcgggatgtctgctaccgctgccacggccccccctgctgccccggctggggagggtggtccccctgcaccccctccaa

SEQ ID NO: 780031 - DNA, 74 bp, Homo sapiens
tgttcagttacaagagaaactttatgtgcctgtaaaagaatacccagatgatgacgatgactattcatcatcta

SEQ ID NO: 780032 - DNA, 75 bp, Homo sapiens
gagctccggggtgtgtggacgccgctttgttgcctgaggagcagcatggacctgtcagcaactaaggaacaaaag

SEQ ID NO: 780033 - DNA, 75 bp, Homo sapiens
gaagatggaacttaccagtacaccttcacagaacccagtgacttgattgtaaaaatttacagagcggaatcatat

SEQ ID NO: 780034 - DNA, 75 bp, Homo sapiens
tttgggtcgcagttcttgtttgtggatcgctgtgatcgtcacttgtggtaagcatccgtggcattcaagacgaag

SEQ ID NO: 780035 - DNA, 76 bp, Homo sapiens
cagaaactcagccactggttgccttggtaggcaataaaaaaagatcaactgaaatcggcaaacttctgagttccta

SEQ ID NO: 780036 - DNA, 148 bp, Homo sapiens
agctgagggaggcgcgagggcgcggagttccaggtcgagcagttaggccgcgagcgactgcggcgccgagccgggcactgcacttggctgtgattcatcagcatgaacccttcctggattttcttctaggcttctcggccggcactga

SEQ ID NO: 780037 - DNA, 83 bp, Homo sapiens
cctcactaatgagctctccagaaaattgatgcagttttcggctttgtgagaaaccttaccatcaaacacgatggccagcaacg

SEQ ID NO: 780038 - DNA, 75 bp, Homo sapiens
tgtagctctccaggcttgcaagcgattaccagattcccagaagttgtgcatgagttcctgtgaggagagttggca

SEQ ID NO: 780039 - DNA, 100 bp, Homo sapiens
tgtggaaggatcaacagtcaattgtgtactagcattccaagatgttgaaacatttgtagcagatatactgaaaggagaaaatttatccaagaaagcaaag

SEQ ID NO: 780040 - DNA, 82 bp, Homo sapiens
ggtgccctccatggccaggaggacacccctggtggcctgcttgcaaccatgtccaagggacctgcagttggtattgatcttg

SEQ ID NO: 780041 - DNA, 97 bp, Homo sapiens
aatatttaatggaaaatcgcttggttaaaacctgacacttttaacaggactccatccccgtgtctacctccctccttggagacacttccgacacgac

SEQ ID NO: 780042 - DNA, 82 bp, Homo sapiens
tatttgtgttgttactgatgcagagatacagcaaaagagtctacatagagttatgcccagccaagtcttcagtatatccagg

SEQ ID NO: 780043 - DNA, 75 bp, Homo sapiens
ggtccctgaagagggaagacacgcggaaacagtgtactaatggtcacttgatgtgcgctggctgttttatccacc

SEQ ID NO: 780044 - DNA, 99 bp, Homo sapiens
agtctgctggacacacctgccaagagagcccaggccgagttccccacctgcgattgcgtcggctccactttgaggctctgatgaacattccagtgctgg

SEQ ID NO: 780045 - DNA, 100 bp, Homo sapiens
ggctgctgggattccatccacgtggtagaagtgcaggtgaacgtgttgtagcctttgctgcagtggaaggcattttcttttccggttcttttgcgtcgat

SEQ ID NO: 780046 - DNA, 82 bp, Homo sapiens
ctgagcttggcgcacgggccgaccagcggaaggagagttttacatggaagtggcttacagaaacttggcgctgaggtgcagg

SEQ ID NO: 780047 - DNA, 100 bp, Homo sapiens
gcccccagcctgtggacgcctggcccaccctgagtgtgtagaatgagccaaggagactcaaacccagcagctattccgcatgcagcagaagatattcaag

SEQ ID NO: 780048 - DNA, 96 bp, Homo sapiens
gtcatcgccagcggcttcttcagcgttttcggcatgtgtgtggacacgctcttcctctgcttccgggttgtgtccactgtggtccccgactctgcc

SEQ ID NO: 780049 - DNA, 100 bp, Homo sapiens
agttggtgagcagcgctctggggctcgccttgtatctcaacaccctgagtgcggatttctgctatgatgacaggatttttcaagccacattcaattgata

SEQ ID NO: 780050 - DNA, 80 bp, Homo sapiens
gtcaggatatgtgcctttcagctttaaagagaattgaaggttgttgatcattatgaaaatcctagaaacgtggggtccct

SEQ ID NO: 780051 - DNA, 87 bp, Homo sapiens
gaagctgaggatgaagaagatgatctctctcagccttgtctgcttatcacactggcttgatcgcgcccatgaagatccgcacagagg

SEQ ID NO: 780052 - DNA, 90 bp, Homo sapiens
gtcgaggagccggggcagggcacgatggcggactgggctcgggccactgtagtctgcagatcaaagctctggcgaaaatccatgcctttg

SEQ ID NO: 780053 - DNA, 100 bp, Homo sapiens
cgaaatggattggagtgaaccggagaccccgaaaacggaagcgcagggagaaggaagaggtgtttgaaaaggtcctcgaggccacacgggttaatcgaag

SEQ ID NO: 780054 - DNA, 100 bp, Homo sapiens
ccagtagcaggacccggtctcgggaccagccgcacgaaagcaagagattatcaaagtcactgaacaactgatcgaagctatcaacaatggggactttgaa

SEQ ID NO: 780055 - DNA, 75 bp, Homo sapiens
tcatcttgggagtgatttgcgccatcatcctcatcatcatcataggtcttaaaattttggtagcagaaagcaaat

SEQ ID NO: 780056 - DNA, 83 bp, Homo sapiens
ccgctgaggcttatttgggaaagaagatgtggcaaaatctggcaaaggcagagaccaaacttcatacctcaaactctgggggg

SEQ ID NO: 780057 - DNA, 87 bp, Homo sapiens
caaatcttgcggcaacgcccccgggacatgcatcgtcccctggactctctcaaatgccttcaattaagttgcagagttctgatggag

SEQ ID NO: 780058 - DNA, 75 bp, Homo sapiens
gttaaagggaagcgggtcgttatgaggtattgttgcagcatctggcagtgagactgaggatgaggacagcatgga

SEQ ID NO: 780059 - DNA, 82 bp, Homo sapiens
cttaagcaaacttaatataccagacactgcaactggagctctcaacttaatcatccttcagcaaaaaagaattaagactagg

SEQ ID NO: 780060 - DNA, 100 bp, Homo sapiens
cctgcatccttcgcgggaacttcgcagaagcccatcagagttttgatgatggagactattttcctgtgtggggcacatgccttggatttgaagagctttc

SEQ ID NO: 780061 - DNA, 82 bp, Homo sapiens
gctgggtcagtccgccgctcaccccgcggccgcaccttcccgccttctcaggactggagactgatgcatgagggggctacgg

SEQ ID NO: 780062 - DNA, 75 bp, Homo sapiens
ggtcacttcatttaccaaccctggaaccgcagacctctgggcttcctgaacattgggtgctttctgcttgaagtt

SEQ ID NO: 780063 - DNA, 71 bp, Homo sapiens
cctccttggtcgccgcgtccttggctggcgtgccgagacgcatccagagctttcgtgaccggggactgttc

SEQ ID NO: 780064 - DNA, 90 bp, Homo sapiens
agtgaacaccgagagtgagacggcagtggtgaatgtcacctattccaaccgggagcagaccaggcaacggccaatgggaacgtggaggcc

SEQ ID NO: 780065 - DNA, 88 bp, Homo sapiens
tgtacaggtcgcgggagtcgtagggaggacgccgggacacctggaagccgagaaatggccatgcacttggtgtaccgagccctggaga

SEQ ID NO: 780066 - DNA, 83 bp, Homo sapiens
ggagaacctgcccttcgccaaggagatcgtctctctcatcgaggcccaaaccgccaagaccattgccctcttgaacatttacc

SEQ ID NO: 780067 - DNA, 82 bp, Homo sapiens
gaagagcgacaagccgctggcagccgcggatctcaccgccgctcagggtgctgccttcacctgcctggagactgccttccgc

SEQ ID NO: 780068 - DNA, 97 bp, Homo sapiens
gttggggtgtccgagttgccgccggagaggagtggcctcgcccgcttgggttttcttaatgctcaaatggtcgcccaacgcagcagagagctgctaa

SEQ ID NO: 780069 - DNA, 96 bp, Homo sapiens
catcgcttcggaggggaaggctgaggaaaggatggatgacatccagctctgcaaggacatcatggacttgaagcaggagctgcagaacttggtcgc

SEQ ID NO: 780070 - DNA, 100 bp, Homo sapiens
cttcctcggcgcccccggccgctaccgctcaggtgctgcaggcacagcccgagaaaccgcagcactacacatgagcacaatgcctggactccccacccgg

SEQ ID NO: 780071 - DNA, 74 bp, Homo sapiens
caaatattgtggaggtggaggtgattctgaaaaatgctgtgcctttcaaaagtgaagaacagtccagactggca

SEQ ID NO: 780072 - DNA, 101 bp, Homo sapiens
gtggacacactcagcattttgagctttcccagtgcctccagcagccctcctcaaggacccctgtgaggccaggcagaaatggcgtggcaggggacccagcg

SEQ ID NO: 780073 - DNA, 98 bp, Homo sapiens
agcaccattcctaggctgggagcaaaacggtgacactggagaccaccattggcaacaagaacccagccctgtggaagtatgtgcggcccaggggctgt

SEQ ID NO: 780074 - DNA, 134 bp, Homo sapiens
gccctcagttcccggccaggacacggtctgggccgccgaatctccggccgaagagcggcggcggcagcggcgacaatgcagatcttcgtgaagactctgactggtaagaccatcaccctcgaggttgagcccag

SEQ ID NO: 780075 - DNA, 74 bp, Homo sapiens
ctttccgccctaatggaggtctccagtttcggtttttcgttggaatatacgttgcacatttatggcgattctga

SEQ ID NO: 780076 - DNA, 75 bp, Homo sapiens
gaactccaggacagcatccaggcctcattggacagcattcgagcccaagaagatgaaaggattgttcttgttgac

SEQ ID NO: 780077 - DNA, 75 bp, Homo sapiens
acaccttcctgtgcagtcctgttggaatttgtcagtttaggggctggtgcaaaggatgagttgcacattgttgaa

SEQ ID NO: 780078 - DNA, 90 bp, Homo sapiens
gccacagaaataaaagatgaacaaaaatctgggacaggtgtaccttcagttgaatttttagaatctcccattacggcagtagacagccca

SEQ ID NO: 780079 - DNA, 96 bp, Homo sapiens
agctggtttgtcaaaatccaaaggaagccgaattggatttgatagcacacagtgggcccatgtccctgagcaccattgcaatcctgaattctgtca

SEQ ID NO: 780080 - DNA, 100 bp, Homo sapiens
tccgaaaataaataccaagacattctcaatgagattgccaagccgaaaactaaatgtgacccttacgtacttgagcatggagatgaagtcaaaattggag

SEQ ID NO: 780081 - DNA, 82 bp, Homo sapiens
tggaggatgatttcatgtgcgatgatgaggaggactacgacctgagcttaatgattaagagagagttggcaaaagattctga

SEQ ID NO: 780082 - DNA, 75 bp, Homo sapiens
caccggatcaacttcgacaaatagttgacaaggtcacaggcaggtttaatggccagtttaaaacttatgctatct

SEQ ID NO: 780083 - DNA, 90 bp, Homo sapiens
ccgtgcggcagcagctccagagctttgtcaaagaaaccaacatcccgggtaaccgggtggctgaaggacaggtgacgtgtccctacctcc

SEQ ID NO: 780084 - DNA, 90 bp, Homo sapiens
gcctcccacagaaggtggcagaaagacttgatgaaatatttcagacaggtgctggagaatctggtaaaagcaccattgtgaagcagatga

SEQ ID NO: 780085 - DNA, 100 bp, Homo sapiens
tgaatacattgatctggtcagcagtgatgatgaagagcctagcacctcttatactgattgatgtcttggcattgcccattttcaagcaggaagattccag

SEQ ID NO: 780086 - DNA, 83 bp, Homo sapiens
cgcgggctggcgacgtagaggaggacgcctcacagctcatctttcctaaagctctaagcgaaagacatgaggcctcagcctga

SEQ ID NO: 780087 - DNA, 83 bp, Homo sapiens
gagtccagaaaagaagcgaaggaagtcaaatactcaggtgtaatgtctttgctgagaactcttcttctggacgtggtcccaac

SEQ ID NO: 780088 - DNA, 73 bp, Homo sapiens
attgagaaacaggcacacaagtgtgaggagttgctaaatgctcaggaaaactaggtgtctgtgttcactccag

SEQ ID NO: 780089 - DNA, 100 bp, Homo sapiens
ctgacggtgctcagagccttcccttgtcggagccggctcggggacgcagagactgcagctgccatcgaagaggaggtctccgggcttaacaacaacgaag

SEQ ID NO: 780090 - DNA, 80 bp, Homo sapiens
aaagacagtcctcgtcagcactgactttcagctatggaatcggaggatacgaagcgttttcggcttcctgcccggagctg

SEQ ID NO: 780091 - DNA, 76 bp, Homo sapiens
gtgatgctttcaaacagtgtcaatacaaagatactctccccaaggtctgttgcggttctcccacttttccataagc

SEQ ID NO: 780092 - DNA, 50 bp, Homo sapiens
aactacagaaacctggccttcctggtttaaaattggtggtgaatggtgga

SEQ ID NO: 780093 - DNA, 136 bp, Homo sapiens
ccgcggaaatgttgtccaaagttcttccagtcctcctaggcatcttattgatcctccagtcgaggtttttcgttggaatatacgttgcacatttatggcgattctgagtgtgagggcagacttctgccaggctcag

SEQ ID NO: 780094 - DNA, 124 bp, Homo sapiens
cagaagttccccttagctgggacagtttcaacaagggtgactgcttcatcattgaccttggcaccgatcttcagcctgttaaacaagaaaacgaaaaaccccttccagaaaacatggatgcatt

SEQ ID NO: 780095 - DNA, 75 bp, Homo sapiens
ggaagtgcagctgcctcagttcttagcgcagatggagtctcgttctgtcgtccaggctggagtgcggtggcgtga

SEQ ID NO: 780096 - DNA, 97 bp, Homo sapiens
aaagtcatgggagcagagctcagacatgttctcaccacccttgcatcctaatgtcctatgatcacgtggaactcacattcaatgacatgaagaacgt

SEQ ID NO: 780097 - DNA, 80 bp, Homo sapiens
ccggcccggagcccccagcgcagcggccgcgatcttggacatgatacctggatgtgcagcagccatctggtaattatgag

SEQ ID NO: 780098 - DNA, 83 bp, Homo sapiens
tcgtcatgttcttcgcgccctgtggtattggaaggaactggccctgggcctctggaggcagcagtattctggcagaatttgga

SEQ ID NO: 780099 - DNA, 80 bp, Homo sapiens
gagcctccgctgccgggagcagtgaaatgacaatggatgctctgttggctcgattgaaacttctgaatccagatgacctt

SEQ ID NO: 780100 - DNA, 98 bp, Homo sapiens
gcaaatctgtttttgagcctgaagattcttcaatagtagataatgaggtggacccaagtggagagattgtggaactggcgaaaggtgcatgtccctgg

SEQ ID NO: 780101 - DNA, 87 bp, Homo sapiens
aagagcaagatcaccgtgacatccgaggtgcctttctccaaaaggaagatgagaatgtgcctactgctcctgatcctccaagtcaac

SEQ ID NO: 780102 - DNA, 90 bp, Homo sapiens
gatcgggagacagccgggcgctgcaaggaagccagttgagggaagttctccatgaatgtacgtcacaatgatgatgaccgaccaaatccc

SEQ ID NO: 780103 - DNA, 100 bp, Homo sapiens
cccaaacactgctcactttgctaatgtgacacagattgaagatgctgtctcctagcccaggaaactctgcccgcagcttatgacggtcattaaccagttt

SEQ ID NO: 780104 - DNA, 146 bp, Homo sapiens
ggcccgtttttctacacgagcaacaaaaattgaagaaatggatccctctttcaaccttcatgaaaccattactaagggcccttccagagaaatgtactgaaaaagtctacgcaatgtctgggatttgctaaacaatacctggaaag

SEQ ID NO: 780105 - DNA, 82 bp, Homo sapiens
cccgaacccgcgctgcagggaacagcggggcaaacaacaatgcagatcttcgtgaagactctgactggtaagaccatcaccc

SEQ ID NO: 780106 - DNA, 96 bp, Homo sapiens
accgccagatcaacctggagctctacgcctcctacgtttacctgtccatggagcgcctggaccatgctgctgagcgcctactggcacggcctccac

SEQ ID NO: 780107 - DNA, 98 bp, Homo sapiens
cgctccaagaggctcctcagtgtgggcgagtaaaatgccctgcgtgtgagaagcagggcctgagcgcctgcgaacagatccgagctgctctctacctg

SEQ ID NO: 780108 - DNA, 80 bp, Homo sapiens
ctagattttctctcaaactacgagccgtcagctttagtcagaggaccccttcagacagccagtgtctctcctagcatgcc

SEQ ID NO: 780109 - DNA, 100 bp, Homo sapiens
cagaggactctatacagggacgtgatgctggagaattataggaacctggtctccctgggtgcaggttttgcagcatttggacaaacaaagccagtagtaa

SEQ ID NO: 780110 - DNA, 75 bp, Homo sapiens
tcatagcattcgcctactccgtgaagtttttggctttcacccccaaccagtgaccaaagacttgaccactcaaag

SEQ ID NO: 780111 - DNA, 100 bp, Homo sapiens
aatttcgatctccgccctggggtcattgtcagacccaatgattctcgcatgctggttgctttaggagaatgttacgagaaactcaatcaactagtggaag

SEQ ID NO: 780112 - DNA, 100 bp, Homo sapiens
tgatctccatgtcctgttgtggggcttttacagcctttggctgcggttggatttctcacgatgtccagtgttatctccatgtctgcccctttcttcctgg

SEQ ID NO: 780113 - DNA, 73 bp, Homo sapiens
atgaacttcagtcattgggggaatccaatgcacaaatggctcctgtgacgtttgatgacatcactgtgtactt

SEQ ID NO: 780114 - DNA, 100 bp, Homo sapiens
agcggctatgaccaggtgctccacgaagacgaaaccacgcatcaagatggtgctcatgtggaccagtggtgacgccttcaagacggcctacttcctgctg

SEQ ID NO: 780115 - DNA, 83 bp, Homo sapiens
cttgcctacccgccggcccgcgggtctacttcctcaaagagaaaattcctgttccaagagaaaataaggcaacatcaatgaag

SEQ ID NO: 780116 - DNA, 74 bp, Homo sapiens
acatcctgcgcaaggccgtgcagaagcttgctgagcgagagcgagaagcggcccttcgtggaggaggcagagcg

SEQ ID NO: 780117 - DNA, 71 bp, Homo sapiens
agttggcaacgcgacacagagccagggggcaagtctcagaaggatcagaacaccttccagaagctgctcca

SEQ ID NO: 780118 - DNA, 105 bp, Homo sapiens
atgtgccacgccgcccaggagacccctctgctgcaccacttcatgaattcagacctaccttcagtcaacaaagccaattattgacttatatgaagaaatggggaa

SEQ ID NO: 780119 - DNA, 75 bp, Homo sapiens
gaagataaacgaggggctggaacacctcgccaaagcagagaaataaatgtgtctgtgaaaactacaagctggccg

SEQ ID NO: 780120 - DNA, 83 bp, Homo sapiens
cagcaggccaacttgtaaagctgttctcaacccactttgctggagtcttttgtgcaattgtttctcaccctgctgattctgtg

SEQ ID NO: 780121 - DNA, 75 bp, Homo sapiens
tggactttcaaacatctgaagatgacaatttattagatggtgacactgcagttgaaaccaatagagccatggcga

SEQ ID NO: 780122 - DNA, 51 bp, Homo sapiens
gaggcctcctcagccatgtggaactcagttggaattgatcacaccttttca

SEQ ID NO: 780123 - DNA, 117 bp, Homo sapiens
cgggtcggagtctgggggttcgcgcccgccgacccgcgccctgctccctctcagcacctgggcggacggcttgcattgatgacaatgttgatatggtgaagtttctggtagaaaatg

SEQ ID NO: 780124 - DNA, 96 bp, Homo sapiens
ccgaagagaacaagacgtgtgaagactcaggttgctccttgagggcaggacagttcttatggctttatccgttgcgtaagcacagagaggtctgcg

SEQ ID NO: 780125 - DNA, 112 bp, Homo sapiens
ggggatgcaaggtccaaatctcagcaacccctgtgcttctccccaggtccagccaatgcattcagaagccaaaatggccttagaaaatttacgtgtatacctgtgtgagaaa

SEQ ID NO: 780126 - DNA, 90 bp, Homo sapiens
ggagactaggctggcattttgactttgggataggggagtgtatacatcaccacaccagctgtccaggaattaggaggaagtgcccttgaa

SEQ ID NO: 780127 - DNA, 100 bp, Homo sapiens
aaaaagcagtctaaacctgtgaccacccctgaagaaattgcacaggcaaaaagggcagctagctgtagaaagagctaaacaagtagaagagttcctgcag

SEQ ID NO: 780128 - DNA, 82 bp, Homo sapiens
tgacgggatcgctttctcccatcgaaccttctagttgcttattgcagactctttttgatcagaacaatgctgcaaaaaaaga

SEQ ID NO: 780129 - DNA, 74 bp, Homo sapiens
cagccgcggcggcagcagcagtgagaggccttctggcggccgcccctggtttctcctggggggtgatgagcggg

SEQ ID NO: 780130 - DNA, 75 bp, Homo sapiens
caggcctgaaggggagcccaagggtgcacagcccctggctacgaatgaagactattctcagcaatcagactgtcg

SEQ ID NO: 780131 - DNA, 100 bp, Homo sapiens
tttgtccgaagagccaaaaatgaccaagtccctgcattcctctgaatattgatttgctgaatagcccagacttattggaagcaacgattggtgatgtaat

SEQ ID NO: 780132 - DNA, 83 bp, Homo sapiens
gtgcaggtgaacggagccgccacggtagttgatgtcacttggcgatattcctgcaaacatgaagaggtgattgccagaagaac

SEQ ID NO: 780133 - DNA, 100 bp, Homo sapiens
actacctggtgcagggcctgattgaggactgccagctggcgctgcagaaggacagaataacgggctcccagattcacaagccccaccaagaggatcaccc

SEQ ID NO: 780134 - DNA, 75 bp, Homo sapiens
cagtacacagacgagcatggggaagtgatgcagtttggcaaagggaagtcgtgttgctaccggtttctgaccaaa

SEQ ID NO: 780135 - DNA, 100 bp, Homo sapiens
aatgtatttcaccagtagcaaatgagatgaaccatcttcctgcacacagccacgatttgcaaagatatgactccaattctggtggtgagagagaaattca

SEQ ID NO: 780136 - DNA, 100 bp, Homo sapiens
ggaaaatgctttggcagggcaagaaagaaggggtggccagaatggatttgtggccaggggcatggatgctgctgctgctgctcttcctgctgctgctctt

SEQ ID NO: 780137 - DNA, 100 bp, Homo sapiens
aaagggttcagcttcaaagaagacactttgctgttgatagctgaggtggcacaagaatggctcaactctccaaatagagagaatttctatcagttgcaag

SEQ ID NO: 780138 - DNA, 51 bp, Homo sapiens
tgtcaggctacatcagcaaagggtacgtttcaggagacggcagcgaggcta

SEQ ID NO: 780139 - DNA, 100 bp, Homo sapiens
cgaaaacttgttagctttacattgtcagtgtgaagcctcagtttaggtcatctggtggttcagaacactcaacagagggctctgtatccttgggggatgg

SEQ ID NO: 780140 - DNA, 50 bp, Homo sapiens
gaatatttggtgataattttgatccaggtcgctacccacaggagaacaag

SEQ ID NO: 780141 - DNA, 112 bp, Homo sapiens
agaagagagagcccgggaagagatgcagcgctatgcggaggatgttggggccgtcaatgacaaagcataaatcatggacaccagagaataaggtggacctcaggaatccgga

SEQ ID NO: 780142 - DNA, 82 bp, Homo sapiens
cttggtttcgggatctcggtgctgcagacggcgagacctcctgcacagaacatccagtcatggataaaaatgagctggttca

SEQ ID NO: 780143 - DNA, 75 bp, Homo sapiens
gtcagatgccccttttaaactccctcttcaaaactcatctcctgggtgactgccaagaaatatttttcttcatgg

SEQ ID NO: 780144 - DNA, 82 bp, Homo sapiens
ctgggcccgcgtggatctctaaggtgcgcgcggagccatggttatcatgtcggagttcagcgcggaccccgcgggccagggt

SEQ ID NO: 780145 - DNA, 74 bp, Homo sapiens
gatgattgagccgcgcacgctacagtacaaggaaggagaagtatatgcaattgaaacctttggtagtacaggaa

SEQ ID NO: 780146 - DNA, 77 bp, Homo sapiens
gtcagtgagatggcttctaacaagtcttatgatgtaatcagcgcgatttcacttcctgaatttcgatgaattctaag

SEQ ID NO: 780147 - DNA, 51 bp, Homo sapiens
cgagggcattggtgcccgtcagcagcagattttgatccaaacaatatcttc

SEQ ID NO: 780148 - DNA, 96 bp, Homo sapiens
gccgggatttgggtcgcagttcttgtttgtggatcgctgtgatcgtcacttgccctgaccctctattctgcaccctgtgagccaccgagactgaac

SEQ ID NO: 780149 - DNA, 74 bp, Homo sapiens
aaagagacctctacttagctcagcaattcttaccttgagccctctggcacaaatggaagaagaaagaagggagc

SEQ ID NO: 780150 - DNA, 82 bp, Homo sapiens
tccggcttcggagcgggagtgttcgttgtgccagcgactaaaaagaggtcagccaccatccgcctatctctgcgtgtcatgc

SEQ ID NO: 780151 - DNA, 75 bp, Homo sapiens
gaggaaaagagccctggatgattttgagggaagaaacacagttcacaggctgtgcgtttgtcacattttctacaa

SEQ ID NO: 780152 - DNA, 98 bp, Homo sapiens
tccccaaaataaaaaaattgcaagagagagactattttcgttattacaaggagaagagatcaactttgggaaacttatcacaaagccttcagaaggaa

SEQ ID NO: 780153 - DNA, 80 bp, Homo sapiens
gaaactagagcaaataaccgttttgaaattgttttaaaatcaaagatgggaaaatcggagaaaattgcccttccccatgg

SEQ ID NO: 780154 - DNA, 75 bp, Homo sapiens
gaaagttctgagaaggtgggaaaggaaacctctgaactcggaggcagtgatatcgggggtcatactacacatcga

SEQ ID NO: 780155 - DNA, 75 bp, Homo sapiens
caccgccttccggcagaagctggtcagtcaaatccaactgggtacatggaaaactcagtctcctacagcgcaatt

SEQ ID NO: 780156 - DNA, 100 bp, Homo sapiens
ccgcggatcgccgcgctcagcgacaaacaaggcatgacgtccttgatgaaggccgcgctggacctcacctaccccatcacgtccatgttctccggagccg

SEQ ID NO: 780157 - DNA, 75 bp, Homo sapiens
cttgtgaaacctcctagtagaaaaagttcttgggacaaacttcatttgatttattgctaaacatgggtgcatttt

SEQ ID NO: 780158 - DNA, 75 bp, Homo sapiens
cgcgcctggacgccgctgacggccccgagcacggccgcccggccacggaaaaatcgcagccctcagagagtcgct

SEQ ID NO: 780159 - DNA, 101 bp, Homo sapiens
gaacggtccttgaagttctattccagggctcccaggcagcagaatctgcccacagagttcggtctggatgtggatagtgaagctaagaaactattgggttt

SEQ ID NO: 780160 - DNA, 82 bp, Homo sapiens
gctggtgcagccaccctcgctccctctgctcttcctcccttcgctcgcaccatggcttgggcactgtttaaaggaaagttcc

SEQ ID NO: 780161 - DNA, 120 bp, Homo sapiens
ggggtccccctgtaccgccacatcgctgacttggctggcaactctgaagtcatcctgccagtcccggggaggagccccagccccgcgacgaggaggaagcggagctggagctgctgaggc

SEQ ID NO: 780162 - DNA, 118 bp, Homo sapiens
tcggtggtttcttgtgaggacgcggcagcccgtggagtcggctgagggaaaagcgaggcaaggcaggcgggttgatggaaatcacaatcttctgacaaagctttctctggaagaggaa

SEQ ID NO: 780163 - DNA, 75 bp, Homo sapiens
tcgacatcgagatcaaccgggagccggggatggttttagattgtcatctcaagaagctgcttctagttttggcga

SEQ ID NO: 780164 - DNA, 50 bp, Homo sapiens
aaaatccacatatcttcaaagacaaggagacggtggctcagggagtaaag

SEQ ID NO: 780165 - DNA, 83 bp, Homo sapiens
gactgtgacgaggacgaggaggcagccacggggcccctgggattttttatcaagcagaaatgcatcgaacaacgagaatcaag

SEQ ID NO: 780166 - DNA, 74 bp, Homo sapiens
gagcttctgtccacctgtcctgcagaggagtcgtttccagcccggctggttatcagtgagctgaatggaaaaaa

SEQ ID NO: 780167 - DNA, 88 bp, Homo sapiens
gccggcagccgcagagcggggaggaggcggtggccctgctggaggagctctgggcacattcaggaccccgcgagccagcggctgacgt

SEQ ID NO: 780168 - DNA, 50 bp, Homo sapiens
tatcgacatcagtggagaacctcaggatttttttcccaggaagccatccc

SEQ ID NO: 780169 - DNA, 100 bp, Homo sapiens
tctgaagttgccaggcttcccaacattcttgtctgtgggaaatgatgtcactctgaaactcaggctggaatacactggcatggtcatacctcactgcggc

SEQ ID NO: 780170 - DNA, 100 bp, Homo sapiens
attttctatcagtgaagccattaagctctgtgtcactgtggtggcgtatgctcccgaatcattcagaaggctggagtgcaatggcacgatctcggctcac

SEQ ID NO: 780171 - DNA, 75 bp, Homo sapiens
tccacaccgcgagggaagatgcgtgcgcccattattctgaaaaagagttccacgtcctcccttatcgagtctttg

SEQ ID NO: 780172 - DNA, 99 bp, Homo sapiens
cttctccctcagtatttagaccaggccaaacgtaccaagaaagtcgggatcgtcggtaaatacgggacccgctatggggcctccctccggaaaatggtg

SEQ ID NO: 780173 - DNA, 100 bp, Homo sapiens
caggatctatttggatttgccacagaatttcaagatatttgtgagcgaaacctccacagctgttgagaaaaaggagaaacctcttccaagacttaatatc

SEQ ID NO: 780174 - DNA, 83 bp, Homo sapiens
gttcttgtttgtggatcgctgtgatcgtcacttgccgctgtacaaccagccctccgacacccggcagtatcatgagaacatca

SEQ ID NO: 780175 - DNA, 90 bp, Homo sapiens
aaatgaagtgccagccccagccccacccccggaaggccaatggaagcagtgctgtgatgaaatcatgaaaattgaaactcctgctccccg

SEQ ID NO: 780176 - DNA, 59 bp, Homo sapiens
cagcccgcggcgaccaagatcaggaacctgccctgagctgctgcccaaagggagcaagg

SEQ ID NO: 780177 - DNA, 74 bp, Homo sapiens
agcagcagagatgataacatgtttcaggctgaccggttccctgatgtgttacctgcttctgctactgatccaaa

SEQ ID NO: 780178 - DNA, 82 bp, Homo sapiens
cccgttcttgcctcaggccagtcgcctccaggccaagagggatccttcacccgtgtctgaggagaaggcagagcccccccag

SEQ ID NO: 780179 - DNA, 75 bp, Homo sapiens
gcaactaactccattcttaattgtttggaaattttagcattcaggtgccaggaatgcagatgggacagccagtgc

SEQ ID NO: 780180 - DNA, 100 bp, Homo sapiens
aggaacctctacaacgaaggtgaagccacggaagataagatcgcgctagcgagcttttatgaggacggaggggatgaagacattgtgaccatttcgcagg

SEQ ID NO: 780181 - DNA, 100 bp, Homo sapiens
aactggagccttaaggatcggagccagttttctggtgctgggtaggccaggtttcagcatcgcagacaagaagcgcaggacaggctgcattggggccaaa

SEQ ID NO: 780182 - DNA, 100 bp, Homo sapiens
gatgtatacacgtttaatttttctaaagagtcttgttatttcttctttgagaaaaacctgaaagatgtctcagttagcactctacgtatatgaatatctg

SEQ ID NO: 780183 - DNA, 82 bp, Homo sapiens
atgacacatcagcatttgtttcccttagccagcccgagcaagtaaagattgcttgaaataactgtgaatgtcccagatgtag

SEQ ID NO: 780184 - DNA, 100 bp, Homo sapiens
gttttctagtccctcttacttgaagcatgtctttcagagcccggcaccacccatcttgagtatctgttacattacttcgttcagaaccatttcacaagtg

SEQ ID NO: 780185 - DNA, 51 bp, Homo sapiens
atcagccactctgcatctttccaacattccagttgtggaaagtaaaaatgt

SEQ ID NO: 780186 - DNA, 87 bp, Homo sapiens
tcggctactacttaataatgacaatctcctcagggaaggggcagcacacaaaagctgatgaagcattgaaagccaaagaaagaaatg

SEQ ID NO: 780187 - DNA, 100 bp, Homo sapiens
accccgagtggccgccgctgcggggcccaagtccttggctgctgagtggtgacagtagcccagcccgccggccagagctgcagctttggaacagttcaag

SEQ ID NO: 780188 - DNA, 75 bp, Homo sapiens
accatcgacaccgaaaactccaccgtagcccttgccaaagggcgccatgttttggaagtttgacctgcacacaag

SEQ ID NO: 780189 - DNA, 98 bp, Homo sapiens
agatgccaaaatattttgcttggtacacaaaatggatctggtacaggaggatcaacgggacctgtccacaggtcctggctaccctgggaagagacaag

SEQ ID NO: 780190 - DNA, 96 bp, Homo sapiens
gaaatctgaaaatgcccctggggagacacatgcacaagacagcctcctgatcacttgccacgtggcacgcatccctctgccagccggatacagaga

SEQ ID NO: 780191 - DNA, 100 bp, Homo sapiens
ccagccgaccttgagctccaggagttcgtctcttacgtctgcggaagtgcagctgcctcagttcttagcgcagcccacttcaacctgatccctgtgggcc

SEQ ID NO: 780192 - DNA, 74 bp, Homo sapiens
gagcggcctgcgggcgatcgggccgaggaaccctaaggactctgcaatatgaataattccctagagaacaccat

SEQ ID NO: 780193 - DNA, 108 bp, Homo sapiens
agaccctggagcctcagttggaagcagccgatccagcctgcggagcctgtggggcaggatcaaaatacttgctggatggtggactcagagaccaataaaaataaactg

SEQ ID NO: 780194 - DNA, 78 bp, Homo sapiens
tgacttgacataacttcccatccagccaggagtctgcactcttcagtctttgcagacaacgtgtcctggagagacagc

SEQ ID NO: 780195 - DNA, 100 bp, Homo sapiens
agaaaattgagacggagctaagagatatctgcaatgatgtactggtaaatattgcagattttcaagagaatcagtgggtgacttgtttccaggagtctgc

SEQ ID NO: 780196 - DNA, 97 bp, Homo sapiens
tcttcggcatcgacatcatcatcaacaaccagacagggcagcacgccgtcattgacatcaatgccttcccaggtgctggagaatctggtaaaagcac

SEQ ID NO: 780197 - DNA, 100 bp, Homo sapiens
cagatgaacgtcacagcccccaccagtccaccagtgcagcagaatatgatgaactcggcttcagcaacatgtcatggtttagtggcctcctggtccctaa

SEQ ID NO: 780198 - DNA, 98 bp, Homo sapiens
taccagtccccagtgagggtgtacaaatacccctttgaattaattatggcttctggctcttgctgattgaattcctttggtgcagtttagcatgttcc

SEQ ID NO: 780199 - DNA, 75 bp, Homo sapiens
caagctgcaggaggaggagagagaaaggagagacaattatgttcctgaggtcgatgagcagatgcttaacgtgca

SEQ ID NO: 780200 - DNA, 101 bp, Homo sapiens
tgcattcactgcagagctcacttggccaatcatgatgaactaatttccaaggtttaagttactgagccaggaggaaggcgagtacttcaatgtgcctgtgc

SEQ ID NO: 780201 - DNA, 100 bp, Homo sapiens
cctccccagtagctgggactacaggaaattgtgggtttcttggaaggctctggatatctgtgacagacctcagggacacagataatttgaaaattgcatg

SEQ ID NO: 780202 - DNA, 82 bp, Homo sapiens
gcgttgcaaatccttaaaagagtcttaacggcaatgatagtaagaaatgctaaagatacagctcatacaaaagcagaacgga

SEQ ID NO: 780203 - DNA, 100 bp, Homo sapiens
ccaagaacaggctacagatactgaaattttggacaagatgacctcatccagcatcaagatatgaggatcttggagctaacgccagaaccagaccggcctc

SEQ ID NO: 780204 - DNA, 100 bp, Homo sapiens
ttttctctgtgccagtttacaaccagcttttgactttgacagatgcactgtgcatccccacctttcagctcctagaacagcagaatggtctccagaatca

SEQ ID NO: 780205 - DNA, 102 bp, Homo sapiens
ctgctcccatcattgatgtggtgcgatcggctgcttctgatgcttggaagatatcctctcagccacaaagatggtaataaatctttgcctcccacagttcag

SEQ ID NO: 780206 - DNA, 85 bp, Homo sapiens
aggcgacctccccgcgttccatgcgcacagggacagggagccagcccctgggcaacaaagtggaaatggagattgtgagcatgtt

SEQ ID NO: 780207 - DNA, 82 bp, Homo sapiens
tgagtgttcctgtggtctctgcacctcctttctgctcctgtgacgtttgatgacatcactgtgtacttactccaggaggaat

SEQ ID NO: 780208 - DNA, 100 bp, Homo sapiens
gcgcggcggcggcgctcggcgatggtaggcgtccctggagcggccgccttccagcaatgctggaagatgaccttaagctaagcagtgatgaagaggagaa

SEQ ID NO: 780209 - DNA, 82 bp, Homo sapiens
gaggaagcacaccctgtcctatgtggacgttggcactgggaaggattacttccttaggatagattgccagaagtggagttac

SEQ ID NO: 780210 - DNA, 100 bp, Homo sapiens
actcccaagaagaataagcacaagagaaagaaggttaagctggctgtcctgaaatattataaggtgggatgatgacgttgtcttcaagaactgtgcaaaa

SEQ ID NO: 780211 - DNA, 96 bp, Homo sapiens
cgccggcagaggatccagtgttcaccatcctggccccggaaggtggaaccgtcccaaaatgtcccttgctcagaagaaggatcgggtagctcaaaa

SEQ ID NO: 780212 - DNA, 51 bp, Homo sapiens
tctcagtcgagacttggctgtggagagtgtgccggcatgtgaagaatgggg

SEQ ID NO: 780213 - DNA, 100 bp, Homo sapiens
cctttgcggagagctgcaagccggtgcagcagccttcagcttttggcagcatgaaagttagcaagttgtctgctggttctcagcttgaagaagattctgc

SEQ ID NO: 780214 - DNA, 100 bp, Homo sapiens
gggagattatgttgacagaggatattattcagttgaaacagttacactgcttgtagctcttaaggctcttacagcactactttcagatgatagcaagttt

SEQ ID NO: 780215 - DNA, 74 bp, Homo sapiens
gcgaccggagaatccgcatctggggcacggagggctttcatgagaaggacaagaagccatattgccgaaaggat

SEQ ID NO: 780216 - DNA, 90 bp, Homo sapiens
caggactttgggtctgggtgagccttctcgtggcggcggggaccgtccagcccagcgattctcagtcagcctgtgcctactacactggca

SEQ ID NO: 780217 - DNA, 49 bp, Homo sapiens
caaagacattcacaacatggatggttgcccccaagtttcctggcagtgt

SEQ ID NO: 780218 - DNA, 98 bp, Homo sapiens
gggactcccccagcagatacattctcagtgactctgacatcattagaagcatgccagaacagactggtgaaaagtaaaccttttcacctacaaaattt

SEQ ID NO: 780219 - DNA, 90 bp, Homo sapiens
tttctctatgatgagcactaacactgtgggacttggtttgcctatgtcaagatcacaggttctcctcaaaatctaagtctatggacaaat

SEQ ID NO: 780220 - DNA, 120 bp, Homo sapiens
tggaatacagattagcaactctttaaaacagtattgccaagagaaacaggaaaataccaagcccggattctttccgagagccttctcactcctgcggagtaccagaaggaagtcaattac

SEQ ID NO: 780221 - DNA, 100 bp, Homo sapiens
ggtagctttgggcttcaccatctttctgacagcgctgtcccggccaggaaccacacaggaagtcctggagaacctgaaggaccgctggtaccaggcggac

SEQ ID NO: 780222 - DNA, 74 bp, Homo sapiens
ggagcccggactcctgggggatgcagaaatcaacgaccgggagcagaagttgcatgcccttaaggaggtattaa

SEQ ID NO: 780223 - DNA, 104 bp, Homo sapiens
tagctgaagaggaagcatataagtcagaattattccagaaagccaagcctgcagaattttcttcctgccccttgaactctgatgaagaagtgaataaatggttg

SEQ ID NO: 780224 - DNA, 100 bp, Homo sapiens
gacaaccctggcgggggttcgctggctgcggccccggctccggcccccgcaggagcagggttttgatgagtatatgaaccttgtattagatgatgcagaa

SEQ ID NO: 780225 - DNA, 74 bp, Homo sapiens
ccgccgccacccccgccctcgccttcgcctccgcctccggggtattccctcagcggatactacacccatccatt

SEQ ID NO: 780226 - DNA, 122 bp, Homo sapiens
agatgatgcggtggtgggggacctgccggcacgcgactccccccgggcccaaataagactttgaccccgacgcaggcttcagtgattgccgcggatcagaagcctgagcactttggctcgag

SEQ ID NO: 780227 - DNA, 51 bp, Homo sapiens
cttgtcagcaaactactttcaggagaaatgaattttgaagattgcaccggt

SEQ ID NO: 780228 - DNA, 100 bp, Homo sapiens
ggcaggatggacaggattggagcccagagcggactgggctgtaacagcttccgggtcgttcagattctaggagataagtttccatgcactttggtggcac

SEQ ID NO: 780229 - DNA, 100 bp, Homo sapiens
tttaacctcacctttgtcttcctggcaagcctccttgttctcattgagttttttgctccactcaagcctgttagaatcaccatggaatacagctccagtg

SEQ ID NO: 780230 - DNA, 74 bp, Homo sapiens
tggacgtggagaggggccgaaccgtgaagggctggaggccccggcggctaggggaacgcccttttgcttgtgac

SEQ ID NO: 780231 - DNA, 74 bp, Homo sapiens
gcgggaccctggtctccgcgtacgggtaatttcatctgtgccaaagcctccagaggacaagccagaagatgtac

SEQ ID NO: 780232 - DNA, 82 bp, Homo sapiens
gatgcagctgagattactgtgatgcattattggtttggtcaagcattcttctattttcaggcctcactttgttgcccaggct

SEQ ID NO: 780233 - DNA, 76 bp, Homo sapiens
agaaaaatgccttaataaggagaatgaatcagctctctcttctgacttggaccctctgtggaacacccgagtacct

SEQ ID NO: 780234 - DNA, 75 bp, Homo sapiens
ctctcttcaccctgccgtcatgtctaagtcagagttaagtgggcagaccaacatccacctcagcaaaaacttctt

SEQ ID NO: 780235 - DNA, 100 bp, Homo sapiens
agggcagagatggaacccacctttccccaggccaccattggcgcctggaactattttgtatgaagcagagctatcacaattttctgaagacataaagaag

SEQ ID NO: 780236 - DNA, 100 bp, Homo sapiens
tgccggaatatttcaagacaccgaaaggctgtaagactggaaagtacttaccagaatcgaacacgctatatggtagtggtttcaactaatggtagacaag

SEQ ID NO: 780237 - DNA, 75 bp, Homo sapiens
tagatgtgtcctatgaataccgcttcctggagttcacgactctgagtgctggccctcgggaccaaggatcacgtc

SEQ ID NO: 780238 - DNA, 75 bp, Homo sapiens
gacactctggacaccactatggacagaatcagcatgattcttcagaggctcttcaggttctcctctgtcattcgg

SEQ ID NO: 780239 - DNA, 100 bp, Homo sapiens
ctcaaaggtgttcctggatttgaattcaaagaagctttttcactatttgacaaagatggtgatggaactataacaacaaaggaattgggaactgtaatga

SEQ ID NO: 780240 - DNA, 50 bp, Homo sapiens
cagacaccagccccccaccatgaactctccatccaaccgtctctcaacgc

SEQ ID NO: 780241 - DNA, 101 bp, Homo sapiens
ttgaagcacatcgaccggcgacagcagccaggagtcatgagcgacagcggcgagcagaactacggcgagcgggttttgagcaaaattttggactgtgaagc

SEQ ID NO: 780242 - DNA, 103 bp, Homo sapiens
gttgccaatccagcatttttgaacttgctggattggtttgtggttttatcatcaaattacagacaagtctgtatgacccaggcttcctacagcagcttcacac

SEQ ID NO: 780243 - DNA, 83 bp, Homo sapiens
tgtttgtccagcgactccggggcctgatgaatgacatcggttttttattggcacctcagtctcaacattttcttttcggattc

SEQ ID NO: 780244 - DNA, 100 bp, Homo sapiens
gaaaggctttctttctgagatttcacttccctgtcaactcttcagctcgcctgctatgggatggatgaagaagagaaccactatgtctcgcagctcaggg

SEQ ID NO: 780245 - DNA, 51 bp, Homo sapiens
aaagaccagtgtcttaagtaccagatcgaaattgcccagaagcatcctgat

SEQ ID NO: 780246 - DNA, 99 bp, Homo sapiens
cgagactccttaaccgagatcaacctgtctgctctggaggctgccatcgagaacctcaatgaagccaagaactattttgcaaaggttgactgcaaagag

SEQ ID NO: 780247 - DNA, 116 bp, Homo sapiens
ccgtatcttcgtctatttcatcacaaaactgtcccgggtgggaagaggaacagcctatgtgggcttccacggagctctcatttcactcttcagtgttcctgttatttatgaacggc

SEQ ID NO: 780248 - DNA, 100 bp, Homo sapiens
ttgagaatggtggtgtggctgtcctcactgggaagaaggtattctctactgccgctgatggtcaaacgcaagtggaaattaaagtgtgtcagggtgaaag

SEQ ID NO: 780249 - DNA, 100 bp, Homo sapiens
gtatgatcccatccgcatggagtttgaaaataaggaagacttgtcgggaacacaggtttgaagatgccgcatttggattggatgaattccaaattctgct

SEQ ID NO: 780250 - DNA, 82 bp, Homo sapiens
tgcagaaataccagtccccagtgagggtgtacaaatacccctttgaattaattatggctatatggctcgtggacagcagaaa

SEQ ID NO: 780251 - DNA, 100 bp, Homo sapiens
gcgggatcccagcctcaggcgtgcgcggacggtgtgcggaatgtcgagtggtaaagtccacttcttacaccaaaatagcttcatcatcccgcaggagcac

SEQ ID NO: 780252 - DNA, 82 bp, Homo sapiens
atgctggccaagaagatcatcattaaggacggaggcacggttcttgcatacactgagggacttcacggaaaatggatgttca

SEQ ID NO: 780253 - DNA, 100 bp, Homo sapiens
acggaggtggcagccatctccttctcggttggactccatgaaagaattgcacaaaacaaatcgacagcagcatgagaaacatctgcaaagccgagtggac

SEQ ID NO: 780254 - DNA, 73 bp, Homo sapiens
ggaatcaggacctggctcccaattctgctgaacaggctctggaatgggcactctccttatcagcaagatccga

SEQ ID NO: 780255 - DNA, 82 bp, Homo sapiens
aggagaccatggctgactacctgctgtacaccctcaacaaacaccagcgctttggggaaaggggctgtttgccacacagctc

SEQ ID NO: 780256 - DNA, 75 bp, Homo sapiens
gccatacgcgctctccctgtttagcacttgcacctcctgcgccgccgccccccatccaaggatatgccttcaagc

SEQ ID NO: 780257 - DNA, 50 bp, Homo sapiens
gttagcctttgcagtctcgacataagtcctctccagcttctgcagtgcat

SEQ ID NO: 780258 - DNA, 82 bp, Homo sapiens
gctatgcagctatcgtggacgtcactggccctggtggggattgacagccacgggaagtgtgaaagcagctgtagacaacaag

SEQ ID NO: 780259 - DNA, 85 bp, Homo sapiens
gcctttgcagatagtctctgcccatcaacctctcttctgtatcttgggcgaacagaaacctgtttggaggttatggatgataaac

SEQ ID NO: 780260 - DNA, 85 bp, Homo sapiens
gatggctgggcccgcgtggatctctaagattgctagtgcaactactgctccatcgatcccttcacatttgtctcctggtttacga

SEQ ID NO: 780261 - DNA, 75 bp, Homo sapiens
gctcacctgcgctgtgatgcctgcagagctgtggcttaccagggaaccagggaggaggatgacgtagtgagcgag

SEQ ID NO: 780262 - DNA, 101 bp, Homo sapiens
tgtccccctggatcttcacacagctgcttccattggccagtatgaagtggtgaaggagtgtgtgcagcggttggaagcgaagtggaagcactgaacctcca

SEQ ID NO: 780263 - DNA, 74 bp, Homo sapiens
gcaacctggaaactgacaggaaaggatgacaagttgggagtcacaggtgaaatgacaatggatgctctgttggc

SEQ ID NO: 780264 - DNA, 75 bp, Homo sapiens
tgtattcaaatggatcttcaaagtcatacagtttgtcaagaaagaaaatagtgcactacacctgttttgaccaac

SEQ ID NO: 780265 - DNA, 75 bp, Homo sapiens
attacaggcacgtgccaccacgccagggtaaaccagacttgaatacaacattgccaattagacaaacagcatcaa

SEQ ID NO: 780266 - DNA, 50 bp, Homo sapiens
agaacgtggacctgacctctgtggtctgtgcagacttttgcagacaaatc

SEQ ID NO: 780267 - DNA, 100 bp, Homo sapiens
cccgccgtgacccacggccgcctccggagcccgacgcggaggctgtgacattcaaggatgtggctgtggtcttctccagggaggaactgcgactgctcga

SEQ ID NO: 780268 - DNA, 97 bp, Homo sapiens
cacacttcagcagtccatcaagcaactgaagggtcaagatggtaagcggatgtttggcacctattttcgtgttggtttttatggaaccaagttcggg

SEQ ID NO: 780269 - DNA, 82 bp, Homo sapiens
ggagaggctggttgcctgacagcccgccagcctggggcgtgatggtgggcatgggtcagaaggattcctatgtgggcgacga

SEQ ID NO: 780270 - DNA, 75 bp, Homo sapiens
ccggagcgcggagcccggctcccgcaccatggaggaggacgacagctacgacggttgatgatgaagcgccggccg

SEQ ID NO: 780271 - DNA, 75 bp, Homo sapiens
ctctgcggctggtccaggccttccagtacacagacgagcatggggaagtctgaatcaccatcttattctcctcag

SEQ ID NO: 780272 - DNA, 75 bp, Homo sapiens
aaaggcaaaggattcggatttattaagcttgttccgctttgattataccaatgagagggccctgcggcgcactct

SEQ ID NO: 780273 - DNA, 100 bp, Homo sapiens
tacattggcgaatttgaaatcattgatgaccacagagctgggaaaattgttgtgaacctcacaggcaggctaaacaagacgctgaccggaaaggagattg

SEQ ID NO: 780274 - DNA, 83 bp, Homo sapiens
aaatcctccagaagagctttttgagggagcttgtggctcctgttcacccagccccgggcttctggagttacagtgaatgatga

SEQ ID NO: 780275 - DNA, 98 bp, Homo sapiens
tgctcgataaatcagacagaacagttaatcctcaatttaagcctgatctaacccctagaaacagcccgtgctttgaagaagaggagcacttcaaggtg

SEQ ID NO: 780276 - DNA, 50 bp, Homo sapiens
cgcctgcggcctcctcgcaaaacaaggcactatgtcgtccgaggcccaga

SEQ ID NO: 780277 - DNA, 100 bp, Homo sapiens
cagttctggatgatgtgggccatggtgtcaagggcacgaccagccgcgccggccacctggcggggcccgagcccgcgccgccgccgccgccgccgccgcg

SEQ ID NO: 780278 - DNA, 83 bp, Homo sapiens
ctgctggcaagtcaagtggcaactccgtcagctcgttagaaaggccttcaatcaagcaggggcagggccgtacagtgaacttg

SEQ ID NO: 780279 - DNA, 50 bp, Homo sapiens
tctttctctagaggagaaactttttatgggaaaaacagatggagactatt

SEQ ID NO: 780280 - DNA, 100 bp, Homo sapiens
agaggaggcgttgcaggacagcccccagccgcggcgagtcctttgcacatgttggcaacacacgcatccgcatcggcctccctgcccacaaagcgccaca

SEQ ID NO: 780281 - DNA, 75 bp, Homo sapiens
gagagcgccctgagagaacagggtggccgcttggtccaggtgttaaaaaagatattgagaagctttatgaagctg

SEQ ID NO: 780282 - DNA, 100 bp, Homo sapiens
gagctgtcactttgggagcggttctgtgccaacatcataaagcttgctatggcattgttcaagtacccactggaccgtggttttgcaggaaatgtgaatc

SEQ ID NO: 780283 - DNA, 86 bp, Homo sapiens
tggtaactcccatgtgcattctactgacggtgtttgtaaaatgtatgaagaacatctgaaaagaatgaatcccaacagtccctcta

SEQ ID NO: 780284 - DNA, 100 bp, Homo sapiens
atgacatgccagcccagactttcatgattcgctaaatattgtaatggatcaaggagatacacctacactagaggaagatttgaagaaacttcagctctct

SEQ ID NO: 780285 - DNA, 75 bp, Homo sapiens
ggggatggtatgaatgcatatgtagcctacaaagttacaacacagaaatttctgaataaattggcagaagaacgc

SEQ ID NO: 780286 - DNA, 75 bp, Homo sapiens
tccgactctcccacctgctaagagggagaaccgaagattacaggaggccagcatgaggttggaacaagagaatga

SEQ ID NO: 780287 - DNA, 75 bp, Homo sapiens
accaggaggccaggggtgtcgccatgagaggtgtgggaaatggaactggatagactcaagaatcaggatggcgaa

SEQ ID NO: 780288 - DNA, 99 bp, Homo sapiens
atgcacaaaagcatattttcacatgggaaaagccaacctggccctgaagaactacagtgtggagtcagtggatcggtggggaaaatgctgcttaccctg

SEQ ID NO: 780289 - DNA, 82 bp, Homo sapiens
ctcaggaacatcctccaccaggggcagacctgcctagagctggaacgttacctccagagcgagccctgctatgtttcagcct

SEQ ID NO: 780290 - DNA, 100 bp, Homo sapiens
tgcgccgcgctgcagaagagcaggcacctcctggaccagaagctccaccatgaggcgaggtggatggaggaagcgagctgaaaatgatggctgggaaaca

SEQ ID NO: 780291 - DNA, 101 bp, Homo sapiens
gattcttccaaggaaccagtgcgaagtggatatcaaagtattgcagagtgccttagcagccatccgacatgcccgctggttcgaggaaaatgcttctcagt

SEQ ID NO: 780292 - DNA, 99 bp, Homo sapiens
tgcaagagtcaccttctggactgctgcccccatgacatcctggctgggacgctgcaagctttcttcctggtggcagatgacatcatggattcatccctt

SEQ ID NO: 780293 - DNA, 100 bp, Homo sapiens
gcgcggaaggacgaggctgaggcgagaaacgaggttttgacctgtagcagagaaccaattctggagaacagcctcacttctttgattgaatacttacata

SEQ ID NO: 780294 - DNA, 139 bp, Homo sapiens
caaacaaccaaccctgatttcctgcttctccttttcatgagtgttcctgtggtctctgcacctcctttctttgagacatttgggaaatgatgaagtgcacattgtttggtcagagcatactagagactacaggagagga

SEQ ID NO: 780295 - DNA, 82 bp, Homo sapiens
ctccaagaggcccagagacatgctgaaacatcgaagtgcatctgggggaggtgttgtagccattgacaacaaaatagaacaa

SEQ ID NO: 780296 - DNA, 98 bp, Homo sapiens
ggaagggagagaaaaaggagagcctctgagctcaacggaggattgtgcctgagaagaacccacagagagtgtgaacatggctacgcctcttcattccc

SEQ ID NO: 780297 - DNA, 98 bp, Homo sapiens
aaaactacagcaacaattcaatatggtgtatgaaaacattatagactggtattttcaattttcatttgcaagaaaatgatcagtggaatgaaataact

SEQ ID NO: 780298 - DNA, 82 bp, Homo sapiens
ggactccttcggcagtccacccaccgccgccgcctcccaggccactcttcacctccaccatgagcctggacatccagagcct

SEQ ID NO: 780299 - DNA, 100 bp, Homo sapiens
ggaggccatgctcaacttctgtgaaaaggagaccaagaaacttatgcagagggagatgtccatggatgtctgtctgggaaccctgcagatctggagaaac

SEQ ID NO: 780300 - DNA, 98 bp, Homo sapiens
aaagagaactctttgttaaagaagagaataagatttttggaagaaaaggtaagaaacgttttcactatgactgcgaaagagggaagaaagaaatcgat

SEQ ID NO: 780301 - DNA, 83 bp, Homo sapiens
cggcgaggaggtcgtccgggtgctgcaggcggttgtggactctctccaaggaagcggggagaggtggtgagagatgacccctg

SEQ ID NO: 780302 - DNA, 100 bp, Homo sapiens
ctgtctgtcatgctcgtcctcatctgggttctcactggccattggcttctcatggatggatggtcttcacaataccctcttcaatcccttctgactggtt

SEQ ID NO: 780303 - DNA, 80 bp, Homo sapiens
ggaggagtcagctgtgtgtccagaacgtgccatggagacgcttaacggctcctgtgaggacaacagcctgggcctcggcg

SEQ ID NO: 780304 - DNA, 87 bp, Homo sapiens
tcgctactggagaagtccctgggactgagtaaggggaataaatacagtgctcagggcgagcgacaggtatgaggatacatgggctgc

SEQ ID NO: 780305 - DNA, 75 bp, Homo sapiens
gccaagttccgcagcctggcatggcttctggggacctttacgagagcggttctggtgaggttggaaggatgcagc

SEQ ID NO: 780306 - DNA, 75 bp, Homo sapiens
cccagaaacgtcactatcaagaaggtgagcggagaattagagtacatacactttgtttgccagtggtaagttcac

SEQ ID NO: 780307 - DNA, 90 bp, Homo sapiens
gccactccaagaaaagatggtcccaaacgttctgtactgtccaagtcagttcctgggtacaaggtgaattacttggaaactgcacaacac

SEQ ID NO: 780308 - DNA, 80 bp, Homo sapiens
cagactcttggagccagaagctacatgacccctaaacggaaatgctctatgtacagtgaagtgtgatgagaaagtgaaag

SEQ ID NO: 780309 - DNA, 100 bp, Homo sapiens
actcagtgaagcatatccaatcaacatgcataatgatctggaactgctgacacaatactctttggaaattttagcattcaggtgccaggaatgcagatgg

SEQ ID NO: 780310 - DNA, 73 bp, Homo sapiens
aggaactagaggagagactgactaaagaccgaaatgatgatgtttgtacagcgctattaattacagccttcaa

SEQ ID NO: 780311 - DNA, 50 bp, Homo sapiens
gcagatcaatgacatttccctgcaggtggtgactctcaaaaggaaatagg

SEQ ID NO: 780312 - DNA, 96 bp, Homo sapiens
gaaaattccacagttccgtggtttgtaaagcaatgcattgaagctgttgagaaaagagctgaatatctgtattctacacctgaacagctttcaaaa

SEQ ID NO: 780313 - DNA, 80 bp, Homo sapiens
acaatgagaggcatgaggtgcagctggacatggaaccccagggctgcctggtggctgagcagctctaccagatccagcaa

SEQ ID NO: 780314 - DNA, 100 bp, Homo sapiens
ctggaggctgagtgctaaactgtgtggggcgcggatgggatccagctgttagtcgggtaggcatagaaaacagaatcttggcattgtcttcctcaagaaa

SEQ ID NO: 780315 - DNA, 75 bp, Homo sapiens
tttgcaacacagtagtggtttctgctcctaaccaaccccgacaaaagactgaacctccattgaatactccagaaa

SEQ ID NO: 780316 - DNA, 96 bp, Homo sapiens
ggatgatccataccctgttctctttaggtattcaagagacgatatttttacttgacccaacttcctgacggttcatatattctcaattcctataaa

SEQ ID NO: 780317 - DNA, 90 bp, Homo sapiens
ggagcacatgcagtcccatgcaggtggtatgcaagattacaattatgtgtgggccaactgttttgagatcacattagaactgtcttgttg

SEQ ID NO: 780318 - DNA, 50 bp, Homo sapiens
tggagaacaagcccatcgtcacctgcagctggctaagagtcttgggcagg

SEQ ID NO: 780319 - DNA, 100 bp, Homo sapiens
aagctcatctctgagacccggaggaggttcgaagctgagtatgtgacagattcatgatgttgctatcaaaagttgagaaattgtcagaagaaatcatgga

SEQ ID NO: 780320 - DNA, 100 bp, Homo sapiens
tggctgcaacacttacacagcagcaacagcctgctacagatgttcatttggatttggaagaccgcctggcaaaatttatgaagacagaagaagccattat

SEQ ID NO: 780321 - DNA, 100 bp, Homo sapiens
tgtggaattatccactgaagttcagtctttgtacagagagataaagtgtcgagttatagcagtgctggattgggagctgtcaaccattggtcatcctttg

SEQ ID NO: 780322 - DNA, 87 bp, Homo sapiens
aggttataagaaaggtgcagaagtcattttaaactatggacgactccgaggaacattgagggcttctaccactgctgatgcaaaacc

SEQ ID NO: 780323 - DNA, 100 bp, Homo sapiens
ctcagatggcagcctttgtgggttgaagctccattcataccaaagtttagaggctctggagataccagcaactttgatgactatgaagaagaagatatcc

SEQ ID NO: 780324 - DNA, 95 bp, Homo sapiens
cgctctgagggcgcctgctcagatatttatccccattttacaaggcctggctcttgctgccaaagagtgctccctcgacagtgactactttaaat

SEQ ID NO: 780325 - DNA, 83 bp, Homo sapiens
caatggccatgtcctacgtgaaggatgacatcttccgaatctacattaaagtgaggactcttgtgaagatatgagttgtggag

SEQ ID NO: 780326 - DNA, 83 bp, Homo sapiens
cattgactggaaacaatggcatttacagaaagagtcaacagcagtggcaacagtgaaacagattcagatagttcaagttcatc

SEQ ID NO: 780327 - DNA, 100 bp, Homo sapiens
cggcgccggcgccgcggcctcttcggctgcggaccctgccattccggaggagatgcaatgctcttggtggcagagcgactggaggggccattcaacattg

SEQ ID NO: 780328 - DNA, 100 bp, Homo sapiens
ttatcctgttcaaagatgcagccagtgtggagaaggtaacctgtgtatggtgactggaggtgctaacctaggaagaattggtgtgatcaccaacagagag

SEQ ID NO: 780329 - DNA, 75 bp, Homo sapiens
ggtgcccgaggaggcagccaagctcgtagcctgccactccgtgcgcttcagggatgacttcttagggggcagggg

SEQ ID NO: 780330 - DNA, 51 bp, Homo sapiens
aaggattccaagtaactcttatttggacgccaggaaagcatgtgcagatgc

SEQ ID NO: 780331 - DNA, 100 bp, Homo sapiens
agtgtggccgagactccagtgcataagcagatctccaaaaggctgctgcacagacaaatcaagggcaggtgtaagctgttcagatgaagatgaaaaaccc

SEQ ID NO: 780332 - DNA, 100 bp, Homo sapiens
ttctctccgaatacatatgttaaagcacacaggtgtaaagccacatgcatgccagtgagaaagatcagtctaaagaaaaggagaagaaagtgaaaaaaac

SEQ ID NO: 780333 - DNA, 100 bp, Homo sapiens
ggctgtcagacagcttcaaggagacgtctgaccagtgcacaggacttcagggcttcctggtgttccacagctttggtgggggcactggctctggcttcac

SEQ ID NO: 780334 - DNA, 82 bp, Homo sapiens
aaaggctcagaaagatggatttttgcatgagacgcttctggacaggaggaagaacgtgcaaaacgtgaggagctagagcgaa

SEQ ID NO: 780335 - DNA, 104 bp, Homo sapiens
ccgtcttccttccagagcccgaccaggcctccactggcatcaccgacacactatgctccctccaaagccaaagcagatgagcgtcccactttcaaaattcttct

SEQ ID NO: 780336 - DNA, 101 bp, Homo sapiens
ctggagacaacagaaacagaaacgattgtggaaacagcctatatatgcaaacagatttgcagtaccaacctatgcagccaagcaacctcagcagttcccat

SEQ ID NO: 780337 - DNA, 83 bp, Homo sapiens
cggaaaagttgtagctttcaaggtaacatctgccggcacctgctgccccgggtccagtgccccgccttgattgtgcacggtga

SEQ ID NO: 780338 - DNA, 102 bp, Homo sapiens
ggtcctcgtcctggtcttcatgaaaatagcctgttgttttgtccaaaatcaaaactgcacatccacagagcagagatctcaaagattatgcgagaatgtcag

SEQ ID NO: 780339 - DNA, 100 bp, Homo sapiens
agagtccaaacagagagtgggaagggcccttaagtgagaagcaggaggctttgatgaccaagagccccgcatccaatgcacggcgtcccgaggaccggaa

SEQ ID NO: 780340 - DNA, 74 bp, Homo sapiens
ccccggacaggctgcagctcgtgtgcaacgcgctactggcccagttatcaggaactgttgccgttattacatca

SEQ ID NO: 780341 - DNA, 120 bp, Homo sapiens
agcggcgttatgacaggaagcagagtggctatggtgggcaaactaagccgattttccggaaaaaggcacagatagatcattatctaggacttgcaaataagaatgttaaagatgctatgg

SEQ ID NO: 780342 - DNA, 100 bp, Homo sapiens
ggggaacaagccggggaccaagccggggaccaagccggggactaaggcgagccggagaccgagcccgaacagcaggttaaagctgaagctcaacaaagat

SEQ ID NO: 780343 - DNA, 50 bp, Homo sapiens
ccctgagccgcccctacacccacagtgcctccggagccagcgtggtggcc

SEQ ID NO: 780344 - DNA, 101 bp, Homo sapiens
acaggacccggcgccgggcactgagcaccgccaccatggggaaggggagttgcatgctgagaatttgaaaaatgaagatgatgtagacactggactattag

SEQ ID NO: 780345 - DNA, 75 bp, Homo sapiens
aaatttctacacctacccattggtctaaacttgatccaaagacaatgaaggacagaagtcggtcctaggcccccc

SEQ ID NO: 780346 - DNA, 96 bp, Homo sapiens
gaaatgagctgaagaccattcacagagtttcacaggtatatgttgccattgatgaaagacttgcatctttgaaaactgatacatttagtaaaacaa

SEQ ID NO: 780347 - DNA, 75 bp, Homo sapiens
gctcatgagaagctctacagcctcctctccgaccccattcccgagacaatgcagatcttcgtgaagactctgact

SEQ ID NO: 780348 - DNA, 97 bp, Homo sapiens
ctcctgagtagctcggattacagcagtattcatgatcataccaactcccactgctttctgaagatgctacagggaaatctaaaggagacattatttg

SEQ ID NO: 780349 - DNA, 75 bp, Homo sapiens
tgcgcggttggggccactgcgaggccgttttagcttcatcactggtccagctgtaataccagggtacttctccgt

SEQ ID NO: 780350 - DNA, 75 bp, Homo sapiens
cgggggcctcttctggaccaggaaactctccactttgtgaagtgtggatatgcaggctctaactttccagaacac

SEQ ID NO: 780351 - DNA, 82 bp, Homo sapiens
acaagcagccccgcttctgggctagcatgatggaggcagccagccccaggggaagtcctatctgtacttcacacagttcaag

SEQ ID NO: 780352 - DNA, 90 bp, Homo sapiens
caggcgccggccggctgcgaagacgcggtgggccgcccctccgcctacagcctggctcccgcgacgccggaggtgaaggtggcttgctcc

SEQ ID NO: 780353 - DNA, 100 bp, Homo sapiens
gtgtgcagtccccccttgccaacacacccttccttggttacttctatcatggtgctgtgcttgtgacatcacgggaggactgtacctgaaggtgcctcag

SEQ ID NO: 780354 - DNA, 83 bp, Homo sapiens
tcctcccctttcatccctatgtggaaaacgtagtttatgccaacgtgacttcattcatacagatgaaccaaggatcgggatag

SEQ ID NO: 780355 - DNA, 75 bp, Homo sapiens
gattttctgctttaactgccgcctcacctgtggagctctgggtacagcatacatctgtggatggatatactgaac

SEQ ID NO: 780356 - DNA, 74 bp, Homo sapiens
atttctgcagtgaagattgctgtaaaaaatttcaggattggtactacaagtactatactggcaattgctggaga

SEQ ID NO: 780357 - DNA, 88 bp, Homo sapiens
agagaacaatgggaaccagtctttcaaaatgcctggcatgcgtgggcagtgatgaacttcgaagctgtgctacactacaaacatcaga

SEQ ID NO: 780358 - DNA, 100 bp, Homo sapiens
cctccagttattacagaggagcccatggcatcatagttgtgtatgatgtgacagatcagaataactgaagtgaagtgatggactccgatttggagagtag

SEQ ID NO: 780359 - DNA, 90 bp, Homo sapiens
ggaacttgttggaaatggaacatacgggcaagtttataaggtgggagctatcggcgacgaggaggagtgggtcaccctctatgaagagga

SEQ ID NO: 780360 - DNA, 86 bp, Homo sapiens
gcaatgcagaatactatggcccatcactcttcctcctagcttgaagctcaactagagaaaaaggaccaacaatttaaagaacaaga

SEQ ID NO: 780361 - DNA, 100 bp, Homo sapiens
gacagtgaaatagctacaaccagcctaagggtttctctactatgtccaatgcattgttctgggttggcatggcatcctgatgttgctactcagatggtcc

SEQ ID NO: 780362 - DNA, 83 bp, Homo sapiens
gtcggggatcggtcgcctgagaggccctgtttgtgctcttcgtcctggcctacatccacatcgtcttctcccgctcgcccatc

SEQ ID NO: 780363 - DNA, 100 bp, Homo sapiens
tatttggtatactgggcacaatccatctggtggcagctgataccccaatgtccttctttgactttgtggttgatcctcattctttcccccgtacagtgga

SEQ ID NO: 780364 - DNA, 80 bp, Homo sapiens
cgtaaagattccagagaagcctgtgaacaaagacacattcagctaacgtattttagcaggtggagtgaggttgaagattc

SEQ ID NO: 780365 - DNA, 82 bp, Homo sapiens
tgcctacccgccggcccgcgggtctacttcctcaaagttactccacaggatccgctgaacataggatgttgccacaaaatct

SEQ ID NO: 780366 - DNA, 51 bp, Homo sapiens
ccttgggccgcgtctcctttgaggcaggggaaatggaaggtgatgcagtcg

SEQ ID NO: 780367 - DNA, 82 bp, Homo sapiens
cctcagcctcccaaagtattgagattacaggccaagactaaggggctgcagagcggggtggacattggcgtcaagtactcgg

SEQ ID NO: 780368 - DNA, 98 bp, Homo sapiens
agcattggtatctacggcctggacttctatgtgggagaagatgtcaaccggacactagaaggtggaaggaaacctcttcattatgcagcagattgtgg

SEQ ID NO: 780369 - DNA, 95 bp, Homo sapiens
ggaaacgccgaggaacccggctgaggcggcagggggtggcttccaccactgctccagcgaccgtggcgggggcttctgtgcctatgcggacatca

SEQ ID NO: 780370 - DNA, 98 bp, Homo sapiens
tttttcatgacctttctcatctgactcgtgatctgcccatcttgttactccctagcagtgtggtaagttggccttgattgtggctcagcatcgtgatc

SEQ ID NO: 780371 - DNA, 83 bp, Homo sapiens
cttccacgctctcggaatcacgacccctccctgccatgtatccgcagggcagacatccgggcgtctctggccgagcctctttt

SEQ ID NO: 780372 - DNA, 100 bp, Homo sapiens
gggcgtccctgagagaaattaagctccatgaacctgcctccagacaaggcccggctcctgcggcagtatgacaatgagaagaaatgggatctgatctgtg

SEQ ID NO: 780373 - DNA, 80 bp, Homo sapiens
atccaacagcccagtgcttctgtctcgactgcactttgagaagatgtgaacgagtgtgaaacactacagggtgtatgtgg

SEQ ID NO: 780374 - DNA, 75 bp, Homo sapiens
ccagggagaaaacaaaggcggccggcctggtgcgcaaggccccgaacaacaggctggctgaaggcggtgcaggtc

SEQ ID NO: 780375 - DNA, 90 bp, Homo sapiens
gatgagagcattcgaagtgacctcagcagggcatccagaggagaaggcagagcccccccaggctatgaatgccctgatgcggttgaacca

SEQ ID NO: 780376 - DNA, 100 bp, Homo sapiens
ttcctttgttttgggaggatatagcctgcctatatgctgtggaaatgaacggggagcagcagcttgatgcagtgagaaagatcagtctaaagaaaaggag

SEQ ID NO: 780377 - DNA, 51 bp, Homo sapiens
gcctcttcatattggcgatcctgttgtgtgaaattcgatgctactgtgatg

SEQ ID NO: 780378 - DNA, 100 bp, Homo sapiens
gtgatattgtagaaattgctgacctgatggccaaaagaaaggaagaaaatttttcctctcctaaaaatgccaaaaggccaagacaagaagaattggagga

SEQ ID NO: 780379 - DNA, 74 bp, Homo sapiens
ggcgcgtcaggccgcgacgagggcgctgagtaagactttgaccccgacgcaggcttcagtgattgccgcggatc

SEQ ID NO: 780380 - DNA, 113 bp, Homo sapiens
cgtgtttggagggaaatgggaatgtacacgataattaaagagtaaagttgtgctcaacgttttcggctttgtgagaaaccttaccatcaaacacgatggccagcaacgttacc

SEQ ID NO: 780381 - DNA, 83 bp, Homo sapiens
cgcgctactctctctttctggcctggaggctatccagcgaagactatgaccgtctgaggcctttatcttacccaatgaccgat

SEQ ID NO: 780382 - DNA, 82 bp, Homo sapiens
tgggagccttcctgatccgggagagtgagagctccccaggggagttctctgtgtctgtgaaactgtgtcagggaaaagggag

SEQ ID NO: 780383 - DNA, 113 bp, Homo sapiens
ttcgggccgagatgtctcgctccgtggccttagctgtgctcgcgctactctctctttctggcctggaggctatccagcggccaattcctgtccccccagcagcatggcatcgt

SEQ ID NO: 780384 - DNA, 82 bp, Homo sapiens
ggccgcttcttccagaagggccaagggacttgcttttatttcggttcgggaagaataccggaagtgggcctgcctagttgct

SEQ ID NO: 780385 - DNA, 100 bp, Homo sapiens
ctgggaaacatcattaaatcgaccccagccatgataggctgctcgttcgtggtcaacaggaagttcttcggtgaaattggtcttctggatcctggcatgg

SEQ ID NO: 780386 - DNA, 100 bp, Homo sapiens
tccaacagccacagtcaagatgttgccaacattcgtaaggtccattcctgatggctctgagagaactcgatgccaccgcaacggtattggcgaaccggca

SEQ ID NO: 780387 - DNA, 75 bp, Homo sapiens
ggctccgaacacccgcccctctgctccaggtggtctttgggaagaagcttcctgcctttgccaccatccccatcc

SEQ ID NO: 780388 - DNA, 80 bp, Homo sapiens
cccacaccctggagacattggggacttcattaatgaggagatgagtatgatgtatgtgccatttgtttggatgagtatga

SEQ ID NO: 780389 - DNA, 100 bp, Homo sapiens
tcaaagtggaccccaggggagaagtcggagcaaagaacttaccaccaagcaggtgaaagaactcttttcttctttgggagtcgaatgtaatgtcttggaa

SEQ ID NO: 780390 - DNA, 82 bp, Homo sapiens
ccgacggctgctcaaacatcaggaaatcaacgaccgggagcagaagttgcatgcccttaaggaggtattaaagaaatttcca

SEQ ID NO: 780391 - DNA, 100 bp, Homo sapiens
ttttagcaagtcagaatgaagatttgggtgagaaggactggcagaaatacgagactgctcggcggctgaaaaaatgtgtggacaagatccggaaccagta

SEQ ID NO: 780392 - DNA, 134 bp, Homo sapiens
ttacactttcttgtacaaagtggaatttcctactgtatcatgatcatcataggagtggagaacatgcacaaggtgctggagatctagaagacccatggtagccttaaaaaccttctaaaatgcttttgattctg

SEQ ID NO: 780393 - DNA, 73 bp, Homo sapiens
gaaggtggcaagatggtgttggaaagcactatggtgtgacctatccctctttgttctgttgttatgataaata

SEQ ID NO: 780394 - DNA, 101 bp, Homo sapiens
cgcgaaggcggtgctcgggccagcccttctctgccgtccctgggagctggttgtcttcttgcctgccctgtgtcgtaaaatgggggtcccttactgcatta

SEQ ID NO: 780395 - DNA, 100 bp, Homo sapiens
caaatcaagtatacagaaaatcggtgaagagaggttttgaattcacgcttatggtagtggaatcatgtcaaccctgccatggacttcacgcagactccac

SEQ ID NO: 780396 - DNA, 100 bp, Homo sapiens
gaaggcttatgaggatggctgcaagactgtcgacctaaagcctgactggggcaagtgttgtacatcagtacacagaagagacggatgtgaagacaccaag

SEQ ID NO: 780397 - DNA, 100 bp, Homo sapiens
atggcggatatggaggatctcttcgggagcgacgccgacagcgaagctgagcgtaaaggttttttgccctgacatctcttcgtcttgtgtttttacttgc

SEQ ID NO: 780398 - DNA, 98 bp, Homo sapiens
gtcggccgagatcgagctgccggacgtggagcccgcagccttcctggcgctgctgagtctgcgggccaggcatcgacatccgcaacgactatcagcag

SEQ ID NO: 780399 - DNA, 75 bp, Homo sapiens
cagagatgtgatgttggagaactatagcaatctggttttcttgggtaaatacggcatcatctgcatggaggattt

SEQ ID NO: 780400 - DNA, 88 bp, Homo sapiens
tgaagattttgtagctggtcttggttgggaggataacgtggaaagggcagatgctttacagctgtctgtggaagaatttgtggagcgg

SEQ ID NO: 780401 - DNA, 75 bp, Homo sapiens
caggatgccgtgggccgcagccactcaggactgtcaaagactactccaaaggattcggcgggaagtatggggtgc

SEQ ID NO: 780402 - DNA, 83 bp, Homo sapiens
cctcctgattatagattagaagaggtcaagagaatggatcttggagaatgtctgaaagtccatgacctggctttaagagcgga

SEQ ID NO: 780403 - DNA, 100 bp, Homo sapiens
cgctgcaagcccttccactacgaccggccctggcagcgcgccacagcccgcgaagccaacgagtgcgtggccagcgtcccatgctcggtggccccagaaa

SEQ ID NO: 780404 - DNA, 97 bp, Homo sapiens
ttggagaagaagttgcccagtatgatggggcatacaaggaaaggccgagggggacggcaagatgcacatcaccctctgtgacttcatcgtgccctgg

SEQ ID NO: 780405 - DNA, 100 bp, Homo sapiens
gtggggctcccagaccttcaaaccaaagggccaatacctggatatggttctggatgtatgttgtgttcacagcgaaggtactcccttcagcctgtcccag

SEQ ID NO: 780406 - DNA, 100 bp, Homo sapiens
taccttgtctcagctgctgaagctggatctgtgccagttcagaagcaggcgagcctcttccctgatgaaaaagaagataacttgctgggtaccacatgcc

SEQ ID NO: 780407 - DNA, 82 bp, Homo sapiens
gccaggctctggagcagttccatcagctcagccaggtcttctgtcccccgaggcagcctatgatgtgctgagcgtcgccgac

SEQ ID NO: 780408 - DNA, 119 bp, Homo sapiens
gctaatgtgtgctgtgttaaattcagcccctcttccagataccatttggctttcggctgtgcaggtcggcttgggaaaccaaaaattacacagagtttaatggcatctgtgaacagcac

SEQ ID NO: 780409 - DNA, 74 bp, Homo sapiens
ctggaccccaacaggtttaaccccaagaccttcttcatactgcatggtagccgggctgagaggccctgtgctgc

SEQ ID NO: 780410 - DNA, 75 bp, Homo sapiens
cttcatgatattactgtaccgttagaagtttttgaggatgaggcagatgctctctacgaagctctgaagaagctt

SEQ ID NO: 780411 - DNA, 90 bp, Homo sapiens
ggccaagcacaaagagcttgctccctacgatgagaactggttctacacgcgagctgattctgatgctcacagtaccacctcaagtgcctc

SEQ ID NO: 780412 - DNA, 75 bp, Homo sapiens
ggcgccaccgcctcatgcactgtgtagcatcatcggctggttcgtgcgaagcttcaagtacttttacgggctccg

SEQ ID NO: 780413 - DNA, 107 bp, Homo sapiens
cagcaaccccttcctggtcggattacactcctgcttccagacgacaagtcgcgggctgacgcacgaggcacacaggaaggaggtggagcaggtgtatctgcgctgtg

SEQ ID NO: 780414 - DNA, 99 bp, Homo sapiens
cttgaagaatggcattgtcaatgaaaatattgttccagaaggttatgattttgacgttggaacttgccaggaatccagcaatgatgcaggagatgatga

SEQ ID NO: 780415 - DNA, 51 bp, Homo sapiens
gctgccgtgaataggcagcctaaaggaaacggcactgcccagtctgcagac

SEQ ID NO: 780416 - DNA, 82 bp, Homo sapiens
tccttcggcagtccacccaccgccgccgcctcccaggtgtagtcgccgccgccagccgccatgggcaaacagaacagcaagc

SEQ ID NO: 780417 - DNA, 75 bp, Homo sapiens
cttctgctgcacgctgtctgccagtacatggacctcatctcggccattccacaggcgcatgggccacgtttccag

SEQ ID NO: 780418 - DNA, 87 bp, Homo sapiens
gatacggcgtcttgccaccgggcctgtcagttgacctaccccttgcacacctaccctaagtggagcagcgtgacttcattggagtgg

SEQ ID NO: 780419 - DNA, 82 bp, Homo sapiens
cttacgtgtactttaccaacgagctgaagcaggatccttactttagaatgacaagggacgtcgcccccaggatcggctatcc

SEQ ID NO: 780420 - DNA, 100 bp, Homo sapiens
gccaggcgtctgcgaaatcatatggctgtagcattcgtgctatccctgggggttgcagctttgtataagggtatgttagagcccaccaaggaaccactga

SEQ ID NO: 780421 - DNA, 51 bp, Homo sapiens
accacctaactgctcgaggcattcaagggaaggcaaagaggaaattgtgaa

SEQ ID NO: 780422 - DNA, 101 bp, Homo sapiens
attgaagagacgttaaaatacttccttacagatttatggtaatggaaagactaggaatagatttacagaagatctcaggccagaatggtacctttaaaaag

SEQ ID NO: 780423 - DNA, 99 bp, Homo sapiens
caacaaattctggtgggagaacaaagctgaggtccagatgaaagagaagtttctggtcactccccaggattatgcgcgctccgctccatcccagtcaag

SEQ ID NO: 780424 - DNA, 100 bp, Homo sapiens
ctcgtgaagaacctgaaggacacactagaggaattcagaaaagcagctcagcaacaggaagaacaagaagaaaaggaggaagaggatgatgaacaaacac

SEQ ID NO: 780425 - DNA, 75 bp, Homo sapiens
cgggctccagactcgccgtggtcaagttcaccatgagagggaagctcttcgtgggcggtcttgactggagcacga

SEQ ID NO: 780426 - DNA, 51 bp, Homo sapiens
atcaatggcatttgaagataaagagagtttcactcttgttgctcaggctgg

SEQ ID NO: 780427 - DNA, 90 bp, Homo sapiens
acagtttttgaggcttcttcagagcttcagtgaccaccacgactgggaacttctggggtaggacgttgtctgctatctccagttccacag

SEQ ID NO: 780428 - DNA, 73 bp, Homo sapiens
aaagatattcaaactctaaaccatctgaattggctcaatgatgagtgggcagatttgtccttcccattctgca

SEQ ID NO: 780429 - DNA, 100 bp, Homo sapiens
ccgcttcagtccgaaggaggaagggaaccaacccactttctcggcgccgcggctcttttctaaaagtgttgaagcactggacaatgccacatactttgtg

SEQ ID NO: 780430 - DNA, 90 bp, Homo sapiens
cttgaaatgaaaggagattccaacctacttcagcatatgagctatttgcattcatcagtcacatgggaacatccacaatgagtggtcatt

SEQ ID NO: 780431 - DNA, 98 bp, Homo sapiens
gatgcttcatctgcccctgcccagatccggaagaacggtgaatttcccccgcagtttctccacagacactacccaaagcagtccttcactacagtggc

SEQ ID NO: 780432 - DNA, 83 bp, Homo sapiens
cagacttatgctggaactgggttttagcaagacttctgctggatgtgtctaggagattggaagactcatggcagtgaatacta

SEQ ID NO: 780433 - DNA, 83 bp, Homo sapiens
gccggcgaaggaggaggcgttgccgggagccttcacgtaaatgggtccagtcatgcctcccagtaagaagccagaaagctcag

SEQ ID NO: 780434 - DNA, 90 bp, Homo sapiens
aacgacaagaaaaacaatcgcttcaatgatgggaaggtggatcccgccgggaggtactttgctgggcccacttaattcatggattccacc

SEQ ID NO: 780435 - DNA, 82 bp, Homo sapiens
ggagctgtgcagccgcgaggaggcgcgggaggtgttcgagaacgaccccgagacgctgctctgttaaaagcgaaaatgaaac

SEQ ID NO: 780436 - DNA, 83 bp, Homo sapiens
cagctgtgcggagctaggacgcggaacatcccagaggccagcatcaacataaccagacgtcctgggtcctctccagcatggca

SEQ ID NO: 780437 - DNA, 98 bp, Homo sapiens
ctcgacctctggttctacttcacactgcagaactgggttctggactttgggcgtcccattgccatgctgccactgcagagccccgccatggaagacac

SEQ ID NO: 780438 - DNA, 75 bp, Homo sapiens
cagccagcaggaaatacagcatggtccacatatagcctcagttacattagctgcttatgaatgcaattcagttaa

SEQ ID NO: 780439 - DNA, 100 bp, Homo sapiens
gacttgccggcagaacttacgctgcgggaccccgggcactgttgctgctgcgggaggagggcctgaggctatggcaggaggagcaggagaggaaggtgca

SEQ ID NO: 780440 - DNA, 74 bp, Homo sapiens
taagctttccgggaacatccaaggcaagactggcacccagcacagcaggtcggaagtctatgcgtcagtctaca

SEQ ID NO: 780441 - DNA, 83 bp, Homo sapiens
agccatggagagcggcccgcgtgcggagctgggggcgggcgcacccccagggaaatcctcattgacgattcaatttgttgaag

SEQ ID NO: 780442 - DNA, 83 bp, Homo sapiens
gcaacttctatttagtgatcatgggtgctcaggaacggatagatagcttgcgtcgaactggggtgatccatgaaaaacagaca

SEQ ID NO: 780443 - DNA, 96 bp, Homo sapiens
agcgaggcagctgtactaggactgggaacggggtcaaagaattgactgtagatccaactgctgctggtgatgttcgtccaataatgcaccatccac

SEQ ID NO: 780444 - DNA, 100 bp, Homo sapiens
cacgggtacgggagcaccacgggtacgggagcaccacgggtacgggagcactgcggctatgagagcaccacggatttctgcgccaggagatgaggggcgg

SEQ ID NO: 780445 - DNA, 88 bp, Homo sapiens
aagaagctggaggccggcaaagccaagtggtcctttggcgtgctcctctgggagctgatgacaagaggagccccaccttatcctgacg

SEQ ID NO: 780446 - DNA, 98 bp, Homo sapiens
cctttgctactaccgcgactggctgctgcggcgcgagctgatccaccttgagatcaagccggccatccggaaccagatcatccgcgagctgcaggtcc

SEQ ID NO: 780447 - DNA, 100 bp, Homo sapiens
atttctcccttgttggtttgggatttgaagaacacaatgctgagatgtataaactgtcttcagagcaattccatgaggcagcctcaaagatggagagcac

SEQ ID NO: 780448 - DNA, 82 bp, Homo sapiens
caaggaaaatggctctgtcggtgtaaaaaagagtcagagtattcatcgaaaagaaagcacagctaacacttttaggaacaga

SEQ ID NO: 780449 - DNA, 50 bp, Homo sapiens
tatccagacggctgcccttcaagtaccaatgggggctccggaggtggcgc

SEQ ID NO: 780450 - DNA, 50 bp, Homo sapiens
acttttgaagtgcctttgatttctggtcaccttcaggccattcagaggag

SEQ ID NO: 780451 - DNA, 88 bp, Homo sapiens
ggcagcagcagcaccaccggacggcaccatactggacataccttttatgtgcactgggactttttatttaccagtcactggatgctat

SEQ ID NO: 780452 - DNA, 50 bp, Homo sapiens
tgaagtgcagaggtttttttctggcaagtagcctgcagtatgaaatgctg

SEQ ID NO: 780453 - DNA, 100 bp, Homo sapiens
gtgacctgcttttcggttccgggtcttggccccgtccttacctcacaggtaggcgaaaaccaagagtacatcggcctcgttctcctatattggaagaaaa

SEQ ID NO: 780454 - DNA, 100 bp, Homo sapiens
aagttcgaggggaaaccgctgcttcagagacacaggttctccacagacgaaggtcaatgctggcaaacctacacgttcaccagggaccccatctatttca

SEQ ID NO: 780455 - DNA, 103 bp, Homo sapiens
gaggaaacaagacagttctgtctgcagaagcccattatggctgtaactggagatgacacagggtaccaccatcttaaggacagaaaagctacaggactctagg

SEQ ID NO: 780456 - DNA, 74 bp, Homo sapiens
gatgtggatttaccttatcccctcaacaacttttcagtggcaagttttagctaaagaagatactgaggcagcta

SEQ ID NO: 780457 - DNA, 50 bp, Homo sapiens
gaacactgtggcggccatcgaggagcatttatgacattaacagagaacag

SEQ ID NO: 780458 - DNA, 101 bp, Homo sapiens
acatgtggggcctgggaaatgaaagagcgccttgggacagggggatttggaaatgtcatccgatggcacaatcagacgcaaacatgcagatctttgtgaag

SEQ ID NO: 780459 - DNA, 100 bp, Homo sapiens
cgtctgcattgctccggactcagccaagttccccaacggctccccgtcgtcctggtgctgcagcgataaaccgagaaaactggtgtacaatagagccatg

SEQ ID NO: 780460 - DNA, 82 bp, Homo sapiens
ttgcggcagcggaacctaaagtttcaggatcaatgtccgagttaccaccatggatgcagagctggagtttgcaatccagcca

SEQ ID NO: 780461 - DNA, 100 bp, Homo sapiens
aactccagcctcatgcggatcaccctgcggaacctggaggaggtggagttctgtgtggaagaggctgggaggcggcagaatgcagccagaggagggcaca

SEQ ID NO: 780462 - DNA, 100 bp, Homo sapiens
ctcccggcccggattatagtctctcgccacagcggcctcggcctccccttggattcagacgccgattcgcccagatctacgactctggctccactgatta

SEQ ID NO: 780463 - DNA, 82 bp, Homo sapiens
ccatcttcggcatgtccttcgcctgccagtcatgtgaagttcatttccaatccgccctccatggtggcagcggggagcgtgg

SEQ ID NO: 780464 - DNA, 100 bp, Homo sapiens
atgttggggagctgatttcagactcagaagccgacgttcgagaggaagattcttacctctttgatctcgacaataaggcataatcaccagcaacacccgg

SEQ ID NO: 780465 - DNA, 50 bp, Homo sapiens
tggaagaggtcctatgacaggatcaagcactgctcagcacgcaggcatgt

SEQ ID NO: 780466 - DNA, 121 bp, Homo sapiens
agaacataagagagcagctgcccatgccaaatagttacctcttttaaactcattctactggagcaaatggccagtactgatgcaggcactgcaggagccctgactccacagcatgttcgag

SEQ ID NO: 780467 - DNA, 73 bp, Homo sapiens
caaaattgaaaaaatggttgacctcacccaggatagtaatgatgacactgaagatgtttcactgtttgatgcg

SEQ ID NO: 780468 - DNA, 90 bp, Homo sapiens
ggttgcaacggagataaattcccggaaccgcgattcggcgtgtcaggtgtggccgacgacgatgccctcgctgaggagcgcatgcggaga

SEQ ID NO: 780469 - DNA, 75 bp, Homo sapiens
agaagtctcgggtttgacaaaggtctatcagccacagtctctgcaagtttccaagagcagcagaaaatgaacaca

SEQ ID NO: 780470 - DNA, 100 bp, Homo sapiens
gcagcaagttagtggattaaaatctcccaagaggaatgacaaacaaccagctcttcaggaaccaacgtccaagaggcccagaagatactcaacaacagcg

SEQ ID NO: 780471 - DNA, 83 bp, Homo sapiens
gctgagcctttctggacagaccaacctgtcagtgctgcaagtgatggcttctctgactggatgactgagcgagttgatttcac

SEQ ID NO: 780472 - DNA, 124 bp, Homo sapiens
ggtatgagcattctccagggaaaggatgacatatttttggacctgaaacagaaattctggaacacctatatggttatcaatactctggctgaccatcatcatcgtgggactgactttggtggaa

SEQ ID NO: 780473 - DNA, 100 bp, Homo sapiens
aacagccagttctcccaaattctcagagcttgttatgaaggcacctaattacaacaagcatgcacattttggtgcattcaagaatggaaaatcagaatag

SEQ ID NO: 780474 - DNA, 100 bp, Homo sapiens
atccggtacttcaaccgcagcagcccggtgtacggcctggtccccaggaccccaaggagcaacaaaggcagctgaagaagcagaagaaccgggcagccgc

SEQ ID NO: 780475 - DNA, 82 bp, Homo sapiens
gacgccgggacaccaagaagcagggaaatgtgttctaagaacggaagcatctgggctggatggaatttagcatcaagcagag

SEQ ID NO: 780476 - DNA, 75 bp, Homo sapiens
cgaggcctcattgatagcttacgggcacagagatcccggtacatgaagcttcgagagctgtgcccaggagtgaac

SEQ ID NO: 780477 - DNA, 98 bp, Homo sapiens
ctgttgtatatcaagagaccaatggagagattgtgcgagccatgacctatgtcatcaaccagggcctggccctatactgggggacatcccgatggggg

SEQ ID NO: 780478 - DNA, 101 bp, Homo sapiens
aagaccatgctggcaagtctgaaggtcaaatttggaagaggcgagataatgatgaaaccaaccagcagggggcttgaaggaggcgtctagggctttgctcc

SEQ ID NO: 780479 - DNA, 83 bp, Homo sapiens
attcgtggcgccacaagctcattcactgtgtagctgcgcaaaccatgcaggatgatttactgatggacaaaagcaaaacccag

SEQ ID NO: 780480 - DNA, 100 bp, Homo sapiens
aatggcattccttatcctcttccatgttctctcccagaggtggtgctgaatgacctgaggctgttccagaataaagcaatggctgccatccggaagaaac

SEQ ID NO: 780481 - DNA, 50 bp, Homo sapiens
cacattggaccctcctcccaactgtaggagcctcacagtctactcagaga

SEQ ID NO: 780482 - DNA, 98 bp, Homo sapiens
aggatcccaagagaagccactttgtcttaattgctggggagccattaagagaaccagttatccaacatggttttgctgttactgctcagtgtagtcac

SEQ ID NO: 780483 - DNA, 50 bp, Homo sapiens
ctcctctatgctggacatcaaatttccagaattctcaatcacaatcctct

SEQ ID NO: 780484 - DNA, 83 bp, Homo sapiens
gtcgcgtgtctaggtgagtcgcggtgggtcctcgcttgcagttcagcgaccacgggagtggacatccgccataacaaggaccg

SEQ ID NO: 780485 - DNA, 100 bp, Homo sapiens
gcacaaggcagcccgcacgatatcatcagaataggacctccatcttcaccaagaaatgttatctctaatataaacgagacctcagttatcctggactgga

SEQ ID NO: 780486 - DNA, 100 bp, Homo sapiens
tttgttattggagaaacatgcagattatatcgcatcctatggctcaaagaaagatgattatctacattggattgggccacatctattcggggacctttgc

SEQ ID NO: 780487 - DNA, 102 bp, Homo sapiens
cattcctgtgaaagtgatgaggaggatagagcctcacatgcaagctctagtgactggactccaaggccacggataggtattgttctctccaagccagaactg

SEQ ID NO: 780488 - DNA, 100 bp, Homo sapiens
atacccactgccccccaactacagctatggatcctacatggctttccaccaacctgggcatcctgacctgcatcgagtgttccggaatccaccgagagct

SEQ ID NO: 780489 - DNA, 75 bp, Homo sapiens
atctcccggtgcttcacgcggaaatacacgctgccccctcggtcactctgttcccgccctcctctgaggagcttc

SEQ ID NO: 780490 - DNA, 90 bp, Homo sapiens
ctgcattgttggtattgaaatgtgacaagtacaagactggagttattgatgggcctgcatgtaacagcctttgtgttacagaaactcttt

SEQ ID NO: 780491 - DNA, 100 bp, Homo sapiens
gaggactttccttacctgtttttccagctcacccactgccagcagagttccaagatgagatgggattctccaacatggaagatgatggcccagaagagga

SEQ ID NO: 780492 - DNA, 100 bp, Homo sapiens
gttctttactactaagcaccgttggtatcctcatggacgccgagtcgtccggaaatccattgcccgtgttctcacagttattaaccagactcagaaagaa

SEQ ID NO: 780493 - DNA, 80 bp, Homo sapiens
tctttcccggtacattgaggacgaggactattacaaaggaggcaagtgaggcctatctggttggcctttttgaagacacc

SEQ ID NO: 780494 - DNA, 96 bp, Homo sapiens
cccgtttctggctccgggctgagcttcctggagaagaggaaggatgaaaactttcggaagagaaagttgcctgtggtaagttcagttgttaaagta

SEQ ID NO: 780495 - DNA, 75 bp, Homo sapiens
cctatccagacggctgcccttcaagtaccactcctcggtgggtggtacttctacgttcaggcctacaaatctctg

SEQ ID NO: 780496 - DNA, 100 bp, Homo sapiens
cagtccaagagccggcggcatgacgaagtgcgatgacatggatcctgcggacaaaccgccccagggcgtacctagcaccgaagcatcaggcgccactagg

SEQ ID NO: 780497 - DNA, 90 bp, Homo sapiens
cagccttcagaaattgccggtctgggagttgggggcaaggagaagatcctggtactccaaagattcaggtttactcacgtcatccagcag

SEQ ID NO: 780498 - DNA, 100 bp, Homo sapiens
ctgggaatcggtcgcctggaggaccagtatttcccatggagggtagcccctgaagaagatgaaaggaaaaagaggcgacgagaaagaaataagattgcag

SEQ ID NO: 780499 - DNA, 100 bp, Homo sapiens
ggactttcttccagcttctgctgtccttctttgtggagagcaaggattggaggctgttgtcattggagaagttcatgagaatgttactctgcactgtggc

SEQ ID NO: 780500 - DNA, 87 bp, Homo sapiens
gccagatggtgcaatgttcaaagtactcaagatgaatttgagcattgtcttcagtgttaagaaatgtggactcctgtgaggtgctgg

SEQ ID NO: 780501 - DNA, 75 bp, Homo sapiens
tggtgtggcttgtggatccctcacagaggaaaaccagtagattcccagacatcgcgaagtgaatctgaaattgtg

SEQ ID NO: 780502 - DNA, 50 bp, Homo sapiens
agaagagcatggcagacacacagtctatccttcactggagtctgatgatg

SEQ ID NO: 780503 - DNA, 75 bp, Homo sapiens
gaagaggtcaaagttaattggagcctaccttccgcagcctccgagggtattccctcagcggatactacacccatc

SEQ ID NO: 780504 - DNA, 75 bp, Homo sapiens
ccggtactgtgcactattctttcccaggaaccattggataaggataaagcttgcctacatgtagcctgtgttgta

SEQ ID NO: 780505 - DNA, 101 bp, Homo sapiens
ccggccacccattgatttgatgcataaaggcagctttgaaacagttcctttgcccaaagactcaacaggtgcagcagatcccccccagccccacatcgtag

SEQ ID NO: 780506 - DNA, 90 bp, Homo sapiens
aagagaagcacctgcacctcagagtaaagctgctggacaacaccatggaaatatttgacattgagaaagtgttgtgaagagcgaagactt

SEQ ID NO: 780507 - DNA, 100 bp, Homo sapiens
ccagtatatctcagcccttcatttgacagtgtactgccccgttacttatttttacaaatccttcaaacatgatgtgagaggaaatgcgcgagccatgatg

SEQ ID NO: 780508 - DNA, 83 bp, Homo sapiens
aacaaatatgaactatgataagctgagcagagccctgcgatactattatgacaaggaatatgcactttctggttggaatttga

SEQ ID NO: 780509 - DNA, 126 bp, Homo sapiens
ccgggaggaaggaacgaggcaaggagctaaagcagcgtgcgttcagccctggggagcatcagatccatgctgctgctgactcggagccccacagcttggcacaggctctctcagctcaagcctcgg

SEQ ID NO: 780510 - DNA, 100 bp, Homo sapiens
acaacgtggatcgttgttttgaaacgccctccctatcctgaagacattagctgagagtctggcaccttttaaaggtctgatcatcaattgtctctctggg

SEQ ID NO: 780511 - DNA, 74 bp, Homo sapiens
tgtgaaatcatgcctctgcaaaggcgcagtgagcctgcaggccgacctcactcgtggcacacaactaaatctgg

SEQ ID NO: 780512 - DNA, 101 bp, Homo sapiens
gtccctgacatcatctctgtgcactgataataaccctgcagcaacacagtcactcctggcggcaaaccaaacaaaaccagagtcatctggggaaaagtaac

SEQ ID NO: 780513 - DNA, 75 bp, Homo sapiens
tacgcatagaagccgggattgagcgcatcaagctggtcagtgagaaggtcggaggggccgaggggaccaagctgg

SEQ ID NO: 780514 - DNA, 96 bp, Homo sapiens
gatgaagctcccagagcatcctgagggcggagaaccagaagacgatgaggctcctgcaaaagggcccaccagctctgagcagatcatgaagacagg

SEQ ID NO: 780515 - DNA, 76 bp, Homo sapiens
cgggagtattatgaaaagatcgcgttggagaccagggccagccctggccacaccccaggctgtgtcaccttcgtcc

SEQ ID NO: 780516 - DNA, 100 bp, Homo sapiens
cagttatcataaccttgaatggcgactagatgtacagactgccactctccgcccctacctgagtgccgtgcgggccacattgcaggctgccctctgcctg

SEQ ID NO: 780517 - DNA, 100 bp, Homo sapiens
ctgggacttcccgtccgcggcgtggagggtcttcatcctccaggtccacctttagcaagacctattctcccccgagaacgaggtgctttggatagaattg

SEQ ID NO: 780518 - DNA, 100 bp, Homo sapiens
cgccgtttccgcaaacagaatcgcgtttggctgtgctgggggatatgagactttctactcggaatatcctgagtgttgcgtggatgtaaaacccatttca

SEQ ID NO: 780519 - DNA, 80 bp, Homo sapiens
agctggaatgcatccaagagaatccctcaacatgctgaaacctgtttccctccaatcttgtggttgcagctttccgtacg

SEQ ID NO: 780520 - DNA, 75 bp, Homo sapiens
gtcatgaccactagacccacagctgttaaagcaacaggaagtgcacggctgtctataacgtgctgccgggtctca

SEQ ID NO: 780521 - DNA, 75 bp, Homo sapiens
ttaaaaaatctggagggactccaacttcaatggaaaatatgagagccacacccgtgttcacacaggtgagaagcc

SEQ ID NO: 780522 - DNA, 129 bp, Homo sapiens
cgcagatgcccgggccgtggctctagcaggctccactaactggggctacgactctgatgggcaggtgaccagtgggaagaggaagctttggatgagtttgatagactcactcattgtgctgactggaag

SEQ ID NO: 780523 - DNA, 83 bp, Homo sapiens
gtggttgtgtggtcgcgtctcggaaaccggtagcgcttgcagcatgtaatctcaggggcgatataatcaatgaggtggtccta

SEQ ID NO: 780524 - DNA, 83 bp, Homo sapiens
cctgcaggtactgacagatccgtagggaggacaccgtgacttcccggacgctgggaaatgggcaagtgtccagagaatggctg

SEQ ID NO: 780525 - DNA, 100 bp, Homo sapiens
tctgttcaggccagaccctctgggagcttctcagccattttccacagatcaggtggtgatgatgtccagcaactctgtgaagcaggagaagaggagtttt

SEQ ID NO: 780526 - DNA, 75 bp, Homo sapiens
tttctaaaacaccagaactcaacctggtcctgaggcacgtgaatggccaggatcagattgtgcccggcctgtacg

SEQ ID NO: 780527 - DNA, 75 bp, Homo sapiens
cggaggcggaggcagaggtggaggcgctttgaaaggatctactgggtggatgcgcatctggaccggatcgagagt

SEQ ID NO: 780528 - DNA, 100 bp, Homo sapiens
ctgacgaagaggaagaccctcctgccaaaaggaaatgcatctttatgtcagaaacacaaagcagcccaaccaaagggtggagtctttcattttggatcag

SEQ ID NO: 780529 - DNA, 75 bp, Homo sapiens
ggagaaccgcgacctgcgcaaagccagcgtgaccatcgtgaaaaaccttttgaatgtccaaattgtcatgaacga

SEQ ID NO: 780530 - DNA, 100 bp, Homo sapiens
ctgccccggcttcaggatttacacagacgtggggcgatgcttgtgaccctgcagctcctcaaaaatccagggcctgaaaacccagaatgaacttgtgtcc

SEQ ID NO: 780531 - DNA, 75 bp, Homo sapiens
agacattgaagtttgggacaagatatttatctaacttctggttggccgccttgaaaatgcaatcgggtggtatca

SEQ ID NO: 780532 - DNA, 98 bp, Homo sapiens
aacaagtcccacttccgaaaccacaagtttgccgatttatccaagcattaggtgaacatcttaaattaagacaacaagttattgccactgctacggta

SEQ ID NO: 780533 - DNA, 83 bp, Homo sapiens
ggctggcctgcggcgcctgggcgctctgagggtggcccagttgaaatccttcccttcctctaccttggaagtgcctaccatgc

SEQ ID NO: 780534 - DNA, 75 bp, Homo sapiens
cagcatgatgcgtcggaagaaaattgcttctcgcatgattgaatgcctaaggtagcctttccagtaaatatatga

SEQ ID NO: 780535 - DNA, 76 bp, Homo sapiens
cgcattcagaatttgaccatcttggtgagaaacattaagacctactaccagtcttcccgaggctgctgtccatgac

SEQ ID NO: 780536 - DNA, 74 bp, Homo sapiens
ttgaccgtctactggaaatctgaatgctgttatcaccattgcagtgtcgagatggctatgaaccctgtgtaaat

SEQ ID NO: 780537 - DNA, 100 bp, Homo sapiens
aatctttttgtcttttggacttcagccatgtccatgatgcctaccctgtgaagatctctcaccatccaaaaaaagtctcgccctgtcgcccaggctggag

SEQ ID NO: 780538 - DNA, 102 bp, Homo sapiens
cggaaccatctgggagccttcctgatccgggagagtgagagctccccaggggagttctctgtgtctgtgaactcctacagaagaagggaaaaaagagctgct

SEQ ID NO: 780539 - DNA, 113 bp, Homo sapiens
aagaccgcgcgcagggcctgcagcgggagctggacggcgagcgcgagcggcgcgagaaagacggggaggtttactgcatcgacgcgcggttctacgggaacgtcagccggttc

SEQ ID NO: 780540 - DNA, 90 bp, Homo sapiens
ggaaaaggagtcgtaatagggctatcaatagtttgagattacgggaaatgatgagacgttcgttgagagcagctggtttgggtagacatg

SEQ ID NO: 780541 - DNA, 90 bp, Homo sapiens
caaactcatcggaaacatggcactgttgcctatcagaagtcaattcaaaggacctgcccccagagagaccctacctgaacccatccttcc

SEQ ID NO: 780542 - DNA, 113 bp, Homo sapiens
ccaatagggatattgtagaaactgtctttaacctgatatttaatgctacaagggagttgtctaacactgcggcatatcagtctgtccgcatcctctctgtctctcccattcaa

SEQ ID NO: 780543 - DNA, 50 bp, Homo sapiens
cggggcggagcacgcgagctatggatcatccagcagctcgtcaacggcat

SEQ ID NO: 780544 - DNA, 101 bp, Homo sapiens
gagctgcggaacaggacgccctctgatgttatgaagacagtatggagtttccagaccatagtagacatttgctacagtgtctgagcgagcagagacaccag

SEQ ID NO: 780545 - DNA, 95 bp, Homo sapiens
gtgaagctgccgttctttaatatgctggatgagctgctgaagcccaccgaattagatgcggacctgtccgtcaccgaagccagcagctccgacag

SEQ ID NO: 780546 - DNA, 145 bp, Homo sapiens
gtggccggcggggtctgggaagggagcaggcctgaggactgctactcccaggggaagttagattgtccggtgactgtcatgtggcatgggtctctgcccaagctcgtaatgagactatagcaaggcggctgtgggacgtcagttg

SEQ ID NO: 780547 - DNA, 98 bp, Homo sapiens
tcctgttacagctcaacagtcagctcttcgtgggaaaagaagtgatgatcacttgatacctattagctaaagttctgctaaagatgattaaagttcag

SEQ ID NO: 780548 - DNA, 90 bp, Homo sapiens
aatatgatgaggatgatgatgaaatcaccccggatttgtggcaagaagcatgctggattgtaatcaggaacatgacatcgatacaagtga

SEQ ID NO: 780549 - DNA, 82 bp, Homo sapiens
cgacgaggcgattgcgggggcctgggctagggcctgcctaggctccaactgacagtaatcccaagagctcccctttcagggg

SEQ ID NO: 780550 - DNA, 100 bp, Homo sapiens
cggtaatgctggtggtctgcatcaccaccggatcaacttcgacaaatagtactcagctggcccactccacagccaggcctggccctgcccttcaccgtgg

SEQ ID NO: 780551 - DNA, 102 bp, Homo sapiens
ccccactttcccctgagcctcagcacctgcttgtttggaaggttcagtaccttgaaatagttccagaaaccagaaggtaccctgtggcagtagccgctgctg

SEQ ID NO: 780552 - DNA, 74 bp, Homo sapiens
ccagaggcagaaaacggacggaagaaaaggtctggccgaggctgcctccattcgaaacattttctcagggacct

SEQ ID NO: 780553 - DNA, 75 bp, Homo sapiens
ccttgggcccccgatgtatgaaatggagacgctgaccggaaaggagattgagattgacattgaacctacagacaa

SEQ ID NO: 780554 - DNA, 74 bp, Homo sapiens
cgcgagtatctccgtttcctggatgtgaacgaagagagaagggcacagttacctaagtatcaacgtaatcttcc

SEQ ID NO: 780555 - DNA, 100 bp, Homo sapiens
cgcgtcccgctcgctgggagagaggtacctctccttttccctctccctttccctaagacttgccttcaaggtgtgcaagtaaggacttatctccagaaaa

SEQ ID NO: 780556 - DNA, 50 bp, Homo sapiens
cgcagcaacaacagagagcacgtgccttgaaaagatcttttgaggtcgag

SEQ ID NO: 780557 - DNA, 89 bp, Homo sapiens
aaattggatcttacacttgaaatacagactgttggggaacaagagcttaagtgagagctttttcatggtgaaaggcgcagccctcttct

SEQ ID NO: 780558 - DNA, 74 bp, Homo sapiens
agagaacttgccggtgccagctgaggcccattggaactacttcagtttgatcacgggcagtcaaatccaactta

SEQ ID NO: 780559 - DNA, 100 bp, Homo sapiens
ctgccctggagcaaatggacgggatcattgcagcagtgtggggatgtgccaactgccgagtggttttgtccaacccttctgggacctttacttctccatg

SEQ ID NO: 780560 - DNA, 100 bp, Homo sapiens
agaaaaagcccaggcataaaatcatctccatattctcaggcacagagaaagaattctgcttggtcagaatcgtgatggcattgtgttcagcactgatgac

SEQ ID NO: 780561 - DNA, 100 bp, Homo sapiens
tggatccaggataacggaggctggggttcttgaagcttttgagattaacaatggcaggaaaatcatcactttttaaagtaattctccttggagatggtgg

SEQ ID NO: 780562 - DNA, 121 bp, Homo sapiens
gtcgaaggtttcctttaagatcacgctgacgtcggacccacggctgccgtacaaagtgtacccagacagccattgtcttcatcaagcagccgtcctcccaggatgcactgcaggggcgccg

SEQ ID NO: 780563 - DNA, 75 bp, Homo sapiens
ctcgaactaaacaaattcatcccagaaatctaagagggtctcctatggacagaagtgcgggcaaggagctttgtt

SEQ ID NO: 780564 - DNA, 98 bp, Homo sapiens
tggatcatgcggccactcatattaccaaccgcagagagatgctttgggaaaatggaattaatggcattttagcagatgaaatgggattgggtaagaca

SEQ ID NO: 780565 - DNA, 74 bp, Homo sapiens
caagaagtcagccaagagatgtgttaaagtgtctcgactgcattgtgagagtgaatctttcaagatggatctaa

SEQ ID NO: 780566 - DNA, 90 bp, Homo sapiens
ggtggacctgctggcgcaggacgccgacatcgtgtgccgctgccaggatttttttcccaggaagccatcccgtcagaggggttcaagtga

SEQ ID NO: 780567 - DNA, 50 bp, Homo sapiens
aagtcacttggcaagcgtttagcagtgcaatgcgtgttttactatctaaa

SEQ ID NO: 780568 - DNA, 100 bp, Homo sapiens
gagcagcctgtcaagaagctcaggtttatgaaggcgagcgtgccatgacaaaggataacaacctgcttggcaagtttgaactcacaggcatacctcctgc

SEQ ID NO: 780569 - DNA, 100 bp, Homo sapiens
tggtgtgaaggaaggcccggtgcgattgcatgaggatgctgaggctgtcctgtcctcgtccgtctcatcaaagttcatgagcggcccagttctgtaccag

SEQ ID NO: 780570 - DNA, 82 bp, Homo sapiens
cgacgtccctcaaaccttgcttctaggagataaaaaggtcgcgtggggcaggcagtggcgctgcgggccaaggccttcggct

SEQ ID NO: 780571 - DNA, 83 bp, Homo sapiens
ggcaaaggcaaaggcggctcgggagattcagccgtgaagcaagtgcagatagatggccttgattgatctgaagttaaacaaaa

SEQ ID NO: 780572 - DNA, 103 bp, Homo sapiens
ccgagacacaccaggccggcaggctgagaaaagcgagaccgcgtgcgaggaccgctgtcgcctggttgggcccggaaatgggacgtcgcgctttctcagggag

SEQ ID NO: 780573 - DNA, 100 bp, Homo sapiens
accagattaaacaggctgtgaagaagctgtatgacattgatgtggccaaggtcaacaccctgattcggccagcaggagatggaaccttccagaagtgggc

SEQ ID NO: 780574 - DNA, 90 bp, Homo sapiens
aatctttagaacttggcaagtctcactagataccttcaatcatcattttgagctcaaagtgccagaaatcacatccaaagtcagttccag

SEQ ID NO: 780575 - DNA, 80 bp, Homo sapiens
accgtcggccgcatccgtttccacgactttctgggagactccagcctcccgcgacgatgcccctcaacgttagcttcacc

SEQ ID NO: 780576 - DNA, 90 bp, Homo sapiens
ggcaacaccacaattcttaaagtaagtaacttagcacttgtaaagcctgaaaaaactaaagcagtagagaattaccttatacagatggca

SEQ ID NO: 780577 - DNA, 105 bp, Homo sapiens
gacccgcgaacccctctgggatccccgccgctctgtctacaacccgagccaccccacgtcatgctgcagcgccgcagagatcatggctgtcctctttttccacac

SEQ ID NO: 780578 - DNA, 100 bp, Homo sapiens
tagacaatctaaaaaagagatgaagaagaaagatacagtgccttggtggataactgaagatgattttaaagatgatggtcgtagttcccccgctccctgg

SEQ ID NO: 780579 - DNA, 100 bp, Homo sapiens
atctttatccaatcaagtgcccttggacaaagcctgaaaccaggatgccggaccagatctctgtctcggagttcatcgccgagaccaccgaggactacaa

SEQ ID NO: 780580 - DNA, 100 bp, Homo sapiens
agtctgggtcagatttgaaaatgcagatttaaatgtttcaccagtgatcattaaagaatgggcagcttacaaaggaaagtctcctcaaaccccggaactg

SEQ ID NO: 780581 - DNA, 95 bp, Homo sapiens
gtgtcggaggtctcatctttgaactactgccggagcttctgccagtgaatgggagctacggacaccgtaccccgggctcagagaagagcctgctg

SEQ ID NO: 780582 - DNA, 96 bp, Homo sapiens
agcaaactgggactgttggtcaccctacctggcagccagtgataaggcaggaggaagagcgcaggcgccgtgaagaagagatgcggcggcagcaag

SEQ ID NO: 780583 - DNA, 100 bp, Homo sapiens
ggacgacgggtttgtgagcctggactcgccctcctatgtcctgtacagaaagaagatcttctggagccacaggaacagcttcccccacctcctttaccgc

SEQ ID NO: 780584 - DNA, 100 bp, Homo sapiens
ggggaacgctcacggactgtgtgtgcagaaataccataccatcaatggtcataatgcagaagtaagaaaggctttgtctagacaagaaatgcaggaagtt

SEQ ID NO: 780585 - DNA, 100 bp, Homo sapiens
gtggcacatgcgctttctctcccagcagagtcgtatggcaacgataagcctaaagaaactgttccaactcttgctccaaaaactctttcagtagcagcag

SEQ ID NO: 780586 - DNA, 83 bp, Homo sapiens
agcagatctactactcggacaagtacttcgacgaacactacgagtaccggactatgatttaatctccaaagaaccaaagcctt

SEQ ID NO: 780587 - DNA, 74 bp, Homo sapiens
gggagttcaaggaggtgctgaagagcgaggaggtaagaatgattgatgttggctgatattggagtgctcattca

SEQ ID NO: 780588 - DNA, 88 bp, Homo sapiens
ggctgcagcgagcgctggacggagaggaaagcgtattctgaagaagttttagctgtttttaagagttataaattagatgatactcagg

SEQ ID NO: 780589 - DNA, 88 bp, Homo sapiens
aaatgactgcatatttgacaaatttgaatgttgttggaatggatctgacaggtactttgacccagccaacggcaagttcagcaagtca

SEQ ID NO: 780590 - DNA, 100 bp, Homo sapiens
ctgcacttcttttttgagaaaggaaggaatatatcctgactgattaaaacatccagtacagacctttctgatatccctgctctccctgcaaatcctattc

SEQ ID NO: 780591 - DNA, 74 bp, Homo sapiens
tccagagcattcagctgtctcaaatgcaggttaatgttcgtgaagaaattgaagagttttttccaagaatgtgg

SEQ ID NO: 780592 - DNA, 51 bp, Homo sapiens
gacagcagccacatcattgctttatgtgtttctcttcagcaacgggtagca

SEQ ID NO: 780593 - DNA, 88 bp, Homo sapiens
ctcgggagaagcagcgcctgttcccggggcagatccaggttcagacagccctcagcgcctttttccaggagaccaacatcccctacag

SEQ ID NO: 780594 - DNA, 96 bp, Homo sapiens
gtgaaggggttctactgtgcagagtgccgagcaggctggtacggaggagactgcatgcgctggctacagcaaacatcattcaagatgtccagcaaa

SEQ ID NO: 780595 - DNA, 100 bp, Homo sapiens
gcggcggctgcggaggcgcaggcagcaactgaggcagcggcaggctcaggtgcagccgctggctcacccatgacatcagcctggaggagtttgaggatga

SEQ ID NO: 780596 - DNA, 90 bp, Homo sapiens
cctgtttgccacacagatcaccctgggaatcctcatctccactcagcgggcccaggccctggtgcccttccacaacctgggccttctcat

SEQ ID NO: 780597 - DNA, 80 bp, Homo sapiens
tcttcagcgatatgggggcctggaccttgccttcccatcctcctggttgtaacctccatttctgacatccccactggtat

SEQ ID NO: 780598 - DNA, 100 bp, Homo sapiens
caagacttttttgaagccatccgcagaaggggagacacattttatgttgtgtcatttcgaaggacatttgaagacagtgatttgttccatttgattggtg

SEQ ID NO: 780599 - DNA, 74 bp, Homo sapiens
aacgagaggctcaccgcagtcgtgcaggatctgaaggagattctgatgctcacagtaccacctcaagtgcctcc

SEQ ID NO: 780600 - DNA, 82 bp, Homo sapiens
gtagacacaactacaggctgggcgcacccttcactgtggggagaaaagtttcaagaccaacagaaaggggtgacaaaggtta

SEQ ID NO: 780601 - DNA, 85 bp, Homo sapiens
cgcaaaccaacctcctggctccaaagctgcagttccagcctggtccgacccccagtggcactaacgtgggatcctcagggcgctc

SEQ ID NO: 780602 - DNA, 74 bp, Homo sapiens
ctcaaaatcagcctacatgccatctttgtggcctgaagcacgaggacaaacgtggaggtagcggatctcacaac

SEQ ID NO: 780603 - DNA, 83 bp, Homo sapiens
ggcaggacctggggccaaaagccaagttcaaaagaatgctgaaccgggagctgacacacctctcagagatgagccgatcaggg

SEQ ID NO: 780604 - DNA, 75 bp, Homo sapiens
ctttggagttggacaagaacagatagacgcttttcttaagacgctgcgcagaggaaactttaccctcccagaggt

SEQ ID NO: 780605 - DNA, 90 bp, Homo sapiens
ccggcccagagctcccgggtcgtctttcgtgtggccgcgagaatggacagcaaattatggatgaacctatgggagaggaggagattaacc

SEQ ID NO: 780606 - DNA, 75 bp, Homo sapiens
aggacttcatctcctcaacatggaaactaaggctattcagcttgaccctgaagaaactcgtcatgctaaaagaaa

SEQ ID NO: 780607 - DNA, 74 bp, Homo sapiens
ttacttgttcacctcatcatgaagatttagtagccattggagaacggagaccaacctgggctgaagaaagaaga

SEQ ID NO: 780608 - DNA, 100 bp, Homo sapiens
ggctttacaagaaaaccacctaaatatgaaagattcatcaggccaatggttgcagatttggatgatgaatttgctgacttggttttagaagaatttagtg

SEQ ID NO: 780609 - DNA, 100 bp, Homo sapiens
ctggagcagaacaactagaagctttgaaagcttttgtggaagcaacaggatgaagttaaaggaagtagatcgtacagccatgcaggcatggagccctgcc

SEQ ID NO: 780610 - DNA, 100 bp, Homo sapiens
ggcggggatggcgtcccccgggggcccgtactgcacatcgtggtggtcggatttcaccacaagaagggctgccaggtcgagatttaatttgcatccagtc

SEQ ID NO: 780611 - DNA, 97 bp, Homo sapiens
agatggcgccaggacgaaggccctactgggcaaggtgatttgatgaaggctgctgcaggagagttcgcagatgatccctgctcttctgtgaagcgag

SEQ ID NO: 780612 - DNA, 97 bp, Homo sapiens
gatgctcatcctccaggaacagcaatattgcatatcaaggaccgtcctccttctaatatttggaagaaaatagatcaatccagggactataaaaatg

SEQ ID NO: 780613 - DNA, 103 bp, Homo sapiens
gtagggagcatagctgctacactgaagatgaagcaaggcccaatgacccaggcggataaaatggaccagttgctacagatgctgcaaagtacagaccccagtg

SEQ ID NO: 780614 - DNA, 82 bp, Homo sapiens
cccctctgcggacctgcagagcaccctcaggaactcgaggcaggaacttgctactaccagcaccatgccctaccaatatcca

SEQ ID NO: 780615 - DNA, 100 bp, Homo sapiens
ggggaccctgaaagaatacgaggtcgcaatggaagaagagatcgccgcgctggtcattgacaatggctccggcatgtgcaaagctggttttgctggggac

SEQ ID NO: 780616 - DNA, 74 bp, Homo sapiens
cactgccgcttcggtcactagtgtctttcctgaagactatcttcccgtctcaaaatggacatgatggatccacg

SEQ ID NO: 780617 - DNA, 82 bp, Homo sapiens
tcggagaaacaggcgccgcgggctccgcgcccggccggacccgggcccgagatgatatcatcaagttgaatcgaaaggaagg

SEQ ID NO: 780618 - DNA, 75 bp, Homo sapiens
ggggtattcgagatgacattgaagaggaagatgaccaagacctgtgaaaagagcaagagaagaaacagacaaaga

SEQ ID NO: 780619 - DNA, 48 bp, Homo sapiens
gagctactgggctgtgagctgaacgcggacaaggcaatctccatgctg

SEQ ID NO: 780620 - DNA, 83 bp, Homo sapiens
cagtgacatactgcggctgatcaaggtgaatgaaaactttgccattgatttgatagcagagcagcccgtgagcgaggtggaga

SEQ ID NO: 780621 - DNA, 100 bp, Homo sapiens
agagtttgaagaaagttctgaaattctcctgaaggagtttcttaaggaactgtggctgcaccatctgtcttcatcttcccgccatctgatgagcagttga

SEQ ID NO: 780622 - DNA, 100 bp, Homo sapiens
caggattcggacagcaagcatgtggatgtacatctagttcaactaaaggtgacagttaaaggatttgaacctttaattcagtttgcctacactgctaaac

SEQ ID NO: 780623 - DNA, 100 bp, Homo sapiens
gagattttgatgtggatgatgccaaagttttattagcgttttaccaacgaggatcatttggctgtccataaacataaacatgagatgacactgaaatttg

SEQ ID NO: 780624 - DNA, 51 bp, Homo sapiens
gagtctgtggaagaggtggttcgaggtgactctgacatcattagaagcatg

SEQ ID NO: 780625 - DNA, 75 bp, Homo sapiens
tctcacttggacaagaactcaagagcagaatctccggatttttagactctgaggagcagttggagctaatccaca

SEQ ID NO: 780626 - DNA, 75 bp, Homo sapiens
cacggagttgcgtcccggggacttggggccgcagggagggtcccctcctcggccgccccccgcccggccgcccgc

SEQ ID NO: 780627 - DNA, 101 bp, Homo sapiens
tcctctactgtgcatctccttgactgccgcatcatgggaaggacaagaattttgggcagatttgaatgccatgaacgtgtatgaaacaactgaatttgacc

SEQ ID NO: 780628 - DNA, 75 bp, Homo sapiens
ttcctctctatgttttggcccttctcaaacagataaagcgatctaaacttcatgaacaagttttagatttgggcc

SEQ ID NO: 780629 - DNA, 83 bp, Homo sapiens
atcgagcggcagcgcggagccagaggaagacgaaggcggttcgacgaggtgctttataaatcatctcaggactttcaacccag

SEQ ID NO: 780630 - DNA, 75 bp, Homo sapiens
gggacctcaccctcgggggagtcaagaagggatccacaaatgctaaagagctgtcttccaagggagtgaaaatct

SEQ ID NO: 780631 - DNA, 89 bp, Homo sapiens
ttttttatatatttttatattattcatcatgttgtatccagttgcctctgttgaccaggttcttcagtattttgagcacgttgaagaag

SEQ ID NO: 780632 - DNA, 100 bp, Homo sapiens
gtcagaccagagaagagcacagaatgtaccagagaggctgtacaagaagcatgatgccagcatctgcttctggtgacaacctcaagaagtttacaattgg

SEQ ID NO: 780633 - DNA, 82 bp, Homo sapiens
tccgcttttctctaaggaacccgaataccctctaccatctgctttggtcagggtgccgctcgaggatttaaaagcaacaaga

SEQ ID NO: 780634 - DNA, 101 bp, Homo sapiens
ctgccctgagacggtgtcccgccgaaagttgactatattgtggagtatgactatgatgctgtacatgatgatgaattaactattcgagttggagaaatcat

SEQ ID NO: 780635 - DNA, 74 bp, Homo sapiens
ttggaaaagggcaagatctatcggcaggagtttgggctttgcaaaactgagaacaaagccaagtcgggcaaaca

SEQ ID NO: 780636 - DNA, 75 bp, Homo sapiens
atgccaaatgattcagtccttgaaaacaaggcttacctatttctactccatgtaccaccataaacaaagtttgtg

SEQ ID NO: 780637 - DNA, 74 bp, Homo sapiens
tgggaataaaatatgctttggcagtccgtcagtttcggtgtctgaactgctcagcttcgcaagtctgctctcag

SEQ ID NO: 780638 - DNA, 100 bp, Homo sapiens
aaagaactgatggaaggcagtgacttaaattactatttcaattggataaaaactcagctgagttcacagatgtagccatagctgtaacgtataaccatga

SEQ ID NO: 780639 - DNA, 88 bp, Homo sapiens
ccagtcaataggaagtacgagtctccgccgcatgcaagagatgattgcaaggatgcaggcgcagatgcagatgcagatgcagggcggg

SEQ ID NO: 780640 - DNA, 75 bp, Homo sapiens
ggatcgtttaggaaagccggccaggatggtgctgctccactggtgcctgctgtggctcctgtttccactcagctc

SEQ ID NO: 780641 - DNA, 100 bp, Homo sapiens
cggaccccggcgccgcggcgacctcggaggaaccggctccttgcgtcccgcctccctgggagctccgcacgggtgacaaacagcatgtttggtgcttcaa

SEQ ID NO: 780642 - DNA, 88 bp, Homo sapiens
ttataatgttccattgccaaagaaatcgaatctgaattatccagaacagaaagttgtgactgttggacagttcaaaattggtctgatc

SEQ ID NO: 780643 - DNA, 80 bp, Homo sapiens
gtcgcagggagcccaccgggcgggcctggccaagtgcctccggagccagcgtggtggccatagacaacaagatcgaacag

SEQ ID NO: 780644 - DNA, 100 bp, Homo sapiens
gcgagaggtgcggcgaaggaggcagaggcacttatgcttgtcaggtggtgatcagggaagtggctttgggaccacaggtaaagctcctgttggttctgtg

SEQ ID NO: 780645 - DNA, 50 bp, Homo sapiens
cggcgggaggagcctgttcccctgaggtgaaaggtgtagcagtcactcgg

SEQ ID NO: 780646 - DNA, 89 bp, Homo sapiens
atcgatgactgctacacctcagcccggggctgcactgccaccctgggcaacttcgcagcaagaaggctgggaccccagccaagggcaaa

SEQ ID NO: 780647 - DNA, 50 bp, Homo sapiens
gtttgaggcacgagagcagaagagtgatcagcagctggactgtgccttgg

SEQ ID NO: 780648 - DNA, 95 bp, Homo sapiens
ggaaatgcgaaaggttgtatgtgatcagaagctgcgtcccaacatccccaactggtggcagagttatgagtctctaggtaacaggagaattcgag

SEQ ID NO: 780649 - DNA, 78 bp, Homo sapiens
ccgagccctcctcctgctgctctcgggaggcctggccctgaccgagacctgggcctgctcccactccttgaggtattt

SEQ ID NO: 780650 - DNA, 100 bp, Homo sapiens
atgctggaaatcgacttcggtttcagttggagttggaatttgtgcaatgtttagccaacccaaattaccttaattcctgaacacttgcctttgcagactc

SEQ ID NO: 780651 - DNA, 100 bp, Homo sapiens
gagctattgaaaaaatgaatggaatgctcctaaatgatcgcaaagtaactgataaatttcaaacggaagagagtggcagcatttagaaagaatctaattg

SEQ ID NO: 780652 - DNA, 100 bp, Homo sapiens
gaaaaagcatccccgaggaggaagacgaatcgttaaacatcttaggtcagggtgcgctggctctggccctgcctgtgggttccggtgtggtgcagtcgct

SEQ ID NO: 780653 - DNA, 50 bp, Homo sapiens
tgacgttgtccggatcctgccctgccggtctgctggagtttgctggaggt

SEQ ID NO: 780654 - DNA, 73 bp, Homo sapiens
gttaggtgacctcacaaaagcttgctttcagcatgttaagccttgtataggagtgtacctcacagccttctag

SEQ ID NO: 780655 - DNA, 75 bp, Homo sapiens
cagaaattgaaaggcttcaaagctagcagatggtttccacggtgatgtgtacctaacagtgaagctgctgctgcc

SEQ ID NO: 780656 - DNA, 76 bp, Homo sapiens
ctgggaggcccctttgaccagatgaacggagtggccggagggggatatgagactttctactcggaatatcctgagt

SEQ ID NO: 780657 - DNA, 98 bp, Homo sapiens
gttggactctcttgaaagacttataaaaggtacaggtttgcagattccgccagcagcacagcaagctctacagatgagtggctctttggcatttggtg

SEQ ID NO: 780658 - DNA, 100 bp, Homo sapiens
tggagacctgcgcctgcctgcgcctcctcgcccgcctccactacatcatgggcgactacgcagagacttcacagagaatgcagttgtcttgacttcaggt

SEQ ID NO: 780659 - DNA, 75 bp, Homo sapiens
cagttagtgacttctgcaagtgggttactacttttttcctattttgacgagaaaggcttggttagacaacagctg

SEQ ID NO: 780660 - DNA, 75 bp, Homo sapiens
ccttgtgaggcagttgggaagccttggtggtaagttttcttcatacagttcttttgtgtgacaaactggatttca

SEQ ID NO: 780661 - DNA, 75 bp, Homo sapiens
aggcagcagaatctgcccacagagttcgggtctcctctgagcctccggcctccataagacccaaaacagatgaca

SEQ ID NO: 780662 - DNA, 95 bp, Homo sapiens
ccagaggattttatggcacatttgatcagaagaaggaggaggaggaggaggcggcagcggcagcggcgatggctacagaaggagggaaaacctct

SEQ ID NO: 780663 - DNA, 100 bp, Homo sapiens
attacccgttaagtcccccaaagatgagatttacctgtgagatgtttcatcccaacagactggactgactatgatgaaaaggcccaggagtctgtgggaa

SEQ ID NO: 780664 - DNA, 100 bp, Homo sapiens
agccctgggtgatggaggaagaaatgtttgggaggcactgtccagatacttggcatatcgaaattttatgattgacacgtatcgtctaaacccccaagag

SEQ ID NO: 780665 - DNA, 51 bp, Homo sapiens
gtgccaatggtggagaagaaaacttcggatgtatgtccatccctgtgacga

SEQ ID NO: 780666 - DNA, 100 bp, Homo sapiens
aggaggaagccgagtttggcgaggaggatcttttccaccaacagctgctcccggtgtgaccgcgtccttccctggccgacccgaaggaagccttctggtt

SEQ ID NO: 780667 - DNA, 75 bp, Homo sapiens
cgaaggcgggcggcagaggcgatcaggggcagaaccccttcgagctggccttctccctagaccagcccgaccacg

SEQ ID NO: 780668 - DNA, 51 bp, Homo sapiens
cgagagcgcgaatatcgtcatcgttagaagaccaagatcactccatggatg

SEQ ID NO: 780669 - DNA, 83 bp, Homo sapiens
ttcaggaccaaaattgtggaaaagtcactctggtcagcccaaggccaaccccactgtcactctgttcccgccctcctctgagg

SEQ ID NO: 780670 - DNA, 119 bp, Homo sapiens
acttcagagctaggagagatggaactgacttggcaggagatcatgtccatcaccgagctgcaggtggtttcctagaaacatgattgtttattggcattgatctcacagtctggtgagga

SEQ ID NO: 780671 - DNA, 100 bp, Homo sapiens
atgacgcgtcagctgcgagagcgtgaacaacgcatgcggaatcagttggagctagcagccagggatggccgccctgctcccccaatgaaaggccagcttc

SEQ ID NO: 780672 - DNA, 88 bp, Homo sapiens
atgaggcagagcctaagagaactatggcaacatcaggtgactgtcccagaagtgaatcgcagactctcgcctgactgctggtgtgccc

SEQ ID NO: 780673 - DNA, 100 bp, Homo sapiens
cctgcccgctggcccctcgcgcgtgaggatctatctcaggtgcaatggatgagcttcatagtctggatccaagaaggcaagagttattggaagctagatt

SEQ ID NO: 780674 - DNA, 100 bp, Homo sapiens
tttttcgtttttcggatgatgccttcaatactacctttatttccaccataggtggcgacatgtctaagaatgtgagccagtcacagatggcaaaattgaa

SEQ ID NO: 780675 - DNA, 90 bp, Homo sapiens
tcagctcagtgctgtgcgggccagatcatgattctggaaggaggtggtgtaatgaatctcaaccccggcaacaacctccttcaccagccg

SEQ ID NO: 780676 - DNA, 75 bp, Homo sapiens
atgcttaaaaatcaccagttactttaatgagagagaatgggcagccctgggaaacatgtctaaagaggatgccat

SEQ ID NO: 780677 - DNA, 85 bp, Homo sapiens
catcgggaacctcttccagttggaattgaagaatattcccaagtccttcacccggggcgaagctgtgctcaggcccgggctggac

SEQ ID NO: 780678 - DNA, 75 bp, Homo sapiens
gacgggatattctcttctgtgctgtcaagggactaaaatctcaggaagctggtgatgaatgaaaaccttagtccc

SEQ ID NO: 780679 - DNA, 75 bp, Homo sapiens
gcgacgccgacagcgaagctgagcgtaaagcttactgcagagtgggtctgggcatctgctacgacatgcggtttg

SEQ ID NO: 780680 - DNA, 83 bp, Homo sapiens
cagcggccgggatagccccggcggagcccgcagcttccctgccggtcaaaatgcagatcttcgtgaaaacccttaccggcaag

SEQ ID NO: 780681 - DNA, 100 bp, Homo sapiens
acaggaaacgttggatgactttaggcaaaaactgattattccaagtggaagttgccctgttattctgaatacttacttttgtgagaaagttgttgccaaa

SEQ ID NO: 780682 - DNA, 82 bp, Homo sapiens
tgcttttgatatctggggccaagggacaatggtcaccgtctcttcagctgcatcttcctcccgtgaggctggccgagctcca

SEQ ID NO: 780683 - DNA, 96 bp, Homo sapiens
gggccactccactatgccccttaccacaggagctctgcacaggtttgagcacaaaatgaacataattagggaaaataaggatctggcatgtttcta

SEQ ID NO: 780684 - DNA, 122 bp, Homo sapiens
caattgcagctcctgaaccggaactcaaaacagacccatctttggatcttcattcattaagcagtgcagaaacacagaacaaagaactttgagtctggcaaggcttataagacaacatgggg

SEQ ID NO: 780685 - DNA, 82 bp, Homo sapiens
ggcagctgtgagggatattcttgaaggaattcaaagcttacaacaggttgatgaacatagtaaacctcctcatctgaggcat

SEQ ID NO: 780686 - DNA, 74 bp, Homo sapiens
ggcagatcttcagttgcggtgcggagctgagcaggtgtcgtgaaaactacccctaaaagccaaaatgggaaagg

SEQ ID NO: 780687 - DNA, 88 bp, Homo sapiens
atcttccccgtcatccgtttttgccaccccaacatcatccggtctgtcatcaacgcctcagtgtttctctcctgaggcaaagcccaac

SEQ ID NO: 780688 - DNA, 90 bp, Homo sapiens
cgccggtggagacgcaggcgaggatctcgctctgctgtcacccggcctggagttcagtggagggatctctgcaccgtcaacttcctgggc

SEQ ID NO: 780689 - DNA, 75 bp, Homo sapiens
ggttcaccatggagctagcaaaaaagggctttattggtcctactgctctgttggctcatgaaataggttttggaa

SEQ ID NO: 780690 - DNA, 74 bp, Homo sapiens
atgttggtccaagggaactgggtggtgaagagctgagcgggctttggacaccatgaactttgatgtgattaagg

SEQ ID NO: 780691 - DNA, 100 bp, Homo sapiens
agctgcgggagcagctgccccgctacctcatgggggagacgcagctgtgcaccacaagaaagtgaagtcactgcttttgctgtcttggatcaagaccaga

SEQ ID NO: 780692 - DNA, 98 bp, Homo sapiens
cgcgggctgcggacgctcggtcccgcgctgcgcatccccgcggacgccacagcgctctcttcctgctgcccacattcctgcaccccctcatgagggta

SEQ ID NO: 780693 - DNA, 100 bp, Homo sapiens
cgggaaggcggacctgtggagcatcggcaccatcgtctaccagtgcctgacggggaaggcgcccttccagacttccaccctcctccactgccccaggaag

SEQ ID NO: 780694 - DNA, 96 bp, Homo sapiens
cagcttcttcagttccaggaagatgcctttgggaagcatgtcaccaacccggccttcaccaaactccctaggaggctgcggaggaggaggaggaag

SEQ ID NO: 780695 - DNA, 75 bp, Homo sapiens
gcagtccaaagcatggacgatttaccgcccagaggaggagtatgatgaagatgctcaggtagtggaagacgagga

SEQ ID NO: 780696 - DNA, 88 bp, Homo sapiens
agaatacatggttgaaaaaatttacccacaaatacctggtaactatggtggtggtgggaactataatgattttggaaattatagtgga

SEQ ID NO: 780697 - DNA, 78 bp, Homo sapiens
ttccttttactattagcccatcaagaaatgaagaacgagattcagacacagttggtgtggatgactacagctcagagt

SEQ ID NO: 780698 - DNA, 82 bp, Homo sapiens
tcgggtgcgctgctcaaggacacggtctacaccgacttcgacgatgaggacggggacttggttgccttttccagtgacgagg

SEQ ID NO: 780699 - DNA, 100 bp, Homo sapiens
taccgagatttcatataccaaaatccacatatcttcaaagacaaggagctcgaggccatgagcagatataccagcccagtgaacccagctgtcttccccc

SEQ ID NO: 780700 - DNA, 100 bp, Homo sapiens
ggagagtgaagctggaagattctggtgtccacgtgatcattggggggcacgattctccctctcctagaggcggtgccatgtttcagaacagagtaagacc

SEQ ID NO: 780701 - DNA, 87 bp, Homo sapiens
gctcctaagcctgcacagccgcggcggcagcagcagtgagagggcgccatgttttggaagtttgacctgcacacaagctcgcacctg

SEQ ID NO: 780702 - DNA, 87 bp, Homo sapiens
ttatcagagtttctgagaggacttgtaatgaactatccacatattacaaatcttaccaacctatatatgcaaacagatttgcagtac

SEQ ID NO: 780703 - DNA, 100 bp, Homo sapiens
aggtagccagaagaagcagaataactaaaaatgtgcctaaacaaagctctcagcttgatgagagaacgtttgtctgcctgatgagagccacttgggttaa

SEQ ID NO: 780704 - DNA, 73 bp, Homo sapiens
cccaggttgccatcctcagtcgtctattgtgattcgcctttgccagtctcatctcgtgtctgctttgttaagt

SEQ ID NO: 780705 - DNA, 82 bp, Homo sapiens
atcagcagctttttgattatatgaattctcagtccaagtttaaagttaagattcatcgaacaggccacatcggacagtgttc

SEQ ID NO: 780706 - DNA, 51 bp, Homo sapiens
cttggactgagtcctgcaggacacaggagttttgagagcaaaatgacaaca

SEQ ID NO: 780707 - DNA, 75 bp, Homo sapiens
gggttggagtaaagagtgagccacagccaataataatcggtgaccaagaatatggcccaggtgaccaaagccctg

SEQ ID NO: 780708 - DNA, 83 bp, Homo sapiens
ccctgagggccttcgagagctaccgcgccagacaggattttttatcaagcagaaatgcatcgaacaacgagaatcaagatcac

SEQ ID NO: 780709 - DNA, 98 bp, Homo sapiens
agaactgaaaggaacttttagaggcaatcacttagtcaacctcttgctgttacaggtgcttttcagtgggaagaattggaagaagatatcaggaagaa

SEQ ID NO: 780710 - DNA, 50 bp, Homo sapiens
cgacacactatgctccctccaaagccggaaaaagacctcgatgaagttct

SEQ ID NO: 780711 - DNA, 50 bp, Homo sapiens
acaaggcccagggaagttaaaccaagcaaccgacataatggaaacatcag

SEQ ID NO: 780712 - DNA, 100 bp, Homo sapiens
ccatgctgctgacgtcacatggagcacagaaatcaatgttagcagatagccagcccatacaagatcgtgattcgataccagcatcttgccaatttgcaag

SEQ ID NO: 780713 - DNA, 99 bp, Homo sapiens
aagaccttcatcacagcaatggagaagagaaagcacaaagcatggagaccctccctccaggagtcatcatcaaaaggaagagtggggagatcccatgcc

SEQ ID NO: 780714 - DNA, 100 bp, Homo sapiens
tcccctttgatccctgtgtgctgaagaggtggagcggctgatcaaggagttctccatctacatgacaaaagatggccgcatctctgtggcaggggtcacc

SEQ ID NO: 780715 - DNA, 100 bp, Homo sapiens
gaaaaaaatagactaatggattaacgtccctgtcgtgtgacattttctgaaacagattgtctcagtttacctagctttgaaaatgccatacccatgggag

SEQ ID NO: 780716 - DNA, 75 bp, Homo sapiens
tttgatgttgttgaaggagaaaagctgctggaacccaatgtgaatattggactggcggagccttgggaagtgaac

SEQ ID NO: 780717 - DNA, 100 bp, Homo sapiens
gctgctcggacagatgaagctccccaaggagctgcagaagcagcattaagaggtcttctgggagccttaacaagtaccccatattctcccacccagcatc

SEQ ID NO: 780718 - DNA, 75 bp, Homo sapiens
agaccctcacggagctgggcgacgagctgaccctgggagacatcgacggacctcatctattccagcccagtggac

SEQ ID NO: 780719 - DNA, 132 bp, Homo sapiens
atcaggtggggaaagatgctgttccaggcgcacactagtctacaaggccagagctttctggaagggggcagtgctggagaatctggtaaaagcaccattgtgaagcagatgaggatcctgcatgttaatggg

SEQ ID NO: 780720 - DNA, 100 bp, Homo sapiens
tggcctggcgtgcactccgcacctcggggacattattgcgcgtggaacggctgcttttggaagatggagaacttaatgttctggatgatattttaactga

SEQ ID NO: 780721 - DNA, 100 bp, Homo sapiens
tcactttgatcagtatgaggaaggacacttggaaattgaacaagcgtcacttgacaagcctatagaatcgtgatgctattgctgagattagagccatttg

SEQ ID NO: 780722 - DNA, 100 bp, Homo sapiens
tgatgatgtccacactgcccaagtctctatccttgaatgctgaccccctgaaggtgtacccgccactgaaggggagcttcccggagaacctgagacacct

SEQ ID NO: 780723 - DNA, 51 bp, Homo sapiens
ttgctgcaggctctggggagtcgccatgccttaattttaaagaccccgaag

SEQ ID NO: 780724 - DNA, 100 bp, Homo sapiens
gatgtcagtgaaaaaagggatccagaatgattactaacctatgactcccaacagtatgacagtgctggtcccaaaggcgataacatctatgaatggagat

SEQ ID NO: 780725 - DNA, 50 bp, Homo sapiens
ggaaggccgaccgactgccgcggtgttggtaaatcatgcttattgctaca

SEQ ID NO: 780726 - DNA, 75 bp, Homo sapiens
aacattgagggaagcaaagaaaagttcatccatctctagtttcaagggaggcaaatacatgcaggcggtgattca

SEQ ID NO: 780727 - DNA, 75 bp, Homo sapiens
cagctgtcctgacttctcccgtattggtgcctggctgccctagcaagatgtccagctcgccgctgtccaagaaac

SEQ ID NO: 780728 - DNA, 154 bp, Homo sapiens
gcattctgaaaacattcagtattttcaagatccaaggactcagataccctttgaagtcccacagtacccacagacagaaggcagagtgcttattcactttggaagcgcactcgcaggagcagaagaagagagtgtgctggtgcctgtcggagaa

SEQ ID NO: 780729 - DNA, 100 bp, Homo sapiens
gacatgcacttgctacgaaacagaaatttcatgttgcaccctcaagtcatttcccttatttaaccgatgtgtccctcaaacacctgagtgctactcccta

SEQ ID NO: 780730 - DNA, 100 bp, Homo sapiens
tggagtctctgaagcggatactccagactctgtttgctggctacacggacaacctggtgcgagtgtggcaggtgaccattggcacacgctagaagtttat

SEQ ID NO: 780731 - DNA, 75 bp, Homo sapiens
agaggaccgcgctgtcctgctgtcaccaagagctggagaaagccatctctgtcctggagatggagaatggctatt

SEQ ID NO: 780732 - DNA, 83 bp, Homo sapiens
gatctttccggatcaatccagatggcagccagtcagtggtggaggttggaagcgaagtggaagcactgaacctccaggtgaca

SEQ ID NO: 780733 - DNA, 100 bp, Homo sapiens
aggccatcacagtcccctgttccgaggtcaggaggatgcaagtcctgacagattcagcaacactgtttgtgaaatggctgctgacatttctgaatccagc

SEQ ID NO: 780734 - DNA, 100 bp, Homo sapiens
acatcaatcctcatcaaggaaatgctatacttgaaaagggagaagatgtcaaccggacactagaaggtggaaggaaacctcttcattatgcagcagattg

SEQ ID NO: 780735 - DNA, 100 bp, Homo sapiens
agaacatgtcggcctaccaggtgttctgtaaagagtatcgcgtgaccattgtggctgaccatccaggtataggagaacatattgtgatgttcgtgcctca

SEQ ID NO: 780736 - DNA, 50 bp, Homo sapiens
ttttgcctcatcctacaaattttgatgttgatgaatgccaggctatccca

SEQ ID NO: 780737 - DNA, 100 bp, Homo sapiens
ttaatgacatggtatggaagtataacattgttacactggacagattaattctctgcctggtctatgttaacaatgaatgggcaaccagtgttggggaagg

SEQ ID NO: 780738 - DNA, 89 bp, Homo sapiens
gcctggtggacagcaaaggctttgatgaatacatgaaggagctaggtacagaggtgcagttccatggtacaccataaatcttgacttac

SEQ ID NO: 780739 - DNA, 90 bp, Homo sapiens
gctgctcttcctgaggttttcctaagccatcccctggcggaaccgcccccagtgtacaagactgatctggagaaggacattatttcggac

SEQ ID NO: 780740 - DNA, 76 bp, Homo sapiens
aaacagtgaagtcttaagtgatgcatgaagaggaagaaaagttccaaatcagaggccaagggcactgtgtcgaaag

SEQ ID NO: 780741 - DNA, 88 bp, Homo sapiens
gcgggggcgacgcgcgggaacaacgcgagtcggcgcgcgggacgaagcagggaggagagagcgatggcttttttcacccagaaggcca

SEQ ID NO: 780742 - DNA, 100 bp, Homo sapiens
tccgagccagcgagccagcgagccgccgacccgccgagcaaaatgtgggacacagcaggccaggaaagatttcgaacaatcacctccagttattacagag

SEQ ID NO: 780743 - DNA, 75 bp, Homo sapiens
ccattgctgctggtgtactagagaagacttcatggcggcggctatggttgccttctgataattgaaggatcccta

SEQ ID NO: 780744 - DNA, 100 bp, Homo sapiens
caaggagttcatgtgggccctgaaaaacggagacttggatgaggtgaaagactatgtggccaaggcttgcattgatgacaatgttgatatggtgaagttt

SEQ ID NO: 780745 - DNA, 87 bp, Homo sapiens
ctcgccctggacatcgatagggatgcagaggatcagaaccggtacctggatggcatggaaactccgggacgttttacagcagaggct

SEQ ID NO: 780746 - DNA, 51 bp, Homo sapiens
acttgaaaaagccagttctaatcaggaaactaaatatattttgccaacttt

SEQ ID NO: 780747 - DNA, 83 bp, Homo sapiens
agaagccaaagataaaaatttcaggatcaccattaacacttaagacaggtgctctagttcacagctataggggaacaggtgga

SEQ ID NO: 780748 - DNA, 100 bp, Homo sapiens
cgtttccggaccttcctgctcgactctgactatgagcgcattgagctggtggcgctactgtatccgtttggagaaccttgacagtgatgtggtacagctc

SEQ ID NO: 780749 - DNA, 113 bp, Homo sapiens
ccgctcgcaggcgccgcacggagttgcgtcccggggacttggggccgcagggaggtgagaagccctaccactgcaactgggacggctgcggctggaagtttgcgcgctcagac

SEQ ID NO: 780750 - DNA, 100 bp, Homo sapiens
gggcaaccaatcaatgaaacagacacacctgcacaggtacccagagggttaccttacttctctgtggattttggccttcacggagggtttgcccatgtca

SEQ ID NO: 780751 - DNA, 75 bp, Homo sapiens
aagaagtgcacgtgtcagagctggagcgcctgcattgtgactgctacattgagaaacttggttgattcatcatta

SEQ ID NO: 780752 - DNA, 100 bp, Homo sapiens
cagcatattacctatcaggagaggagaaccacatcactgccttcgcagaagtcacatgatatcgaagcagatggtttttcactgcattggacatcatccc

SEQ ID NO: 780753 - DNA, 96 bp, Homo sapiens
ggcgccaggagcccgtgcgcggcccgggcagccgcgctttcccagctggactctgtgaagctgagcaggagcagatgcggaagatcctctaccaga

SEQ ID NO: 780754 - DNA, 78 bp, Homo sapiens
attcatgctctgaccatcacatgggcacttcctcctcaacagcaacattacaggcgcaacgtgctgagcttgtcccct

SEQ ID NO: 780755 - DNA, 100 bp, Homo sapiens
ctctgtgtcaatctgcctcttcgagaaattcatactcctgagggtatattacctctctctggaattttacatgggccgaacattacagaacaccatgatc

SEQ ID NO: 780756 - DNA, 75 bp, Homo sapiens
accagtcccttggacagtctgcaccttctcttactgctggcctggtcatgaagacatatcacatgtacaatgccg

SEQ ID NO: 780757 - DNA, 75 bp, Homo sapiens
gttatgacagccaaaaagcagagtttgctggacaaaggagtgatactacatgttggtgacatcgtgaaagtcaca

SEQ ID NO: 780758 - DNA, 75 bp, Homo sapiens
actaggtggcaccagaacaaacaaagggctgcaactacggtatgatgtggaactcttccagcgcatagaacactt

SEQ ID NO: 780759 - DNA, 101 bp, Homo sapiens
caggaagctgtttatggccaaaatacattgtggatatcaagcctgccaatatggaagagctaacagaggtgattacagcagcagaatttcatccaaacagc

SEQ ID NO: 780760 - DNA, 75 bp, Homo sapiens
agcgtttcttgcaagaatgggaggagtcctaagcagacttaaagccaagaaaataagaagaggaaagagagaggg

SEQ ID NO: 780761 - DNA, 100 bp, Homo sapiens
cgcccggtgaccatcaaatctgtctgcactccaattctaccaggatggctctcttcgctggtggcaaactggtggatgatgaagacttacaagatgaacc

SEQ ID NO: 780762 - DNA, 95 bp, Homo sapiens
acatgggtccgtggtcgtttgtttctccaaggtttgaaaagcagctggcctgcaagaggaattaaggaatttgcaagagcaaatgaaggccttac

SEQ ID NO: 780763 - DNA, 100 bp, Homo sapiens
aagctcaagaaagaggctgaaaacccccgagaagttttggatcaggggtatactctagttgaatatgaaacatacaaggaagcccaggctgctatggagg

SEQ ID NO: 780764 - DNA, 100 bp, Homo sapiens
acacccgtgtagatgggtacatcacggcttctctcccacgttaagacttaataaagcagcagcagttgcaagctcagcatctttctcatggccacggacc

SEQ ID NO: 780765 - DNA, 75 bp, Homo sapiens
aaggattccaagtaactcttatttgcaccttctaagtgagcaacacagaaactttgcacagagtaaccagtatca

SEQ ID NO: 780766 - DNA, 75 bp, Homo sapiens
cggagtcccaatgaaacgggcagccatggccctccacagcccgcagtgccggtggtggtgtgcacattgagcccc

SEQ ID NO: 780767 - DNA, 110 bp, Homo sapiens
gtggagggtggaacgcgggcgcctgaaggagttgttgtctcggcagcgcccgcggagacgtgaagaggcttcccagctggcgtgtatgttgtaaagagagttcttcagct

SEQ ID NO: 780768 - DNA, 101 bp, Homo sapiens
aggagcaagtgtgcttgcagtagatgaaaatgattcagaaggtttgtaacaagaaactatgggaaagatacactcaccggagaaaagaagtttctgaagaa

SEQ ID NO: 780769 - DNA, 75 bp, Homo sapiens
tttttgtggtaggggcctttgcccatggcaaggttaatttggagtggcccctggagtcagtttcctacaccatcc

SEQ ID NO: 780770 - DNA, 83 bp, Homo sapiens
ctcttttccagtgtccttcaggagatctgtgatgagtttcttgcagaacataaattattaggaaacattaaaaatgtggccaa

SEQ ID NO: 780771 - DNA, 88 bp, Homo sapiens
ccctgttgacttacaccctcaggactttttgtcatctgttttgttccagcaattcagtgaggttctaataactggtccagcggacacc

SEQ ID NO: 780772 - DNA, 50 bp, Homo sapiens
cctccaacccagaactggacaatctgggctggtgaattaccagatctctg

SEQ ID NO: 780773 - DNA, 100 bp, Homo sapiens
attgaagtttcctagattacttcagattatagaacggtatccagaggagactttgagcctcatgacaaaagaggtgccgtgagcgatgtggagatgcagg

SEQ ID NO: 780774 - DNA, 75 bp, Homo sapiens
aacacggtgttcatcttttctacaggtcttatcgaatgttacttagcctccaacagtattcgagaagcaatggta

SEQ ID NO: 780775 - DNA, 100 bp, Homo sapiens
tcagttcgtggttgcattgtggatgcaaatctgagcgttctcaacttggttattgtaaaaaaaggaccgagatctcactcagcagacagcagcagcccgg

SEQ ID NO: 780776 - DNA, 100 bp, Homo sapiens
atctcaaggaaggaggcctcctgaccttggctggcgcaaaggctgccctggatgggactcctgttttgagtatccgaggagcccaggaggaggaacccac

SEQ ID NO: 780777 - DNA, 75 bp, Homo sapiens
gccgaggggccggtgcagtgcaagaacggcctcttggtagcctgccaggcagcatcactaaagcaggagacttcc

SEQ ID NO: 780778 - DNA, 75 bp, Homo sapiens
caaggcttgaagatttctatgcaggaccccaaaatgcagtttccgtttaggtaaaatggatagaataatagtact

SEQ ID NO: 780779 - DNA, 100 bp, Homo sapiens
caaggaacacgtgatcttcgtaattccagagcggggcaaactgcttggcacctcttcaataggtgacattcaatgatgggtgattattgaacaaggatgc

SEQ ID NO: 780780 - DNA, 74 bp, Homo sapiens
atcacaaaagcagatgctgctgaattctggagaaagttttttggagacaagactgcatcaaaacatgtaaacaa

SEQ ID NO: 780781 - DNA, 75 bp, Homo sapiens
cgcgtccccagagagcgccctgagagaacagggtggccgcttggtccagggcacctcaacacctttgcttcgaat

SEQ ID NO: 780782 - DNA, 75 bp, Homo sapiens
ggtgattgaggacaagaccatcgagctcatggccttcacctaccaccatatccaggagatcatggtccagctgct

SEQ ID NO: 780783 - DNA, 82 bp, Homo sapiens
gcccaggtcactgggaagagtgtcacggtgatcatggaaccccacaaagaggagaactctcttcagaggtcgaagacgacga

SEQ ID NO: 780784 - DNA, 83 bp, Homo sapiens
gaaaaatgtaggcatcatagccattcagcagaagggggtgatgaagacatatcacatgtacaatgccgacagcatcagtgctc

SEQ ID NO: 780785 - DNA, 50 bp, Homo sapiens
ccggacagagcccgtggtcgcgcaggtgcacttacagagtgctacgatga

SEQ ID NO: 780786 - DNA, 83 bp, Homo sapiens
ccagtacattgtataaagaccacagaaacggtcccctcctggatggtggccgtcatcctcatggcctcggtcttcatggtctg

SEQ ID NO: 780787 - DNA, 100 bp, Homo sapiens
cggccacctgaactccaagctcttcctgaacgaagtggccaagaaggagaagcagctgcggaaaatgctagaagcctcctgacaaggtgatccgggcggg

SEQ ID NO: 780788 - DNA, 82 bp, Homo sapiens
gaagctgtattccctagagggttacgggacagatgcagttatctacattaagatgatgctgaataatcccctatttgctgga

SEQ ID NO: 780789 - DNA, 75 bp, Homo sapiens
cagagaaataacagacaagtcacgctggaggtttcagttttaaccatgctgaccaacgaaactggctttgaaatc

SEQ ID NO: 780790 - DNA, 98 bp, Homo sapiens
aaaaaggagatgcctggcagccccgctctctgcaggggattcccgaagtcttccgttttctgagaatgtgagtgctgttcaaaaattagacttttcag

SEQ ID NO: 780791 - DNA, 75 bp, Homo sapiens
tgatcgaaggggagtttccacagtgattgatgctgcctcaggtacggttcctggagcagcagaacaagatgctgg

SEQ ID NO: 780792 - DNA, 100 bp, Homo sapiens
aagaggagcagcgggatgggagcaggccaacgtcctgcggcctggttgagctcgcactgacaatcgcagaatctctgaaggatctggtgtcggcctgtgg

SEQ ID NO: 780793 - DNA, 50 bp, Homo sapiens
gggactgggagtcgttagtgagacaatgcagatcttcgtgaagactctga

SEQ ID NO: 780794 - DNA, 75 bp, Homo sapiens
ctttctggcctggaggctatccagcttcatagccctgatgaagcaagttactctgctctcctaataaatgcaaga

SEQ ID NO: 780795 - DNA, 105 bp, Homo sapiens
ttggaggcagcccctaagggcccttcgcgggagagcgtcgtgcacgcgggccagaggcgctcctctggtgcaagtgtggtagctattgacaacaaaatcgagcaa

SEQ ID NO: 780796 - DNA, 98 bp, Homo sapiens
gcagctcgccagccagcagcccgccagccgccgggaggtactccaaagattcaggtttactcacgtcatccagcagagaatggaaagtcaaatttcct

SEQ ID NO: 780797 - DNA, 76 bp, Homo sapiens
cagcagctgcgggacagtctggacgagaatgaggctaccatgtgccagctttaccaacagggacgcttatgtcaac

SEQ ID NO: 780798 - DNA, 82 bp, Homo sapiens
aacaagttttgtgcagattgccagtctaaagacttcccaagtaagaagcggaagaggagccgctggaaccaagacacaatgg

SEQ ID NO: 780799 - DNA, 75 bp, Homo sapiens
aactacttccttaagatcatcgtggtgttcccactgatgaagagcaggcgactgggttggagagggagatcatgc

SEQ ID NO: 780800 - DNA, 99 bp, Homo sapiens
ccttcctgtcgctgacggcgactgcgggaggccagttacacaacagccaatgcggagtctgacaatgagcgggactctgacaaagaaagtgaggacggg

SEQ ID NO: 780801 - DNA, 82 bp, Homo sapiens
ccagagacgcggcgcgcccgccctgcagctgcccaagcaggcgtgatggtgggcatgggtcagaaggattcctatgtgggcg

SEQ ID NO: 780802 - DNA, 75 bp, Homo sapiens
gatcagaaggaccatgctgtttttactcgatatgaagcaacagcatgtcatagaaaccttgattggcaaaaagca

SEQ ID NO: 780803 - DNA, 100 bp, Homo sapiens
gaaacgcagcagggagcacaagagacgcagggacaggttgaggctgcaccaagctggcagccggtcaagttccccaggaaaattgttgggaagtggttat

SEQ ID NO: 780804 - DNA, 100 bp, Homo sapiens
tggcttctgccaccgatccagaaccctgctcctcaccccacagggcatgaggcagccttcgctgctttcctctgctgtctctgcaagattggggtgctcc

SEQ ID NO: 780805 - DNA, 71 bp, Homo sapiens
gattgcagtttacacccggggcgcagaaaagctgagggcggcagagaggtgtgagccatgcaatgggaggg

SEQ ID NO: 780806 - DNA, 50 bp, Homo sapiens
cctgtgtactttccatttgccttcctggtgaagcagagatggtttctgcc

SEQ ID NO: 780807 - DNA, 97 bp, Homo sapiens
ggccgggctgcgtgagggaggaggactattgcccagaagaaaagatgtttggttttcacaagccaaagatgtaccgaagtatagagggctgctgtat

SEQ ID NO: 780808 - DNA, 82 bp, Homo sapiens
tgatattgaagaggaagaactgaccagagctgatcccgagcagcgtcatgtacccctgggcagacactggcctcagatacct

SEQ ID NO: 780809 - DNA, 82 bp, Homo sapiens
ggggattgtgggagtctccgcgtcccgctcgctgggagagaggttctgcgttagacctgcatcttagcaatgtgaatattgc

SEQ ID NO: 780810 - DNA, 83 bp, Homo sapiens
tggcgccaccgcctcatgcactgtgtaggtcagggaagtcaaagatgcatccctgagttcttcctagcaggcaagcagccgtg

SEQ ID NO: 780811 - DNA, 100 bp, Homo sapiens
ttagctgtgctcgcgctactctctctttctggcctggaggctatccagcgaaacccagcgtttgctggcagaaccagttcctggcatcaaagccgaacca

SEQ ID NO: 780812 - DNA, 75 bp, Homo sapiens
cccgcgcccgcaggacgccccagccagtggatccttcaggttccagggatttcaccagtagcagtgaaagcctac

SEQ ID NO: 780813 - DNA, 100 bp, Homo sapiens
gcacggcagccaccatggcgctcctgctgtgcttcgtgctcctgtgcggagtagtgggtgaaaggtgtagcagtcactcggcctacacccacagcatcga

SEQ ID NO: 780814 - DNA, 96 bp, Homo sapiens
tgcatggagtcaaggacccggcgccagcatcaacccagagcgtgcttgccgatgggacagattctgcagtctgggttctgcccgcacacattcctc

SEQ ID NO: 780815 - DNA, 83 bp, Homo sapiens
ggggccgcccgccgcagacacgggacccgcttcgaggccgctttggcgccaaatcctgaggtgaggcggaaccaaccctcctg

SEQ ID NO: 780816 - DNA, 83 bp, Homo sapiens
gcccgcaagaagtacaaagtggagaatccaagcaaaaatccctggattgaagcgcaaagctgaatgaaaacgcccaaaataat

SEQ ID NO: 780817 - DNA, 98 bp, Homo sapiens
gtgattcccgtgattgcgttacaagctttgtctccttcgacttggagtctttgtccaggacggaatggtcctcgtccgaagtgagaatgggcagttgt

SEQ ID NO: 780818 - DNA, 82 bp, Homo sapiens
ctcaactttgaagagatcgactacaaggagatcgaggtggaagaggttttaaaatcaaagatgggaaaatcggagaaaattg

SEQ ID NO: 780819 - DNA, 97 bp, Homo sapiens
agagcctggagtctgcgaaggccgggacccggttccccggcccacagtgggggtgtgcaaacccgagagaactggaactctgacagcgtcccacctg

SEQ ID NO: 780820 - DNA, 82 bp, Homo sapiens
tacactgtgaagtgcatccagatccgccggaagctgcgcatcgagaagcgccagcagaaaacgcccactcctggatcttcac

SEQ ID NO: 780821 - DNA, 74 bp, Homo sapiens
gcgtgggtgcctggagatgaagctggaaaggtggacaacgcgtactggctgtggactttccagggacgcctcct

SEQ ID NO: 780822 - DNA, 82 bp, Homo sapiens
tcaaaacgtgcaataccacctcccctacctcctaagactatcggtggtccatgtcaagtgatagttcacaagtgggagactc

SEQ ID NO: 780823 - DNA, 100 bp, Homo sapiens
atcaatgcccaaatggtggaagatcagggatttctggattctctacgggatctcatagcagattcaaatccaatggagttcaaagaaggacgcagagcca

SEQ ID NO: 780824 - DNA, 100 bp, Homo sapiens
gaggcgacatggggcacccggtgtaccgcggcgagaagccccagctgcactacgcgctttggggccatttggatcacacgatgttttttcaagattttag

SEQ ID NO: 780825 - DNA, 112 bp, Homo sapiens
ctcagcccacatgcccgctcacctgcgctgtgatgcctgcagagctgtggcttaccaggctgggacgcagagaccggcagcgattcggaggacgggctgcggcctgacgtgc

SEQ ID NO: 780826 - DNA, 74 bp, Homo sapiens
gcgcaaagcttgcgaggtggcgttagctctaagcgaaagacatgaggcctcagcctgaaatgaggttgttttga

SEQ ID NO: 780827 - DNA, 83 bp, Homo sapiens
gtctcctgcagcggcccccgccgggaatagaaggacagtctgtggaagtttccaatattgtggacatccgaaaagtatataac

SEQ ID NO: 780828 - DNA, 90 bp, Homo sapiens
gaaccagatatcttgaaaagctgccagaaagtggatatcaaagtattgcagagtgccttagcagccatccgacatgcccgctggttcgag

SEQ ID NO: 780829 - DNA, 100 bp, Homo sapiens
cggcacccagacaggtggcgacggcagaggagtccttccaaccctcctgctaccatgaagattgcagtgattggacagagcctgtttggccaggaagttt

SEQ ID NO: 780830 - DNA, 126 bp, Homo sapiens
caacgtcggggacggctgcgcgggacggctctgtaggaaggaacttggttccccctccctcagcttccgccccaaaaggcctcattgctacgatttcagagtaccctggtaatagctgagcatgca

SEQ ID NO: 780831 - DNA, 97 bp, Homo sapiens
gacaactggtgccggagggacaaaaagcaatgcaagagtcgctttgttacacctttcaagtgtctcggttgtaaagaagaaagttctaccctttctg

SEQ ID NO: 780832 - DNA, 74 bp, Homo sapiens
ggcagggtcccgcatggcggcgcacaggaagcacggtacctcaggatgagtggggagggtaccccaccggtggc

SEQ ID NO: 780833 - DNA, 90 bp, Homo sapiens
gcatgttggacgatatctaatattacagctggaaatagggcacagatccagctgagatctgtatctgtggacctgaatgttgatccctcg

SEQ ID NO: 780834 - DNA, 100 bp, Homo sapiens
ccgaaaggcccggaagcagaagggtgccgagacagaactcgtcagattcttgcctgcagcacggggtcactctggtgcccattgaggagttcagcccgga

SEQ ID NO: 780835 - DNA, 83 bp, Homo sapiens
cacggcctcttgcgctacgccctggatgagatgacctgcctagagctggaacgttacctccagagcgagccctgctatgtttc

SEQ ID NO: 780836 - DNA, 50 bp, Homo sapiens
taacattttgtgaagttgtaaaacagtatccggagttactcgtggcttcc

SEQ ID NO: 780837 - DNA, 74 bp, Homo sapiens
tactgctgcctctgtcactcctggtgaccagcattcaaggggatatcattttcaatgcccaatacccagaactg

SEQ ID NO: 780838 - DNA, 102 bp, Homo sapiens
agaagaaaacatttcttttaatttttaaacttggtttgaaaggtcagcccaaggccaaccccactgtcactctgttcccgccctcctctgaggagctccaag

SEQ ID NO: 780839 - DNA, 100 bp, Homo sapiens
catggactcggaatattacagcggcgaccagtcagattttacatcctgaagtccaaactctagatctacggagctgcgatatatcagatgctgctctcct

SEQ ID NO: 780840 - DNA, 75 bp, Homo sapiens
cggacgggcgccacattctcaacaccacggaattccatggggagctgatcaccttctattactattggaagaaga

SEQ ID NO: 780841 - DNA, 106 bp, Homo sapiens
ccagaagctcttgctatggagactgcagaagtgaagatgatgaagcaacagaatggaattttttgcagataacctgggtgattttctcatttttctccgccgcttt

SEQ ID NO: 780842 - DNA, 75 bp, Homo sapiens
gtcaccatcctggccacgccccttcccgaggagaggaaaatggagctgatagtatcctggatcttggattagtag

SEQ ID NO: 780843 - DNA, 50 bp, Homo sapiens
ctgcaatataaggatctctgtacaaaaatccattcctcgctgccgaagaa

SEQ ID NO: 780844 - DNA, 75 bp, Homo sapiens
cggaggagccaggtccctgtctgagccagtctgttgcggttctcccacttttccataagcagaacaagaaccaaa

SEQ ID NO: 780845 - DNA, 100 bp, Homo sapiens
tacaagttggcttatgagtggaacatggctagcaggaatgcttactgttgcgtggttcgttattaacaggagctatgaagacatgattggtgaggaggtg

SEQ ID NO: 780846 - DNA, 82 bp, Homo sapiens
aaaatccgcaagaccatcatgcaggtgtggacactgccagcggctgcagccgacttggaatgacctgggagacaaatacaac

SEQ ID NO: 780847 - DNA, 100 bp, Homo sapiens
gaaaatgtttgaagcaacaagattgcttgcaacaattgttatgcttattgagaggatccagaatccagatctctggaatagctaccaggcaaagaaaaaa

SEQ ID NO: 780848 - DNA, 75 bp, Homo sapiens
ggcagatgggctgaaggttgtcctggctttctgagaccaagatcttcactgcctctaatgtgtcttcagtgcctc

SEQ ID NO: 780849 - DNA, 88 bp, Homo sapiens
cctttcagtcctatcggaaggatgatttcgttatgccaactcacagccccgaaaaaatcttgaagttaccaaaagaagaagacagtgc

SEQ ID NO: 780850 - DNA, 75 bp, Homo sapiens
cggaagggtgatgtggctgcggcatcgccggcctcgctatgcaaatactgcatgtgatggtgataaggaatcaga

SEQ ID NO: 780851 - DNA, 100 bp, Homo sapiens
tcctgacacaacaccactcagcctccatgaagaagtggactattctgagaaactgaagttcagtgatgatgaagaggaggaagaagttgtgaaggacggc

SEQ ID NO: 780852 - DNA, 90 bp, Homo sapiens
agactgggcggccggccgacccttcctgtcgctgacggcgactgcgggaggccagatggcagatgatcagggctgtattgaagagcaggg

SEQ ID NO: 780853 - DNA, 100 bp, Homo sapiens
atacagcttacatcttgcatcctcaagcgtagaacttcatggaggaacacggagtgacccaaaccgaacatatggctaccatagaagcacatgcagtggc

SEQ ID NO: 780854 - DNA, 80 bp, Homo sapiens
ttgtcaccataggagacatggacgaagccttcaaatccatcaagctcatcaaaaggaatagccaggccagaagaaggaag

SEQ ID NO: 780855 - DNA, 75 bp, Homo sapiens
aggaaagaatgaagaggccctgcaaggtgtggatgtggaagcagccaagcgggcagaagaggaattgctccttca

SEQ ID NO: 780856 - DNA, 124 bp, Homo sapiens
cagagcaaagttaccggacagcaattaaacacagaaggaaatacccagactgttactacaacctcgggcgtctggaagaggatcacctagcccgggtagaagaggcaatcacccgtatgcttgt

SEQ ID NO: 780857 - DNA, 98 bp, Homo sapiens
cggggcgcagttcggaggttcagccgtgctggtatagaggactctaagaagtggggcatgctgtttctggtgaaccagctgtttaaaatctacttcaa

SEQ ID NO: 780858 - DNA, 80 bp, Homo sapiens
gcagcttccaggatcctgagatccggagcagccggggtcggagcgggttggctttctgccacctcagcgagcagtgctgc

SEQ ID NO: 780859 - DNA, 82 bp, Homo sapiens
ccctggaggacttggacccctactatgcagacaaaaagatcgtctggtagaatcaacttccttgagaaaagccatagaaaca

SEQ ID NO: 780860 - DNA, 100 bp, Homo sapiens
tttctcaaggcacgaactgagctgatccttgccccagaatggtaccaaaccaccactggatgcagatgtaaatttggaagcaattgctggtgaccttcgc

SEQ ID NO: 780861 - DNA, 98 bp, Homo sapiens
ggaggctcgggtcgttgtggtgcgctgtcttcccgcttgcgtcagggacctgcccgactcagtggacttcctccgtcaggcagctggcaggacctgaa

SEQ ID NO: 780862 - DNA, 100 bp, Homo sapiens
gagaatggaaaagaaccattgaagcttgagagaaaagcccccaaaagcagctattcaggaggaatcttcgagtatgcggacggccccaacgcccaggtca

SEQ ID NO: 780863 - DNA, 100 bp, Homo sapiens
ttctgttaaggaactcgatttatatttggcatactttgtgcatgcagcagggcgaccctggacatctttgactacatctacatagatgcttttgggaaag

SEQ ID NO: 780864 - DNA, 75 bp, Homo sapiens
cgactgtttctgctcctactacaacactggcatgttatttgaaagcaattgagacgcaaccgaactttgcagtag

SEQ ID NO: 780865 - DNA, 101 bp, Homo sapiens
aactccgcgttgggctgctgctctgatgggaagacgccctcgctggacgcagagggctccaactgccccgggcgacggccggggactgcctggagagctcc

SEQ ID NO: 780866 - DNA, 90 bp, Homo sapiens
tcaagatgctctctctggaccgatcccactgaaagcactgtcttagaacctggctcacctgattttgccgatgagtcaactttgaagtgt

SEQ ID NO: 780867 - DNA, 90 bp, Homo sapiens
tgggccggagcaggcgaggtggccggagccgtgtggaccaggaggagcgcttgggctccctgctggccacctatggctggtacatcgtct

SEQ ID NO: 780868 - DNA, 100 bp, Homo sapiens
gagcctttttggcctggcttgtttgcaaagggtcaactgctatgatgtgtttggagcccagtcaccctttggtggctacaagatgtcggggagtggccgg

SEQ ID NO: 780869 - DNA, 96 bp, Homo sapiens
tttggtggcacgcagcctggggactctgcctcgtgccgctgagcctggcgcagatcgggggctagagagctgaaggagagccagtttccccaaaat

SEQ ID NO: 780870 - DNA, 50 bp, Homo sapiens
acaacattttcaagaaaattcaagatattctctaagccgctttcatcatg

SEQ ID NO: 780871 - DNA, 75 bp, Homo sapiens
agaagctcttagccagcactcgctatccacctccaggaggcagcacaggcacttccccaaccacctccagcactg

SEQ ID NO: 780872 - DNA, 75 bp, Homo sapiens
gctgtgtcaatgccattgaattctccaacaatggaggccagtggctggtctcagccactgaggcggctcccagct

SEQ ID NO: 780873 - DNA, 100 bp, Homo sapiens
agaaccagaaacatatctattatatcacagattcccaacttcttctggagcctggggatcggtcacactggtgcgtggtggcatactgggaggagaagac

SEQ ID NO: 780874 - DNA, 99 bp, Homo sapiens
cagagccaaaatcagagctggaacctgaggagagaggaatcagagatcattgatttcttcctgggggcctctctcaaggatgaggttttgaagattatg

SEQ ID NO: 780875 - DNA, 100 bp, Homo sapiens
ctagaccgacttctgcagtacgagaacgtggatgaagactcttcggcaaagccgccgcagggaagatgaacctgtacgagtcatttgcccaggctaccca

SEQ ID NO: 780876 - DNA, 100 bp, Homo sapiens
ggatggcacaacatatgaagcctcaggaccatccaagaaaacagcaaaacttcacgtagcggtgaaggcgggcacatgaacgccccccaccccatccaca

SEQ ID NO: 780877 - DNA, 92 bp, Homo sapiens
cccctccgagggcaccaacaccagcggggcgtccgagtgttgcttgtctggagatggagccactacaggcgggcctgggcgcctggagtcgg

SEQ ID NO: 780878 - DNA, 50 bp, Homo sapiens
gaactgctgggaggatgacatggctgcttcaacccccaactccactgctg

SEQ ID NO: 780879 - DNA, 74 bp, Homo sapiens
cgcgtggactggaagtcacactgcggcgtatgtgccaagagttgtaacctctgcacaacagaaagcaggaagaa

SEQ ID NO: 780880 - DNA, 82 bp, Homo sapiens
cgtctctctgctgcggcgcggggaccgctgtgctctcggtttacccaaggtccagcctagcccctaggcaccatgtcggaca

SEQ ID NO: 780881 - DNA, 99 bp, Homo sapiens
ggaagatgcaagcggtttgggaccttgaacaaggcaaatatggttttgagctccaaacgagaatggaagccgctggaggaccgtagctgcacagacata

SEQ ID NO: 780882 - DNA, 100 bp, Homo sapiens
gtgacaagtcagttgaagatgattggtcaaaaccacttccaccaagtgaacgcttggagcagtactgagcagtacagtgaatacacaggctatgctgaga

SEQ ID NO: 780883 - DNA, 100 bp, Homo sapiens
aagtggatgaggtgaagtccacaatcaagttccaaatgaagaaggtgttgtgactgcagtgcctccctgtcgcaccagtactatgagaaggatgggcagc

SEQ ID NO: 780884 - DNA, 98 bp, Homo sapiens
tggccgaagcgaagggcgacgccaagccggagggatggatagaatgacagaagatgctcttcgcttgaatctgttgaagcggagcttggacccagcag

SEQ ID NO: 780885 - DNA, 87 bp, Homo sapiens
agaccatcatgctgcgcggccttcccatcaccatcacagagagcgattggaatgcagtagccctctgggcctgggatattgtggttg

SEQ ID NO: 780886 - DNA, 109 bp, Homo sapiens
ggaggaggaataatatttatggagcatatattatggaacacagagattatttggtagcaattgaagagaaaaacaaagctacatttctacgtgcttatgtgaactggag

SEQ ID NO: 780887 - DNA, 97 bp, Homo sapiens
gaaatttttgaaaaaattgaatcacagagaattatatctggaagaatctcaggatacatatcagaagcatctgctactcccgagcccggagaggacc

SEQ ID NO: 780888 - DNA, 120 bp, Homo sapiens
ccagcagcactgtgtgtcttggcttcggagcattcagcaggtgttacaggtgaccatcttggtgctgcagggccggctggatgaggcccgacagatgctctccaaggaagccgatgccag

SEQ ID NO: 780889 - DNA, 75 bp, Homo sapiens
atagtctacaaaggaagacttgtaacctggagaagagtttctaagctgactaaacaactaatgctcctggaggca

SEQ ID NO: 780890 - DNA, 74 bp, Homo sapiens
aggagatggttcgggcctagcggagccgggactggaggtgcagagcattgtagaccaaggagccatggatagga

SEQ ID NO: 780891 - DNA, 83 bp, Homo sapiens
cccgcactgacagcgggaggcagagggaggaacctggacgccggaagccgggaaatgaataccgtagcagtaggcaggacagt

SEQ ID NO: 780892 - DNA, 100 bp, Homo sapiens
cttctgaagcacatgattattgagcataagattgtcatagctgatgtcaagttggttgctgatttccaaaggtcaaatgggctctctcattcttggagtg

SEQ ID NO: 780893 - DNA, 75 bp, Homo sapiens
taccttttcaccagactatccgtttaaaccccctaaggtttacccagggttgatgataaccgctggccttattca

SEQ ID NO: 780894 - DNA, 75 bp, Homo sapiens
agatacatcctactcagatatggctgctggatcagaggagcatgataaagatccagaaagcttttttaaggtatt

SEQ ID NO: 780895 - DNA, 82 bp, Homo sapiens
gcggattcgccgaggcaccgaggcactcagaggagacatgggaaagcggaaccaccaaaaggagtgatgatcaacgatctca

SEQ ID NO: 780896 - DNA, 50 bp, Homo sapiens
gtcaagtatgtcccaaacgtctaatccaaaggactgcatgacacaccata

SEQ ID NO: 780897 - DNA, 80 bp, Homo sapiens
agtggacatagaggacaacgcagatatagaacatttcttttatcacagacagtatttatgatgaaatggaagagaagtgg

SEQ ID NO: 780898 - DNA, 83 bp, Homo sapiens
ccaacgtgaaccagatcgggagtggcaccatggacctgcccttccagacctgcctagagctggaacgttacctccagagcgag

SEQ ID NO: 780899 - DNA, 100 bp, Homo sapiens
agcggtggcagtcgcgaccgcgggtgcatccagtttctgcgcccaggttatgaagacagtatggagtttccagaccatagtagacatttgctacagtgtc

SEQ ID NO: 780900 - DNA, 89 bp, Homo sapiens
tcgccgtgctctccgggcacgtcaaccccttcctcccgtatatcagcccatctctccagcagaactgcttggatttttctaccaggagg

SEQ ID NO: 780901 - DNA, 50 bp, Homo sapiens
ggaggaagtgtcagcgctactgccgcagggctattgagtggccagacttc

SEQ ID NO: 780902 - DNA, 95 bp, Homo sapiens
gacacagcctcgctggaggcagtttctggtcagtcattggcaccatgaactggaataaaggtggtcctggcactaagcgaggatttggctttgga

SEQ ID NO: 780903 - DNA, 98 bp, Homo sapiens
ggcggctgacagtcgggaggagaaagattcaaccctatgaaaagataaaggccaggggcttgcctgataatatatcttccgtgttgaacaaactagtg

SEQ ID NO: 780904 - DNA, 75 bp, Homo sapiens
cggcttttctcctcagttttctggagtgctttggaggagaggtgtcttacaagtatcaagaacttactatatgtg

SEQ ID NO: 780905 - DNA, 75 bp, Homo sapiens
aactggaaagaaatcggaagcgactagagactctgcagagtgtcaggatatgttgcagtattacttgaatctgac

SEQ ID NO: 780906 - DNA, 83 bp, Homo sapiens
agcctcagttggaagcagccgatccagcctgcggagcctgtggggcaggaagcagacagtatgagcatgaccagtggagaagg

SEQ ID NO: 780907 - DNA, 90 bp, Homo sapiens
aagcggacacgggaatatatccgaagcctgaagatggttccaagtattccctatctaggtctgggaggggctgaacgtggtgaagacagg

SEQ ID NO: 780908 - DNA, 98 bp, Homo sapiens
agcagaggtggctgcactgcccgtcgccggagatggggggacagatcacccggagcactctccacggttttgctttgtgaccctgaagccaagaagct

SEQ ID NO: 780909 - DNA, 75 bp, Homo sapiens
ccgcgctctcgctctggccgacgagtggagaaagttacctaaccaaactcctgcaaaaccacaccacctatgcct

SEQ ID NO: 780910 - DNA, 90 bp, Homo sapiens
tgggtggctgagagaggaaccacccagggctgccatccaggtatgggcactaggaaaagacttcttccatcaagcttaattgttttgtta

SEQ ID NO: 780911 - DNA, 88 bp, Homo sapiens
ccccagagattccctgccctgattccaggagaacctggcagatcttttgaggttccttgtggagaagcactggtataagcagtgggag

SEQ ID NO: 780912 - DNA, 119 bp, Homo sapiens
gggggctcagagatccaagtgcgcgccctggcgggtccggaccaaggtgttacagcacatgaaggccgtgcaggcagatcaggagcgggagaggcagcggcggctggaagtagaacgtg

SEQ ID NO: 780913 - DNA, 100 bp, Homo sapiens
gactgattttatgggaaaattaagcagatgctccagtttgagaaacctggatctgcgatctgtttgtggagtcttttagtcctgctatacagctgcacct

SEQ ID NO: 780914 - DNA, 74 bp, Homo sapiens
gagtctttgggggcagcctgcagaggctgcggggtattccctcagcggatactacacccatccatttcaaggct

SEQ ID NO: 780915 - DNA, 75 bp, Homo sapiens
ccgatcacaaagatacgaatctcttaagggggtaacttacgacctatttctccgtggcgttggctgttttctgtt

SEQ ID NO: 780916 - DNA, 96 bp, Homo sapiens
caagaccgtcatctacctgctcaacccctgtcacctggtcaccatgatgcatcttgtagattttcagtggaaactgggtatggctgtgagctcaga

SEQ ID NO: 780917 - DNA, 80 bp, Homo sapiens
cgctgtgatgcctgcagagctgtggcttaccaggactggaagcaaccccaaaattagacgcaacaaaatctggggaggac

SEQ ID NO: 780918 - DNA, 100 bp, Homo sapiens
ccctgcgccccgctctgctgtgggcgctgctggcgctctggctgtgctgcgcgacccccgcgcatggctggttgtggtgactcatgcccataatcccaac

SEQ ID NO: 780919 - DNA, 75 bp, Homo sapiens
aaagcagtgccattccagaatgccatcttgaatgtaaaagaacttggagatgccttcaattaagttgcagagttc

SEQ ID NO: 780920 - DNA, 90 bp, Homo sapiens
attggcttcgggctgagctagcagtgagcaccttttggcccaatgaatatcagttgtcggacaagtaaccgcaagagcttgattgtgacc

SEQ ID NO: 780921 - DNA, 97 bp, Homo sapiens
aaaattttggaaagagaagatgctcggctgatggtaccagtgcatcttctgttgggagacctttgtcacttactataacctgaagacccaccagcga

SEQ ID NO: 780922 - DNA, 98 bp, Homo sapiens
gcaccgggatcgtgaccgagaccgtgaccgagagcgtgaccgagagcgcgaatatcgtcatcgttagaaggagttttgggaatgcacttggaaactgt

SEQ ID NO: 780923 - DNA, 100 bp, Homo sapiens
tggagctacagatagtaaagatgatgatgacattgacctctttggatctgatgatgaggaggtggaacgtgtgatcaccattatgcagaatccacgccag

SEQ ID NO: 780924 - DNA, 75 bp, Homo sapiens
agagcaggccagcccggacctctggagtgcccccagcccagagcccggccctgggcagtgacggggttcgggtga

SEQ ID NO: 780925 - DNA, 51 bp, Homo sapiens
gattgcaaacgtgcatgtgcaaaagcctgtagattttgaaaccaaaagagc

SEQ ID NO: 780926 - DNA, 82 bp, Homo sapiens
aggcgaacccgcggcgcaataacggaatgctgtctctgcaatttgagaggaggtgctcttaagcaaacgaagaacaataagt

SEQ ID NO: 780927 - DNA, 90 bp, Homo sapiens
aaaacagtgcacagacggctgacggctcacactgatgttgtcggaactgggaggaccatgaaagcactactcagcaatatagagaaatac

SEQ ID NO: 780928 - DNA, 100 bp, Homo sapiens
caacgtgctggagagaccccgcggctgggcgttcatctaccacgctttcgtaaccttcaacaactagtactgcttcaaattatccagatgtgttaacaag

SEQ ID NO: 780929 - DNA, 101 bp, Homo sapiens
ccgggggctcagagatccaagtgcgcgccctggcgggtccggaccaagggagtcaaggtggacgcgagagaccacagtggagccacagcccggatgctggc

SEQ ID NO: 780930 - DNA, 90 bp, Homo sapiens
actcccatcagtttctgtatagtgtaaaagtgcctccaaagccattacacctgcagaattcaccttcgtccaatatacaccaaaccccca

SEQ ID NO: 780931 - DNA, 90 bp, Homo sapiens
gggcccattttcttggataccaaggacctactctatactctcagtggcttagctcttcacagatggaatcacaaataaacttattggctg

SEQ ID NO: 780932 - DNA, 83 bp, Homo sapiens
tgctattccagcacacaaactccctgacagaatactgccaagtgtattcacagagatataaaacctgaaaatattctaataac

SEQ ID NO: 780933 - DNA, 99 bp, Homo sapiens
cactggcccgctccctggcggtgcagagaccagcatccttggagaagcccagctgcagctccagcaggtggcgctgcagcagcagcagcaacagcagca

SEQ ID NO: 780934 - DNA, 91 bp, Homo sapiens
cgagagtgggcgagaacgtccactgcgggccggcgaaagctgatcgtaaagctgaaaattgaaatcatgaaagtagacaggactaaactga

SEQ ID NO: 780935 - DNA, 94 bp, Homo sapiens
attcgggtgggagtgacccgattttccaggttaccatggcctctactgtgaggaggaatataatgagtgcctctccgctccatgcctgaatgca

SEQ ID NO: 780936 - DNA, 100 bp, Homo sapiens
cgaccacctcgtgaacgaagattcgaaaagccacttgaagaaaagggtgaaggaggcgaattttcagttgataggtcctgaacgaggctgtgggggccct

SEQ ID NO: 780937 - DNA, 100 bp, Homo sapiens
cggcggccccgggaccaaggagaatggcattgtgcccatcgtggagcctgagatcctccctgatggggaccatgacttgaagcgctgccagtatgtgacc

SEQ ID NO: 780938 - DNA, 100 bp, Homo sapiens
cattgctattacaactgtaagccaggagtggcagcatggtgattcatttgatgcttccagaaaccagagaaatctatgaattagagaaattatggaccct

SEQ ID NO: 780939 - DNA, 100 bp, Homo sapiens
ggagatgggcctactcgcccgccaccctgcgctgccgccgctctgaggagttaaagccatgaaccagagaatcagtcagagtgctccagtgaaacagcca

SEQ ID NO: 780940 - DNA, 100 bp, Homo sapiens
ggaaaaatcctggtgttttgaatatgttcaggtccagttcagactcttgatcccacagccacttcttgagtgaggcgggcgctaatattgacacctgctc

SEQ ID NO: 780941 - DNA, 98 bp, Homo sapiens
tctgttggacctgcctgctcccagcatctccagcaacaagctgtctctgccggtagatgacattaatgctgataagaatatctcttctgcacagattg

SEQ ID NO: 780942 - DNA, 100 bp, Homo sapiens
caaaagctgggtacaggcgcgagccacaggcacggaaacctcgcgccgaccggggccctaggcccgacgacggcagctgcttttctaacccaaactgtat

SEQ ID NO: 780943 - DNA, 80 bp, Homo sapiens
atggagctcgagaacatcgtagcgaacacggtgctactcaaggcccgggaaggggacggcaaaacagaacagaaaggcgg

SEQ ID NO: 780944 - DNA, 100 bp, Homo sapiens
attactcacaccaggtggggaattaccacatgggattcttggtcagtgaggatgaaagcaaactggatccaggtctctggacactatgggcacacgactc

SEQ ID NO: 780945 - DNA, 75 bp, Homo sapiens
tgagtttcctggtagagccggccgagctgaggcggtcgcggccatgaaggtcctcagccagcagagccacgttcc

SEQ ID NO: 780946 - DNA, 73 bp, Homo sapiens
taaaagaactacgtgttttatccaacaggacatggatttgattgacatactttggaggcaagatatagatctt

SEQ ID NO: 780947 - DNA, 100 bp, Homo sapiens
tggcagacgatattgatattgaagcaatgcttgaggctccttacaagaagagcagccagacacagtctccaacgccaccaaagcctccgtcgccaagctt

SEQ ID NO: 780948 - DNA, 98 bp, Homo sapiens
gaagaccgagagtcaccacaaggccaagggcaagtgatttgacaggtctctaattaacagaagatggcaaagcccagccacagcagctatgtccttca

SEQ ID NO: 780949 - DNA, 101 bp, Homo sapiens
tgcgggcccgggccatggccgccgccgatgccgagaacctgtgtgcagacacattagaaaaggattggaacaaggtaatttgaaaaaggctttagtgaatg

SEQ ID NO: 780950 - DNA, 100 bp, Homo sapiens
gccgtacacctggcggctggaacggtcaatgagctgaaggagaaaggcaacaaggccctgagcgtgggtaacatcgatgatgccttacagtgctactccg

SEQ ID NO: 780951 - DNA, 87 bp, Homo sapiens
ccttctccactttcgccagcccgtgccgcgagcgcggcctgcaggaggtcctcagccctcgctctcgctggcggagcagcacctgga

SEQ ID NO: 780952 - DNA, 97 bp, Homo sapiens
cgcctccttgcccgtgaccgtcgctagaactcagttgtgcgttgcggccagtcgccactgctcagaaaaagtcctacctggagcgaagcgttaagga

SEQ ID NO: 780953 - DNA, 100 bp, Homo sapiens
gaggtgctctacgaaatctttcgctccctacacaccctggttggacaggtcctgcagacattcgctttgtctgggagaagaatgggcgagctctggagac

SEQ ID NO: 780954 - DNA, 75 bp, Homo sapiens
aacttcaatggaaaacatgaaaaggtgaacagtcagcccagggcaggtgtttgtttgccagtggcagtccatttg

SEQ ID NO: 780955 - DNA, 100 bp, Homo sapiens
aaagtgttgagtaaacagaccaagttggggaaatcctcattgacgattcaatttgttgaaggccaatttgtggactcctacgatccaaccatagaaaaca

SEQ ID NO: 780956 - DNA, 98 bp, Homo sapiens
gggtccccgcaccacctcctgctgccttcccgtcgccgctcccgaagcttttccagccccctgcgccccgaggaaggaaggcggctggtggaggacgt

SEQ ID NO: 780957 - DNA, 100 bp, Homo sapiens
gccagaccacgagcgccttcctcttcctcggcggtgtaccaacagtaccgttattgccaccacaagtaaaccagtccctcacttctgtgccaccaatgaa

SEQ ID NO: 780958 - DNA, 100 bp, Homo sapiens
gggacagccatggtttcagacgatgccgacaaaaggatcaaggtggcgaagcccgtggtggagatggatggtgatgagatgacccgtattatctggcagt

SEQ ID NO: 780959 - DNA, 100 bp, Homo sapiens
gtggaggtaccccctgaactatgtcatgggattcaaggaaagttttctttggatgaagaagccattcttccagatcatgatcaggaacctccctattcaa

SEQ ID NO: 780960 - DNA, 101 bp, Homo sapiens
ggtgagcgtcgaggaggcgcaggagactgaccgcaacggcaggctctctggtggctgtgagctgacagtggtgatccatgacttcaccgcttgcaacagca

SEQ ID NO: 780961 - DNA, 78 bp, Homo sapiens
tccacatctgtgggatatctcatcaggtggacaagatcgaggaacttgatcaagaaaacgaagcagcgttggaaaatg

SEQ ID NO: 780962 - DNA, 88 bp, Homo sapiens
atccctaacatcagaagagtttgctaagcttgtgggaatgtctgtcctcctagccaaagaaaggtatctttcagatgaaggcattgaa

SEQ ID NO: 780963 - DNA, 76 bp, Homo sapiens
caaacaaggactctctgtataaggcaaatgttctgaaaaagactctgcatgggaatggcctgccttacgatgacag

SEQ ID NO: 780964 - DNA, 83 bp, Homo sapiens
gtcgcttgaaaagactgggcttgtccttgctggtgcatgcgtcgtcggcctctgggcagcagccctgggcgctgcctatggca

SEQ ID NO: 780965 - DNA, 100 bp, Homo sapiens
gacaagttctggaggagatgaaagctttgtatgaacaaaaccagtctgatgtaatccttttccctggaggaagtgttgacctcagacgctcagattatgc

SEQ ID NO: 780966 - DNA, 75 bp, Homo sapiens
gaccacggcgactggacttacgaggagcagtttaagcaggtgaaaggtgtagcagtcactcggcctacacccaca

SEQ ID NO: 780967 - DNA, 74 bp, Homo sapiens
tttagagcctggctactcacagttgaagcctgattgcagccacttccggctcctgcgtcgctccggaagcctgc

SEQ ID NO: 780968 - DNA, 75 bp, Homo sapiens
agaggtcatgtggttggactacgctattacacgggagtactttaccgatttgttacaactcaagcaagggccagc

SEQ ID NO: 780969 - DNA, 96 bp, Homo sapiens
atgatttaaacaagagatttccacagaagtccagaacacatattacataatggagccgggagacagactagggctggcttgatccggccacgcagt

SEQ ID NO: 780970 - DNA, 100 bp, Homo sapiens
ctgaggaagtctgcatccacattgcacataaagttggtccctgagtgccagaggtggtggtgttgcttatcttctggaaccccatgcagccagatcccag

SEQ ID NO: 780971 - DNA, 82 bp, Homo sapiens
cgctacctcatgggggagacgcagctgtgcaccacaagttttgtaccaatggctagaagcagatcgtcatggcaagagccaa

SEQ ID NO: 780972 - DNA, 100 bp, Homo sapiens
aactggagagcttcatcaaaaatagtgatagctttgataacagtatcctggtgtgaaccagctatcctccagtataggaggattgagtcttcagagttct

SEQ ID NO: 780973 - DNA, 100 bp, Homo sapiens
gctctacacgtatcctcctgcctagcgcaggcgatatgagtctcatccagtctgtgctgatctgcaggccaaaattcttcagtgttaccgtgagaacacc

SEQ ID NO: 780974 - DNA, 100 bp, Homo sapiens
aaccgcctacgagacactcaaggaacggaaaacagttcttccttcaaagcatgcagtacctgaagtaatagaagactttctctgcaatttcttgatcaaa

SEQ ID NO: 780975 - DNA, 131 bp, Homo sapiens
tgcttgtttcttcaccatcaaccggacctacctccatcatcacatgaccaaagcattcctcttctatggagatgacctggcttccaccactttctgctattcaagcacctggcaaagtggaaccaaccaaa

SEQ ID NO: 780976 - DNA, 100 bp, Homo sapiens
ccaggtgtccatccccgtgctgaggtcatgcttcaccccttcctccatctgctgcacctaccactgattctacagattccataacaggacagaattcaag

SEQ ID NO: 780977 - DNA, 90 bp, Homo sapiens
ggagaacgagtccctcttcactttcctcggcaagaaatgtgtgttaactgcctgtatccatggatcagctgctcttctatacccaatgta

SEQ ID NO: 780978 - DNA, 83 bp, Homo sapiens
cctacgcctcctcggcagtcacctttccaggaatcaaggctcgggacgtgtacgaggaggccatccggacagtgatgaccgtg

SEQ ID NO: 780979 - DNA, 98 bp, Homo sapiens
tctacgcagatgccgacgaaatcctccaggaggagatcaaggagtacaagttagaacctggcccattagatgaaacccagatcgctactatattaaga

SEQ ID NO: 780980 - DNA, 75 bp, Homo sapiens
tccacccaccgccgccgcctcccaggtcactatcatatgacaaaggctttgccgcagttcatcttcctccctgtg

SEQ ID NO: 780981 - DNA, 83 bp, Homo sapiens
cggccggagagctggaggagaggttcaaccgcgccctgaaaccaaggtgtatgttggtaacctgggaactggcgctggcaaag

SEQ ID NO: 780982 - DNA, 98 bp, Homo sapiens
cctgggtctccagcttgcagacagcagattgtgggacttcttcgcctccatatcatgtgaagacattcagtgaagcttgcctgatggtaaggaaacca

SEQ ID NO: 780983 - DNA, 75 bp, Homo sapiens
aactcactgatgaaggactcaagcaggcagctagtttattgctgcagctcagacagaagtggcatagcttatttt

SEQ ID NO: 780984 - DNA, 87 bp, Homo sapiens
tgcgaccacccctacattgtgaagctcctgggagcctactatcacgacgggaagctgtggaaaactttagaaactgttcctttggag

SEQ ID NO: 780985 - DNA, 100 bp, Homo sapiens
actgaaaatgtagacaaaaggcaaattattttggaccttcagattagggaaatcctcattgacgattcaatttgttgaaggccaatttgtggactcctac

SEQ ID NO: 780986 - DNA, 80 bp, Homo sapiens
agaagtcgcgtgtctaggtgagtcgcggtgggtcctcgcttgcagttcagcgaccacgactcggagccgtgggtcccgac

SEQ ID NO: 780987 - DNA, 98 bp, Homo sapiens
ttgatgaaattcaccagtgaagccgtgacatcctgggatattctttgttgagaggatctcaaagatttcatgagacaagctggggaagtaacgtttgc

SEQ ID NO: 780988 - DNA, 97 bp, Homo sapiens
actggaagaatatgctgtcttttacccaccaaatggttcgcatggctctgaaaaaggccgaaaaagaatttgaactgagaagcagttggtctgttcc

SEQ ID NO: 780989 - DNA, 82 bp, Homo sapiens
cctcaacatcccggagcagctgccacaatgggacatgtgcaaatcctgcagaaagtgctccagggctgccgagaggacatgc

SEQ ID NO: 780990 - DNA, 100 bp, Homo sapiens
cgaggaggaagatggcgggacggctgccggcctgtgtggtggactgtggcacggggacctttaacttgaaggaagtcctgaattctattggtattcagac

SEQ ID NO: 780991 - DNA, 100 bp, Homo sapiens
gttcttccaagaaaccaacattcccaacagccaccaccaccaccagatgattccttctctgccggggagccccgtgtgctgggcctggccatggtacccg

SEQ ID NO: 780992 - DNA, 74 bp, Homo sapiens
ttttacctactgttcatgaggtggatattttcagaccaaagagaaccctgtacagtaagaaatatggtgtggac

SEQ ID NO: 780993 - DNA, 75 bp, Homo sapiens
acagtggactcaacttcaaagacgttctcaaggagaaggcagacctggtttccgttactatggcaatgacggcag

SEQ ID NO: 780994 - DNA, 88 bp, Homo sapiens
ataacggccagccctgggcgaagttgccagagtctgccctccgagacctcatcgtagccaccattgctgtcaagtacactcagtctaa

SEQ ID NO: 780995 - DNA, 83 bp, Homo sapiens
cgcgaggaaatggccgaggggccggagccacagaaatgagccgtcagactgctacagcattacctaccggtacctcgaagtgt

SEQ ID NO: 780996 - DNA, 100 bp, Homo sapiens
tcttgtctgtatccgctgctcttgtgacgttgtggagatggggagcgtcctggggctgtgctccatggcgagctggaatgcaagttctagccggtttttc

SEQ ID NO: 780997 - DNA, 100 bp, Homo sapiens
cagtcccgacgcagcaaaggcaaacttggaaagagcaagatcggcagccctaaatatggaggggctcccggagggcctgcgtttcccggacaaactcagg

SEQ ID NO: 780998 - DNA, 119 bp, Homo sapiens
cggcccggcctcatcgtgccggcttcgcgcgcgaacccggctttcgcatttgggaccctgcagggctactgcagcactggggtgtcagttgttggtccgacccagaacgcttcagttct

SEQ ID NO: 780999 - DNA, 50 bp, Homo sapiens
caaaatatggcaaagaaacctattctgagtgcgtatcacggccacctgag

SEQ ID NO: 781000 - DNA, 104 bp, Homo sapiens
ctctcgggcggggcggcggcgacgcggacctgcggactagcgaacccggagcctcctgacaaggtgatccgggcgggccccgcaggaattttatcccctcaccg

SEQ ID NO: 781001 - DNA, 114 bp, Homo sapiens
cgcgagcacagagcctcgcctttgccgatccgccgcccgtccacacccgccgccaggttggagcaaaacgtcccactcactggaggcacctgaggacgacgggggctggtcaag

SEQ ID NO: 781002 - DNA, 100 bp, Homo sapiens
agctgctggtttcattcgaggtttcgggccggactcacaccacccggcaagaactgctcactacggctccctgccccagaagtcacacggccggacccaa

SEQ ID NO: 781003 - DNA, 90 bp, Homo sapiens
cactctgctctgcatagccagctcaaagagagggctgaactccagttttgaaacctctcctaagaaagtgaaatggtccagcaccgtcac

SEQ ID NO: 781004 - DNA, 100 bp, Homo sapiens
cagattcgcagtggtcgcttcttctccttggatcaagacttcaaatcccaaaagaacttcatcattaacatgacttgcagattttgctggcagcttcctg

SEQ ID NO: 781005 - DNA, 145 bp, Homo sapiens
agcgacgtgggcaagggcgagatcctggagagcctgcaggacggcgcggcagagtccccgtacgcctacagtaacgcaaattgtggctactaatttgccccctgaagatcaagatggctctggggatgactctgacaacttctcc

SEQ ID NO: 781006 - DNA, 97 bp, Homo sapiens
gttatatttggaaccttcgggcaaacaggattccacagtgtcctctggaaaatgagctttcattgttgaggttcctcagtgctgaactaacaagagg

SEQ ID NO: 781007 - DNA, 101 bp, Homo sapiens
cattgttgagttctcagggaagccagctgctcggaaagctctggacagatgcagtgaaggctccttcctgctaaccacgttttggcacaaataccagtggg

SEQ ID NO: 781008 - DNA, 90 bp, Homo sapiens
gccaaagtgtgcggcccttcctgacatcaccacagtctgagcagcctcccgcgtcctgcaggcctacctcctgagctgtggcttccctcc

SEQ ID NO: 781009 - DNA, 100 bp, Homo sapiens
acctgtgcaataatgcttcttaataccgatctacatggccacgaggaggaagccaagaatctggtgagcgaagccatcgcagctggcatcttcaacgacc

SEQ ID NO: 781010 - DNA, 82 bp, Homo sapiens
ctgcgaggcgaaggtgaccggggaccgagccacagaatatattactgagcagcatataccctctcggggacattaaaatagt

SEQ ID NO: 781011 - DNA, 101 bp, Homo sapiens
caagatccagatcgggatttacgtggagatcaagcgcagcgatgcagggagataccagggttcgtcatgggcagcaatgactacgatggacaagaagatag

SEQ ID NO: 781012 - DNA, 95 bp, Homo sapiens
gagcatgaagagtacatgaagaatcttctcaaagtgggagggatccttgtcatgccactggaagagaagcaaagagagcaggatgaatggacagt

SEQ ID NO: 781013 - DNA, 85 bp, Homo sapiens
tcaaccgattctgcctgtccaagcctgagctagcgctgaacacagcccagtttgcaaagagtctagccatgcttgggagctctga

SEQ ID NO: 781014 - DNA, 101 bp, Homo sapiens
agcacgaaaatcaaattcaggagttcaagaaacgagatgcacaggacccactgatctcagcatgaagagacaattggcgactagctcaggatcctccagca

SEQ ID NO: 781015 - DNA, 82 bp, Homo sapiens
gaggcccagagatgaccccttatgaaggttatgaagacagtatggagtttccagaccatagtagacatttgctacagtgtct

SEQ ID NO: 781016 - DNA, 83 bp, Homo sapiens
cacgccatgagggccctgtgggtgctgggcctctgctgcgtcctgctgaccttcgccgcttacaaacacgcagatggcaagaa

SEQ ID NO: 781017 - DNA, 100 bp, Homo sapiens
ctaactagaagggatacccttccatttcaaagaacagaatgctaaggaagctgtggcaaccatcatcgtctacagactgccgtggacctggaaatgcagc

SEQ ID NO: 781018 - DNA, 73 bp, Homo sapiens
ttgaatcatgaagctactaaccagagccggctctttctcgattgttgaacagataaatacgaaactgccatca

SEQ ID NO: 781019 - DNA, 75 bp, Homo sapiens
aggactgcggggacctggtggccatcggtgaacagcattcacccagaatgccgatttcatctggaaatacaggag

SEQ ID NO: 781020 - DNA, 97 bp, Homo sapiens
gtcttccccaggcctgcgtccgagtctccgccgctgcgggcccgctccgacgcggaagtgaggagaaggaggaagtgaccatggacacaagtgaaaa

SEQ ID NO: 781021 - DNA, 74 bp, Homo sapiens
gcggcgccatcttcgaacttagacttccggaaggactttggcgaggctcatgatggagcagtccaagaagtcct

SEQ ID NO: 781022 - DNA, 101 bp, Homo sapiens
cttcagagctaggagagatggaactgacttggcaggagatcatgtccatcaccgagctgcaggtcatggaaaatggaagatttgcaaaatacaaatatttt

SEQ ID NO: 781023 - DNA, 50 bp, Homo sapiens
gatcgtccggaaacctgctaactgcatttgaaacgccactttatgtttcg

SEQ ID NO: 781024 - DNA, 83 bp, Homo sapiens
atatcatgaaaatgtggggaagggttcccttttctccaggtccagctccccctcctcatatgcttcttggacacttaatgatt

SEQ ID NO: 781025 - DNA, 98 bp, Homo sapiens
gtggttacatatttattagcagaaaacttttaaatgcaaaacactcagagaaatcaccaccttctacagtgcacctatgatatgtgttttagaaatag

SEQ ID NO: 781026 - DNA, 82 bp, Homo sapiens
tcagatgttggatatttgcttggaaaaacgtgtgggtacgaccttgtgatcagggccaaagcggtcagtgagaaggaagtgg

SEQ ID NO: 781027 - DNA, 118 bp, Homo sapiens
ctcagaaacaggctccaggccctgcctgccctgtgcctctgcgtgctggtcctggcctgcattgggggatgccaggccaaggtggagcaagcggtggagacagagccggagcccgagc

SEQ ID NO: 781028 - DNA, 125 bp, Homo sapiens
gaatagaacgcttctctcgaaaagtttttgttggtggtcttcctccagatattgatgaagatcgggcagtacatcatgtccctccccctgaatcttgagccatttgtgactcaggaggactctgc

SEQ ID NO: 781029 - DNA, 83 bp, Homo sapiens
gcatcttgcatgttggggaccacacggaatttgtcaaaaacctgctgccaaagtctatagcatttcagaagggtgtaccttga

SEQ ID NO: 781030 - DNA, 50 bp, Homo sapiens
tacctgtccaccgtcgtgaccgaggtgccagagtttgtagcctattggag

SEQ ID NO: 781031 - DNA, 90 bp, Homo sapiens
gaaaggcccacctgtgtcctggttgagggtctccagggttctttggggcccgaggtgctggagaatctggtaaaagcaccattgtgaagc

SEQ ID NO: 781032 - DNA, 109 bp, Homo sapiens
cgggaggaaggaacgaggcaaggagctaaagcagcgtgcgttcagccctggggtttttagaacttcagccataaaaatgggcagaattttccttgatcatatcggtggt

SEQ ID NO: 781033 - DNA, 90 bp, Homo sapiens
ctccatggtccatgaactcaaccgaacattcagaagattctcggccttgccccttcacgagccgccaccaagcaggcaggtggatttctt

SEQ ID NO: 781034 - DNA, 83 bp, Homo sapiens
ggacggttttcgtacgggcggccgtgcgcgaggcgaggattttttatcaagcagaaatgcatcgaacaacgagaatcaagatc

SEQ ID NO: 781035 - DNA, 100 bp, Homo sapiens
ctatacgctaagagaacttaaactttcaaaggttggacaaactggtcgaattgacaaatcttaccctacagtatgtggccacacaggaccagtgctggac

SEQ ID NO: 781036 - DNA, 82 bp, Homo sapiens
ggcgaagcgggcgagcggtggtttggacgccggcggagacgcgggcgagatgcctgctctgtgcctgtatctgagatcatcg

SEQ ID NO: 781037 - DNA, 75 bp, Homo sapiens
gggtgttccacgctatgttgggagtgttcgctttcgaggtgagatttcaatggaaaaagtgaaggtaaagcgtta

SEQ ID NO: 781038 - DNA, 75 bp, Homo sapiens
ctcccgagtagctgagaccacagatggttccatgggaagatttccaaacaggaagcttataatttactaatgaca

SEQ ID NO: 781039 - DNA, 98 bp, Homo sapiens
ttcctcagaactactatattcagtggctaaatggctccctgattcatgtgttcggctaatgaatgagttcactaatatgccagtacctccaaaacccc

SEQ ID NO: 781040 - DNA, 50 bp, Homo sapiens
gacacccttgaagctgagaaatgaatcagcatgattcttcagaggctctt

SEQ ID NO: 781041 - DNA, 100 bp, Homo sapiens
cgcagtggtcgcttcttctccttggtgtttcaagaataaggggttggttccctagaaaatgtgtggaaaagtgtccctgtgatgctgaaacagatcaagc

SEQ ID NO: 781042 - DNA, 88 bp, Homo sapiens
gccgctgtgtggttgcaacggagataaattcccggaaccgcgattcggcgtgtcagcagtcagtggaagagcatctgcaatgtcaaac

SEQ ID NO: 781043 - DNA, 51 bp, Homo sapiens
gaattcacagtctgcagcattggtggaataacactcccatggatgaagcac

SEQ ID NO: 781044 - DNA, 75 bp, Homo sapiens
cccagagcaaattgagacgtccggatgatcatgacgcagtcctgaggtttaatggggcacccacagccaacttcc

SEQ ID NO: 781045 - DNA, 83 bp, Homo sapiens
cctcatccagcaggcggtgacccgctaccggaaggccatcgccaaggtttggtgcacctcgatttggaggaagtagggcaggg

SEQ ID NO: 781046 - DNA, 96 bp, Homo sapiens
gagatgttacccagtatcttggtgttgctgaagagatataccatggggtatacagttagcagccgtgtatgctctttgtgacttgagtcccagcaa

SEQ ID NO: 781047 - DNA, 74 bp, Homo sapiens
gccgcaagtacccgtccatcatagtcaactgcgtggaagagaagggaaaagaagatctcccggagcagtgccct

SEQ ID NO: 781048 - DNA, 75 bp, Homo sapiens
ggcgcctaccccaaactcatggaaattgatcaggtcctcagaatggttggaatgaccctccagctttgaacagag

SEQ ID NO: 781049 - DNA, 97 bp, Homo sapiens
gcagtgactctcgtggaagatttagaaagagagcctggaagacctagatcttcgggtggttctcttcccaaagtggaagccaaattcatcaattatg

SEQ ID NO: 781050 - DNA, 101 bp, Homo sapiens
cgaagacggaaccggagccggttgcgggcagtggacgcggttctgccgagagccgatatgaggccccaggattcctggcgaggtcctcctccccttttcca

SEQ ID NO: 781051 - DNA, 88 bp, Homo sapiens
agcgttcagtctgcacttggggcaagaataagcctggaattggtgcagtgattttaaaaagagattcagttgtggaaattctttttga

SEQ ID NO: 781052 - DNA, 115 bp, Homo sapiens
gatgaggtgatggcaacggccaacttcggcaagatccagatcgggatttacgtggagatcaagcgcagcgatggttcgagaacttgtcttggacaattgcaaatcaaatgatgga

SEQ ID NO: 781053 - DNA, 75 bp, Homo sapiens
gcaacctcaggcttcagccagtggttatccaaatgccaacccagtccaggtttcaacagcaacattttttctttt

SEQ ID NO: 781054 - DNA, 82 bp, Homo sapiens
gtcttcccgcgtccgccgattcctcctccttggtcgccgcgtccttggctggcgtttgagaagctgatgtctcctcgacttc

SEQ ID NO: 781055 - DNA, 87 bp, Homo sapiens
gaggaatatcagtcccttatccgggcagcacgctggctcttctcctgaacttcctcgcctgcctggccagcttctgtgtggaaacca

SEQ ID NO: 781056 - DNA, 75 bp, Homo sapiens
ctcaagtgcaatgtcaagagctttctgggccatgaccacaatgtttcttcagtagccatcatgcccaatggagat

SEQ ID NO: 781057 - DNA, 48 bp, Homo sapiens
gactgtttgatgacgtcccgcagtcgtgccaagcggacctcgtgaagg

SEQ ID NO: 781058 - DNA, 96 bp, Homo sapiens
ccaggctcaaagaaccaccagtaccatcccgtgccaaccctgggggacagggctagccccttgagcagtccagacactcttgcactcctgtaatga

SEQ ID NO: 781059 - DNA, 100 bp, Homo sapiens
aacagtcaattgtgtactagcattccaagacattgtacccatcctgacgtcaactgtgattgagtgtcacagggcaggcctgaagaactctgctttcagc

SEQ ID NO: 781060 - DNA, 75 bp, Homo sapiens
ggagtttgggaaaaaccgcgaagtcatggggctctgtcgggaaggaggactcacgaatggcagtggaagatacat

SEQ ID NO: 781061 - DNA, 98 bp, Homo sapiens
cgaagtgcgcggcgcccaggcctcccagcagcagtcccgagcagagcttctaaccgaaaatcttcagttggcgtaaaaaagaatagcaagagcagaac

SEQ ID NO: 781062 - DNA, 100 bp, Homo sapiens
gctgaactgagcgtatgtgccacgccgcccaggagacccctctgctgcaccacttcatggaacagatggagtcggataactgttcaggaggagatgatga

SEQ ID NO: 781063 - DNA, 101 bp, Homo sapiens
ctcaacttcctgatagatgtacactgaaaactggacattataacattaactacagtgcttacaccgcccagcccactcaaggatatgcacagaccacccag

SEQ ID NO: 781064 - DNA, 50 bp, Homo sapiens
aaaatatcaacgatgaaagagtatttggacagtcattttgtttactcatt

SEQ ID NO: 781065 - DNA, 82 bp, Homo sapiens
acgcgaccctcgccaaatgctgttgcctggatcttggactccctggcctccgtaatgaatgtgacagtgatgataacatggg

SEQ ID NO: 781066 - DNA, 100 bp, Homo sapiens
tgaagccacggctgggacaggaagccacactagttcttctggagctcaacttcttgccaaccacagggaccaagctgaccaaacagcagctaattctggc

SEQ ID NO: 781067 - DNA, 100 bp, Homo sapiens
cccggcccggctcgacgccaatgggatcttagaaatgaagttgaaaaattacgcaatgaagtgaatgaaagagagaaagcaatggaaaatcgttacaaga

SEQ ID NO: 781068 - DNA, 100 bp, Homo sapiens
gagcggtcggtgacagcctcaagggcttcagcaccgcgcccatggcagagccagaccacttctgcctggtgtcgaaggtggtgggcagatgccgggcctc

SEQ ID NO: 781069 - DNA, 83 bp, Homo sapiens
cgcgggccacctgtaccccggagaggacaatgcagatcttcgtgaagactctgactggtaagaccatcaccctcgaggttgag

SEQ ID NO: 781070 - DNA, 49 bp, Homo sapiens
attctctcggcctgtcagcaaacaaacatgtctgacaaagagctaaaga

SEQ ID NO: 781071 - DNA, 127 bp, Homo sapiens
atagcccgaggaagctgggattcgggggtcttcgctggtctgcgcgggtcacgcgtccccagtcctcgggcgggaaatggcgaaaagtcttttgaagacagcctctctgtctggaaggacaaaattg

SEQ ID NO: 781072 - DNA, 100 bp, Homo sapiens
gatggaaaaccagttattgaatatcaagaggaggagttgttggttcaaaccttgtactactcagctgatcacaagctgcttgatgggaacctactagatg

SEQ ID NO: 781073 - DNA, 73 bp, Homo sapiens
cggcttcggagcgggagtgttcgttgtgccagcgactaaaaagaggtatgaaaatgaaagtcttcagaatgga

SEQ ID NO: 781074 - DNA, 83 bp, Homo sapiens
cgaacgaccaagagggtgttcgactgctagagccgagcgaagcatgaaggatttgggggcagagcacttggcaggtcatgaag

SEQ ID NO: 781075 - DNA, 98 bp, Homo sapiens
cttggggagagcagcaccgaggccagcaagacgctgcccgccatcgagccaagacaatgcaaactccagtgaacattcccgtgcctgtgctccggctg

SEQ ID NO: 781076 - DNA, 98 bp, Homo sapiens
gccgccaccgccgccatgaagaagcagttcaaccgcatgaagcagctggctaaccagaccgtgggcagaatccagcaactatcacaagaatactcctt

SEQ ID NO: 781077 - DNA, 75 bp, Homo sapiens
actatgtgaatgggaagactttccttgagaaaagatttgaagaccttgcttctcatcacccactggattatgccc

SEQ ID NO: 781078 - DNA, 83 bp, Homo sapiens
ccctgagtcactgcctgcgcagctccggccgcctggctccccatactagtcgccgcatactggagcatagtgaaagagtctat

SEQ ID NO: 781079 - DNA, 99 bp, Homo sapiens
gtcagtggcaacatggacgggagtgagcatttgtcctgtgctttcacattctttctgcatggagaaagtaatgtatgcacaagtgtggagattgcccag

SEQ ID NO: 781080 - DNA, 102 bp, Homo sapiens
cagattcgcagtggtcgcttcttctccttggtggacccaagtggagagattgtggaactggcgaaaggtgcatgtccctggaaggagcatctctaccacctg

SEQ ID NO: 781081 - DNA, 89 bp, Homo sapiens
ctccttctgaattggcagcgaggtcgcggcaggttcgagggctggagcggctctgggctccggaatcgcccgcagccggtactgcggga

SEQ ID NO: 781082 - DNA, 83 bp, Homo sapiens
cctgtaccatgatattgcccagcaagctgctgtatcttggacgagactatccaaaaggagcagactattttaaaaagcgtttg

SEQ ID NO: 781083 - DNA, 95 bp, Homo sapiens
atgtgatcgaactcgatgactgcgtgcagactgatgaggaatgggacaccaggtccaataccacctccaagccgagtcacttggtggatgcgcac

SEQ ID NO: 781084 - DNA, 50 bp, Homo sapiens
caccgtcgcccgcccagcctccgcccggttttaaaatcaaagatgggaaa

SEQ ID NO: 781085 - DNA, 100 bp, Homo sapiens
gttcggcgggaagtcttcggtagaaatgtacagacaggttctcctggctggttgcagtgtactaatggtcacttgatgtgcgctggctgttttatccacc

SEQ ID NO: 781086 - DNA, 133 bp, Homo sapiens
ccttcctcaactcagcgatgacatccctttccgagtcaactggcccggcaccgagttctctctggttgttggtatggagcaaaagacgagacaccttctaagcagaccctttctatacaacaggagtccccac

SEQ ID NO: 781087 - DNA, 100 bp, Homo sapiens
cgccctgcgcttcgtgcaccggggcggtccgttgccaaagccaggtgtctgctttttcaacgtgggagaaggagttgcacaagatagtttttgatccccg

SEQ ID NO: 781088 - DNA, 75 bp, Homo sapiens
caacctagtgggtgtaatacatcatgaactgcagggattctgagaaacgaacccctcttcatgtggccgcatttc

SEQ ID NO: 781089 - DNA, 50 bp, Homo sapiens
caaaaatagtgatagctttgataataataaaagactagtggccttagtgc

SEQ ID NO: 781090 - DNA, 100 bp, Homo sapiens
cgcggtggagcgggacacgaacgtggttttaaaatcaaagatgggaaaatcggagaaaattgcccttccccatggccagcttgttcatggtatacacttg

SEQ ID NO: 781091 - DNA, 75 bp, Homo sapiens
ctgaaggggatggcaactccgatcctgaatctagtggacagtgacaccgtgtggaatgagatgcactcctccagt

SEQ ID NO: 781092 - DNA, 90 bp, Homo sapiens
agatcatcgagcatttcaaacgattcgacggaggcgccttgcacgacttgctggtggacagacctctcagccaaccaccccactcacctc

SEQ ID NO: 781093 - DNA, 100 bp, Homo sapiens
cagggccttgcctagtgggccttccttcccaggatcaaaaccattcaagtgcaagatatgccattttgcaacagctcagcttggagatgccagaaaccat

SEQ ID NO: 781094 - DNA, 100 bp, Homo sapiens
cctcctcaagaagggcgcgtgctacggggacgacgcgtgcttcgtggcccggcaccgttccgcggacgtgctcgtgttcagactgcatcacagtgcttcc

SEQ ID NO: 781095 - DNA, 83 bp, Homo sapiens
attacccgttaagtcccccaaagatgagatttacctgtgagatgtttcatcccaacagattctggactctacttataatatcc

SEQ ID NO: 781096 - DNA, 100 bp, Homo sapiens
ccgcttctctgaaaggctctccttgcagctgcttagacgctggatttttttcgggtagtggaaaaccagacctcctgccccccgaggtctgcagtctcct

SEQ ID NO: 781097 - DNA, 75 bp, Homo sapiens
gctcatcccggtggccgccgcgcaggagcctcccggagctggacctgaaggagaagaaggagaaggtggaggaga

SEQ ID NO: 781098 - DNA, 100 bp, Homo sapiens
tctgtttcttgatatggaagcagctacagggcaggagcatgctacaagtgaaaactgatgagaaactgaatgtgtctgatgagaatacagcaagttgccc

SEQ ID NO: 781099 - DNA, 100 bp, Homo sapiens
ctaaggtttgcgctgccatccgcaaaggctttctcgcttgtcaccttgccatgtggaagaaactggatacagtttatgtaacttgatggaagaaaatgga

SEQ ID NO: 781100 - DNA, 73 bp, Homo sapiens
tgagtgatcactctcaatcccgggcacctgcggaactcgagtcatgcaggagcttttgtgatcgtgacggaag

SEQ ID NO: 781101 - DNA, 82 bp, Homo sapiens
gccgtccttctccactttcgccagcccgtgccgcgagcgcggcctgcaggagtcgtgagatggagaataaagaaactctcaa

SEQ ID NO: 781102 - DNA, 100 bp, Homo sapiens
cttcctgtcgctgacggcgactgcgggaggccaggcatcagtgtttttctgaccgaagttctcatttcctgacaatggaaatggaacaagaaaaaatgac

SEQ ID NO: 781103 - DNA, 100 bp, Homo sapiens
ttggcccagctggcagcccagcgggaggatctggagacagccatggagttctacttagagcttcttggacacttaatgattgttggcaagaaatgtgctg

SEQ ID NO: 781104 - DNA, 100 bp, Homo sapiens
cagaaactcagccctggacacctgcatcaagaccaagggctggagcggctctgggctccggaatcgcccgcagccggtactgcgggacccactgcggata

SEQ ID NO: 781105 - DNA, 80 bp, Homo sapiens
aggggacccagtgcgcccgcatcgtcgagccggcccaggcctttgtggtgaagcggggcgtccacgtgtcaggagcgtct

SEQ ID NO: 781106 - DNA, 95 bp, Homo sapiens
cttctgggctgtgctggtcacagccacactctgcaccgctaggccgtccccgaccttgcctgaacaagctgagctgactgctgcccactttggag

SEQ ID NO: 781107 - DNA, 50 bp, Homo sapiens
agggagtggatcagagcactgcctgagtgcttgatgaagccaccagtgcc

SEQ ID NO: 781108 - DNA, 100 bp, Homo sapiens
acggcgtggaccacatagacatttacgcggatgtcggcgaagagttcaaccaggcagtggagctactgctgtggttcaggcagccctatgcaaacccagg

SEQ ID NO: 781109 - DNA, 100 bp, Homo sapiens
gatacttttgaagatgcagtgaatatactgaagccttcaactataattgaacactcgtgaaactgctcaggccatcaagggtatgcatatacgaaaagcc

SEQ ID NO: 781110 - DNA, 82 bp, Homo sapiens
taatggaagatttcgatcagttaggattctgatgctcacagtaccacctcaagtgcctccccagctcaatctccttgttaca

SEQ ID NO: 781111 - DNA, 74 bp, Homo sapiens
tcctggaggagttccgtcccagcccgcggtctcccggttgccgctcaggctactgtgtgagagtatgaagaggc

SEQ ID NO: 781112 - DNA, 59 bp, Homo sapiens
gtgaacggagtgaccaagagcaggtttgagctggaaaaggattttggtctgagatgctg

SEQ ID NO: 781113 - DNA, 90 bp, Homo sapiens
aaacaatgcccagactcaatttagtgaggagaggagaggcagcagcatggcgagtgtcctgtcccgacgccttggaaagcggtccctcct

SEQ ID NO: 781114 - DNA, 100 bp, Homo sapiens
tggccatgttcctcgtccactacgggcatcgacctgcaggctgggacaatgaaaagaaaatagctattttacatgaaaattttacaaccgtgaagccgga

SEQ ID NO: 781115 - DNA, 101 bp, Homo sapiens
cttggattagactctggccctagtaactgtgacatttgatgatgtggccttatatttttcggaacaagagtgggagatcctggagaagtggcagaagcaaa

SEQ ID NO: 781116 - DNA, 100 bp, Homo sapiens
tcctacgtaaaggagtattggaatgatgtgttcagaggcagaggaggtggacacggtggacgtctccggcgtgcccgcagaggtgctgtgcaacatcgag

SEQ ID NO: 781117 - DNA, 90 bp, Homo sapiens
gcctggatgggccccatctgccagctggccttcccgacgatggtgacagagcaggccacccagggctccagcgctcctgatctccgtgtg

SEQ ID NO: 781118 - DNA, 75 bp, Homo sapiens
ccagaatttcctgcgctgttccacctcattcaacttcaggtgtgggcaagagcagtttactgttgcgttttgcag

SEQ ID NO: 781119 - DNA, 100 bp, Homo sapiens
aagtgtcagggctcaccaaccatgcaaggacagggcaggagaagaggaacctgcaaaggacttgatgacacgtaccttcgctgcattgagctgcacagcc

SEQ ID NO: 781120 - DNA, 101 bp, Homo sapiens
ttctggtggacaacagtgtgtttcatgatatgaagatcaatgatgcagactgatggttttgatgaagctgggcatttataactagattcattaaggaatac

SEQ ID NO: 781121 - DNA, 100 bp, Homo sapiens
tttccttatagtacatctaaagcgttctgctgatggaacagccagccatgaacaaggtgaggaagaagaaagaggaagcgctgaattatctgaactggag

SEQ ID NO: 781122 - DNA, 74 bp, Homo sapiens
aatttagccctgatgaagacttgtgttgctgtcatgatatgaaagattccagtctgacatgggctcattgctcc

SEQ ID NO: 781123 - DNA, 75 bp, Homo sapiens
tcaagataaagtgattttttgcctttgttgattaactggacaaattcagttatgccccgtggtgccctgcttgtc

SEQ ID NO: 781124 - DNA, 98 bp, Homo sapiens
tctcatgccacggccaaattcagtagcagaaagcataacccctactgtagaactaaatgcactgtgcatgaaacttggaaaaaaaccaatgtataagc

SEQ ID NO: 781125 - DNA, 108 bp, Homo sapiens
agttccccagttctggcagattctggaaactgtacattgaagcagaggctgctgagcttcgtgcttatctgaaatctaaaggagctgagatttcagaagagaactcgg

SEQ ID NO: 781126 - DNA, 83 bp, Homo sapiens
atgaagaagaaattaaacttctgtctgacaaactgaaagaggcatggaagaggagatggttcgtgttacgcagtggccgttta

SEQ ID NO: 781127 - DNA, 75 bp, Homo sapiens
ataggctgcgctaccggaatgtcatccagcgagtgattagatatttgatcaagttccttgcaaagcttgctcaga

SEQ ID NO: 781128 - DNA, 101 bp, Homo sapiens
gagcgcgagcggcgcgagaaacctgcggcgagagggctacaccgtgcaggtgaacgtgaacgactatctggatatttactgcccgcactacaacagctcgg

SEQ ID NO: 781129 - DNA, 74 bp, Homo sapiens
ccaggaacccctggaagcctagaaatggattctcaaagttggattggtggaaacaatgaaccattgacaggctt

SEQ ID NO: 781130 - DNA, 99 bp, Homo sapiens
ccgattcgactctcagaccaagagcatcttcgagcaagaaactaataataataattccagcttctacacagagagtgaaccacgagacgctggaactga

SEQ ID NO: 781131 - DNA, 74 bp, Homo sapiens
agcctcctcaacgaatacggcgacgacatgtatgggccagaaaagctgtgccagcaggagaagctgagggatga

SEQ ID NO: 781132 - DNA, 100 bp, Homo sapiens
cagggatataaccgactgacctggatagtagttgttcttcagataaaggagatgggtgagatgcatagggaactcaatgcataactatataatttgaaga

SEQ ID NO: 781133 - DNA, 90 bp, Homo sapiens
aaggaggagactgtgctggcggaaaagaagatctcccggagcagtgccctgaaagtgctggaccatgccatgattggccccgaaggcaca

SEQ ID NO: 781134 - DNA, 98 bp, Homo sapiens
gtgcatcgagcgctgccatgtgcctctggctcaagcccaggctttggtcaccagtgagctggagaagttccaggaatcggatggcataagtgattaag

SEQ ID NO: 781135 - DNA, 75 bp, Homo sapiens
cgcaaacattcagacaaaattggagagactgccatgaagcaagaagagagaagggcacagttacctaagtatcaa

SEQ ID NO: 781136 - DNA, 98 bp, Homo sapiens
gtgaatggaaggtagcaagacgcctctccaaagcagcccttctgcgcaggagctgaaagctccactgggtttctgagtcccttcaacatgatcctggg

SEQ ID NO: 781137 - DNA, 75 bp, Homo sapiens
cctgactcggaggcgctccctcagaaggaagttaatgaaggagttcccccttctgagtatgttcaatatccatga

SEQ ID NO: 781138 - DNA, 80 bp, Homo sapiens
gccatggagcccgactcggtgattgaggacaagaccatcgagctcatggctatgaaaatgattctgtagaagacctgaag

SEQ ID NO: 781139 - DNA, 83 bp, Homo sapiens
accctctcccgaggccccagcgttgggggactaccgggctgctctttggcgtaaattgcaatcgattagggatcgtttctcag

SEQ ID NO: 781140 - DNA, 50 bp, Homo sapiens
aagaagctggaggccggcaaagccaagggtgatacaattctggagactgg

SEQ ID NO: 781141 - DNA, 112 bp, Homo sapiens
tcaggagccctggaaaggagaaggaataagacggcaggaggaagagagagagagggcattccctcctcgtcccgggctggcccttgcccccaccctgcaactcctggttgag

SEQ ID NO: 781142 - DNA, 98 bp, Homo sapiens
ccaaaagtcagaggccctgattcagggtctgagcatggcaaaaagtcagggtgctgacaaccagggtgcaggagaacaaggtagaccagtgaggcaga

SEQ ID NO: 781143 - DNA, 74 bp, Homo sapiens
aggaacccgcgccgcgagggctccttccctcaggacatggatttgattgacatactttggaggcaagatataga

SEQ ID NO: 781144 - DNA, 83 bp, Homo sapiens
ctatagcagccgcggcggttaagtatgcggcgccaggagctgtttgctggttggctcccgagcagacagcaggaaagaagaag

SEQ ID NO: 781145 - DNA, 100 bp, Homo sapiens
tcttctgggagctgaggaaccagatatcttgaaaagctgccagaaagatgggagaagaagttgtccatgttcacactgggtgaaggaagctgaaaccaca

SEQ ID NO: 781146 - DNA, 74 bp, Homo sapiens
agaagtgataggagggctctgtaggacaagcagctgcggatctttgaccccagaacaaagccgcgggcctctca

SEQ ID NO: 781147 - DNA, 100 bp, Homo sapiens
gggcccgaggccggaggaacccggactccggcgtagcgttcaacacaagatgagacacatgtgaatactgggtcatcgtctgaagtggtgcatttggatg

SEQ ID NO: 781148 - DNA, 75 bp, Homo sapiens
tgcgtaatagacgagctgccgtttatgtgggcagcttctcctggtgtgggatttgcagtaaaccgatgggcgatc

SEQ ID NO: 781149 - DNA, 75 bp, Homo sapiens
gccctcagcatctcccttcatgtctgggtcatgatcacttcagcatcggtgaggttggtctctcaagaacccaaa

SEQ ID NO: 781150 - DNA, 82 bp, Homo sapiens
ctccacccaggaacctcgccatccagaagagccccgcggcctaagcgcagcgtctccgcccttggctgagactggcgctcct

SEQ ID NO: 781151 - DNA, 90 bp, Homo sapiens
cttcaaactcaaccatatctaccaggtgaagctagaggaaccagacctcatcagcccaacatcaaagacaccatcggaacagcagcgccc

SEQ ID NO: 781152 - DNA, 101 bp, Homo sapiens
ctttggggcccgtcaccctcagcctgctataactgcggtagaggtggccacattgccaaggactgcaaggagcccaagagagagcgagagcaatgctgcta

SEQ ID NO: 781153 - DNA, 75 bp, Homo sapiens
ggatcttcagtattcacaacatcccaagcaccattttgcttctccctttataaagacatcattaacatgcccgct

SEQ ID NO: 781154 - DNA, 101 bp, Homo sapiens
gccggaatatttcaagacaccgaaagtctgtaagtcctgaagattctgaaaagaaacgcactaattatcaagcttatcgaagctacttaaatcgagaaggt

SEQ ID NO: 781155 - DNA, 100 bp, Homo sapiens
tgtatgcatggtgtggggttggtgtgattagcttcgcagtctggaaagctttaggagttcacagttggaagacttataaccctgccttctcccggttgga

SEQ ID NO: 781156 - DNA, 100 bp, Homo sapiens
aaaaccaatatttgctatttgtcttttccagattcaaattcagtggatccaaacttctacagcaaaaacttacttcttttaggaaagacatacttgaaac

SEQ ID NO: 781157 - DNA, 50 bp, Homo sapiens
attttacgggatcactccattagtgtccaggaggagcatttacacccaat

SEQ ID NO: 781158 - DNA, 100 bp, Homo sapiens
tccataccggagcgcaatggcgtccaaccccgaacggggggagattctgctcacggaactgcagtatgtccgtggttcagaccctgtattaaagcttttg

SEQ ID NO: 781159 - DNA, 100 bp, Homo sapiens
gctcgggctgcctgcgcagcctcttctacctgcacaacgaactgggcaacatctacacgcacgattcttcgctgctgctgccttaccgccgagaaccacc

SEQ ID NO: 781160 - DNA, 100 bp, Homo sapiens
ccctattcacgctctgtgcttgtgccaagattaacagccatgcaacagaatggagtcccagccacccaggagaggatgcagtggcgtcttttgctgatgt

SEQ ID NO: 781161 - DNA, 75 bp, Homo sapiens
cagagttcaaggaggccttccagctgtttgaccgaacagtttcatcgcaaaccagaaaaggttagaaatcatcaa

SEQ ID NO: 781162 - DNA, 98 bp, Homo sapiens
tgatctccgtggtgatcgctgtcaagatgcagttcaaactggaaacaagatggatgatgtgtcaagaagactaacagctgaaggaaaagacatagatg

SEQ ID NO: 781163 - DNA, 75 bp, Homo sapiens
gacagcatgcctcaccaagtcacatgacaagcaacaagttggatggcttgaggactggtactaaaaggaaacgtg

SEQ ID NO: 781164 - DNA, 50 bp, Homo sapiens
ccggagcccaccaagttctgggaaaactgaaaagctccatcattggcaag

SEQ ID NO: 781165 - DNA, 75 bp, Homo sapiens
ccaaatggagctggaagcagtccagtgggcacttcctggacctcactactacacatggggagaccacggcggaat

SEQ ID NO: 781166 - DNA, 50 bp, Homo sapiens
tctgtttggggagacgtccgccaaggtactccaaagattcaggtttactc

SEQ ID NO: 781167 - DNA, 50 bp, Homo sapiens
tcagtggagagagtggtgctggaaagatggtgtcctactcttctgtcctc

SEQ ID NO: 781168 - DNA, 100 bp, Homo sapiens
aggacatggccagcgacgccgtgcaggacttgagaccaggagacgtatccagcaagcggaacctctgggaaaagcaatctgtggataaggtcacttcccc

SEQ ID NO: 781169 - DNA, 83 bp, Homo sapiens
gtgcagaagaaaccagccgaacttcagggtttccaccgttcgttcaagattgagaggatccagaatccagatctctggaatag

SEQ ID NO: 781170 - DNA, 88 bp, Homo sapiens
acacagtcgaaaagaatactgtgaattatgcaagcacagatttgcttttacaccaagagaagatttacaaatctctgcctggatgctg

SEQ ID NO: 781171 - DNA, 75 bp, Homo sapiens
cctcagcacacagaggatgatgctgactttgatgaaggtattctgagagaagcctcacaaagtgtattggaatta

SEQ ID NO: 781172 - DNA, 99 bp, Homo sapiens
aagacatctaatttcattgctcggcaggtagtgaagctgattttagctcctcgagcagcacaggcagcatttccgctcctgaggtccatatgtcgactg

SEQ ID NO: 781173 - DNA, 98 bp, Homo sapiens
cggacggcccctgtccccgctggcgggcttccctgtcgccgttcgctgcgctgccgggtgatttttgaagtgataacttctggacatcaaggctatct

SEQ ID NO: 781174 - DNA, 100 bp, Homo sapiens
gaggacgccttattcttctttgtcaacaacaccatccctcccaccagtgctaccatgggccaactgtatgaggatttaagcgagagcctcactggttccc

SEQ ID NO: 781175 - DNA, 50 bp, Homo sapiens
caagaggcagctggaacggcggtggcaccggatgcccaccacccaggaga

SEQ ID NO: 781176 - DNA, 100 bp, Homo sapiens
cgcgcggcgtgccctgcttgtcacaggtgcagattcactttataggaacagcttcagcttcagtgatgaaaaactgaattctccaacagactctacccca

SEQ ID NO: 781177 - DNA, 75 bp, Homo sapiens
gactacccacctagaagaggtgatgatagctttggagacagtggcagatatctacctagcatctcagtacacatc

SEQ ID NO: 781178 - DNA, 98 bp, Homo sapiens
cagactcggtgctgtacccgccaggtcctgctgtactagccaccaaagcagctgctggtactaagaaatatgatcttagtaaatggaaatatgcagaa

SEQ ID NO: 781179 - DNA, 98 bp, Homo sapiens
tacatgaacttatctgtattagaaaagagccctgaggatgatgacaggaaggtccgaaggagagaaaaaaaccgagttgctgctcagagaagtcggaa

SEQ ID NO: 781180 - DNA, 83 bp, Homo sapiens
gtctgagtcggagctcggcaggaagtgggaccggtgtctggcggatgcggtcgtgaagatagctgccactgggcccaagagat

SEQ ID NO: 781181 - DNA, 99 bp, Homo sapiens
gttaacttgggagaaagtttcatctgtggatggagtattgagcatccgggcatcgggccttatcctgttggaaacgatcctttttggatctctgctcct

SEQ ID NO: 781182 - DNA, 80 bp, Homo sapiens
tggacaagagccccctgccgctgggcttctcccccgtctgcgaccccatggattccactgacagcagccatggcgagcgg

SEQ ID NO: 781183 - DNA, 83 bp, Homo sapiens
caacttcctggagggggactggaagaccatctcggctttatcctgtggataaacgcagagtgaacgagtttggggagtcctac

SEQ ID NO: 781184 - DNA, 112 bp, Homo sapiens
tgtgagtgggcccagggctgctggaacctgtggagctatagcaagaaggtgccaacaatatgcccaagcaggtggaagtgcgaatgcacgacagtcatcttggctcagagga

SEQ ID NO: 781185 - DNA, 100 bp, Homo sapiens
agcgcgggtcggagtctgggggttcgcgcccgccgacccgcgccctgctccctctcagcacctgggcggacgggtgtgctggaccggttttctcaaattc

SEQ ID NO: 781186 - DNA, 52 bp, Homo sapiens
tccagcgcccagagagacaccagaggcctgctgcgggtcatctcaggggttc

SEQ ID NO: 781187 - DNA, 75 bp, Homo sapiens
gaagacttgaacttaatacagcaagaaagaccatcaagtttaccagtcctggatgcctcatcccttagtttcaac

SEQ ID NO: 781188 - DNA, 74 bp, Homo sapiens
cagctgcagtctaatagtaacacagagtgtgaaatggcctttccccgggtcaagccagcacctgatgaaacttc

SEQ ID NO: 781189 - DNA, 90 bp, Homo sapiens
aggaggagatcaagaagtcggtcttttgattacaactatagaagatcgtatagtcctagaaaactgtatctgggaaaccccatggacccc

SEQ ID NO: 781190 - DNA, 100 bp, Homo sapiens
gttgttctaacgctgcctttgctttaaaacagtattacttgcgtgttggaaaaccttggacagacaattgtccccgatttgggatcactggaaagtcagc

SEQ ID NO: 781191 - DNA, 100 bp, Homo sapiens
ctggacatccacctgtacgtccccagacttaattcagtgcacaaatgagatgaatgtgaacatcccacagttggcagacagtttatttgaaagaactact

SEQ ID NO: 781192 - DNA, 100 bp, Homo sapiens
ccatcattgatgtggtgcgatcgtcgaacttcgctatgggtcgctttcctagtacatgtaggaaatgttacatgcttgattttggcttggctcgacaatt

SEQ ID NO: 781193 - DNA, 82 bp, Homo sapiens
agaccctggagcctcagttggaagcagccgatccagcctgcggagcctgtggggcagcgaggatgccatgaggaaagctggt

SEQ ID NO: 781194 - DNA, 100 bp, Homo sapiens
gctgagccagagcccacagaagcatggaaggccaggagtggtggctcacacctgtaatcccagctctgggaggccaaggccagtggattgcttgagccca

SEQ ID NO: 781195 - DNA, 131 bp, Homo sapiens
ctcgggtcagagaacttgaacggcagctatctcgtggggaccgttacaaatgcctcatctgcatgcttctggagctatttgacagcgaagaccctcgggaacgggactacttaaaaacagtcttacacaga

SEQ ID NO: 781196 - DNA, 98 bp, Homo sapiens
tcctcagcccctttcaactctacttcaacccgcaccttgtgttccggaagttccagatgtgaagttcatttccaatccgccctccatggtggcagcgg

SEQ ID NO: 781197 - DNA, 144 bp, Homo sapiens
gtttttcaagtacgaaaagtaacaggagcaaatactgggaaaatatttgccatgaaggtgcttaaaaagggtatcggtacagcaatcggagagctgcctccatatttcatggccagagcagctcgcctctcaggtgctgaacca

SEQ ID NO: 781198 - DNA, 75 bp, Homo sapiens
ggaaaaactggagagcttcatcaaaaatagtgatagctttgataacccaacctcagcgcttgcctcagcttcaga

SEQ ID NO: 781199 - DNA, 100 bp, Homo sapiens
gtttctggacgcggatttttggcctcatactctgttatagataaacaagacttaattcagtgcacaaatgagatgaatgtgaacatcccacagttggcag

SEQ ID NO: 781200 - DNA, 73 bp, Homo sapiens
ggcaaacagtgtttgcctctggttcagctcatacaacagcttcttagtatttgtttaccagcaacttcagttg

SEQ ID NO: 781201 - DNA, 100 bp, Homo sapiens
acaagatgttgtcctgtgctggggctgacagaggaaggaccagaagaagctcgagcagacagtggagcaaatgaagcagaatgaaactactgcaatgaag

SEQ ID NO: 781202 - DNA, 75 bp, Homo sapiens
gcccaagaagggggaccttggcctttctaaaaaggggctgcttggatggggttattacttgataatgcttccatt

SEQ ID NO: 781203 - DNA, 100 bp, Homo sapiens
gagtaactgagcttactctgagatttgcacccagagggatggtctcagaagacgctggttcagtgcaaattgagatgataaggagtcaggccagggcggg

SEQ ID NO: 781204 - DNA, 95 bp, Homo sapiens
gaaccgactggacatgcggtcataacgtggagaaggggtactacccctccatcccccacccacttgctgggaaagaccacagcaagattctttca

SEQ ID NO: 781205 - DNA, 88 bp, Homo sapiens
agttcaaagggcaggagtgcggccaccaagacttcaccacagcagtggagctactgctgtggttcaggcagccctatgcaaacccagg

SEQ ID NO: 781206 - DNA, 82 bp, Homo sapiens
gcagcgagcaagacagcaagcaggaggatttgatgaagatgttaaagcgaaagtggagaaccttctcgggatttccagcctg

SEQ ID NO: 781207 - DNA, 90 bp, Homo sapiens
cgcagctcgcgggtctttggacaccaccggtcctgagtccgcgcacaatcctggaggaagagaaggctcagcaagaagagcgcatgagga

SEQ ID NO: 781208 - DNA, 83 bp, Homo sapiens
gcctgggtggttgttggcgtgtccctgcagcgaaggatcctggtaagtaaggaggtctctgtaccatggctcgtacaaagcag

SEQ ID NO: 781209 - DNA, 101 bp, Homo sapiens
ccataaacgcccccaatttcccagctgctaaaggaagaggaagcgtgtctaaacaacattcagttgttccaagtcaaatatttgagctggaggatggtacc

SEQ ID NO: 781210 - DNA, 100 bp, Homo sapiens
agaaaattgagacggagctaagagatatctgcaatgatgtactgatgccttcaattaagttgcagagttctgatggagagatatttgaagttgatgtgga

SEQ ID NO: 781211 - DNA, 83 bp, Homo sapiens
gacaagctcagaactgagaagctgtcaccacaggtactagagatacctggaccattaacggataaatagaagattcatttgtt

SEQ ID NO: 781212 - DNA, 90 bp, Homo sapiens
gcggtggtgagctgcctgcgcccgcagcccggcgaggagccgcagacccatgagagatgctgcccccacccccttaggcccgagggatca

SEQ ID NO: 781213 - DNA, 120 bp, Homo sapiens
tcattgacttgcacagtccttctgagattgttaagcagattacttccatcagtattgagccaggagttgaggtggttatcactaggctaaaactggacaaagaccgcaaaaagatcctcg

SEQ ID NO: 781214 - DNA, 100 bp, Homo sapiens
attttggaagagggagtcaccactggacctccaaggaagccacgtgcagacatctacaaccttcgatctcctgacgagtcttctctgttggttgaaatgt

SEQ ID NO: 781215 - DNA, 73 bp, Homo sapiens
gcagcactgtctctgtgcccatgatggctcagaccaacaagttcaactataacaacctcaaatatgaccacac

SEQ ID NO: 781216 - DNA, 74 bp, Homo sapiens
agaactgaggagcaccaggagacgcaactcatcgggttccagcaacagatagaaatgctttaagttcactctgg

SEQ ID NO: 781217 - DNA, 101 bp, Homo sapiens
ggcttctctcccacgttaagacttaataaagaaatattattcatctgtgccagaggaaggaggggcaacccatgtctatcgttatcacagaggcgagtcga

SEQ ID NO: 781218 - DNA, 100 bp, Homo sapiens
tgtgagtccaccttgccatatatatgtaaaaaatatctaaaccacattgatcatgaaatagttggagtccatagaggccactgtattctattgaagaaca

SEQ ID NO: 781219 - DNA, 75 bp, Homo sapiens
ggagaacgaacatcttctggacctttgtccagaacctttaacccagctgattatgcagagccagccaatactgat

SEQ ID NO: 781220 - DNA, 90 bp, Homo sapiens
catcacccaccaacaacaccacaataatccacagccaaggagcagctgcattggcatggaagaatcctatttcaagctggtttactgcta

SEQ ID NO: 781221 - DNA, 100 bp, Homo sapiens
ggaggccgtgaagaccttcaatagcgagggttacatcaattgcagacaggttgaatgtggaatttgctttgatccacaaagagaggaagaaggcgaatga

SEQ ID NO: 781222 - DNA, 75 bp, Homo sapiens
ggattgtcttaggaccataccatgacaagatgttaaggacatgttcacttccagatctctcaaagctgttcagaa

SEQ ID NO: 781223 - DNA, 83 bp, Homo sapiens
cgggctctgcagcgagcgctcgatggaacctcatcccagtttttgaatcagagccgacaggcacttgaattgaaaatggaaaa

SEQ ID NO: 781224 - DNA, 88 bp, Homo sapiens
gaagttgttcattgtttgtcaccacaaaaaggacagaacatgccagatccccacaaccttccaatagtggctggttggaagaaatacc

SEQ ID NO: 781225 - DNA, 75 bp, Homo sapiens
ggcggccgggggctcagagatccaagtgcgcgccctggcgggtccggaccaagaggcagaggaggtggacacggt

SEQ ID NO: 781226 - DNA, 100 bp, Homo sapiens
gtgtgtctcatcccagaaagagaagactttaaccactgtgatgcctgagaatccagttatcctacctacaaagaaaaagtaaagaaaaggcctggaggcc

SEQ ID NO: 781227 - DNA, 100 bp, Homo sapiens
caaaggggacgtcccaacgaagagaccacctgtccttcgagcagaagatggctgtgccacccacgtatgccgatcttggcaaatctgccagggatgtctt

SEQ ID NO: 781228 - DNA, 90 bp, Homo sapiens
tgaagatgaagcaaggcccaatgacccaggcgagtctggagaagcccagccctcattgtgaagggagagccaccgtggtgctcacagcaa

SEQ ID NO: 781229 - DNA, 96 bp, Homo sapiens
tccggaaatttgatgtcaatacttcagcagttcaggtccatgcctcaaagaccaaccggctgaacatccttggggggcttcgaagcatggtccttg

SEQ ID NO: 781230 - DNA, 84 bp, Homo sapiens
ctgctggcgctctggctgtgctgcgcgacccccgcgcatgatgatatcatcaagttgaatcgaaaggaagggaagaagcagaat

SEQ ID NO: 781231 - DNA, 74 bp, Homo sapiens
gtcgaagatggtgaggtagatgagagtgacataagtgattttgaggctacggaaacaggccgagaagaacgtgg

SEQ ID NO: 781232 - DNA, 75 bp, Homo sapiens
aagcggatttccgattgaatgagggtgatgagacaggagtgatggataatctgctggaggccttgcagtccgggg

SEQ ID NO: 781233 - DNA, 95 bp, Homo sapiens
cgaagttggaagtgtctcttagcagcgcgcggagaagaacggggagccaggaggagacatcacagctttcccagatcgggaggaaaaatatggaa

SEQ ID NO: 781234 - DNA, 100 bp, Homo sapiens
ctcccaggttcaagtgattctcctacctcagcctcccgagtagctgggactacaggcgtgcaccaccatccccaggaggcagttcccatgttatacgcag

SEQ ID NO: 781235 - DNA, 82 bp, Homo sapiens
ttcgtcatgttcttcgcgccctgacctgatgcctgcacctgctgaccccacagccagggagggcctggcagccccacccagg

SEQ ID NO: 781236 - DNA, 100 bp, Homo sapiens
attttaatttcagtgactgaattaaaaggtgtcaagaagctcagaatggcagcacacttctgcttttgttccttcatcaggacgaatttactcttttggg

SEQ ID NO: 781237 - DNA, 49 bp, Homo sapiens
ggcggcgccgagcctgagccgagagtggccaagcgggtgcaggaccaca

SEQ ID NO: 781238 - DNA, 100 bp, Homo sapiens
gcaccggctggtcaacctcttccagcaggggggccgggagctcgacatctacaacaacctacggcagacggggaagcggagccaacatgccagtggcccg

SEQ ID NO: 781239 - DNA, 83 bp, Homo sapiens
tcctcagcgactcttctgacctccgcgcgacgtacccgccgccgccgttggctggaggagtctcgctctcagtcaaaatctcc

SEQ ID NO: 781240 - DNA, 89 bp, Homo sapiens
atggagagctgtgtctgaggagccttggaacattcacccagaaatgtgcggagattattgtggctcaccttggctacctgaactacact

SEQ ID NO: 781241 - DNA, 101 bp, Homo sapiens
aagactgtttgttcaacatatctacaatctcggtactacagcttgcttggctcaggaacaacagaagagaataaagaaaatgacctcagaccttccttacc

SEQ ID NO: 781242 - DNA, 75 bp, Homo sapiens
tttgggagatccaagagattcagtatcactcgctcccttgatgatcttgaggatattgactgggtacagacagag

SEQ ID NO: 781243 - DNA, 100 bp, Homo sapiens
cgggcggtgcgcactgcgggcgcatccctgccccggcgccgtccgtgcccgcgggacctgacagccgggtcagagatcagcttgaacgggtctttttacg

SEQ ID NO: 781244 - DNA, 75 bp, Homo sapiens
ttattttgaagtaaaaattgtcagtaagggaagagatggtgttgctaacaaccacaagcagaatttgatgacggt

SEQ ID NO: 781245 - DNA, 90 bp, Homo sapiens
ctcggccctgcgccgcgacaagtacgtggccgagttcctcgagtgggcatgcttttcacttccactgcatctctcgctggctcaaaacac

SEQ ID NO: 781246 - DNA, 100 bp, Homo sapiens
gcatctgaagaccatggatcacaaccggaaccgcaggcagaaagatgaaggtcttagaatcattgattggaatgatccagaaattcccttatgatgaccc

SEQ ID NO: 781247 - DNA, 75 bp, Homo sapiens
cttggatgaatttttagtgaaaaatgatccctgccgaggtgctggagaatctggtaaaagcaccattgtgaagca

SEQ ID NO: 781248 - DNA, 83 bp, Homo sapiens
aggcaaggagctaaagcagcgtgcgttcagccctgggaacccagcttagactagaaagtctagaagacacacacataatgaag

SEQ ID NO: 781249 - DNA, 117 bp, Homo sapiens
ccccgctctgctgtgggcgctgctggcgctctggctgtgctgcgcggcccccgcgcatggtgctggagaatctggtaaaagcaccattgtgaagcagatgaggatcctgcatgttaa

SEQ ID NO: 781250 - DNA, 100 bp, Homo sapiens
tcaccgagatgattcatgaatccattggaaatgctaaaacaaccaggaatgataatagcagccgttttgggaagtatattgagattggttttgataagag

SEQ ID NO: 781251 - DNA, 82 bp, Homo sapiens
aggagattgacagtcacaattttgtaataagtttaatcccatggaatcaatcaaattaaatcatcatgactacattgattcc

SEQ ID NO: 781252 - DNA, 100 bp, Homo sapiens
agaggatgatgtttttggtgaagaccctacagcttggggcctgggctcctctgaccatcctcattgagaaaggaaagtgagtccagagaagttgatgctt

SEQ ID NO: 781253 - DNA, 100 bp, Homo sapiens
gaggtcttgcagatgacggtggatcacttgaaaatgctccatgccactggtgggacagacactggaagaattgtcttaccaagctcttgccctgttttct

SEQ ID NO: 781254 - DNA, 97 bp, Homo sapiens
ttcccagctttggttggaagacctattatcagatcaaccaccaaagtgggaaacattgaaatcaagcttccagataagacaattgcaagccttgtaa

SEQ ID NO: 781255 - DNA, 125 bp, Homo sapiens
tatgccagagtaaattccatttttttgaagatcagctccgtggggctggttttggtccacagcataacagtaccttctccaggcaaattccgttcccctgcagcaccatctcctttggctcttcg

SEQ ID NO: 781256 - DNA, 141 bp, Homo sapiens
ctgccgctatggatgatcgagaggatctggtgtaccaggcgaagctggccgagcaggctgagcgatacgacggccgagacgcatccagagctttcgtgaccggggactgttctgaagcaggcctcgtggatgacgtatccg

SEQ ID NO: 781257 - DNA, 90 bp, Homo sapiens
agagatgctggtaaatgtgctcaacatatgctctgatgacgaactgatttctgatgatgaagcagaagccttcgttcagaaaaacctggt

SEQ ID NO: 781258 - DNA, 76 bp, Homo sapiens
tccgatcctcatatacccccggaaacattggcaaatttggagcgacagatctatgcttttgagggaagctacctgg

SEQ ID NO: 781259 - DNA, 82 bp, Homo sapiens
cgccggccccatgaggagggacgtgaacggagtgaccaagagcaggtttgagggagcatttcctgaagacgtagtcatgcag

SEQ ID NO: 781260 - DNA, 75 bp, Homo sapiens
cgtgacctaaagctggagtattttgagattggagaattaagctccagggtttgagccacaatgtgatcttcacct

SEQ ID NO: 781261 - DNA, 100 bp, Homo sapiens
agaattccgagagaacgagcacctcctcgaagtcatcccagttgacactggtacagtagctccagaaaaatgcttatttggggcaatgctaaatattgcg

SEQ ID NO: 781262 - DNA, 100 bp, Homo sapiens
gaggggccaggcctttgtcatcttcaaggaggccagcaaggtgcctttctgcaagttccacctgggtgaccgacccatccccgtcaccttcaagagggcc

SEQ ID NO: 781263 - DNA, 100 bp, Homo sapiens
gagtccttcgaaggccctcagcctgcggatgtgaggctgatgaagaggaaaacaggttcgggatgagtatcggcaggactacgatgctgggagaggaggc

SEQ ID NO: 781264 - DNA, 50 bp, Homo sapiens
agagtatgcgctgaagcaggaaagggccgtaggcagccatggcgcccagc

SEQ ID NO: 781265 - DNA, 100 bp, Homo sapiens
gagctgccatgaacaactccttcatctacataaagattccacaggttccactgtgtgtcagctacaagggtgagcctggcagccctggtgaaaatggagc

SEQ ID NO: 781266 - DNA, 100 bp, Homo sapiens
ctctagctcagaaccattagacacatcagtggagtccatgctacctgattgcccccgggtctcagcaggtcacctagaccccaggccacgtatgtgaacg

SEQ ID NO: 781267 - DNA, 75 bp, Homo sapiens
atcctgctccacagagaatgctctgcacccgttgatgtttgctgtaatggcacaagagtatttgtgcagaaagaa

SEQ ID NO: 781268 - DNA, 100 bp, Homo sapiens
attttggggcagaatacagagatatggaatcaggtagtgggcagcagtcagtgacaggtgtaacctctgtggatgacagcaacagttactggaggatacg

SEQ ID NO: 781269 - DNA, 90 bp, Homo sapiens
agctttgcaaatatacctcctgagattcagaaaagttgtcttaatatgttgattcagtccttagcatctccttggaaacaatgccatctt

SEQ ID NO: 781270 - DNA, 100 bp, Homo sapiens
tgagcaagcaaacaaaccttctcatctttgtggtcgtgtttttaaagtaggagagcctacatattcttgcagtatcaaatcatgggtggataagatgcaa

SEQ ID NO: 781271 - DNA, 90 bp, Homo sapiens
ggggccggaggaagagcggccggatgggccttaaggcgacgttgtggacgtttaccagcgggagttcctggcgctgcgcgatcggttgca

SEQ ID NO: 781272 - DNA, 100 bp, Homo sapiens
ggatgatgagcgccttaaggatctctttggcaagtttgaacatccatgatagcagtcttctgtaaatcgaacttttcaagaattctctgaaggaaccaag

SEQ ID NO: 781273 - DNA, 101 bp, Homo sapiens
ttggctcaggagtcagtattttagcagtccattccaaagacaactataaacgagtgactgggacaaggtatgttgagtctaaaaaggacagagtcacagta

SEQ ID NO: 781274 - DNA, 99 bp, Homo sapiens
cacggctttactttcacccggggcctttccgtccgagaaattctcgcagagcttacagtgtctcctttcctcttgggccgggcactttgggctgccagt

SEQ ID NO: 781275 - DNA, 50 bp, Homo sapiens
cccaagatgggcatctattacattccaacctcagcccctgtcaacagtgg

SEQ ID NO: 781276 - DNA, 100 bp, Homo sapiens
cagcaaggcactggggattcttggtagatctgagtgctgcggctgctcatcacggcctgggagagaagactcatcttcactatcggcacgtccaacacca

SEQ ID NO: 781277 - DNA, 90 bp, Homo sapiens
tcaccacccctatccagacggctgcccttcaagtaccagtagttattactagtaaaagcggagagatcttgtatcgtatttcaccgtggg

SEQ ID NO: 781278 - DNA, 112 bp, Homo sapiens
cgttccttcatgggatttgctgctcccttcaccaacaagcgaaaggcttactcggagcgtagaatcatgggggctcccagaatggggaccagagatgggaagaacataggag

SEQ ID NO: 781279 - DNA, 99 bp, Homo sapiens
gggcaaaatcacccccaattgagaactactgctctaaactattgccacactgaaggtcaaaatattttattcactgatggagaatatattaatcagata

SEQ ID NO: 781280 - DNA, 87 bp, Homo sapiens
gatccagatcgggatttacgtggagatcaagcgcagcgatggtttccacttgagcggcacagtgacagaacctgcaatacaatcgga

SEQ ID NO: 781281 - DNA, 74 bp, Homo sapiens
aaacattttcgaagtttggatcacagcctataccaggggtggcactgaatcaacaagacaagcaactcaattga

SEQ ID NO: 781282 - DNA, 90 bp, Homo sapiens
aggtcagctaccattggcagttctccagttctctatagccagtcagctatagctacagatttcagaagaaagtggtagcttcctttccaa

SEQ ID NO: 781283 - DNA, 82 bp, Homo sapiens
aagcagaaagtattcattgtgatggggaaggatctaataaccaacaatgcagatcttcgtgaagactctgactggtaagacc

SEQ ID NO: 781284 - DNA, 83 bp, Homo sapiens
ctcgaccagctgctggacatgtcctagaatcgggcgcctgattgctgagtgtcatctcaaccccatcatcctgcccctgtggc

SEQ ID NO: 781285 - DNA, 98 bp, Homo sapiens
tcagagcgagtctcggagaagatgtggtggcttccgtttgttggtggaggaggtggcaggcctcggcgattgctttattcaccaagtgaaaaacagtc

SEQ ID NO: 781286 - DNA, 75 bp, Homo sapiens
gccaagccgtgtggggtgcgcctgagcggggaagcccgcaaacagggaaatgaataagcgtctaacagaagaaca

SEQ ID NO: 781287 - DNA, 82 bp, Homo sapiens
gcgcccagcccagcgcctcggccgaacccctccgcagcaggaatcccttggcaccatgtcctgtgtgcattataaattttcc

SEQ ID NO: 781288 - DNA, 82 bp, Homo sapiens
ggcgcgtggtctacgccgagtgacagagacgctcaggctgtgttctcagaatgaccgtgacggctggaatccctctgtgtgc

SEQ ID NO: 781289 - DNA, 90 bp, Homo sapiens
ctctggagttatgttgatgaacatgactcgaatgagaaggaagtatttcaaggaaacctcgacctgtctcccagttggttgcacagcagg

SEQ ID NO: 781290 - DNA, 83 bp, Homo sapiens
atggagaccaaaagtatgttgtaccttgtgacagaatatgccaaaaatggagaaatttttggagtctaccatggctcaagaat

SEQ ID NO: 781291 - DNA, 98 bp, Homo sapiens
ttcttaaggagctccgaaaagcaagaaatcaaataacacagttggaatccttgttaccggtattgtaagaacaagccgtacccaaagtctcgcttctg

SEQ ID NO: 781292 - DNA, 83 bp, Homo sapiens
taaagcagcgtgcgttcagccctgggtcttattgccagcagttttgaagatgactcccgtgtagcctcaccgttagaccagaa

SEQ ID NO: 781293 - DNA, 50 bp, Homo sapiens
gagaccactagaatctggaattgagaataactgaagtgaagtgatggact

SEQ ID NO: 781294 - DNA, 97 bp, Homo sapiens
gaaccggcggcgttgcgtctaaaaaggcgaaagccttgaggttgaaggtgggacgagcctaatgaagtggagcatggggaagtgattgactgtgtgc

SEQ ID NO: 781295 - DNA, 100 bp, Homo sapiens
tgacagaggatatgatcggggctatgatgatcgggactactatagcagatcatacagaaggaggaggagaaccgtcggctggaggaaaagcggcgggccg

SEQ ID NO: 781296 - DNA, 100 bp, Homo sapiens
aactcatggaactgaaagctcttggcatgaaatagcagctacatcaggtgctcatcctgaggatttgggagcaaaagcaagtctgccactaacctaggac

SEQ ID NO: 781297 - DNA, 108 bp, Homo sapiens
aatggtcttccacactagagacaaaggcaatgaggtgaacgcagaacggcaagaagaataaatgtctctggtggaacttttgctctggtggaactgcttttctagaac

SEQ ID NO: 781298 - DNA, 100 bp, Homo sapiens
cgctgcctgtcaccaacgggaagggccggcccgcctccctggccggggcgcagttcggaggttcagcccgtggaccgggagcccgtggaccgggagccgg

SEQ ID NO: 781299 - DNA, 75 bp, Homo sapiens
tcggaatgcactacaacaggaaaatcatattatagatggagtaaagcttctcggacaaactatttagtggaaaag

SEQ ID NO: 781300 - DNA, 83 bp, Homo sapiens
gggatcttcctgagcagagctctccgggttccccggctcgcggggcccggcgaagggcagtttggtgccctggttgtcagatg

SEQ ID NO: 781301 - DNA, 74 bp, Homo sapiens
tcagcgccagcggcactggctccgccgcccaagatgctgtctttgcatttcaactacgcaacccagtgcacaat

SEQ ID NO: 781302 - DNA, 76 bp, Homo sapiens
gatcaatgaacctttagatgaatttacagagaggcagatgcgaaccagaacaatgggacctcctctcaggacacag

SEQ ID NO: 781303 - DNA, 82 bp, Homo sapiens
gcgcctgggctgccggcacttcgcggcagaacactctgctccagccaaggtggtgagggcagctgttcctaaacagcgcaaa

SEQ ID NO: 781304 - DNA, 100 bp, Homo sapiens
cggattcgattcaacggggttccggaccgcgctgcgctatggagcagctctgtctcccactccgtgctgtctgagatgcaggtgattgagcaggaaaccc

SEQ ID NO: 781305 - DNA, 82 bp, Homo sapiens
cagacattttcctgaatgggagggtcctgcagttctgagcttgggttccctttgcctggacaccaaccaagcccccaactgg

SEQ ID NO: 781306 - DNA, 90 bp, Homo sapiens
cccactggaggagatgaggaaggctgccgaggatctggaaattgccatgaccttgcctcctttcctggagttcggtgtcccgtccccagc

SEQ ID NO: 781307 - DNA, 100 bp, Homo sapiens
tggagttcctcctggggaacccgttcagcacaccagtggggcagtgcctcgaggctgacccgcggctgattgagtccctctcccagatgctgtccatggg

SEQ ID NO: 781308 - DNA, 75 bp, Homo sapiens
gacctgctagagccattattgccccgtttttcgttggaatatacgttgcacatttatggcgattctgagtgtgag

SEQ ID NO: 781309 - DNA, 96 bp, Homo sapiens
cagctgcgcagggcctgccaggtggcgctcgatttgaacatggaattcaatccttcagatcatcctcgggccagcacaatattcctcagtaaatct

SEQ ID NO: 781310 - DNA, 100 bp, Homo sapiens
ggatcccaaggggctcctctccttgaccttcgtgctgtttctctccctggcttttggggcaagctacggaacagggctcagctttcaccccaaaagacct

SEQ ID NO: 781311 - DNA, 74 bp, Homo sapiens
ggatgaagttgattgactatggtctctccggctaccagggagacgtgtggatctgcatggagctcatggacaca

SEQ ID NO: 781312 - DNA, 100 bp, Homo sapiens
cgggtctcgggggccgctctgggatcccggccaccagcaattgtccgtattctaccttgtaaatactgttatttgtatatactgtaaatgatgacatcgg

SEQ ID NO: 781313 - DNA, 75 bp, Homo sapiens
actcaatccggatttcaagccacctgcagattacaatataaaagaagcctgtattgttttgaatttgaacgtcgg

SEQ ID NO: 781314 - DNA, 75 bp, Homo sapiens
tctacttcagttagtctctatgacagtcacagagatgcggcggaccctgacgcctgccagctccccagtgtcctc

SEQ ID NO: 781315 - DNA, 76 bp, Homo sapiens
agagccggatcgcaggctccctgcctactcccccaccggggatttcagatgaggagcgggaaggcctcctgcaccc

SEQ ID NO: 781316 - DNA, 100 bp, Homo sapiens
ctctccttttctgccacccgagatcttccagaagcttcagggggcagagtcacaaagctgtaagaagccctgactgcagagatcgtgaagaccatccggg

SEQ ID NO: 781317 - DNA, 82 bp, Homo sapiens
tgctggtgtgagtgccctcaggggttccccaggaatatcgatacaacaccaacagagtcctgttcgatttgatacctttgat

SEQ ID NO: 781318 - DNA, 75 bp, Homo sapiens
ccggtacaatagaattaaagcgcttccttctgggattggagctcaccatggtccatgctgtggacggcaccgccg

SEQ ID NO: 781319 - DNA, 83 bp, Homo sapiens
gaagattcgaaaagccacttgaagaaaagggtgaaggaggcgaattttcagttgataggatccgagccaggagacactgagcc

SEQ ID NO: 781320 - DNA, 82 bp, Homo sapiens
caaaaatgagagagatagtggataaatactttccagataattggttttgctacttgagaagatagaacatgatgacatctgc

SEQ ID NO: 781321 - DNA, 98 bp, Homo sapiens
cgagacagacagcatactgaagtggtttgcaacatccttcttctggataacactgtacaagctttcaaagtcaatggcacacgtgtttcacgttgaca

SEQ ID NO: 781322 - DNA, 50 bp, Homo sapiens
acacggtctacaccgacttcgacgcaaaatgatgcttcaacacccaggcc

SEQ ID NO: 781323 - DNA, 131 bp, Homo sapiens
ccgacctcgctgtgggggctcctgtttctctccgccgcgctctcgctctggccgacgagtggagaaagtactccaaagattcaggtttactcacgtcatccagcagagaatggaaagtcaaatttcctgaa

SEQ ID NO: 781324 - DNA, 133 bp, Homo sapiens
ttcacagaagaagtcacaagacaagggtcctaaaacaggatcagtaaagaaggaaaaagcagtaaagccagaggaagtgtttggtgtataaaacagaccaagctcaagatgtaaagaagattgagaaattcca

SEQ ID NO: 781325 - DNA, 74 bp, Homo sapiens
agaccttcaagtctcactttggccggatggcgggtgaaaaagttgagaagccagatactaaagagaagaaaccc

SEQ ID NO: 781326 - DNA, 90 bp, Homo sapiens
caacgtcaaggagctggaagtgctgctgatgtgcaacaagtgcccacctggactggatttaagtcagaagagaaggaagatgtgagtatt

SEQ ID NO: 781327 - DNA, 100 bp, Homo sapiens
gccggccgccgccgaggtgcagggggctggcaacgaaaatgagcctcgcgaggccgacaagagccacccggagcaggtgatgacaatgggaagaaggcca

SEQ ID NO: 781328 - DNA, 82 bp, Homo sapiens
ctcagctccgagtccagggcgagctccatctggctcctgctgaagaaccccacgttcatcctgctctgcctggccggggcca

SEQ ID NO: 781329 - DNA, 82 bp, Homo sapiens
ccagaatgaagagatgttacccagtatcttggtgttgctgaagagggtgagaactctgtctcagtcgacgggaagtgcagtg

SEQ ID NO: 781330 - DNA, 118 bp, Homo sapiens
cggcgctgagccagccgggacggacatgcgcgggagggcgccgcggggcagccgccgctcctccgggtactatactggcaattgctggagaagattttgcaattgttgcttctgatac

SEQ ID NO: 781331 - DNA, 83 bp, Homo sapiens
gtgcacgagaccggctacttctcggcgctgccgtctctggaggagtactggcaacagcaatggctgccatccggaagaaactg

SEQ ID NO: 781332 - DNA, 139 bp, Homo sapiens
ttctgagggaaaggacaagatgaagtggaaggcgcttttcaccgcggccatcctgcaggcacagttgccgattacagactcaagaatgaacaatccgtcagaaaccagtaaaccatctatggagagtggagatggcaac

SEQ ID NO: 781333 - DNA, 99 bp, Homo sapiens
tttgtctttcatacactttctcctgtcaaggctgaggcggcaaaggaatcgtctaagtctcaggttcttcagatagatcctgaagttacagatgaagaa

SEQ ID NO: 781334 - DNA, 95 bp, Homo sapiens
tcggccggcaaccgagggacccgcgtccagactcggtgaaatacctggagtgctcagctctcacccagagaggcctgaaaaccgtgttcgacgag

SEQ ID NO: 781335 - DNA, 100 bp, Homo sapiens
tggagagaatcttgaaatgtcttttagggttcaaaccttgtactactcagctgatcacaagctgcttgatgggaacctactagatggacaggctgaggtg

SEQ ID NO: 781336 - DNA, 100 bp, Homo sapiens
ccaggtccaccacctgctccatttgcaagtggattttcggaaaagacatatgaatggagctcagaagaggaggagccagtgaaaaaggcaggaccagtcc

SEQ ID NO: 781337 - DNA, 100 bp, Homo sapiens
ctggaacacagtgactctgttaagcagctgaagggacaggcagcacgctggctcttctcctgaacttcctcgcctgcctggccagcttctgtgtggaaac

SEQ ID NO: 781338 - DNA, 88 bp, Homo sapiens
ttaattaagaaagcagttgctgttcgaaagcatcttgagaggaacagaaaggtatgttgagtctaaaaaggacagagtcacagtagtc

SEQ ID NO: 781339 - DNA, 75 bp, Homo sapiens
tttagcaaaaggagcccggaggaacattccaaaggaaaaatttcagcctctaaagagagcaatcactacacttat

SEQ ID NO: 781340 - DNA, 105 bp, Homo sapiens
cccaagatggagttcctcctggggaacccgttcagcacaccagtggggcagtgcctcgcaaagagcccagccaacagcgagtaaaaagatggggcttctctttcg

SEQ ID NO: 781341 - DNA, 82 bp, Homo sapiens
cgccgcccgtccacacccgccgccagaggctgaggggatctggcggtggagcgctaggatcagacgcccccgcgatgaccag

SEQ ID NO: 781342 - DNA, 75 bp, Homo sapiens
cgcactggcaagtgcagcgcctgtaatgtttggcgagtctgtgcatccaagacttctttagatacagcaggccag

SEQ ID NO: 781343 - DNA, 82 bp, Homo sapiens
gagaatagaggagctgctggctgagaagagaacgaagtgaaactcctggtagaacggatgatggctctgcagaccgacattg

SEQ ID NO: 781344 - DNA, 107 bp, Homo sapiens
gtgaggagtttgtcaaaatcatgggcaacctgaacttgcctaaacctcagcagatagctgctgttcacccagaagacagaccgccagctgctggtgctccaggatgc

SEQ ID NO: 781345 - DNA, 75 bp, Homo sapiens
cgaaagctttcctaggccaaaaagagagaatgtaactggtcactacatttccccctttcatgatattcctctgaa

SEQ ID NO: 781346 - DNA, 90 bp, Homo sapiens
cgcgagggcgcgcgcgtcccgagccctccacccgtcgtgccggcgccgcccggaccgccaggtttattgggcacttcctagcaccaggca

SEQ ID NO: 781347 - DNA, 82 bp, Homo sapiens
atatttctgtggagctgagggctgatgggttctgacggataatttccaagccagaaataccgctaccaagatgaagacacgc

SEQ ID NO: 781348 - DNA, 75 bp, Homo sapiens
tgcacgacgcactggcccaggacctgcacaagcagcccctgtcaaagggaacaggaagcagtccacggagggtga

SEQ ID NO: 781349 - DNA, 82 bp, Homo sapiens
cctcggcagccttgcgctgctctaatggtccggacttccgtgtgtgacgcggcgcacggcgcggatggtggccgagtggcag

SEQ ID NO: 781350 - DNA, 50 bp, Homo sapiens
tgacgctaggccacaaaaatcgtccagatgtgaaaaagctttgcatcctt

SEQ ID NO: 781351 - DNA, 80 bp, Homo sapiens
tgacaaggagcccctcatccccatccaggtgaggctccaggttgggctctatgctgtgtaccttctggactggctcagcg

SEQ ID NO: 781352 - DNA, 100 bp, Homo sapiens
ggagatggcggctcagaagataaacgaggggctggaacacctcgccaaagcagagaaataaaatgcactcggtgatggaaagagagccactattctgaag

SEQ ID NO: 781353 - DNA, 82 bp, Homo sapiens
gtctgcgagccaggattcccggtacgaggaacagcaaattcaggaaaaagtggcgacctttcgactcatgttgctggagaag

SEQ ID NO: 781354 - DNA, 82 bp, Homo sapiens
gcctccaggccaagagggatccttcacccgtgtctgagctagggccatgagtaccttgtttttgactggaaggagctgtggg

SEQ ID NO: 781355 - DNA, 101 bp, Homo sapiens
cggtgattgaggacaagaccatcgagctcatgggtggttctcttcccaaagtggaagccaaattcatcaattatgtgaagaattgcttccggatgactgac

SEQ ID NO: 781356 - DNA, 82 bp, Homo sapiens
attttgaagaactggggaagtacgacatgatgatggatgtgtggggaggagagaacctagattgggaaaatgaggtacgtta

SEQ ID NO: 781357 - DNA, 100 bp, Homo sapiens
cggcgagccaaagaggagccggccgcgcgggccgggaggggacggccgccggagccgcgaggccaagtgctggagaatctggtaaaagcaccattgtgaa

SEQ ID NO: 781358 - DNA, 83 bp, Homo sapiens
ctggtccagcttcccttcctcaaataaggaaattgacacctggcgtgcaagccctggatgaaaacatggacctcttggaaggt

SEQ ID NO: 781359 - DNA, 97 bp, Homo sapiens
ggtggccactgcgctgcggaacatggccttggacgtcagaaataaggagctcatcgcttagcagtgtctgcaaaaacgaatcttttcctacaacctg

SEQ ID NO: 781360 - DNA, 99 bp, Homo sapiens
gagcgggaggcgccggggaccggggcgaggcggcccccgccgccgccatggaggcgctgggacccgtttctgccactgccttctacaaagcacaacctg

SEQ ID NO: 781361 - DNA, 96 bp, Homo sapiens
acggtttcgtcccgtcggcgctggggacccgcgagcaatgtcaccgggtgcgcatcaatgtacctccacacagagggcttctctgggccctctcca

SEQ ID NO: 781362 - DNA, 113 bp, Homo sapiens
ctatggtgttgtgagccatcaggactccatcactcgtcttatggaggtgtctgtaactgaggtgactctcctattccatctgtttcttcgggatcatcttcacctctttcagc

SEQ ID NO: 781363 - DNA, 100 bp, Homo sapiens
ctctttgggccgttatctcacactgtgccctgtccacggtgcctcctgcatgtcctgctgccctgagctgtcccgagctaggtgacagcgtaccacgctg

SEQ ID NO: 781364 - DNA, 80 bp, Homo sapiens
tctgtcttcggtggactccttcggcagtccacccaccgccgccgcctcccagcacatacccccggcctcatgagtacctg

SEQ ID NO: 781365 - DNA, 82 bp, Homo sapiens
gctcccttcgccttcgccctttccacctcgcggcagttcgagctgcctggagttcagcctcagaatccaggagttcattgaa

SEQ ID NO: 781366 - DNA, 100 bp, Homo sapiens
cacaagcacaacaaggcctgctgcccgctggagggggtcaggccatcaccccagcaggttctatgaatttgaatgctgtgtgtgtcgcgggggccctgag

SEQ ID NO: 781367 - DNA, 110 bp, Homo sapiens
gggtatcctcagtatgtctcagaaattttggaaaaagttacatgtgaaagaagatatattccagacacgctgtttaatggtcttgggcttggagcagtaattggcctggg

SEQ ID NO: 781368 - DNA, 98 bp, Homo sapiens
gtgagctctatgtgttcttagtagatcagatgcatgtagccctaaaccagggtcttactggacagagctcattcagactatgacagtgtgtttcacca

SEQ ID NO: 781369 - DNA, 80 bp, Homo sapiens
taaggattccaagtaactcttatttgggacaagaatccttcaagaaacaggaaaaaactcctaaaacaccaaaaggacct

SEQ ID NO: 781370 - DNA, 89 bp, Homo sapiens
agcagaggacgacatgttgcttttcgtggagcttctccagaatcatgcaccagacggtgaaggaactgtcaccaaaatgtaacgtgtcc

SEQ ID NO: 781371 - DNA, 90 bp, Homo sapiens
gactggttcttgaacagacagaaggatgtaaaggatggaaaatacagccaggatctgggcatccaggcacggccatgacccctccgaggc

SEQ ID NO: 781372 - DNA, 82 bp, Homo sapiens
tcaagctctgtgagggtttcaatgaggtgctgaaacagtgccgacttgcaaacggatgaagagaggggagctctttgactac

SEQ ID NO: 781373 - DNA, 100 bp, Homo sapiens
cgcacctgcagcgagtgccaggaactcttctggggagaccccgacgtggagtgccgagaaatttaaaagcctgttgattcaagaactttctaaagtattt

SEQ ID NO: 781374 - DNA, 97 bp, Homo sapiens
agagcgagctgagtggttgtgtggtcgcgtctcggaaaccggtagcgcttgcagcatgctcttcagtgggtcatctgtgtgtcacagcctcagaaga

SEQ ID NO: 781375 - DNA, 87 bp, Homo sapiens
tagataaacttgtggatggacttgctacctcttgggtgaactctagcaattacaagttttccaagagataacttcaccaagatgtcc

SEQ ID NO: 781376 - DNA, 100 bp, Homo sapiens
tattcagctcttcacagggggtagaacaagtggtactaggattatacattgtaagaggtgacaacgttttgcagctcaccttgtgaagatgaaatatcca

SEQ ID NO: 781377 - DNA, 99 bp, Homo sapiens
agacagttcacactaccaagctctatggcaccacaacttttaagtcccttaagctcctaggatttttagatgttgaaaatactccctgcgcccggcatt

SEQ ID NO: 781378 - DNA, 100 bp, Homo sapiens
caattacttacctggcccaggaggatgggcccgttgtggaccagttgctcttctgtgatgactgcgatcgtggctaccacatgtactgtctcaccccgtc

SEQ ID NO: 781379 - DNA, 83 bp, Homo sapiens
aggaggatctgctgtgcatagccaagaccttctcctaccttcgggaatctggtcaccgacgatgagggcgcacctgctgtcct

SEQ ID NO: 781380 - DNA, 98 bp, Homo sapiens
agatccttcaaaattaaaagaggagcagcatggcatttcagtcactggtttgcagagtccaggcactggtgaggtggattgatgatgaatcttctggc

SEQ ID NO: 781381 - DNA, 100 bp, Homo sapiens
caggtgctggaaaggaatgaggagttacagagggccgagaaggacaggatcaggaccgtataatagacgctggccccaaaggaaactactctcgatttat

SEQ ID NO: 781382 - DNA, 100 bp, Homo sapiens
ctctgaccatctggacggtgtgtggggtcctgtcactatttggatctacagtctttgcagaaattcagggggtcattgatgcttgcattaaactatctgg

SEQ ID NO: 781383 - DNA, 100 bp, Homo sapiens
atatacttttgaaggtgcaagatactatataaagaaacctcgacctgtctcccagttggttgcacagcaggttactcagcagtttgtgcctcctacacag

SEQ ID NO: 781384 - DNA, 100 bp, Homo sapiens
ttatggatccgttacagtcagtacctagtcctgacactaaactaatgcagaatagtggtaagacaaagtttaaaaggacaagcattgatagattgatgaa

SEQ ID NO: 781385 - DNA, 75 bp, Homo sapiens
tgccaaatgtcttaatcattggcaaaaatcccttttctggatggataaggtgggggatgccctggaggaagtgct

SEQ ID NO: 781386 - DNA, 101 bp, Homo sapiens
gctggacgtgggatccacacagctcagaacagttggatcttgctcagtctctgtcagaggaagatcccttgcaaacggggattcagcgtccgatcctttgg

SEQ ID NO: 781387 - DNA, 51 bp, Homo sapiens
ggtacctgccggacacgcttctcttggagctgctgtatgtttccaggaaac

SEQ ID NO: 781388 - DNA, 50 bp, Homo sapiens
gaaaaaatggttgacctcacccagcggagcgtgctttggacaccatgaat

SEQ ID NO: 781389 - DNA, 83 bp, Homo sapiens
aaacaaccctgaagagaacagccaggcctgtgacagacatcacacctccagtgcaatccctgttcctaagagacaaagctcca

SEQ ID NO: 781390 - DNA, 50 bp, Homo sapiens
aagctattctgggggcaacagaggtggacccaagtggagagattgtggaa

SEQ ID NO: 781391 - DNA, 90 bp, Homo sapiens
gatctccatcctttgcaggagcacaacaagatggccatgtcccaggacctgcgctgccgagaggaccagtggtaccccctggaaccccgc

SEQ ID NO: 781392 - DNA, 74 bp, Homo sapiens
ccaacctctcgtacatcggcgagggcgcctacggcatggtgtgattgatgggtcaaccttgagaacgatctgca

SEQ ID NO: 781393 - DNA, 100 bp, Homo sapiens
acattgctgttcatgagtggaatccatgtttctggacgcggatttttggcctcatactctgttatagataaacaaggtgtcgcggtcatccccgtgctgc

SEQ ID NO: 781394 - DNA, 75 bp, Homo sapiens
tacgtggagcgtgggcgtttcgcagactcctaaggaaacaaatggaagactgctgcgaccctgcccatctctttg

SEQ ID NO: 781395 - DNA, 80 bp, Homo sapiens
gggtctcagccccgcgtacggcctttcacgagtcttcaagccttcagatgcttcaggactgccccaaggcccgcagggag

SEQ ID NO: 781396 - DNA, 100 bp, Homo sapiens
gcgtgagcggaaatgaggaggagatggtggaggaggctgaagggtggcccagttgaaatccttcccttcctctaccttggaagtgcctaccatgcatcca

SEQ ID NO: 781397 - DNA, 75 bp, Homo sapiens
gatctctagcctacaggatggcttggccttgcacataagtgaaaaatgtgaggttttacaatattctgcaaggga

SEQ ID NO: 781398 - DNA, 97 bp, Homo sapiens
aggattatgaagtattaattcttccactgatatctcaaaaggtgatctggacaaaggaacaggtatctcagatgtggtgctggaaaaagccatgcac

SEQ ID NO: 781399 - DNA, 100 bp, Homo sapiens
gcgcagccagaaatccaaggccaagagcaaggcccggcgtgaggaggaggaggaggacgaagttatacggaagcgtctcctcattgatggagatggtgct

SEQ ID NO: 781400 - DNA, 96 bp, Homo sapiens
gcaaggaggcctctccaaggagctgtttcaatccactggatgtgccaggactcaccaggaataaaagcacgtgtggagtgagagcgaggactgcct

SEQ ID NO: 781401 - DNA, 95 bp, Homo sapiens
agctgcacaaggcggaggacagcctcctggccgccgaagaggccgccgccaagtttacaggctggtaacctacatctttgtctacgagaatccca

SEQ ID NO: 781402 - DNA, 74 bp, Homo sapiens
gcctggtcgctttgatagagaattcctctttagcctgcctgataaagagagtccagtgtcgtgctgctgcagga

SEQ ID NO: 781403 - DNA, 76 bp, Homo sapiens
agacggaaaaagtcgatctggagcttttcccctccccgggcgcatattaaatttcctattgactacccctattcac

SEQ ID NO: 781404 - DNA, 100 bp, Homo sapiens
aggacatgcctccgccggggggctatgggcccatcgactacaaacggaacttgccgcgtcgaggactgtcggatggcaatcaggaattgtttccctgtga

SEQ ID NO: 781405 - DNA, 90 bp, Homo sapiens
ccaaccagctgcgccaggcacgggccatgggtgactacctcatcgtaggcgtgcacaccgatgaaatatgaacagggattcatcacagac

SEQ ID NO: 781406 - DNA, 50 bp, Homo sapiens
gacatcctgagaggacttggcagctgagattggggattttgatgaagcct

SEQ ID NO: 781407 - DNA, 75 bp, Homo sapiens
catacctatggctttattgacctcgactcccatgcggagtcctaagcagacttaaagccaagaaaataagaagag

SEQ ID NO: 781408 - DNA, 75 bp, Homo sapiens
tgaagaaatttgtgtggagcgaggaaaggtgtgctgtgcctgaggccagcaaattccggaccccatctgagctcc

SEQ ID NO: 781409 - DNA, 83 bp, Homo sapiens
gacagagaacactggatagacttcgaacatttaaacagaagaagcagactacagtgcctttggtacagacacgctaataaaga

SEQ ID NO: 781410 - DNA, 100 bp, Homo sapiens
gttttggggaggctgctgcgacgaagagttccctcagcctccggccttgtgtgtccgactcggcagcagtgatgcgctggctccctccctccgaggctac

SEQ ID NO: 781411 - DNA, 75 bp, Homo sapiens
cgccccgggacccgcgccgctgccctccggctccgcgggcggcccacggcgagactcctgggagagttggctctc

SEQ ID NO: 781412 - DNA, 83 bp, Homo sapiens
cttcgagtcgttcttgctcttcgagggcgagaagaagtcaaggtcagcatctcctcgacgatcaagatctatctctcttcgta

SEQ ID NO: 781413 - DNA, 100 bp, Homo sapiens
agaagacagagggttttcttttgagaagttggctcaggagggccgtgctccggtggaatgcccatctctgggcccagtgccccatcgccctccatttgaa

SEQ ID NO: 781414 - DNA, 82 bp, Homo sapiens
cggggcacaaagagccctctgcactagcgccgcaggaccgcggacccgaggagcggttggttccccgaggcgtacgtgaagg

SEQ ID NO: 781415 - DNA, 98 bp, Homo sapiens
cctagaggacctgtgcaacaacctcttgaggatcgaatcttcactcccgctgtctcagcagtctacagcacgcttggtgctaacagtggtttgcacat

SEQ ID NO: 781416 - DNA, 50 bp, Homo sapiens
atagaagatgccaccgagaagctcaagacagggaagttggacccccacta

SEQ ID NO: 781417 - DNA, 100 bp, Homo sapiens
ctctgaaacactaccactgctggcgctgaccttcatcacagacaacagcctggtggcagcggcaccacctacctatgatgccgtggtacagatggagtac

SEQ ID NO: 781418 - DNA, 75 bp, Homo sapiens
agggtggaaaaagcagggaggttatgaggcttaataaagaaggtgaatctggattgggaaagtcgacattaatca

SEQ ID NO: 781419 - DNA, 96 bp, Homo sapiens
cgcagctggatgtaccgcatgtgatcactctgggactcgtggggctgcagcaccggagattacctggggcaattgatgttatcggtcagactataa

SEQ ID NO: 781420 - DNA, 49 bp, Homo sapiens
tatttagcaaggattcaaggctttcagggaaatgatcttcattggttag

SEQ ID NO: 781421 - DNA, 120 bp, Homo sapiens
gaagatccggcgcggggcacaggatccggagctggagcccccagttggaatcgaagcctcttaaaatggcagatgacttggacttcgagacaggagatgcaggggcctcagccaccttcc

SEQ ID NO: 781422 - DNA, 100 bp, Homo sapiens
cttttccggtagaaatcacccgccgagatgaccttgttgaacgaccttgtccacaggatgaaatgtccgagtcaggccagtcctcggcggccgccacacc

SEQ ID NO: 781423 - DNA, 82 bp, Homo sapiens
gtcgccctcggggtggcagttcccgttaaccttagccacaaagtcaaaggctctgacgcccgctctgcggcttcggtgtttg

SEQ ID NO: 781424 - DNA, 101 bp, Homo sapiens
gctgtagagaatgagcatatggtcacttcctcctaacccatctgctgctagagaaactaaaggaatcagccccatcaaggatagtaaatgtgtcttccctc

SEQ ID NO: 781425 - DNA, 100 bp, Homo sapiens
gccgggagtcgctgagcggccaggccgtgcgccggcctttggtcgcctccgtgggcctcaatgtttgtgaatagcacaatggaagaagctggactttgtg

SEQ ID NO: 781426 - DNA, 74 bp, Homo sapiens
ggagaacaccttgcccactcccatggtcctgcagagatgtatcggaacagtacaacatctaaagagtaaatttg

SEQ ID NO: 781427 - DNA, 95 bp, Homo sapiens
ttaaccagctaaagtttgctcgaagccttcagtccgttgcagaggtagttagaaacaaacctgtggcaaggcaggctcctggcaaacggaagtgc

SEQ ID NO: 781428 - DNA, 71 bp, Homo sapiens
cccactgttccccgtgcagacaaaatacatggatgtggtcaaggcccgaaggagaaccaccactcagatgg

SEQ ID NO: 781429 - DNA, 83 bp, Homo sapiens
atgcaattacacagttttatccagatgatgaagttacagcaataatcgcttccttcagccagtgaaactgaaattgcattctt

SEQ ID NO: 781430 - DNA, 100 bp, Homo sapiens
aaattaaagaagatgatgctccaagaacaatagcttgccctcataaaatgtatccagttaaagcaggcaatagatgaaaataaaaatgctcttcaaaaat

SEQ ID NO: 781431 - DNA, 100 bp, Homo sapiens
aggccacagcccggactccatcgactcccccggctcttagactaattgacgagatgcctgaggctgccgtgaaatcaacagccaacaaataccaagtctt

SEQ ID NO: 781432 - DNA, 96 bp, Homo sapiens
tggattctaaggcaacacttccttgaagaaacaagcttacaggtatggcgactacccgaagctccctgaccgctcacagcatgagagagatccatg

SEQ ID NO: 781433 - DNA, 100 bp, Homo sapiens
ctcgataacagattcctcaaccggcccacccgccagccagccagcgccttcatcctggggctgcgatgcgaatgctgatgtcttaaaggcgatggtagca

SEQ ID NO: 781434 - DNA, 78 bp, Homo sapiens
ttgcattggatgcaatccattccatgggttttattcacagtgagggccccaaggctgttgcagctcctcgacctgatc

SEQ ID NO: 781435 - DNA, 100 bp, Homo sapiens
tcaccatcagggacgtgctggccgtgatcaaacactgcaaggaccccctccggctcaagtgtgtcaagcaagtgaactccggagacggcattgactacag

SEQ ID NO: 781436 - DNA, 82 bp, Homo sapiens
cggccgatgaagtgcagaggtttttttctggctgcagagactgcaagtctggaagaacagctgcaaggatggggagaagtga

SEQ ID NO: 781437 - DNA, 75 bp, Homo sapiens
tcctggaggaatccgagaagagcagagcggagggagccccagacacggatttccctagagattatgacgttgcag

SEQ ID NO: 781438 - DNA, 82 bp, Homo sapiens
gagacgcggcgcgcacgctccggcctgcggactggcattgcggactgacctccagggagaggcccagatctgatctgcagag

SEQ ID NO: 781439 - DNA, 75 bp, Homo sapiens
cgtgcagacatctacaaccttcgatctcctgacgagaaaatggctttgtaaagaagtttgaacctaaatctggct

SEQ ID NO: 781440 - DNA, 50 bp, Homo sapiens
ctctttttctttgtaccacttactgaggtgtacgaagccatcgacagcag

SEQ ID NO: 781441 - DNA, 90 bp, Homo sapiens
gccatgcaggtttctttctaagagaaaacgagtgtgtctcctgtagtaatacaattatcagaatccttggaattatggacaatattatcc

SEQ ID NO: 781442 - DNA, 83 bp, Homo sapiens
gttgctgatcgcctgggtggttgttggcgtgtccctgcagcgaaggatcctgtggacatcctcatcatggatgatgacgacgt

SEQ ID NO: 781443 - DNA, 75 bp, Homo sapiens
ccggaagcagcacatggtgaatgccacacccttcaagattgctcgaggccagacagtgtccagtgctccagccta

SEQ ID NO: 781444 - DNA, 75 bp, Homo sapiens
cctcgcgccggctatggccgtgccctggggctgagccctcaggggaacgcccttttgcttgtgactggcagggct

SEQ ID NO: 781445 - DNA, 98 bp, Homo sapiens
gcaaatcactcagagtgcattattagcagaagccagaagtgattattctgaagctgctaagcagtatgatgaggctcaaggactatcagcggcgcctg

SEQ ID NO: 781446 - DNA, 100 bp, Homo sapiens
ggagatcgtctctctcatcgaggcccaaaccgccaaggattttttatcaagcagaaatgcatcgaacaacgagaatcaagatcactgagctaaatcccca

SEQ ID NO: 781447 - DNA, 100 bp, Homo sapiens
gtgatcaaacactgcaaggaccccctccggctcaagtgtgtcaagcaagactgggctggcttagatgaagatgaagatgcacatgtctgggaggataatt

SEQ ID NO: 781448 - DNA, 98 bp, Homo sapiens
gttggagccgtctgcaaagtgtccccggcaagaaggattaaagcaaggagagccaatcatgactggcaaaacacagaccagcaacgtcaccaataaga

SEQ ID NO: 781449 - DNA, 100 bp, Homo sapiens
atgtgcgggttcaggaggtacccaaactgaaggtatgtgccatcacaagcagatgtggcagtatttgaagccgtgtccagcccaccgcctgccgacttgt

SEQ ID NO: 781450 - DNA, 74 bp, Homo sapiens
gggatacattttcggtggcgttcattaagaaggaacttgtaatagctggcatcgttgagaatgaatggaaaaga

SEQ ID NO: 781451 - DNA, 90 bp, Homo sapiens
ggacagaaatggcagcacaagcacatcacttacagcttgtggagagactccagagcaaatacgagcaccaagtggcataatcacaagccc

SEQ ID NO: 781452 - DNA, 100 bp, Homo sapiens
tgcggagccggaggaggaggggagaggcctggaggacaccaacatggtcacctcatcatctcaaggaggagcattcccctgggctaaggcactggggccg

SEQ ID NO: 781453 - DNA, 80 bp, Homo sapiens
aagtcgagtatctggtgaagtggaaaggatggcccccaaaaggctgggaggcggcagaatgcagccagaggagggcacag

SEQ ID NO: 781454 - DNA, 100 bp, Homo sapiens
cgggtaccatggacgtgggcgaacttctgagctaccaggacgggctctacgagtgcattctctgtgcctgctgtagcaccagctgccccagctactggtg

SEQ ID NO: 781455 - DNA, 75 bp, Homo sapiens
ttggcctcatactctgttatagataaacaaggtcctgggaactccaacaagggagcaaatcagagaaatgaaccc

SEQ ID NO: 781456 - DNA, 100 bp, Homo sapiens
gccgcagctggtggcctcagtcatcgagagagcagtatggtatgaccccatctactatccaacctcatggcagttggatccaacagaagggccaaatcga

SEQ ID NO: 781457 - DNA, 100 bp, Homo sapiens
gatgacaaccgtacccggctgtaccggcagatcctcaggggcaagtacagttactctggggagcatgttcagctcttgacacaaatccaccttcttgcca

SEQ ID NO: 781458 - DNA, 80 bp, Homo sapiens
aaactcgaagaacagctgtggaaagaagttgcaaaacactggggactggtttggctgaaagacaaagaagcaacacattg

SEQ ID NO: 781459 - DNA, 100 bp, Homo sapiens
gcctgatggctccacgcatttcccttcgtgtgatttcctaaataaaaaccaagagctgttgcaagatttgtcagaagtgaatgacgaaaacactcagttg

SEQ ID NO: 781460 - DNA, 96 bp, Homo sapiens
tcggcagcatggagggccccgacgatagcgaggtcacctttgcattgcactcaggatgcagaaagcctcagtgttgctcttcctggcctgggtctg

SEQ ID NO: 781461 - DNA, 101 bp, Homo sapiens
agtgctcaagagcctcattatctaccacccgagatgccccaagaggaggcctaccagaaactggccagcgagaccctggaggagctggactggtgtctgga

SEQ ID NO: 781462 - DNA, 88 bp, Homo sapiens
tgatttaccacgtattgatgtgagcaagcgggaaccacctccagtaaaacaggtggacccaagtggagagattgtggaactggcgaaa

SEQ ID NO: 781463 - DNA, 100 bp, Homo sapiens
ttcgtccgcggagatctctctcatctcgctcggctgcgggaaatcgggctgaagcgactgagtccgcgatggaggattattgcatcgagcttttagtgtc

SEQ ID NO: 781464 - DNA, 98 bp, Homo sapiens
ctcaagaagatctgccgagagtgcaagtatgacctgcctccctatgctgccaacattgtggctgtgtcccaggccgctgtgttcatcgacttcctcat

SEQ ID NO: 781465 - DNA, 100 bp, Homo sapiens
ggtttgggcgaccaggaggtgccggtggccgcgctcggacccgacagcaccagttgcccttgaagcagaaaacagaggtgaaatgaaactagctctccag

SEQ ID NO: 781466 - DNA, 90 bp, Homo sapiens
cacagccaagccatcagtacccagtgctgacagtgagacacccctgacccaggtgacagacggttccttggtggcattggtgcccaaaca

SEQ ID NO: 781467 - DNA, 100 bp, Homo sapiens
ccacacagccatcattctagtgacaagcaacacatacacaaccataaaaattaacttccaggtgaaaccagtgggaacgaaagtgatgccgagtatctgc

SEQ ID NO: 781468 - DNA, 90 bp, Homo sapiens
gtgctgcagtccacccagaaggccctgcagaagcataaaggaaagaccacagcaagattctttcattcgtctcctcctagcctgggggac

SEQ ID NO: 781469 - DNA, 50 bp, Homo sapiens
cttgcaacagtggccgcacgcataggacagtgatggtgacaaaagcgatg

SEQ ID NO: 781470 - DNA, 82 bp, Homo sapiens
ccggccgcccagacgctgcccgcgggcccggccacggcggagccaagtgtactaatggtcacttgatgtgcgctggctgttt

SEQ ID NO: 781471 - DNA, 75 bp, Homo sapiens
cgtcaccttaccttaaaccttttaagcaaggaaattgaactaagaaatggagagtgcaagcatctcttggcagtt

SEQ ID NO: 781472 - DNA, 51 bp, Homo sapiens
gtggctgccatgcgccggatacgggttgacctgacagttcaagaaaaggag

SEQ ID NO: 781473 - DNA, 137 bp, Homo sapiens
tgagctccaggagttcgtctcttacgtctgcggaagtgcagctgcctcagttcttagcgcaggaacggtaatggtaggagagagagagcagggattggggaatgctgcccccccaaagtttctgtggctgcgcttag

SEQ ID NO: 781474 - DNA, 83 bp, Homo sapiens
acaatgaaattgaattgaagaaaattgcacgtaatcacccaaatgccaagacccatggatgaaggaccagatcttgatctagg

SEQ ID NO: 781475 - DNA, 100 bp, Homo sapiens
cttgaaacacaaatggtttttggtcagcccaaggccaaccccactgtcactctgttcccgccctcctctgaggagctccaagccaacaaggccacactag

SEQ ID NO: 781476 - DNA, 100 bp, Homo sapiens
agctgcagctggagcaaatgcataaacgttttgaacaggaaatcaacgcatttggctttatgtcccgagttgccctacaagcagagaagatgaatcatca

SEQ ID NO: 781477 - DNA, 75 bp, Homo sapiens
agattccagcttcggaacaagagaccctggacccgaagattagtacaagtctgcctgttctggacctcatcgatg

SEQ ID NO: 781478 - DNA, 75 bp, Homo sapiens
ggcgactggacttacgaggagcagtttaagcaggcggtgcgtctttctacgtgaataggattttgtggctggcca

SEQ ID NO: 781479 - DNA, 100 bp, Homo sapiens
ggctggccctagcgttggcggaatttgcagtattgcctcatcattccgaaggaggtatatcgaattccaaagaaaagtcaaactgaaaaggaaaacacaa

SEQ ID NO: 781480 - DNA, 75 bp, Homo sapiens
atgaccacactccaggaatgccagtgcatcttttgcacagctggcattcttagcagggttacagaatctgttaag

SEQ ID NO: 781481 - DNA, 101 bp, Homo sapiens
tgaggctcgcgagcctccttcgccgcgccccacttgctcgtgcactttacacacatgagattgctcatttagaaagtggatgtgtgggataacatgtccaa

SEQ ID NO: 781482 - DNA, 90 bp, Homo sapiens
ctgacccaggggctggagcgaatcccagaccagctcggctacctggtactgagtgaagagactcttgaagacaactctgaaaagtgggct

SEQ ID NO: 781483 - DNA, 75 bp, Homo sapiens
ccggggctcctcttgtcggcgaccagagctcgtggtctcggaaagagggtcgtggtcccgcacggatgcgcttgt

SEQ ID NO: 781484 - DNA, 138 bp, Homo sapiens
cctggggcaggtggacgcccagcttgtgccctacatcatcgacctgcagtccatgcaccagtttcgccaggacacagtcctctctaataaatagtgacattatctttgtgaagttgcatgccccatgggaagtccttg

SEQ ID NO: 781485 - DNA, 97 bp, Homo sapiens
gcaagttgacagatgctagttggtataccgtgggtgggaaagcagtgccactctccgcttcacagatgccccctgccaagatgtcagtgatgctgcc

SEQ ID NO: 781486 - DNA, 74 bp, Homo sapiens
gactcagaatcgaatctcttctccctccccttcttgtttgcctgagaatacagatcaacccacagaacaaagcg

SEQ ID NO: 781487 - DNA, 100 bp, Homo sapiens
ccggcttcccccgcgcccaccggcacaagctctgctgcctgcgccaggagctggtggacgccttcgtggagcacagtccctgaagaggaaggagaaggaa

SEQ ID NO: 781488 - DNA, 75 bp, Homo sapiens
aaactggatgtctcatttcaaagagctgtcaccactgactaaagaagagaaaactgcggcagagcaattcaaatt

SEQ ID NO: 781489 - DNA, 100 bp, Homo sapiens
tcaggcttcacgttggagcctcttgattgtgagtgttgcggagataggaacatgggagagaaacaatctgggtaacatgaaagtgatgctggttgctaag

SEQ ID NO: 781490 - DNA, 83 bp, Homo sapiens
atggggttgtgatggcccaggttcttcaaaagatacaatgcagatcttcgtgaagactctgactggtaagaccatcaccctcg

SEQ ID NO: 781491 - DNA, 101 bp, Homo sapiens
tggaaaggccagagctggagacctagcacccagaagatgagaccgcaattcgagaatcaaagggccgggagcgatggcgctggggctgtggagatccggag

SEQ ID NO: 781492 - DNA, 82 bp, Homo sapiens
ctctatgacgtcatcttgtacgggtttggtgcacctcgatttggaggaagtagggcagggcccttatctggaaagaagtttg

SEQ ID NO: 781493 - DNA, 75 bp, Homo sapiens
acaaattttgctactgtcagatggattgactatggaaaagttgccaaattggtctcggcgcggaagatggccggc

SEQ ID NO: 781494 - DNA, 101 bp, Homo sapiens
ctcctcctcctcttcctcctcatcctcctcatcttcttcatcctcctcctcctcagcaatggctgccatccggaagaaactggtgattgttggtgatggag

SEQ ID NO: 781495 - DNA, 100 bp, Homo sapiens
agaagatgatctacaattactaattaaagctgtgaatctgttccctgctggaacaaattcaagaaatctctcagtgcaagtctcagaagctaacctaatt

SEQ ID NO: 781496 - DNA, 75 bp, Homo sapiens
ttgaacatgccttcatcctctataacaagtatatcacgtatatctttgcaaagaatctttttgaaaatggttccc

SEQ ID NO: 781497 - DNA, 103 bp, Homo sapiens
aagtttgatttgccctatgggatgagaacatcaggaattacatgaatgacagtcttcgaaccaatgtgtttgttcgatttcaaccagagactatagcatgtgc

SEQ ID NO: 781498 - DNA, 100 bp, Homo sapiens
cagtatctcagtcctccagtgtttggatattcaggttacttacagcaagaaaacctcatttctacctgccagacttttattttggaaagttcagatttaa

SEQ ID NO: 781499 - DNA, 91 bp, Homo sapiens
gccgaattcctgtgccacctcctcctttagaaaactgatcttaatacagcttctgggctggctggctgagaaactacctactcttcgttcc

SEQ ID NO: 781500 - DNA, 83 bp, Homo sapiens
caatgtttccacaatggaaccaattgttttacagtctgttccgcatgatcgttataataagacatatctgaagagatggatta

SEQ ID NO: 781501 - DNA, 52 bp, Homo sapiens
agcacagaaatggactatcaaatggtatttgaaataccttaccaagaaatac

SEQ ID NO: 781502 - DNA, 100 bp, Homo sapiens
gccactgtgtacaagatatgtgcctggatgcagctcacctccggtatctcagatgaagacatcatcaacattactcttcctactggagtccccattcttc

SEQ ID NO: 781503 - DNA, 89 bp, Homo sapiens
ccgggggctcccaggggagcgtgcgcggaacctccaggcccagcaggttatttggaaatagcggtgcttgcagcgcttgcggacagtcg

SEQ ID NO: 781504 - DNA, 100 bp, Homo sapiens
gaaaccggaacgaatcagtccgggacacgaggccatggttgcatcacccacagacacaagtaattttgacagtttccctgaggacaacgatgaaccacca

SEQ ID NO: 781505 - DNA, 80 bp, Homo sapiens
ctgctattctccgagcttcgcaatgctcgaggccacagtcatgccctaccttcaggtgttatcagaattccgagaaggag

SEQ ID NO: 781506 - DNA, 75 bp, Homo sapiens
taccatttgatgatgataatgtaatggctttatacaagaagattatggtccgggcccaccagctggtcttgccac

SEQ ID NO: 781507 - DNA, 98 bp, Homo sapiens
ccaggagaggctgcggagccgcagccgcccagaccgcgcagcgcgggaggcaggttccgcacggatgaacgtgaagccagagaaaatgtgaagagaga

SEQ ID NO: 781508 - DNA, 100 bp, Homo sapiens
cctgcatatgattggctctttagctgaaatacttctgaagacaaggtctttactaggtgtatttgaagaagatgccacagctatttccaactatatgaac

SEQ ID NO: 781509 - DNA, 75 bp, Homo sapiens
aagatggcgtgcttgttggagaccccaatccgcatgagcgtcctttcggttcatgtcagggctggtctttttcat

SEQ ID NO: 781510 - DNA, 87 bp, Homo sapiens
gaagaaagaagctgctgaaaacagaagttcacctgcacatcttgttttccctaacatcaagaatgatataccagtatattcagagtc

SEQ ID NO: 781511 - DNA, 82 bp, Homo sapiens
cgactcgcttctttcggttctacctgggagaatccaccgccatccgccaccatggagaactacgatgacccgcacaaaaccc

SEQ ID NO: 781512 - DNA, 74 bp, Homo sapiens
ccggcagcgggggcagtcagagcggagccaagatgcgaatgggtgcttcaggcaccgtgtacacagcaatggat

SEQ ID NO: 781513 - DNA, 95 bp, Homo sapiens
ggaggacaccgagtactcttatgcagtccccatggcatcagaacacaccatgatggctgtgacctaagaccctcaggaagccccggggtcatggc

SEQ ID NO: 781514 - DNA, 75 bp, Homo sapiens
ctatcctggttttaatatatctactcccagaggaattccagacgttctgcggcatgaggaatttgaagaaggctg

SEQ ID NO: 781515 - DNA, 101 bp, Homo sapiens
gcggaactggtgtaccctggtggacgtgcacccagaggaccaggcggcgctgcagcatatcgtgagtgatgagatctgtgtgcaggtgactgacctttacc

SEQ ID NO: 781516 - DNA, 82 bp, Homo sapiens
cttgttctgtggagaataacggctgcacctggagattgacgcagagtgggcggcggtggtgtttccagagtgtggattcttt

SEQ ID NO: 781517 - DNA, 83 bp, Homo sapiens
cgatccgccgcccgtccacacccgccgccagccgcggcgagtcctttgcacatgttggcaacacacgcatccgcatcggcctc

SEQ ID NO: 781518 - DNA, 100 bp, Homo sapiens
aagagaaacctgagaaaggaagaaaagatcacgttgatgaactcgagcctgagcgacataagatgaaggatttgggggcagagcacttggcaggtcatga

SEQ ID NO: 781519 - DNA, 100 bp, Homo sapiens
tgcatgtttgcgaggaagccgccgggcgccgcgcctttgggattctccttttacaaatgcaggaatgggatctaatctaaatctgttaggtgaaattgag

SEQ ID NO: 781520 - DNA, 75 bp, Homo sapiens
ccaagatgtagctaatgaccgtggttcccactgaggtggataagattgtggaccagctgcagcagttaatgcagg

SEQ ID NO: 781521 - DNA, 100 bp, Homo sapiens
acccaatcttgatgctttaatacagaaccagcatagagagtagacttgacacccctcaactggatatatttagagatgttttcttccataaggagacact

SEQ ID NO: 781522 - DNA, 100 bp, Homo sapiens
acaccttttccacagggaattgagttgcaggacagaaggagcaagctgtggaatggtataagaaaggtattgaagaactggaaaaaggaatagctgttat

SEQ ID NO: 781523 - DNA, 80 bp, Homo sapiens
cctaaacatgtggaatcccaatgccgatggtagtgaaaacctttatggatatggatcaggactcagaagatgaaaaacag

SEQ ID NO: 781524 - DNA, 82 bp, Homo sapiens
tggagaacaagcccatcgtcacctttccagtgtctcgccccatcctcaccctcagggttcccagggcccaggctgtggtggg

SEQ ID NO: 781525 - DNA, 83 bp, Homo sapiens
cccagctcgcccagcgtccgccgcgcctcggccaagatgtgtatatctcatgattgatatggagaaactagtcatgggccaaa

SEQ ID NO: 781526 - DNA, 100 bp, Homo sapiens
gtcagtcattaatgaccctatgtcaaaatgcagatcttcgtgaaaacccttaccggcaagaccatcacccttgaggtggagcccagtgacaccatcgaaa

SEQ ID NO: 781527 - DNA, 51 bp, Homo sapiens
cctagcctatcagctggggctggatgagtgacccccgcagcaaacacaagt

SEQ ID NO: 781528 - DNA, 75 bp, Homo sapiens
agcctcccgagtggctgggattacagaagaatggctacgtgactgtcagtgagatcaaagccagtcttaaatggg

SEQ ID NO: 781529 - DNA, 121 bp, Homo sapiens
ccgttttggtgcccagcagctataccagccaccctgcccccaagaaggaagtcatcatgggccggcctggaacagggggggccctcagcctcttggccttgaacgggctgttcatcttgat

SEQ ID NO: 781530 - DNA, 98 bp, Homo sapiens
gcatcgcctactacatgtactcggggggcggctctgcgctggccgggggcgcgggcggcggcgccggcaggaaggatctgagtgatgagacgtgtccc

SEQ ID NO: 781531 - DNA, 90 bp, Homo sapiens
agaaaattgtgaactaaggccccctgcccccttttcctggtgcatgtgaagttatcaaaaacaggaaatctactttcttcaatgtgttaa

SEQ ID NO: 781532 - DNA, 80 bp, Homo sapiens
atttaaacaaagagtctgtgagcccataatgctcacggagttcatgatcaagtgttgcccacaccaaatgcttcatccag

SEQ ID NO: 781533 - DNA, 51 bp, Homo sapiens
caggccttaaggagaaagtttcagatggttccaatccctatacattgaagc

SEQ ID NO: 781534 - DNA, 83 bp, Homo sapiens
gcctgaacttcggagtcagatgcagggacccaggacaagggctcgcctaggaactgtggctgcaccatctgtcttcatcttcc

SEQ ID NO: 781535 - DNA, 89 bp, Homo sapiens
aacgctggggccaagtcagcgaggcctacgtgagcctcctaggctgcaagatcaaggccctgcgggccaagacaaacacctacatcaag

SEQ ID NO: 781536 - DNA, 75 bp, Homo sapiens
ggcgccgccaataaccacggagccggcagcggcgcgggaggccgtgcgggtttcaagtgccccatttgctccaag

SEQ ID NO: 781537 - DNA, 100 bp, Homo sapiens
cacaagaagggctttgggggcagtgtttttccagaaaggaggagtcaaggaagcccttagtgaacgagaactcttcaatgctgtttcaggcttaaacatc

SEQ ID NO: 781538 - DNA, 83 bp, Homo sapiens
aggcggcagcggcgggcctgaggcgaaggagcggccgggagcccgccgcgctggtagcggaaggttgtgcaggaccagcgttc

SEQ ID NO: 781539 - DNA, 82 bp, Homo sapiens
aaagcaccagtaaaatatggtgaactcattgtcttagggtattccaatgctgctagagttcttggagcaaaatattgccaag

SEQ ID NO: 781540 - DNA, 83 bp, Homo sapiens
gatttatgtaatgtcaactttactgagaattttccacctcctgacacaacaccactcatgcttggtccatcctactagatcgc

SEQ ID NO: 781541 - DNA, 101 bp, Homo sapiens
gacctgggcaagaggaacagacacaggaaaattgcctaagaattatgacccaaaagttaccccagatccagaaagatggctgccaatgcgagaacgttctt

SEQ ID NO: 781542 - DNA, 75 bp, Homo sapiens
gactctggaagcagcagtttatctgatatctatcaggtctaagagtgtaaccagttccagtagcagtagcagtga

SEQ ID NO: 781543 - DNA, 75 bp, Homo sapiens
cgggccgggaggggacggccgccggagccgcgaggccaaagagcgcctgctcgctgtgcccccgggttatgacga

SEQ ID NO: 781544 - DNA, 98 bp, Homo sapiens
tggatcctttgataatgaaggcattgctatttttgcacttcagttcacatactatttatggactgtcagcatcaataaggccattaatacgcaggaag

SEQ ID NO: 781545 - DNA, 50 bp, Homo sapiens
aactgctttacaacaggccaggcactgaaactcttatcactactattgat

SEQ ID NO: 781546 - DNA, 95 bp, Homo sapiens
acaaggatgccatcacacaagcattgtttctacgagaaaagaacctgctagttactagctccaattgattggtaacagaagatgaagacaacagc

SEQ ID NO: 781547 - DNA, 86 bp, Homo sapiens
gtcagcagcgaggaaggaaacagcggtgtctgatgatttgtgagcctcaagtgactactctgtggaatcatctgtccttgcctttg

SEQ ID NO: 781548 - DNA, 74 bp, Homo sapiens
tagcaaaggtgctaatccagtggaaatcaggagaggtcagaagagatcaattctacagaaatttccagtggttc

SEQ ID NO: 781549 - DNA, 98 bp, Homo sapiens
tcctccatcattggactgcagtcccaccagataacaatgaagatggtgccaaaactgctttctcctttggttaaagattgggctcccaaagcatttat

SEQ ID NO: 781550 - DNA, 83 bp, Homo sapiens
agcatccccgaggaggaagacgaatcgttaaacatcttaggtcaggtctcggcgcggaagatggccggcggcgtggacggccc

SEQ ID NO: 781551 - DNA, 98 bp, Homo sapiens
cgtgtcctgcgttccgggagcgccaacccctccaggccttcctggatgctctgcagaaccaggctgaggccagcagcaagatcatcggccagtttgga

SEQ ID NO: 781552 - DNA, 82 bp, Homo sapiens
cttcttcctggacatgaccaactggtgtcgtgaaaactacccctaaaagccaaaatgggaaaggaaaagactcatatcaaca

SEQ ID NO: 781553 - DNA, 74 bp, Homo sapiens
cgaagaacagctgtggaaagaagttgcaaaacactgggcctcatgtggaatgcagcctctgagaaaagcacttc

SEQ ID NO: 781554 - DNA, 96 bp, Homo sapiens
ccctggctctcacaggagctctctgcctccaacaggtccagcctttcctgccaaggtggctggctgagcctaactgtgtcagaaggaatgtcaccg

SEQ ID NO: 781555 - DNA, 74 bp, Homo sapiens
cgctgccgaggagaacccagcggtcctcctccgcctcctcctctctgcatgcgcgtcagagcccgtgccaagaa

SEQ ID NO: 781556 - DNA, 80 bp, Homo sapiens
acgcataccccagcgcccggcagttatgtattctccgctctgtctcacccaggtgagaagccctaccactgcaactggga

SEQ ID NO: 781557 - DNA, 98 bp, Homo sapiens
atagagatgtttcgaaatatgcagaatgcagaaatcatcagaaaaatgactgaagaatttgatgaggaccctgatgcttggtgtgacctgagtaaatt

SEQ ID NO: 781558 - DNA, 96 bp, Homo sapiens
ctccttgcccgtgaccgtcgctagaactcagttgtgcgttgcggccagtcgccactgctgttgaaatcacaaagattagacacctttttagatagg

SEQ ID NO: 781559 - DNA, 76 bp, Homo sapiens
gagcaggtgcagagcactgcgctgtcagcgatagcccagtggatggccattccagtgaatcatcctctacaatttc

SEQ ID NO: 781560 - DNA, 75 bp, Homo sapiens
gtgcatgatgtgcgatgtgcggaagggcacctccacccgtttgcattgggtgaatgaccttcctagagcacttga

SEQ ID NO: 781561 - DNA, 83 bp, Homo sapiens
gggagacggacgcgtttggcaacagcgagggcaaagagctggtggcctcaggtgaaaacagcatctggaatcaagagacccat

SEQ ID NO: 781562 - DNA, 86 bp, Homo sapiens
ccgagaccgcggccgggaccgagggagaaccaggtgcatcagcgcattgcggagctgaggaaagcaggtctgtggtcccagaggcg

SEQ ID NO: 781563 - DNA, 75 bp, Homo sapiens
ttcccaagagcagcggaaaatgatccagtcacaggtggagccgccaccaaaatgcagattttcgtgaaaaccctt

SEQ ID NO: 781564 - DNA, 50 bp, Homo sapiens
gaggaggagttccagaagcatgaagatactccatcttctaaaccaacact

SEQ ID NO: 781565 - DNA, 74 bp, Homo sapiens
catccattatccttggcctaatttggacaattatcctgcactttcatatggaatcgccacttatatatgtttca

SEQ ID NO: 781566 - DNA, 80 bp, Homo sapiens
atgtgaaaactctgttactgaagatgcttgtgaccacaccagaaaaatgggatgtagtgacaagaaagagtgttggggat

SEQ ID NO: 781567 - DNA, 82 bp, Homo sapiens
ataacactaaacagtggaacactacagacatttgagattcttcccagctggctttatgtgctggggcagaagagatccgata

SEQ ID NO: 781568 - DNA, 50 bp, Homo sapiens
ctggcctgggcgctccggtggcggcggagttctgggaggtgatcagtgat

SEQ ID NO: 781569 - DNA, 90 bp, Homo sapiens
tcaccgctggaagaggctggtggacgaccggtggctgtggcgacatgtcgacctgacgctctacacggttgtggcagcactgcctgaagg

SEQ ID NO: 781570 - DNA, 74 bp, Homo sapiens
gcatcactcccagctgcgcaaagcttgcgaggtggcgttagagatcctgcatattttgatgaaaattggctaaa

SEQ ID NO: 781571 - DNA, 75 bp, Homo sapiens
tcttaggcccatattcatctgctatgaaaagcaaggcagactgccagattcacttacagccccagctaattccac

SEQ ID NO: 781572 - DNA, 100 bp, Homo sapiens
atcctgaaagccatgcagcgggtgcacttagaactacctcccagctccaacatagtgcaaactccagaagattttaacttgctcaagtcaagcaatttta

SEQ ID NO: 781573 - DNA, 75 bp, Homo sapiens
aagaagtccaaggatggttctgaggacaagttctacagccacaagaaaagtggctgtgttactgcaacgtgccac

SEQ ID NO: 781574 - DNA, 75 bp, Homo sapiens
cggattcatttagagctgcggaacaggacgccctctgatacggagatgcggctgcaggaccagcaactggccaga

SEQ ID NO: 781575 - DNA, 76 bp, Homo sapiens
ctttgggaaagccactcgaaaagatctgaagaggaatgattatacgcctgataaaattatatttcctcaggatgag

SEQ ID NO: 781576 - DNA, 100 bp, Homo sapiens
ccgtggactccgtggtcagcctgctggacggcgtggtggagaagctcagcgtcctcaagaggaagtttgtcgctgatggcatcttcaaagctgaactgaa

SEQ ID NO: 781577 - DNA, 100 bp, Homo sapiens
ggaggcagccaagctcatggcctgccactgcgtgcttctgggaagtcatcagtgatgagcatggcatcgaccccagcggcaactacgtgggcgactcgga

SEQ ID NO: 781578 - DNA, 100 bp, Homo sapiens
gcccgctgtgccacctggtttcaagaccctacccgcttcactggcaccatggtgatggcccgctccctctccccacccccggagctggaagaaagggatg

SEQ ID NO: 781579 - DNA, 119 bp, Homo sapiens
tacagagcacccgaggtcatccttggcatgggctacaaggaaaacgtgctgaggaatgtaaacaagtttgctgggccttgcgagacttcaccaggttgtttcgatagctcacactcctg

SEQ ID NO: 781580 - DNA, 75 bp, Homo sapiens
ctgcacgagaccgggctggccatgatctatggattttttatcaagcagaaatgcatcgaacaacgagaatcaaga

SEQ ID NO: 781581 - DNA, 90 bp, Homo sapiens
tgcatattacatggagtccggacccaggaagaagctgaccagagcagataatcagctcaacactgtcgtcaccatcaagtaatgccccag

SEQ ID NO: 781582 - DNA, 87 bp, Homo sapiens
tgcgtcagaagtcactcgcagtcccgtcagcccagattcccctcttcccgcggcctcgccatggcgacccacggacagacttgcgcg

SEQ ID NO: 781583 - DNA, 100 bp, Homo sapiens
ctcctgaatagctggaattacagaaagcataacccctactgtagaactaaatgcactgtgcatgaaacttggaaaaaaaccaatgtataagcctgttgac

SEQ ID NO: 781584 - DNA, 88 bp, Homo sapiens
ccggacccaaagtgccatgtctttaatgttccatgcaggtgatgaacaagacccggcgcatcatggagcagggcggggcgcacttcat

SEQ ID NO: 781585 - DNA, 82 bp, Homo sapiens
cttcgtgctggtggcgttcgggccgcacccgcgcggtgtcgtgaaaactacccctaaaagccaaaatgggaaaggaaaagac

SEQ ID NO: 781586 - DNA, 90 bp, Homo sapiens
atgatttcagctgcaatggcagagcttacaagaccctatgaaaaaattagttgagaaagaagagaagaagaaaatcaaccagcaggaaag

SEQ ID NO: 781587 - DNA, 101 bp, Homo sapiens
ggccgagcaggctgagcgatacgacggctacgacttcccggccgtgctgcgctggttcgcggagcgcgtggacctcatcatcctgctctttgatgcgcaca

SEQ ID NO: 781588 - DNA, 100 bp, Homo sapiens
ccaggtccgacccgcgaacccctctgggatccccgccgctctgtctacaacccgagtaagactttgaccccgacgcaggcttcagtgattgccgcggatc

SEQ ID NO: 781589 - DNA, 100 bp, Homo sapiens
gcctgctctgctggtcttcatcctcatattcctggagtctcagatcaccacaggatgctgtgttcctgaagaatgaggctcagcgcatggagtacttgtt

SEQ ID NO: 781590 - DNA, 75 bp, Homo sapiens
tcctggccgatgccacggagcaagtgggccagacagccgctcaggaagcaatcttgcatgcgtctggaaatggca

SEQ ID NO: 781591 - DNA, 106 bp, Homo sapiens
ctgttttatactgcttccatatttacaaatcttgtggaagaagaatgaagttgctgattatgaagctacaacattttccatcttctataacaacactctgttcctg

SEQ ID NO: 781592 - DNA, 75 bp, Homo sapiens
acatcctggaagctgggaaatggatcagttccatgacaagaccccttatacgattatgtttggtccagataaatg

SEQ ID NO: 781593 - DNA, 83 bp, Homo sapiens
ccgctctgctgtgggcgctgctggcgctctggctgtgctgcgcgacccccgcgcatgatggagaaggaggagacaacccggga

SEQ ID NO: 781594 - DNA, 100 bp, Homo sapiens
ggaagacatacaccatgggggaggccagtgtgggtcctggtgcttgatggtcgaggccatctcctgggccgcctggcggccatcgtggctaaacaggtac

SEQ ID NO: 781595 - DNA, 98 bp, Homo sapiens
ggcaaggtgctgctggacgacacggtgccgctgacagcagccatcgaggcgagccagagcctgcagtcccacacgggcagcttgtgcagctggaagag

SEQ ID NO: 781596 - DNA, 50 bp, Homo sapiens
ccgaagaagactcccccacatctggggagtgcatccgccccaaccctttt

SEQ ID NO: 781597 - DNA, 100 bp, Homo sapiens
atgagctcaatcggcactgggtgatcaccagcagcttgcaaaacttatccaggagtcgccaaccgttgaactgaaagacaagttggagtgtgaattggag

SEQ ID NO: 781598 - DNA, 101 bp, Homo sapiens
cacagaagaagagagatggggtgagagctaaaggtttctgagtcccttcaacatgatcctgggaggaatcgtggtggtgctggtgttcacagggtttgtgt

SEQ ID NO: 781599 - DNA, 117 bp, Homo sapiens
tgccaaggaaaaactggagagcttcatcaaaaatagtgatagctttgataaataagccaatggacacgtcagtgttatctgaagaaggaggagagccttttcagaagaaacttcaaa

SEQ ID NO: 781600 - DNA, 75 bp, Homo sapiens
cgggatcacagatgacgacatcacgcacaaggtgctcagactctgggctgggaagccctgttggcccggcgcctg

SEQ ID NO: 781601 - DNA, 146 bp, Homo sapiens
cccggggccagattcccatggaagcgccgcgatgttcgccccccggctgctggatttccagaagacgaaatacgcgagagctgaagaagcaggtggagagtgccgagctgaagaaccagcggctcaaggaggttttccagaccaag

SEQ ID NO: 781602 - DNA, 99 bp, Homo sapiens
ggagagcttcatcaaaaatagtgatagctttgataagttatcaatactctggctgaccatcatcatcgtgggactgactttggtggaagtccttggtta

SEQ ID NO: 781603 - DNA, 100 bp, Homo sapiens
tatgttctctaggccttttagaaaacatgctccatcggcagtgtccatcatgcatcaggtgagccgcaccgtggacagcattaccctgtcgtggtcccag

SEQ ID NO: 781604 - DNA, 51 bp, Homo sapiens
gcgcttcttccccactcccgagacagatacttgccagaactaatacagctg

SEQ ID NO: 781605 - DNA, 99 bp, Homo sapiens
cgcgcacctggtcctcgacggggaggagatcccggtgcagaagaacatcctggcggcggccagcccgtacatcaggaagctcttcgtgggcggtcttga

SEQ ID NO: 781606 - DNA, 75 bp, Homo sapiens
ggcggccatgacaccgctcgtctcccgcctgagtcgtctgtggaatgttgctgaggcacagtgcatcgccaacca

SEQ ID NO: 781607 - DNA, 100 bp, Homo sapiens
tgctcgcgctactctctctttctggcctggaggctatccagctcagagcaccataacatggtgtgggaagtgaagacaaatcagatgcctaatgcagtac

SEQ ID NO: 781608 - DNA, 90 bp, Homo sapiens
acgggaaggcgggagacgagaagcctgaaaagtcgcagcgagctggagccgccggagattcctacgagaagcaacaggcacaaggctctg

SEQ ID NO: 781609 - DNA, 98 bp, Homo sapiens
gcgcctgggcaccgggctcgctccctgcgccccggagcaggccaagttcggggccaggacgtcgggaggacctgcttagaccatgctcagcctccaag

SEQ ID NO: 781610 - DNA, 82 bp, Homo sapiens
cgtccgtccgccgccaccacccactccggacacaggagtgcgccggtctcggggaaatgcccggttccttcgtgcccacggt

SEQ ID NO: 781611 - DNA, 100 bp, Homo sapiens
atgaggctcagggatgcctgtaccatgatgtgatgctggagaccttgacacttatatcctccctggctgccagccttgccctggctctgaatggcgtctt

SEQ ID NO: 781612 - DNA, 76 bp, Homo sapiens
tacattctgggtgacacgctgggggtcggcaccttcggcaaagtgaagggaaaaccagtagattcccagacatcgc

SEQ ID NO: 781613 - DNA, 87 bp, Homo sapiens
gaagtatatgctacaggaggagaggttcaaattgcaatggaggaagaacgtgcaaaacgtgaggagctagagcgaatactggaagag

SEQ ID NO: 781614 - DNA, 74 bp, Homo sapiens
cgctctccagcccgcttgaacgcatttatgacattaacagagaacaggactatgtcaagaattctgagggtata

SEQ ID NO: 781615 - DNA, 101 bp, Homo sapiens
gatttccaagtgatttcttccaaagcacaggaatctcactctgttaaagctggtctgttctaactgaggcaaggggagagccagttgcgcagagccctgca

SEQ ID NO: 781616 - DNA, 82 bp, Homo sapiens
agttcacgcccaagtacatcctgcgcgccggccagatggtcacgcttcgagagcatgcagaggctctgcgacaagtacaacc

SEQ ID NO: 781617 - DNA, 98 bp, Homo sapiens
taaggagccgcggcggggggaaaatggagcccttcaccaatgttcctctgctggtctgggttctaattcggcgcctcccatccctgactcaaggctcg

SEQ ID NO: 781618 - DNA, 75 bp, Homo sapiens
ccgagcgggctccctgcgcgcccagctggaggcgcagcggcggcagattgctcgagactttaatcccaactggat

SEQ ID NO: 781619 - DNA, 90 bp, Homo sapiens
aaagaatccctccattgctgttccaattgtccttaaaaggaaccctctggatattgatgcctcgggtgtggttggactgtcatttagtgg

SEQ ID NO: 781620 - DNA, 75 bp, Homo sapiens
actgagcggagcccggtgacaggatggtaacctggatggagaggaccatgccgcagagcgaacggtggaggatgt

SEQ ID NO: 781621 - DNA, 78 bp, Homo sapiens
ctcaagtcgacaggggatgggaccctaggaccgtagcctgacgggcaagctggaaccggtgtctccccccagcccccc

SEQ ID NO: 781622 - DNA, 100 bp, Homo sapiens
ttccccagacacagcaagtggatcttgacttatccaggccacttttcacttctgctgcactgctttcagcatgcaatctgcgctcctcagaccaccggca

SEQ ID NO: 781623 - DNA, 98 bp, Homo sapiens
gcctcctaagtagctgggactacaggctccatctcagtgaatagtcgcagcacgccgttcttggccactggagacagcgagattctggacctggagag

SEQ ID NO: 781624 - DNA, 100 bp, Homo sapiens
aggactgcgccgcgtcttcctcaagggccacaggagaatggtatgctgctcggcatggagtgaagaccaccccgtgtgcaatctgttcacctgtgggttt

SEQ ID NO: 781625 - DNA, 100 bp, Homo sapiens
gcctcagcgccctgcagaaggcccagcatcaagatggtgctcatgtggaccagtggtgacgccttcaagacggcctacttcctgctgaagggtgcccctc

SEQ ID NO: 781626 - DNA, 98 bp, Homo sapiens
ccgtccgcgccgcccgttctggtgcgttgaaaactatacaggagctcgttgtgaagaggtttttctcccaggctccagcatccaaactaaaagtaacc

SEQ ID NO: 781627 - DNA, 75 bp, Homo sapiens
gcggcgccgccgggctgtggagggaacggcaggagcagctgatgggatatcggaagagagggccgaagcccaaac

SEQ ID NO: 781628 - DNA, 100 bp, Homo sapiens
gcccacagagcagtgcttgctgctttttctaactatttcaagatgatatttattcaccaaacaagctcgagatgtctttttaatgctaaagaagccaaac

SEQ ID NO: 781629 - DNA, 90 bp, Homo sapiens
gccagccagctggataccactgagtgacctcagtagatgccacgtgggacaggagaattctctaaaaccttccttccttccagatgtgtg

SEQ ID NO: 781630 - DNA, 99 bp, Homo sapiens
catgcttgtcaaaaatcagaggcaactaacactgcggcttcctgaggactgaaaactggatatttggtccccatggactttctggtcaccctgtgaagt

SEQ ID NO: 781631 - DNA, 101 bp, Homo sapiens
aggacagcgcgtgcccgcgaggagccgccgcgcgcccgcgccctccgcgcgacgccaggtgctggctgccagctgctgcgccccccatgtagaaggtgcac

SEQ ID NO: 781632 - DNA, 95 bp, Homo sapiens
gcagctgtgcccgggcggcacggccagtgaactttgaggcgctgatcatcaccatgtcggtagtcgggggaaccctcctcctgggcattgccatc

SEQ ID NO: 781633 - DNA, 87 bp, Homo sapiens
gaagcttctgaaccatccacacatcataaagctttaccagtgcctccggagccagcgtggtggccatagacaacaagatcgaacagg

SEQ ID NO: 781634 - DNA, 100 bp, Homo sapiens
ctcctccccgtctcctgtgctaggccagaaagtatgctgaggccttggattaccaccgtcaggcactggtgttgattcctcagaacgcatccacctactc

SEQ ID NO: 781635 - DNA, 75 bp, Homo sapiens
atggccaccgaccagaggaaagtcaaggagccttcacgtaaatgggtccagtcatgcctcccagtaagaagccag

SEQ ID NO: 781636 - DNA, 82 bp, Homo sapiens
cgacaagccgctggcagccgcggatctcaccgccgctcaggcttgttctaaagacgaaggggaactccctagtgctacaggc

SEQ ID NO: 781637 - DNA, 82 bp, Homo sapiens
tgaacggagaggaagaattctttgatgccgtcacagagctgcaagcgtttgctcaccacggccgctccctgccaagattcca

SEQ ID NO: 781638 - DNA, 75 bp, Homo sapiens
gtgcgccgtggcgcggcccggctgacaggttggctgttgaaggcacgaatggaatagataatcatgtacctacaa

SEQ ID NO: 781639 - DNA, 82 bp, Homo sapiens
ctacaacccgcgcttctggccgcgggaaggagagattgtcactgctgttccaagggcacacgcagagggatttggaattcct

SEQ ID NO: 781640 - DNA, 80 bp, Homo sapiens
gctttatgaagcaatctgtaacttgcttcaagatcaagatttagtggccctgaaaaggagcctttaaaagtcaattctac

SEQ ID NO: 781641 - DNA, 100 bp, Homo sapiens
cgcagcaaaaatcatcaataccaagaagttgtctgcccggggtttcattgtttgcggaacttttcaacgaaatgcttcaaagagattttggtgtccgtat

SEQ ID NO: 781642 - DNA, 83 bp, Homo sapiens
ctgggttttacagcacttggccaagctagatgtcaagattaactgctgaagtactgatcgagttctgcatttcttcaatgagg

SEQ ID NO: 781643 - DNA, 75 bp, Homo sapiens
tcctccggatattacctgtggagaccctcctgagacgttctgtgcaatgtgctgacttgctcatcagttttgcac

SEQ ID NO: 781644 - DNA, 100 bp, Homo sapiens
gctgtaaactgcaaaccataatcctgtcttaatactgcaaacaaatcatagtggaactaaggggaacttaatttactggagtgagctgagtcgacagaaa

SEQ ID NO: 781645 - DNA, 88 bp, Homo sapiens
gtcccaaataaggaccctaaaacattctttactgaggagctccagctgagtattagaggccaggagtggtggctcacacctgtaatcc

SEQ ID NO: 781646 - DNA, 82 bp, Homo sapiens
ctgaagaaggtcagtgtgcttgcttggagatcaggacgcaaagacctgcctagagctggaacgttacctccagagcgagccc

SEQ ID NO: 781647 - DNA, 75 bp, Homo sapiens
gactgaccagtttttgcagttctaaaaccatggcccatggaacaagctaccctctgagtcagcactggacttgaa

SEQ ID NO: 781648 - DNA, 95 bp, Homo sapiens
ggagccggacctccggagcatggtcagccccgtcccctccccgacgggcaccatcaggtgaagctttgttctaagaatatttgtttcatctagtt

SEQ ID NO: 781649 - DNA, 100 bp, Homo sapiens
agcaaagattacctattaccagaacacactgacaactgcttttcaggaagccttggacgctgcaggtgataaacttgtagtagttgacttctcagccacg

SEQ ID NO: 781650 - DNA, 90 bp, Homo sapiens
cttcggccttggtcccagcgccttcccacggagcagcactcttcaccctgcacagccttgttaggagtctccccaggacagtgctatcac

SEQ ID NO: 781651 - DNA, 75 bp, Homo sapiens
ggtggccatcttcggaccccccaacaccctctacgaaggcggctacttcaagattcgggaactggagcctctcct

SEQ ID NO: 781652 - DNA, 90 bp, Homo sapiens
ccgagttgatgatgacagcctgggcgagtttcctgtgaccaacagtcgagcgcgaaagaagactggagcgctcagcctgccacggaagac

SEQ ID NO: 781653 - DNA, 75 bp, Homo sapiens
gttggttgcatctgctaaagaggatcctgccaacattttacagcccctgatgaaaaatgactcattgtgcagtgt

SEQ ID NO: 781654 - DNA, 85 bp, Homo sapiens
ggaatcgcccaagtccctctactcgcgagcctctactcttcatggatcttttggatgaaagaacactcgtggcagtagaacggcc

SEQ ID NO: 781655 - DNA, 82 bp, Homo sapiens
tacacggccagttttgaaatcgacacacaaagaatagagttgagcctgtgggacacttcggatgtccagctcgccgctgtcc

SEQ ID NO: 781656 - DNA, 75 bp, Homo sapiens
aagcaaataaagacaaagccaaccgatacttttctccaaattttaagtcaagctgcagtttcagctcaggccaca

SEQ ID NO: 781657 - DNA, 75 bp, Homo sapiens
tttggggcagaatacagagatatggaatcaggtacaccaggggttggaaaaaccacactaggcaaagaacttgcg

SEQ ID NO: 781658 - DNA, 75 bp, Homo sapiens
cttctgcctgttcagaagcattaccaacttgatgatcaagagggcatttcattgcaaatagaagagtcttccaaa

SEQ ID NO: 781659 - DNA, 83 bp, Homo sapiens
cgagtatctggtgaagtggaaaggatggcccccaaactgagcgggctttggacaccatgaactttgatgtgattaagggaaag

SEQ ID NO: 781660 - DNA, 75 bp, Homo sapiens
tgtcagaagtcttacagactttacaggatgaatttgggcaaatgagcttgaactgtggctgcaccatctgtcttc

SEQ ID NO: 781661 - DNA, 75 bp, Homo sapiens
gaaaaaccaaagcttaaagctacaggccacgtattccagagctgacaaggaaggtttcgagcgttttgctggcaa

SEQ ID NO: 781662 - DNA, 100 bp, Homo sapiens
ggggaacatggcgccggggcccccgtcgttgctgccgggattttggaggccggggccgcgctgagggcgcccagctgctcattgctatggacagtgctat

SEQ ID NO: 781663 - DNA, 83 bp, Homo sapiens
acggctgtgtgctggcagtgtgggacacctgcttggagccgtggtccttcagcatatctctgtgctgcagacaacacaccttc

SEQ ID NO: 781664 - DNA, 114 bp, Homo sapiens
aggcttccgagggggccggggtggtggggacagaggtggctttggccctggcaagatggattccaggctgcagaagatcctggcagagtctcccccacccgcccgtctggacat

SEQ ID NO: 781665 - DNA, 75 bp, Homo sapiens
gcggcacggccatcgccggctcggtggaggcggtggccagcaaacttaaactatttccagaagcttcaaaaggtc

SEQ ID NO: 781666 - DNA, 100 bp, Homo sapiens
taaaaatctcgtcaaaaaatattcacagttcataaactttcctatttatgtatggagcagcaagctaatggttgcagagaagaatggaacaatccggttt

SEQ ID NO: 781667 - DNA, 85 bp, Homo sapiens
gcacacgccctgcatcgagcagctggagaaggaacagcatatgccatatatgagctggctgtggcttcatttcccaagaagcagg

SEQ ID NO: 781668 - DNA, 75 bp, Homo sapiens
ctgatgtactggccctttgtacagatcagctggacatcatctccatggcggagacaaccatgatgccagaggaga

SEQ ID NO: 781669 - DNA, 87 bp, Homo sapiens
gaagaagcacttaaatactcatctactaggcaagcatggagttggcaccccaaaagaaagctccctgatggctcggagatcccgctc

SEQ ID NO: 781670 - DNA, 100 bp, Homo sapiens
catttccagacgccccggaggccaccacacacacccagctaccaggttaaaattgcagagttttctcgtactccagaagactttctaaagaaatatgatg

SEQ ID NO: 781671 - DNA, 96 bp, Homo sapiens
ggccaaatatgaatttttatttggcagatctgaagggaaagctccagatactaaccattgccctcttgaacatttaccgtaaccctcaaaactctt

SEQ ID NO: 781672 - DNA, 101 bp, Homo sapiens
catggcaccatggcaagaagaagctgtatcttatctatggaagataaagcatggagttggctaatggatgctgcctctacggcagacacatgcaggccaac

SEQ ID NO: 781673 - DNA, 134 bp, Homo sapiens
tgcttttccaacatcaagatcttcctggtgtccgagtgcgccctgatgctggcgcagggcacggtgggcgcctacctgacaatgcagatcttcgtgaagactctgactggtaagaccatcaccctcgaggttga

SEQ ID NO: 781674 - DNA, 80 bp, Homo sapiens
gttggcgcttggacggcgggaaccggctccggagcgagaacgcgcgtgtcgtgaaaactacccctaaaagccaaaatggg

SEQ ID NO: 781675 - DNA, 100 bp, Homo sapiens
tgactctgcacccagcaatccctctgcagacagctcccacaggagtcatgcccagtgtgtgaaggtatccatcacgaattgaaaaaattgactatgagga

SEQ ID NO: 781676 - DNA, 90 bp, Homo sapiens
atcttccgtaacccctgcacagagcagattctgaaacttcttgacaatttgcttgcgcttataaggactcgctgattcttgagaagagtc

SEQ ID NO: 781677 - DNA, 100 bp, Homo sapiens
gtggttacctggttcacagaccgagttagcaattgtcaccgcagactttgttaagagacgagttgtactgctgtcacaggaaatggacgctggattacaa

SEQ ID NO: 781678 - DNA, 98 bp, Homo sapiens
ccacaaatgctccttctcctggagacgcaactcaaggacgagattgaggagctgcgggccgagatgctggagatgcgggacgtctatatggaggagga

SEQ ID NO: 781679 - DNA, 75 bp, Homo sapiens
ctgagtgtggcatgcatggtcattgcaggcggggagctgaaagttggtgcaacagctgcagcccggaaagaggtg

SEQ ID NO: 781680 - DNA, 51 bp, Homo sapiens
tccttatgctgatatacatccaatgaggattcatactttagtggaaagttt

SEQ ID NO: 781681 - DNA, 74 bp, Homo sapiens
cagaaagtgaacttggcattttagatctaattcaaggtgcaaatagctatgggcaacttggcctcggccataag

SEQ ID NO: 781682 - DNA, 100 bp, Homo sapiens
tacaaatattttgcacttcaagtcatctttctgtccaagggcaaggatgccatgcagtccttcatgatgccattttatctcatgaaagactgtgagatca

SEQ ID NO: 781683 - DNA, 90 bp, Homo sapiens
cttgaccatgatgactccatgagaaaacagcagaacgccagctttgcagcatcaagatggtgctcatgtggaccagtggtgacgccttca

SEQ ID NO: 781684 - DNA, 83 bp, Homo sapiens
acgaagacggggaggacgaggctgaggacacaggtgtggacacaggttctaaatggcttctaagaagttgggtgcagattttc

SEQ ID NO: 781685 - DNA, 83 bp, Homo sapiens
ggagcttgacccgtccatcgctgtgtgtactaatggtcacttgatgtgcgctggctgttttatccacctactagcagatgccc

SEQ ID NO: 781686 - DNA, 82 bp, Homo sapiens
aaaccagagcaaagtgttcgggattcgatggattctttggcattgtccaatatcacaggtcctaggcctacttacaagcctc

SEQ ID NO: 781687 - DNA, 107 bp, Homo sapiens
ctggagtttatctggagtgaggtggccggttcttggtgggatctgagcagacaatgcagatcttcgtgaagactctgactggtaagaccatcaccctcgaggttgag

SEQ ID NO: 781688 - DNA, 90 bp, Homo sapiens
ggaaaggttcagtttcgtgactagccacgatggaggtgatgaacctgatggagcagcctatcaaggtgactgagtggcagcagacataca

SEQ ID NO: 781689 - DNA, 74 bp, Homo sapiens
gtctggagcagtggagcccaaagacccctggagacatgcaaattgtggctactaatttgccccctgaagatcaa

SEQ ID NO: 781690 - DNA, 76 bp, Homo sapiens
aatgcgtaatcctgaagaggatggaaaagggtaagggactgttctgaagaacctttccatttagtgatcaagatat

SEQ ID NO: 781691 - DNA, 89 bp, Homo sapiens
cgccgccgccttgctgctgctcaaagctgctgccgccccttgggctaaaagaggctgggaggcggcagaatgcagccagaggagggcac

SEQ ID NO: 781692 - DNA, 73 bp, Homo sapiens
ttaagagagtgattgctcttgaaggagatattgtcagggcaactgtactcctgatgatattggtctgtgaaac

SEQ ID NO: 781693 - DNA, 82 bp, Homo sapiens
aatacagccaacctccaggtttcagtggcagttctcagcctgtggacatctctacagcaatgagtgaacgggcacttgctca

SEQ ID NO: 781694 - DNA, 100 bp, Homo sapiens
gacggcgtgctcaaggagggcttcctggtcaagaggaccaagatcactccatggatgaaatgacagctgtggtgaaaattgaaaaaggagttggtggcaa

SEQ ID NO: 781695 - DNA, 104 bp, Homo sapiens
gcctgccccgcggccaacatgagcttcttgttgtgctggagaatctggtaaaagcaccattgtgaagcagatgaggatcctgcatgttaatgggtttaatggag

SEQ ID NO: 781696 - DNA, 80 bp, Homo sapiens
gcttcacgacagccagtgacgtctggatgttcgaatgtcagcatctcattagatggtgcttggccctgagaccatcagat

SEQ ID NO: 781697 - DNA, 83 bp, Homo sapiens
ctgaggaagcgagggtcgtcgtactcgaagcggcgcccgcagggggggccctcagcctcttggccttgaacgggctgttcatc

SEQ ID NO: 781698 - DNA, 100 bp, Homo sapiens
ctcactttgtgaaactgctttttgaaacagagaaaatagatatagtactacattttgccgcacaaacacatgtaggagttaaacatagatgtagctgatg

SEQ ID NO: 781699 - DNA, 75 bp, Homo sapiens
aagactgttaccatatcccaacatgtgatccgagggaaccgccccatcaaaactgagatggcccatcagctatat

SEQ ID NO: 781700 - DNA, 100 bp, Homo sapiens
gtgaactctgtagtggatttcttcacggtgccccccgtgtttgtgtctgtgtacttaaacagaagttggcttggtctgctaaaaggtcagagtaatgcag

SEQ ID NO: 781701 - DNA, 83 bp, Homo sapiens
cagctatcgtggacgtcactggccctggtggggattgacagccacgggaagggcgtgatggtgggcatgggtcagaaggattc

SEQ ID NO: 781702 - DNA, 96 bp, Homo sapiens
aagtaatggaagaactggaaaatgagcgatgggcccgccctcctgcagtgaccagtaatggcactttacactcggccaagaataaggagacgggtg

SEQ ID NO: 781703 - DNA, 74 bp, Homo sapiens
cgttgtggaccaccaaacagaactttctaatttagccaaggaagggagcatttcctgaagacgtagtcatgcag

SEQ ID NO: 781704 - DNA, 75 bp, Homo sapiens
ggccggaggagtcagctgtgtgtccagaacgtgccatggagacgcttaacggcctccccatggccacccatggac

SEQ ID NO: 781705 - DNA, 97 bp, Homo sapiens
gtttgttcaggaaccaccagtgacagaagggaaatctggtttctggattaactactgaatagcaactgcagtcaacagctgatggaatcttgcagga

SEQ ID NO: 781706 - DNA, 96 bp, Homo sapiens
ggcagacttcgacacactcgaggccgacctcacccggcttggggccctcaaacgacagaaatggaagcaactgtcgagattgcagcggaatatgat

SEQ ID NO: 781707 - DNA, 75 bp, Homo sapiens
gagctgcccggctcggcagcgggaagtattggtaaaggttttcaaggtgtcatgaaaagatggggatttaaaggc

SEQ ID NO: 781708 - DNA, 98 bp, Homo sapiens
acatggtactcagtaatctagctgcagttttgatgcacagagacttatacaagcactagcaacaactctatatctggatcattgaagcgcttggaaga

SEQ ID NO: 781709 - DNA, 82 bp, Homo sapiens
cggacgggccatacccaataaccaggtgcttggcaaaatcgagcgggccattgatgaggacggggacttggttgccttttcc

SEQ ID NO: 781710 - DNA, 75 bp, Homo sapiens
ttcctccacctaccttcccgagcctatggcatgtctgcgttacctttaaatctgataaaaggcactagaagcgct

SEQ ID NO: 781711 - DNA, 100 bp, Homo sapiens
cgtgcctggttacagctgtttccacgtgcggtgctcgtcgggagtgatcacctaccctacaggttcatcctcgatgactccgccttgtacctgtccgaca

SEQ ID NO: 781712 - DNA, 82 bp, Homo sapiens
acaggcattgtagaaacacatttcaccttcaaagacctatacttcaatgcagggagactgaccctagacaaagctcttgaca

SEQ ID NO: 781713 - DNA, 100 bp, Homo sapiens
ctgcaatatggcggaggcggaaggggaaagcctggagtcctggctcactgaacaaaaggttcatcctcagttttctccatgcccatgggaagctgtttac

SEQ ID NO: 781714 - DNA, 100 bp, Homo sapiens
agaagatgaagaagatgatagcagtggagaagagctgctggccttcctgcaaggactcttcactttctatcaccatggttacgaactggccaaggatttc

SEQ ID NO: 781715 - DNA, 74 bp, Homo sapiens
tttgtgcaactgtgaacagcagcgattcaaagaggaatacttcattgctccatcagtagatatacaagaacagg

SEQ ID NO: 781716 - DNA, 98 bp, Homo sapiens
actcagcacctataccaaagcaatgagaatagtagctcttctagtatctgcaaagacaatgcagggtatttgaagtataccatacaactgttttgaaa

SEQ ID NO: 781717 - DNA, 85 bp, Homo sapiens
gctcaactctagccagctaggttcctggtgctttggggggtgtcaaattgagaaccaggtagatccccaccacctacagtaaaaa

SEQ ID NO: 781718 - DNA, 74 bp, Homo sapiens
tactctcttaatgctgacaacaggacttgtagtggtgatgtgctctatgaactccttcagcatattctgaagca

SEQ ID NO: 781719 - DNA, 100 bp, Homo sapiens
ggtgatgtggctgcggcatcgccggcctcgctatgctgagatctgtatctgtggacctgaatgttgatccctcgcttcagattgacatacctgatgcgct

SEQ ID NO: 781720 - DNA, 100 bp, Homo sapiens
aggattccaagtaactcttatttgatgcggttcatgctattattcagccggcagggaaaactgcggctgcaaaaatggtacctggccacttcggacaagg

SEQ ID NO: 781721 - DNA, 74 bp, Homo sapiens
cacctttcggcttctgagacggcggcagcagcggcattcaggtgatgatgaacagtctacacagatggctgcaa

SEQ ID NO: 781722 - DNA, 100 bp, Homo sapiens
aaaagaacatgatttagaacgacggtatgagctgctgaaccgggaattgagggcaatgctagccattgaagccctcaacaggaggcgcagaaaatcttca

SEQ ID NO: 781723 - DNA, 98 bp, Homo sapiens
aacgtcccttcccagtctttcccggcccccaggtcgcagcagcgtgtcgcctccggggggcgtagcaagccaaatttgtatcctactgtggggcttca

SEQ ID NO: 781724 - DNA, 99 bp, Homo sapiens
acttcttggaaagatatgccaaatttgttaaagagaggatagaaattgaacagaactatgcgaaacaattgaggtccagaggtgtccttctaaagctgg

SEQ ID NO: 781725 - DNA, 75 bp, Homo sapiens
ggacctgtttaagaggcagcaggcgatgccctccacaggtatggcagaaaggcctaaagaatgtatttgacgaag

SEQ ID NO: 781726 - DNA, 50 bp, Homo sapiens
cctctccctccttgcgcgttccgggtctcagtcttgctgtgtcacccagg

SEQ ID NO: 781727 - DNA, 100 bp, Homo sapiens
cgaagaacagctgtggaaagaagttgcaaaacactggagagaagctgcatgaggccaataatgaactacagaagaagagagccattattgaagatctcga

SEQ ID NO: 781728 - DNA, 83 bp, Homo sapiens
tttgggtcgcagttcttgtttgtggatcgctgtgatcgtcacttggtggtagctgagcacccagatgcttcaggtgaggagat

SEQ ID NO: 781729 - DNA, 154 bp, Homo sapiens
cggagccagggccgagtcctcgccatgccggcccggcggctgctgctgctgctgacgctgctgctgcccggcctcgggagagacaagagagacacctccaacttcgacaaagagttcaccagacagcctgtggaactgacccccactgataaac

SEQ ID NO: 781730 - DNA, 96 bp, Homo sapiens
tttacagaccctcaaaaatcctctgccggaagcagaagctgggaaaattgaggagagtcctttcagtgtcgagatggagtctcgctctgtcgccca

SEQ ID NO: 781731 - DNA, 91 bp, Homo sapiens
gctgtctatggatctgctctaaaccttatagcctgcttatgggggaagttgcaagaatgtagtaactctgatcagctacaaggaaaggagg

SEQ ID NO: 781732 - DNA, 76 bp, Homo sapiens
cacttggcatcacttgtattgaattgggatgtgatggagctgcttgaagaagatctcacatgccctatttgttgta

SEQ ID NO: 781733 - DNA, 100 bp, Homo sapiens
tcttcattcagtgttggcccagaaactacaggctgaaaagcatgacgtaccaaacaggcacgagataagggaattctgaatgtcaacaaacacagagccc

SEQ ID NO: 781734 - DNA, 50 bp, Homo sapiens
ggttggcaccactgaagtgaccgaatgagtaattcgccaaaatgacgaac

SEQ ID NO: 781735 - DNA, 110 bp, Homo sapiens
gcttctgtggcctcgttacctgcaggtattgggagatccacagctaagacgccaggacccactggaagcctagaaatgatatttggagttcttacaacatggcagacatt

SEQ ID NO: 781736 - DNA, 83 bp, Homo sapiens
ggaaaacagagaaagaagtgataggagggctctgtagatgtgaagttcatttccaatccgccctccatggtggcagcggggag

SEQ ID NO: 781737 - DNA, 100 bp, Homo sapiens
tcttctataacaacactctgttcctggtcgtggtcattgttgcttccttcttcatattgaagaacttcaaccccacagtatcttcatcataaaagaggag

SEQ ID NO: 781738 - DNA, 100 bp, Homo sapiens
accgccatgcccaagaataaaggtacgaggaacagcaaattcaggaaaaagtggcgacctttcgactcatgttgctggagaaggatgtgaaccctggggg

SEQ ID NO: 781739 - DNA, 82 bp, Homo sapiens
ccagctgcggcggccggaggaccggcctgccggcccccagaacaagatgaccgtggaaaaagtacagggtattagcagattg

SEQ ID NO: 781740 - DNA, 100 bp, Homo sapiens
gctctgtggacccgtgagcaagcataagctgccaaaccaaggcactttgatccggttttccagttcttgcacaagcaagtttgtgtcagccacgccctgg

SEQ ID NO: 781741 - DNA, 82 bp, Homo sapiens
tctgcgcagcggcgcccgcagccgcagccccctgctccggaggctggtgcagacgggttcttactctgtcacccagactaga

SEQ ID NO: 781742 - DNA, 96 bp, Homo sapiens
agaaaatcagtgatgtcattgaggactctgtagttgaagattataattcagtggataaaactaccacagatgttactggggtttccacagtcactt

SEQ ID NO: 781743 - DNA, 98 bp, Homo sapiens
aagaagcacctggatgagacatttgctacagcatcccacattaagtcaacgcttctgaaagttctgctgaagacagtgagcaggaagatgagagaggt

SEQ ID NO: 781744 - DNA, 90 bp, Homo sapiens
ttgaagagtgcatttcaagctgccaaggtggagagagggattacagaaaggagaacaccttatttcagacttagaaggttttgactccgt

SEQ ID NO: 781745 - DNA, 50 bp, Homo sapiens
gttcagcatccccaagcagggggagtggatgattcaacagccacacaaag

SEQ ID NO: 781746 - DNA, 91 bp, Homo sapiens
ggggctaatggtaaccgaaactcaaagttaatggagccaaatttaataaagagcagcccgacggccatggaggctgaagagacgatggaat

SEQ ID NO: 781747 - DNA, 75 bp, Homo sapiens
cccgcctcacctggggtatggagaggaaggaagaggatgacattattgacgatgtggagagttttgttgctgccg

SEQ ID NO: 781748 - DNA, 83 bp, Homo sapiens
aaagcatttaaccagcatggctacttcatattttggaaagcagtttttaagacaaggcaccatgccggtggaaaggatgcgca

SEQ ID NO: 781749 - DNA, 100 bp, Homo sapiens
caggctgcgggtgatcgcagaagcctacgctaccaaaggtttcgtttataatgtcagcccttatatggagtatcatcctggtggagaagatgaactaatg

SEQ ID NO: 781750 - DNA, 50 bp, Homo sapiens
aatggatgaaaggaaccgacagtgatcgaactgtgagaatttggaaggct

SEQ ID NO: 781751 - DNA, 100 bp, Homo sapiens
ttcgttgttttcaccgacgagactggaggtggcctgcatgcagtttataaatgcccttgtcacttctccttatgagcttgattttcgaatacatttaagg

SEQ ID NO: 781752 - DNA, 82 bp, Homo sapiens
gctgccctgtccacagtgggctctgccatcagcaggaagcttggagacatgagatgagcagcaccagcagtaagagggctcc

SEQ ID NO: 781753 - DNA, 83 bp, Homo sapiens
agttgctactcgggacgctgcacctcccgcgccgcacggtggacgagcatttgacattgtgcagcaaagaaatggttatggag

SEQ ID NO: 781754 - DNA, 100 bp, Homo sapiens
aaggtcttttatattggcctgagaggagagtggactgagagaatgctctcatcactcagtcaaggctaatgcttttggaatcagtgttaatatttttcaa

SEQ ID NO: 781755 - DNA, 74 bp, Homo sapiens
aaaaagttcagtgggaagcatgtcgtctttatcgctcagtcctcctccgcctcctcctctctgcatgcgcgtca

SEQ ID NO: 781756 - DNA, 83 bp, Homo sapiens
aaaagactatgttagcaagtgtcacgccatgtacacggagtatgggaggaatggtcaccatggagtttatgttcatttacatg

SEQ ID NO: 781757 - DNA, 96 bp, Homo sapiens
ttcatggcagttcttgtggtgatggcctgaactatggttcttcccttccatcatctcctcctaaggctgataagaaggacccccaaggcaacggca

SEQ ID NO: 781758 - DNA, 87 bp, Homo sapiens
aaagtatggagctgctatggtggtcatggcttttgatgaagaaggacaggatgaatttcatcctttcatcgaagcacttctgcccca

SEQ ID NO: 781759 - DNA, 71 bp, Homo sapiens
tgcccaggttgacctttctgcgggaggagtcagtggatcggtggggaaaatgctgcttaccctgggccctg

SEQ ID NO: 781760 - DNA, 101 bp, Homo sapiens
tctctttcttctatttcttgtggatattatggctaataacacaacaagtttagggagtccatggccagaaaacttttgggatatttggagttcttacaaca

SEQ ID NO: 781761 - DNA, 73 bp, Homo sapiens
tggcagctgctgatttgtcccatggcctatggatttgtcaactattaagaaaaacatagaaaatggactgatc

SEQ ID NO: 781762 - DNA, 82 bp, Homo sapiens
ggaaacttacactgctgcataatggagaacctctctacattccagtaacccaggaattgaatgatctggcacgggaccctcc

SEQ ID NO: 781763 - DNA, 83 bp, Homo sapiens
ggcagcgcccggcccccggctcagcccccggagtgcggagccgaccagaccatggtgaatccgggcagcagctcgcagccgcc

SEQ ID NO: 781764 - DNA, 100 bp, Homo sapiens
ccaaaattcaactgaatgcactgatgcccagcaggcccgctacaacttcatccgaagcatggccgcctacagcctcctgctgttcctgctgcagatcaag

SEQ ID NO: 781765 - DNA, 74 bp, Homo sapiens
agcggaacagccacagcagcctcccaaggagtctgcaagttggtgaaaggtgtagcagtcactcggcctacacc

SEQ ID NO: 781766 - DNA, 100 bp, Homo sapiens
gtaacaaatgctatttgtttggtggcctggcaaacgaaagcgaagattcaaacaataatgttcccagtacattgaccatctctggtgacacagttgaagg

SEQ ID NO: 781767 - DNA, 100 bp, Homo sapiens
gccaccgtccagcaacttgtggacctcctgtgccgcctggagctctaccgggctgcccagatcatcctgaactgtccatgaaagacctcctcctccttct

SEQ ID NO: 781768 - DNA, 100 bp, Homo sapiens
tgtaccgacagtccaaggagctgtacggcacctgggagatgctgtgtgggaacgaggtgcagattgaggtggtgccttctgcctctgccctgatcatcaa

SEQ ID NO: 781769 - DNA, 95 bp, Homo sapiens
tctgcagccagaagaacaagaagtaggcattgaccccttgtccagttactctaacaagtctggagcttggtgatccagctatttttcctgccgta

SEQ ID NO: 781770 - DNA, 100 bp, Homo sapiens
ccatgaacgaggagtacgagacgaggttcctgtgcaactcttcacagggttccccactgaaggacttggtccagctgtctggcagggaggagagacagaa

SEQ ID NO: 781771 - DNA, 98 bp, Homo sapiens
ccggaagaccctggaccctacctacatcctgagctacatggccccctggtttagggaggctttggaggaattttttacatcacttgtgaagcaagaaa

SEQ ID NO: 781772 - DNA, 131 bp, Homo sapiens
tttgaagatggagcagatactacttccccagagacacctgattcttctgcttcaaaagtcctcaaaagagcaagattaccttatgctggctactttggatgagaatgaggaagtgatagatggaggcaaaa

SEQ ID NO: 781773 - DNA, 153 bp, Homo sapiens
agcaagagagagacaagcccgaggcctgacttctagcactcctgagtttgagccctatgagcagtggaacctaggctctctgaacaacggggcccagagctgatggcagacaatgtcagccactaacaacatagcccaggcccggaagctggt

SEQ ID NO: 781774 - DNA, 100 bp, Homo sapiens
ccagggaccctgtgcaggcctgctcctccgtttgcaagcctgtgggccaaagctgaccaactcccccaccgtcatcgtcatggtgggcctccccgcccgg

SEQ ID NO: 781775 - DNA, 100 bp, Homo sapiens
cctttcacttattcatctgtccagcatgactcatccccgggagtgttgagcaaagcataattgatttgaaggagaaggaaataccagaattaagaaacaa

SEQ ID NO: 781776 - DNA, 100 bp, Homo sapiens
aagcataatgacattgtggacagtgacagcgatgctgaggatcgaggaacgttgtctgtgatgtcttggcattgcccattttcaagcaggaagattccag

SEQ ID NO: 781777 - DNA, 90 bp, Homo sapiens
gctaaaaggctccttcagtgagcaaggcatcaacgagtttctcagttattgtgaccaactgaaagtctcagagagtacccacgtgctcca

SEQ ID NO: 781778 - DNA, 98 bp, Homo sapiens
tgcgcgcggccccgcccccgccggttcgcgtctctctgctgcggcgcggggaccgctgtgctctcggctgctctttggcgtaaattgcaatcgattag

SEQ ID NO: 781779 - DNA, 100 bp, Homo sapiens
gccagcggcaggaccagcgggcgggggcccacgagtgtcgtgaaaactacccctaaaagccaaaatgggaaaggaaaagactcatatcaacattgtcgtc

SEQ ID NO: 781780 - DNA, 100 bp, Homo sapiens
aaggagactcacttatgtgcacaatggtggcgacatgtctaagaatgtgagccagtcacagatggcaaaattgaaccaacaaatggccaaaatgatggat

SEQ ID NO: 781781 - DNA, 98 bp, Homo sapiens
ctcctcgcagttggactggtgggaactgggaacactggagacctgatttctaactgacgctaccgtcgcggccgccgatcctctggaccttctccatc

SEQ ID NO: 781782 - DNA, 100 bp, Homo sapiens
cccaaacgtgagaagcacacggctgatttcttaattatattcatgccaagaatgaaactagtgatcgagaagatggcctccccaaaggacatcatgtgac

SEQ ID NO: 781783 - DNA, 51 bp, Homo sapiens
cttggagacggacttgcttccgggtcgacaagtgcccccaatgatttatgg

SEQ ID NO: 781784 - DNA, 100 bp, Homo sapiens
cacgcagagtgtaaagtctcagatcaaggattcggagaaaggtctctacaggtccctcctcgttagtatagtgaacactctgctccagccaaggtggtga

SEQ ID NO: 781785 - DNA, 75 bp, Homo sapiens
tggtagcccccacccctctccgtccatggccccagatgacacttcagggtttccaaggcaagaccggccctccag

SEQ ID NO: 781786 - DNA, 100 bp, Homo sapiens
ctgctgtgggcgctgctggcgctctggctgtgctgcgcggcccccgcgcatgaaaacaaccctttttgctgcacatgtaagtggagctgtgcttaccttt

SEQ ID NO: 781787 - DNA, 78 bp, Homo sapiens
cacggttctttgaattttacctaattgtctctaattcttaacaattctttgaggccataaaattttgagtagaaaaat

SEQ ID NO: 781788 - DNA, 74 bp, Homo sapiens
agccaatgatcttttcaatgctgcgaaagctgccaaaagtgacatgcaggtgctgctgcatgaggaggcgggtg

SEQ ID NO: 781789 - DNA, 88 bp, Homo sapiens
ggattccagactcgtgggggaaaggctggttgaattgaccaaagcaatggtgatggagaagcctagtcccctgctggtcgggcgggaa

SEQ ID NO: 781790 - DNA, 50 bp, Homo sapiens
aatgcagtcagtctgttgatgaaactattccgtgcactggagaaggcgag

SEQ ID NO: 781791 - DNA, 74 bp, Homo sapiens
tgggctgatcctgaaggccattccagccagcgacacagaagattggagaaatgaaggcagaggtcaccaaacta

SEQ ID NO: 781792 - DNA, 82 bp, Homo sapiens
gtggactccttcggcagtccacccaccgccgccgcctcccaggatcatctcaaaaatggctacagaagaagattttgtcgac

SEQ ID NO: 781793 - DNA, 75 bp, Homo sapiens
ctgggatttcaacctgaaagtggaggctgcgaaaataggttatgatgtgattgctcaagcccaatctgggactgg

SEQ ID NO: 781794 - DNA, 100 bp, Homo sapiens
ttcttcttgtgttctcaatcacagaacatgaatcctttacagcaactgccgaattcaggtcccgcagcccccggaagccaatagactccctcagggactc

SEQ ID NO: 781795 - DNA, 75 bp, Homo sapiens
gtctcttctgctgggaaatcccagctctgaggactgctcagctggcccaggcccccctccccagcagctgcccca

SEQ ID NO: 781796 - DNA, 100 bp, Homo sapiens
ggaggagacggcttggaaaacggagagactggggagaagcatcagcaatgcagaagcacggcagccagggaaggcccccaacttcagtgtcaactggacg

SEQ ID NO: 781797 - DNA, 100 bp, Homo sapiens
acacgtcagcgaaacccatctgatcgacatgttattatgtatgtccctgggaagctgcatgatgtggaacacgtgctcatcgatgtgggaactgggtact

SEQ ID NO: 781798 - DNA, 98 bp, Homo sapiens
tggagtgaaggtcacgtcgccatgataacatccctgaggacctcagagaccctttctacgttgaccagtatgagcaggagcacattaagccgcctgtt

SEQ ID NO: 781799 - DNA, 83 bp, Homo sapiens
ctctgggatcccggccaccagcaattgtccgggctctggaacttcatccattctctatgaaacctcttctgaggcgggcgatg

SEQ ID NO: 781800 - DNA, 75 bp, Homo sapiens
agagagcctgcggaacctgcgcggctactacaaccagagcgaggccggatccctccccgcggcggcgatggcccg

SEQ ID NO: 781801 - DNA, 75 bp, Homo sapiens
atgatgcagacatggcgcgtcttctggagcaatgggagagttctatctctggggtgactgccgcatataaccgag

SEQ ID NO: 781802 - DNA, 90 bp, Homo sapiens
ggctctgcggggaattgtgaggcggactgcgagggaaagggggccttgttgagtccgccagggcgaggacatcctagacaggagctcgga

SEQ ID NO: 781803 - DNA, 101 bp, Homo sapiens
agagttgcagcctgtcaagaccttttggatcctgattcagccatccatcgttattaggtggtaataagctgcagtcaacaggaaataaagcagaagacata

SEQ ID NO: 781804 - DNA, 100 bp, Homo sapiens
ccctccccactgttaccaacatgaagctgctcgcagcaactgtgctactcctcaccatctgcagccttgaagatttctgaggggagcacagctctatgga

SEQ ID NO: 781805 - DNA, 118 bp, Homo sapiens
ctcaggcgattacaagacgattcacctgtccagcatccgaccaccgaggctggagggggagaacacccagaagaagctcattcacacagaagacccatttaatgatgaacatcaggag

SEQ ID NO: 781806 - DNA, 100 bp, Homo sapiens
cctcaccaagaagctactggacctcgttcagcagtcatgtaactataagcagcttcggaaaggagccaatgaggcggggtgcaggcagattcaagacctg

SEQ ID NO: 781807 - DNA, 80 bp, Homo sapiens
ctgtgaccacacttccctatatggtgcagaccatgaattacgtggggcagttagccggccaggtgtttgtcaccgtgaag

SEQ ID NO: 781808 - DNA, 82 bp, Homo sapiens
ggcgcttcggcccgggccgctcaggtgcagcagcccctgtcaaagggaacaggaagcagtccacggagggtgacgccctaga

SEQ ID NO: 781809 - DNA, 82 bp, Homo sapiens
gcaaaccgggaaaggagaggatcccggagccggtcttccactttcgccttggtgcctgtcttcgcccacctgagcatcctcc

SEQ ID NO: 781810 - DNA, 100 bp, Homo sapiens
ctccctgtcacatgatacagccactgggcttatacagtatgcattggaccagggcgtgaacgtcacccagtgcacagccagagaacaacacatcacacac

SEQ ID NO: 781811 - DNA, 101 bp, Homo sapiens
tgaggctctgcggctggtccaggccttccagtacacagacgagcatggggaagctttggacatcagacagtgcaggagaagaatgtgatgcggcagaaggg

SEQ ID NO: 781812 - DNA, 88 bp, Homo sapiens
gaagatgaggaggtcgctgagagctgggaagaggcggcagacagcggggggttatggttttgtgaaattcacagatgaactggaacag

SEQ ID NO: 781813 - DNA, 100 bp, Homo sapiens
ccggtttttagtccattgactatgcagcctaatggcataaacttggaggaggcagtggagagagcatcctggtatcacagcttcagcatggactgacgtt

SEQ ID NO: 781814 - DNA, 73 bp, Homo sapiens
gcacatcagtgatgaatgcaagaggcgtttctataagaattggcccaacagcgccctggaatcctgctccttc

SEQ ID NO: 781815 - DNA, 93 bp, Homo sapiens
cagtgccatagctcctttgggagatctggaccaggatggtttcaatggaaaaatgccagctgtgggacaaggagtgcaggccgcacaacctcg

SEQ ID NO: 781816 - DNA, 75 bp, Homo sapiens
gaaccaattgttttacagtctgttccgcatgatcgttataataaggtacagcagggaagaactggaaactcagag

SEQ ID NO: 781817 - DNA, 75 bp, Homo sapiens
catgattgtgaggcctccccagccatgtggaactttcgagcatcagacaagcggatagcttgtgatgaagaattc

SEQ ID NO: 781818 - DNA, 103 bp, Homo sapiens
cgcgtggctggaagacatggccactccagtcggtgttgagcacggcgagcagtctcaggcctttagtgatgatgtgttctaagaacggaagcatctgggctgg

SEQ ID NO: 781819 - DNA, 88 bp, Homo sapiens
gacttggcggatcttacagagcagcaggatgaccggaaagaagggatgaccgcgtttgtggaaaagagaaaggccaacttcaaagacc

SEQ ID NO: 781820 - DNA, 72 bp, Homo sapiens
gggacctggaggggacgctggggccgaagcagcatgtgacaccgaccagtttccctgaaacctgggctcttg

SEQ ID NO: 781821 - DNA, 75 bp, Homo sapiens
acaaaagagttgattgaaattatctctggtgctgcagctctattgttaaaggaaatgggctggcaggaagacagt

SEQ ID NO: 781822 - DNA, 75 bp, Homo sapiens
cttcatcaaaaatagtgatagctttgataagcttgcagatgggtcaagggttgtggagagtggtcagaaaccagc

SEQ ID NO: 781823 - DNA, 98 bp, Homo sapiens
aaaccatcgaagaatgaaaccggcttgttgtcttcaattaaaaaatttattaaaggaagcacacctaaggactatcctattaagtgtaatctcactgc

SEQ ID NO: 781824 - DNA, 74 bp, Homo sapiens
agaaagactccacctactatggagcacagaagagatccccttgaagattttagctcataataactttgttggac

SEQ ID NO: 781825 - DNA, 138 bp, Homo sapiens
atatggctgggtaggagtggtgaagctggaacagccagaattggacccgaaaccatgcctcactgtcctaggcaagagtgcagcagctgccccgagccccgtgcttggcaacattccccccaacgatgggatgccggg

SEQ ID NO: 781826 - DNA, 90 bp, Homo sapiens
aaagaatctaaacagcctgcctcacaactccaaaaacaaaagggagatactccagcttcagcaacaggttgatgctatgaaactgggagt

SEQ ID NO: 781827 - DNA, 49 bp, Homo sapiens
ggccaacatgagcttcttgttgttgatgataattagaagcatgctttcc

SEQ ID NO: 781828 - DNA, 100 bp, Homo sapiens
aggatgaacagaatctgccggatggtgctggccacttgcttgggatcctttatcctggtcatcttctatttccaaatagctgctgctggtggtgacaatg

SEQ ID NO: 781829 - DNA, 75 bp, Homo sapiens
ataaattcttttgaactagatcgagctgatagagaccctagtaacatgtgggacaattgatgactgtgagttggt

SEQ ID NO: 781830 - DNA, 98 bp, Homo sapiens
aaagaaccagcttaaagatatggctattgctactggtggtgcaggtcccctcctaaccgcaagcgtcctgctaacgagaaggcaactgatgactatca

SEQ ID NO: 781831 - DNA, 100 bp, Homo sapiens
gacgagtggtgggagaaccagccgactggagcaggcagcagcccaggtcacagtaatgaaaggcagtaatagaaataaggatcattcagcagaaggagaa

SEQ ID NO: 781832 - DNA, 100 bp, Homo sapiens
gaagaattagtgtctccatcgtcatcagaaactgaaggcaactttgtctatcgcacagagtgtgaacatggctacgcctcttcattcccgtccatgccga

SEQ ID NO: 781833 - DNA, 50 bp, Homo sapiens
tggaccctcctcccaactgtagatgtggtgaagctgtagagaaaaacaag

SEQ ID NO: 781834 - DNA, 90 bp, Homo sapiens
gaagcacagagttcagtatgaaatgagaacactttacagatgtttagagaatgcccaggaaaaccatgggctggctgtgcccaccccctc

SEQ ID NO: 781835 - DNA, 50 bp, Homo sapiens
cttggattcagacgccgattcgcccagccatgaagctcatgactgctctg

SEQ ID NO: 781836 - DNA, 82 bp, Homo sapiens
gagctcagacctgccaatttaccagagataattgataacaccctgtaacagctgaggcgaactttctgaccaagtatacaac

SEQ ID NO: 781837 - DNA, 98 bp, Homo sapiens
gagctttcacaattgcagcagatgaagatccattggtaaattgatcaggatttttggcctaccctccaaagaaaagaaaaacctatacctgctgaacg

SEQ ID NO: 781838 - DNA, 82 bp, Homo sapiens
atcctggccagcctgctcatcgcctactgcagcaacatgagtgagaatgaggaagaggaaatttctcagcaagaaggcagtg

SEQ ID NO: 781839 - DNA, 76 bp, Homo sapiens
gtttcctgaaagaacaactgttactgaattacctcagggtgtccgcaatgttgccagtgtctgtctgcagattggc

SEQ ID NO: 781840 - DNA, 75 bp, Homo sapiens
gacaaccccttcggagacaacaacctgctgggcaccttcatctggaataaggcctgtaactgtgaccagtaccta

SEQ ID NO: 781841 - DNA, 100 bp, Homo sapiens
gaacttctgcttctctcgggagaaggctggttgtagcatgagcgtcatggagtcattaaggaggaaggaaggttctcaccctgctcctgctcagcgtccc

SEQ ID NO: 781842 - DNA, 77 bp, Homo sapiens
ggatgagcaagacctaaatgagcctcttgccaaagtgtcccttttaaaagagattgccttgcaacaggtttccatgt

SEQ ID NO: 781843 - DNA, 98 bp, Homo sapiens
tactatgtgcaatgtttccaagctttacttcgatgtgaagaaaatgttaaggagtcatcaaggaaaatgttggggcttttcaggaagcataataagat

SEQ ID NO: 781844 - DNA, 75 bp, Homo sapiens
ctcggagcaacgagcgcagcgccgccaccctgaagggtcccttcccaagcccttagggaccgcagaggacttggg

SEQ ID NO: 781845 - DNA, 75 bp, Homo sapiens
accagcaaccatgagtggttccatgatgggaagtgacatgagttacactgttagaccttatgatagccaagataa

SEQ ID NO: 781846 - DNA, 95 bp, Homo sapiens
agtggcacaacaaatccatggcactgaaatagacatgaaggacacagccagtgtgaagtcctctagtagtcttgaacccaatcttttttgtgatg

SEQ ID NO: 781847 - DNA, 99 bp, Homo sapiens
attttcaaaaacacaggaagcaaaattgaagaggattttccacacatcagatcaattctgcttggtcagaatcgtgatggcattgtgttcagcactgat

SEQ ID NO: 781848 - DNA, 110 bp, Homo sapiens
gtccccggccgggacgcgggtcgcgtcgttgtcctccgcgagcgtccggattgcagacctgcctagagctggaacgttacctccagagcgagccctgctatgtttcagcc

SEQ ID NO: 781849 - DNA, 100 bp, Homo sapiens
ccggcgtccagctctgccccgacagagacggaggagccggggtccagtgcagacttaattcagtgcacaaatgagatgaatgtgaacatcccacagttgg

SEQ ID NO: 781850 - DNA, 100 bp, Homo sapiens
agtcaatgcccgtgcccgcattgtggctgaagagttccttaagaatgggacctatattcagagacttaaccggacacctggacagaccattacaacttgg

SEQ ID NO: 781851 - DNA, 75 bp, Homo sapiens
tttgaagagttctgcgttttgccagtcacctctcaactgtgtgccaaaggccacttgtgtccttcactaatcaga

SEQ ID NO: 781852 - DNA, 115 bp, Homo sapiens
actgcgccgagctgcacgtcctcgaacgcgaggccaacagccccggtttggttgggatgttccagtaattctgagaaattcagaagagacccagttcagcacaagagttttcaaa

SEQ ID NO: 781853 - DNA, 100 bp, Homo sapiens
gaccctcgcgcgcgaccgccgaatcgctcctgcagcagaggattttttatcaagcagaaatgcatcgaacaacgagaatcaagatcactgagctaaatcc

SEQ ID NO: 781854 - DNA, 98 bp, Homo sapiens
cgggggctgctgcaatgacgagggcctggagtgtgtgcccactgaggagtccaacatcaccatgcagatcaatgaactgagccatgttcaaatccctg

SEQ ID NO: 781855 - DNA, 100 bp, Homo sapiens
aactttttcacttactgcaggattttcagcttcagcaagcagggtgttttgaatgctgtatcaaatgcctggggggcattccctatgcctctctgattgc

SEQ ID NO: 781856 - DNA, 74 bp, Homo sapiens
gccgattcctcctccttggtcgccgcgtccttggctggcgtggtaccgtgagggttttctctggaagcgtggcc

SEQ ID NO: 781857 - DNA, 90 bp, Homo sapiens
gggatttttagcccagcccatgaaggcaatgtatcaggaacacagaggttggattctgctacagtcaggacttactcctgctaaagtctc

SEQ ID NO: 781858 - DNA, 88 bp, Homo sapiens
gtgcagagcactgcgctgtcagcgatagcccagtggatggccattccagatgtatgtccctgggaagctgcatgatgtggaacacgtg

SEQ ID NO: 781859 - DNA, 82 bp, Homo sapiens
ggattccaagtaactcttatttgagatgagcatcaggattttatggatgagcaaaaacgactaaagaagcttcgtggaaagg

SEQ ID NO: 781860 - DNA, 100 bp, Homo sapiens
acgctgacgtcggacccacggctgccgtacaaagtaaccagaagagtgtgttaattgcacagatgaatgccgagtgcttggtcattctgacaggtgctgg

SEQ ID NO: 781861 - DNA, 82 bp, Homo sapiens
agcggccgagcgggcggcttcctggcctgggcgctccggtggcggcggagtgccaggccgggcacctggtgtgtaaccaatg

SEQ ID NO: 781862 - DNA, 50 bp, Homo sapiens
ccaagctcgtagcctgccactccgtgcgatgcctttgtggaactgtacgg

SEQ ID NO: 781863 - DNA, 96 bp, Homo sapiens
attttgaaaatgctttgtgcagaaaggaatcaaaagaatatttagaatgcaggatggagaggttgaaggtcgaggagctggaaggcgagcggagtc

SEQ ID NO: 781864 - DNA, 117 bp, Homo sapiens
gccaactccaatgggcctttccagcccgtggtccttctccatattcgaggtgtcatggagaaactccagctgggcccagagattctgcagcgggaaaatccaaggcttatttatgcc

SEQ ID NO: 781865 - DNA, 74 bp, Homo sapiens
tggactgtgaagagtgaggagaccatagctgcacagccagactggcattgctcgggtaccacttgctggagctg

SEQ ID NO: 781866 - DNA, 100 bp, Homo sapiens
gctgcctcaaatcgtcgtagtgggaacgcaggtttttgattggtcaaggagcacatgtaggggctgtcaacagtgaaggagatacacctttagatattgc

SEQ ID NO: 781867 - DNA, 97 bp, Homo sapiens
tcggctccctgcctccgcgtcgcagcccccgccgtagccgcctccgagcccgccgccacatcctctgagggaatttctcttcaatgccattgaaacg

SEQ ID NO: 781868 - DNA, 100 bp, Homo sapiens
ctgacaatgacctgcccgtcgtccaaggcagctcctccttctccctgaaaggctagatgaacagtgtagtgctattcccacccgtaccatgcattttgag

SEQ ID NO: 781869 - DNA, 98 bp, Homo sapiens
aggatgtggcctggcacctgctgcacgagtcattgtttggatctgttgctgatgatcagaaacttatgatggagcccacctacgatgcagaattccag

SEQ ID NO: 781870 - DNA, 83 bp, Homo sapiens
aacccactgaagacgtctgcgtgagaatagagaccaccgagagacaaggtctcaccatgttgcccagaatggacccgaactcc

SEQ ID NO: 781871 - DNA, 75 bp, Homo sapiens
atagagttgagcctgtgggacacttcgggtgacagagctgaatgaacctctctccaatgaagatcgaaatctcct

SEQ ID NO: 781872 - DNA, 83 bp, Homo sapiens
gatgcgtgttcgcgggtgtgtgctgcgttcacaggtgtttctgcggcaggataaagataaagtttctctaaccaagaccccaa

SEQ ID NO: 781873 - DNA, 75 bp, Homo sapiens
tgccaacaacgggcactacaagacagacagtctagcagtgcttccttggagaccctgttagcacttcttcaggca

SEQ ID NO: 781874 - DNA, 74 bp, Homo sapiens
gaccaccctccactgagtgcggagcagccaaggatgatcggctgaatgtaacagaggaactaacgtccaacgac

SEQ ID NO: 781875 - DNA, 107 bp, Homo sapiens
ccgctgtgtggttgcaacggagataaattcccggaaccgcgattcggcgtgtcagacctgcctagagctggaacgttacctccagagcgagccctgctatgtttcag

SEQ ID NO: 781876 - DNA, 100 bp, Homo sapiens
ccgtcctgggcctcccccatccaccagcagcccccacctcaccgcccattcagaaccctctgcaggtcctggtgaacgccatcatcaacagtggtccccg

SEQ ID NO: 781877 - DNA, 50 bp, Homo sapiens
aggaagtgaaccctcagaacttataaaggaatgatgagaagacagcagct

SEQ ID NO: 781878 - DNA, 75 bp, Homo sapiens
cagaagcagatggattcgtccttttagtcctattttgtaacggattatgatccaaccattgaagattcttacaca

SEQ ID NO: 781879 - DNA, 110 bp, Homo sapiens
cagaaatgttgcttctacttttgaggcgcttccctgaaacggtggtgcagcatgggttgtggtcagaaatgagaagacatgaaatgttgagggaggagctgcgacagaga

SEQ ID NO: 781880 - DNA, 100 bp, Homo sapiens
cccaacagaagctgaattgcaggatatgatcaatgaagtggatgctgatggtggcgacatgtctaagaatgtgagccagtcacagatggcaaaattgaac

SEQ ID NO: 781881 - DNA, 82 bp, Homo sapiens
caactgacaagcccttgcgcctgcctctccaggatgtctacaaaattggtggtgacaaaacacgacagccttcttcaagccc

SEQ ID NO: 781882 - DNA, 89 bp, Homo sapiens
aagagcccctcatcgagctcttcgtcaagatctcaaagacggaattagattggttccttcaagatttggaaagagaaattaaaaaatgg

SEQ ID NO: 781883 - DNA, 75 bp, Homo sapiens
tggaaccctgcgtccaggcgtgacggtcatcccgaaaggccggccccaggtctcctctgagcctccggcctccat

SEQ ID NO: 781884 - DNA, 100 bp, Homo sapiens
gtcagagcgagtctcggagaagatgtggtggcttccgtttgttggtggaggaggtggcaggcctcggcgatgaaggcattttcaaagctggagcagagag

SEQ ID NO: 781885 - DNA, 98 bp, Homo sapiens
cggcagccgagcagcctggcaacggcggtggcgcccggagcccgaggacactggggttgggaaatcaagcatcgtgtgtcgatttgtccaggatcact

SEQ ID NO: 781886 - DNA, 100 bp, Homo sapiens
actatggggcctttatcaaaatcccaggctgtcggaagcaagccgattcgaagacagtctcttacacctcctcctcagaacactattacatgggaagaat

SEQ ID NO: 781887 - DNA, 100 bp, Homo sapiens
caaggcttcaggcgacccgtactgggcctactctggtgaggccgcaggcggtgctctgggtccgggagcgctgtccccagcatgaacgcggccggcggcg

SEQ ID NO: 781888 - DNA, 100 bp, Homo sapiens
cataaatttgaggaagctttgaagatctagtgaaaagccatttgatgtatgcggtcagagaagaagtggaggtcctcaaagagcaaatcaaagaactaat

SEQ ID NO: 781889 - DNA, 100 bp, Homo sapiens
aaagtgactgatgaagggaaggaaatcatgtcaagcgaagccttgaaaaagctgccctgagacggtgtcccgccgaaagattcaattagcagagcctcac

SEQ ID NO: 781890 - DNA, 98 bp, Homo sapiens
tcgcagtggtcgcttcttctccttggcttgcccacaggtgacgttcccatggatggcatgtccgtgtctgacctgggtcctgtggtgctcagcctttt

SEQ ID NO: 781891 - DNA, 75 bp, Homo sapiens
agaacttcgagctatgatagaagaatttgacaaagatggtgatggagaaaaataccctgaagatgtagctcctac

SEQ ID NO: 781892 - DNA, 100 bp, Homo sapiens
tggaggtggccgtggaggcagaggtggcatggggtgtgaagcttacactctctgctctggtagatgggaagagcattaatgctggaggccacaaggttgg

SEQ ID NO: 781893 - DNA, 71 bp, Homo sapiens
tgatttgcaacccttccgggaagccatagctctgcatggcgttgacccggacgacacctataatgagaccc

SEQ ID NO: 781894 - DNA, 100 bp, Homo sapiens
gctgaggagaggagcgtcaacagcagcaccatgggacccattccaacaatctcgtaaaacatggtggattactatgaagttctaggcgtgcagagacatg

SEQ ID NO: 781895 - DNA, 103 bp, Homo sapiens
cttgattccagggcctgccctgctcctggtggcacccagtggcctgtactactggaatgtatcctgtcaggtataatgtcagtgaatggcaagaaagttcttc

SEQ ID NO: 781896 - DNA, 90 bp, Homo sapiens
tgagagtggcaactttagagtacacacagtcatgaccctagaacagcagtccctctctgaaaagtattccaacgtgatattccttgaagt

SEQ ID NO: 781897 - DNA, 100 bp, Homo sapiens
ccggatcaatccagatggcagccagtcagtggtggaggtcaatgagctgaaggagaaaggcaacaaggccctgagcgtgggtaacatcgatgatgcctta

SEQ ID NO: 781898 - DNA, 100 bp, Homo sapiens
gcaagtccaagaggaggaggaggcggaggtccaagcggaaagccttgttgtcctcctggtgcgaagagctcggccgcctgctgctgctccgacatcagaa

SEQ ID NO: 781899 - DNA, 50 bp, Homo sapiens
caggaggcagtagccaaacacccaggttggccttcattccacgatgtgat

SEQ ID NO: 781900 - DNA, 74 bp, Homo sapiens
gatctgtgtgcccacagctcctggagccccacagccctgaccctctattctgcaccctgtgagccaccgagact

SEQ ID NO: 781901 - DNA, 50 bp, Homo sapiens
ggcctcgctggagatcgagtaccaatttcattcattggctcccatgtact

SEQ ID NO: 781902 - DNA, 100 bp, Homo sapiens
tgtgctatttgacctcttggtttcagagagctccctggaccatctaatggctatgggagatggtagtctgggttggaggaggcagagccatgaccaaggg

SEQ ID NO: 781903 - DNA, 73 bp, Homo sapiens
ccaaatcctcttctccaagaagccgggtgttcccagacaaagaggtcatgctggatgctgccttagcgctggc

SEQ ID NO: 781904 - DNA, 89 bp, Homo sapiens
gcgccgctgggcctgcaggtctctgtcgagcagcggacgccggtctctgttccgcaggatgaaggaaggggagttcaccctgcacggcc

SEQ ID NO: 781905 - DNA, 100 bp, Homo sapiens
agaacatatgggaccagatcctcagtatgttggaaagccagagactgctgctactttgaaacgtacgatagaggccctgatggacagaggagcaatagtg

SEQ ID NO: 781906 - DNA, 100 bp, Homo sapiens
aaaacgccaggcggatctcagaaggccagttcaaaggagacaaatgacctgaagcgtgctggactcatgcttcaagaagcagataaactgggctgcaaac

SEQ ID NO: 781907 - DNA, 82 bp, Homo sapiens
tggaagacgcgctcctgcgccggtgtggatgaggtcaccattgtcaacattttgaccaaccgcagcaatgcacagagacagg

SEQ ID NO: 781908 - DNA, 101 bp, Homo sapiens
atttgttttcatgctgaagatttcttagaagtagttcaacgaatgcagttagatttacatgaacctccactgtcccaggtgcaagttcttcagtctgactg

SEQ ID NO: 781909 - DNA, 88 bp, Homo sapiens
ggaatgtctgcagaggttcgctgacagcctacaggaggtggtgaactaccacatggtgcggagctctggactgggattaagaaggggc

SEQ ID NO: 781910 - DNA, 140 bp, Homo sapiens
tttgaagccagagaaaataatgcagtgtatgccttcttaggcttgacagccccacctggttcaaaggcagccctggaagcattagatgaactggatctgtttggtgtgaaaggtgggcctcaatcagttatccatgtcct

SEQ ID NO: 781911 - DNA, 100 bp, Homo sapiens
tccttgaggacaattttggcctattcagaagaggacacagccatgcagatgactccttttcccacccaggccgcaaaagataagtaccgtgaattggctg

SEQ ID NO: 781912 - DNA, 98 bp, Homo sapiens
gcggggtccgccgggggaggcggattgttctctggggccggactgagaaatgcctgaaggagacgacggaggagatccggcagatgggcactgagtgc

SEQ ID NO: 781913 - DNA, 83 bp, Homo sapiens
cgctccgacggcggtccatcctggcatgccagatttcctggagaagctgcacatggccactctgaaagccaagaatatggaga

SEQ ID NO: 781914 - DNA, 144 bp, Homo sapiens
caagtcgagactactggccgaaggggcgtctgcggctctccgccgtccccagccctgcctctccctgggctctgatctttaatctcatgaagtacgacagctacagccgcttcttaaagtctgacttgtttttaaaacacaagc

SEQ ID NO: 781915 - DNA, 100 bp, Homo sapiens
actatcgagattggaaccacagaagtttttcagttatgggacaaaaatattatatcaaaacactgaagctttgcaatctaaattcttttcacctcttcaa

SEQ ID NO: 781916 - DNA, 101 bp, Homo sapiens
tggcttctgtccctgctcagtcggccaagaagccctgcccaggacctgttactatgactagtgtacaccccccaatacgttcacctagtgcctccagcgtt

SEQ ID NO: 781917 - DNA, 90 bp, Homo sapiens
caacccccttacagatgagaataaagaacacgaagctgatacagggcctgttgcagcaggttcagggtcctcggctgccctggacgcggc

SEQ ID NO: 781918 - DNA, 83 bp, Homo sapiens
cggcctcccagccgcgttctcctccgccgctcctccgggcttgccctggagccctcagctcaccatggatgatgatatcgccg

SEQ ID NO: 781919 - DNA, 83 bp, Homo sapiens
gctgccagaagggctgagggcttctgcagatgctaagaagagggaacaccctgaagaacatagagaaggagtgcaatgccaag

SEQ ID NO: 781920 - DNA, 75 bp, Homo sapiens
agtgggagagctgctgaagtcaaaggagcaattgctggtcctgagcctgaggattttcctaagcccagtgaagag

SEQ ID NO: 781921 - DNA, 101 bp, Homo sapiens
agaaaaacggccaagaggcagacctaggaaatgggatgtggctgggccgccgggccctgtgcgctctggtccttctgctcgcctgcgcctcgctggggctc

SEQ ID NO: 781922 - DNA, 100 bp, Homo sapiens
ttgcctaaatgaggaatgtctttcctaccatctaaaatacgaaggtttctggctgggtctacctgcaagtcggatttcccaggttattgttggagatgag

SEQ ID NO: 781923 - DNA, 88 bp, Homo sapiens
gcgggagctggacggcgagcgcgagcggcgcgagaaagtgatggctggaccggcggaggaggcgggagcccattgtcccgagagcctg

SEQ ID NO: 781924 - DNA, 87 bp, Homo sapiens
gcttccccaagtagtccgatggcagcggctgtgccgaggcgcccaactcaggtacggttcctggagcagcagaacaagatgctggag

SEQ ID NO: 781925 - DNA, 82 bp, Homo sapiens
taggaagctgtgattttcaaagctaattatgaaaacatttatcattggaatcagtgggaaaagacagagtctctaatacagc

SEQ ID NO: 781926 - DNA, 74 bp, Homo sapiens
ggggctgccgccacggccgcccggagcctgattacatcaaccccagagccgtgcagctgggctcccttctcgtc

SEQ ID NO: 781927 - DNA, 93 bp, Homo sapiens
caagagtaacagcagcgccgtcccgtccgacagccaggcccgggagaagtgtcgtgaaaactacccctaaaagccaaaatgggaaaggaaaag

SEQ ID NO: 781928 - DNA, 101 bp, Homo sapiens
cagtgttggcccagaaactacaggctgaaaagcatgacgtaccaaacaggcacgagataagctaagtaatcatttgtttgaagaacttgccatggatgtgt

SEQ ID NO: 781929 - DNA, 111 bp, Homo sapiens
aagagcatgagttgttatgtgcttagtaatgttctggattataacacagaaattgtctctcaagaccaggtgagggagcacacgtcgcatttggaggcagagctggaaaag

SEQ ID NO: 781930 - DNA, 51 bp, Homo sapiens
caggacacccctgaagccgagaaatgatttgaaggccatatagagatctgc

SEQ ID NO: 781931 - DNA, 97 bp, Homo sapiens
attgtgttctgcaaaaaacaaaaaggatagcctccggcattccagtgttccttgcctgtatctccccttggttcaatagctaccagatttttggaag

SEQ ID NO: 781932 - DNA, 95 bp, Homo sapiens
gcaaggatggtgcagattttggcagattatggctttgtccccacccagcactgatgatattataaaagaccaagaagcgggacgttcaccatggg

SEQ ID NO: 781933 - DNA, 100 bp, Homo sapiens
cgccggggaggcagcgcgggatcccagcctcaggcgtgcgcggacggtgtgcgggtcatgatgatgggcagcgcccgagtggcggagctgctgctgctcc

SEQ ID NO: 781934 - DNA, 90 bp, Homo sapiens
cccaaatccaaatggatgaatgtagaccatcccattcatctaggagtccagaacacatattacataatggagccgggagacagactaggg

SEQ ID NO: 781935 - DNA, 90 bp, Homo sapiens
gtgaagatgaagatgaggagggagctacagcgttgaacaaccacagctctattcccatggacccaggccctcgggaccaaggatcacgtc

SEQ ID NO: 781936 - DNA, 96 bp, Homo sapiens
gatgtctttccggcagacattgggctttgaagacaagattcccaaaaggagattctctgagatgcaaaatgaaagacgagaacaggcacagcggac

SEQ ID NO: 781937 - DNA, 99 bp, Homo sapiens
tgaagactgattacaagaatcctatagaccagtgtaataccctgaatcccgatgtacagttacccagcacgtgtacctcctcctcctcctattgctcgg

SEQ ID NO: 781938 - DNA, 101 bp, Homo sapiens
actcgaagaacagctgtggaaagaagttgcaaaacactggataacgaaggaggcccaacttcattcaataaggagcctgacggatttatcccagacggtag

SEQ ID NO: 781939 - DNA, 100 bp, Homo sapiens
agaaactcgtcatgctaaaagaaatggacaaagatcttaactcagtggtcatcgctgtgaagctgcaggagcttgaagaaatccgcaaatgtgggatgaa

SEQ ID NO: 781940 - DNA, 75 bp, Homo sapiens
ttggctgcggggcccacctctctaagcctatggaaaagcttctggagtccctggagaagtgggagcgtctgaccg

SEQ ID NO: 781941 - DNA, 100 bp, Homo sapiens
ttcgttattaattatccattaacactcaagcctttctacatgagggataatgaagatggccctcagcacacgttttctgaatttccagatcccatgtggg

SEQ ID NO: 781942 - DNA, 75 bp, Homo sapiens
actaaggcggaggaactgagacgtttcgaattccaggcatttccggagagttcttttgaagtcacttcagaagga

SEQ ID NO: 781943 - DNA, 100 bp, Homo sapiens
tcggccgatgaagtgcagaggtttttttctggagccaaaaacctgtatatcatctccgtgaaggggatcaagggacggctgaacagacttcccgctgctg

SEQ ID NO: 781944 - DNA, 80 bp, Homo sapiens
tccaccgccatccgccaccatggttacctagggtatgaattaatacagacttggaaactctgaaagaacttagaatcagc

SEQ ID NO: 781945 - DNA, 100 bp, Homo sapiens
caggcagcatggaccacggttgctgggcggatggggagcgtctatggtcaggtgaaaggtgtagcagtcactcggcctacacccacagcatcgaccttgt

SEQ ID NO: 781946 - DNA, 100 bp, Homo sapiens
ccaggaggcggcggcggcgcggctggagtgagggagcagctggaggacaggcgggcagcggccgagccagatgtggacgagtgcagctccgggcagcatc

SEQ ID NO: 781947 - DNA, 90 bp, Homo sapiens
gcggaggcgggagaggcgagctcgcgatgagtggtctcggcaggctcttcgggaagggacttcctcgttctgcccatcttcctaacaagg

SEQ ID NO: 781948 - DNA, 89 bp, Homo sapiens
agctgggtcagtccgccgctcaccccgcggccgcaccttcccgccttctcagaacaaccccgtgccgcgcagccgacgcgaggttcccc

SEQ ID NO: 781949 - DNA, 51 bp, Homo sapiens
gccaacatgagcttcttgttgcagaaaccactaatactagcctcttgcagg

SEQ ID NO: 781950 - DNA, 101 bp, Homo sapiens
gcagtggatgcctactgggcttctgcaaccgctttccacgggtcaaacaggatttatgcatcatccatcattttttacgtctgagccaccaagtatttatc

SEQ ID NO: 781951 - DNA, 101 bp, Homo sapiens
tgaacgggcggcccctggagatgattgagccgcgcacgctacagtacaagaaaactgtcgctgaaaagcaggagaagagaaatcaggatcgcttgaggagg

SEQ ID NO: 781952 - DNA, 98 bp, Homo sapiens
agaggttccgtcagtgtctgatgtcagatttatctcatgctgtgcaggttgctgtagtaaaactaaaaaatgcagataaagtgtttgccatgaaaata

SEQ ID NO: 781953 - DNA, 96 bp, Homo sapiens
ccccatggggctggcctgcggcgcctgggcgctctgagaattcaaggaagccttctccctatttgataaagatggcgatggcaccatcacaacaaa

SEQ ID NO: 781954 - DNA, 90 bp, Homo sapiens
tgcagttgcagattctgtatttcagagccacatcatagggctgattgttgtgacattggccgtatgctggatgcccaaccagattcggag

SEQ ID NO: 781955 - DNA, 95 bp, Homo sapiens
ctgcctgcccccggaggtgcccacgcagctgcctggacaaaatgccagctgatgaagaccgagaggccgcgacccaacacctttgtcatacgctg

SEQ ID NO: 781956 - DNA, 98 bp, Homo sapiens
aaagacgggcgcctatcagtacacaataaggttactctttcaacctgatcagaacgcaccaccaattcgtctccgacacagacgatcacgctctgcag

SEQ ID NO: 781957 - DNA, 96 bp, Homo sapiens
acccagagatggccccgagcgagcaaattcctactgtccggctgcgcggctaccgtggccgagctagtgctgggcctaaaggagataacatttatg

SEQ ID NO: 781958 - DNA, 90 bp, Homo sapiens
gagaaaaaagaacgcctggtgaacggcatccaaaagctaaaaaccacagcctctcaggagaactgtgtttatgaaactgtagttttgcct

SEQ ID NO: 781959 - DNA, 100 bp, Homo sapiens
cgagaacgtgcgggaagagaagatcatcgagcatttcaaacggtatgatgccgggcgggacggcttcatcgacctgatggagctaaaactcatgatggag

SEQ ID NO: 781960 - DNA, 100 bp, Homo sapiens
ccctgcagttctgcctcacacggctcaagtcaccaccgtgaacaagggtgctgcagctgctgcgcatcatcactcgccacgacctgctgccctacgtcac

SEQ ID NO: 781961 - DNA, 95 bp, Homo sapiens
tcttttggacttcagccatgtccatgatgcctaccctgtgaagatctctcaccatccaaaaaagactgctctacactgggcctgtgtcaatggcc

SEQ ID NO: 781962 - DNA, 100 bp, Homo sapiens
aatagctcaaggaaacctttccaacacagatgtccaagctgccaagagtctccccaggacagtgctatcacccgggatattaaccgaacattcccagccc

SEQ ID NO: 781963 - DNA, 90 bp, Homo sapiens
aacttctgtttacatggaactcagacatctgcaaatcatgcaataagagctaactgccatcaagagccatcagtatgtcttcaagctgca

SEQ ID NO: 781964 - DNA, 50 bp, Homo sapiens
accgtcatattccacccattactaagggtgcatttctcacctgcactgtg

SEQ ID NO: 781965 - DNA, 100 bp, Homo sapiens
gctgaatccagtaccaaaaacgtcaacaacagttttacgcactgctcagcacgcaggcatgtgaggaagctgggcttaaaggagactccagcaaatggag

SEQ ID NO: 781966 - DNA, 75 bp, Homo sapiens
catttgtttcccttagccagcccgagcaagtaaagattgagcaggttgttgccctggatgcccaaaatattgtag

SEQ ID NO: 781967 - DNA, 82 bp, Homo sapiens
attccaactggtcatggtttcagttgcgatgcatgcaagtcggaggaaacgctagtgcagcaggaagttatgttcgtgatga

SEQ ID NO: 781968 - DNA, 87 bp, Homo sapiens
tggatcgaggagcactgtaagcctcagcttcccaagctcttccttcagtcccacgactacagtctgtattccttggatgtggaattc

SEQ ID NO: 781969 - DNA, 100 bp, Homo sapiens
aaacacagctcgacagtacgcctacttctataaagtcatccagtaagctgtgctagaacaaaaatgcaatgaaagaaacactggatgaatgaaaagccct

SEQ ID NO: 781970 - DNA, 110 bp, Homo sapiens
ccgggctcggcggcggcggccaggtccctgctgaatcacacgccgccatccgggaggcccagggaagaataacaagcctttgtattcatttgaagataatgcagactatg

SEQ ID NO: 781971 - DNA, 83 bp, Homo sapiens
ctccactccgtcccccgcgggtctgctctgtgtgccatggacggatctctgttgaggagctggcgcggaatctggtcatcaag

SEQ ID NO: 781972 - DNA, 75 bp, Homo sapiens
cgggatcccagcctcaggcgtgcgcggacggtgtgcgggtgatctgtgaaaatggttcgctattcacttgacccg

SEQ ID NO: 781973 - DNA, 82 bp, Homo sapiens
tcgggacgctgcacctcccgcgccgcacggtggacgaggggtgagcccctccagactccgaataggagatcaagagtttgat

SEQ ID NO: 781974 - DNA, 105 bp, Homo sapiens
catggaatgctgccgtcgggcaactcctggcacactgctcctctttctggctttcctgctcctgactgacatcaatttgccctatcttacaatggattcttctgg

SEQ ID NO: 781975 - DNA, 75 bp, Homo sapiens
gctcctgtcgtccgttctctcaggctcccgttcagtgaagcagagatggtttctgccatcaagcctcctcgtgaa

SEQ ID NO: 781976 - DNA, 100 bp, Homo sapiens
ttccagggagacaccgattataagaagagaaactcagcgctggggaagaagggtgcatgtagtctttggactggttatttctggttttgaagtaatcgaa

SEQ ID NO: 781977 - DNA, 97 bp, Homo sapiens
ctaagctgaataaagctgttttggaactgtcaggtacctcaaagcggaactcaaagttggcattcccgtcacggatgagaatgggaaccgcttgggg

SEQ ID NO: 781978 - DNA, 99 bp, Homo sapiens
gccgcccgcagcctgccgcccgccgcagggcgctgacggtcccgcacgtctgccgctgccaccggcgcgcccgaaacattaaccaggtggtatttgttg

SEQ ID NO: 781979 - DNA, 82 bp, Homo sapiens
cacacttatagatcttctgcactgtttacaggcacagagttgtctcccagagctccgtggaatttcctttctctgctttaac

SEQ ID NO: 781980 - DNA, 50 bp, Homo sapiens
aatagctcagatcctttccttaacaggaatggttttagggaagactgttg

SEQ ID NO: 781981 - DNA, 82 bp, Homo sapiens
ccgccgccaccatgcccaagagaaaggggatttgggagcagcttgtcttacacaaggacgaaggaaaaggtcagggatcgag

SEQ ID NO: 781982 - DNA, 75 bp, Homo sapiens
tatgaattggatatcaagccagagaagtgcccgaggagagttaacagtgatgtcttggcattgcccattttcaag

SEQ ID NO: 781983 - DNA, 132 bp, Homo sapiens
acctctatctcgcttttcccctggccttctgtatcttcatggtgcggctcatcttcgagagcctggagcattggtaagcgtcacactgccaaagtgagagctgctggagaactcataatcccaggaacgcct

SEQ ID NO: 781984 - DNA, 84 bp, Homo sapiens
atgattcagggtggggacttcagtgaaggatggctactttgcttagcaagttccggatagacttttctgatatcatggttctag

SEQ ID NO: 781985 - DNA, 83 bp, Homo sapiens
cgaggagaaggaggagtggattaagtgcattaaacaatgcagatcttcgtgaagactctgactggtaagaccatcaccctcga

SEQ ID NO: 781986 - DNA, 76 bp, Homo sapiens
tgggcatctaccagatgtacttgtgcttcctgctggccgtgctgctgcaggagtatagtcatggccaacagcaaaa

SEQ ID NO: 781987 - DNA, 74 bp, Homo sapiens
tcatggcctgccactgcgtgcgaggatacgaagcgttttcggcttcctgcccggagctgtgcagcaaacagtcg

SEQ ID NO: 781988 - DNA, 132 bp, Homo sapiens
attgaccaaacaagttaccatgcttactggaaatggaggtggatggaacatagaacaaccttccattctaaaccaaagctaaaagatggcggcaaggcagcccaggcaaatgtaagaataggcgatgtggtt

SEQ ID NO: 781989 - DNA, 100 bp, Homo sapiens
cttgacaaaagtgttcagctgtcatggaccccaggcgatgacaacaatagccccattacaattggagtcattcgttgcccagtttgcagccaagaatgtg

SEQ ID NO: 781990 - DNA, 100 bp, Homo sapiens
ctcagaagaatttgttcacataaacagattggttcgatggatgatgtactggattgtttttgctctctatactgtgattgaaacagtagccgatcaaaca

SEQ ID NO: 781991 - DNA, 100 bp, Homo sapiens
gcctgagcaacatccgcgagttcctgcgcggctgcggggcttccctgcggctggagttgtcgccgtgatcctgaaggcgctgacctacgacgagaagcgg

SEQ ID NO: 781992 - DNA, 98 bp, Homo sapiens
tggcgggtgtccaactggactgccatgaaggaggcgctggtgcaggccctggagggacaggaaagccagaaatggacttcgtgagactcgctcgactg

SEQ ID NO: 781993 - DNA, 98 bp, Homo sapiens
attccttttgggacgccaattgaatcaacagtgagacaattatgaaaccagcttcaatttcagaggaagaattgttgaatttaatcaataaactgaat

SEQ ID NO: 781994 - DNA, 96 bp, Homo sapiens
ggagtttgatgaggagcgagcccagactcagggggcaggctctccccgctcctcccccagccacaccatcagcaggccaattcccatgcccatccg

SEQ ID NO: 781995 - DNA, 100 bp, Homo sapiens
acttcttaccgctgcatcctcagagcatgcttggtggtagaagactttttgaatctctccacacagctgtctggatttcatatttgtattgacaaaggga

SEQ ID NO: 781996 - DNA, 100 bp, Homo sapiens
cccgaagccccctgcaggaactctacaacccaatccagggagattctatacaagcaggtgaggaatcaccattctcagattctgtgaccttggaacaaac

SEQ ID NO: 781997 - DNA, 74 bp, Homo sapiens
agatcaccgtgacatccgaggtgcctttctccaaaaggccgcaccaggatgtcggacaccgaggagcaggaata

SEQ ID NO: 781998 - DNA, 76 bp, Homo sapiens
accatcatggacagtgacaaggttggatgactgcctgcaacaatatgtccacaagtttgaacgagagaagatcaac

SEQ ID NO: 781999 - DNA, 74 bp, Homo sapiens
cgcttgaacctgggaggcggaggttgtggtgagccaagatcgagaacggctactttgtacactactttgccccc

SEQ ID NO: 782000 - DNA, 82 bp, Homo sapiens
gaggcgcgggaggtgttcgagaacgaccccgagacgatccctgcatgtcactgagtccaccatgctttacagaagaagacag

SEQ ID NO: 782001 - DNA, 100 bp, Homo sapiens
cgacctgcaggcagcaccggaggcccaggtctccgtgcagcccaacttccagcaggacaagttttctttttaaaagcggaaggagagttttacatggaag

SEQ ID NO: 782002 - DNA, 129 bp, Homo sapiens
ttctcagggtcaagcaaataagtaaatggaggagccagaattataccccagccttggaatggatggctttggccaaccagttggcattcttggacgccctgccacagcatatggattccgccctgatga

SEQ ID NO: 782003 - DNA, 76 bp, Homo sapiens
tgacaaccttggaacagaacaagaggacaggaggtgtcgttccaggtgtttttccaggtctgaccacctggccctg

SEQ ID NO: 782004 - DNA, 100 bp, Homo sapiens
cctccatatttactggacagagtgctgtgctcagatgaaggattaccaacgtgaattagaagaagctcgtgcatccagagatgagatttttgctcaatcc

SEQ ID NO: 782005 - DNA, 74 bp, Homo sapiens
aggaggagccgagccgcgggcacaggcctctagactcaggactcaacaatgctttacaaggtttatctgtcata

SEQ ID NO: 782006 - DNA, 111 bp, Homo sapiens
tgaagacttgcagcaaggcttgctgaggctcacagaagatagccccagggccgttgctccagggagaactgcaaatatcttcatccacccccacatttaaaaacgcagttg

SEQ ID NO: 782007 - DNA, 82 bp, Homo sapiens
ggaccccgtacgtcactaccactgtctctgctcacagtgccaaggaggatacgaagcgttttcggcttcctgcccggagctg

SEQ ID NO: 782008 - DNA, 101 bp, Homo sapiens
ctcctttaagacggtctacaaaggtctggacactgaaaccaccgtggaagtcgcctggtgtgaactgcaggctgaactcacgggaatcaaatggcgtaggt

SEQ ID NO: 782009 - DNA, 83 bp, Homo sapiens
gctgaaaagcctccttcagcatcaacttgatacttctgtctccattgaggacttcctgcctgacacagctcacttcaagaagt

SEQ ID NO: 782010 - DNA, 78 bp, Homo sapiens
tcgtggtatgagagtggataatataatcaactcctctgcctgcagaggggactcaccagagatcactgggccagaaaa

SEQ ID NO: 782011 - DNA, 90 bp, Homo sapiens
cgggcggccgggagagtagcagtgccttggaccccaggcagtgcaaagccctaccctgtagagggtagtccaaggaagcgtgggaccctg

SEQ ID NO: 782012 - DNA, 100 bp, Homo sapiens
ttggccattcaataggcagctatttcacacttcagatgctgaagcgagtccctgagctcccgggttttgtctccacaattatccgtttacttgacagccc

SEQ ID NO: 782013 - DNA, 98 bp, Homo sapiens
ccatgatcgaaattagccggacccaggatgaagaggttggagatgggaccacatcagtaattattcttggtgctaagtgtggtggctcacacctgtaa

SEQ ID NO: 782014 - DNA, 100 bp, Homo sapiens
gcccttcagaggagaatgtccatgtacagccagggtaccccggaaacgcccaccttcaaagaccactccttctttgtatatttgaaggctcccatgattc

SEQ ID NO: 782015 - DNA, 50 bp, Homo sapiens
tggcaagaagcagatgcgcattttgatggatcatgtttgagaccttcaac

SEQ ID NO: 782016 - DNA, 51 bp, Homo sapiens
cccagtggcttccagatgtaaccaggtacaccaggggttggaaaaaccaca

SEQ ID NO: 782017 - DNA, 101 bp, Homo sapiens
agactgcgctcctggccctggggtattctcacagctctgcggcccaggcccaagggtgtcagtgtggaggcagttgatccagtgttccaagctaaaatgtt

SEQ ID NO: 782018 - DNA, 82 bp, Homo sapiens
gaggcgagcaggagcagggaacagaccaagatcactccatggatgaaatgacagctgtggtgaaaattgaaaaaggagttgg

SEQ ID NO: 782019 - DNA, 75 bp, Homo sapiens
acgtgtcaattccttagcattggccgaagagttaaggagttggtaatgcttctcttagaatataatgctgatact

SEQ ID NO: 782020 - DNA, 95 bp, Homo sapiens
tctgtttccctaggcctctgcgggagaagatgaagccggaaagtgaagctggctggagaggagtggttggggaggtgccaagacctgaacaggtg

SEQ ID NO: 782021 - DNA, 90 bp, Homo sapiens
aatttttgggaaggtgcaaggggtgtttttccgtaagcatactcaggtttccacttgagcggcacagtgacagaacctgcaatacaatcg

SEQ ID NO: 782022 - DNA, 100 bp, Homo sapiens
gctgccgaatttccaaattcatttgtgacactcagtatatgttctggtctcagttaaacatgctcagcattgatcatctcacagaccacaagtcacagcg

SEQ ID NO: 782023 - DNA, 98 bp, Homo sapiens
aatgctgcagtgtctgaagaagagcgagaagctgagaaagaggctgagcggaaggaggagaaaaaggcggctgcccctgctcctgaggaggagatgga

SEQ ID NO: 782024 - DNA, 74 bp, Homo sapiens
tgctgccaagggctacattgaggtgatgaggcttgccgctgttccgtaacccagtgattccagtcttggctgtg

SEQ ID NO: 782025 - DNA, 83 bp, Homo sapiens
gcactttgtggagaaagtcgtcttccacttgcacgaaagctttcctaggccaaaaagagttcaaaaggtgatgacctatcaac

SEQ ID NO: 782026 - DNA, 75 bp, Homo sapiens
agaaaacataccaatattgttgcacagactagtgctaaaatgatgtattttctggacaagtcaaggcaggagaaa

SEQ ID NO: 782027 - DNA, 123 bp, Homo sapiens
tggcccttgtggataagcacaaagtcaagagacagcgattggacagaatttgtgaagaataccctctaccatctgctttggtcagggtgccgctcgaggatttaaaagcaacaagaagaaaac

SEQ ID NO: 782028 - DNA, 83 bp, Homo sapiens
gtccgtccgccgccaccacccactccggacacagattttgagaagagggggaaaaaggaagtttgtcctgtcctggatcagtt

SEQ ID NO: 782029 - DNA, 101 bp, Homo sapiens
ctcctcgccctccccaccgacatcatgctccagttcctgaattgccaagaagatgcttttagaagaaattaaagccaatctttcctctgatgaggatggat

SEQ ID NO: 782030 - DNA, 101 bp, Homo sapiens
gagccgttgccgaacgtggtggagctgtggcaggcagaagaaggggaactcctgctgcccactcaggcctttctggagcaatgcattctcaagtgtttcct

SEQ ID NO: 782031 - DNA, 98 bp, Homo sapiens
caccgagaacatctactctttcaactacaccagccagcccgaccagtgagaaagatcagtctaaagaaaaggagaagaaagtgaaaaaaacaattcct

SEQ ID NO: 782032 - DNA, 74 bp, Homo sapiens
tgagatccaagtctctacagttaactggcaaagaagaattatagaccaatccagcaatgtggagatagcatctt

SEQ ID NO: 782033 - DNA, 75 bp, Homo sapiens
gtccgattgcgttatttcttctactccagtggtgagaaggactccaagccccctgatccttgatcagaactacat

SEQ ID NO: 782034 - DNA, 74 bp, Homo sapiens
aggaccccagatgtctgacagccctgtgtgacaccaagataagtaacgtgacaaggagccctgtgcacatccca

SEQ ID NO: 782035 - DNA, 98 bp, Homo sapiens
acaactacacctttgcccaacctgggattcaaatgaaagtgaaaatgttagaagaactcgtgagccggattgatgctggttttccaagaattgatata

SEQ ID NO: 782036 - DNA, 97 bp, Homo sapiens
atacagtgcgacagctagaattggaaaaccttacaataacgaaggaggcccaacttcattcaataaggagcctgacggatttatcccagacggtaga

SEQ ID NO: 782037 - DNA, 101 bp, Homo sapiens
acccaggcccctgtcaagaaggtgccggtggtgcgagtcttcggagcgaccccggcagctgtggaaatacaaagaactctgaatcaacttggaacacctca

SEQ ID NO: 782038 - DNA, 50 bp, Homo sapiens
caagacagggatcagatttataggatgatcctttcaaaaataaagccttg

SEQ ID NO: 782039 - DNA, 98 bp, Homo sapiens
ggacctgtcccacctggcggccatcgtcatcctgctgctgaagatctggaagacgcgctcctgcgccgtattctaccttgtaaatactgttatttgta

SEQ ID NO: 782040 - DNA, 50 bp, Homo sapiens
gacaagcgaggaagtttctttaaggatctcatggtccggaatgacacccc

SEQ ID NO: 782041 - DNA, 80 bp, Homo sapiens
aggtctctggagacatcttcagcagcttcatggcggctgaagagatgcattggcctgtccctatgaaggccattggtgcc

SEQ ID NO: 782042 - DNA, 74 bp, Homo sapiens
cccgcgccgaccgcgttcctatggacagacgcacagacacctgcaggccaagcagatagaacttcagttcacta

SEQ ID NO: 782043 - DNA, 97 bp, Homo sapiens
ctccagattcccatccacttccccaaggatttcttgtctgtgatgcttgaaaaagagacgaccaccggataattctttttatgtgcgaacatgtaac

SEQ ID NO: 782044 - DNA, 100 bp, Homo sapiens
gcaggccttccgagaggaacctctatgccgacatcgacgccgcctggcaggccctgcgcaccagacttccaccgctgtcagaaggcaatgaccgctaaag

SEQ ID NO: 782045 - DNA, 50 bp, Homo sapiens
gaaagatgacaccacctttgatgaggttgcctgtgatttgcttcggagga

SEQ ID NO: 782046 - DNA, 74 bp, Homo sapiens
tccggagacagcccaaatatcctcggaagagcgctcccaggagaaacaaaatgaaatttttggttcgacggtgg

SEQ ID NO: 782047 - DNA, 74 bp, Homo sapiens
ttaaacacaatcatggtgcctaccagttcttcagagaagcgttgcagagcaggggagagaagacagaagaggtt

SEQ ID NO: 782048 - DNA, 96 bp, Homo sapiens
tcagggacctttcctattcggttcctgaaggaccctggtggaggaagaaagtcctgatcacccgagaggatgacttcaacaacaggctgaacaacc

SEQ ID NO: 782049 - DNA, 101 bp, Homo sapiens
ttgcctaaatcagccaaacacagggatctaagcctttcccacgttatggttataaaccctccccaccgaatggatgtggctctccactgtttggtgttcat

SEQ ID NO: 782050 - DNA, 75 bp, Homo sapiens
caaaagcataggcaggctttcaaaaacagggaaacagtgcttcttagtcctacgtcagcagcagtttaatgtcca

SEQ ID NO: 782051 - DNA, 98 bp, Homo sapiens
cgcgaatatcgtcatcgttagaagttaccctgaagaatgctgctatgctactggaatttgcagcaatgtatagtgcaaaacagttgaaactgtcttgt

SEQ ID NO: 782052 - DNA, 100 bp, Homo sapiens
ttcaccctgcacagccttgttaggtcggagatgtccgcccagaggttaatttctaacagaacctcccagcaatcggcatctaattctgattacacctggg

SEQ ID NO: 782053 - DNA, 75 bp, Homo sapiens
ggatgtggagattgccacctaccggaagctgctggagggagaggagagccgatggagtttcactcttgtcgccca

SEQ ID NO: 782054 - DNA, 90 bp, Homo sapiens
tgcagcagaagctggtggaccagaacatcttctccttctacctgagcaggcccatggacagaccttcacgttcccagatctgtttcccga

SEQ ID NO: 782055 - DNA, 98 bp, Homo sapiens
tggagaattataggaacctcgtctccctgggtgtggtgttgggtggctgtggtgacaaatccattcgtttccgtcccacgctggtcttcagggatcac

SEQ ID NO: 782056 - DNA, 85 bp, Homo sapiens
cggggccaccggctggagcggatcccacacctccggaccgagggacgcgggtgtcagcttcctctggtgcaaccagcaagtcttc

SEQ ID NO: 782057 - DNA, 97 bp, Homo sapiens
tggagtagcgaggaatctgattccaagcaaaaaccagctgtgatgcagatccatccgccctagcaaaatatgttctggctttggtaaagaaagacaa

SEQ ID NO: 782058 - DNA, 100 bp, Homo sapiens
tggaccacatagacatttacgcggatgtcggcgaagagttcaaccagaacccttaggagaaatcttgagagtggacagcaattgtgaagatcgccagaga

SEQ ID NO: 782059 - DNA, 100 bp, Homo sapiens
gccgtgaggaggacggtctgcatactcgctgcccgccggctccctcccccgcgtccctgcgaccgccgcggcgaagatgaccatggtgaatccgggcagc

SEQ ID NO: 782060 - DNA, 101 bp, Homo sapiens
cgaggtgtgcgaagccaccaaccttggaatggatggctttggccaaccagttggcattcttggacgccctgccacagcatatggattccgccctgatgaac

SEQ ID NO: 782061 - DNA, 100 bp, Homo sapiens
cggagatggtgcagaagatggaggagaatctttggaagaactaccagaaacgagtgggaaaacaacccggagattcttctttaatttaagttctatcccc

SEQ ID NO: 782062 - DNA, 88 bp, Homo sapiens
agaagctgccgccgaacgacaggacgttggggcggcctggctccctcagaaatgcctccacggctgtgtacgcctgttgcaaccccat

SEQ ID NO: 782063 - DNA, 81 bp, Homo sapiens
cttacccgacctcagatgctcccttctgctcctggtggaatatgtgatcaagtgtgacatgtcagctctgcagaagattct

SEQ ID NO: 782064 - DNA, 100 bp, Homo sapiens
aaatggcggcagctgggctcaccgtgactgtcacccacaagacacctatggctgccgatgaaggctcagcagagaaacaggcaggagaggcccacatggc

SEQ ID NO: 782065 - DNA, 83 bp, Homo sapiens
tcatcattatgttgcttttagctcactggagcctcacagaaccctgtgagcaaccattaatctgctttctgtcactgaagatg

SEQ ID NO: 782066 - DNA, 78 bp, Homo sapiens
cgcaccctcctcctccggagaagtagagaaataaatttctcccaccctaaaccagctgggacaataatgagagagaaa

SEQ ID NO: 782067 - DNA, 100 bp, Homo sapiens
agtcgggtatatttttctgtctccaaactagattggcagccgttttttgagagcagatcaataagatggagtggtggagccgcttggtgtccagtgaccc

SEQ ID NO: 782068 - DNA, 83 bp, Homo sapiens
aaaataagagcccggatgctgaagcaaaattcagagagattgcagaagagataattgacgaccttgccaacctagtggagaac

SEQ ID NO: 782069 - DNA, 100 bp, Homo sapiens
aggaaggagctggacaagattacagccaagcacgcggccaaggggaaacagatcgaggagctgctagagctgctgatgactgagatcctgcaccccagca

SEQ ID NO: 782070 - DNA, 97 bp, Homo sapiens
cagatggcacagttttgaaacagttacaaccacctccaaggggcccaagagagctggaattctataatatggcctatgagagctacaagaagaagga

SEQ ID NO: 782071 - DNA, 100 bp, Homo sapiens
gatcaacgagcaagggctgtatcgaattgtgggtgtcaactccagagtgcagaagttgctgagtgtcctgatggtctgaagatgatgagaaactgaaaaa

SEQ ID NO: 782072 - DNA, 100 bp, Homo sapiens
ggagccggcgtgggcggcggcaacggggcactgacctgggtggttgcacgttttcaaaaaatacctaatggtgaaaatgagacaatgattcctgtattga

SEQ ID NO: 782073 - DNA, 100 bp, Homo sapiens
cagtgagttctcccgccctcttggtgaggtcaatgtctggtctgggtccagtgttccttcccaaactgtgggaaatggaggcggctgtgtgggaacattg

SEQ ID NO: 782074 - DNA, 101 bp, Homo sapiens
ccacttttgcaagggcgaggtcagccccaaactaccgttttgagtatccgaggagcccaggaggaggaacccacagacccccagctgatgcggctggacaa

SEQ ID NO: 782075 - DNA, 50 bp, Homo sapiens
gtggaagatgatcacatcccaggatacagttgatatattagttggatggc

SEQ ID NO: 782076 - DNA, 100 bp, Homo sapiens
cgactgcctgggacctggccaagggctccacacaccaagaccaaggagacgaagtcgcagacgtcggtgacactcagcatcgtccactgccctcccgtca

SEQ ID NO: 782077 - DNA, 100 bp, Homo sapiens
tggatttcttgactggccacagtactttaggatggagctgatgcatgctgaaaaactgaggaaggagaaggaagaatttgaaaaagccagtatggatgtg

SEQ ID NO: 782078 - DNA, 83 bp, Homo sapiens
ctggactgtcgtctacctgaccgacttggtgctgaagggaaatcctcattgacgattcaatttgttgaaggccaatttgtgga

SEQ ID NO: 782079 - DNA, 98 bp, Homo sapiens
tgggagtacaggactcgcctcctcagggttccctgtgctgccacttttcagccatggccacaagggcgtctctggccgagcctctttttgtggaaaac

SEQ ID NO: 782080 - DNA, 80 bp, Homo sapiens
aattccttgatcagaacagagggagcagcctcatctagttgaatctgaagatgtggacctgctgatgaagagggctgatt

SEQ ID NO: 782081 - DNA, 90 bp, Homo sapiens
gaagtatagaagggcgcaggcgctagttcagtgctcgtgaggtatggcctcacaagtcttggtctacccaccatatgtttatcaaactca

SEQ ID NO: 782082 - DNA, 100 bp, Homo sapiens
acctccaccaccaccccctcccaaaaaggagaccaagccagagccaatggaagaagatcttccagagaataagaagcagacggggaagcggagccaacat

SEQ ID NO: 782083 - DNA, 80 bp, Homo sapiens
cgagtctccgccgctgcgggcccgctccgacgcggaaggcaagtatatcgcgtcaacacagcgacctgacgggacctggc

SEQ ID NO: 782084 - DNA, 83 bp, Homo sapiens
acattcggggtgccagaaggaaagcatagggggatatgagactttctactcggaatatcctgagtgttgcgtggatgtaaaac

SEQ ID NO: 782085 - DNA, 75 bp, Homo sapiens
gcgtcgactgcccagagtccgcggccggggcgcgggagccaacacaagccatcagccccatgctcagctcccagc

SEQ ID NO: 782086 - DNA, 99 bp, Homo sapiens
agcaagcggggccggtggcgcccgtgtcggagaccccgcgccggaccctgaggcagcgaacagatgccttggggaaacagtctgtgaacagaggattca

SEQ ID NO: 782087 - DNA, 100 bp, Homo sapiens
caaagagtctcacatgctctgctggggagctgagcacataacgacttacacgttcaatactcacaaagcccagcataccttctgtaagagatgtggcgtt

SEQ ID NO: 782088 - DNA, 76 bp, Homo sapiens
caggcacgcgccaccactcccaggcatcaagcatgatggaaccatgtgtgatacctgccgccagcaaccaatcatt

SEQ ID NO: 782089 - DNA, 75 bp, Homo sapiens
gtggagcggcggccttccaggaaaccacccacgtccccttcgaaaagttcaggagccctggaaaggagaaggaat

SEQ ID NO: 782090 - DNA, 100 bp, Homo sapiens
gcgggctgtggggcctccgcgccgcggccgttagtcatgtcggatttggtcgtattgggcgcctggtcaccagggctgcttttaactctggtaaagtgga

SEQ ID NO: 782091 - DNA, 49 bp, Homo sapiens
tccgaatagggatgaggcatacgtggctgatgaattcatccgagcaaat

SEQ ID NO: 782092 - DNA, 75 bp, Homo sapiens
tgcggctctgcgcggtccccgccagcgccccatcctgagccggtaagaatgattgatgttggctgatattggagt

SEQ ID NO: 782093 - DNA, 100 bp, Homo sapiens
aagaggcagtgaaatggggtgaatcatttgacaaactgctttcccatagaggcccagtacatcttgatccatcaggctttggtggaatacaatcagtttg

SEQ ID NO: 782094 - DNA, 100 bp, Homo sapiens
gtccgccaagcctgaagtcagcttagtgcgcgaggcttctcggcagatcgtggccggtggttctgcaggtgctggagaatctggtaaaagcaccattgtg

SEQ ID NO: 782095 - DNA, 82 bp, Homo sapiens
cacgcgggacccatcgtctccgtgtggcaccgcgagctccgcaaagaattagcagcagcctctgtcaccatccaaagattac

SEQ ID NO: 782096 - DNA, 75 bp, Homo sapiens
tactcacacagtggcttctgctcaccaacagatgaagacagatgcaccaacgagatcgatgggctagaggagaag

SEQ ID NO: 782097 - DNA, 85 bp, Homo sapiens
gtctgcaaacctggagccagaaacattaccgtcatattccacccattactaagtggagtgtgacaatatgaaccgctttgaccga

SEQ ID NO: 782098 - DNA, 87 bp, Homo sapiens
ccacttcaaaatcagacctctgtggcagcattttttccagaacacaaaagtgcccttgctaccagttccgagccagccgagacctgc

SEQ ID NO: 782099 - DNA, 101 bp, Homo sapiens
gatcctctggccagctgactgcacttcttttttgagaaaggaaggaatatatcctgactgattattggggtggagcatgtggtggtgtatgtgaacaaggc

SEQ ID NO: 782100 - DNA, 100 bp, Homo sapiens
tgttgagagacacgctcagcgaggaagaggaggacgactttcggctggaagaaatggtggagtcaatgaagaaagtagcagggatggatgtggagctgac

SEQ ID NO: 782101 - DNA, 82 bp, Homo sapiens
cggcacgatgccgaggaaacagtgaccctgagcgaagccaagccgggcggcaggcattggaatggatacttgtgtcattcct

SEQ ID NO: 782102 - DNA, 98 bp, Homo sapiens
agagccgcgatgtccatacttgccaaaatgggggactggcagacaatgcagatcttcgtgaagactctgactggtaagaccatcaccctcgaggttga

SEQ ID NO: 782103 - DNA, 74 bp, Homo sapiens
aaagctttccagcagtcagttgaacaagacaacttatttgatggtgtgtccgcagccggccaggtggtatccct

SEQ ID NO: 782104 - DNA, 90 bp, Homo sapiens
gcaggaccagctgcagctgcttgctgtgctgtggctttcattgagaagctagacgcccagtctttgaatctaagtcaggaggattttgat

SEQ ID NO: 782105 - DNA, 75 bp, Homo sapiens
tccacgcaggagatccatgagaagatgagcagcaccagcagtaagagggctccgaccacggcaacccagaggctg

SEQ ID NO: 782106 - DNA, 51 bp, Homo sapiens
gaggcagagaacagcagcccggattcagaggtccagttccggccgtaccgc

SEQ ID NO: 782107 - DNA, 100 bp, Homo sapiens
gattcagtgactcagaaattggcggcatcaccattgcttggaagtttgattctctcccacgcctttgacatctcatccttcagtccctttgctgtaaagg

SEQ ID NO: 782108 - DNA, 83 bp, Homo sapiens
cgcagtatcatgctggccaagaagatcatcattaaggacggaggcacggtgtttgctgactagcactttggagagtgtatgct

SEQ ID NO: 782109 - DNA, 99 bp, Homo sapiens
tgtgaaactcataggagttcccgctgacgctgaggccttaagtgaaagaagtggaaacacccctaactctcccaggcacagtgtggatacaagtccagg

SEQ ID NO: 782110 - DNA, 82 bp, Homo sapiens
caagaagtgaattacccgaccctggtacttggtaatcaaataatgcctggatttcttaatatgaagataaagtttgtgtgcg

SEQ ID NO: 782111 - DNA, 80 bp, Homo sapiens
tctccatcattgtcaccctggccctcgcggtggctgcctttaatcttagcaaagcaatgtctcaagatggtgcttctcag

SEQ ID NO: 782112 - DNA, 75 bp, Homo sapiens
cttctgactatcttctcttcaccagctcttcagatcaatatggtatgacaggtgcccaggtaatccagatgttgg

SEQ ID NO: 782113 - DNA, 100 bp, Homo sapiens
tcacggatatcctctgttgggggagaagctacaatcaacctaaattcagccaatgatagctggtttggcagcttaaaggacactattcagcatcagcaag

SEQ ID NO: 782114 - DNA, 75 bp, Homo sapiens
acttgcggctgtagctcagatcttgcaaagtcctcaaggccagcaggtgccaggattgctgagtattcccagttg

SEQ ID NO: 782115 - DNA, 75 bp, Homo sapiens
ctctctttcgctgtttgagagtctctcggctcaaggaccgggagggagtgcatccgccccaacccttttccccct

SEQ ID NO: 782116 - DNA, 101 bp, Homo sapiens
agcctgcggagcctgtggggcagatgtcatctgggtgattctcagtgtggaggtgggtggacttttaggagtaacgcagcagctgtcatcttttgaaacgg

SEQ ID NO: 782117 - DNA, 90 bp, Homo sapiens
attcaacagaacttagcataaatgctgaaggacacattcagctaacgtattttagcaggtggagtgaggttgaagattcctgtgacagcg

SEQ ID NO: 782118 - DNA, 73 bp, Homo sapiens
ttatttctctccaggtgaagcagaaaggggatggagaagtttatgtttgggatgtgaactcaaggaagtgcct

SEQ ID NO: 782119 - DNA, 51 bp, Homo sapiens
ggattccaagtaactcttatttgggaaggatcgaatcatatttgtaaccaa

SEQ ID NO: 782120 - DNA, 100 bp, Homo sapiens
gcgtggagccgggcaggagccgcgagccagctgcgcgaagggctcatcgttggggtgatcctgaggtatggtacccctgctaccagtggccgtgacaaat

SEQ ID NO: 782121 - DNA, 95 bp, Homo sapiens
ccaggactcagaggccgccatcaaccgccagatcaacctggagctctacgcctcctacgtttacctgtccatgacacctgaaagaccccgccgtg

SEQ ID NO: 782122 - DNA, 101 bp, Homo sapiens
ctaatagtgtggaaggtcttctaaatgctctcaggatttgaatttgttgaaatgagcagtcgtaaatcaaagagtaacagcttaattcacacagagtgcct

SEQ ID NO: 782123 - DNA, 76 bp, Homo sapiens
gcttaattcaaggtcacacaatgtcggggatggacctccagatttccttactggttcgatctggggctaatgttct

SEQ ID NO: 782124 - DNA, 74 bp, Homo sapiens
aggatgacccgctggcggctttcaaacagcggcaaagccggctagagcaggagaagaaggaagttgtggaagag

SEQ ID NO: 782125 - DNA, 100 bp, Homo sapiens
ccagaattggacccgaaaccatgcctcactgtcctaggcaaggaactggtgctcctatgtggtgacccgcaccatctcatgccatgtgcagaatggcacc

SEQ ID NO: 782126 - DNA, 49 bp, Homo sapiens
ggtggaccagctcatccgcgacctggactacaaatccctccaggatatc

SEQ ID NO: 782127 - DNA, 98 bp, Homo sapiens
aggggctccgggtcttccagagcgtgaagatcaagatcgattttcgacaatgaagccaaagacgtggagagagaagtttgctttattgatattgcctg

SEQ ID NO: 782128 - DNA, 100 bp, Homo sapiens
agtgagcaccttttggcccaatgaatatcaggtttgagcacaaaatgaacataattagggaaaataaggatctggcatgtttctacacaacaaaacattc

SEQ ID NO: 782129 - DNA, 90 bp, Homo sapiens
agatgtacagaatgggccaagctccactgttcagatgcaaagctttggagtttaacccttctgccaatccagaggcaagcacaatattcc

SEQ ID NO: 782130 - DNA, 83 bp, Homo sapiens
gggagtatgaccacatgaatggatccagtctgatatcctgttgggcattctggacaacttggacccagtcatgttcttcaaat

SEQ ID NO: 782131 - DNA, 76 bp, Homo sapiens
ggaagagatcaatcttaccagagggccctcagattactttctatgaagacaaaaattttcaaggccgtcgctatga

SEQ ID NO: 782132 - DNA, 101 bp, Homo sapiens
attatggataccaaggaagagaagaaggaacggaaacaaagttattttgctcgtggatcctcacaaagctacaagaagcaagagaaccttctccgagcctc

SEQ ID NO: 782133 - DNA, 98 bp, Homo sapiens
cgaaaccccgcggggaaaagtgacccaagacactgttcaacggttttgtgtatagcatttgaggttcttcagggcttgcagtatatgaacaaacatgg

SEQ ID NO: 782134 - DNA, 75 bp, Homo sapiens
atctcccccttcttcaagacccacgagagtggaatgttggctgtccgtgaaaaccgctacattgtcctggccaag

SEQ ID NO: 782135 - DNA, 83 bp, Homo sapiens
cgagaccgtgaccgagagcgtgaccgagagcgcgaatatcgtcatcgttagaagaaaccgaaagttccagcatctcccaccag

SEQ ID NO: 782136 - DNA, 75 bp, Homo sapiens
agacaccgagcttcagcaagctctctccaacgggtggctgtgctggctctggctgtggcaaatgtgactgccatg

SEQ ID NO: 782137 - DNA, 82 bp, Homo sapiens
ctactacaggactgcggacaagggctggcagcgggctgacgcacgaggcacacaggaaggaggtggagcaggtgtatctgcg

SEQ ID NO: 782138 - DNA, 82 bp, Homo sapiens
tactgcagccacgcgggcgagcggctgtgtggatgtcggcgaagccgcgggcgagctcattgctatggacagtgctatcacc

SEQ ID NO: 782139 - DNA, 100 bp, Homo sapiens
ctggtagccaccggcactcacgatgaagatgtgtgtgtctttaagtgctcagtgtcccgagagacagagtgcagccgtgtgggcaagcagtccttcatca

SEQ ID NO: 782140 - DNA, 100 bp, Homo sapiens
gagctggaactagagcttgcatttcctgacttccagattagtgttatttttacttcaaactattacttcttgaacggggaggtcctgcctctgaagattg

SEQ ID NO: 782141 - DNA, 75 bp, Homo sapiens
cggattagccttcgcggggcaaaatggctcttgatggaaatgtgtatgatcatctcaaggattatttaatagcct

SEQ ID NO: 782142 - DNA, 108 bp, Homo sapiens
gtgggcgacccggtgtgtggcgcgcccagagccccgcgtttcagccctagggaagtaagactttgaccccgacgcaggcttcagtgattgccgcggatcagaagcctg

SEQ ID NO: 782143 - DNA, 75 bp, Homo sapiens
gagctgcacgtcctcgaacgcgaggccaacagccccgtgtttctgaaagatctatccagcactccgatggccagc

SEQ ID NO: 782144 - DNA, 74 bp, Homo sapiens
ttaccttaaaccttttaagcaaggaaattgaactaagaaatggagagaaatttccatcgtgaagcctttaatca

SEQ ID NO: 782145 - DNA, 75 bp, Homo sapiens
cgacctggtgcgctctcgtgaggtctcggtggatggtgctgggcgtcctcttctttgccatagcctgcttcttat

SEQ ID NO: 782146 - DNA, 100 bp, Homo sapiens
atttcagaggtcatgtcaaaagagtgacattgatgtttgggtaccagaaccagaccactcagaagttcctgctgagtggtgggattttgatgctgataag

SEQ ID NO: 782147 - DNA, 75 bp, Homo sapiens
cggagctgctggtttcattcgaggtttcgggccgactccagcgggaggaagaagaggcctttgccagcagtcaga

SEQ ID NO: 782148 - DNA, 100 bp, Homo sapiens
gctttggacgccggtggagacgcaggcgagagtacccaaaggcaagtggaacagctctaatggggttgaagaaaaggagacttgggtggaagaggatgaa

SEQ ID NO: 782149 - DNA, 118 bp, Homo sapiens
acagtggactcaacttcaaagacgttctcaaggagaaggcagacctggacttaattcagtgcacaaatgagatgaatgtgaacatcccacagttggcagacagtttatttgaaagaac

SEQ ID NO: 782150 - DNA, 101 bp, Homo sapiens
ctggccttcaaccccgagccgctggtgctacaggccttataatgggactaattttacgatatgctacagcaccaactgatattgaaagtggaactgtctat

SEQ ID NO: 782151 - DNA, 75 bp, Homo sapiens
ctcaggcctgtccagccggggcaagaagagcccgcagcttcatctcccagctcaaacaacacagcggccacaaca

SEQ ID NO: 782152 - DNA, 100 bp, Homo sapiens
cagaccctggagcctcagttggaagcagccgatccagcctgcggagcctgtggggcaggaaggatctgagtctctccctgcggagacagccctgaagaac

SEQ ID NO: 782153 - DNA, 90 bp, Homo sapiens
cactcacaatgggaacatgtacacctcatccctgtacgggtgcctggcctcgcttctgtcccagctcagcaacagcctcaccaaggactc

SEQ ID NO: 782154 - DNA, 83 bp, Homo sapiens
cctcagttggaagcagccgatccagcctgcggagcctgtggggcagcttccgggaggatttccattataatgacacagctggg

SEQ ID NO: 782155 - DNA, 51 bp, Homo sapiens
gggctcccccgggatgatctacagccaggaggaagaagaggaggatgagga

SEQ ID NO: 782156 - DNA, 82 bp, Homo sapiens
caaaaagcataggcggaccatgataatttccccagagcgtcttgatccttttgcagatgaatcaagcactcttttggaagag

SEQ ID NO: 782157 - DNA, 98 bp, Homo sapiens
cccagatggacagtgtggtcaaggaccttaaagacaaggccaaagagactgcagatgccatcactaaagaagcttcacgttacagcatggaagctgtt

SEQ ID NO: 782158 - DNA, 98 bp, Homo sapiens
caccccaagaatcctcatgctcctactatccatttcaactacagatactttgaagtagaagaagctgatgcttgcagaccaggattctataaagcttt

SEQ ID NO: 782159 - DNA, 100 bp, Homo sapiens
gtcccccagcggcagccgagcccgcccgcgcgccgatttggtcgtattgggcgcctggtcaccagggctgcttttaactctggtaaagtggatattgttg

SEQ ID NO: 782160 - DNA, 143 bp, Homo sapiens
gatgcaccatgccagaccgtggaagatttaacgaatggggttgtgatggcccaggttcttcaaaagataaagaacttccagatcattataggccttggatggaaattgccaacaaacttcctcaattgattgatgctcaccag

SEQ ID NO: 782161 - DNA, 100 bp, Homo sapiens
cttacgtggagttatttcctgcatttcctcctttcgtctttacaaggtagccgtttggcgtcgtgagagtgcagacatgagtccagcaagcagtaccacg

SEQ ID NO: 782162 - DNA, 97 bp, Homo sapiens
gctgcttcatgacaaggggctgcttctgcggctctacacgcagaacatcgatgggcttgagagaggtagatgatgagctggagatcaaggcctacta

SEQ ID NO: 782163 - DNA, 100 bp, Homo sapiens
caaggacatcaggacaccgggagtgggagagattggactgggagactcagcaggaaacaatgtgatgagaaccattcatggggtgggagagatgatgacc

SEQ ID NO: 782164 - DNA, 100 bp, Homo sapiens
ccttatcaggacatacttccaacaatatttacgaggcagtcaagtattttcctacgttggaatagatcctctaagtatttggatgaagcatatgaagaaa

SEQ ID NO: 782165 - DNA, 100 bp, Homo sapiens
aagactgtctgccgagttctcacgtgcccatcagtgacagcaagtccattcagaagtggcttcgtcctgttcatcgccaactaggggaagcgaatgagga

SEQ ID NO: 782166 - DNA, 75 bp, Homo sapiens
ccgcacatcatctgctgaactctctacaagtgcccctgatgagccccttctgagacagggtttcaccgtgttagc

SEQ ID NO: 782167 - DNA, 90 bp, Homo sapiens
ctgcctctcgcccatcagcgcggcgctggccgagagccgcggctccgtgtttctggaaagtgacagcagctggcaagcagatgaattaac

SEQ ID NO: 782168 - DNA, 87 bp, Homo sapiens
ttgaagacacctgggaaaaaatccattagcaaagacaaagctgggctcagcagctggcgcccagtgacccccaggtcatcctctatg

SEQ ID NO: 782169 - DNA, 100 bp, Homo sapiens
agagatcattgcaaagcagggaggaggtggatggtctgaagcatttgctggagacaggggcctcggtcaacgcacccccggatccctgcaagcagtcgcc

SEQ ID NO: 782170 - DNA, 102 bp, Homo sapiens
gaaccccttcatgcccaaatcccggaaactccagcgtgtctccagccgtggtgagaagccctaccactgcaactgggacggctgcggctggaagtttgcgcg

SEQ ID NO: 782171 - DNA, 75 bp, Homo sapiens
ataaagaccagatcttgctggaaaaagaagctgagggattgtggtccatcaggagtctgtgtgtgccacctatgg

SEQ ID NO: 782172 - DNA, 98 bp, Homo sapiens
tccacagctcatcatgatggacttggagctgccgccgccgggactcccgtcccagcaggtgcttttgaagatgatgatatcacgcacgttgaaggaag

SEQ ID NO: 782173 - DNA, 75 bp, Homo sapiens
cacggcatccctgacgagacctgcaacaactaccaggccaaggaccaggagtcaacggttgcaggaaagtttgaa

SEQ ID NO: 782174 - DNA, 101 bp, Homo sapiens
cggggaccgagcctgggaggccggccggtgccagcacctttcggcttctgagacggcggcagcagcggcattcaggccctgtctcagcgggaccctcctca

SEQ ID NO: 782175 - DNA, 50 bp, Homo sapiens
ggagcgggcggctgagacaaaggcgacgttcacagcaacccaatggacat

SEQ ID NO: 782176 - DNA, 99 bp, Homo sapiens
gcccagaggatcggaatgacagatgaacatgcttgccaactcagccagcgtgaggatcctcatcaagggaggcaaggtggtgaacgatgactgcaccca

SEQ ID NO: 782177 - DNA, 100 bp, Homo sapiens
cggaaagttgccggggaaaaggaaatttggatatgtgcagtgcatctcctcgaagatgctgatggtggaaatttcttgaaaccgctctcgtaatttgcca

SEQ ID NO: 782178 - DNA, 82 bp, Homo sapiens
gcgcagggaaggagggcgtccgagtcaacaaccgcttcgagctgaggtggggctggtgtccgagcacttctcgcaggccccg

SEQ ID NO: 782179 - DNA, 83 bp, Homo sapiens
ctgctagtcctggggctctgccgggcgcgtccccggaacgcactgctgctcctcgagcgatgaagtaacttgatttgaacaag

SEQ ID NO: 782180 - DNA, 100 bp, Homo sapiens
ccgcaagattcgagcctgagcggcctgggcgtctcgagaggtcaaaatgcagatcttcgtgaaaacccttaccggcaagaccatcacccttgaggtggag

SEQ ID NO: 782181 - DNA, 100 bp, Homo sapiens
tctgccgaagagaacaagacgtgtgaagactcaggtggttggaggcaaagtaaagaagcccggtaaacgtggtcggaagccagccaaaattgacttgaaa

SEQ ID NO: 782182 - DNA, 89 bp, Homo sapiens
cttatgcttataagagtggaacaggaccaagaatcgccttcagccctgtctggtgcatccttggcagaaagtgaggaggaaaacacccc

SEQ ID NO: 782183 - DNA, 74 bp, Homo sapiens
acagcgcgaccggaccggggccggaggcggcgcgccctgcaagaggtgagaagccctaccactgcaactgggac

SEQ ID NO: 782184 - DNA, 51 bp, Homo sapiens
gacaacaccgagtatgagaacaaaaaagaaattcctgtgtttaactttacc

SEQ ID NO: 782185 - DNA, 51 bp, Homo sapiens
gattttataaacagcttggcagtgcagaaacctgtttccctccaatcttgt

SEQ ID NO: 782186 - DNA, 98 bp, Homo sapiens
ttggacgccggcggagacgcgggcgagatccagacatttaatgtggatgcaccatgccagaccgtggaagatttaacgaatggggttgtgatggccca

SEQ ID NO: 782187 - DNA, 100 bp, Homo sapiens
gttcaccaagtgggaaaggacactctaggccatctacaagatggtgtcgtctgtgatgaagatgccggaggatgagtccaccccggagaagcgcacagac

SEQ ID NO: 782188 - DNA, 101 bp, Homo sapiens
ttaagtattatcggtttgctgtctcaactagggctttgactctatcctctcctgaagttcgattccacatggacagtgaaactcacgatcctatagatctg

SEQ ID NO: 782189 - DNA, 127 bp, Homo sapiens
cggcgtcaagtggagctcggacgcacggaccaggcccatttccctttcatctcttgcaaaccatactgggtacatcaaagttgactggcaacgagtggagaaggacatgaagaaagccaaagagcag

SEQ ID NO: 782190 - DNA, 90 bp, Homo sapiens
gtttggaaagggccctcaaaatgccttcttcctcgtaaaattctggccaaaagaatgcaatggtgtaaagattccagttgatgccagtaa

SEQ ID NO: 782191 - DNA, 92 bp, Homo sapiens
ctacctgattggaggtgccctgctgaatatctacacggaaatgggccgacggtgagaagccctaccactgcaactgggacggctgcggctgg

SEQ ID NO: 782192 - DNA, 80 bp, Homo sapiens
tctacttccaccaataaacttccaaggaaatcctcattgacgattcaatttgttgaaggccaatttgtggactcctacga

SEQ ID NO: 782193 - DNA, 82 bp, Homo sapiens
cagctctttccccgtcagcatcccagccgtgctcacgtctgcagatctccaggggagcccaccagcctagtcaacatggcct

SEQ ID NO: 782194 - DNA, 124 bp, Homo sapiens
gtcccccggagtccgactcgctacgcgggtcttgcgagatatctggccgcctctgccgcagctggagcattcctctgaatattgatttgctgaatagcccagacttattggaagcaacgattgg

SEQ ID NO: 782195 - DNA, 98 bp, Homo sapiens
atatccatgtgccaccccgggtgaaagagtctatgcagatgcaggtgaccaagatggagttttctggaagaaagtggaggaagctgaggttggcaggt

SEQ ID NO: 782196 - DNA, 101 bp, Homo sapiens
agacaccagcagcatgcccagccagggcagggtggagagctgcagctgcaggctgaagccgacgtagcttctctgaacagacgcatccagctggttgagga

SEQ ID NO: 782197 - DNA, 100 bp, Homo sapiens
caaagagaaaaggggcattatcccgctggatgcacactgctgcgtggagccaatggagatcttcgtggatgatgagacgaagttgacgctgcatgggttg

SEQ ID NO: 782198 - DNA, 75 bp, Homo sapiens
cggcgagtccgcgacggtcgccgcccacggcgaggtacaccaggggttggaaaaaccacactaggcaaagaactt

SEQ ID NO: 782199 - DNA, 75 bp, Homo sapiens
ggacatttaacgatcagaaacgtggcatctgtcgaccctggacaaaggagatcttgtgcgaaaactcaaagaaga

SEQ ID NO: 782200 - DNA, 112 bp, Homo sapiens
aacatgaacaacgtcaagatgttccaggcacataaggaggcgattagagaggccagacccaacatgagtgaagtttcctgcaagaaacgggacgactatttggaatggccag

SEQ ID NO: 782201 - DNA, 50 bp, Homo sapiens
atggagctagcaaaaaagggctttattgagtcttactctgtcacccaggc

SEQ ID NO: 782202 - DNA, 88 bp, Homo sapiens
agatgagaccgcaattcgagaatcaaagggccgggagcgatgtttgacaagtatgcgcccaagctggacagcccctacttccgacatt

SEQ ID NO: 782203 - DNA, 74 bp, Homo sapiens
attccaagtaactcttatttgctttggtgtcatccccagcactcctctggccatccatacaccactgatgccaa

SEQ ID NO: 782204 - DNA, 75 bp, Homo sapiens
gcccggtttgcccagagcgccccaggaaatgcttccagactgcacacttttacttagaggacagtacatccccta

SEQ ID NO: 782205 - DNA, 75 bp, Homo sapiens
gttctaaatgtcagttataagccacagaaaattagtcccaaatcaactgtttggctctttaaccatggatggtgg

SEQ ID NO: 782206 - DNA, 82 bp, Homo sapiens
aaaaggcattgaggaactcaatcaaaccagtattcttttcacacaggtctaggcgttttacactgagattctccactgccac

SEQ ID NO: 782207 - DNA, 109 bp, Homo sapiens
tcgcgcccgggaggaaggaacgaggcaaggagctaaagcagcgtgcgttcagccctggggttgattcttcaccacactgaaaccattaggaaaaatccttgtggttaac

SEQ ID NO: 782208 - DNA, 96 bp, Homo sapiens
cggctttcagttgagctgaccagctctctcttcagaacagagccaatggcttggaatgagggagtaactattcccagtcagaggcgctatgtgtat

SEQ ID NO: 782209 - DNA, 50 bp, Homo sapiens
atacatttgtacacgatcccaagattggctcaagctacccaggaaagaac

SEQ ID NO: 782210 - DNA, 90 bp, Homo sapiens
gtacaactaggaagcccagataagaaaaagcgcaaggcaaatacacagaattaaacaaccaccatgtcgagcaaaaaggcaaagaccaag

SEQ ID NO: 782211 - DNA, 50 bp, Homo sapiens
tatctactcccagaggaattccagacgagtttgggctttgcaaaactgag

SEQ ID NO: 782212 - DNA, 83 bp, Homo sapiens
ccctcatccagctgatgcccttcttcgtggatatcccagagaaggaaggaaataccctttgccaccaccctcaggaagataca

SEQ ID NO: 782213 - DNA, 82 bp, Homo sapiens
gccatcatcctcatcatcatcatagatttcgctccctccattgtctgctctatccagatacaccctggtgtccccagctggg

SEQ ID NO: 782214 - DNA, 90 bp, Homo sapiens
cgggacctgaccaccgcaggcgctgtcacccagtgctgtattaacaagtaaaggtgacgcgtgggccaagtacatggcagaagtgaaaaa

SEQ ID NO: 782215 - DNA, 132 bp, Homo sapiens
aagcgatcctcccaccacctcagcctcctgagtagctggaaccatcatatgcaccagcacgcctggctaagcagccctgaagcagcttcctaggaacaaggtccccaacatggcggtgatgatcaagtccct

SEQ ID NO: 782216 - DNA, 98 bp, Homo sapiens
gactcagacctgctacaccagcgtgaaggtcagtactcctgcatttgtaccaacgaaaactcacgtgctgcttcatcgaatgagtggaaaaggactag

SEQ ID NO: 782217 - DNA, 75 bp, Homo sapiens
atgaacctgaacgtcatcaacgagggcggcattgacaagctgggcgagaccacagcaccgggaagtccagtcagc

SEQ ID NO: 782218 - DNA, 82 bp, Homo sapiens
tgaggcttccccagccacgtggaactcttcctcatcgtcctggtctgcctcatcttcagcgtgctgtccaccatcgagcagt

SEQ ID NO: 782219 - DNA, 100 bp, Homo sapiens
gtccagtgctgtgaaggcggaacttcgacagaaggaaattgacagaactttcataaagccaaagactggcagaaataaagtaaataatgatgaaactgag

SEQ ID NO: 782220 - DNA, 124 bp, Homo sapiens
ttcagagagacaatgctcgctcgtctctgagtgccagtcacccaatggtgggcaagtggctggagaaacaagaacagttaccttatcccatatcacacaactggtcctcagccataacaagcta

SEQ ID NO: 782221 - DNA, 96 bp, Homo sapiens
tgaggtcatcggggatgtggacgaaggggccgacctcctagatgtggacgagtgctcactagcagaaaaaacctgtgtgaggaaaaacgaaaactg

SEQ ID NO: 782222 - DNA, 75 bp, Homo sapiens
caccactgaggctgttgggccaggccagtcatgctagaaccttcgtgctgcctgatgacagccaggccagccgcc

SEQ ID NO: 782223 - DNA, 100 bp, Homo sapiens
cggctgtggaccgggcggcacgcacgcggtgcagggtaacatggcggatgcggaaggtggttcagaatctggggagccttatattccaggtgtctttttc

SEQ ID NO: 782224 - DNA, 100 bp, Homo sapiens
cccactggaagcctagaaatgctggaagaagcacgccaaattcattctcgttttgaaaaagaatttagttttaagaatgaggagacagcacaggttgtca

SEQ ID NO: 782225 - DNA, 109 bp, Homo sapiens
ctggcttcagaccaccttcccagcgagtttctactagtccagttgatacatatgaaccagatggttacaacccagaagctcctagtattactagttctggtagatctca

SEQ ID NO: 782226 - DNA, 131 bp, Homo sapiens
cgagtttgcgactcgcggaccggcgtccccggcgcgaagaggctggactcggattcgttgcctgaggtcaaaatgcagatcttcgtgaaaacccttaccggcaagaccatcacccttgaggtggagcccag

SEQ ID NO: 782227 - DNA, 82 bp, Homo sapiens
cgctcgcggaagcagaggtttggggtgacttaagagattaaaattaatttggttgctgttggttctgaacaaataatgagtt

SEQ ID NO: 782228 - DNA, 100 bp, Homo sapiens
cttgggcacaacagcgaggaccctgctctagaaggaacgtacgccagctatgggtttggccgcattggaggtcatgcaagccgtgcagcgtacatggacc

SEQ ID NO: 782229 - DNA, 100 bp, Homo sapiens
agcaggcatcatccgctatgcaattgggactgaaactgttgaggagcccatggaggaagaagaagcagccaaagaagagaaagaagaatctgatgatgaa

SEQ ID NO: 782230 - DNA, 50 bp, Homo sapiens
ctaaaggaggttttaaacagtataacagcaggaagaagatgagccttagg

SEQ ID NO: 782231 - DNA, 100 bp, Homo sapiens
caccatccacgccagccgcaccatgccgctcctaagcctgcacagccgcggcggcagcagcagtgagagacatttatgcagtgtgtgattctttctaaaa

SEQ ID NO: 782232 - DNA, 98 bp, Homo sapiens
ctctcgcttcgtcctacacttgcgcaaatgtctccgaaataaagctgttcaacttgaaaatgagctggagaattttactaagcagtttctaccttcaa

SEQ ID NO: 782233 - DNA, 90 bp, Homo sapiens
tgctgaagaggagggggcgttccccagaccatggcatctacggaaggaaagctgatgtcctgaccactggagctggtaacccagtaggag

SEQ ID NO: 782234 - DNA, 50 bp, Homo sapiens
agaagatgcagcaccagcaagcccgagaatgacagcccatatcaaggcgg

SEQ ID NO: 782235 - DNA, 51 bp, Homo sapiens
gacacagatagtcttcttattgctgcttcagcgcctgctcctggtcatcac

SEQ ID NO: 782236 - DNA, 100 bp, Homo sapiens
tgggaatgtacacgataattaaagagtaaagttgtgctcaacgtttccgttactatggcaatgacggcagggactacaacaacctttcctatgagcaacc

SEQ ID NO: 782237 - DNA, 75 bp, Homo sapiens
ctggactcatggaggctgagcatttattcaggtgtggaaccactttgacagcggttcgtgcccaggccaggccat

SEQ ID NO: 782238 - DNA, 83 bp, Homo sapiens
attggacacttgctcccatctactttcttctctagaatccacgggattttttatcaagcagaaatgcatcgaacaacgagaat

SEQ ID NO: 782239 - DNA, 50 bp, Homo sapiens
agtgggtcaaaggacagacagaagacccagaagtccacattcccctcgag

SEQ ID NO: 782240 - DNA, 75 bp, Homo sapiens
ggagaactcccccagtgtttctgcaggtcatgcaagacaagataatctgccttccgaaaagagtgcagcctgctc

SEQ ID NO: 782241 - DNA, 100 bp, Homo sapiens
agagaattatgatcaacttcaaccctcacttcgatttggaggacagagactgcaaccgaacgcacggccggcgacgcagagcgggcgacactcggtgtcc

SEQ ID NO: 782242 - DNA, 98 bp, Homo sapiens
gtagctgaatgtgttactccattgctgaggagtggatgccagggatcagctgaccatgtggttagcatctcgggagtgcctcttcagttacaaccaaa

SEQ ID NO: 782243 - DNA, 98 bp, Homo sapiens
ggacaccaggcgtttgatgttggccagccccgggacggactgaagctggtgcgcaaggacagttggacagagagactctgaagatgtgagcaaaagag

SEQ ID NO: 782244 - DNA, 94 bp, Homo sapiens
tcttacgtctgcggaagtgcagctgcctcagttcttagcgcaggacacattcagctaacgtattttagcaggtggagtgaggttgaagattcct

SEQ ID NO: 782245 - DNA, 100 bp, Homo sapiens
ggtgcctttgaaaatcaacgacaacttgagcacaggtttctgaaggattgtcattcttgcatagcagtgtgaaaatggtgcatggaaatatcactcctga

SEQ ID NO: 782246 - DNA, 76 bp, Homo sapiens
ttctcctattgaggagtcaacgtctcttgatgttttaagcgatggtgttttgaaggatctttctgagttttaccgg

SEQ ID NO: 782247 - DNA, 100 bp, Homo sapiens
tagcaatagctttatagcagctccggttacctgttttaaacatagaagaaaactacgcctcagccctgagcaatgtagtaacttttatgtggaaaagtat

SEQ ID NO: 782248 - DNA, 76 bp, Homo sapiens
ggcggacatcccctaccaggagatcgcagtatgagcccagaggacctggtcggcccttgtaccaaagaagaatctc

SEQ ID NO: 782249 - DNA, 75 bp, Homo sapiens
cacatgctgacagcacaagaaggtcgggtcacaaatcttcgaagagtgacatatgttgttttagatgaagcagac

SEQ ID NO: 782250 - DNA, 75 bp, Homo sapiens
gaaaactttcgtttcagatttacttccgcattgtcttcagtgttaagaaatgtggactcctgtgaggtgctggag

SEQ ID NO: 782251 - DNA, 90 bp, Homo sapiens
gtcactactaggaaaactcaaatctttggcaaccaaggaaatccacactgatttgtacgtctgactgagagaaagatggtcgtctccagc

SEQ ID NO: 782252 - DNA, 100 bp, Homo sapiens
ccatggcaagccgtctcctgctcaacaacggcgccaagatgcccatcctggggttgggtacctggaagttccacctcttgaaggttttgtaatgaatcga

SEQ ID NO: 782253 - DNA, 49 bp, Homo sapiens
ggagaatcctgggtttagccattgagactgaggctgatgtgaatccaaa

SEQ ID NO: 782254 - DNA, 83 bp, Homo sapiens
caggagttgctgctggactacagcttccagcacctgggtgtctcctcacaggttgcagtgtaggattttggaagtcctccctc

SEQ ID NO: 782255 - DNA, 98 bp, Homo sapiens
aaaattgacactatgggaacctaccatggtatgacactgaaatctgtaacggatggagagcaatacatcatcatctttggagaatttagcgacggcgc

SEQ ID NO: 782256 - DNA, 100 bp, Homo sapiens
ggccggggtccgcaaggccggagaaggccgccgggcccgggcatggtggtctggggcaacgcggaagccaagccctataccaagtcctgttttggggcga

SEQ ID NO: 782257 - DNA, 75 bp, Homo sapiens
gggatctcttcagggtggaatacgtcattggtacaccaggggttggaaaaaccacactaggcaaagaacttgcgt

SEQ ID NO: 782258 - DNA, 100 bp, Homo sapiens
cagaaggcgaatggcttgtacccattggcaagtgttcctgcaatgctggctatgaagaaagaggttttatgtgccaagatggctcaacggaagatccgag

SEQ ID NO: 782259 - DNA, 75 bp, Homo sapiens
acttagagctatttcttcttttggatttgcgaagaacatgcggttttcaggtagcagtagctgatgtgcagtttg

SEQ ID NO: 782260 - DNA, 99 bp, Homo sapiens
gttcgggtgcgctgctcaaggacacggtctacaccgacttcgacgttgactatattgtggagtatgactatgatgctgtacatgatgatgaattaacta

SEQ ID NO: 782261 - DNA, 100 bp, Homo sapiens
ggcagcgggaccccagcgcgggcggcggcggctgggcgggagccccagagagcttggggcttccttggtcgcacccaccacctgcctgcccactggtcag

SEQ ID NO: 782262 - DNA, 76 bp, Homo sapiens
ctcatgggcacggctcgggacggtggtataagttgaaatccaaaccaggaaagaaggacaaggagcgaggagaaat

SEQ ID NO: 782263 - DNA, 100 bp, Homo sapiens
ccttcctacatttgtctgctctgtggctgaagaaccaagttcaggcttcatctttggatatcaacaggcattctgaaggcaaatcctgtttagacccagg

SEQ ID NO: 782264 - DNA, 74 bp, Homo sapiens
gtttatctggagtgaggtggccggttcttggtgggatctgagcaggacagaatgacttggaagataacggagct

SEQ ID NO: 782265 - DNA, 100 bp, Homo sapiens
tctggcccattaacaagcagctcttccggaagatcaactgcagactgtcctattgcatctcaagccgtgttggagcgggccggagagaagtagagtgggc

SEQ ID NO: 782266 - DNA, 100 bp, Homo sapiens
tgcacatcgtggtggtcggatttcaccacaagaagggctgccaggccaaacgtaccaagaaagtcgggatcgtcggtaaatacgggacccgctatggggc

SEQ ID NO: 782267 - DNA, 50 bp, Homo sapiens
ccgccaaccccttcgagcaagacgtggtgttcagactgcatcacagtgct

SEQ ID NO: 782268 - DNA, 74 bp, Homo sapiens
acccactggaagcctagaaatggtaatcctcccacttcttaaaagtgatctttatgaagtgattcagtccacct

SEQ ID NO: 782269 - DNA, 100 bp, Homo sapiens
ctcctccagaggcctgcacgcggggcgcgggccccgaaggctctccatcgaaggcaacattgaacacggagagttcctggctctggatcttggagggacc

SEQ ID NO: 782270 - DNA, 96 bp, Homo sapiens
gaagtgtcatcattagcaggtgctcttggaaaactcaagcatagtcaagatccagggaaatgtttcaacgtgcgcaagcgttgcggcggcgggcag

SEQ ID NO: 782271 - DNA, 82 bp, Homo sapiens
ctcggggcgggcgccgcgggacctctccgggccatggaggtcggatccgcagctgcttgcccggttctactatgccgacgag

SEQ ID NO: 782272 - DNA, 82 bp, Homo sapiens
cagctataccagccaccctgcccccaagaaggaagtcatcatgggccggcctggaacaggctccccacaggtgcaggaagcc

SEQ ID NO: 782273 - DNA, 99 bp, Homo sapiens
cttcgtgaagactctgactggtaagaccatcaccctcgaggattctcagctggtagctggtgttgcattcaagaagactttctcttacgctgggtttga

SEQ ID NO: 782274 - DNA, 100 bp, Homo sapiens
gtgtggggccgtgtctcagtccacccaaggtctcctcggatcgcctggagaggcactcggacctgctccagaacctgggtatcaacccagcaaacattgg

SEQ ID NO: 782275 - DNA, 75 bp, Homo sapiens
actgcgctgcggaacatggccttggacgtcagaaataaggagctcatcggacctataaaaggcatcaccaagccc

SEQ ID NO: 782276 - DNA, 96 bp, Homo sapiens
tcttcccagaaacttcaacatctggaacatgtgatggaaaattatactcagtggctgcaaaaacatgttggcagataaattgaacatgactccaga

SEQ ID NO: 782277 - DNA, 100 bp, Homo sapiens
gctccttcggggacatctatttggcgatcaacatcaccaacggcgagttgctctaggtcgtaaccagcctttgaaaaaggagaaaccaaaatggaaaagc

SEQ ID NO: 782278 - DNA, 82 bp, Homo sapiens
aggatttctccgcctcagcccaacggggagtgccctctggtggtcagaagatgctgtgctgtctcgttaggatgaatggatt

SEQ ID NO: 782279 - DNA, 51 bp, Homo sapiens
acacctggaagccgagaaatgaggtcggaaaggtctgcttggaagccagac

SEQ ID NO: 782280 - DNA, 82 bp, Homo sapiens
ctttaatacagaaccagcatggtggaataattaatgatagttctgaattaattggtcctgctgaagctcactcagattccct

SEQ ID NO: 782281 - DNA, 80 bp, Homo sapiens
gagaaaaagaacattactgtcttggtaatgagggatcctgcaagcaaaagatcaagaggatttggttttgtaactttttc

SEQ ID NO: 782282 - DNA, 98 bp, Homo sapiens
tttggagatcttgacaaagcctcttctgtttccaatggggcccctccagccagcgtcaggtgcagaatggcccctctcctgatgagatggacatccag

SEQ ID NO: 782283 - DNA, 90 bp, Homo sapiens
agaagatcttctttgagaaccacccatatttcagatatgccctgcgtccaagcccaatatagcccttcccctccaggttccagttatgcg

SEQ ID NO: 782284 - DNA, 105 bp, Homo sapiens
atgatgctacttcgtaaatgttgtaatcatccatatttgattgaatatcctatagaccctgttacacaagaatttaaggagatctattgggaaactgattataac

SEQ ID NO: 782285 - DNA, 75 bp, Homo sapiens
tgtggaagtgtatgcacatgcacgatgtgttcagagcaacattgttttgttgacacaagcatttagaagaaagtt

SEQ ID NO: 782286 - DNA, 90 bp, Homo sapiens
cttttgatggtggaagtggtgaaacccaaacaacatctcctgctattccttgggctgcctttcctgcagcaaaagagctgtgtctgaaca

SEQ ID NO: 782287 - DNA, 73 bp, Homo sapiens
aggacgtggtcaggctgcggccctgtgagaagaagcggccttcgtgaccctgctgaatggggagcaggccgag

SEQ ID NO: 782288 - DNA, 75 bp, Homo sapiens
agtgtttgcacaaacatttcagcaaactatgctgccttcaataagacaatgtatttcaaaggcattgaagcaggg

SEQ ID NO: 782289 - DNA, 102 bp, Homo sapiens
gtcacggatcggattcctcagctacgaggaggcgctgaggagaggcaaatgttctgaaaaagactctgcatgggaatggcctgccttacgatgacagaaatg

SEQ ID NO: 782290 - DNA, 98 bp, Homo sapiens
gcgcacctcagccgcctcctagcggcgcggcgctcgctcctacggcttgttgattggtgctggctgtgccctctaccccttgggctgggacagtgagg

SEQ ID NO: 782291 - DNA, 100 bp, Homo sapiens
gggactctggacagctgataatgcaactgcaacaaacttgttgaaacgcattttggatgcatgagactgggagatactgcctcaccttattatattcttc

SEQ ID NO: 782292 - DNA, 96 bp, Homo sapiens
cagtatggtagccacacccccagattaagcctgatcaagatgacaacctcccaaaagcaccgagacttcgtggcagagcccatgggggagaagcca

SEQ ID NO: 782293 - DNA, 75 bp, Homo sapiens
gctgggttactgatggattactgatggattcttctcagtgtgtactgtaagcacggtcacctgtgtcccatcgac

SEQ ID NO: 782294 - DNA, 100 bp, Homo sapiens
ccatccactgccgcggccgtgggcccgaccgcggggacccctccaggcggacgacgtgggccgaagagaggaagctcaacacagagacctttggggtgtc

SEQ ID NO: 782295 - DNA, 75 bp, Homo sapiens
gcggccgcggccagggaacggggcatcgcggttccaacgacctttccaaagtgaaactgatgagatttgatgatc

SEQ ID NO: 782296 - DNA, 100 bp, Homo sapiens
cccggaaaacctaaccatgaagacttgaacttaatacagcaagaaagaccatcaagtttaccacttttgtctggtcctctgagccccagtgagagtttcc

SEQ ID NO: 782297 - DNA, 100 bp, Homo sapiens
ccagatgtcatctccaagttggaacaaggagaagagccatggatcataaagagacacataccaaattggatctatccagcaataatgacgatgaggacct

SEQ ID NO: 782298 - DNA, 75 bp, Homo sapiens
ttaccaccgtcatggcagtcccagcagcagcagccccgtttcagacctctcaggcttccgccagtgctccacgac

SEQ ID NO: 782299 - DNA, 100 bp, Homo sapiens
gggcagagcactgcgccgtttgggaacgcaactttgaggagacagtgcggtggatggcctgatatgaaggagtcacgcctcccgcctcccggagctgccc

SEQ ID NO: 782300 - DNA, 90 bp, Homo sapiens
gcgcctttcatagagaaatcccgcagcggaggcaagacagtgcgcacggccacccccttccccatggtcagcctcttcctcgtgttcacg

SEQ ID NO: 782301 - DNA, 75 bp, Homo sapiens
aaggttcagttggcaaaccagatatatgacttgtgacgagtagcacagcccctctatggtttagatggcagtgct

SEQ ID NO: 782302 - DNA, 100 bp, Homo sapiens
ccgcacgcggcgatatggaagaggagggcaagaagggcaagaaggaaaatgcaacatggcagcagcaatggaaacagaacagctgggtgttgagatattt

SEQ ID NO: 782303 - DNA, 100 bp, Homo sapiens
ggattcagagcagatgtgatctgcgctaggtggcatctcctctcacggatgcctcgaatggagatttacagacagtcatctgggtggaggacaccctttt

SEQ ID NO: 782304 - DNA, 100 bp, Homo sapiens
gcctccctcgtgagttgggcttggtaccgtgctgcccagaatgcccttcgggagcttccaaacagtttcataatgaggtcctgaaggcccacaatgagta

SEQ ID NO: 782305 - DNA, 75 bp, Homo sapiens
ttaagagccaactggtagagcaatttccaggtgctggagaatctggtaaaagcaccattgtgaagcagatgagga

SEQ ID NO: 782306 - DNA, 100 bp, Homo sapiens
cggacactacgtgctgggcgacacgctgggcgtcggcaccttcggcaaagtgaagagaaacatgccctgaactgtcacagaatgaaaccagcgctcttca

SEQ ID NO: 782307 - DNA, 98 bp, Homo sapiens
tcattaaagcagccggtgtaaatgttgagcctttttggcctggcttgtttgcaaaggccaaccaggatctcccaacccgaagacagcaggcagcccaa

SEQ ID NO: 782308 - DNA, 75 bp, Homo sapiens
gggagagtgagagaaaggctggaagacgagagtatgcagagaacatcggggacggccggagcccggagttccggg

SEQ ID NO: 782309 - DNA, 98 bp, Homo sapiens
ttgtactatcctcggtgctgtggtgcagagctagttcctctccagctcagccgcgtaggcgaggccttcttgggcagctttgtggccagcgggatggg

SEQ ID NO: 782310 - DNA, 75 bp, Homo sapiens
ttcaatgagtaaacatattcctggtttccaggcctgaggtgcccgccctggccccaggagaatgaaccagccgca

SEQ ID NO: 782311 - DNA, 49 bp, Homo sapiens
gaaaagactaccgcactgaaaggtttctatatatgctgtaccagaaaag

SEQ ID NO: 782312 - DNA, 75 bp, Homo sapiens
aagtaaatgctgtcttttcccaaaagacaggctcttcacctgaaggtataaatgaccaaggattgtacagagttg

SEQ ID NO: 782313 - DNA, 74 bp, Homo sapiens
gatcagctgtgaaaaactctttggatgattctgccaaaaaggacacagaagacttagatcactatgaaatgaaa

SEQ ID NO: 782314 - DNA, 96 bp, Homo sapiens
ttgagtaccagcatcacaagcctcctttcaccaacgatcagatgtggccgcccagcagttgtgcacataggaggagaaggggccaggtgggaaaag

SEQ ID NO: 782315 - DNA, 104 bp, Homo sapiens
ttgtctttgacgggtcctccctgcctgccgatgtgcatcggtacatgaagatccaaagcaatgaggacctgaagcaagagaaatcagaattggaagagaagctt

SEQ ID NO: 782316 - DNA, 100 bp, Homo sapiens
ttgtgttcctggcttccctctggatgctgacagaaacaagggtcaaggtgaagatgttcttaaagggtcccagattacgtatgttacaggtgtagaaggg

SEQ ID NO: 782317 - DNA, 97 bp, Homo sapiens
gaagtcctcccgggttcaggacggcatggggctctacacggcccgcagagtgcgaaaggggacagagcacaggaaagggacccccacagtcacctgt

SEQ ID NO: 782318 - DNA, 100 bp, Homo sapiens
tgcaccgcaccgagggcgagctccagaacctgtctccagagaagattttccacgtcattgtggccccttgttatgacaagaagctggaggctcttcagga

SEQ ID NO: 782319 - DNA, 99 bp, Homo sapiens
ttgacttggaagcaatgtttgaacaaactcgaagaacagctgtggaaagaagttgcaaaacactggctcctacagaagaagggaaaaaagagctgctgt

SEQ ID NO: 782320 - DNA, 90 bp, Homo sapiens
ggaagatggcgctggccggatggaaatcctaatgacagtctccaaattcgcctccatctgtaccatgtccacagacaaacgaatttaaag

SEQ ID NO: 782321 - DNA, 100 bp, Homo sapiens
gccgctgctgccgccgccgccgcccagagactgctgagcccgtccgtccgccgccaccacccactccggacacagactattcagactatgaagacagttc

SEQ ID NO: 782322 - DNA, 75 bp, Homo sapiens
cgagaaccgtcagtttgagccagatggtattctttaggtgatgctagaaggcctcttcatgaaacagcagttttg

SEQ ID NO: 782323 - DNA, 50 bp, Homo sapiens
gactcatggaggctgagcatttattcagagttttgattcatcatggataa

SEQ ID NO: 782324 - DNA, 82 bp, Homo sapiens
aggaaaaaatagaaaaacaaattgctacatccgggcccccaccagaaggtggacttagggaagacccactacgttatgtgag

SEQ ID NO: 782325 - DNA, 100 bp, Homo sapiens
ggatgccaccaatatgccagctgtcaaagccatcatatatcagtatatggaagagtcttgccacttgcctagtgaggcttttccgaacctggaaggagac

SEQ ID NO: 782326 - DNA, 75 bp, Homo sapiens
agcgctgaggtctacacggaggaagatgcggcatcctatgttagaaagggtggagagattcaaccagttagcgtg

SEQ ID NO: 782327 - DNA, 83 bp, Homo sapiens
ttcacttcttagacaaagaattgacaggcttgaaggaaaaagacctcgatgaagttctgcagacccactcagtgtttgtaaat

SEQ ID NO: 782328 - DNA, 102 bp, Homo sapiens
ctacctcctgcgaggcctcccgggctccgggaaaactacactggccagaagtccattggaatattaagcccaggagttgctttggggatggctggaagtgca

SEQ ID NO: 782329 - DNA, 100 bp, Homo sapiens
ggatttttgagctggtggaagtggttggaaatggcacctatggacaagtctataagggccatgaaatgacaagcattggactgctacttggtgtttctgc

SEQ ID NO: 782330 - DNA, 75 bp, Homo sapiens
gctcgagtccatattgcagaagatcaggtggataatccagtttctgttttaacacaagaaatgagcaagcagttc

SEQ ID NO: 782331 - DNA, 101 bp, Homo sapiens
cgaggagccttcatagggacagccgcccctggtgcacacaccctcgtattctcctgcccttccccagatacttgccagaactaatacagctgatgaaatac

SEQ ID NO: 782332 - DNA, 90 bp, Homo sapiens
atgatggcacgttacgctgtggggatttttccagggctatttttgaagaggtgagcacctgcggatctgtccccagggctacacctgctg

SEQ ID NO: 782333 - DNA, 100 bp, Homo sapiens
ctccactcgaacagatgtgagcgagaaagccgttgcctccagcaccacttctaatggtaagaatgattgatgttggctgatattggagtgctcattcaca

SEQ ID NO: 782334 - DNA, 75 bp, Homo sapiens
gaagcggccaccgactactgtcagcagctgtgccagtgcaagcagctaatgactcagtctgtagactccaacaga

SEQ ID NO: 782335 - DNA, 83 bp, Homo sapiens
ttgtggtagaccgtctaagagaagagctggaagtcgagtgtgctactcaactcaggagatttggagacaaactgaacttccgg

SEQ ID NO: 782336 - DNA, 82 bp, Homo sapiens
gaagccatgcccctcaggctggaacttgccctgtctcctcgcagatgagtgactcgccataatcacctcaaggacttcatgc

SEQ ID NO: 782337 - DNA, 50 bp, Homo sapiens
aatgaccagtcacaatggttacagcatgcaatgatgctacctgttctgac

SEQ ID NO: 782338 - DNA, 95 bp, Homo sapiens
cgcgggccgaccgggcgcaccgaccatggcctccaaatgccccaagtgcgacaagaccgtgtacttcgccaccctgaagggtcccttcccaagcc

SEQ ID NO: 782339 - DNA, 80 bp, Homo sapiens
cctgaggcctccccagaagcagatgctgtcgtgcttcctgtatagctgcagaacttatatctctctaccgggggaattgc

SEQ ID NO: 782340 - DNA, 75 bp, Homo sapiens
tattcttggggagagttgctaggaaaatgatatggccgcgtggaaagtgtcaaaattcttcccaagaggggatct

SEQ ID NO: 782341 - DNA, 101 bp, Homo sapiens
tttggtcatcggaagtggtgccttcagcacaggacaaggtggagcagacacctcgcagtcaacaagacccggcaggaccaggactccccgcacagtctgac

SEQ ID NO: 782342 - DNA, 100 bp, Homo sapiens
gccttttctaccatgatgagtgtccatcgcggagaggtaccttgcacagtgacctctgcatctatgatgaggagtctgatgaggaagctgtgaagaaaac

SEQ ID NO: 782343 - DNA, 98 bp, Homo sapiens
ctcgcgcgtgaggatctatctcagttttttgaggaagagtctcgctaccactgtgccctaatactcaacctccaaaaatcaccgtttactgggacgtg

SEQ ID NO: 782344 - DNA, 100 bp, Homo sapiens
cgggaacctcttccagttggaattgaagaatattcccaagtccttcacccgggttcgaccttgaaactacaagagtgaatctgaaagttagttcaaaaag

SEQ ID NO: 782345 - DNA, 74 bp, Homo sapiens
cttcggagggttcgttctggagtcatgagtgaaaaggagagaagacgatctgcacttcgcattttggcattgac

SEQ ID NO: 782346 - DNA, 75 bp, Homo sapiens
ggcagcatcttgtggggccatccagtacatcccaactgagctggatcaagagaagaaataccacttgcaggagag

SEQ ID NO: 782347 - DNA, 82 bp, Homo sapiens
ggaaaacatatccattaaatggggtgatggatgtggacacactgtactaggccctgagagtggaacccttacatccataaac

SEQ ID NO: 782348 - DNA, 83 bp, Homo sapiens
cgaggcgattgcgggggcctgggctagagccagccccagtgcctgctgagccgtttgacaacactacctacaagaacctgcag

SEQ ID NO: 782349 - DNA, 125 bp, Homo sapiens
cctgcccggagccaccgcctgaagcacccaccgaagacgaccatgacgagctctagctggatgggcgcagagcttggaatgcactccctccacctccaaccagagctccccacaactgaccctgc

SEQ ID NO: 782350 - DNA, 101 bp, Homo sapiens
actggctacacctacatccttcccaagaatgtgcttaagaagttcatctgcatatctgaccttcgggcccaagatatgggccctcacattttccaaacctg

SEQ ID NO: 782351 - DNA, 75 bp, Homo sapiens
accccttggagccaggcgccggggtctgagggtgtggagagaagctcgggaccgcatcgtgggcttccctggccg

SEQ ID NO: 782352 - DNA, 75 bp, Homo sapiens
cgcggtcgagatcgccatgcctacccgatgaccagtgtcccagtgaaggaacgagtgaaggtgtctcagaactgg

SEQ ID NO: 782353 - DNA, 98 bp, Homo sapiens
agctattgctgctgtcaatgcattgcatggcaggtggtttgctggtttggaattggccgcttcactacagaggaggaagtggactacacagtggagaa

SEQ ID NO: 782354 - DNA, 50 bp, Homo sapiens
ctcgatttattcctggattacaggtttctagagaggaaggatctccccag

SEQ ID NO: 782355 - DNA, 100 bp, Homo sapiens
cggcatcatcgagataaagaaagacagtctccatttcatggcaaccatgcagctattaaccagtgtcagacaggtgatttggcttctgcacagttaggag

SEQ ID NO: 782356 - DNA, 100 bp, Homo sapiens
atcacttctcaccgcgccctccagcttcacccgtacaggtagccccgccgccgcgcacctgccttcgctcccgcaccgggccgttgctccagggagaact

SEQ ID NO: 782357 - DNA, 134 bp, Homo sapiens
ggatcgtgaccgagaccgtgaccgagagcgtgaccgagagcgcgaatatcgtcatcgttagaaggggggtggattagatgtattatcagagagatttccaccacaacaagcaacgccacctttgatcatggaag

SEQ ID NO: 782358 - DNA, 80 bp, Homo sapiens
gaaagcaagggattgctggctacagcttcagaagaccgaagcgttcgtatctggaaggttaacacagaaatctgcctcct

SEQ ID NO: 782359 - DNA, 51 bp, Homo sapiens
cccaggaagaagacgaggatggcttgcagatgggtcaagggttgtggagag

SEQ ID NO: 782360 - DNA, 75 bp, Homo sapiens
ttaaatcattcatcacaagtattgcaaacaaggctttcccaacgagcctgctgcagtcattgccctcaacaccat

SEQ ID NO: 782361 - DNA, 74 bp, Homo sapiens
ttcagcagctacagtcgacgggcaaaaaggctacagcctgatgtgtctgctttttcaacgtgggagaaggagtt

SEQ ID NO: 782362 - DNA, 127 bp, Homo sapiens
cggccggtgccagcacctttcggcttctgagacggcggcagcagcggcattcagaatgaaactttgctacctgttgcccaaagtgaaatctactctgaagattcctgctgataagcatctacttcag

SEQ ID NO: 782363 - DNA, 78 bp, Homo sapiens
ggaaagtgagtgagtgagcccagtgagttggaatcaactggactcggccttagtagtagtagactaagaacaactcta

SEQ ID NO: 782364 - DNA, 100 bp, Homo sapiens
gtcccgcggagtctcgggccccggagacgggcgaggagcacggcagcagccagatggatacacaactgatgacattgagttttactggcgtggcgatgat

SEQ ID NO: 782365 - DNA, 75 bp, Homo sapiens
cacatgcccgctcacctgcgctgtgatgcctgcagagctgtggcttaccaggtagatatagttgtaggtactccg

SEQ ID NO: 782366 - DNA, 75 bp, Homo sapiens
gaagaggaagaggaggaattagtggatggagatgaagatgaggaagctgagtcagctacgggcaagcgggcagct

SEQ ID NO: 782367 - DNA, 101 bp, Homo sapiens
cgctagcaacttctaccaacaacagcatcctaatgtcctatgatcacgtggaactcacattcaatgacatgaagaacgtgccagaagccttcaaagggacc

SEQ ID NO: 782368 - DNA, 82 bp, Homo sapiens
cacagcctgatgaggaggaagaagaagaagaagaaaaagtttctcaaccagaggttaatttggagtggcccctggagtcagt

SEQ ID NO: 782369 - DNA, 95 bp, Homo sapiens
ctactccagcaacatcttgtccataaggctgaaccggcaaggtgtcaacatctgggccctggtggcggctgtggtgctcctctccagcagtgtga

SEQ ID NO: 782370 - DNA, 74 bp, Homo sapiens
gacttcatcaaaaagtttcttaaacttgtggcctcagaacagttgcgcgttccttcacctcgggcagaataact

SEQ ID NO: 782371 - DNA, 80 bp, Homo sapiens
aacccgcgcccgcttcggagagagaaatgctgggtttgggatatgagattgaaaatgacgactcggaattttcctgagag

SEQ ID NO: 782372 - DNA, 83 bp, Homo sapiens
ccgggagccgggccggcctagccaggtgaaatgacaatggatgctctgttggctcgattgaaacttctgaatccagatgacct

SEQ ID NO: 782373 - DNA, 50 bp, Homo sapiens
cgactgctagagccgagcgaagcatgtgtatatctcatgattgatatgga

SEQ ID NO: 782374 - DNA, 75 bp, Homo sapiens
gtcagtacatggacaagcaccctggggggctgcatccagataatgtgaaggtgtatgcaacagcgttattgcaac

SEQ ID NO: 782375 - DNA, 75 bp, Homo sapiens
tgccctacctcaacaagtacatcctggacaaggccaaacgtaccaagaaagtcgggatcgtcggtaaatacggga

SEQ ID NO: 782376 - DNA, 100 bp, Homo sapiens
gcccgtggtccttctccatattcgagaatgtccctcttccagtggaaagcccaaccatgcagacatcttgctcataaacttacagtatgtttcagaagtg

SEQ ID NO: 782377 - DNA, 75 bp, Homo sapiens
aagctatgtcttcagaggaacaaaagatttgtctgccaaacaactgcagccctggtacctgacagtgtaaagaag

SEQ ID NO: 782378 - DNA, 90 bp, Homo sapiens
ggggcgcagagccaggcagcgcagactgtattggtgatcacgtaccgagaacccccaaatcctgagtatcaggaattccagaatcgtctg

SEQ ID NO: 782379 - DNA, 98 bp, Homo sapiens
ccgcagagagcagccgggctgccagcgaacatccagtcatggataaaaatgagctggttcagaaggccaaactggccgagcaggctgagcgatatgat

SEQ ID NO: 782380 - DNA, 100 bp, Homo sapiens
gtggtgggatcaactaacacaagaatccatccttctccccaggataagtccagaaggtgttggtgaaaatttgactgacccatctgtgataaaagcagaa

SEQ ID NO: 782381 - DNA, 73 bp, Homo sapiens
gtttccttaaagtgcctcgatctaaggatgaccctggaaagacggcaaatggatacatcttgttttttcatat

SEQ ID NO: 782382 - DNA, 99 bp, Homo sapiens
agaatactggctgaaccacagatcttcaagaatcctgtctcacgcctgtatcccagcactttgagaggccaaggtgccatcgcctgcaggattctttat

SEQ ID NO: 782383 - DNA, 51 bp, Homo sapiens
gtaaaaacatggcggatccagaattctggcacagatagatcattatctagg

SEQ ID NO: 782384 - DNA, 90 bp, Homo sapiens
ccagctctgtctacttcacggcctcctcgggagccacgttcacagatgctgagagtgaagggggcatccgcacttccactaatagccaag

SEQ ID NO: 782385 - DNA, 98 bp, Homo sapiens
tctaaaccttatagcctgcttatgggggaagtgttttccaagcagtgaagcacttgccgtgttgaactgaatgcactactggagaatgttctgggtcc

SEQ ID NO: 782386 - DNA, 100 bp, Homo sapiens
cctacagtgaaatagcatggatttcatccattatgctggctgttatgtacgcaggagacatgccaccactgctctttgaggtgtcatccctggagaatgc

SEQ ID NO: 782387 - DNA, 100 bp, Homo sapiens
ctttgctcttccatccgcctttgatcgtcttcctcttcagccatccaggcattgaatgccccagaggagcccgaaacctcccaggcttggtgcaggaagg

SEQ ID NO: 782388 - DNA, 100 bp, Homo sapiens
ccaccgtgcaggtcgtcatcttcataggctcgctgctcggtataaaggaccattgttagaagagcaagcccttacaaaggcggcagagggtggattatct

SEQ ID NO: 782389 - DNA, 100 bp, Homo sapiens
aacgcggcaatggtctcatcaaggtgaacgggcggcccctggagatgattgagccgcgcacgctacagtacaaggaggatttgacagctaaggatattga

SEQ ID NO: 782390 - DNA, 50 bp, Homo sapiens
ggaagcatcctgcctcgtcatccagttgttttccaagagataacttcacc

SEQ ID NO: 782391 - DNA, 83 bp, Homo sapiens
atttcctcagtcacgggcctagaactccaaggagaaaggcggcggaagctcttcgtgggcggtcttgactggagcacgaccca

SEQ ID NO: 782392 - DNA, 100 bp, Homo sapiens
tttaaaattttacataagaagttacctttttcagctttgacagatccaaatgcttctgctgcccagcaggctgttctccagcagcacatcaatagtctaa

SEQ ID NO: 782393 - DNA, 101 bp, Homo sapiens
ttctgaccccaatgccagcttatgccagacacacaggacaagtagggaccaaactgtatatgagcccagagcaggcccgccagctcatcctgcagtatggc

SEQ ID NO: 782394 - DNA, 74 bp, Homo sapiens
acccggtggtgcagctgggcctgaccaacccgaaaacattgctagatcagcttgaacgggtctttttacgactt

SEQ ID NO: 782395 - DNA, 82 bp, Homo sapiens
gatgtctacttcgaagactggcaagcacggccacgccaagctgttcagggcaacaacgaagtgtccatgtgggacatggaga

SEQ ID NO: 782396 - DNA, 75 bp, Homo sapiens
atgaagtaatacagaactgccccatcgatgtgcggcgtccgctgtataagtacttgattctaaagctcgaaaggc

SEQ ID NO: 782397 - DNA, 96 bp, Homo sapiens
gaactatgcagagctgctggaggatgccttcctgaagaatgtcaccgcccagatctgcataggaatcgggcgcctgattgctgagtgtcatctcaa

SEQ ID NO: 782398 - DNA, 100 bp, Homo sapiens
gtggtggcttaagttttgaagggaggtagcatccgttggatatccacaccatccttctcgctgcagggggaatgaattggaaataaccattatgatggtg

SEQ ID NO: 782399 - DNA, 100 bp, Homo sapiens
acgaaaagtaacaggagcaaatactgggaaaatatttgccatgaaggtgcttaaaaagggtccacatatagcctcagttacattagctgcttatgaatgc

SEQ ID NO: 782400 - DNA, 78 bp, Homo sapiens
ccctacgagtgcaacatctgcaaggtccgcttcaccaggggaacgcccttttgcttgtgactggcagggctgcgacaa

SEQ ID NO: 782401 - DNA, 100 bp, Homo sapiens
gggactgtggtgccatctttgcttcatcaggacctggcagccttgggtgggcaaacgcagaggcgggaacaaactagccctcaagacgggaatagtagcc

SEQ ID NO: 782402 - DNA, 82 bp, Homo sapiens
gtctgtggactcttttcctgtcaaattaccaggatgaaatactggagctgttgtagaagaaaaacttctgattttaatacat

SEQ ID NO: 782403 - DNA, 98 bp, Homo sapiens
aatatctgtcttcggtggactccttcggcagtccacccaccgccgccgcctcccagccctgggcgctgcctatggcacagccaagagcggtaccggca

SEQ ID NO: 782404 - DNA, 90 bp, Homo sapiens
gagaattggaagctaaagctaccaaagacgtagaaagaaatcttagcaggtgctgtaccctgtgtgccatgtgcgtaacctgatgctgtg

SEQ ID NO: 782405 - DNA, 73 bp, Homo sapiens
ggaatttctgcccagatagtgtctgcagctatcctcattgaattttgtgcaggtggagcagtagatgctgtga

SEQ ID NO: 782406 - DNA, 101 bp, Homo sapiens
ccaactcaggcttgcccatggtgtcagactaaaggcaaacaaggactctctgtataagatcaccacgcttattaatcataaagataataccaaaaagtctg

SEQ ID NO: 782407 - DNA, 100 bp, Homo sapiens
gccacctgcctttgacctttttgaagcctttgcaaaaatgatagtatttctgctgcaagtacttctgatgttcaagatcgcctgtcagctcttgagtcac

SEQ ID NO: 782408 - DNA, 100 bp, Homo sapiens
gggagagcaaggcgcgcggcgactccgacaatgcagatcttcgtgaagactctgactggtaagaccatcaccctcgaggttgagcccagtgacaccatcg

SEQ ID NO: 782409 - DNA, 100 bp, Homo sapiens
aagctataagtatcttctcttgtccatggtgaaactaattcatgcagatccaaagctcttgctttgtattgctgacttgacctctgaccttgccgatgag

SEQ ID NO: 782410 - DNA, 75 bp, Homo sapiens
tctttttcttcaatgggcagcatatgaaagtggattatggagagttggaaactcaactattggaacaatgtactg

SEQ ID NO: 782411 - DNA, 97 bp, Homo sapiens
aagcagaggagaaccgggagccattcagaaaaggtggagtattgctcctggaaaatccaaaaggtgacaataggttggaccttttaaagctgaagag

SEQ ID NO: 782412 - DNA, 75 bp, Homo sapiens
gtacttttcatggtgcatggaaggaaagccaatgcgcaggccatggttgcttgttatccgggcaatggaacgggt

SEQ ID NO: 782413 - DNA, 83 bp, Homo sapiens
cttggcaatgaaggaacttaatgagcatgcagactgtgtattgcccattgacaatcaatactgccaaatctgtcgaaagggag

SEQ ID NO: 782414 - DNA, 82 bp, Homo sapiens
acattctctatctgcgcaccttggagtccaagcttgtgctctttggaacccagtgaaatgagctgcaccaggaactttaaga

SEQ ID NO: 782415 - DNA, 83 bp, Homo sapiens
gtcttccataactttcataactttgaacattttgattgggacagtgcaactttaagtaatgagtcactcttggacactgtgtc

SEQ ID NO: 782416 - DNA, 100 bp, Homo sapiens
tgtatgacattgatgtggccaaggtcaacaccctgattcggttgctccttgagggcaggacagttcttatggctttatccgttgcgtaagcacagagagg

SEQ ID NO: 782417 - DNA, 100 bp, Homo sapiens
atgcagatgcccctcctccaccagaggactgggaggagcatgtcaacagtgagttggactatggatcaggtactgtgctcagcatcagaaaatgggatga

SEQ ID NO: 782418 - DNA, 75 bp, Homo sapiens
tgatccagaagtccagagctgaggactgcctgtttgcagttggtgtaatacggtgcccagtatgccgccaagaat

SEQ ID NO: 782419 - DNA, 98 bp, Homo sapiens
gcgctctggctgtgctgcgcgacccccgcgcatgaatggagatgtatgcatttcgattcttcatccgcctgtagatgacccacagagtggagaactgc

SEQ ID NO: 782420 - DNA, 98 bp, Homo sapiens
gcggcatgagtatctgggatgtgaagatgcctgtccctatgcttattccatcttcaatggatagtgaagataaagtcacagagagtattgaagacatt

SEQ ID NO: 782421 - DNA, 100 bp, Homo sapiens
ttgactgagagaaacccactgaagacgtctgcgtgagaatagagaccaccgagtacctggagtagaacagaaaaattattatgtctgtgttcccttggga

SEQ ID NO: 782422 - DNA, 100 bp, Homo sapiens
gccatgtcgggttattcgagtgaccgagaccgcggccgggaccgaggaatggctattcaagtggacaagttcaactttgagagtttcccggagtcccctg

SEQ ID NO: 782423 - DNA, 90 bp, Homo sapiens
cctgaaccgcgcggccgaaccctccgtccctcaacaccttacactaagtcaaagcgtggccacagagaagaggagcaagaagacctgaca

SEQ ID NO: 782424 - DNA, 100 bp, Homo sapiens
tcgggaagcagggattccagtgccaaggtatcagtcagagccggatctctcattggctgttgcagcagggatcagacctgagtgaacagaagaaaagagc

SEQ ID NO: 782425 - DNA, 78 bp, Homo sapiens
gcgaaacgaggaggagataacgcggccttgggctctgcgccaagaagagggagggcgagcttacggtggcccagggcc

SEQ ID NO: 782426 - DNA, 83 bp, Homo sapiens
ctcaatatctgtcttcggtggactccttcggcagtccacccaccgccgccgcctcccagggctgccagaggaacccgaccaga

SEQ ID NO: 782427 - DNA, 100 bp, Homo sapiens
aacaacagttgctccattggatcgagtaaaggttttattacaagctcacaatcaccattacaagcatttaggtatccgttacagcactgatgtgagtgta

SEQ ID NO: 782428 - DNA, 50 bp, Homo sapiens
cagtaccctgatggagtcccttgcaggtgtccctggccagtgtccttcca

SEQ ID NO: 782429 - DNA, 90 bp, Homo sapiens
gggaaaacccccattcattctggattggtggatctgaagtacaaaatattttccaggtctatgttaacaatgaatgggcaaccagtgttg

SEQ ID NO: 782430 - DNA, 101 bp, Homo sapiens
cccatacctgctgcctgtggcatttattactttgaagtgaagattgtcagcaaaggaagagatgggtgcggtcttgctctgttgcctaggctggagtacag

SEQ ID NO: 782431 - DNA, 100 bp, Homo sapiens
ggtggtgatggaagcaggtggaattatgccctgttggttccaatgctgggattggctgcttttcagtgcttgtgatttcacgtatttttgctgaactcgt

SEQ ID NO: 782432 - DNA, 82 bp, Homo sapiens
gaacccagtaatcgattacccaaagtttacaaatggagttttcagatgtgcatcacgttgggtggtttccatttagaccgag

SEQ ID NO: 782433 - DNA, 75 bp, Homo sapiens
aggctctatcagactgacccctcgggcacataccatgcctggaaggatgatgatgctgaagctatccttgctgca

SEQ ID NO: 782434 - DNA, 100 bp, Homo sapiens
ggaaagcagaaatgatcattgaacaggtagcttggccagaactaatagcaattcgaaaggcatgtattagcttggaagaagattaccggccaggaataac

SEQ ID NO: 782435 - DNA, 82 bp, Homo sapiens
ggacacctttctgggactgcagcaccagggtggctacgcctcccggctgactccagttgtacagaatgcagcatctattgtt

SEQ ID NO: 782436 - DNA, 98 bp, Homo sapiens
atgagaccagcttcttcacaggttccacgagtcatgtcaacacagcgtgttggatcgacgagaacgtgctaggagcccagctggacgttgaggccgcc

SEQ ID NO: 782437 - DNA, 100 bp, Homo sapiens
agccgccctgcccagaaacgtccacatgtgggtactgcattcctaccggtgtgacagtggatatcttgacctacgtggcttggaagataagtggttttcc

SEQ ID NO: 782438 - DNA, 83 bp, Homo sapiens
aaggcggtcaccaagtacaccagctcgaacaaaatgatgcttcaacacccaggccaggtctctgcctcggaagtgagtgcttc

SEQ ID NO: 782439 - DNA, 98 bp, Homo sapiens
tggagtgcaagaagaaattcccacctgtcaaagaggattactacagcatcccatttcccacacccactactccgctgactgggagggatggtagcctg

SEQ ID NO: 782440 - DNA, 99 bp, Homo sapiens
tatgaacaatccgtctggatcacggatgtaggaagtgctggagaatgctggaggagaccttaaggatggccaccaccactatgaaggagctgttgtcat

SEQ ID NO: 782441 - DNA, 101 bp, Homo sapiens
aaggcagatgtatctttcgttctcttttttgactgtaataatgaggttgctggtaaaattcctcctagtgtccaagtggaggcagcttgtcttctgtccca

SEQ ID NO: 782442 - DNA, 75 bp, Homo sapiens
ggctggaggcaaggcctgggacgagcaggagagagacgcttatgcagacagaggcgcatgcctgtgtctaccaag

SEQ ID NO: 782443 - DNA, 75 bp, Homo sapiens
gaggatatggtgcagaaggtgcacagccacagcgccgagatggaggatatccgacatgaagccagtgacttccca

SEQ ID NO: 782444 - DNA, 100 bp, Homo sapiens
ggacttggtgtgcattaacctgccgccgcccctcaccagacagatcgctgtcaaaaccctagttttcaatggttccagcaggtcaacacgggagaaggaa

SEQ ID NO: 782445 - DNA, 100 bp, Homo sapiens
gaccaccggagaattcctggggcgcaccgccaagagctgggagctccactggttcaacagcctctcctccagtttcgaccccagtcacaggacacaagag

SEQ ID NO: 782446 - DNA, 100 bp, Homo sapiens
actaagggggcattgccctgtcccccggattacagtgagccacatgtcaagcccaagagccaggagggttcttgatggtgctagacattccccaggagcg

SEQ ID NO: 782447 - DNA, 98 bp, Homo sapiens
gctgaggaggggccccagcagcccccgaaggccctatcaggacatggagtatgaaagacggagtggtccgcagacctgaatcgaaccctcagccggag

SEQ ID NO: 782448 - DNA, 75 bp, Homo sapiens
aatcgcttggttaaaacctgacacttttaacagatatggccgcgtggaaagtgtcaaaattcttcccaagagggg

SEQ ID NO: 782449 - DNA, 99 bp, Homo sapiens
tgcatttgtctgtttgatatcaccaaactggaggatgcctatgtattccctggggatggcgcatcacacaccaaaggaactatcgtgagcataggtgac

SEQ ID NO: 782450 - DNA, 82 bp, Homo sapiens
caacaatggaggccagtggctggtctcagggagtgcatccgccccaacccttttccccctcgtctcctgtgagaattccccg

SEQ ID NO: 782451 - DNA, 80 bp, Homo sapiens
gggttcagttgataaaaataagaacaaagtgacaccactgcagaggcctatgagagctacaagaagaaggactacaccca

SEQ ID NO: 782452 - DNA, 100 bp, Homo sapiens
gcacattttacctcagccaccgagaaggctacggcaccatgtacatgaagacacggcttttccagggttttggccaaattgggcgagggcacaaaataac

SEQ ID NO: 782453 - DNA, 95 bp, Homo sapiens
tgctggcgctctggctgtgctgcgcgacccccgcgcatggccaatgtgagggagttgatggaccgagctctggagctagaggcacggcgctgggc

SEQ ID NO: 782454 - DNA, 90 bp, Homo sapiens
gacccatttctcctcctttgacagggacatcagtggagccttctcagacccacaggaaaatatatgcagatgatgaacattcttaagcca

SEQ ID NO: 782455 - DNA, 83 bp, Homo sapiens
ccagcatggaaccaaagcggatcagagagggctaccttgtgaagaagatcatggaagggaagtggttgctgtgtatgttactg

SEQ ID NO: 782456 - DNA, 100 bp, Homo sapiens
ctagaagagagaaggaggaaaagaagcagttcctgatgttacaaatgaacaaggatctcccaggtaaagtgaatgccgaagacagaagatttggatgata

SEQ ID NO: 782457 - DNA, 104 bp, Homo sapiens
cctaagccaactcgaaaaagccgtacaaaaaataagcaaaagcgtcccaggaggtgagaaaggagattccggtgacataggaccccctggtcctaatggagaac

SEQ ID NO: 782458 - DNA, 100 bp, Homo sapiens
cacggccgaggacttcgccgaccaggacccagatgatgtggtaccagttggccaaagaagagcctggtgttggtgcatgtgctttggactagcatttatg

SEQ ID NO: 782459 - DNA, 75 bp, Homo sapiens
aagcggccgcggccagggaacggggcatcgcggttccaacggttgccaacttggcctgttccatctcaaataatg

SEQ ID NO: 782460 - DNA, 90 bp, Homo sapiens
ggcgctccaggtgctgacagcgcgagagagcgcggccctcaggagcaaggcgtaagactttgaccccgacgcaggcttcagtgattgccg

SEQ ID NO: 782461 - DNA, 112 bp, Homo sapiens
agacaaaagacctcggggccggcctcgcaaggcgcttcccctttccagagagccagaaagaagagcatcagatccatgctgctgctgactcggagccccacagcttggcaca

SEQ ID NO: 782462 - DNA, 50 bp, Homo sapiens
aagaattctccttccacaattttaatcagtttgcagagaaattccaggag

SEQ ID NO: 782463 - DNA, 110 bp, Homo sapiens
aaagaaacccttgctgtaaattatgagaaagaagaagaattcctcactaatgagctctccagaaaattgatgcaggcagacctgttatcctaaactaggtgagtcagctt

SEQ ID NO: 782464 - DNA, 83 bp, Homo sapiens
gttcggccaagggaccaaggtggaaatcaaacgaatgggtaccacagaccatgtcatcgtcctggcgtccacgaaccgagctg

SEQ ID NO: 782465 - DNA, 80 bp, Homo sapiens
tctcccctacgcgctacacaagtggagctccttttcctccacctaccttcccgagtctacaaggaagtcttcacgaggag

SEQ ID NO: 782466 - DNA, 98 bp, Homo sapiens
gtgacccaaggagagtgctacccggtgtactggaaccttcctcctcagatcatgaatatctcctcagacatcactgtgaatgagggaagcagtgtgac

SEQ ID NO: 782467 - DNA, 110 bp, Homo sapiens
acggccctgtgtccagccagggatacatgccctacctcaacaagtacatcctggacaaggaactgtggctgcaccatctgtcttcatcttcccgccatctgatgagcagt

SEQ ID NO: 782468 - DNA, 100 bp, Homo sapiens
gccagcaccatggccagcaccatttccgcttcggaaccaaaaagaagcttcccagagccggggccaggagccccaagcgccctctagcagcaaacacaga

SEQ ID NO: 782469 - DNA, 82 bp, Homo sapiens
gcggacaaggctccggcctgcgaggagcgggctgacgcacgaggcacacaggaaggaggtggagcaggtgtatctgcgctgt

SEQ ID NO: 782470 - DNA, 90 bp, Homo sapiens
ctagtcgtggccggaggagtctcagagctgtcagaaagagggaaaccaaagggcagtttctcattgaccacatctgcaactactacagcc

SEQ ID NO: 782471 - DNA, 75 bp, Homo sapiens
ggaaaacacacgttcctccgaaaccggtttgcaagtccttgtagaggtcgcaatggaagaagagatcgccgcgct

SEQ ID NO: 782472 - DNA, 75 bp, Homo sapiens
atgtctcccgaggagtgcaggcgcttcaccacagacggacataagcagatgttcaacccaacagaggaaagccag

SEQ ID NO: 782473 - DNA, 101 bp, Homo sapiens
ccagaggtcaacaaggttctggacaagatgaagtctttctgccagctgaagtacacaaagtttcaaggccagaaaatgagcaactcagaaatgataacaag

SEQ ID NO: 782474 - DNA, 100 bp, Homo sapiens
cttggcctggaggcgatatgggtggtccgtggcccggttcagtcgcttgcagcagcccggggaacaggacctgaaggagaagaaggagaaggtggaggag

SEQ ID NO: 782475 - DNA, 100 bp, Homo sapiens
ggccgctgcacatcgtcctgtggacgcgtatcgccagcacgatcccaccgcacgttcagaagtcgggtcatctttgctttgaaccagaccctcctgcagc

SEQ ID NO: 782476 - DNA, 90 bp, Homo sapiens
tggcctcacggaccttgggctgaccggtctgtctggcttcagacgagccaaactcaggctgtaccttgagcagctcaagcaactggtgcc

SEQ ID NO: 782477 - DNA, 100 bp, Homo sapiens
tcgagtgaccgagaccgcggccgggaccgagggtggccctcatgacactgacgctcttcccggtccggctcctggttgccgctgccatgatgctgctggc

SEQ ID NO: 782478 - DNA, 50 bp, Homo sapiens
ggggatgagaagcaggacaatgaggtttctacgataaagacagttcaggg

SEQ ID NO: 782479 - DNA, 75 bp, Homo sapiens
ggttatccgtccccacaagtcatttgatgagggttcgggggtgattaaagctggctttgcaggagaccagattcc

SEQ ID NO: 782480 - DNA, 100 bp, Homo sapiens
tcgaattgctgtggatgaagttcactgctgtagtcagtggggacatgatttcagacctggaagtatactgaagatgcaagtttttttcatctggagttct

SEQ ID NO: 782481 - DNA, 75 bp, Homo sapiens
cgtcccgcggccggcgtccggagcatggcggacccccagagctggaaggaagcagccaccctcgccatggcctcc

SEQ ID NO: 782482 - DNA, 75 bp, Homo sapiens
gagcagctcatgaaactggatgaacaagggggttacacatcattttggaatgactgtatatcatctggattacgt

SEQ ID NO: 782483 - DNA, 100 bp, Homo sapiens
cagattttggtttaatatctgattgggacaacattcagacccatttccagtcatgagtatgggctacgtgagttcgtggtgattgcccctgctgcacaca

SEQ ID NO: 782484 - DNA, 101 bp, Homo sapiens
ggcgcccagtggcgtccacctgctcgtccgcagaggtcttgatagactttctgtaaagaaggaatgatttggtgatggagtgttcccactgaccgatggac

SEQ ID NO: 782485 - DNA, 83 bp, Homo sapiens
ctcagccggccatcgtggtgaaggactgatctcacattcttgaaggtggcattgaagagcactaagatcggaagatgagtgag

SEQ ID NO: 782486 - DNA, 100 bp, Homo sapiens
agcgtgaccgagagcgcgaatatcgtcatcgttagaaggtgaggacaccagtgatgaattctgaagcaaaagttctggtgcctgggattcctggtcatca

SEQ ID NO: 782487 - DNA, 85 bp, Homo sapiens
gaggatgacaaaaaagccttcataggcatccaaacaattgactctacccaggctctgttccttccaattggagcatctgtctctc

SEQ ID NO: 782488 - DNA, 100 bp, Homo sapiens
tgaccggcgaggcccagagcgaagaggtgggaagcgagaccgtggccaaggtctgggagcagcgacccctactgcctagtgaaagtggacgacgaggtgg

SEQ ID NO: 782489 - DNA, 82 bp, Homo sapiens
caaagatggggttgtcctctttaagaaggacttgaaagaggagattgatattcgactctccagggttcaggatatcaagtat

SEQ ID NO: 782490 - DNA, 100 bp, Homo sapiens
cccgcgccctgcggggctgtccaacgccttccagctccggctcccgctgcctgcaccatgtccgccagagatggttgccaccctggggaccacaacatgc

SEQ ID NO: 782491 - DNA, 100 bp, Homo sapiens
cgggcgcgcgcaccatgggggagaaacccgggaccagcatgatccgctgggcccccagcgcatctcctggaagagcccactcaccctggacgagctcttc

SEQ ID NO: 782492 - DNA, 82 bp, Homo sapiens
acgagctcaacgccaggcgccgctcctttacaggtgtttcccattaaacactaccaggacaaaatcaggccttacatccagc

SEQ ID NO: 782493 - DNA, 74 bp, Homo sapiens
ggtgctgctaacgggacctgcttcacagcgggcagagtggccacaaactcaaaggtgcgggagcaagtgcggct

SEQ ID NO: 782494 - DNA, 86 bp, Homo sapiens
catgtctggtggctccgcggattataacagacgctctgctgttgcccgtattcaggagttcttcagacggagaaaagaaaggaaag

SEQ ID NO: 782495 - DNA, 100 bp, Homo sapiens
gactctgtgctttcctaagataggaacccagaagaggactgatcatttcttgcagctctaaaaaccatggctcgggatcctggatgtccggaactttatt

SEQ ID NO: 782496 - DNA, 100 bp, Homo sapiens
agatggctttggtcacggtccagcggtcacctacccccagcaccacctccagcccctgcgcctcggcactggtgaggtggattgatgatgaatcttctgg

SEQ ID NO: 782497 - DNA, 51 bp, Homo sapiens
gacaacaccgttcccccagccgggctggtgttggtaaatcatgcttattgc

SEQ ID NO: 782498 - DNA, 101 bp, Homo sapiens
ctgggtccaagatgcaaggcttgctggagcgcgtgaacacggagatacactttgtcaccaaatgtgcctttcaggtgcagattcactttataggaacagct

SEQ ID NO: 782499 - DNA, 80 bp, Homo sapiens
ggggtgaagctggagatatttcggggagtgcatccgccccaacccttttccccctcgtctcctgtgagaattccccgtcg

SEQ ID NO: 782500 - DNA, 74 bp, Homo sapiens
gatactgaatctccagtgttagtgaatgactatgctgaccggttccctgatgtgttacctgcttctgctactga

SEQ ID NO: 782501 - DNA, 100 bp, Homo sapiens
tatattttacacccttggagaatgtgggctcatatccttttcagactacattttcctcacaactgttctttccacttttcaggatgtccagcaaagaatc

SEQ ID NO: 782502 - DNA, 101 bp, Homo sapiens
caaaaggtgggaagacggacttccaatcgagtgactgcctggcacgggtttttgccaatccagaagactgtgtagcatttggcaaaggagaaaatgccaag

SEQ ID NO: 782503 - DNA, 87 bp, Homo sapiens
cgattatggacccggccgaggcggtgctgcaagagaaggcactcaagtttatggatgggagctacagtttttgtccagcccctggac

SEQ ID NO: 782504 - DNA, 50 bp, Homo sapiens
tgtgcacgccagcttgtttgccaggagtaactattcccagtcagaggcgc

SEQ ID NO: 782505 - DNA, 107 bp, Homo sapiens
gagagggaatggtgcaggcaggcgctgagaaggacgcgcagtccatctctctcaggttaaaaagatcaagtggcatgagcagccttttggggaaaattggtgccaag

SEQ ID NO: 782506 - DNA, 50 bp, Homo sapiens
ccggacgcaaagctgtcatcgtgaagttacatggacacagaacagtatga

SEQ ID NO: 782507 - DNA, 100 bp, Homo sapiens
ctcttttaaatatttgataaaactactcacccagaaagatatggagagagatttgaaggctgactcaaacatgccactcaacaattctagccaagaggtc

SEQ ID NO: 782508 - DNA, 102 bp, Homo sapiens
ctgatattgaagaggaagaactgaccagagctgatcccgagcagcgtcatgtaccccttcagagcaccataacatggtgtgggaagtgaagacaaatcagat

SEQ ID NO: 782509 - DNA, 98 bp, Homo sapiens
cccttggtcaaagaagtgaccaaaaagtcatctacatttcaggtcttgctcagtgtgcagaactctgctggcagctgagaggggaagccggaaagagg

SEQ ID NO: 782510 - DNA, 75 bp, Homo sapiens
aagaatgaaccgcttgcttcttatttagggaactgcatgagtgagttcatgggactcatccgaggtcactatgag

SEQ ID NO: 782511 - DNA, 90 bp, Homo sapiens
gagacgctactggaggcggcccgcttcctggaatggcaagcgcagcaacaacagagagcacgtggctactgcagcactggggtgtcagtt

SEQ ID NO: 782512 - DNA, 50 bp, Homo sapiens
atgaaattggatactggcattgataggatccagatgaagaaatggccaaa

SEQ ID NO: 782513 - DNA, 90 bp, Homo sapiens
atgaatgctacttggatgcctcttaagattcttgagtatcagaacaccaccttctttggtggaacctgtatatccatgattgattacctc

SEQ ID NO: 782514 - DNA, 82 bp, Homo sapiens
cgagtgcacccagcagcacagctgccactacggcctcatcaactattaccaggtgtggacactgccagcggctgcagccgac

SEQ ID NO: 782515 - DNA, 96 bp, Homo sapiens
ctgaacagcaacctccagcatgtggtcgtcattcactgcagggttatggagacatcggctcagtcctctggagaccatcaggagcagcatgtttca

SEQ ID NO: 782516 - DNA, 75 bp, Homo sapiens
gcacagttcctgggaaggtggagccaccagcctctccttgacgagatgatgcctattggccagaaggaaagcgtg

SEQ ID NO: 782517 - DNA, 50 bp, Homo sapiens
aactattcattcttatcaagggcagcaaaagcggcgccaggaaattgaac

SEQ ID NO: 782518 - DNA, 50 bp, Homo sapiens
tggcaagttcgaccagatcgccaagactacatgaggaaataattgacttt

SEQ ID NO: 782519 - DNA, 75 bp, Homo sapiens
gaagaccccggcgctggtgaacgtgtactaatggtcacttgatgtgcgctggctgttttatccacctactagcag

SEQ ID NO: 782520 - DNA, 75 bp, Homo sapiens
gaagccccctgcaggaactctacaacccaatccagactcgctctttactgagcgtgtttgaagaagatgctggca

SEQ ID NO: 782521 - DNA, 100 bp, Homo sapiens
tggagcagatcctggaggatgtgcggggtgcgccggcagaggatccagtgttcaccatcctggccccggaaggagctctgtgtgtcgtctgagcagtcgc

SEQ ID NO: 782522 - DNA, 100 bp, Homo sapiens
tccggatgctgcctacatacgtggggtccaccccacatggcactggttttaaaatcaaagatgggaaaatcggagaaaattgcccttccccatggccagc

SEQ ID NO: 782523 - DNA, 90 bp, Homo sapiens
ttcggggccgtgctgctcttttcctggacagtgtatctttgggagaccttcctagcacagcggcaggaagatctgtttcagcaaccaggc

SEQ ID NO: 782524 - DNA, 74 bp, Homo sapiens
gtggaggtgttccgttattacaaatacaaacctggtcgatgtgatgatattttgaaatggaagcctcccagtct

SEQ ID NO: 782525 - DNA, 100 bp, Homo sapiens
gagaaaggaacaggcgccttcaaaagcccacttggcgatgggttacagtaagagatggcccactgcgtgaccttggttcagctgtccatttcctgtgacc

SEQ ID NO: 782526 - DNA, 74 bp, Homo sapiens
tgactggaaacaatggcatttacagaaagagtcaacagcagtggcaacagttctaggcctgattcttcactacc

SEQ ID NO: 782527 - DNA, 75 bp, Homo sapiens
gctttcatcattgggactgcagtttatttcaggatctaagcctttcccacgttatggttataaaccctccccacc

SEQ ID NO: 782528 - DNA, 95 bp, Homo sapiens
cgaggctcggagaaacaggcgccgcgggctccgcgcccggccggacccgggcccgagctgtgccacgaccgtggctatctggtgacccaggacga

SEQ ID NO: 782529 - DNA, 100 bp, Homo sapiens
ggtaataacccttaccgggagtttcactgaagatccggagttaggtgttggcacgctaccagaacatgacagccaggatgcagggccgattgtccccaag

SEQ ID NO: 782530 - DNA, 75 bp, Homo sapiens
ttcacccttgtagagtcattcctgcctttgagcggactcccttttaaggtgaagtattacagacacttagcacct

SEQ ID NO: 782531 - DNA, 100 bp, Homo sapiens
tggctgtgcagggccccgagccggcccgggtcgagatgcctgaaaacttcatgcctcctgttcccatcacatcaccaatcatgaacccgttgggtgaccc

SEQ ID NO: 782532 - DNA, 75 bp, Homo sapiens
attcgccgtgcccgagaatagctccgtccagcagccaaaagaatgcaatggtgtaaagattccagttgatgccag

SEQ ID NO: 782533 - DNA, 74 bp, Homo sapiens
ggtcggctcagccgggcagtttgaggagctgctgcgcctcaaagccaagaagcatgagtgggaaaagcatggga

SEQ ID NO: 782534 - DNA, 99 bp, Homo sapiens
ggcagcgccatggcggagcagacctactcgtgagtattgggaaagggtcgttgtggtgcatagacccagagtatagacaaaatctaattcaggctttga

SEQ ID NO: 782535 - DNA, 100 bp, Homo sapiens
atacaccgagagagtgaggagccagacgacaagcacacactatggcgctgaaacggattaataaggtaccagaggtttgaaaaggcatttctcctagctg

SEQ ID NO: 782536 - DNA, 100 bp, Homo sapiens
tagatctaaaagccacccaggccttggtcctagcacccactcgagaattggctcagcagatactaaaatggatcgtaaggataagctatttgtgattaac

SEQ ID NO: 782537 - DNA, 50 bp, Homo sapiens
ctacttccattataatgcatttcagtggccctggccaacgtcaacattgg

SEQ ID NO: 782538 - DNA, 100 bp, Homo sapiens
tgccgcttcgccgagtgctgccgcgaggagcggccgctcaacgcttcgggaaggcccgaacaagacaggaacgtcctgtgccctggactgtggagctggc

SEQ ID NO: 782539 - DNA, 82 bp, Homo sapiens
ctcgccacctgcaagagcctgcagcagtcgcttctccgcagggaaatcctcattgacgattcaatttgttgaaggccaattt

SEQ ID NO: 782540 - DNA, 75 bp, Homo sapiens
tcagcctcccgagaagctgggattacagggtcttgctatgttgccaggctggtctcaaaattcctggactcaagc

SEQ ID NO: 782541 - DNA, 100 bp, Homo sapiens
gtggtggcagcccagaattttttctgtgccggctgtggaactccagtagagcctaggaaatgatgtcactctgaaactcaggctggaatacactggcatg

SEQ ID NO: 782542 - DNA, 75 bp, Homo sapiens
cgagcgacgctatggatcccacaggtggaggcctgaattttgatctatgttctacctacatccagctggctgaaa

SEQ ID NO: 782543 - DNA, 90 bp, Homo sapiens
ctgccgaacgacgtggtcctacagaacccttaggagaaatcttgagagtggacagcaattgtgaagatcgccagagagttctgtgtttca

SEQ ID NO: 782544 - DNA, 90 bp, Homo sapiens
ggcaggagaggtttgttccctgacaactttgtaagagcactgggacgttcgggcgggtgcacctggtgaaggagaagacagccaagcatt

SEQ ID NO: 782545 - DNA, 82 bp, Homo sapiens
tgtgtccctgaccatggctccctgcagtaccctttaacgcttaaagcttttcaagccaggccaagaagctgtgaagtaccag

SEQ ID NO: 782546 - DNA, 100 bp, Homo sapiens
ctgctcacatctgtggtccagggcagggccactccagatagagccttactgggcccgtgcagattttccacttcctcggctgtggcccttggcatctgcg

SEQ ID NO: 782547 - DNA, 115 bp, Homo sapiens
caaatgaagatgtttccagccctgcctcggcggaccaaagggagacacagcaggtccccacagaggaagtgtccttggaagtgctgctcagcaacgggcagaaagttctggtcaa

SEQ ID NO: 782548 - DNA, 82 bp, Homo sapiens
tccggaacctggggctggacgacagcagcaggaggcgtgctcccatctccgggtgctttcttctgcgacctggtactcatct

SEQ ID NO: 782549 - DNA, 97 bp, Homo sapiens
aggatccttttccacggtgtgttctatgccgggggctttgccattgtgtattacctcattcaaagttattcagcttctcaaggctggaaaagcgaag

SEQ ID NO: 782550 - DNA, 100 bp, Homo sapiens
ttttaatccaacagccacagtcaagatgttgccaacattcgtaaggtccattcctgatggctctggagataattttatggagaaaagctcctgaaaaact

SEQ ID NO: 782551 - DNA, 80 bp, Homo sapiens
cggcgctgagaggggctgcggccggagcgggcggctgagacaaaggcgacgggctcaaaatctccttcgccaagaccaaa

SEQ ID NO: 782552 - DNA, 100 bp, Homo sapiens
aattcctcgaacgcccctgagcccaagtcctatgaaaacccctcctgcagcagctgtgtcccctatgcaggtccttatgtcgtcagaagatcgagaagct

SEQ ID NO: 782553 - DNA, 115 bp, Homo sapiens
gaagtgaccttggaggcgggaggcgcggagcaggagcccggccaggcgctggggaaagtgaattttgaagattgcaccggtcgacaaaggacagcctatttttccctcgacaccc

SEQ ID NO: 782554 - DNA, 82 bp, Homo sapiens
agggccgtgccgcagatgcccaccggaatggagaaggaagaggagtcgggcacggccgagcagatgaggactgtgtggacga

SEQ ID NO: 782555 - DNA, 78 bp, Homo sapiens
gcctctgctgcgtcctgctgaccttcggataaaatgcaggttgatcaagaagaagggcatcaaaaatgtcatgctgaa

SEQ ID NO: 782556 - DNA, 97 bp, Homo sapiens
caagaagaccattcagatgggatctttccggatcaatccagatggcagccagtcagtggtggagaattccttcgacaatcctgagtggttttatcgg

SEQ ID NO: 782557 - DNA, 100 bp, Homo sapiens
gtgagatttcatgaagatggcgccaggacgaaggccctactgggcaagacttaattcagtgcacaaatgagatgaatgtgaacatcccacagttggcaga

SEQ ID NO: 782558 - DNA, 96 bp, Homo sapiens
atgatcatcttgggagtgatttgcgccatcatcctcatcatcatcataggtgtcatggagaaactccagctgggcccagagattctgcagcgggaa

SEQ ID NO: 782559 - DNA, 50 bp, Homo sapiens
caggatccgaacccgcctccccaggccaagtcctgtatctgccatgtctg

SEQ ID NO: 782560 - DNA, 100 bp, Homo sapiens
gtcaggagctggcccagaaactggggctgcgagttcgcaaggcgtataagaggccccagctatcaagcccagagagagacgtggagagggacgtcttcct

SEQ ID NO: 782561 - DNA, 100 bp, Homo sapiens
cctcaactgacagtgaagtggagattgtaacagttggagaaagctatcggtgctggagaatctggtaaaagcaccattgtgaagcagatgaggatcctgc

SEQ ID NO: 782562 - DNA, 83 bp, Homo sapiens
cgccgccgccgccgctgccgctgccgctgccgcacctccgtagctgactcgttggttgaaagactggaaaagaagagctgaat

SEQ ID NO: 782563 - DNA, 75 bp, Homo sapiens
agcaagatattgacgacctcaagcggcagaatgctcttctggagcagcaaggtgtgatccctcacatccacaaat

SEQ ID NO: 782564 - DNA, 98 bp, Homo sapiens
catctagtggaagcggcaagcagagaaaacctgccaatcaagatgagtatggttgctaacacaggttagtctggcctattgaaccatcttttactgct

SEQ ID NO: 782565 - DNA, 75 bp, Homo sapiens
ccccctggagcccccatgatccctaagaagacagcttgaacctaggaaagaccggcagagaccaatgccaatgtg

SEQ ID NO: 782566 - DNA, 50 bp, Homo sapiens
ggaaatgggagagctcagaattcagcctaaatgcgatggccaggtattac

SEQ ID NO: 782567 - DNA, 75 bp, Homo sapiens
cgctgttccacctcattcaacttcagatggactcaccctgtcacccaggttggactgcactggcctcaacctcct

SEQ ID NO: 782568 - DNA, 100 bp, Homo sapiens
aacaaattcatcaaagacgtaatcaaagacggcaacgcgcttatcagcgctatgagaactcttttgtgacagggacggcttgttgcgggcacttctcacc

SEQ ID NO: 782569 - DNA, 100 bp, Homo sapiens
cagcctcacctgctgcccattctctacctgaacggcgtcgtcgggccgccgcagcccgccgaaggcgcggaaatgtctttcctccaggacccaagtttct

SEQ ID NO: 782570 - DNA, 100 bp, Homo sapiens
caagggtctctccagaaaatcttgtggacaaatccaggggaaggtgtcagttgtacccgaggcgttctcagcagcagcaagtacctgtggtggatttcca

SEQ ID NO: 782571 - DNA, 100 bp, Homo sapiens
tgtggaaatcatgagaaaggacttgaatgacgcccgggacctgcatggccaggcagagtcagcagctgcagtgtggaagacaggggcaagtgtccgagtg

SEQ ID NO: 782572 - DNA, 111 bp, Homo sapiens
ccttcctgacgatctggggcagctgactgccctccaggctacctcggacctgaacagctgcctgactgcctgaaaggttgtgatgtggtagttattccggctggagtcccc

SEQ ID NO: 782573 - DNA, 60 bp, Homo sapiens
cgaccaatacactgaggccctggcccagagggacaaggagcagattaagcgagtaaaaga

SEQ ID NO: 782574 - DNA, 90 bp, Homo sapiens
cctgagtgcttctttcttggagctgaccatggtattgatgaagatgaccctactgctgatgataccagtgctgctgtaactgaagaaatg

SEQ ID NO: 782575 - DNA, 90 bp, Homo sapiens
ccctttcatccctatgtggaaaacgagattttattccctcaaagttgcccccaaagttaaagccacagctgcgcctgcaggagcaccgcc

SEQ ID NO: 782576 - DNA, 87 bp, Homo sapiens
gagtcggtcggggaaggccacccagttggattggatgctgctggcaagacaaccattctgtataaactgaagttaggggagatagtc

SEQ ID NO: 782577 - DNA, 50 bp, Homo sapiens
gagagcgcgggcctctaggaagatcgtatacatgggagtgtcgctctgga

SEQ ID NO: 782578 - DNA, 90 bp, Homo sapiens
caagtatgtggaagccaaggactgtctgaacgtgctgaacaagagcaacgaggggtgtgggctcccgcctggatggtcttcgaaaccggg

SEQ ID NO: 782579 - DNA, 100 bp, Homo sapiens
ctgccttcttcatcaatttcatagccatttattaccatgcttcaagagccattccttttggaacaatgtaatagaatctcatccagataatgcattagag

SEQ ID NO: 782580 - DNA, 100 bp, Homo sapiens
ctgtctcagcgaagtggtgaaagagcatcagcttcctgcctgacacagctcacttcaagaagtgcacaatgtcagaacgtggaattaagtgggcttgtga

SEQ ID NO: 782581 - DNA, 101 bp, Homo sapiens
gctggtgcctggcttgcaagacaagcacgaacttccaggagccggtgcagccgctgacacagcagcaggtggcgcagatgcagctgaagtactacaactcc

SEQ ID NO: 782582 - DNA, 83 bp, Homo sapiens
catcaccagggccgagaacgacagacttcccaagtaagaagcggaagaggagccgctggaaccaagacacaatggaacagaag

SEQ ID NO: 782583 - DNA, 95 bp, Homo sapiens
gtcaactgctcacgacagaaggcgtctcatggcgttggaataccggctctcagcggctttatcccagatcactgaagctgagatggctgatgaag

SEQ ID NO: 782584 - DNA, 83 bp, Homo sapiens
agcagcagtcagaaggggaacggatctgtgtgcccacagctcctggagccccacagccgcggcgagtcctttgcacatgttgg

SEQ ID NO: 782585 - DNA, 83 bp, Homo sapiens
ctcaacttcggtgcctctctccagcagactgcggattctttctactaatccagatacttgttgaagtgctgactagtttcttg

SEQ ID NO: 782586 - DNA, 90 bp, Homo sapiens
gcggcgtgtgcgcgcccgccagctgctccggagatacggtctctgtgccttgcggagaatcctgaaaaaacagcctaacctccctgatgt

SEQ ID NO: 782587 - DNA, 85 bp, Homo sapiens
cttcaggctatggccagagcagctattcttcttatggccagagccagaacagcctttgaggggagggactgcacctgagtacagc

SEQ ID NO: 782588 - DNA, 83 bp, Homo sapiens
gggcaagaggcggatggacacggacgtggtcaagctatgtgtcgtggaggccgaatgtttgcaccaaccaaaacctggcgccg

SEQ ID NO: 782589 - DNA, 75 bp, Homo sapiens
gttgctcttgcttttcctcgctggggtgtacgaatggctattcaagtggacaagttcaactttgagagtttcccg

SEQ ID NO: 782590 - DNA, 100 bp, Homo sapiens
atctctggggcacctggtgacaaaggggcgccagggatatttggcctgaaagcaaaccagtccagctacgggggcccagccagccagcagctgagtgggg

SEQ ID NO: 782591 - DNA, 98 bp, Homo sapiens
gtgtcgccagcaccgagctagaccaagacctggccaaggcctacctcaccgtgctagtggggggactgcaccgttttcccccaacatcatccctgagg

SEQ ID NO: 782592 - DNA, 74 bp, Homo sapiens
catcactgaggtcgtccagctgcccaatcacttctccaacagagttgctgggagcctgagcacctttcgttttt

SEQ ID NO: 782593 - DNA, 90 bp, Homo sapiens
gcaaagttcctattgatggtccccccatagtggatattccatctattataaccaagaaactattaaaagcagcaatgaagcatatagaag

SEQ ID NO: 782594 - DNA, 75 bp, Homo sapiens
ttccagctgggaattatggatgatgctgcagagtgctttgtcaccacctatttgcacaaggactacaacaacctg

SEQ ID NO: 782595 - DNA, 152 bp, Homo sapiens
cttcccgccgcccgaaccaccatgacccacttcaacaagggcccttcctatgggctctcggccgaagtcaagaacaaggaagtgcacggctgtctataacgtgctgccgggtctcaggatggaggagtgaagtctcctgtcgccgtggttcc

SEQ ID NO: 782596 - DNA, 71 bp, Homo sapiens
tcgcctccttcaccgccgcagaccccttcaagttctagtcatgaaagatggatactatgatgctgaatgtg

SEQ ID NO: 782597 - DNA, 100 bp, Homo sapiens
tgactgagaatacgcattttgacaaaatccctgagtcctgtgcactcaaaagttggagacatccaggtctgcaccatggcatcccgggcccaaatcctag

SEQ ID NO: 782598 - DNA, 90 bp, Homo sapiens
gccaccacggaggaagagaagcacgaattccgccggcgttggtattctgagagaagcctcacaaagtgtattggaattactattgaaacc

SEQ ID NO: 782599 - DNA, 96 bp, Homo sapiens
ggatgtgcagacacaactacgagctgggcgggcccatgaccctgcagcgccgagccgaggcctgcctggagccccagatcaccccttcctactaca

SEQ ID NO: 782600 - DNA, 75 bp, Homo sapiens
gccgctgccggaagccatgaaggagaaggaagtgcgtccgaagcacgtgaaggtggccgtaacctttggcctggg

SEQ ID NO: 782601 - DNA, 80 bp, Homo sapiens
ccctgccggggagggcccagcgcatccgacaggcgatcagtgggtgaccgcggctgcgagggactttgtcatccgtcctc

SEQ ID NO: 782602 - DNA, 90 bp, Homo sapiens
gcagctggtggacgaggtggtacgaggggtcgtggccgagaagttgaagaatctgccattgagaagcactttctggactgtggaagtatc

SEQ ID NO: 782603 - DNA, 100 bp, Homo sapiens
aaacgcttccatatttatccagagcacttttccagccattaactccaggctctcgagaatttgaagatgttgtaaatattctccattcttcttaccttga

SEQ ID NO: 782604 - DNA, 98 bp, Homo sapiens
gatgatcggatccatggagccttgttgatccttaacgagctggtccgaatcagcagcatggagggagaggacttcctcccagctgacatccaggctca

SEQ ID NO: 782605 - DNA, 75 bp, Homo sapiens
ggccagatgggtttgtatggacaggcttgtccatctgtaacttcattaagaacaactctgctcatggtgattaca

SEQ ID NO: 782606 - DNA, 90 bp, Homo sapiens
cggtcatggagggagcaggagctggatccggcttccggaagatgccccttggtgtggccactgcaaggctctggcccctgagtatgccaa

SEQ ID NO: 782607 - DNA, 100 bp, Homo sapiens
aaaatggttgcagaggagacagtgataccttgggagcgctacatgatctagccaacaggtgccttagctggaccaattattgtggagccacatgtcacag

SEQ ID NO: 782608 - DNA, 49 bp, Homo sapiens
gacatttcttcggcattctgcaacagaattctgcttggtcagaatcgtg

SEQ ID NO: 782609 - DNA, 96 bp, Homo sapiens
ggaaacacctactttatagtcctgattcaagtgttggcggatggaagggaggagactcctgaccctcagaatggaaaactcaatgtgagtagtgac

SEQ ID NO: 782610 - DNA, 112 bp, Homo sapiens
gaggacgacagcaccttcacaataactgttgatcagaaaaccttccatttccagggcatgtactggcattgaaaacattgacgaagctattacattgcttgaacaaaataat

SEQ ID NO: 782611 - DNA, 83 bp, Homo sapiens
aaaactgttcggacttccccgttagaactcgcgtttccacttcagagatctgtggttagcaggaagaagatgagccttaagtc

SEQ ID NO: 782612 - DNA, 100 bp, Homo sapiens
aggaagaagagaccactagaatctggaattgagggacagtatggaaattaccagcagtgaaaaagtacttacattccagtagccagtatctattagcagc

SEQ ID NO: 782613 - DNA, 101 bp, Homo sapiens
aagctccgccgccccctaaagcggaaccggatcaccgagggcatttacggcagtgctcagcagaggagcagtcaggttcacaagaaaaccacagttggaaa

SEQ ID NO: 782614 - DNA, 100 bp, Homo sapiens
ttcaaaaactaagcatccagaggccctgagcagctttcagcactggaggtgtaattacttcaagcctccaggatggcaatccagttccgttcgctcttcc

SEQ ID NO: 782615 - DNA, 100 bp, Homo sapiens
agctgagatcgatgacaagctcaacaaaattaacgatcgttggcaacatctttttgatgtcatcggatcaaggtatcttgcaatatattcagaactctcc

SEQ ID NO: 782616 - DNA, 98 bp, Homo sapiens
gacccgactgcaactgctggattgctgcaaggctgagggacgagaacgagtgccgcgtatgatgctgtccttgacagaaatgtggccattaagaagct

SEQ ID NO: 782617 - DNA, 101 bp, Homo sapiens
gatgagatcaatgacagagtgaggtttctgcagacaatcaagaagatgagaatgtgcctactgctcctgatcctccaagtcaacatttacgtgggcatggg

SEQ ID NO: 782618 - DNA, 82 bp, Homo sapiens
cagcgcccactggggatggcaaagacgacatccggtgcgccgaggctgctcacaaaagttcttctgtgtggcagttcagaat

SEQ ID NO: 782619 - DNA, 90 bp, Homo sapiens
cctgaccaagaagatctaaagagaacgtctctgaaatcaagtccggatgaaggttttgacctgtagcagagaaccaattctggagaacag

SEQ ID NO: 782620 - DNA, 100 bp, Homo sapiens
gccggctgccaccttctgggctcctggggccctgcccaccacaaattttgactaaaggagaagttcaagtatcagataaagacacacacaactggagcag

SEQ ID NO: 782621 - DNA, 87 bp, Homo sapiens
tgccgctgctgtcctgcgaccccaagcagacacctagctgttgggcagaagagggtgcagaaaagaggtcacatcagcgttctgcgt

SEQ ID NO: 782622 - DNA, 50 bp, Homo sapiens
tagcagacaaagatctgttgaagagtgatgagatttccatccatgctgac

SEQ ID NO: 782623 - DNA, 100 bp, Homo sapiens
gaaagactttgacttggacatgactgaagaggaggtgcagatggcactttccaaagtggatgcctccggggagattctgtttctggcgtctgcatacgca

SEQ ID NO: 782624 - DNA, 75 bp, Homo sapiens
aaacaaaagctattacaatgtggtgtccctggccagtgtccttccacctgtccacaagcatggggaacatcttcg

SEQ ID NO: 782625 - DNA, 80 bp, Homo sapiens
gttttatcctatattcataattacattgtggatggctgggtggtatttcaaccaagaaaacccgcctagtgccaagcaac

SEQ ID NO: 782626 - DNA, 50 bp, Homo sapiens
ggtcggaatcagatttgaaaatgaaagtgaggttcaaaatggaagactgt

SEQ ID NO: 782627 - DNA, 75 bp, Homo sapiens
taatcttgtacttcaagaggaggaatcacgctcggaaacaatgggggccagacacctgctgagtcggatttccag

SEQ ID NO: 782628 - DNA, 82 bp, Homo sapiens
aaaagacaccaggaaaatgtccacactgatgtgttcagagcaacattgttttgttgacacaagcatttagaagaaagtttgt

SEQ ID NO: 782629 - DNA, 100 bp, Homo sapiens
tggcagcgacagagccaaaatcagagctggaacctgaggagagagagctgtaggtaaaacttgcctactgatcagttacacaaccaatgcatttcctgga

SEQ ID NO: 782630 - DNA, 74 bp, Homo sapiens
gggttttgcttatataatcccaaaattacctcagaattatcagttcatcaatggtgctaaggaaatttgctatg

SEQ ID NO: 782631 - DNA, 83 bp, Homo sapiens
ctgtgtccccaagctccccgtcctcggactctcagcgttctcatctctcttccttcaccatgaagctgatggacaaattccac

SEQ ID NO: 782632 - DNA, 82 bp, Homo sapiens
tcgggagcgcaaggtcgccctcaaggccatgatcaaaacgtcacgaacgagatcacgccggtgctgtcgtactcctacctgg

SEQ ID NO: 782633 - DNA, 75 bp, Homo sapiens
ggtggctccttctacctgcagtcaaagtccccatgtgagagcagcagaggcggtcttcaacatcctgccagcccc

SEQ ID NO: 782634 - DNA, 101 bp, Homo sapiens
atggggaagtatttgatttcagaggaatgagattagattggtttaggttacagatagaagagtgatggatgtcatttctcgttcacagctttacttggatg

SEQ ID NO: 782635 - DNA, 100 bp, Homo sapiens
ctgatactagtaataaccacagtggaaggttgcagttacaggtaactgggaagaatatttctcagccctccgttctcaagacagatgagtgctttagaaa

SEQ ID NO: 782636 - DNA, 74 bp, Homo sapiens
ctgtttgagaaaaggcctaagaattttggcattggtcacagttacctggagaggctcctgaatgttgaggtgcc

SEQ ID NO: 782637 - DNA, 98 bp, Homo sapiens
aggatgcactgagatggtacatcaggataactgctcgtatcagggccgttgctccagggagaactgcaaatatcttcatccacccccacatttaaaaa

SEQ ID NO: 782638 - DNA, 73 bp, Homo sapiens
ggatatcgtgtctggagcagtggagcccaaagacccctggagacatgctcaaaagccaaaagtctctgagaac

SEQ ID NO: 782639 - DNA, 90 bp, Homo sapiens
gaccactttgaaggaggatgctccagcaggtgctggagaatctggtaaaagcaccattgtgaagcagatgaggatcctgcatgttaatgg

SEQ ID NO: 782640 - DNA, 50 bp, Homo sapiens
aggctggagggggagaacacccagatgttcctcctgctgatcaagagaag

SEQ ID NO: 782641 - DNA, 83 bp, Homo sapiens
atgccatcaccgatgtggacgccaaggcatccgacgaggacgacacttacaagcccggcaagatcgcaccccctccctccctg

SEQ ID NO: 782642 - DNA, 75 bp, Homo sapiens
ggcaaccccaaagccgcgcgagcagtgggaggagcaatgagaggcaatcctaataccctctaccatctgctttgg

SEQ ID NO: 782643 - DNA, 100 bp, Homo sapiens
ggcggaggtcgataagctggaactgatgtgtaatgaacaagtctggggtgaatcgtgtagtttggaaacgacctcgactcactcacaatggacctgttag

SEQ ID NO: 782644 - DNA, 73 bp, Homo sapiens
tctggtagccaccggcactcacggccccgagcattcctctgattcagaatacactctctcagagccggactcc

SEQ ID NO: 782645 - DNA, 95 bp, Homo sapiens
ggccaacattttgcggatactcttctgataacctctttgtgcccaaccagaacggatactactgtcactctcagacaagcttggatagagcccag

SEQ ID NO: 782646 - DNA, 74 bp, Homo sapiens
ggcctcggagcaacgagcgcagcgccggattctgtttcactgaggccatctatccgatttcaaggaagccaagg

SEQ ID NO: 782647 - DNA, 101 bp, Homo sapiens
cacactggtgtctcctgcggaagggcagctgggcacgccttccagaccgaggcttggtggcatgcatgtttagtcccagctacacagcagggaggctgagg

SEQ ID NO: 782648 - DNA, 100 bp, Homo sapiens
cttcatcatcttgctctggcggacgctcaagtacctgtggaccgtgtgctgccactgcgggggcaagacgaagtggtctcacgtgtgaaacatggctaca

SEQ ID NO: 782649 - DNA, 126 bp, Homo sapiens
gcgaaccgcagtatcatgctggccaagaagatcatcattaaggacggaggcacggactccacagaatggagcaagaatgagaggaaaaaggccggcagaaaagcatgaactggaggtttgttgagc

SEQ ID NO: 782650 - DNA, 50 bp, Homo sapiens
agcgagtcgacttcccatcctgagttgcttgtggctgaggacctctccca

SEQ ID NO: 782651 - DNA, 75 bp, Homo sapiens
gcccggctccgggccagcatccgagagcccggactggaggaaagaaggattgtccaaatgtggaagatgcaagca

SEQ ID NO: 782652 - DNA, 82 bp, Homo sapiens
gggtacgctgccggtgtgcacaggaacggagctttgactgtaagatctgtgggaagagcttcaagaggtcatccacactgtc

SEQ ID NO: 782653 - DNA, 100 bp, Homo sapiens
aatatattagaaagcagccgtggagacaaccatcttcattttgggagaaataactaaagattgaaagacatgacaattgtgcttatgactacctggaagt

SEQ ID NO: 782654 - DNA, 125 bp, Homo sapiens
gaagttacagaattagacctttcacatgggaaaaaagatgcttttgttttggagagcttactcacatagcatattggtatatcaaaatgaaatgcaaggaaccaaaaataacataattgaaggca

SEQ ID NO: 782655 - DNA, 74 bp, Homo sapiens
aagctgctggaggtcctctctggagagaggctggagtacttgattcttcagaaaacctccaaagtagatgtgga

SEQ ID NO: 782656 - DNA, 100 bp, Homo sapiens
cctacactagtcgcgggagccacgcagaggacgccggaacaccctggaagccgagaaatggtaattcatttgcacacctgttagcaagaaacagaagttg

SEQ ID NO: 782657 - DNA, 83 bp, Homo sapiens
agagggcctcgggaagagatgcgaggatgacaagggaattggctcgggaaaaggtaatgcgagaagttaaagccttagccaag

SEQ ID NO: 782658 - DNA, 100 bp, Homo sapiens
cagtgccgggcagcccggccccgctgagcgatcccaccgaagcagcgtgtcctccgtgggagcccgagatgtctttggtggacttgggaaagaggttgct

SEQ ID NO: 782659 - DNA, 75 bp, Homo sapiens
ctcgcagcacttggagcgcagaaccggccgcgcccggttttttattggcacctcagtctcaacattttcttttcg

SEQ ID NO: 782660 - DNA, 99 bp, Homo sapiens
agcgcagaagggacgtgagcccagccgaggtaccgctgaagaggaatcaattttgggaccatgcctggccggatgctgccgcctggcttcagtgccatc

SEQ ID NO: 782661 - DNA, 100 bp, Homo sapiens
cttggttgcacttgagaaaattaatgtggcaggaaaggagtgttcccaggatgaaagcacagctgctgccatcttcactgttcagatggatgactatttg

SEQ ID NO: 782662 - DNA, 75 bp, Homo sapiens
atgtcgggacaccccggaagctgggaaatgaaggagctcaaaaagtgggatgagtttgaagatattttagaagag

SEQ ID NO: 782663 - DNA, 99 bp, Homo sapiens
ctcggtcccagtgccccacaccaccgcactgtcgctgcccgcctgccctgaggagtccccgctgcttggtgtttgtggccagtcctcacaaaacacagc

SEQ ID NO: 782664 - DNA, 100 bp, Homo sapiens
acatgctaagaggccagatgcagatctgaagacctattttactgataagaaaacacatctttacacactaagaggaaatctctgacatcaaagaggaggg

SEQ ID NO: 782665 - DNA, 83 bp, Homo sapiens
ggacgtctgcggcccgcgtcggcgctggggacaaaggatcctgcgcatccagaaagagacgcccacgctgcagcggaaggagc

SEQ ID NO: 782666 - DNA, 147 bp, Homo sapiens
agcagttacttccactcaagaatcgtaggccaggctgatggagagctgaacattactcttccagaagaggaaggagctcattgccaagttagatcaggcagaaaaggagaaggtggatgctgctgagctggttcgggaattcgaggc

SEQ ID NO: 782667 - DNA, 90 bp, Homo sapiens
tctgtgtggctgtaacttacgtgtactttaccaacgagctgaagcaggtgtacaagggagaagaagccacattccaaatctcaggcctcc

SEQ ID NO: 782668 - DNA, 75 bp, Homo sapiens
cgacgacctgtttgtggacttggggagcgtcagagccgagttagtggaaaagtggaaagcagagagagaggctcg

SEQ ID NO: 782669 - DNA, 75 bp, Homo sapiens
gctgctctttgccggacagcagagtcccaggtggtggtcaccaatacaattccacatgaagtccagaagctccag

SEQ ID NO: 782670 - DNA, 99 bp, Homo sapiens
cgaggacctagactgtgacaacgaccacgtctccaaaatgagtcgcatcttcaacccccatctagcgaaccagacggggacagtaaggtttggaggaag

SEQ ID NO: 782671 - DNA, 82 bp, Homo sapiens
accagttcgcccgtccccctgccccgttcacaataccatggtgaatccgggcagcagctcgcagccgcccccggtgacggcc

SEQ ID NO: 782672 - DNA, 100 bp, Homo sapiens
ggaaaagtggcagtggatgatagtgaggtattctctactgccgctgatggtcaaacgcaagtggaaattaaagtgtgtcagggtgaaagagagatggctg

SEQ ID NO: 782673 - DNA, 100 bp, Homo sapiens
agtggtcccacacacgcttctctcagtggctggatgaccatccatctgaaaaggacaggctcctcctcatcagggctcacccctccagctacccctcccc

SEQ ID NO: 782674 - DNA, 100 bp, Homo sapiens
tcacttcaagactaagattgaagtctattatcctcccagtccacaacgctgaaccgtggctggacgaatgtttgaggtctgttttgcaacaggactttga

SEQ ID NO: 782675 - DNA, 75 bp, Homo sapiens
tggcgaagagaagctacaaaatatgctcgatggatagcattcactggaaagattttattccctcaaagttgcccc

SEQ ID NO: 782676 - DNA, 83 bp, Homo sapiens
ctcctggttcggcctccccgcgcactagaacgcttacaaaacactacacagcaaaataatgatctgctagactgctaacccga

SEQ ID NO: 782677 - DNA, 75 bp, Homo sapiens
gtgagaagtgcagcaagccctgtgcccgagcaagtgcggaggcaagacacatcaaagcagagatgggaagtgaaa

SEQ ID NO: 782678 - DNA, 75 bp, Homo sapiens
ctggaggacggagaggacctgttcaccagcactgtctccaccctagagggaccatggctaaacctcctggatcat

SEQ ID NO: 782679 - DNA, 100 bp, Homo sapiens
gcaaatgcacctcctgcaagaaaaactgctgcctcatatccgggggaatgtgggctttgtgttcaccaaggaggacctcactgagatcagggacatgttg

SEQ ID NO: 782680 - DNA, 100 bp, Homo sapiens
ccgggacccgcgagcggagcggcgcgtgggtcggttgcggtcggccccggcaggacttgaaagaggagattgatattcgactctccagggttcaggatat

SEQ ID NO: 782681 - DNA, 51 bp, Homo sapiens
aagctcagggggaaaccgagggtattgctaataccctggatctcacagata

SEQ ID NO: 782682 - DNA, 100 bp, Homo sapiens
gccgagcggccgaggcgccgcggtcggctctgggactcgtctggcgtccctcaggtgtcatggagaaactccagctgggcccagagattctgcagcggga

SEQ ID NO: 782683 - DNA, 135 bp, Homo sapiens
tatgtggcacaggtgacttcaagggatggccggctcctctccaccgtcatccgtgccttggacacaccgaggtgctggagaatctggtaaaagcaccattgtgaagcagatgaggatcctgcatgttaatgggtt

SEQ ID NO: 782684 - DNA, 81 bp, Homo sapiens
atcccactttagatcttacagctaactgtgtgccttagaaaccagggagactcatgcatctgtatgccgtgtgcgtggact

SEQ ID NO: 782685 - DNA, 100 bp, Homo sapiens
cccgctgtcaccgccatggctgccccgtgtttgctgcggcaaggacgagccggggcgctgaagtacactaccagaagatcatccaccgtgacatcaaacc

SEQ ID NO: 782686 - DNA, 75 bp, Homo sapiens
tgcctcagcctcctaagtagctgggactacaggaggtgtgattgcctatatcagttcttccagctcagcctcaag

SEQ ID NO: 782687 - DNA, 87 bp, Homo sapiens
agaattaagacgcatggaagaacttcacaatcaagaaatgcagaaacgtaaagaaatgcaattgagcaccaaatcagatgaaagcca

SEQ ID NO: 782688 - DNA, 82 bp, Homo sapiens
ctgtctggccacaacttcctgcaggactccaaggtcattttcgtggagaaagccccaggtaactaggatttctacctcaacc

SEQ ID NO: 782689 - DNA, 97 bp, Homo sapiens
gcagaaaaagaggctcttcctcctcctcccgcgacggttctctacttaaaagacaatgactactgatgaaggtgccaagaacaatgaagaaagcccc

SEQ ID NO: 782690 - DNA, 90 bp, Homo sapiens
caaccagaagaagtatttgatgtcttagagaaacttggagaagggctccagcaggagaagacagacacggtccgctgcatcaagtcctgc

SEQ ID NO: 782691 - DNA, 75 bp, Homo sapiens
tcacagtgttgctgcaacatagagctgacattaactgtcaggatgagaacaagttgagcagtgccaacggccatg

SEQ ID NO: 782692 - DNA, 100 bp, Homo sapiens
tcttttcctgatggaatccaatcctctgcttccaggacaagtcctgcgcttggggatcctctgtacgcccgttcactgtgctgatgggcccgtgcaacag

SEQ ID NO: 782693 - DNA, 82 bp, Homo sapiens
atctgcacatacctcagcgggaaaaacagtatgcgccgatttcttgcagaacataaattattaggaaacattaaaaatgtgg

SEQ ID NO: 782694 - DNA, 75 bp, Homo sapiens
agtgcttcagcgggccaggaagcgcatccaggaggtaatctgtaagtcagatgctccaacaggggatgttcttct

SEQ ID NO: 782695 - DNA, 101 bp, Homo sapiens
tgctgggcgacctgcaggcagcaccggaggcccaggtctccgtgcagcccaacttccagcaggacaaggtggatgcccagctgacgggaagaatcagccag

SEQ ID NO: 782696 - DNA, 92 bp, Homo sapiens
gggggcctctccagggagtgctctgttcacggctccatcgctgttagtcgctctggtgcagtggacagagagtgtgggcctcacgctggtca

SEQ ID NO: 782697 - DNA, 49 bp, Homo sapiens
actcataacagttgatgaaaaattggcagagatcctacaagaatccagg

SEQ ID NO: 782698 - DNA, 98 bp, Homo sapiens
gagggctttcttcgccgtgctggccgcggcccgcctcagcatctggtacagccgaacctcaagcatctgcaagacagccgtgcacgcgggagtcatca

SEQ ID NO: 782699 - DNA, 80 bp, Homo sapiens
ggacctgagcctgacgcgggccgcgcggagcggttctggtgaggttggaaggatgcagccacccggttgtcatgaaaggc

SEQ ID NO: 782700 - DNA, 100 bp, Homo sapiens
ccggccctgagcgcactctggagggattctggcatcagggaggctttcagccggagaagcgagtttcagctggagaatggccaccagtccttactgagca

SEQ ID NO: 782701 - DNA, 109 bp, Homo sapiens
cctgggagcagctggctctgggccttgaacattccgaaactgtcaagattggcaagtgatcctgccatgaagcagtttctgctgtacttggatgagtccaatgccctgg

SEQ ID NO: 782702 - DNA, 75 bp, Homo sapiens
gcgtgctcgtagctgtcaagagggtcatcgactacgccgtgaagtttaatggatcgagaagtggcgttgcttgct

SEQ ID NO: 782703 - DNA, 50 bp, Homo sapiens
gtggacagatctgagagatactgagctaattgtccaatgatgcatcaaga

SEQ ID NO: 782704 - DNA, 75 bp, Homo sapiens
aagaccatcatgctgcgcggccttcccatcaccatcacagagagcgataatcagcttaaaatggctcgtttcacc

SEQ ID NO: 782705 - DNA, 98 bp, Homo sapiens
ccatccgtctgtccatccgcccactcagctatctgtttatcaagggcccagtcatatatgcacagttagaccactccggcggacatcacagtgacaag

SEQ ID NO: 782706 - DNA, 100 bp, Homo sapiens
ccaagcgccgtcgcttccatgaaagctacaacttcaatatgaagtgtcctacaccaggctgtaactctctagatttacagaatgtcaacatcacactgcg

SEQ ID NO: 782707 - DNA, 74 bp, Homo sapiens
gacaagcgcgggacccgctatgagacaaagaaccggcgctgcaaactgctgcccctggtgatggctgcccccct

SEQ ID NO: 782708 - DNA, 118 bp, Homo sapiens
tctgcgtgagtgtggtctacgagctgtttctcatctttatactcttccagcagtcctgcgttaactgcggccgggaggctatgagcgagtgcaccggctgccacaaggtcaactactg

SEQ ID NO: 782709 - DNA, 100 bp, Homo sapiens
agaggtggacagatctgagagatactgagcaaagaacagtctgaacttgatcaagatttggatgatgttgaagaagtagaagaagaggaaactggtgaag

SEQ ID NO: 782710 - DNA, 98 bp, Homo sapiens
ccggcacccagacaggtggcgacggcagaggaccgcttacaaacacgcagatggcaagaagattgatggcaggagggtccttgtggacgtggagaggg

SEQ ID NO: 782711 - DNA, 49 bp, Homo sapiens
gttcgggctcctggaggacgagcatgtcagtgaaaaaaccagtgaatcg

SEQ ID NO: 782712 - DNA, 83 bp, Homo sapiens
cgtgatactcacacagtggcttctgctcaccaacagatgaagacagatgcaccaacgagctgaaggaattgaagaatctgcag

SEQ ID NO: 782713 - DNA, 75 bp, Homo sapiens
ccgcctcgtctccgctcctgggggaccgcaggaagaggatcacctagcccgggtagaagaggcaatcacccgtat

SEQ ID NO: 782714 - DNA, 100 bp, Homo sapiens
tgtcgggttacccttggtggccttgcatggtttctgcagatccactccttcacagctataccaaacttaaaggacttgaaaatactggaaatctgtccgg

SEQ ID NO: 782715 - DNA, 75 bp, Homo sapiens
ctgcctcagtacaaggagagggaagtggtatcacggaaaacttgacagaacgatagcagaagaacgcctcaggca

SEQ ID NO: 782716 - DNA, 98 bp, Homo sapiens
ctcctccccaagtcgcagtgccactgcaagcccacagatatcagaaaaccaggactctgcagatgttgatcctcaggagcattcatttactcgaacta

SEQ ID NO: 782717 - DNA, 82 bp, Homo sapiens
actcccacaatgccacaggaggaggcagcaggtttgattactcaggagttggaagttcagatggtaactcagaggaaagcac

SEQ ID NO: 782718 - DNA, 90 bp, Homo sapiens
ggaagttagcagacacttgttcgaactgtgctgttcaagtcagtagaagaaccatttcttcgaattccttctcaccagaggtatttgtgc

SEQ ID NO: 782719 - DNA, 100 bp, Homo sapiens
cgccgtgactttgaagtgtaacttcaagacagatgggcgcatgcgggagatcgtgtggtaccggctgcggataaccgtctggtccttgtgcacaaaatcc

SEQ ID NO: 782720 - DNA, 75 bp, Homo sapiens
aagtcccagctgaagctgggcatctggggcggttatgaagacagtatggagtttccagaccatagtagacatttg

SEQ ID NO: 782721 - DNA, 51 bp, Homo sapiens
tttcaggacaaaaatcacctttatctggagccggtgaaacctgaagaaggc

SEQ ID NO: 782722 - DNA, 118 bp, Homo sapiens
agggtctgcagggcctgggccgccgctgctacctgcagcgccgtgtggcacgacacaaaaatcagagggccccattgtgctgtcccgaccccaggatggggactctccactgtccgac

SEQ ID NO: 782723 - DNA, 100 bp, Homo sapiens
agcactcttcaccctgcacagccttgttagattcccaacttcttctggagcctggggatcggtcacactggtgcgtggtggcatactgggaggagaagac

SEQ ID NO: 782724 - DNA, 100 bp, Homo sapiens
tacttggaaaatactcagtttcctgcttactgcttcattatggattatacagactcctgaaacagactactctttgcctttttgctgcagttggagaaga

SEQ ID NO: 782725 - DNA, 80 bp, Homo sapiens
aaggccaaggctgcagaagccaaagccacggtcctgcagacattcgctttgtctgggagaagaatgggcgagctctggag

SEQ ID NO: 782726 - DNA, 100 bp, Homo sapiens
ctcttcttctgaaaaagagatcttggttgcatgatggaatttgaacattacttcaagaggttttgtattttggattagttaattgggtttgtcctctgct

SEQ ID NO: 782727 - DNA, 51 bp, Homo sapiens
tgtctttcaggattcctgggacacagagtgacttttttgaacgaaccattc

SEQ ID NO: 782728 - DNA, 100 bp, Homo sapiens
taggaaatgtcactgcagctttaaaaagcagtgggctctggaacaacacggtgttcatcttttctacaggccatttgtgtaggaccagaaaacatgcaga

SEQ ID NO: 782729 - DNA, 88 bp, Homo sapiens
ttatacagtatgcattggaccagggcgtgaacgtcacccaggtaacagctattgaacctataattaatcatggaggagccagtgcaag

SEQ ID NO: 782730 - DNA, 97 bp, Homo sapiens
aggccttcagaaacatccctggtggtcgttctcgttaccggaccacttcttcagccaacaatcccaatctgatgtatcaggatgagtgtgaccgaag

SEQ ID NO: 782731 - DNA, 76 bp, Homo sapiens
cactcacacgacgtgcgctatgggtcagatgatatcatcaagttgaatcgaaaggaagggaagaagcagaattttc

SEQ ID NO: 782732 - DNA, 50 bp, Homo sapiens
aaactcctctccaccagcgccaagagttggtgtggatgactacagctcag

SEQ ID NO: 782733 - DNA, 122 bp, Homo sapiens
ccaggacagaggagagcaaagcagacagtccacccccatcctacccaacacagcaggctttctgtgaagaattggaatcaatgatacaggagcaatttaagaaggggaagaaccccacaggc

SEQ ID NO: 782734 - DNA, 100 bp, Homo sapiens
acattgagagcaaaatctacaagatgatgcagggaggagacaatgcagatcttcgtgaagactctgactggtaagaccatcaccctcgaggttgagccca

SEQ ID NO: 782735 - DNA, 83 bp, Homo sapiens
cggcggtgttgtaggtagcggtaccttgagtggcaacaggactcacagaaaacactggacttccccggaagctacttgaaaaa

SEQ ID NO: 782736 - DNA, 100 bp, Homo sapiens
agagaggcaccgggatcgtgaccgagaccgtgaccgagagcgtgaccgagagcgcgaatatcgtcatcgttagaagttgcagcatgagaaagccgaacta

SEQ ID NO: 782737 - DNA, 74 bp, Homo sapiens
tcgcattcgcagcactgtggctgagtcttcaggcagtgacagtggtgggagcagcagcagcagcagcagcagca

SEQ ID NO: 782738 - DNA, 82 bp, Homo sapiens
ccgtgtagcgtcgccgttactccgaggagataccagtcggtagaggcaaattgtggctactaatttgccccctgaagatcaa

SEQ ID NO: 782739 - DNA, 50 bp, Homo sapiens
attgacctcgactcccatgcgtaaaatgtttattggaggcttgagctggg

SEQ ID NO: 782740 - DNA, 100 bp, Homo sapiens
agcccctcctaaaccatgtgctggcaatcaagggacccagatcacggacgcctcgtctaaggagcagaaaacccaagggcaggtggagagtccagggagg

SEQ ID NO: 782741 - DNA, 113 bp, Homo sapiens
gagtacatggagcacgtgtacctcatccacagggcctcctgccagccccagcccctggagaggatgcaggtgttcgaaatccgcaccactgatgacctcactgaggcctggct

SEQ ID NO: 782742 - DNA, 101 bp, Homo sapiens
ctggagtgcagtggcgcaatctcggtctcagaacggccccgaagcctccccctatcccctgaattggagagctctccttgatgccctctgttagggcccac

SEQ ID NO: 782743 - DNA, 100 bp, Homo sapiens
aaagaatgccaatcgaattacatcacttttggcttacagagcctatgagcttactcaggtggctgtgttactgcaacgtgccacagttctgcgacagtct

SEQ ID NO: 782744 - DNA, 98 bp, Homo sapiens
gcggcaaaatggcggaccgcttctcccgcttcaacgaagaccgagactttcaggctcttgcagccaatgccggaacaggatttgctgttgctgagcct

SEQ ID NO: 782745 - DNA, 74 bp, Homo sapiens
ccaaatattagagcttagagaaaaccagttaaaaatgttgcctaagagtagatcccataatagatcacgttcaa

SEQ ID NO: 782746 - DNA, 100 bp, Homo sapiens
aggccgcggacaccgacctggagatgtgtatatctcatgattgatatggagaaactagtcatgggccaaaggtcaagatacttctctgggaaatgttgct

SEQ ID NO: 782747 - DNA, 98 bp, Homo sapiens
tgagaaattttgagtcctcgagtgaatgggcggatctcatatcttcacttggcaaactcaacaagcttcgatgtttttgaagcaggcatttgaaggag

SEQ ID NO: 782748 - DNA, 82 bp, Homo sapiens
tgctgcgattacagacctgagccactgcgcccagccttgatcttgagctgctgatgcaaggaatcccctgggctcccgtcca

SEQ ID NO: 782749 - DNA, 88 bp, Homo sapiens
cagcctcttcgagcgccgcggacgcgtcatcgagtgtgacgtggtgaaaggaagctcttcgtgggcggtcttgactggagcacgaccc

SEQ ID NO: 782750 - DNA, 73 bp, Homo sapiens
caagattgggatatttgagagtccaactggcactatgcttttgataaagagtacaagatggcatacgatcgtc

SEQ ID NO: 782751 - DNA, 75 bp, Homo sapiens
ctgccctccggctccaagaaggttatctcctcagccaacagagctgtggttggcctatgagagctacaagaagaa

SEQ ID NO: 782752 - DNA, 77 bp, Homo sapiens
cagcagtgttagcaagacctgggggagaggttgcagggagagtagctgaagaaaggggtgcagtgctgggccacgag

SEQ ID NO: 782753 - DNA, 100 bp, Homo sapiens
gtgatctgtggaggacctggggtctctgatgcctattattgtaaggagtgcaccatccaggagaaggactgtttcctgaggttataggcgggtgtttgag

SEQ ID NO: 782754 - DNA, 100 bp, Homo sapiens
ctttgtatgagatccgctttcgggaaaacgtggagaagagaattctgtgccacatgcagctcagttctgcacaggcggcaaagatctgcaacaacatgct

SEQ ID NO: 782755 - DNA, 97 bp, Homo sapiens
gaaagaaggcagttgatacagcttcgagatattttgaaatccgcattgcaggttgaacagaaagaggatgaacttgcgtcctttctcttctccgcca

SEQ ID NO: 782756 - DNA, 75 bp, Homo sapiens
ggggagataatgtaactgtgtgcaaggataacagaagaggactgtcagaaggacgtagaaggcacggttttactg

SEQ ID NO: 782757 - DNA, 100 bp, Homo sapiens
cggagcggcacctacgtcctgatcgacatggttctcaacaagatggccaaaggtgtggccgacgacgatgccctcgctgaggagcgcatgcggagaggcc

SEQ ID NO: 782758 - DNA, 98 bp, Homo sapiens
ccacggctgcatacctgcactttcagttcctctgtgacgagggtgcaggtatctctggggactacatcgatcgcgtggacgagcccttgtcctgctct

SEQ ID NO: 782759 - DNA, 88 bp, Homo sapiens
tgtatcagatgctcaaaggccttaagattgagtttgtgacgggcaccaaaaaaggcaccacgaccaacgccacgtccaccaccactac

SEQ ID NO: 782760 - DNA, 74 bp, Homo sapiens
ctcctgtcggggaggcaaggtggttttggaccagacaggcgtgtctaaaaatcatgttgttgatgtcagtgttg

SEQ ID NO: 782761 - DNA, 100 bp, Homo sapiens
cgttgctgccttcttcgtcaaggtcaaggtgaagatgttcttaaagggtcccagattacgtatgttacaggtgtagaaggggacgacgttgtttctacac

SEQ ID NO: 782762 - DNA, 90 bp, Homo sapiens
gttttacatgaatcaggctgctgcattacagagtgagagactagctccaattgattggtaacagaagatgaagacaacagcataactaaa

SEQ ID NO: 782763 - DNA, 98 bp, Homo sapiens
gaggaccccggtacatctgaaagccgggaaatgatgagcagcaccagcagtaagagggctccgaccacggcaacccagaggctgaagcaggactacct

SEQ ID NO: 782764 - DNA, 100 bp, Homo sapiens
ctctgatctgcttccatctccaagtgttattactactcaatctgagaatattagcagctcagcaactcaggataccagaaggccctattgatcaggggcc

SEQ ID NO: 782765 - DNA, 82 bp, Homo sapiens
ccacctgcccggtgcccgaggaggcagccaagctcgtggcctgcctctgcgtgcgaagtccaaagccaagcctaatggcaag

SEQ ID NO: 782766 - DNA, 74 bp, Homo sapiens
tccgcacggcactgccgacctccgggagcagcgcagcctgggccgagccagtggcccccagaggatgagaagga

SEQ ID NO: 782767 - DNA, 98 bp, Homo sapiens
tctgggaagatggcgaaggtctcagagctttacgatgtcacttgggaaggggaggacgaggaagaaacgaacgtgatagttctcagctacccccagta

SEQ ID NO: 782768 - DNA, 82 bp, Homo sapiens
gtcggaactagatctttctgacaacaaactcgaagactggcatgagaagacttgcactatctgccagatgctgcttcctaac

SEQ ID NO: 782769 - DNA, 100 bp, Homo sapiens
gaagaggaacagcctatgtgggcttccacggaggttgctgaccagcaatcagccatgtttggagagtgctgcttccagacaggtgatgtgaaattaacca

SEQ ID NO: 782770 - DNA, 98 bp, Homo sapiens
cgagcagcggacgccggtctctgttccgcaggatggagcaccatactggaccaacacagaaaagatggaaaagcggctccatgctgtgcctgcggcca

SEQ ID NO: 782771 - DNA, 98 bp, Homo sapiens
ttaggtgcttttatattcatctcaaaaacaaaattctgaactcaggacttggcaagaatgtttctccagtgggttctttgtgctgccatatggttggt

SEQ ID NO: 782772 - DNA, 145 bp, Homo sapiens
cctgcactccacggagaggagctgcctgctcaaagagctgcaccgcttcgagtctattgccattgcccaagctgaagatgcttgtggaggaacaatgagaggatccagtggcatcatatccagccctagttttcctaatgagtac

SEQ ID NO: 782773 - DNA, 87 bp, Homo sapiens
gatgtaattattacagcattagataatgtggaagccaggagatacgtagacaggttacttcttgctgcagattctgcgcaggatcgg

SEQ ID NO: 782774 - DNA, 75 bp, Homo sapiens
ctagacttatacttctcaaatcttaatttcctaaagaacaactctgctcatggtgattacatgcaaaataacgag

SEQ ID NO: 782775 - DNA, 101 bp, Homo sapiens
tgagagcccacaggcccccacaggtccctggtgctgaaccgcctgcgtccagttgccagcgggggtgggaaagcccaaccgggctccccttggtggcggag

SEQ ID NO: 782776 - DNA, 74 bp, Homo sapiens
gacttggcctccatggtgtcagagcaaggagaagctgttggtgcaatggatgagcttcatagtctggatccaag

SEQ ID NO: 782777 - DNA, 97 bp, Homo sapiens
cttcatcaacctctgcatcttggcttcacagcatgcttgggctcagctcacattctgggaggccagccagattgtcttcttacataatgatagatac

SEQ ID NO: 782778 - DNA, 83 bp, Homo sapiens
tgtctcggcagcgcccgcggagacgtgaagaggtcccttcaccgatgttgtcaccaccaacctaaagcttggcaacccgacag

SEQ ID NO: 782779 - DNA, 99 bp, Homo sapiens
aatgcccagtccccagctcgccagcagtgatcagcagctggactgtgccttggacctaatgaggcgcctgcctccccagcaaatcgagaaaaacctcag

SEQ ID NO: 782780 - DNA, 100 bp, Homo sapiens
cgccgttctatggaaaacattgagctcgggctgagtgaggcccaggagacagaagaaattctggcagatgtgctcaaggtggaagtcttcagacagacag

SEQ ID NO: 782781 - DNA, 147 bp, Homo sapiens
ccggagttgcgtcgccttagtcctcctggctgccgccgtcagctgtgccgtcgcgcagcacgcgccgccgtccattccagtgattaatggaagagatttacagaaccctattattgttcaactttgtgatcagtgggataatccagc

SEQ ID NO: 782782 - DNA, 82 bp, Homo sapiens
gctcctaagcctgcacagccgcggcggcagcagcagtgagagtcagagcaccataacatggtgtgggaagtgaagacaaatc

SEQ ID NO: 782783 - DNA, 100 bp, Homo sapiens
ccatgattgtgaggcctccccagccatgtggaactgtgacctcacattcgtgccccttagcagcactctgcagaaatgcctcctcagctgcaaaacggcc

SEQ ID NO: 782784 - DNA, 74 bp, Homo sapiens
cggagcccaatttccggaagcggttttcctcctccaccaggcgctccacctccatctcttataccaacaataga

SEQ ID NO: 782785 - DNA, 59 bp, Homo sapiens
tgacacttacctccgagacgctcataggcaggtatcttgagaattacaaatgctataga

SEQ ID NO: 782786 - DNA, 96 bp, Homo sapiens
cgcgatggagcagcgaaaacgtggttgtagagttccgtgactcccaggtcattgggctgactgcctcggttggtgttggggatgccaaaaacacag

SEQ ID NO: 782787 - DNA, 82 bp, Homo sapiens
cgaaggaaaaggaggaattcgccgtgcccgagaatagctccgtccagcaggggtctaatgtgatggaagagcaggacctgcg

SEQ ID NO: 782788 - DNA, 51 bp, Homo sapiens
cccaactgctcctgcgaggctggtggctcctgtgcctgcgccggctcctgc

SEQ ID NO: 782789 - DNA, 90 bp, Homo sapiens
gacaggcttctccggaaggaacagattttagctgtggccagaaactatgttccaacttcctgtcaacaatcttggcagtttaagaaaagc

SEQ ID NO: 782790 - DNA, 78 bp, Homo sapiens
aaatggttctggcaaactgctcaagacatttctcttgggaagttgtgcatctgacaggaatatagtactgtacgatat

SEQ ID NO: 782791 - DNA, 100 bp, Homo sapiens
tgttgaagttcatgatccacgaagccccagtgaccttgattcaccaacatccagcctgcgtcgcagcccatcattgcaatcaagtggagacagagtcggt

SEQ ID NO: 782792 - DNA, 100 bp, Homo sapiens
aaatccatgactccaacccagaaccgggagaaatggatctactactgcaatggccatgaaactgttttggctgggcctacttcacctataccttctctgg

SEQ ID NO: 782793 - DNA, 88 bp, Homo sapiens
tccgctccccacttcagacgagctcttcctgcctggaatctgatatgaggccccaggattcctggcgaggtcctcctccccttttcca

SEQ ID NO: 782794 - DNA, 97 bp, Homo sapiens
ggtgaagagtcctggatggcagatggggggaccccggtacggacctgtgcaggatacagttgatatattagttggatggcatatagatcatactcag

SEQ ID NO: 782795 - DNA, 74 bp, Homo sapiens
gctgacagcgcgagagagcgcggccctcaggagcaaggcggagagttgtggactggggcaacctttgccagtga

SEQ ID NO: 782796 - DNA, 100 bp, Homo sapiens
ggcattttggggcagaatacagagatatggaatcagtggactcccgaaaaattgaccaggaagggaaaatcccagatgaaactttggagaaattgaagag

SEQ ID NO: 782797 - DNA, 100 bp, Homo sapiens
gcaggaattattggaggccaggtttactggagtaggtgttagtaagcaaaccagtccagctacgggggcccagccagccagcagctgagtgggggttacg

SEQ ID NO: 782798 - DNA, 83 bp, Homo sapiens
catgctcagaccttcattgctctgtgtgccaccggctgaaggtgatgtggccgccctcaaccgacgcatccagctcgttgagg

SEQ ID NO: 782799 - DNA, 103 bp, Homo sapiens
caaaacctcgctccggaaaggggacacctggtttttcgttggaatatacgttgcacatttatggcgattctgagtgtgagggcagacttctgccaggctcagc

SEQ ID NO: 782800 - DNA, 80 bp, Homo sapiens
cgagaccagcctggctaacatggcattttttactgtctacagaaacttattgtaattcatttttcctcactccagtagta

SEQ ID NO: 782801 - DNA, 90 bp, Homo sapiens
cgcgcgtcccgagccctccacccgtcgtgccggcgccgcccggaccgccaggaaacagctacatgattcagcgcaaggagtgggacttat

SEQ ID NO: 782802 - DNA, 75 bp, Homo sapiens
ctcctgctattccttgggctgcctttcctgcaggaagctccaggactggcgggatgggctcagcctgtatcaaag

SEQ ID NO: 782803 - DNA, 90 bp, Homo sapiens
ccgagctctgatgcaagcgaagaaccttttccctaatacgtacctcattgtgggaggttgaggccttggctcctgcctgtagtcccagct

SEQ ID NO: 782804 - DNA, 90 bp, Homo sapiens
agatagcaatgatgatgtgaaaacagaagctgtggctgcaggaccagatgctgtgttggggaggacaatctggggagttttaggtttagg

SEQ ID NO: 782805 - DNA, 100 bp, Homo sapiens
aacaggaggacattgaaaataagatggaacccatccacataaggttaagcaaccttttccacgggatggataagaatactcctgtaagatacacagtgta

SEQ ID NO: 782806 - DNA, 100 bp, Homo sapiens
ggacgcgcgcagcccgcccgcccggcgaccagcaaggaaaagcttttgacatcacctatgtgcgtctcaagttccacaccagccgcccggagagctttgc

SEQ ID NO: 782807 - DNA, 51 bp, Homo sapiens
ggagagcaatcgccgggacagctgcaagtaatctatgccagcaattatgac

SEQ ID NO: 782808 - DNA, 80 bp, Homo sapiens
cagccagtgtggaaaaccagtggtaaatgtcagctacaggccagcttatgaccagggcttacagagtcatttgaagaagt

SEQ ID NO: 782809 - DNA, 83 bp, Homo sapiens
gctctccaagttctaccagccctacacaatgcagatcttcgtgaagactctgactggtaagaccatcaccctcgaggttgagc

SEQ ID NO: 782810 - DNA, 100 bp, Homo sapiens
tggaccccaatggcaaaacctgcagccgcctccatgaagaagtggactattctgagaaactgaagttcagtgatgatgaagaggaggaagaagttgtgaa

SEQ ID NO: 782811 - DNA, 110 bp, Homo sapiens
ctgaatctggagaaggggaaatctccccacaaagagaagtctcaagatcccaggttcctgatgttattagcagcataaggcaattatctaaagcggccatgaaagaggat

SEQ ID NO: 782812 - DNA, 83 bp, Homo sapiens
ggcgagtttccgatttaaagctgagctgcgaggaaaatggcggcgggagaacaacacagctaaactggtgaagcagctgagca

SEQ ID NO: 782813 - DNA, 89 bp, Homo sapiens
gggcgagcgaggaggatggcggagtcggggctcctgacgggttcatagtggcgtcatgcacgcagactcctgcaagttcccctaagttc

SEQ ID NO: 782814 - DNA, 101 bp, Homo sapiens
ggaatccgcccgcaagagcgagccgcctgccccggtgcgcagacagagctattccagcaccagcagaggtactggatgtaagcagagaaggcaaagaagaa

SEQ ID NO: 782815 - DNA, 100 bp, Homo sapiens
agaatacagggtcactcaagtagatgggcactccagtaaaaatgacatccacacactgttgaagtggtttgatgataagaacccaatttgggccgggcgc

SEQ ID NO: 782816 - DNA, 100 bp, Homo sapiens
cgcggagcccgagcccggagcggccgacgcccgcctcggcgcgcacatcccgcggggcccggccgggtggacaaggtcagggagcttcagaaccagggca

SEQ ID NO: 782817 - DNA, 74 bp, Homo sapiens
cataccttcctgaggctttcatggaggctggcagaacttgcttgctagaaaacaaagtgcaaggcttgacaaac

SEQ ID NO: 782818 - DNA, 98 bp, Homo sapiens
gaaatgctatcaatgagctgaaattccatccaagagatccaaatcttctcctgtcagtaagtaaagttcacacaaaagatgttggacaatttctacaa

SEQ ID NO: 782819 - DNA, 73 bp, Homo sapiens
gaagattaggaagaatccactgatagaaatcatttccatcaataccggattcttcgttgtcaagccgccaaag

SEQ ID NO: 782820 - DNA, 75 bp, Homo sapiens
aggttaaatcaggatggctggataaactctctcctcaaggcggctttgattcagcaagccacaacagttaaaaac

SEQ ID NO: 782821 - DNA, 96 bp, Homo sapiens
ctgaattagattgctcttttactgcacacgagaagattgtccagttccattggagaaatactcattctgatgaaggaaagagcgtccctgtgcagc

SEQ ID NO: 782822 - DNA, 100 bp, Homo sapiens
ttacagccaggaggactcttcggacggggacagagagctgatgaagggattgtcaatgaggcagatcagattccgatttgacgggcaaccaatcaatgaa

SEQ ID NO: 782823 - DNA, 100 bp, Homo sapiens
ttttaaatcaagatttaacattccaacacataaaaattatttatccaacagctcctcccagacctgtcatttactccatcctttatagtgatgctacagg

SEQ ID NO: 782824 - DNA, 82 bp, Homo sapiens
gcgggagagcggactcccctcgccaccgcccgagcccagggtgaggtggctttgaccccgggttgcccggccagcacgaccg

SEQ ID NO: 782825 - DNA, 100 bp, Homo sapiens
gtgggaactctttccagcttgtgtctgagtttattaaccacttaacctctcagaactgaacaaagacaacattgttcctggaacgccctctttttaaaaa

SEQ ID NO: 782826 - DNA, 75 bp, Homo sapiens
ctttttgtacttacaaagtccatgctaacctactatgagggtcgagcagagattctttcttgtggagaagttatt

SEQ ID NO: 782827 - DNA, 90 bp, Homo sapiens
cgcggaaccgtgctgccccgccccgctccacccgtgaggggggggccctcagcctcttggccttgaacgggctgttcatcttgattcaca

SEQ ID NO: 782828 - DNA, 98 bp, Homo sapiens
atggagacaagagtcaaccagaaagagattgggtacttaatgggtgaagaaggtgaatacagtgaagaggaaaactccaaagtggagctgaaatcaga

SEQ ID NO: 782829 - DNA, 76 bp, Homo sapiens
atgccatcaaagggggcaagaaagcttttaagatgaagacccgaccgcatgtctgtcatggacctcgccaatactt

SEQ ID NO: 782830 - DNA, 101 bp, Homo sapiens
ggccggggtttggctcggattcaccgcgagggccggccaaggattgcgaaaaggaccaattccagtgccggaacgagcgctgcatcccctctgtgtggaga

SEQ ID NO: 782831 - DNA, 51 bp, Homo sapiens
tgtggcaggttgcagaggacagtgcctgatctagttgaatctgaagatgtg

SEQ ID NO: 782832 - DNA, 75 bp, Homo sapiens
aaatcagagctggaacctgaggagagaggtcatcgacatcctgagggggaaggccacccggcctgcttccacctc

SEQ ID NO: 782833 - DNA, 100 bp, Homo sapiens
tgaaattttgggggcaggttctcttgctaggctttcttagaaatggcttctgaggaagctgccgttactatggtgaattattacactcctattactcctc

SEQ ID NO: 782834 - DNA, 100 bp, Homo sapiens
gcaagtccaagaggaggaggaggcggaggtccaagcggaaagcaagttttggaacgaatcagtcgaatgacccaaggtgatttagtgatgtcaatggacc

SEQ ID NO: 782835 - DNA, 78 bp, Homo sapiens
ccccttccccacgcaaccccagatccatttacactttacaggtgtcttttatgaataatcaaaagcagcaaaagccaa

SEQ ID NO: 782836 - DNA, 99 bp, Homo sapiens
cggcgacaggactttgggtctgggtgagccttctcgtggcggcggggaccgtccagcccagcgattctcagtcagaaatgagccgtcagactgctacag

SEQ ID NO: 782837 - DNA, 83 bp, Homo sapiens
agctccagcagccttgttagggcgtggcctgaggcttggataagtggggtgctggagaatctggtaaaagcaccattgtgaag

SEQ ID NO: 782838 - DNA, 96 bp, Homo sapiens
tcctcccagttagtgcgctgcaggatttgtgaaaatccatcttgaggactctcctagctgtcaccactgactaaagaagagaaaactgcggcagag

SEQ ID NO: 782839 - DNA, 100 bp, Homo sapiens
atcgcgtggagtgacggtcacaccgcggcgagagcagctctaaattgggaagcaatgccggaaacaagtctcttaaaaatcaacttggattaacctttca

SEQ ID NO: 782840 - DNA, 51 bp, Homo sapiens
aaagagtcgaatggtttgttggcagatgtgcctggcatcagaagggatgaa

SEQ ID NO: 782841 - DNA, 51 bp, Homo sapiens
agaggctgcggagccccaggaggggtcttgctctgtcacccaggctggagt

SEQ ID NO: 782842 - DNA, 50 bp, Homo sapiens
cccggacacctggaagctgggaaatggacccagatgatgtggtaccagtt

SEQ ID NO: 782843 - DNA, 75 bp, Homo sapiens
tttggattcacccacagcggggcggcggcggcggcggctgcggcccaatatagcccgagaccgaggacgagaaga

SEQ ID NO: 782844 - DNA, 93 bp, Homo sapiens
tcatccctgtacgggtgcctggcctcgcttctgtcccagtgggtgcctgagtctgcacgctggcttctgacccaaggccatgtgaaagaggcc

SEQ ID NO: 782845 - DNA, 98 bp, Homo sapiens
agccacagcgtccgactcgactcggagggtttctgtgagagacaaattgcttgttaaaggaattgaacaacacatgtgaacccgttgtaacacaaccg

SEQ ID NO: 782846 - DNA, 82 bp, Homo sapiens
aaatgacttaagtcagcccacgggatttttagcccagcccatgaagtctggcttcagccttgtcatgaaccacccagcctgt

SEQ ID NO: 782847 - DNA, 87 bp, Homo sapiens
aggttatgaaagaccctttgcacaaatcaaggtttcgtttataatgtcagcccttatatggagtatcatcctggtggagaagatgaa

SEQ ID NO: 782848 - DNA, 98 bp, Homo sapiens
aaggttgcattgatgaaattaaagatgcatgctgatggcgataagtcattaccacaggagagtgtgcctgtgtccagttaccagcaggcaggaattcc

SEQ ID NO: 782849 - DNA, 101 bp, Homo sapiens
ctggcccgtgacctgaaggctgtcaagtatgtggagtgttctgcacttacacaggttgcaaaacttcctcaagttgttcaacagcaaacacccgtggccag

SEQ ID NO: 782850 - DNA, 100 bp, Homo sapiens
agcagggagggaagacaattcagtcacagttgcagattatatttctagagctgagtctcagagcagacaaagaaacctcccaagggaaactttggctaaa

SEQ ID NO: 782851 - DNA, 97 bp, Homo sapiens
aaaccagacccctgtgtcatcctcaagatgcagtctcatgggcagtggtttgagaaaccaggaatggatctggcagacacctatattatgtttgttc

SEQ ID NO: 782852 - DNA, 76 bp, Homo sapiens
tctgctgattcacaattatggagactgtgaatgtaaccaatttacctacaagtttgccgaagaaatcagaaggcag

SEQ ID NO: 782853 - DNA, 82 bp, Homo sapiens
ctagaagaaatttggagtgtgcgtgcgcgccgagcggaccatggccaacctggagcgcaccttcatcgccatcaagccggac

SEQ ID NO: 782854 - DNA, 75 bp, Homo sapiens
ctcagagaagtccctccaccggctctgtggtattggtgcctctagaaactgccaagatcaaacattctgtgggac

SEQ ID NO: 782855 - DNA, 90 bp, Homo sapiens
tcccagtgacgggtctggagtgcgtgggggaccggctgttggcggggtcctcactgagcagcgagtcgtcccccgtgtcctctccggcca

SEQ ID NO: 782856 - DNA, 74 bp, Homo sapiens
actgcctcactgagcaaccaagaagaagatggcgaattagaagatggtgaaatagacgatgcaggatttgaaga

SEQ ID NO: 782857 - DNA, 100 bp, Homo sapiens
aagtgtctccaatggatggactgtataccgtattgccagacaggcttccagaatggactgaatgtgggcccagttggcgtcattctgctttgacctaaac

SEQ ID NO: 782858 - DNA, 75 bp, Homo sapiens
ctgatggcacatgtggaagttaaggtacgcaataactgtttggtattttgatgcagatgagagagcacgagctaa

SEQ ID NO: 782859 - DNA, 50 bp, Homo sapiens
aggatggagactacgagtttgatcccattgaagataccacgctgcatgtg

SEQ ID NO: 782860 - DNA, 100 bp, Homo sapiens
aggaccagtgctggacatagactggtgcccacataacgatcaggtcattgccagcggttcagaggactgcacggtcatgaagcggcaccatgtactacag

SEQ ID NO: 782861 - DNA, 76 bp, Homo sapiens
ttctgaaattattgatgggctctctgagcaggagggcggtccaggcggttctagcactggatttggaaactttgag

SEQ ID NO: 782862 - DNA, 90 bp, Homo sapiens
cagacagtggctcggcaccaactttgaactggcccaaataaggaaggaggaaaaagagaagaaaagacgccgcctcgagaacatcaggtt

SEQ ID NO: 782863 - DNA, 100 bp, Homo sapiens
cattactacgttcagatctgtgcagccgtgcttcctcaaagactgggaaatgcacgtccacttcaaagtccacggcacagggaagaagaacctccatgga

SEQ ID NO: 782864 - DNA, 90 bp, Homo sapiens
tgtgaaggccaatggccaagtgtctctacctcatttcccggagatggaaaatgcttggaacgaatacctgaagttggagaatgatgtgga

SEQ ID NO: 782865 - DNA, 100 bp, Homo sapiens
ctcgggcagaggcgacctccccgcgttccatgcgcacagggacagggtggacatcctcatcatggatgatgacgacgtccccagctggcctcccaccaag

SEQ ID NO: 782866 - DNA, 75 bp, Homo sapiens
gtcgtcgtcggcatcctcctggcctacctggcaggaccgtataatagacgctggccccaaaggaaactactctcg

SEQ ID NO: 782867 - DNA, 96 bp, Homo sapiens
tgtggattgcaaccttgaatgtaccaggaggactttaacccgctggtgagaggatgttcctgttactgctgtaagaatcacactcgggcatacatc

SEQ ID NO: 782868 - DNA, 99 bp, Homo sapiens
ctcagcctcccgagaagctgggattacaggaacaaaccctatctgttttatttcaacattgtgaaatgtgccagccccctggttctgctggaattccaa

SEQ ID NO: 782869 - DNA, 100 bp, Homo sapiens
catgaagcaaccgcccattcagtctacggctggggccgtcccagttcgcaatgagaaaggagtggtgaaaggacataggaaggagtctggggaactgtac

SEQ ID NO: 782870 - DNA, 87 bp, Homo sapiens
ggaatagattctcttgaccatgtgacatctgatgctgtggaacttgcaaatcgaaggttggatggcaagcatgtggtgtttggcaaa

SEQ ID NO: 782871 - DNA, 75 bp, Homo sapiens
cctctcctcactctcgctcgccgtttccaggagcacagtaagcggcgggctcgccagcctcgagcgaaagtgtga

SEQ ID NO: 782872 - DNA, 101 bp, Homo sapiens
tacctcttcactcaggctctgcccagaactcaaggtgcaaatatatacagagcttcataatcagcccaagaccacatagagcaaacatgaatgatatttcc

SEQ ID NO: 782873 - DNA, 82 bp, Homo sapiens
tgaagagactttccgttacatgagagcaatttacagcaatgagggatttatacatgaaaaatggacaaggatttgcattagt

SEQ ID NO: 782874 - DNA, 89 bp, Homo sapiens
cctcggggcccaggatgcccccgccatcgccttcggtggaaggaccacggaggggtgatcgtgaacatcactgccaccctggggaaccg

SEQ ID NO: 782875 - DNA, 107 bp, Homo sapiens
ccagacggctcacctgtgcgggatggaacaaaagggagaaacaaaggcagcgctgccctcgggggagcattggccctggcggaacgcagcagccgcgaaggatccag

SEQ ID NO: 782876 - DNA, 74 bp, Homo sapiens
gaccccaagcagcggatcatcccctttctgccaggacgcacatgcagaacatcaaggacatcaccagcagcatc

SEQ ID NO: 782877 - DNA, 100 bp, Homo sapiens
ccaggagcacagcggcatctttggcttcagcgtgtcccgtgagtccagggctctcgtggaggggtccctccatacccagaagtgttccgggacagcctcc

SEQ ID NO: 782878 - DNA, 101 bp, Homo sapiens
ttgccacctagtgaccaaactgaagatccaaaattgctgtgtacgagaaaatgtggtcttacatgaaatcagcggagccatctgtgtttaccaaaacaaca

SEQ ID NO: 782879 - DNA, 140 bp, Homo sapiens
tgccgctgccgccctgagtcactgcctgcgcagctccggccgcctggctccccatactagtcgccgacaatgcagatcttcgtgaagactctgactggtaagaccatcaccctcgaggttgagcccagtgacaccatcga

SEQ ID NO: 782880 - DNA, 140 bp, Homo sapiens
gcatggacatattaactcttacctgaagcccatgttgcagcgggactttattaccgctttaccagctgtggaggaagatgcagagtcagaagatgaagaggaggaggatgtgaaactcttaagtatatctggaaagcggt

SEQ ID NO: 782881 - DNA, 100 bp, Homo sapiens
agcaccacactgaccctgcgctccaagtccatgacagctgagctcgaggaacttggttttgtcctggtcatcgggctcgtgactttctacagaattggcc

SEQ ID NO: 782882 - DNA, 102 bp, Homo sapiens
ctagaggctggataccaaatagcagtggaaaccggtctgaatttcctgctgctgttcacaaagatgctttttatctttaactttttgttttccccacttccg

SEQ ID NO: 782883 - DNA, 87 bp, Homo sapiens
gagacggagctaagagatatctgcaatgatgtactgaataatccagaatggctactctgatctatgttgataaggaaaatggagaac

SEQ ID NO: 782884 - DNA, 90 bp, Homo sapiens
acaattcgtcaagctgctgaggcacatcctccagtgggaaggggtaccggcaagagatgttccttgcctgtatctccccttggttcaata

SEQ ID NO: 782885 - DNA, 50 bp, Homo sapiens
tatttgacatcattacagctttggaatgagaccgtggagctttttcgtgc

SEQ ID NO: 782886 - DNA, 120 bp, Homo sapiens
ccagacagcagctaagctggttcatcccatcagcctggattggtgaaactgaatcacaggagatatttccaggcaggatggggaagcagaatagcaaactggcccctgaagtgatggagg

SEQ ID NO: 782887 - DNA, 83 bp, Homo sapiens
cccactctttccgccctaatggaggtctccagtttaggcacctgaatggacagaagaggacctcagccaactgacaagaagta

SEQ ID NO: 782888 - DNA, 75 bp, Homo sapiens
tatcctgtccgagcaaagattacctattaccagaacacactgacagtctttgatttgcgtcagtgtcatcgacag

SEQ ID NO: 782889 - DNA, 93 bp, Homo sapiens
atttaatggaaaatcgcttggttaaaacctgacacttttaacagatgaggtttatataactttccaagacaaggaagttgtgcaaagcctcac

SEQ ID NO: 782890 - DNA, 100 bp, Homo sapiens
gccctggacacagcaatatctctgggctttcacagcaaagtggaagatgctttctacaaaggtgaactcaggctgaatgaggaaaaattatggaagaaaa

SEQ ID NO: 782891 - DNA, 100 bp, Homo sapiens
acgatgagaagtacaaggctgtgtccatcagcacagagccccccacctacctcaggtaacctgtgccgttgcactggatacaggcccataattgatgcat

SEQ ID NO: 782892 - DNA, 85 bp, Homo sapiens
gaagcagctggacccgctcaccatctacggcatccggtacctcctgccccccgaggtctgcagtctcctgaacccagcagccatc

SEQ ID NO: 782893 - DNA, 75 bp, Homo sapiens
gaagaggaagagataagcctccacttacagatctgggctctcccggggctgaagctgagtgcagatcaggtggcc

SEQ ID NO: 782894 - DNA, 100 bp, Homo sapiens
gggtgggtccttggggaacatggagattccagtgccctgggcccctggccttgaaaattgctgggcgaattgcagaattcttccctgatgcagtacttat

SEQ ID NO: 782895 - DNA, 50 bp, Homo sapiens
ctcagcctgtgtgcactggtctcagatatgaattgagaattcgttatttg

SEQ ID NO: 782896 - DNA, 100 bp, Homo sapiens
agactacaaggacagcagcgactttggggcccgtcaccctcagccctgtgtactgtgttgcatctgacagagagacttttccttgaccacccgcatagac

SEQ ID NO: 782897 - DNA, 100 bp, Homo sapiens
caagacgctgcccgtcgccttcaagaacatccagtcatggataaaaatgagctggttcagaaggccaaactggccgagcaggctgagcgatatgatgaca

SEQ ID NO: 782898 - DNA, 80 bp, Homo sapiens
agaaggaccttcacccattgtttgatgagacctttgaattgtgaaagaaaatggcccgaaccaagcagactgctcgtaag

SEQ ID NO: 782899 - DNA, 74 bp, Homo sapiens
gacccctccttggtgtttgtaagagcattggatcttctgggtgctggagaatctggtaaaagcaccattgtgaa

SEQ ID NO: 782900 - DNA, 100 bp, Homo sapiens
aaactgaatactccttccttcctccccacccattcctttaaatccggagggggaaaaaatcccaaggtctgcaaagagtccggcagcgtcttctcttgag

SEQ ID NO: 782901 - DNA, 100 bp, Homo sapiens
taaacatcagaacctcaattctgttgatcttcaaaatgctgcagaaatgctcactgcaaaagtgaaagcccaccttgggacaccttgactccaagcccag

SEQ ID NO: 782902 - DNA, 74 bp, Homo sapiens
cttgttgctcttaaagttgtcagtggctgactcacaggctgcaggtttggatgcatctgctcagactacttctc

SEQ ID NO: 782903 - DNA, 75 bp, Homo sapiens
gtctttactccagtcccggataaagaccttctagggacccagacatggagctgcgggaagaagcctggtctccgg

SEQ ID NO: 782904 - DNA, 90 bp, Homo sapiens
gtcctcggcggccccggcgccggcaaggggacccagtgcgcccgcatcgtcgaggatttgaatttgttgaaatgagcagtcgtaaatcaa

SEQ ID NO: 782905 - DNA, 100 bp, Homo sapiens
ctgacatggaggatgatttcatgtgcgatgatgaggaggactacgacctggtgagccctattcccagaggcaggtggtgctgaccctgtaacccaaagga

SEQ ID NO: 782906 - DNA, 75 bp, Homo sapiens
ccgagtgtgtcgccgcggccatcaggatcaatgaactgagccatgttcaaatccctgttatgttgatgccagatg

SEQ ID NO: 782907 - DNA, 101 bp, Homo sapiens
ccaaagcacattggagttggaatgtatcaggggaagcaaccaggggaaaatgaagatatcaccatcagtagtaactcttccttttttgtttaaatggtaaa

SEQ ID NO: 782908 - DNA, 100 bp, Homo sapiens
aggaaaaccagaatgctttgaagttctgtaatttggctttattgcttcctactgttaccaaagagatccatcttcggttgtgaatccggcccggaatgca

SEQ ID NO: 782909 - DNA, 98 bp, Homo sapiens
tttcaacagtttcctgcgtcgggcacaacagaaacagaaaccacactgccgaggaatggctcccaatggcttaccaaatcatatcatggctcctgttt

SEQ ID NO: 782910 - DNA, 75 bp, Homo sapiens
tacagtctctgcacctcgcgccccagcaggtcaccgaggaggagcccagctccaaccacacggtcatgatccagg

SEQ ID NO: 782911 - DNA, 75 bp, Homo sapiens
cctcaccatcccctcattgctgttgattaccaacaacatctgaatgaattgatgacgaagaagtggctattaggg

SEQ ID NO: 782912 - DNA, 100 bp, Homo sapiens
ccccggaggtggaggctacagggctgtgctcttggatctggaccagcagaccctgcccggagtggcccaccaggtggtggagcagatggtcatctctgac

SEQ ID NO: 782913 - DNA, 100 bp, Homo sapiens
aaaagttagaattcttgaaaaaaagcatgttattgaattatcaacatcactgggcatttgatgtagaactactgtacatagcacagttctttaaaattcc

SEQ ID NO: 782914 - DNA, 82 bp, Homo sapiens
gacaggcgggctgcagcagcaaaggtttgatgagaagagggcagtgcagcagctgagagcatgtggtgtcctggaaaccatc

SEQ ID NO: 782915 - DNA, 90 bp, Homo sapiens
cggctgcggcgcctggcgcacctggtgctcttctgccccttctccaagcgcctgcagggtgaggacgcttgagcggaagttagaagcaaa

SEQ ID NO: 782916 - DNA, 50 bp, Homo sapiens
gagatcttgaaagtgggcgagttgcgaagtttgtgtgtatgttacagccc

SEQ ID NO: 782917 - DNA, 78 bp, Homo sapiens
ctgaggcggcccagcggcggcagatcagtcgcatcgaatacattcattcaaagaacttcatccaccgggatgtgaagc

SEQ ID NO: 782918 - DNA, 90 bp, Homo sapiens
ctaccagacaagttcagagaatatcatgcttccagtctactgtaaagtctttcccagggaactccgatgaagtgttccaacaaaatgagc

SEQ ID NO: 782919 - DNA, 100 bp, Homo sapiens
cattggggtccagccgtccccagaacgcagatcagaggtagtcggacctttcccgctggcgcgcagcctcagctaggccatttgtgtaggaccagaaaac

SEQ ID NO: 782920 - DNA, 96 bp, Homo sapiens
tgaagaggaggaaggccttgtgcaaacgcaagtcgtggatgagtaaggatcagttcttaagagcagccccggtaactggaggaatgggagccgttt

SEQ ID NO: 782921 - DNA, 95 bp, Homo sapiens
agttatggagtcctatgaagttgaaatagatgggaagacatatcaaggtacccattcctggcccagtgggtaacaagagaatggttcatttttcc

SEQ ID NO: 782922 - DNA, 97 bp, Homo sapiens
accacgggactgcagccaggtccaatcttacaagtctcaagtcttctctgcagctttaccgggctgcatgttgtgcctgggtcagtccaccttcctt

SEQ ID NO: 782923 - DNA, 118 bp, Homo sapiens
gcgaagctggccaaagcctgcccagacggctcacctgtgcgggatggaacaaaaggttgatgccggcccaggatggatcagacctgtgaactacccagaagaaattgtctgctgccct

SEQ ID NO: 782924 - DNA, 98 bp, Homo sapiens
gaccacaagttccacaggcacctcattgggaagagcggtgccaacatgcagaaataccataccatcaatggtcataatgcagaagtaagaaaggcttt

SEQ ID NO: 782925 - DNA, 82 bp, Homo sapiens
ctcggaaaccggtagcgcttgcagcatggggctttgaccacgacctttgaagagcttcattttgagatcaagccccacgatg

SEQ ID NO: 782926 - DNA, 100 bp, Homo sapiens
tgccccggcgcaccgactggaccgggaaggagcatcccaggacctaccagaatctgagttgtctgctggttctcagcttgaagaagattctgcagtcctt

SEQ ID NO: 782927 - DNA, 75 bp, Homo sapiens
actgaagttggatggtctgttagaagaaaatgataaagtagccaatatttggtgcagcttcaatgtctttctgaa

SEQ ID NO: 782928 - DNA, 76 bp, Homo sapiens
agtcagctacgggcaagcgggcagctgaagatgatgaggacaggctgcgggaggagctgcaggactgaggtacaga

SEQ ID NO: 782929 - DNA, 50 bp, Homo sapiens
aaatatcccgagatggacttggatgagatcatgcacgccctgaagatgac

SEQ ID NO: 782930 - DNA, 98 bp, Homo sapiens
gccgccccgcgcccccgccgcgccctcagcccatcacctcttcatgaccactgcctgccaggaggctaactacggtgccctcctccgggagctctgcc

SEQ ID NO: 782931 - DNA, 88 bp, Homo sapiens
ggaagagacgagtgcggtaacaccgttcacagagctagccggacgtcctccgactcaaggtcagtatgggaatcctttaaataaatat

SEQ ID NO: 782932 - DNA, 90 bp, Homo sapiens
ctggaaggacaccaggtgaaactcaatgctgctgaagagatgcttcaacagatggttggcaatggctgataaatgacactttgagacatc

SEQ ID NO: 782933 - DNA, 90 bp, Homo sapiens
gaggcttccccagccacatggaactaatggccacaggtggcagatatttcaagattggttgggaactgaccaagataaccttgatttggc

SEQ ID NO: 782934 - DNA, 100 bp, Homo sapiens
cgccgccgccgctgccgctgccgctgccgcacctccgtagctgactcggagtacgagagggcctccaaagtggaccagtttgtgacgcgcttcctgctgc

SEQ ID NO: 782935 - DNA, 74 bp, Homo sapiens
cgcgtcaggccgcgacgagggcgctgagtaatctatgccagcaattatgacaatgttagcagaccatgcagctc

SEQ ID NO: 782936 - DNA, 83 bp, Homo sapiens
tcccctccagtccgctccgggcaggtggctacagtttcagaaaagtcacgtataatggaactggagaaagacctagcattgag

SEQ ID NO: 782937 - DNA, 97 bp, Homo sapiens
cccgtggactaagaacgcattgccgccggtcctgaccaccgtgaacggacagtcccccccagggcgcaccctacgacgcgcacaccaccggcatgac

SEQ ID NO: 782938 - DNA, 80 bp, Homo sapiens
aactctcatctccggccctctcggcgtccgccagcgatggcacagttgtggaagctgatcgaggaagcctaagcaggctc

SEQ ID NO: 782939 - DNA, 74 bp, Homo sapiens
gaacttataaagttctgccgggaagcaagaggcaaagagaatcggttggcatttgatgaagcaattgctgaatt

SEQ ID NO: 782940 - DNA, 76 bp, Homo sapiens
gcccgcccttcgaaagtccagggtccctgcccgctaggagatcgggcgcatctccattgagatgaacgggaccctg

SEQ ID NO: 782941 - DNA, 75 bp, Homo sapiens
gttggggcgcccagctgccaacaccaagagtgtgacaagtttaaccaatgtgggacatgcaatgaattcaaagag

SEQ ID NO: 782942 - DNA, 98 bp, Homo sapiens
ctggagcctcagttggaagcagccgatccagcctgcggagcctgtggggcaggtgcacattcaggttcccgagcacaaacatcaagataacgttcact

SEQ ID NO: 782943 - DNA, 101 bp, Homo sapiens
cctgcgcgaagctggccaaagcctgcccagacggctcacctgtgcgggatggaacaaaagtggactcccgaaaaattgaccaggaagggaaaatcccagat

SEQ ID NO: 782944 - DNA, 88 bp, Homo sapiens
aagacacaaatgtaacttctgaggacaaaaaggtggacccccaaaagtacaagggcatatttaacggattctcagttacacttaaaga

SEQ ID NO: 782945 - DNA, 97 bp, Homo sapiens
ggtgacggcggagaggcgccccccgcagcagatgcagagcaaagcggcagtccccggacagggatgggctctgaccaggaggacagcaagcccatca

SEQ ID NO: 782946 - DNA, 90 bp, Homo sapiens
agcctggtcttgcgcctgctgcagggcaaggagccaggactcgctcagcagcagcctgaaaacttgctacaagtatctcaatcagaccag

SEQ ID NO: 782947 - DNA, 75 bp, Homo sapiens
ccctgaaaaagtatcgtcgagaagcctatcatcggtttggtgcacctcgatttggaggaagtagggcagggccct

SEQ ID NO: 782948 - DNA, 51 bp, Homo sapiens
atgcggtctcggggagaggctactctgagcagaagttctgccagcgctatg

SEQ ID NO: 782949 - DNA, 137 bp, Homo sapiens
cacctggtgcgggccctctggaccctggagtacaccccgcagcacagccgcgacttcaaggtatgatctcgtgaaatcttgagagaaactgaatgacgaatgaaactattgttcctgtttcacacagaagaaaactg

SEQ ID NO: 782950 - DNA, 74 bp, Homo sapiens
agcgaccccggggtcttcaccgagctcattaaaggattcgtacaacctttctgctgtgaggacagaattctggc

SEQ ID NO: 782951 - DNA, 85 bp, Homo sapiens
ggagccattatttatgtcatcaagaagaatgacgatgccggaggcagtttgggcccaaaaccaaggaagaggtgaagatcattga

SEQ ID NO: 782952 - DNA, 98 bp, Homo sapiens
tcagtggagctggtcgcagatcctgagacccggacagtggcagtgaaacaggtggaacggcacatgtgtgatggggacattgttatcttcaaccggca

SEQ ID NO: 782953 - DNA, 100 bp, Homo sapiens
gagaggacccagtcccacatctcccagaaatggtggagtcaatgaagaaagtagcagggatggatgtggagctgacagttgaagaaagaaacctcctatc

SEQ ID NO: 782954 - DNA, 89 bp, Homo sapiens
aaaatcataacaagcggttctctaccctgtaaagctttaaggaagcctcctatttcagtttctcaacatgaaagtcatcaagcaatctc

SEQ ID NO: 782955 - DNA, 100 bp, Homo sapiens
ctggagaaggtgcgcgccctggaggaggccaacgctgacctggagttactgtaaaagacgtgaaccagcaggagttcgtcagagctctggcagccttcct

SEQ ID NO: 782956 - DNA, 75 bp, Homo sapiens
atctgaaggaggggcttctggttagcccagattcaaccctatgaaaagataaaggccaggggcttgcctgataat

SEQ ID NO: 782957 - DNA, 50 bp, Homo sapiens
agcttttatgagaagctttataatagatacagtttatgtaacttgatgga

SEQ ID NO: 782958 - DNA, 99 bp, Homo sapiens
aaaaatcactaaggaaagaactccagaaagtgaagaagaaaatgtagaatgggaaactaatagagatggctgccaaacgagggattctttcatctggtc

SEQ ID NO: 782959 - DNA, 74 bp, Homo sapiens
agaggtgtttcgagtaaacaagccaggctggcctgctgtctgccttgggctccctgatattgatgatttggctg

SEQ ID NO: 782960 - DNA, 100 bp, Homo sapiens
gagacagatcaaaggagagtttagtgagttttgcaatgcagcatgttagaagtacagtgacagaactttggacaggcatgtggagaccccaaggcaaaac

SEQ ID NO: 782961 - DNA, 99 bp, Homo sapiens
cttcagtccccgccgagccgccaccgcaggtcgaggacggtcggactcccgcggcgggaggagcctgttcccctgagaagtggtacaccatccccaaaa

SEQ ID NO: 782962 - DNA, 75 bp, Homo sapiens
atgggggcaggagctgttggagctttgcagctgacctacatctcgaaggttcgtaagaagaactcgctgaaggac

SEQ ID NO: 782963 - DNA, 74 bp, Homo sapiens
acagccaccacagcatctttctgaagccgggagagggcctgtagggattcgacggaggcgccttgcacgacttg

SEQ ID NO: 782964 - DNA, 75 bp, Homo sapiens
ctggagccagtgcccaagtacggtttggaggaatgccccccacgccgcaggccgcgcagctcgctggacagaggc

SEQ ID NO: 782965 - DNA, 100 bp, Homo sapiens
gaaggttaagctggctgtcctgaaatattataaggtgattggcaaaggcagtgaaaagtctgatgacaactcctatgatgagaagtacctgattgccacc

SEQ ID NO: 782966 - DNA, 101 bp, Homo sapiens
ccagagcgttcctcaaggcccaggctgctttcttcggtagctaccgaaacgctctgaaaatcgagccgagatcatgatgcagccgtccttttggatttctt

SEQ ID NO: 782967 - DNA, 76 bp, Homo sapiens
tagaactcgcgtttccacttcagagatctggtcacaaggcacttaaagcattgttgaggtcattggtaggtcttca

SEQ ID NO: 782968 - DNA, 90 bp, Homo sapiens
agatgcagaggaaagaaaagaatacattcctgattacctgccacccattgtgtcttctcaagaagtgctcatcttcaaactctatcagcg

SEQ ID NO: 782969 - DNA, 82 bp, Homo sapiens
gctggttcatcccatcagcctggattggtgaaactgaatcacaggagatatttccagttatctccagaagaagaagagaaaa

SEQ ID NO: 782970 - DNA, 101 bp, Homo sapiens
cagccatgaacggatggatgtgatgcctgctagccaaaaggatcatgacaagatgtttaagatgagtgaaaagatattactcctgtgtgttggagaggctg

SEQ ID NO: 782971 - DNA, 98 bp, Homo sapiens
ttaagagctgtgcgtgttttgggggagcagacggttgacagtgttgagtttgattgaaggcctctgtgtcctttgtcccaatagtaacaactccctcc

SEQ ID NO: 782972 - DNA, 75 bp, Homo sapiens
ccttttggcccaatgaatatcaggtcatcagaagattgagagaaagaggagaaccaatcagactatttggagaga

SEQ ID NO: 782973 - DNA, 75 bp, Homo sapiens
gtctctccagaaaatcttgtggacaaatccaggggaaggctttcatgagaaggacaagaagccatattgccgaaa

SEQ ID NO: 782974 - DNA, 100 bp, Homo sapiens
ctgcggcttctggttctcacttgtcggcaacagcattattgagaaaagcccttacagaagagtgtggccgtaggtcagctattcacagtagtgaatcatc

SEQ ID NO: 782975 - DNA, 100 bp, Homo sapiens
aagagccctgcaatttgaagatacatgagacagcagccaaacccccaggacttccaatagtagtcagacattatcatcctgtcatactatggagccatgt

SEQ ID NO: 782976 - DNA, 120 bp, Homo sapiens
ctctcggagaattccccttcctagaaggaccaagatggcagcagtgactctgctggctttggcgtatacacagacccggatgcagagtctacagcctgacccagctgcccgctatcgcaa

SEQ ID NO: 782977 - DNA, 75 bp, Homo sapiens
aaggattccaagtaactcttatttgaggaagaagcccctccagatggtgctgttgccgaatacagaagagaaaag

SEQ ID NO: 782978 - DNA, 100 bp, Homo sapiens
atcttgtggaaagaccaatgaccaagacggcttgatttcaggaatattacgtgttttagaaaaggagatcatgaatcagacagataaaaatcaacaagaa

SEQ ID NO: 782979 - DNA, 96 bp, Homo sapiens
tgtgaccccgagtaacaacgcgcgcttgagttggtataaactcctgaagctatgtgaaaacttctgagaaacttggagagtggaatgagaaagtga

SEQ ID NO: 782980 - DNA, 46 bp, Homo sapiens
ttcggaaaggagccaatgagggttaaagctgaagctcaacaaagat

SEQ ID NO: 782981 - DNA, 50 bp, Homo sapiens
gaagaggaaaactctaccggtgcagacggttacctggcacgctggccaca

SEQ ID NO: 782982 - DNA, 98 bp, Homo sapiens
ggagaatgaaatttgcagagtatgggatatgtcaatggatgaggatgacacagcaagaaggccctcaccagatgctgagcagatgccggcaccatgcc

SEQ ID NO: 782983 - DNA, 83 bp, Homo sapiens
cacgctgttcggctactcggtcgtgctgcacagccacggggcgaaccgatgtggagacctttggcgacttggcctttggcgac

SEQ ID NO: 782984 - DNA, 100 bp, Homo sapiens
aatacactggacctgaaagttatgtggctcaaatgattgtgtcctgacacagctctccctgaggagcagccacattccagctcccagtgcgcccctctcc

SEQ ID NO: 782985 - DNA, 97 bp, Homo sapiens
cagtctctcattggcttctttgagactgaaatggcaggacttatcaaactggtttcaaagcacagagctcaagtaatttacaccagaaataccaagg

SEQ ID NO: 782986 - DNA, 75 bp, Homo sapiens
ccttctccctgcctggacccctactattgcaacaagatctcacattcttgaaggtggcattgaagagcactaaga

SEQ ID NO: 782987 - DNA, 75 bp, Homo sapiens
cggggagccgagctggagctgccgcggcgcagccagagctcaggccccggggcctccagcggcaccagcggagac

SEQ ID NO: 782988 - DNA, 100 bp, Homo sapiens
cggagacgctctgcggggctgagctggtggatgctcttcagttcgtgtgtggagacaggggcttttatttcagtggaatgaggtaccatctactgtctcc

SEQ ID NO: 782989 - DNA, 97 bp, Homo sapiens
atttgagccagacgtccaaagtgaaacctccgggtggacattcccctcaggcacacattctggcagttccgccatgagaacccccagacccgggttg

SEQ ID NO: 782990 - DNA, 75 bp, Homo sapiens
gacttaagggacctggtcaccacgctcgagcgccatgctgcactgcccctactggaacaccttctcgctgccgcc

SEQ ID NO: 782991 - DNA, 98 bp, Homo sapiens
ggcggacggggagctgaacgtggacagcctcatcacccggctgctggagggtttgtcctggttgtggtcaagactggatgatgtaactggctctctag

SEQ ID NO: 782992 - DNA, 100 bp, Homo sapiens
ggggccgtcaggcggggatacagcctggaaggtgcgtgtggggctgggtctcggagtgggagacgtggagtgcaggacttgtttacactgggcatgtaaa

SEQ ID NO: 782993 - DNA, 75 bp, Homo sapiens
acagcctgtgatgctgtcctggagcaagaagtctatgtgccccaggatcctggattacctgaggaagaagagatc

SEQ ID NO: 782994 - DNA, 75 bp, Homo sapiens
ggatgatgaagaagaagatgaaactgctgaagagattgcccccgaggaattagcacttgttcacaacttgaggaa

SEQ ID NO: 782995 - DNA, 101 bp, Homo sapiens
ctacagtgagtcattcaaacagcatgacataactgttttcagataactattatcgtgcagaaatgattgatgccctggccaactctgttacacctgcagtc

SEQ ID NO: 782996 - DNA, 80 bp, Homo sapiens
ctgccctgatcatcctgctgctccccggaagttccaagttccccatcaagtggacagccccagaagctgccctctttggc

SEQ ID NO: 782997 - DNA, 101 bp, Homo sapiens
cctgaaggctgcgcaggaggagtatgtcaagcgagccctgctgtatgccactgggtatggtgcaggtggcagactaggcattggagggacagagtcggtgt

SEQ ID NO: 782998 - DNA, 95 bp, Homo sapiens
attaggcttattgaagataagccacgcacaagccataggcgatcttactctggaagcagatccagaatgcagtaatagtggccttgtcttcaaaa

SEQ ID NO: 782999 - DNA, 103 bp, Homo sapiens
cagctagcaaaccgtttgcggaggtacggatactcagttgtggagagctgattcccaaatctaaaggaactcttggtgtaataacagaagctacaataaaaat

SEQ ID NO: 783000 - DNA, 75 bp, Homo sapiens
ccaacatggacatctccaccggccacatgatcctggggccaaaccagtgctcctgccacctctctggctgccccc

SEQ ID NO: 783001 - DNA, 82 bp, Homo sapiens
tttgctgatggtgtggttggagtttatgaatgtcacaatgctgggggaaaccagcaatcatcctcttccagtggtagcgtgt

SEQ ID NO: 783002 - DNA, 82 bp, Homo sapiens
gtctggatccccgcccaggaagcccctctgaagcctcctcgccgccgtttctgagaagacctaatctgggagcctgcaagtg

SEQ ID NO: 783003 - DNA, 75 bp, Homo sapiens
atgccgggcactattactgctacgtgaaggtgtgaacctcaaatggactgaataaccctgagttggttgcagtcc

SEQ ID NO: 783004 - DNA, 103 bp, Homo sapiens
agagcgagctgagtggttgtgtggtcgcgtctcggaaaccggtagcgcttgcagcatgggacccagacatggagctgcgggaagaagcctggtctccggggcc

SEQ ID NO: 783005 - DNA, 78 bp, Homo sapiens
gcctcccgccggccgtctccttaacaccgaacacctgggtgggaggacgctactcgctgtggtcggccatcggactct

SEQ ID NO: 783006 - DNA, 75 bp, Homo sapiens
tgatcgttggcggacattttgggtacatccgtccccagtatcaagggtccggggcaatcgaatgaataatcaaaa

SEQ ID NO: 783007 - DNA, 98 bp, Homo sapiens
acccggttccccggcccacagtgggggtgtgcaaacccgagagaactgggttctgctgaatgtcctgaccttgaaccggaacctgagtgacagcctgg

SEQ ID NO: 783008 - DNA, 100 bp, Homo sapiens
cggacgccgacatcatcagccgctgccaggtcaaaatgcagatcttcgtgaaaacccttaccggcaagaccatcacccttgaggtggagcccagtgacac

SEQ ID NO: 783009 - DNA, 82 bp, Homo sapiens
tttggagccccggagtggggtgtcggcgcctcattcgggtggagctgagccggagacagcccgtggaccgggagcccgtgga

SEQ ID NO: 783010 - DNA, 90 bp, Homo sapiens
aaatgtaactgctatcctctggaggaggaagaggtggtggacaagatggatgatgatgtcttcctgcgctgcatcgagtccaacatgctg

SEQ ID NO: 783011 - DNA, 75 bp, Homo sapiens
tcaccgccaaggtcctgcttcaccgaacagcacctcaggagcagaacatgttcttcaagtatacatggaataact

SEQ ID NO: 783012 - DNA, 98 bp, Homo sapiens
ttttgtaacaactaatttaaacatagagactgaggcagctattgttaaccgtgatggcacccgctatgtccagaaaggagaatacagaacgaatcctg

SEQ ID NO: 783013 - DNA, 111 bp, Homo sapiens
cctgtctcccgctccgcagccccgggcacggcggaggcagcggagccctgggccatcgttgatattcactgatggactccaaagaatcattaactcctggtagagaagaaa

SEQ ID NO: 783014 - DNA, 78 bp, Homo sapiens
gcggcgtagtggatgcagcatcctagtggaggacgcccctgtgttcaaagaggaaatctcccggaggtttaaggctca

SEQ ID NO: 783015 - DNA, 100 bp, Homo sapiens
aattccagggcccacacctctgcctttgttgggaaatgttttgtcctatcgtcaggttggcatggattacagaagctgcatcctgagacccggcggttcc

SEQ ID NO: 783016 - DNA, 75 bp, Homo sapiens
tgtgatccaagcggcagtgatttgcctcaaggaaccactgtctcaattcctaagaggaagccatttcttcccagg

SEQ ID NO: 783017 - DNA, 100 bp, Homo sapiens
gaacttcacaatcaagaaatgcagaaacgtaaagaaatgcaattgaggactactgttcgaagatttttggaagaatactgagaacggcataaagtgaaga

SEQ ID NO: 783018 - DNA, 95 bp, Homo sapiens
aaaatggctgaggagagagtcgcgacggctactgcagcactggggtgtcagttgttggtccgacccagaacgcttcagttctgctctgcaaggat

SEQ ID NO: 783019 - DNA, 97 bp, Homo sapiens
agaaacatatgaggattttgataccaggatacttgagagttgctttaatgtgaagtattttcctggagtcacttcctttgggacgttgccattcttt

SEQ ID NO: 783020 - DNA, 85 bp, Homo sapiens
ctggagcagtatttcatgaagttccagcaacagatagaaatgctttaagttcactctggggaaagctggcctctgaaatcttaat

SEQ ID NO: 783021 - DNA, 51 bp, Homo sapiens
ggggtcctctctgagtcaaatccagtgagatggtgccttgctgtgttgccc

SEQ ID NO: 783022 - DNA, 100 bp, Homo sapiens
gtgcactgttcaacacagcaatgaccaaagcaacccctgctgtacggacagcatataaatttagcatagcggcctgaccacaggggtggccttcgggcat

SEQ ID NO: 783023 - DNA, 82 bp, Homo sapiens
gtcaggccgcccgcagccgcttcttcagccggccgtcagactccgccgtggtcatggaggagggaagtccgggcgaggttcc

SEQ ID NO: 783024 - DNA, 130 bp, Homo sapiens
cggcagagcactgtgattgcttgcagtgtttctttataatacattccatgggaggaggcggcttacagggagaacacagttggcctccaccgtttctgccccacagaaaacgtagcaaagatcaaccgag

SEQ ID NO: 783025 - DNA, 104 bp, Homo sapiens
aaagtgggcacctcaacttacctcgatttgagaaataccttgtgaaactatcagatgaattacatgaatgacagtcttcgaaccaatgtgtttgttcgatttca

SEQ ID NO: 783026 - DNA, 100 bp, Homo sapiens
atttcagcctgcccttgccagtgcctgggccgctgggagccgttattggctgccgttaaggaccgttacgtttcccggactcccaagacagctgggctgc

SEQ ID NO: 783027 - DNA, 101 bp, Homo sapiens
ctctacttccccaccaaaaagtggcacacactggagagatatcagtttttcgttggaatatacgttgcacatttatggcgattctgagtgtgagggcagac

SEQ ID NO: 783028 - DNA, 84 bp, Homo sapiens
gagcctggctaagcaaaaccctgcagaacggctgcctaatttacagcaaccatgagcaggagtcctggcaaaataagcatgcag

SEQ ID NO: 783029 - DNA, 74 bp, Homo sapiens
aatacaaggcaaatcatatcttggatcagagttccagaaagctgagtctgatctggattacattcaatacaggc

SEQ ID NO: 783030 - DNA, 100 bp, Homo sapiens
tgcagggcatttccttcgggatgtattcggctgaagagctcaaggtgaaagattgtctgctggatattctccatcatatgacaaggacaagagtgttctg

SEQ ID NO: 783031 - DNA, 101 bp, Homo sapiens
gcagccccggcctctcggcctctgccggagaaacagaaaacatccagtacagacctttctgatatccctgctctccctgcaaatcctattcctgttatcaa

SEQ ID NO: 783032 - DNA, 74 bp, Homo sapiens
cagatggaggaggagcagaaagcaatgaggttgaaatcacaaagattagacacctttttagataggtgttcttc

SEQ ID NO: 783033 - DNA, 96 bp, Homo sapiens
caacttcaggaacagcctgaagaccaaggtattgaaaaccttccctttgaattacagagaaactttcagctcatgagggacctagaccaaagaaca

SEQ ID NO: 783034 - DNA, 75 bp, Homo sapiens
tccaagctctgggcgtctgtctcacaaggagggtaaatctgactttaacaattaaaccacaggttccattatggg

SEQ ID NO: 783035 - DNA, 83 bp, Homo sapiens
aagcacggggtgaaactgaccacagtgctcaccacccaccaccactggtgctggagaatctggtaaaagcaccattgtgaagc

SEQ ID NO: 783036 - DNA, 96 bp, Homo sapiens
gaaacctcagacagatcgccggggaggcagcgcgggatcccagcctcaggcgtgcgcggacggtgtgcggagtgaagatagtccaagtcctaagag

SEQ ID NO: 783037 - DNA, 97 bp, Homo sapiens
actggaatgtttcagtttgggaaatctggatgccaaacgagattggggccatgccaaggactatgtggaggactggttgccataaaggaagcccacg

SEQ ID NO: 783038 - DNA, 100 bp, Homo sapiens
cctggtggaacagttgttgcagcaagcgattcagtggtattcatgggtagtttgaaatatccagatgagaatggatttgatgccttcctgaagaagcatg

SEQ ID NO: 783039 - DNA, 100 bp, Homo sapiens
cttcagtggagagcaactcaaatggccagcgatctgtacatgagacccaggaattatttccaaagcaagattcatatgctgaaggggtaacagacagaac

SEQ ID NO: 783040 - DNA, 100 bp, Homo sapiens
cgcctccaggccaagagggatccttcacccgtgtctgggatgcccgctgtctgtagccccggcatggtgcccgtggccctgcccccggccgccgtgaacg

SEQ ID NO: 783041 - DNA, 76 bp, Homo sapiens
aaaaagcagacaatctgaggatgatgttgacttggggatccaaaggcacaggtgaaattggcctcctggtccaagg

SEQ ID NO: 783042 - DNA, 82 bp, Homo sapiens
caaacggcaagatgtccagtaatgtcccggcggatatggtactccaaagattcaggtttactcacgtcatccagcagagaat

SEQ ID NO: 783043 - DNA, 100 bp, Homo sapiens
taccctggaaggaaggcccagcgcctataactttgacaatagccctgtgctgcaggtcctgcattcagctcttttcacatttgatttgattgaaagtgtt

SEQ ID NO: 783044 - DNA, 95 bp, Homo sapiens
gctggaggtactgagaggatggaaatcagcgcggagttaccccagacccctcagcgtctggcatctggtttggttttcagataggagttaggtat

SEQ ID NO: 783045 - DNA, 90 bp, Homo sapiens
aagcctataatatttgtcacctgaactacttcacattttccccaatatatggcatgctgcttgcagggtttctcatcagaaatatcccag

SEQ ID NO: 783046 - DNA, 50 bp, Homo sapiens
cacaactccagtgctaactcaacagatctgccgacaccccaggccatcga

SEQ ID NO: 783047 - DNA, 129 bp, Homo sapiens
ctcaatgttctcgatgccaatctctgcttgaaaggagaagacttggattctcagattctgaagaatatttctgtgtaaaaagaattttctcagggggagatcaaagcttttcacattactctagtcccc

SEQ ID NO: 783048 - DNA, 74 bp, Homo sapiens
gggaagagaccctgcaaagatcctgggagaccaagatggtggtggcctggggcaccggccaggtgggcctcggt

SEQ ID NO: 783049 - DNA, 74 bp, Homo sapiens
cttggctcaaggactcatactacactttcttggtagagagctatgccaagaccaagacgagagccgaggtgcgg

SEQ ID NO: 783050 - DNA, 74 bp, Homo sapiens
ttatcagatcaaccaccaaagtgggaaacattgaaatcaagtctattgcgtctgcagacatggatttcaaccag

SEQ ID NO: 783051 - DNA, 80 bp, Homo sapiens
agggcttaactcatatatttaacccccctccaaaaagaagagtgacccagtcccagccatgaccactcctgagaaactct

SEQ ID NO: 783052 - DNA, 100 bp, Homo sapiens
caggatcggaagcctgcgtaactttctcccttgatccgggagtctttccactgggatttaagtgccctgtatgctcaaaatttgtatcctcagatgaaat

SEQ ID NO: 783053 - DNA, 100 bp, Homo sapiens
aattaattacacaaacccttcacagactgctctgctgtgagccgtgagctttgaggcggtgggatgtgtcagcagaatgtctcctgcccccgagagcgac

SEQ ID NO: 783054 - DNA, 104 bp, Homo sapiens
gtcagtcctgcagagccctctcttcagtcagattctgagccttcagacttctgtacagcagctgaaagaccagattctggacaatcaggaagtccaagccacaa

SEQ ID NO: 783055 - DNA, 100 bp, Homo sapiens
tggaatttagaagattagttctgaattacaagcctccatcaaatgctcaagatttaccccgaaaccaaaagatgtggccgtcttgtatatcatcttggtt

SEQ ID NO: 783056 - DNA, 100 bp, Homo sapiens
ctcacccgcctctacaacatcaagaagggtgacgcagacttacgatgcaggtgcttgtatctacttctattttgcctttaactacaggggaattagtgac

SEQ ID NO: 783057 - DNA, 75 bp, Homo sapiens
ggcttaacccaggcatttggagggtttctcatttggcctggcaacaagcagtggtggtttggtggtggatgtgac

SEQ ID NO: 783058 - DNA, 100 bp, Homo sapiens
gcccggacatctgctttatatttctctcagaccattcccatcagtgagcattacaggaaggagctcattgccaagttagatcaggcagaaaaggagaagg

SEQ ID NO: 783059 - DNA, 83 bp, Homo sapiens
ctggtcttgctcggccgatgaagtgcagaggtttttttctgggccgcgatgggcctcttggaacattggtgtgttcatctgca

SEQ ID NO: 783060 - DNA, 97 bp, Homo sapiens
gctgctgctccggccgccggcgacgcggggtagtgggcagcagtcagtgacaggtgtaacctctgtggatgacagcaacagttactggaggatacgg

SEQ ID NO: 783061 - DNA, 90 bp, Homo sapiens
ggagcaattgcactcatcattggctttggtatttcagcccagtcagaacaatggtccaggataacaaggatgggacatactacatttcct

SEQ ID NO: 783062 - DNA, 75 bp, Homo sapiens
ttccggatcaatccagatggcagccagtcagtggtggaggacttgattattcttagaaatgcacttgacctgctt

SEQ ID NO: 783063 - DNA, 50 bp, Homo sapiens
ttgctccataggcttacattagggatagctgggagtatggccaccctgct

SEQ ID NO: 783064 - DNA, 75 bp, Homo sapiens
gtgattctgggagcagcagtctttctgatatctaccaggaactgttcaagaaggtggtgccctaccactgcctgg

SEQ ID NO: 783065 - DNA, 97 bp, Homo sapiens
ttctcctctgttactacagcaacagtctgcgttctgtggtggggataagcagacccttccagttaacaagcacaagccctggctggagcccacctac

SEQ ID NO: 783066 - DNA, 74 bp, Homo sapiens
agaataagagactggacgctgtgagatataacttccccaagtcacacagtggtatcagagctaagaatgggacc

SEQ ID NO: 783067 - DNA, 100 bp, Homo sapiens
agtcagcccgtcttccttcccctcccttgcatgatggaaacaccatggctgcggcggcccagctctctctgacacaggaatatgatgaagaatgggctaa

SEQ ID NO: 783068 - DNA, 100 bp, Homo sapiens
tcaagccctaccactgctcctactgtgataagtccttccggcagctctcccacctccagcagcacaccaggaacgtcaaggtcgtgggaaataaaaggca

SEQ ID NO: 783069 - DNA, 100 bp, Homo sapiens
gaataaagctgttttggaactgtcaggtacctcaaagcgcagaaataaaacgtcttcaagaagccaataaggcagctcggaaggaaagacagctgattct

SEQ ID NO: 783070 - DNA, 98 bp, Homo sapiens
accttccctgcgaacttcagaggaacttccagctgatgcgagagctggaccagaggacggaaggaaggttgtgcaggaccagcgttccctgtgcaggc

SEQ ID NO: 783071 - DNA, 100 bp, Homo sapiens
gctcgatctaggttctgcggcacgggatggcggaggcgcctcctgtctcaggtgaccagaagtcagcagcttcccagaagccccgaagccggggcatcct

SEQ ID NO: 783072 - DNA, 51 bp, Homo sapiens
agatcatgggactgataaattgataaacaacttgatgcagatgtttccccc

SEQ ID NO: 783073 - DNA, 101 bp, Homo sapiens
ctggtgttgtcctatcgacccagctggatcgtgtaaccagtctatgggaagtgagagagacaagagagacacctccaacttcgacaaagagttcaccagac

SEQ ID NO: 783074 - DNA, 82 bp, Homo sapiens
gccggacgggcactgggcgactctgtgcctcgctgaggatgtgaagttcatttccaatccgccctccatggtggcagcgggg

SEQ ID NO: 783075 - DNA, 138 bp, Homo sapiens
ctgctcgatcttacccagaggaagctgtaccgagatgtcatggtggagaacttcaagaacctggttgcagtggaatttcgctaaggagtttgtgatcagtgatcggaaggagctggaggaagatttcatcaagagcga

SEQ ID NO: 783076 - DNA, 82 bp, Homo sapiens
tcagctccgagtccagggcgagccactcatctctgcccagctgctgccctccccaggaggcctccatggcttcacctacctc

SEQ ID NO: 783077 - DNA, 96 bp, Homo sapiens
tcctcctgtgttccagttaataaagcatctacaaatgaggcagcctggggcaggagacttgaatgaaaattctgtggagaatcttcagcagaaaac

SEQ ID NO: 783078 - DNA, 60 bp, Homo sapiens
cttgtacattgggcagaatgccttcagaaaacgatgtgttcagagcaacattgttttgtt

SEQ ID NO: 783079 - DNA, 80 bp, Homo sapiens
cgtcggacccatggtttccagtgcagcgcggagtgggcgatgccagcgtgccaggtacatgtcccagagcaagcacacgg

SEQ ID NO: 783080 - DNA, 83 bp, Homo sapiens
tatactcaattacacttcgactctcaaagcaataccaggatagctgttgtttcagagaaagggaatgggtactgttcaaaaag

SEQ ID NO: 783081 - DNA, 90 bp, Homo sapiens
tacaaagatgctctgcggtttttgggctgtgttgacatcaaggatctaccagacgcaaacatgcagatctttgtgaagaccctcactggc

SEQ ID NO: 783082 - DNA, 100 bp, Homo sapiens
gatcatgatgtttaagaacatgacgccgtcacccttcctgcgattctacttagacctgcttttttaaaggctgcagaaaacttcactcttttggttaaga

SEQ ID NO: 783083 - DNA, 75 bp, Homo sapiens
cagatgtacatagatgatttaccaatatggggtgagctgatcaaccttgccatgtactgtgagaggataaggagg

SEQ ID NO: 783084 - DNA, 100 bp, Homo sapiens
ccgcagcgcgaacatggacgccgtcaacgccttcaaccaggagacatttatgcagtgtgtgattctttctaaaacaactccctggaagagaggacattta

SEQ ID NO: 783085 - DNA, 82 bp, Homo sapiens
ttcgcccggctttgcagcggggacttcggcggcggcgcctcaggcacctcggcccgggtgacttaagagattaaaattaatt

SEQ ID NO: 783086 - DNA, 97 bp, Homo sapiens
tcttgatctatatccatagattggaatattggtgggccagcaatcctcagacgcctcacttaggacaaatggatcctgagcttgaaaaaaaactgaa

SEQ ID NO: 783087 - DNA, 98 bp, Homo sapiens
acgctctgcaggggatcctctctgctttcctgtacaaaattggacagctgtacatgatcagcaaacacagccatgaacagagtgaccggggagaaggg

SEQ ID NO: 783088 - DNA, 97 bp, Homo sapiens
ggagacccatctggactaccaaggagaagctatagactacttctactccaccaggaaggttcttcacgtacggtaattttccattagaacagcatct

SEQ ID NO: 783089 - DNA, 103 bp, Homo sapiens
gagagcgccctgagagaacagggtggccgcttggtccaggctggcagtgatggtgaaagcataggaaactgccccttttcccagaggctcttcatgattcttt

SEQ ID NO: 783090 - DNA, 75 bp, Homo sapiens
gcagatggccgtacgtgtgaagccctgccataggacaggctgaggctgagtctcagtgttgccctgttcagtctg

SEQ ID NO: 783091 - DNA, 100 bp, Homo sapiens
cccgtcctgtagctttccggctctgttggacagtgatgtgaagaggttcagctgtcctaatcctcactgccgaaaggcccctgggggagaagaagacggg

SEQ ID NO: 783092 - DNA, 100 bp, Homo sapiens
cgtgggccgcgacaatggccggtagaacatctgggaggtcccttgctgaccactggaagaagatgagctcgagctattggagtgagacgagcagcagcag

SEQ ID NO: 783093 - DNA, 114 bp, Homo sapiens
gcgctttcgcttggcgctgggcagcttcgtggaggagtacaacaacaaggctgaccggttccctgatgtgttacctgcttctgctactgatccaaactgcagaacttctcattc

SEQ ID NO: 783094 - DNA, 75 bp, Homo sapiens
caggcggagcgctacgacgacatggcctccgctatgaaggcgaagatggcagtgaacgtatactcaacgtcagtg

SEQ ID NO: 783095 - DNA, 90 bp, Homo sapiens
gaagatcttcaaatgggcattcacaaggttggccttggggaggcactattagaggctgaaactattgaagaacaagaatctccagtgaac

SEQ ID NO: 783096 - DNA, 101 bp, Homo sapiens
ccgggctcggggcctccgcagcgacaacatggaggccgtgaagaccttcaatagcgagatgatgaaacatgcttggaataattataaaggttatgcctggg

SEQ ID NO: 783097 - DNA, 51 bp, Homo sapiens
aagaactgagattggaatatttaatggagaggatgaagatcagtatgagca

SEQ ID NO: 783098 - DNA, 100 bp, Homo sapiens
caatgagtggcacacagtctactatcaccgacaggttccgaggcctcatcctgctgctgaccttcctaatttacgcctgctatcacatgtccaggaagcc

SEQ ID NO: 783099 - DNA, 74 bp, Homo sapiens
gatgaagcagcaagatgtcatctatgcaattaccagctctggctgggtcgccacaacttgtttgacgacgaaaa

SEQ ID NO: 783100 - DNA, 100 bp, Homo sapiens
gcgtttcggtccggacctattcctgctagtgcaggcctccaggaacctacaagcagcaattggcgcctattatgactttgagagcccaaacatcagtgtg

SEQ ID NO: 783101 - DNA, 73 bp, Homo sapiens
cggaaaccccttcgcatggcagccggttccggttcggaaagggggctgtatacagctttgatccagtagggtc

SEQ ID NO: 783102 - DNA, 95 bp, Homo sapiens
cttcatctgcgatggacagaataactgtcaagacaacagtgatgaggaaagctgtgaaagttctcaaggaataactcaagtcacctgtactggaa

SEQ ID NO: 783103 - DNA, 75 bp, Homo sapiens
gctgtgtcacgctactactttgggtgctgtgaaatgcaagagtgatagattcgtgtggcctttcaaatgattgtg

SEQ ID NO: 783104 - DNA, 100 bp, Homo sapiens
agaaacctcagacagatcgccggggaggcagcgcgggatcccagcctcaggcgtgcgcggacggtgtgcggctgggagaaccaccacagacgacgagcta

SEQ ID NO: 783105 - DNA, 97 bp, Homo sapiens
tgaagaagaatctttttggctgttagatgctcttgttggaagaatactaccagctgtcttttggggagacattgccttagatgaagatgacttgaag

SEQ ID NO: 783106 - DNA, 59 bp, Homo sapiens
gaggccttgcggaaccaccagacgccccggattttgtccacagctgggaagtatctatc

SEQ ID NO: 783107 - DNA, 97 bp, Homo sapiens
gtacaacatcacttcttctgtttgcagtgggactgctgagatgtcctctattcttgaagagcgtattcttggagctgatacctctgttgatcttgaa

SEQ ID NO: 783108 - DNA, 148 bp, Homo sapiens
aatcaaactctggaaggtggctctgcatttttgggatcctccagcggaagaaggatgtgatttgcaagaaatgcacaaatcctgaagagcccgtgggcgtggactgctcatctgtaaagaaagtggagacatgaccttgagatttggc

SEQ ID NO: 783109 - DNA, 100 bp, Homo sapiens
cccggaaaagggcactcgtctccgtgggtgtggcggagcgcgcggtgcatggaatcaagagagacccggccaaggcttttgtgcccaggactgttatgat

SEQ ID NO: 783110 - DNA, 82 bp, Homo sapiens
agggaatcaattccacaagctggggtaagtaaggaggtctctgtaccatggctcgtacaaagcagactgcccgcaaatcgac

SEQ ID NO: 783111 - DNA, 82 bp, Homo sapiens
ggaacctgggcgagcagcggcgggggcccgagggactgattcttgctattccaaatcctcttccacgttgacagcccttcag

SEQ ID NO: 783112 - DNA, 51 bp, Homo sapiens
ggagactcagcagaaggtgcagctgcaagctttcttcctggtggcagatga

SEQ ID NO: 783113 - DNA, 100 bp, Homo sapiens
atgctcgaggatgctgtccaggtgggcggccgcgggcgcgatgcggcactgcagcaaaacttagagagtaacctcaccaaccttattaagaggaacacag

SEQ ID NO: 783114 - DNA, 100 bp, Homo sapiens
ggcggagacagtgcagggaagagagaccttagaaaggatcaggactggcgggaatttgctcgccctgatacatcgaatgatagagtttgttgtacgtgaa

SEQ ID NO: 783115 - DNA, 89 bp, Homo sapiens
gcagctgcaatatttaattcagcctttggaagttttttgatgttagtaggcaggaagaggcggagggagagctcagtgaaggagaacac

SEQ ID NO: 783116 - DNA, 74 bp, Homo sapiens
ctgtgaatgtgtttgctctcatgaacatgcaatgagaagactgatcaatctgagggaatctggaaaaattgcaa

SEQ ID NO: 783117 - DNA, 46 bp, Homo sapiens
gaggccgaggtgggcggatcacgagccaaactgctctcagtataga

SEQ ID NO: 783118 - DNA, 96 bp, Homo sapiens
gagcgcgctcgctccggcgccggcctcgcctcctcgcagcagcgccatgacatgcaagaaagcacttcagccaagcagaagggagccagctggacg

SEQ ID NO: 783119 - DNA, 100 bp, Homo sapiens
ctatcaggacatggagtatgaaagacgatgaagactggcccatttgcagagcactccaaccagctgtggaacatcagcgccgtcccttcctggtccaaag

SEQ ID NO: 783120 - DNA, 90 bp, Homo sapiens
ccgagacacaccaggccggcaggctgagaaaagcgagaccgcgtgcgaggaccggccgagacgcatccagagctttcgtgaccggggact

SEQ ID NO: 783121 - DNA, 96 bp, Homo sapiens
ccacctgcacgacgcagatagcatcagcagcattgacagcacctccagaagccagttgagggaagttctccatgaatgtacgtcacaatgatgatg

SEQ ID NO: 783122 - DNA, 74 bp, Homo sapiens
gaggatatcgtgtctggagcagtggagcccaaagacccctggagacatggtgatgtgtccaatctagatcccaa

SEQ ID NO: 783123 - DNA, 90 bp, Homo sapiens
agcaggaagctgcggctgagtcgcaggtcaatggccagcaaggaggggggtccgagccggcggcggcggcggcagtggtggcagcgggag

SEQ ID NO: 783124 - DNA, 101 bp, Homo sapiens
atctgcacttcgcattttggcattgacatttaattttagggtcctttatatagaagggagagtagatgatgaggagtctgatgaggaagctgtgaagaaaa

SEQ ID NO: 783125 - DNA, 83 bp, Homo sapiens
agaactttggacagcagcccattttcgtttttctcctgagtactagggcagcttcttggacacttaatgattgttggcaagaa

SEQ ID NO: 783126 - DNA, 100 bp, Homo sapiens
ggttggtgtgattagcttcgcagtctggaaagctttaggagttcacagtgtagagtggaacccccagctattagaggtcccaccccaaactcagtttgat

SEQ ID NO: 783127 - DNA, 82 bp, Homo sapiens
tccactaactggggctacgactctgatgggcaggagcacgtgaattgcctctgcttacgttcaggccctgtcctaaacccag

SEQ ID NO: 783128 - DNA, 100 bp, Homo sapiens
gtggactctgagtgacagacaaggtatacagaccagggcggcgaggaggaggaggactatgaaagtgaggagcagttgcagcaccgcatcctgacggcag

SEQ ID NO: 783129 - DNA, 75 bp, Homo sapiens
ggaacccgaagaagaaaggattcgttacagccagagattgttttttgtagcatcagatccaacagttaaaacaga

SEQ ID NO: 783130 - DNA, 104 bp, Homo sapiens
cccagcctgcacctcaagctcctcagcgtggtgcccgtccctgaaggccaggcctcatggggcgtctccagtccccaggacgtgcagggtgtgaaggggtcttg

SEQ ID NO: 783131 - DNA, 75 bp, Homo sapiens
cgctgggaggccgagcgcgccgagttacaggacaggctgcgggaggagctgcaggactgaggtacagaggccagg

SEQ ID NO: 783132 - DNA, 77 bp, Homo sapiens
aggaatgggcctggcctgtgggcagattgtgcttgagaacagtagtcgagaagacaagcatgaatgtccctttggcc

SEQ ID NO: 783133 - DNA, 100 bp, Homo sapiens
tatctacaagggggtccgcaagatcaggatcctcatgaccagccaaagagaagaagaattaggaagcataaatcaaagaaaaaatttaaaaatcccaata

SEQ ID NO: 783134 - DNA, 100 bp, Homo sapiens
gctcagcaagaactgattaccgagccattcaactagccaaggaaaaaaagcagagaggagcggggagcaatgcaggtggctttctagaagatgaccatag

SEQ ID NO: 783135 - DNA, 98 bp, Homo sapiens
tggaattaccttcactctgggaaaaggcactgaagttgattgcttgtcttactcagctttgcaagtcctatcccgaaggtgctatgggaagcagagat

SEQ ID NO: 783136 - DNA, 90 bp, Homo sapiens
gggaaaagtttcgtccaaatactggatgctttgagccgtttgtcttatatttccctgattacagcatagctttcatacagagatgaccag

SEQ ID NO: 783137 - DNA, 80 bp, Homo sapiens
aaggattccaagtaactcttatttggtggatttgacatggaagtgaaaggttggggtggagaagatgttcatctttatcg

SEQ ID NO: 783138 - DNA, 82 bp, Homo sapiens
ctcctagtctggaaaaacgactaccggcagctcgagaaggagctgcagggccaggtgaaatgacaatggatgctctgttggc

SEQ ID NO: 783139 - DNA, 75 bp, Homo sapiens
ggagataacagtcatcaaacatggaaacctttgagttgaatgagccacctagaacagtttcaggcagatataaaa

SEQ ID NO: 783140 - DNA, 74 bp, Homo sapiens
ggcccaggtcgccgccgcggcgcgaaaattcttccaggaggaaatacatcatttgatgtagtttttcttgcaag

SEQ ID NO: 783141 - DNA, 100 bp, Homo sapiens
cctcggaagttgctgatgaacctcctaccctcaccaaggaagaaccagttccactagagacacagtttgaaggaggagtttcctgcctggtatgagaagc

SEQ ID NO: 783142 - DNA, 82 bp, Homo sapiens
gcaagcgggagtcggggatagtgtcatcggttcgatgggcactctggttttttaaaaatgataaaagcaaaacttggcaagc

SEQ ID NO: 783143 - DNA, 83 bp, Homo sapiens
cgacgttccatctgtggaaggacctaccaaccagagcccacaggcggttttgtgagctgcttccccaggagcagcggagcgtg

SEQ ID NO: 783144 - DNA, 75 bp, Homo sapiens
gcgacattgacaatgatggctttgaaggcccagtctgactctgtctgtaatacctgattgcattggagaactcta

SEQ ID NO: 783145 - DNA, 50 bp, Homo sapiens
caggaggaaaggccagactcacagaagatactaatggaccatactaccaa

SEQ ID NO: 783146 - DNA, 98 bp, Homo sapiens
tggttcgccggctcctccaatgtgggcatcaacaggtggcgagatccgtgctcagctcacagagcagatgaaatgcctggaccagcagtgtgagcttc

SEQ ID NO: 783147 - DNA, 82 bp, Homo sapiens
ttcgagaacgaccccgagacggcctctccatattgctgtggtgcagggtaacctgccagctgtgcaccggctggtcaacctc

SEQ ID NO: 783148 - DNA, 95 bp, Homo sapiens
gcaaggtcggcagagcaaggggcttacgcagaaggacctggccacgcttcctgggtctgcaggtccagccggctggcaccctccatgtacccagg

SEQ ID NO: 783149 - DNA, 75 bp, Homo sapiens
tccctactacgatgcaatcctgagaactcctcctcccacatctgatggagctaccaatcatcagatctcctctgc

SEQ ID NO: 783150 - DNA, 71 bp, Homo sapiens
atgctgcgaaagctgccaaaagtgacatgcaggtacgggaaaaacactcttggcacgagccgttgctagcc

SEQ ID NO: 783151 - DNA, 75 bp, Homo sapiens
gctgctgtggtcattgctggtcatctttgtcagtgctagatgagatgatggtggaacaaacggatcttgtgcgct

SEQ ID NO: 783152 - DNA, 100 bp, Homo sapiens
ttctccagtcagcgtcagagttggaggcctcaattttaaagaaggcaaagccatggtcatcgttgcgggaccatcagcacgtgcccatcgacatccagac

SEQ ID NO: 783153 - DNA, 82 bp, Homo sapiens
gggaacctactgtggggccgcggccggaccgagcgcctcgacctcggtctgaggtcttcaggtcaagttactcttggagatg

SEQ ID NO: 783154 - DNA, 82 bp, Homo sapiens
tgggccgcttcttcctctaccacatccacctgtggatcactggtaggtgagtgctgtcctcggctcactttcctcaagctct

SEQ ID NO: 783155 - DNA, 74 bp, Homo sapiens
gattgaactcagagaagccggggtacacttcatgttggtgatgaaattcgagaaatcaatggcatcagtgtggc

SEQ ID NO: 783156 - DNA, 100 bp, Homo sapiens
agtgacatacctgccaggcccattgtgtccatcgctctcagagcagctggggattgtggaaaccacccctactcctaatcccccgactacagaagaggag

SEQ ID NO: 783157 - DNA, 83 bp, Homo sapiens
gcctcagttggaagcagccgatccagcctgcggagcctgtggggcaggaaggaatcgtgtctcctagtgacctggaccttgtc

SEQ ID NO: 783158 - DNA, 100 bp, Homo sapiens
gttgacattgacctgtatcactgtcccaactgtgcagttttacatggttcctccttgaaaccttatctgcattagctcactggtctgtcatttttagtga

SEQ ID NO: 783159 - DNA, 109 bp, Homo sapiens
atatcagacaccgagcttcagcaagctctctccaacggtgaatgaaaactttgccattgatttgatagcagagcagcccgtgagcgaggtggagactcgggtgatagcg

SEQ ID NO: 783160 - DNA, 80 bp, Homo sapiens
ccagcatgtgttggctgttgacccagaaaaggcggcccagatgaaatcccaggtgacgtgctagtgatggatgagctggg

SEQ ID NO: 783161 - DNA, 100 bp, Homo sapiens
tcacagactgaactgctcccgagaggaacagatggagtcggataactgttcaggaggagatgatgactggacccatctgtcttcaaaagaagtggacccg

SEQ ID NO: 783162 - DNA, 80 bp, Homo sapiens
atccagcctgcggagcctgtggggcaggtcggagcagagcatggacatgggaacgagtgctctcagcaagaagccgtggt

SEQ ID NO: 783163 - DNA, 75 bp, Homo sapiens
ttttggtggaaagtttcattgtgtatgtagaagaccagaagtggatggagagcagtataactccaactgtggaac

SEQ ID NO: 783164 - DNA, 75 bp, Homo sapiens
agataactgggcccctgcgctcaggaggccttcaccctctgctctgggtaaagctaacaacctgagagaagatta

SEQ ID NO: 783165 - DNA, 101 bp, Homo sapiens
ctgaggacctccttgactccttccttagcaacattctacagggaaagcggcgttatgacaggaagcagagtggctatggtgggcaaactaagccgattttc

SEQ ID NO: 783166 - DNA, 100 bp, Homo sapiens
aagtggcagacccacggttcattggattttgcattcagaaaggagcagactgtggagcaaaggtggtagaggacattgaatacctgaagttcgataaagg

SEQ ID NO: 783167 - DNA, 74 bp, Homo sapiens
ggggggttccatctcccaacttgtccatagactttagaagacagctttccatcgacactaggccctttagacca

SEQ ID NO: 783168 - DNA, 83 bp, Homo sapiens
aaacaaaagaccaacccttgagggaagagaattatctctaagtactactataattccttgacccagcagtacctttactggga

SEQ ID NO: 783169 - DNA, 75 bp, Homo sapiens
tggaacttcatcatcatctacttcacaggaattgccatttgatgataatgaagataattcaaatgatgggaccca

SEQ ID NO: 783170 - DNA, 101 bp, Homo sapiens
aagacggccgggatgagggggaagaggaggacgccgtggatgccgcctccgcatggattccgtgaaggaacaacacctaaacccaagagggcagctgttgc

SEQ ID NO: 783171 - DNA, 50 bp, Homo sapiens
ttaaacaagagatttccacagaagggacacttggcattcagggacgtggc

SEQ ID NO: 783172 - DNA, 75 bp, Homo sapiens
gtctctgcacctcgcgccccagcagcaaccccaaggtccaggtggaggccatcgaagggggagccctgcagaagc

SEQ ID NO: 783173 - DNA, 100 bp, Homo sapiens
ttgaagacaaggcggccccgctcccgggttcctctgaggattggaattctaggccaggagtggtggctcacacctgtaatcccagctctgggaggccaag

SEQ ID NO: 783174 - DNA, 98 bp, Homo sapiens
aaggaggcagctctggcctctcagcagatcatgtttgagaccttcaacaccccagccatgtacgttgctatccaggctgtgctatccctgtacgcctc

SEQ ID NO: 783175 - DNA, 100 bp, Homo sapiens
agctatcaggggaagatatgcatcagttccatcgagccattactacagatgttgatgttagtgaagattcacctcctcccctacctgaaagaactcctga

SEQ ID NO: 783176 - DNA, 96 bp, Homo sapiens
ttatggaggtgtctgtaactgagattccacctgctcctacgaagcccgactttgatggtcctcgagagaagatgcagaaactgggagaaggtgaag

SEQ ID NO: 783177 - DNA, 75 bp, Homo sapiens
aaatatgttcaagatggctaaaaattggagtggctactgcagcactggggtgtcagttgttggtccgacccagaa

SEQ ID NO: 783178 - DNA, 83 bp, Homo sapiens
atttatctataccacaagcaaccacatcaaatatgctgtcaccactggatgatatcatcaagttgaatcgaaaggaagggaag

SEQ ID NO: 783179 - DNA, 75 bp, Homo sapiens
tagacttcaaccagcctttggtcatcaccaggtggtacaggagctgcagcaggccatctccaagctggaggcccg

SEQ ID NO: 783180 - DNA, 100 bp, Homo sapiens
ttccatttgaagggggaagtctcttgcaaattccagtcaaggccctaaaatataggcaccttcttactgagatacgtaatgagaagtttcgattatacaa

SEQ ID NO: 783181 - DNA, 96 bp, Homo sapiens
ctggtttgtggcaggctctatggcctgcaggaagcgctggaaatagccagagagatgcatttgagacggagttggcttatctctcaggaaatagac

SEQ ID NO: 783182 - DNA, 100 bp, Homo sapiens
gtccttgcattacatggaccaagaacacttcacaggactcagagagtgtctgtagtgggaagtcttcatgagctcagttggccatatttctgtacctgga

SEQ ID NO: 783183 - DNA, 100 bp, Homo sapiens
gcaagttcttctacagccccagttatgtggacgagctgttaaaccaggattaacacagattcctcagatccagaagactgaaatttcctttcgtcctaat

SEQ ID NO: 783184 - DNA, 75 bp, Homo sapiens
agagactgctgagcccgtccgtccgccgccaccacccactccggacacagtttggtgccctggttgtcagatgtt

SEQ ID NO: 783185 - DNA, 83 bp, Homo sapiens
atgtgaaaatgaagccagaccgagactttcaaacctctggttgaaagaaatatacccagttcagtcactgcagtagaattcct

SEQ ID NO: 783186 - DNA, 75 bp, Homo sapiens
gacgatgatgatgaagaggatgatgatgaagatgttttagtgacccacacagatgcggtaaaaatttcagatttt

SEQ ID NO: 783187 - DNA, 90 bp, Homo sapiens
gatgatgcggaaattaaccccaagcacttgcacctcctgcgccgccgccccccatccaaggatatgccttcaagcctccacctagacccg

SEQ ID NO: 783188 - DNA, 101 bp, Homo sapiens
tgggatcaccaaagcctgccgggagctagaactcaaggtgcccctggtggtccggcttgaaggccctgaagaggaaagtgaggatgactctcatctcgaag

SEQ ID NO: 783189 - DNA, 83 bp, Homo sapiens
ctgagctattgaacaagacagacaaccgccccctaaagaaactggaggcccaaggtcctgggcacgaatcatccagatgtggc

SEQ ID NO: 783190 - DNA, 82 bp, Homo sapiens
cccagcccctccaaagatttactttcccatccgtgactcctggaatgcaggacagagcgggatgccaccagcttgtccaaag

SEQ ID NO: 783191 - DNA, 51 bp, Homo sapiens
atgcacgtacagaatacattcagccgtcagctacattattgagcagggggt

SEQ ID NO: 783192 - DNA, 98 bp, Homo sapiens
gccagggaagctctagaggcgttttttggccaagggcctctctacatatgacatcgtgatcactacctatagcctcgtggccaaggagattcccacaa

SEQ ID NO: 783193 - DNA, 82 bp, Homo sapiens
tgtatgattaggccacaatcttcaatgagtaaacatattcctggcgcggatggcgtcggggcgccccgaggagctgtgggag

SEQ ID NO: 783194 - DNA, 83 bp, Homo sapiens
gtagaagacgaagtcaacagtggagtgggccaggtgatggcaagtgtgtgatttgtgactcctatgtgcgtccctgcactctg

SEQ ID NO: 783195 - DNA, 83 bp, Homo sapiens
tgcggctgcgtggggctcggccgcgcggactgaaggagactgaaggttttaaaatcaaagatgggaaaatcggagaaaattgc

SEQ ID NO: 783196 - DNA, 100 bp, Homo sapiens
acactcagcatggctaacgcgggatcaaatactaatggatcccagtttttcataacggtagtaccaacgtttaagcggctgcagggcaagaggaaccgag

SEQ ID NO: 783197 - DNA, 85 bp, Homo sapiens
gttctctctcgaccccttctgcccggcgcttcggcccgggccgctcaggtgcagtgctgaagctgctgaaagatggcagaagaag

SEQ ID NO: 783198 - DNA, 83 bp, Homo sapiens
gggcgccccacgggccgaagccgcattttgaaagcgaagcagaagccgtagaatcagcggcgagcctgttgaaagaacccaca

SEQ ID NO: 783199 - DNA, 90 bp, Homo sapiens
aagtcatggaactgaaaaagcactgactgctctgcttaaagtcgtgtcccaaatgcgaacatcctcgtgcttacttcatgcagcttcaga

SEQ ID NO: 783200 - DNA, 82 bp, Homo sapiens
ccggcggcggcgcgcagcgtgtcaggcggagagacccgccgccaggtgacttaagagattaaaattaatttggttgctgttg

SEQ ID NO: 783201 - DNA, 98 bp, Homo sapiens
aagaaacactggcttctctccttcagctccaggctagatacccattgacaacatgaccaatgagatggagcaaagggttgaacctcataatgattact

SEQ ID NO: 783202 - DNA, 136 bp, Homo sapiens
gccggtggagcagctgggctcggcgctgaggtttcgccctggctacaacgaccccatgtcaggcagagcatcctggccagaacaagccaaggagccaagacgagagggacacacggacaaacaacagacagaagac

SEQ ID NO: 783203 - DNA, 75 bp, Homo sapiens
ctggcatacagatgccgtgtttgtaaggatttaagtgccctgtatgctcaaaatttgtatcctcagatgaaatgg

SEQ ID NO: 783204 - DNA, 75 bp, Homo sapiens
tctgcattggtgctaaaagtttcttggatcacatttttattagctaaagttcaaggagcagggacaagttacagg

SEQ ID NO: 783205 - DNA, 83 bp, Homo sapiens
gcctccgccgccgcctgaggaggcgagctagccgggagttacaccgccaccgccagaactcccccactggaaaggattctgaa

SEQ ID NO: 783206 - DNA, 100 bp, Homo sapiens
atttgagggccttttctcttcctgcttcatctctaaaggtccttctaggagagaggtgaaagactactgtcagaggatgtaggaatggacatcccctttg

SEQ ID NO: 783207 - DNA, 100 bp, Homo sapiens
cggctcccttcgcctccaggatgcgctgagccctacaacacccccagcggccgccggctcccccacgagatgtagaggactcaagtcagagaccagatca

SEQ ID NO: 783208 - DNA, 128 bp, Homo sapiens
aaactaggaatctatgatgctgatggtgatggagattttgatgtggatgatgccaaagttttattagttgttgacctcctgtactggagagacattaagaagactggagtggtgtttggtgccagcct

SEQ ID NO: 783209 - DNA, 100 bp, Homo sapiens
caagcaccgccgggcccgcttcctgcacgaaaccggcctggctatgatttatgttttctggatatgccgcagaaggatccgtgccagaagcaagcctgtg

SEQ ID NO: 783210 - DNA, 100 bp, Homo sapiens
gggcggctgttcagcagaagaactcactgcagagcgagtctggaaacctcccactgtggctgcataagagacggaacctcactatgttgcccaggctggt

SEQ ID NO: 783211 - DNA, 75 bp, Homo sapiens
catttggaccagaaaaattcagattcttgttggatctagccttggagggtggcttatgcttcatgctgcaattgc

SEQ ID NO: 783212 - DNA, 75 bp, Homo sapiens
tggagctgctgaatcctgcccgcgtgaaccacatgcccagcacggttactccacaggatccgctgaacataggat

SEQ ID NO: 783213 - DNA, 127 bp, Homo sapiens
tggccgccgcgccaccatctttcgggctgccgagggtgttcttgacgattaatcaacaggctcaggctgcacgaagaaaaggttattaaagatagacgtcatcatctcaagacctacccaaactgtt

SEQ ID NO: 783214 - DNA, 100 bp, Homo sapiens
tcaacttcctgaaaaatggtattgctccaataaccctgacccacagttcagatggtcagtaggacagaaggtaacattgatgactcgctcattggtggaa

SEQ ID NO: 783215 - DNA, 100 bp, Homo sapiens
aaaatgcagtgggattggagataacccaggcagcgcttcctcccatcaacacagtcggcggagacaaggttggctaaaggagatccgaaagcttcagaag

SEQ ID NO: 783216 - DNA, 74 bp, Homo sapiens
ggaatttgtggaggattttattcaggttcctaggaatctcgttgtgttctaagaacggaagcatctgggctgga

SEQ ID NO: 783217 - DNA, 75 bp, Homo sapiens
tcggcctcggcctcggcctccgacacggtttggtgcacctcgatttggaggaagtagggcagggcccttatctgg

SEQ ID NO: 783218 - DNA, 95 bp, Homo sapiens
catttaaaggctttcacttatattaatctggataaagcggttcttgctaacaacctgagagaagattacaaatttcaccacactttcagcacaga

SEQ ID NO: 783219 - DNA, 88 bp, Homo sapiens
cgcgctactctctctttctggcctggaggctatccagcgctcttgtcaggatggtgaagctgttcatcggaaacctgccccgggaggc

SEQ ID NO: 783220 - DNA, 98 bp, Homo sapiens
tggcctcccgagtgattgatcgtgcgattcagacatgatcagccagcgttcagcgggtggccgccctggctctggcccacaactgggcactggccgag

SEQ ID NO: 783221 - DNA, 75 bp, Homo sapiens
ggtgtctcacctttaactctccttatgctgggtgaaaacaaaggttgtggcagcactgcctgaaggtatgagacc

SEQ ID NO: 783222 - DNA, 100 bp, Homo sapiens
gcagcacatctgtggaggatctgccagggagcaaacctgagcctgatgccatttctggtgctgcttacgctcatgcagaagagagtatcaagaaattggt

SEQ ID NO: 783223 - DNA, 100 bp, Homo sapiens
cggagccatgtcagaaggagtggacttgattgatatatatgctgacgaggagttcaaccaggcagtacaagtcccagtttgaagctcaaaagatctggta

SEQ ID NO: 783224 - DNA, 100 bp, Homo sapiens
cggaccgaagacggaccgtgccgggaagagaccctgtacacgtatcctgaaaactggagggccttcaaggctctcatcgctgctcagtacagcggggctc

SEQ ID NO: 783225 - DNA, 83 bp, Homo sapiens
cgaggacatggacctgtacagcatcaactacctgcactttggggagcctaagtcctggttcgtgctggccgtgggcagcgccg

SEQ ID NO: 783226 - DNA, 75 bp, Homo sapiens
tcaactatctcgctgacacgcaggttgaattgaccaaagcaatggtgatggagaagcctagtcccctgctggtcg

SEQ ID NO: 783227 - DNA, 100 bp, Homo sapiens
tgctagcggaggagtttgggaacctgactccggagcagctggcggcgccgatcccgactgtagagtgaatctgaatggtgcctaccctaagctggtgcct

SEQ ID NO: 783228 - DNA, 83 bp, Homo sapiens
ccgggcgctggtctgctcccagccgacagagtttcactcctgttacccaggctggaggacaatgatgtgatctcgggtcacca

SEQ ID NO: 783229 - DNA, 97 bp, Homo sapiens
cttcccatgcttgtcaaaaatcagaggcaactaacactgcggcttcctgaggtgttttcacagtcctgtgtttggtatggagagtgtggaattgcat

SEQ ID NO: 783230 - DNA, 74 bp, Homo sapiens
cgagatcctgcacatgtctttattgttttcagagggaggcaacttttctcctaaagaaatcaattcactgtgtt

SEQ ID NO: 783231 - DNA, 82 bp, Homo sapiens
cgcaaaaggcgcttttcctggagctggtgccggcctcagcagcagttgcaagctcagcatctttctcatggccacggacccc

SEQ ID NO: 783232 - DNA, 96 bp, Homo sapiens
aggtctggtcggatggggcaggatggctgcgttgacacgtcttatttaatccacatcataggacaggaagatgtcacccaagcgcatagctaaaag

SEQ ID NO: 783233 - DNA, 89 bp, Homo sapiens
gttatgatgcccttcgaaaaatgatcaactattgaccatataggctgctctttggcgtaaattgcaatcgattagggatcgtttctcag

SEQ ID NO: 783234 - DNA, 137 bp, Homo sapiens
ggcccggtttccctcggcgtgctactgtgcgctcgatccagcaccatggggaagcgggacaatcgggtggtgctggagaatctggtaaaagcaccattgtgaagcagatgaggatcctgcatgttaatgggtttaat

SEQ ID NO: 783235 - DNA, 100 bp, Homo sapiens
caagtcacctgtactggaaatcagtttgctgaaattaatcaacgattcttgaagttgaagaaaaggtacacagataagctgtttctctccaagttctttc

SEQ ID NO: 783236 - DNA, 100 bp, Homo sapiens
aggatgcagctcagggcgaagtggaagcagagagcccgggccctgtgccgaaagaatcttcaagagggagacatagggaaaaggaagacataaaaatcac

SEQ ID NO: 783237 - DNA, 90 bp, Homo sapiens
accccctcccgcctggaaaactactacatgggcccagtgttcaccatcataccaggggccagaggcgatggcttgcctccatgagacccg

SEQ ID NO: 783238 - DNA, 97 bp, Homo sapiens
ctccaggaccctaaacagatggacagttgatgcatttcaggggagagtcccgtattctcagagtaaaagttgtttctggaattgatctcgccaaaaa

SEQ ID NO: 783239 - DNA, 96 bp, Homo sapiens
gacggcgagatgggcaagcccaggaacgtggcgctcatcaccggtatcacaggccaggtatgagtagaggagaggatgtggagcagagtcttttcc

SEQ ID NO: 783240 - DNA, 75 bp, Homo sapiens
cggaaacccaagagcgccacgctgcgggcggagctgctgcagaagtattagtgacaagagctggggttaggatcc

SEQ ID NO: 783241 - DNA, 88 bp, Homo sapiens
caggccccggcagcgcctgggacaagcgtccgtctccaagagagtatgaagagagtgcgtctgtagggcagggaagatggcggacaag

SEQ ID NO: 783242 - DNA, 96 bp, Homo sapiens
ttcattctactctaaaggcatcgttattaggtgaatctggattgggaaagtcgacattaatcaactcattattcctcacagatttgtattctccag

SEQ ID NO: 783243 - DNA, 100 bp, Homo sapiens
tgagagtccactctggggagaagcccaacaagtgtacggtgctggagaatctggtaaaagcaccattgtgaagcagatgaggatcctgcatgttaatggg

SEQ ID NO: 783244 - DNA, 83 bp, Homo sapiens
attcctcctccttggtcgccgcgtccttggctggcgtattggaaccaaccagatggctgtgtgtgccaaagcacagaacaaac

SEQ ID NO: 783245 - DNA, 83 bp, Homo sapiens
cgagccgggcccacctccccaccaaggaaggttgtgaccgagattcccgacgagagagactgaggggaagagaggaaggaggg

SEQ ID NO: 783246 - DNA, 108 bp, Homo sapiens
agctatatactttggttacctatgtacctgttaccactttcaaaagcggttcaggaccatcatcctccatagccatagcgggcaccaaccaccctgccatcacaaaga

SEQ ID NO: 783247 - DNA, 89 bp, Homo sapiens
tagaaaccgagggagggagagagacagcgatcgagagagaccggagaggtggagagatgtccctggtagatttgggaaagaagctttta

SEQ ID NO: 783248 - DNA, 97 bp, Homo sapiens
catgatcagcagttccatagtttaaagccaatatctggattcattactggacagtgcaattatcaatgaggataatttgccaatgttccatcgttgt

SEQ ID NO: 783249 - DNA, 98 bp, Homo sapiens
tgaggcagcggcaggctcaggtgcagccgctggaacgtatcaatgagtgtgatgagatatgcctttcagttttgtcaactgttttagaggcaatggaa

SEQ ID NO: 783250 - DNA, 75 bp, Homo sapiens
accattgaaaaatttgagaaggaggctgctgagggaggagatatcaccaaacatgatggaacaggcggacagtcc

SEQ ID NO: 783251 - DNA, 100 bp, Homo sapiens
ggagacgctccaagaggctcctcagtgtgggcgagtaaaatgccctgcgtgtgagaagcaggcggcggcggcggcgcccgggagccggagccttcgcggc

SEQ ID NO: 783252 - DNA, 75 bp, Homo sapiens
ctgaagagggaagacacgcggaaacagtacataccgagcatcaaatattaaggcacccggagaacagacagtacc

SEQ ID NO: 783253 - DNA, 83 bp, Homo sapiens
agcaaggggcttacgcagaaggacctggccacggtaatgaacttctcctgacgctggcgcttaagacccagtctcccctgtca

SEQ ID NO: 783254 - DNA, 100 bp, Homo sapiens
ggcgtggccgtcaaggagctggacctctacctggcctacttcgtgcgtgagcgaggtggatccataaagaacccagccaacccgcagagggaggggaggg

SEQ ID NO: 783255 - DNA, 82 bp, Homo sapiens
ttgaagatttgcataaagccaacattcgcaccgtcatggtcacaggaattacatgaatgacagtcttcgaaccaatgtgttt

SEQ ID NO: 783256 - DNA, 75 bp, Homo sapiens
ctggactgatctccatgtcctgttgtggggcttttacagcctttgggcaagaggaggaacgacgtagaagagagg

SEQ ID NO: 783257 - DNA, 144 bp, Homo sapiens
aatatggcatcctaatattagttccgtcacaggggctatttgtttggatatcctgaaagatcaatgggatgcagttattaaatgctgttcttctctcctaagttgaaaatcagaaacttgtggaaaagagcacttgaatgttgg

SEQ ID NO: 783258 - DNA, 104 bp, Homo sapiens
ctgagatttccactagagcttccaagtcattgacaacaaaaacatcaaaacggcgatccaaaaattcagtggaagacttccttgtgaaacctcctagtagaaaa

SEQ ID NO: 783259 - DNA, 75 bp, Homo sapiens
ccggaagatgtgtctgaggtcatctttggacatgtcttggcagcagatgaaacgactacaaagtgccatgacaga

SEQ ID NO: 783260 - DNA, 82 bp, Homo sapiens
cgcggcgctctggctctggctgtgcgcgctggcgctgagcctgcagccggccctgccgttcaaatctgaacatcaatgatgt

SEQ ID NO: 783261 - DNA, 100 bp, Homo sapiens
ctctggccggccttggtgcggcgagccgagcgaggcagctctgagccgcgcggtacttggaaaaatggacaaggattgtgaaatgaaacgcaccacactg

SEQ ID NO: 783262 - DNA, 75 bp, Homo sapiens
ggaaatcctcaatgcctgggagaatggggtcctggccttcgagtccatccaggtgctgggtttgtgcggagccgc

SEQ ID NO: 783263 - DNA, 74 bp, Homo sapiens
tccaatcttgaaaaacagtttaccgatctcaaagatcatcgtcattgaattttgagaagcattctgaaaacttt

SEQ ID NO: 783264 - DNA, 74 bp, Homo sapiens
gaagatggaagagtttgtgtacaaggacataagcagctctatgaccaatagcacagctgccagtagacccccgg

SEQ ID NO: 783265 - DNA, 90 bp, Homo sapiens
tctgaacctatcccagagagcaatgatgggcctgtgaaggtcattcccaaaagcaagttcgtcttggtgaagttcgacacccagtacccc

SEQ ID NO: 783266 - DNA, 75 bp, Homo sapiens
cccaggccccacacctcccagcatcctgcccagccgacgtgggggtaatacgaggaaatagtatcatcatgttag

SEQ ID NO: 783267 - DNA, 51 bp, Homo sapiens
cagagtccgcggccggggcgcgggagatatcagttttagagaatgtggcgt

SEQ ID NO: 783268 - DNA, 98 bp, Homo sapiens
cgggttattcgagtgaccgagaccgcggccgggaccgagggtgcacattcaggttcccgagcacaaacatcaagataacgttcactgccctgtccagc

SEQ ID NO: 783269 - DNA, 75 bp, Homo sapiens
ttggtccgcggcatccgtaaccacaaggaggacgagggctgggttacgacccctacaaccctgagctgcccaagc

SEQ ID NO: 783270 - DNA, 82 bp, Homo sapiens
tgcacacctggatccaggataacggaggctggatgaagggcgccctaatggagatcatccagctcgccagcctcgactcgga

SEQ ID NO: 783271 - DNA, 87 bp, Homo sapiens
tcgcggcgtctccggggaaagccgtggccccgagggcggatccgaggctaatagctcgtcagcttgctaaaatccatgctattcatg

SEQ ID NO: 783272 - DNA, 120 bp, Homo sapiens
cccgggagagcaagccgggcggcctgccccgccggagcagcatcatcaagatgccttcaattaagttgcagagttctgatggagagatatttgaagttgatgtggaaattgccaaacaat

SEQ ID NO: 783273 - DNA, 88 bp, Homo sapiens
attaatactaactttcttcaaagctgcatcatcacaggataaacgtcttgtacccggaggtggagcaacagaaattgaattagccaaa

SEQ ID NO: 783274 - DNA, 75 bp, Homo sapiens
tgacaaaggcagtagatgcttttagtagtgggcagcagtcagtgacaggtgtaacctctgtggatgacagcaaca

SEQ ID NO: 783275 - DNA, 98 bp, Homo sapiens
tgtctcccagcagtcacgcaaacaacttatcagtagtgacttacagtaagtgcatgagcagccgagcctgctaaccgcagctccgcacttgtccatcc

SEQ ID NO: 783276 - DNA, 98 bp, Homo sapiens
atgaagctcctgaagccgacctgggtcaaccacaatgctaaaaatgaagctgatcgtcaggcagaaaaacgagaaattaaacgtcggctcactagaaa

SEQ ID NO: 783277 - DNA, 99 bp, Homo sapiens
acaggagtaaagcgaattgtccaagccctgaatgccaatgtgtggtccaatgtagtgatgaagaatggtctattgaatgatggaactgtgggtattttt

SEQ ID NO: 783278 - DNA, 85 bp, Homo sapiens
aagaagcaaaaaagggactgctaagaagataccaccaggaagaccaacactgtcatctgaagttggaatcatcatctgtgatatt

SEQ ID NO: 783279 - DNA, 50 bp, Homo sapiens
ctgcgcccccagcctcctcgtcgccctggcaggtagagcagagccggagc

SEQ ID NO: 783280 - DNA, 75 bp, Homo sapiens
gctcacctgtgcgggatggaacaaaaggaagttggaaatctgtatgacatgttccacactcgcaactctttacac

SEQ ID NO: 783281 - DNA, 80 bp, Homo sapiens
aagccgcctctgtattacttaccaggaagatgttaccgagtacttcagtgaattccttagtgcaggggaacggagtcttg

SEQ ID NO: 783282 - DNA, 75 bp, Homo sapiens
gtgttggaaagcactatggtgtgatccggaagaccacggccagccaggtgtacgagacattgctcacctacagtg

SEQ ID NO: 783283 - DNA, 83 bp, Homo sapiens
ccaagacaaggcgcccaccccacagagcaagttttctgaaacgtggaaccttctgaccagcctcatgggctcctcagagcagg

SEQ ID NO: 783284 - DNA, 100 bp, Homo sapiens
ctgcaacgtgcctcgaaggccaggatggggtgcaggatgagttttctctgcagcctgaagaagtgatgagccctcctcttcagctaggaaaatgacggtg

SEQ ID NO: 783285 - DNA, 74 bp, Homo sapiens
ttggcttccggctccccccatctggctggaacacacatcagtcacgtatgtgaaagcaagaacagagctaacat

SEQ ID NO: 783286 - DNA, 100 bp, Homo sapiens
gagagattccttggttaaaattctgcaagactacaatttgcaaggtcctgcagttctgagcttgggttccctttgcctggacaccaaccaagcccccaac

SEQ ID NO: 783287 - DNA, 75 bp, Homo sapiens
cagacaaggagctcagtgacctcctggacttcagcatgaattaaatgtgagggagtctgacgtaagagtttgtga

SEQ ID NO: 783288 - DNA, 90 bp, Homo sapiens
cgctcgctgggagagaggtacctctccttttccctctccctttccctaaggccaccaccacctatcatgacagatggtgaagatgcggat

SEQ ID NO: 783289 - DNA, 83 bp, Homo sapiens
tcttgctcctctctccttggcctctcctgggatcggcccaaggccagttctccgcagcttgctatggcattgttcaagtaccc

SEQ ID NO: 783290 - DNA, 80 bp, Homo sapiens
atggtcaggtctggagctcgaccgggccaggtagttacttttggtgacgctgtccagttcccacaatgtatcattcctta

SEQ ID NO: 783291 - DNA, 100 bp, Homo sapiens
agcctgttggaggaactggcccggaaacaggaggaccgtttagtgggctacagatggcatggcatctaaaaccttacaatgcttgattttcatacagaag

SEQ ID NO: 783292 - DNA, 87 bp, Homo sapiens
cagataatcagagtggaggaagtacagccagcaaggacaagaattttgggcagatttgaatgccatgaacgtgtatgaaacaactga

SEQ ID NO: 783293 - DNA, 100 bp, Homo sapiens
cttgtcctggctcttgccctcatcctggttctggaatcctcagttcaagcaatacgaggattctctccaccacatagaatctgcagttttgaagaggcaa

SEQ ID NO: 783294 - DNA, 75 bp, Homo sapiens
gcgtgtgtttgaagaagccacgtcagtcattggcaccatgaactggaataaaggtggtcctggcactaagcgagg

SEQ ID NO: 783295 - DNA, 75 bp, Homo sapiens
ctccaggaaaccacccgcgctcggcggccgccagcagtcagggcctttctacttacaaggaactttgttctctgg

SEQ ID NO: 783296 - DNA, 75 bp, Homo sapiens
taaaatcatctccatattctcaggcacagagaaagagagatgcaggtcagctcctccagtaccacaacttctgag

SEQ ID NO: 783297 - DNA, 100 bp, Homo sapiens
aaaaagggaggattgaaggagctctatgagaaggggccccctaatgccttcttccttgtcaagttctggccccacagagcaggtgttgccaatgctgcgg

SEQ ID NO: 783298 - DNA, 75 bp, Homo sapiens
aggcccaggccgccacctgcaaccacactgtggtcatctacacgaacaatcagaggtacatggctgccatcatct

SEQ ID NO: 783299 - DNA, 82 bp, Homo sapiens
gtttgtcattaaacccatcgacaagaaggcacctccttatgccagcctggaccatcttggaggcagtgtaggatcatggaag

SEQ ID NO: 783300 - DNA, 100 bp, Homo sapiens
ggcaggaacagcacccggacggactacgagtaccagcactccaatttgtatgccatatcaggctcttcgcggccaagtgcagcggctgcatggagaagat

SEQ ID NO: 783301 - DNA, 85 bp, Homo sapiens
ttggacatgtcctagacatcacttagaggtggatgaaactcagtttaagaagatcctcggctacatcaacacggggaagcaagag

SEQ ID NO: 783302 - DNA, 102 bp, Homo sapiens
aaagatcttgtctcgctggcctgcgacccagccagccagcaacctggaccgacaatgcagatcttcgtgaagactctgactggtaagaccatcaccctcgag

SEQ ID NO: 783303 - DNA, 85 bp, Homo sapiens
aaagcgcctatagaaatgctttgtactaccgcagcaacatggctgacatgctttataatttggaggtagaagacatcgtagaagg

SEQ ID NO: 783304 - DNA, 101 bp, Homo sapiens
cagaggacgccttcaacaccaccttcatctccaccatcggaattgtcttagaagaaagaaggcaagccaccattttacccacgtaaatatatgaatatatt

SEQ ID NO: 783305 - DNA, 74 bp, Homo sapiens
tctcgacctgctaacagaactggaccttttcgattctgcttctcagaagatgcactattatagatactctaacg

SEQ ID NO: 783306 - DNA, 100 bp, Homo sapiens
gcagtttctacctgaacgaattttctttcgatggcattaccagagtatagagtgtgagaattttgaacaaggagccctagagctggatgcaaaagagaac

SEQ ID NO: 783307 - DNA, 75 bp, Homo sapiens
ggcgcatcctccacaccgacaccatctggaggaggcgttgccgtgagggtcagcccaaggccaaccccactgtca

SEQ ID NO: 783308 - DNA, 101 bp, Homo sapiens
gtttatctggagtgaggtggccggttcttggtgggatctgagcagcacagaagctgtaatgttattaaacaaagcaatgtatccagatcactcagaatcta

SEQ ID NO: 783309 - DNA, 87 bp, Homo sapiens
atttgtggcttaaactcttggcatttggctttgcctttctggacacagaagtatttgtgacagtttctccagcatttggctctaggt

SEQ ID NO: 783310 - DNA, 75 bp, Homo sapiens
gggcgagcagcggcgggggcccgaggggattgtgcagactggtgcttaaaatggaagtcgatattaatggagagt

SEQ ID NO: 783311 - DNA, 97 bp, Homo sapiens
atggtggtgcaagtagtgattggagaacaaagaggtgaaggagtattgctaaactgtgaaaatgcagtcctcaaagagaatttgaaagtgaaaacag

SEQ ID NO: 783312 - DNA, 74 bp, Homo sapiens
agaaatagggggcacggcagacgcggtcctggatatacttcagataaccctaaggaatatcttggatgtcttca

SEQ ID NO: 783313 - DNA, 75 bp, Homo sapiens
gaagaatcctgcaaaaatgtctctctatccatctctcgaagacttgaagacatgtccttccgcaaagtggtccgg

SEQ ID NO: 783314 - DNA, 98 bp, Homo sapiens
cttggagaggccgagggtttgatgaaggtggaggcagcgcggctctcaggtcgcaatggaagaagagatcgccgcgctggtcattgacaatggctccg

SEQ ID NO: 783315 - DNA, 75 bp, Homo sapiens
ttaccacttcataccaatggtcgacgatggcatttgcccccagcacagcaaacgtttcctgagagctctaaccaa

SEQ ID NO: 783316 - DNA, 119 bp, Homo sapiens
agctccaggagttcgtctcttacgtctgcggaagtgcagctgcctcagttcttagcgcagatcacttaggaaaatggctgttggtatgatcctagcatgcctggcatttgcagttgcgg

SEQ ID NO: 783317 - DNA, 100 bp, Homo sapiens
ctgagctggttggccctgtgatccctcaagactggtccacggagtgtatgaccacaaacagccatcaagctatcatggtgaacttacttcagattgtgcg

SEQ ID NO: 783318 - DNA, 100 bp, Homo sapiens
cccaggtccaagcgattctcctgcctcagcctcctgagtagctggcattacaggaatgcagtttattctactccaagagattctgcctcccttgtgtccg

SEQ ID NO: 783319 - DNA, 100 bp, Homo sapiens
aaatatgtggattccaatctctgttgcttcatcccaggaaagatcatggagtgcatcggatcctttctataccaacgacaggagcatcttgactctctcc

SEQ ID NO: 783320 - DNA, 90 bp, Homo sapiens
tgagcttcaaaaggggggacatcctcaagccttatgatctcctcattgcgtccccctctgcccactggacttggacttcagatctgaccc

SEQ ID NO: 783321 - DNA, 100 bp, Homo sapiens
ctccacttggacaacaacaagttggccagggtgccctcagggctcccagacctcaagctcctccaggcgaaagacagtgatgatgaagaggaggtggtcc

SEQ ID NO: 783322 - DNA, 82 bp, Homo sapiens
gggttggtgtgattagcttcgcagtctggaaagctttaggagttcacagtaaagcctcacattgtgcagtggagaagctgag

SEQ ID NO: 783323 - DNA, 90 bp, Homo sapiens
gcgacccttcctggccatcctgggcggcggtgaccacccgtcaggtgcgtaccattgtggaagaggtccaggatggcaaggtcatctcct

SEQ ID NO: 783324 - DNA, 99 bp, Homo sapiens
tcttgggctttctgtattctgaagacagcgccccagcatttgccatcttcaagtttgttcagaaacagtatctcacctccctaaactggttaatagtgg

SEQ ID NO: 783325 - DNA, 75 bp, Homo sapiens
caaagccatcatcttctttgacccagggtggccgtgaattaagtgattttattagctatctacaaagagaagcta

SEQ ID NO: 783326 - DNA, 83 bp, Homo sapiens
ctcgcagattcatccccccagccagatagccttctggcaggcattcctcagagagtcaagttcactgtcactaccggccatta

SEQ ID NO: 783327 - DNA, 85 bp, Homo sapiens
gatgagaaagagtggggcgatgatgaagaaggtgccatgcctctgcaactcctcctgttgctgatcctactgggccctggcaaca

SEQ ID NO: 783328 - DNA, 98 bp, Homo sapiens
aggagatcaagaaggcctatcggaagctggcgctcaagtaccacccggacaagaacccggatgagggcgagaagtctgcgggccaggcatcgacatcc

SEQ ID NO: 783329 - DNA, 80 bp, Homo sapiens
cgctaataatgcaattactgagagacaacttgacagtctcagatgatgataaagaaaagggagagggagctcttccaact

SEQ ID NO: 783330 - DNA, 101 bp, Homo sapiens
tgaagtacaagaattgatagacataagaaatgattatatcaactgggtccaacagcaggcctatggaatgatgttttactgtgcctggctaactatagtcg

SEQ ID NO: 783331 - DNA, 82 bp, Homo sapiens
agggacgctgggactctcagcaggcaaaacccatttatggcggttggctgctcctggctccagatgggaccgactttgacaa

SEQ ID NO: 783332 - DNA, 100 bp, Homo sapiens
agccaccagagaagtcggcacagttctagagataggagcagagaacgatccaagaggagggactttgaacatgtcggggatcgccctcagcagactcgcc

SEQ ID NO: 783333 - DNA, 101 bp, Homo sapiens
ctaaatttaagtggcaacaaaattaaagacctcagcacaatagagccactggtacatcaggaacgtctctatcaagaatacaatttcagcaaggctgaggg

SEQ ID NO: 783334 - DNA, 100 bp, Homo sapiens
gtgaggaggaaccctcgcaagggcagaaggttgaagaacaggaggagtctactcttcatcttgtgttgagacttcgtggtggtgctaagaaaaggaagaa

SEQ ID NO: 783335 - DNA, 74 bp, Homo sapiens
tcacctgccaacggtgtggtcctggacaggagctatccaagatcagtgtgcgtgtgaccaccatggatgcagag

SEQ ID NO: 783336 - DNA, 101 bp, Homo sapiens
cccgtttgtgcgggtgaagcgggagcgcgaggtcgatgaggactcggagcctgagcgggaggtgcgaggagctgctaagacacatggttgcacagaaggtg

SEQ ID NO: 783337 - DNA, 83 bp, Homo sapiens
cctgttcagagcaaccagctaatcactacctatacaatcattttcacatgaaaaagagtctcaccaacacagacaacactcgg

SEQ ID NO: 783338 - DNA, 100 bp, Homo sapiens
aggccggctctccatgatgtccttcatcctcaacgccctcacctggtttagcagccagctgtggactttgaaagagggagcagaggtagccccaggacag

SEQ ID NO: 783339 - DNA, 100 bp, Homo sapiens
cccaaatcaagtatacagaaaatcggtgaagagaggttttgaattcacgcttatggtagtggcatgaagactttttgcttgccctacagatgaatgaaga

SEQ ID NO: 783340 - DNA, 100 bp, Homo sapiens
ctgagatgagtgaggattgtttcagaaaatcaggcctcctcctggggaatgtgcctcagcttctgaaatatggctacacacacctttctgcaggagagct

SEQ ID NO: 783341 - DNA, 97 bp, Homo sapiens
cagcgccgcgcccggggccgtgcgctctcgggccactcggccgcaggtggacatcgagcagctggatccccgcggccggactcccctgcacctggcc

SEQ ID NO: 783342 - DNA, 90 bp, Homo sapiens
cctccaactttgcgacggaaatgtgtcatcgaaagccagggcagagcggcttgggtaaatccaccttaatcaacaccctcttcaaatcca

SEQ ID NO: 783343 - DNA, 100 bp, Homo sapiens
caagaagcagctccacgaaaggcagccgcggatcgccgcgctcagcgacaaacaactcgagaagctgcaatttgggagctcgaagaacgacacttacaag

SEQ ID NO: 783344 - DNA, 96 bp, Homo sapiens
ggggagcttacccagcttaaagagctccacattcaggggaaccgcctcaccgttctgcccccagaactaggctatcaagtactagctccaactgcc

SEQ ID NO: 783345 - DNA, 98 bp, Homo sapiens
cctcagtatcccagtgcattcccatcctcgctcccacctgtcagccttctaccccatgagaaagaccagactgctgcagtaagaatgtcttttccacc

SEQ ID NO: 783346 - DNA, 97 bp, Homo sapiens
cgcggcccgggcgccatcgagccttggcggcggacgtgcagggagtaccctgacttctaccggaagctctacggcctcttggacccctctgtctttc

SEQ ID NO: 783347 - DNA, 90 bp, Homo sapiens
atggcagccactaacaggccagggcccactgatgatggtgaagaagagatggaagaagacacagtcacaaacgggtcctgagcagtgagg

SEQ ID NO: 783348 - DNA, 74 bp, Homo sapiens
aacaccgcggagccccgggacttgggcaacaggtttgtctatgctggctctaactcgggcgtggtccaggcccc

SEQ ID NO: 783349 - DNA, 100 bp, Homo sapiens
cagccctggtgtcacctatcagtaaaagaaactgcaacagccaccccaactttcaagcaccaccttgatcaacagccatcaacattgaggcaaaaccctc

SEQ ID NO: 783350 - DNA, 75 bp, Homo sapiens
atttgcgccatcatcctcatcatcatcataggagcagccctgggccccctgctggctgggctcctctccccgtcc

SEQ ID NO: 783351 - DNA, 95 bp, Homo sapiens
tgctgtctcggcacaagcagctgctgcacagaaaaataaactcaaggagcctgggggaggttcgtttcggaaagtgatgaagcattgggcccaac

SEQ ID NO: 783352 - DNA, 75 bp, Homo sapiens
ggcaattgttcccatcatccaccgcgaccttaagtccagcaacatatatcctttcgggctctgatgacttcaacc

SEQ ID NO: 783353 - DNA, 90 bp, Homo sapiens
gaagatgcaagcggtttgggaccttgaacaaggcaaatatggttttggacctctttgtttttagacatgaattggccataatgagactag

SEQ ID NO: 783354 - DNA, 100 bp, Homo sapiens
tttcagtggaatgggcagaaggaggtgccacaaagggcaaagaggttgtactcgtaaaacaaggatcatcgatgttgtctacaatgcatctaataacgag

SEQ ID NO: 783355 - DNA, 98 bp, Homo sapiens
tggaaacatcaaagctggattagaacatctggctatttagcagacatgacccacaagcagaagaagcattagcaaagaggaggggaagaaacagcccg

SEQ ID NO: 783356 - DNA, 83 bp, Homo sapiens
cgctgtgagacatgtctgagactcctgctcagtgtagcattaaggtactggctgtgatcgaacttctcaaccctcagagactt

SEQ ID NO: 783357 - DNA, 100 bp, Homo sapiens
tgatggtaaagttggatttattacaccagtgtcaagtagatttactgcagagaacgagcctctgactccaggttatcatggattcccagcgcgggacagc

SEQ ID NO: 783358 - DNA, 90 bp, Homo sapiens
atgagggagacggtggggaggcttcccatggtttggaggatagcaacatcagggtagtacagaaacagatggcattcatgctaggccggc

SEQ ID NO: 783359 - DNA, 85 bp, Homo sapiens
tattcattattacatgaagtatcatgtttctcatttgacattgtgcagcaaagaaatggttatggagaagcccagtccgctgctt

SEQ ID NO: 783360 - DNA, 100 bp, Homo sapiens
cactgactttcagctatggaatcggcctgcattgatgagaacctggaggtggtgcgcttcttggtggagcagggcgccactgtgaaccaggcagacaacg

SEQ ID NO: 783361 - DNA, 75 bp, Homo sapiens
cctccgtcaccagccacatctaccagatggtggatgcttccaaaagcatcgaagctgtccatgaggacatccgcg

SEQ ID NO: 783362 - DNA, 82 bp, Homo sapiens
ggcggcgccggcctccggggagaaacgcatctgtgttttgtgtgagcctggaccccaagaccaataccttggcagtgaccgg

SEQ ID NO: 783363 - DNA, 80 bp, Homo sapiens
agatcctcctgcacagccacaaggctgcgtccctgctggctgtgctgctgctgctgctggagcgcggcatgttctcctca

SEQ ID NO: 783364 - DNA, 98 bp, Homo sapiens
ggaaatgcaacaatccaaatggccatgggcacaattataaaggtggtggaggtggatacagcagtcggagaacatctggcagagacaaatacggacca

SEQ ID NO: 783365 - DNA, 80 bp, Homo sapiens
cttggactgagtcctgcaggacacaggtgattgaattactcagatatgaagatcatcatctaggttttgtgtaaaaggcc

SEQ ID NO: 783366 - DNA, 100 bp, Homo sapiens
catgttagtgctcaagagcctcattatctaccacccgagatgccccaaggtgatcagactctgagaatatgggatgtgaaggcagcaggagtaagaatcg

SEQ ID NO: 783367 - DNA, 50 bp, Homo sapiens
cctgaaccgcgcggccgaaccctccgggatgtttcagcagcccctgagaa

SEQ ID NO: 783368 - DNA, 75 bp, Homo sapiens
aaagactccacctactatggagcttttggacttcttggatcagcatcctttttcatttactcctctaattcagag

SEQ ID NO: 783369 - DNA, 97 bp, Homo sapiens
aaaggaagaagtgtcagaagggagaacgagaaatggcgaaaagtcttttgaagacagcctctctgtctggaaggacaaaattgctacatcaaacagg

SEQ ID NO: 783370 - DNA, 75 bp, Homo sapiens
aacctggatccttggatacaggaaaccaacagtcacacatgtacattacagtttccaggaatatggatctactgg

SEQ ID NO: 783371 - DNA, 100 bp, Homo sapiens
agtgggcgcatcttagcttgccccatccccatttgaggtctgtcggagctgcccttcagtgtggattccagtcctctactaaatgaagtttcttcttccc

SEQ ID NO: 783372 - DNA, 100 bp, Homo sapiens
gaagtactgcgttgaattgctcaacagcatcttggaagtccttagctaccaggatgcggaaataaagtctttgcttttgctttttggaggtcagtttgcc

SEQ ID NO: 783373 - DNA, 82 bp, Homo sapiens
gtctggagtgcgtgggggaccggctgttggcgggggttcagtcggctgccgtcaatgtcatctgcgagctggccagacgcaa

SEQ ID NO: 783374 - DNA, 75 bp, Homo sapiens
atctttatgtcagaaacacaaagcagcccaaccaaagggttcaaaactggtcaaatcaatggtgatttgctgata

SEQ ID NO: 783375 - DNA, 98 bp, Homo sapiens
cacacactggagagatatcaggcaagtagagctgcagctgtctggcgccactgtaatgctgtctcctcctctgagtgagttcatcctggaaacatttt

SEQ ID NO: 783376 - DNA, 106 bp, Homo sapiens
caagctggaggtggacgccatcgtcaacgccggttatgatgtgattgctcaagcccaatctgggactgggaaaacggccacatttgccatatcgattctgcagcag

SEQ ID NO: 783377 - DNA, 138 bp, Homo sapiens
ggagctcggtggccgtgccgctcgacctcctggtcagcacttaccggctgccccagatcgcgcgcctggacaacgaaatgcatcttctgcagacaccgggttaagagggtctctggagcctgcatccagtgttcctac

SEQ ID NO: 783378 - DNA, 75 bp, Homo sapiens
agcaatctcagggtaaccagaactagagctgctcaaagaaaaactggtggtctgtttttctggggggccaccaac

SEQ ID NO: 783379 - DNA, 83 bp, Homo sapiens
aggaagccgaaaacaccctgcaatctttcagacaggtggtgtaaattggtccaatgtaacttgccaggcaactcagaaaaaac

SEQ ID NO: 783380 - DNA, 100 bp, Homo sapiens
cctgcatctgcccctcggccttccgacgtgggcggtgggccccagccccacagaccagcccagcattcaggcctctggctgtacctggcagggagcagcc

SEQ ID NO: 783381 - DNA, 82 bp, Homo sapiens
cagggagagcctggggacgacttttacatcatcacggagcggagcgtgctttggacaccatgaattttgatgttataaaggg

SEQ ID NO: 783382 - DNA, 100 bp, Homo sapiens
cactttgatcagtatgaggaaggacacttggaaattgaacaagcgtcacttgacaagcctatagaatcgggtgtcaaattgagaaccaggtagatcccca

SEQ ID NO: 783383 - DNA, 96 bp, Homo sapiens
tcgcattttggcattgacatttaattttagggtcctttatatagaagggagagtaggttctccaaatgtcaactgtcaaggagcagctaattgaga

SEQ ID NO: 783384 - DNA, 75 bp, Homo sapiens
gcaccgcggtgctgctggtcacggccaacgtgggctcgctcttcgacgacgctcctgggtagaactgcacttcag

SEQ ID NO: 783385 - DNA, 82 bp, Homo sapiens
aaaacttgtgagggcgaaggtcgtattgaatggtgttgtaggctaaagccaattttgaaaaagaagaaaggcgtaaagaact

SEQ ID NO: 783386 - DNA, 100 bp, Homo sapiens
tgcaaatgattatcgagtagttaaccaatttgccagacattatcagactggacaggcatcagagaccccaactctacaaggcctttcctttactgtcaga

SEQ ID NO: 783387 - DNA, 51 bp, Homo sapiens
gcatggcttctggggacctttacgaggtttcaagtgccccatttgctccaa

SEQ ID NO: 783388 - DNA, 82 bp, Homo sapiens
caccctgtcctacgatgtggaggaggaggaggagttccaggagctggagtaatctcaggggcgatataatcaatgaggtggt

SEQ ID NO: 783389 - DNA, 98 bp, Homo sapiens
ggatgagggggaagggcctcaaagccagaagataagtatgctgttcgcttcatccctcatgagaatggtgtccacaccatcgatgtcaagttcaatgg

SEQ ID NO: 783390 - DNA, 100 bp, Homo sapiens
ggagcaggcccccactgccatggtcgagaagtcctccagctctgcatcttccgaggcctcggaaacctgccagtccgttagcgagtgcagctcccccacc

SEQ ID NO: 783391 - DNA, 116 bp, Homo sapiens
caggtgtaagcgcagaaagcaggcgaacccgcggcgcaataacggtcagatgcccagggccactgaagagaaaactccgcttttcatttagctgtcacttggcccaaaccagtcaa

SEQ ID NO: 783392 - DNA, 87 bp, Homo sapiens
taccaggaactattttggtgacagaagaagaacttagtagatgcattgaggatgtgtttaagagcccgtgttctggtactacgtgaa

SEQ ID NO: 783393 - DNA, 75 bp, Homo sapiens
gtagtggaagatgtaaagcaatatttcgagcagtttggcaagatcttcaaagctgctgcgggcattctatgtccc

SEQ ID NO: 783394 - DNA, 74 bp, Homo sapiens
atgagagtgaggatgacatgtcatcccaggcctccaagagcaaagccactgagcctactcagcaggaagacaat

SEQ ID NO: 783395 - DNA, 100 bp, Homo sapiens
cagagccaccagcgcagcgctgccatggagcccagcagcaaggatcccctaacaacagtgagagagcaatgcgagcagttggagaaatgtgtaaaggccc

SEQ ID NO: 783396 - DNA, 100 bp, Homo sapiens
aaccatgagggaaatcgtgcacatccaggctggtcagtgtggcaaccagatcggtgccaagagcttgtgagcctgcaggtcctggatcaacacccagttg

SEQ ID NO: 783397 - DNA, 50 bp, Homo sapiens
cagaaatggaagcaggaagtcctggttttaaaatcaaagatgggaaaatc

SEQ ID NO: 783398 - DNA, 90 bp, Homo sapiens
tgaaaatcggcggacttaccagaatcttgtcattgagaaggatggttcaaatgaaggtccaagtgtgcctgccatcaactaactatccag

SEQ ID NO: 783399 - DNA, 75 bp, Homo sapiens
gtttgactccatttcaagtaggaagtttctccacagacactacccaaagcagtccttcactacagtggcagacag

SEQ ID NO: 783400 - DNA, 82 bp, Homo sapiens
cgggggagtcgtaaacaaccctgaagagaacagccaggcctggtatagtcgtctccccctccaccacggcaagtcctgcaga

SEQ ID NO: 783401 - DNA, 100 bp, Homo sapiens
gccgccgccgccgcccctgttgcgatggcgcagaaaccccgttgacaaggcactgctttttcatgacggctgagtcatcactagagagtgggaagggcag

SEQ ID NO: 783402 - DNA, 100 bp, Homo sapiens
ctcgccttgtatctcaacaccctgagtgcggatttctgctatgatgacagatacagatccacgggttttagaaaaacaagaattacagcagccaacctat

SEQ ID NO: 783403 - DNA, 96 bp, Homo sapiens
ctggagcgcccagaggcgagccctggtggaggaagaggaagagagaagggcacagttacctaagtatcaacgtaatcttcctcggccaggacaggc

SEQ ID NO: 783404 - DNA, 85 bp, Homo sapiens
gaatttgaaaaatgaagatgatgtagacactggactattaggccgaagataaccagattggattttaagaagaataaattaacct

SEQ ID NO: 783405 - DNA, 145 bp, Homo sapiens
aaaaactgccagtatcttctaaacctggtaaaatttcacggcaggatcctgttacatacatttcagaaacagacctgatggccaaaagaaaggaagaaaatttttcctctcctaaaaatgccaaaaggccaagacaagaagaatt

SEQ ID NO: 783406 - DNA, 75 bp, Homo sapiens
gccaattcgttttcaggagcatctccagattatggcatcgtcaaagcattgtggtgtcttttttactgctgcttg

SEQ ID NO: 783407 - DNA, 100 bp, Homo sapiens
ctccgaaccactgcctctgggctcaacagaacacagggtggtaagcatccgtggcattcaagacgaagatccccctgacgcccagctcctgaggctggat

SEQ ID NO: 783408 - DNA, 129 bp, Homo sapiens
tgcggagagactccttgggggtcgagcacataacggggttcgggtgtctcgtgtgtgaacatcacagacccctggatgcccagctgccgcacctcccgtggccccacgctgtggctacgtgttgtctga

SEQ ID NO: 783409 - DNA, 83 bp, Homo sapiens
ccgagagcaacaaagcaggcgactacagccacgtgaagttcgtgtttagtaggagcacagtagctgtttggggaacgacctta

SEQ ID NO: 783410 - DNA, 75 bp, Homo sapiens
tttctgggtgacactcaacaggattcccgcttccactgtgtcaacaaccctccattgtccaacctgtgtggcttt

SEQ ID NO: 783411 - DNA, 100 bp, Homo sapiens
gccaagctgtcatcacaaaagagttgattgaaattatctctggtgctgcagctctataaccagcccgagtcatgcagtcttttcgagaaaggtgtggttt

SEQ ID NO: 783412 - DNA, 82 bp, Homo sapiens
tgaggctgtcctgtcctcgtccgtctcatcaaagaaaatgtggtgacctggaagaagaactcaagaatgttactaacaatct

SEQ ID NO: 783413 - DNA, 100 bp, Homo sapiens
tgctcctgcggctgtatggagcgattttgcagatggttcatcagggcgtcagaggatttgttctagatgccacagatggcaggggtatattaaatgccac

SEQ ID NO: 783414 - DNA, 98 bp, Homo sapiens
ttcgccggacttgaatcttttgcctggccgcaacccgccagcctgcaatcgagggcggcactgctcacaggacggctacccatccgcaatggcttcta

SEQ ID NO: 783415 - DNA, 101 bp, Homo sapiens
gccggtgcagcagccttcagcttttggcagcatgaaagttagcaagctcagagttctacagagtcaccactgaacaatatcagaaagctgctgaagaggtg

SEQ ID NO: 783416 - DNA, 135 bp, Homo sapiens
cacgctctatagccaaggaaggcttcgagaagattagcaaaggtgctaatccagtggaaatcaggagaggtggatactttaatactgataagccacaccccaggggtgaaattcttattgggggccaaagtgtga

SEQ ID NO: 783417 - DNA, 101 bp, Homo sapiens
tccgctgctcgcacgggagccagctgggtgggctacaataaggcagtggattggtgggcattaggagtgctaatctatgaaatggcagctggctatccccc

SEQ ID NO: 783418 - DNA, 100 bp, Homo sapiens
agcaccccaaagcaattacacccagaagattacctttgactcttgtcccaggtgaccaagaatatggcccaggtgaccaaagccctggacaaggccctga

SEQ ID NO: 783419 - DNA, 101 bp, Homo sapiens
tgacaagatgtcacctgaaagtggtcacagccgcatctttgaagtttctcaactcattggatgctaaagaaatatatttggaagtaatacataatcttcca

SEQ ID NO: 783420 - DNA, 101 bp, Homo sapiens
ctggaccctgctcagagggacttgtacgtggatgtaatgttggagaactatagtaacttggtgtcactggtggtctgcaagaagaatctggacagtaccac

SEQ ID NO: 783421 - DNA, 100 bp, Homo sapiens
agtgcacaacttggccgggctcactgggctcctgcaccactgcctgtcaggtttggaacaaactctcccttcacttgttgccctgtagcactacagaaac

SEQ ID NO: 783422 - DNA, 88 bp, Homo sapiens
aaagatgaaaactaagaagtaaatcaatgctaaatgaagaatctgtactttgttgcagaagaaaaccccagccaagtccccagggaag

SEQ ID NO: 783423 - DNA, 100 bp, Homo sapiens
tccgtagtcgcatcaaacagatgactacccagggagaggaattacgggaacagaaagaaaagtccgaaagagctgtgacctcttccatcccagtatttga

SEQ ID NO: 783424 - DNA, 82 bp, Homo sapiens
tccgaccggctgaggcggcgcggcagcggagggacggcagtctcgcgcggtgaacctgagcaaggtgggcgagtattggtgg

SEQ ID NO: 783425 - DNA, 75 bp, Homo sapiens
ccaccttaagagaagaagagctgtaagccggcctttgtcagagccatcatggtgcccatgacgcttccggagaca

SEQ ID NO: 783426 - DNA, 83 bp, Homo sapiens
ttccgctgtgttgattgaggacgttcccttcacggagaaagattttgaacccaacatgagtgaagtttcctgcaagaaacggg

SEQ ID NO: 783427 - DNA, 73 bp, Homo sapiens
ggtcatacaccagtactaccaaggacagcttttttcctgcaaggaccgcagctgaatgcacagctagaaggtt

SEQ ID NO: 783428 - DNA, 90 bp, Homo sapiens
acctcagccccaacggcaagcaacttgaggctgtggccaggccagctgggctcggggagcgccagcctgagaggagcgcgtgagcgtcgc

SEQ ID NO: 783429 - DNA, 98 bp, Homo sapiens
ataaatcagacagaacagttaatcctcaatttaagcctgatctaacccctagaaacagcatccgtacttcaaacaatagtcaggttaataaactgact

SEQ ID NO: 783430 - DNA, 95 bp, Homo sapiens
atccacctttggataaagtcccagaagaggaatactgggtacagccaaagaccggagctttggagagatgaagtttaaacagtgtcctacagaga

SEQ ID NO: 783431 - DNA, 75 bp, Homo sapiens
ccacttctaaattcttgtcttagtgaaaggttctaaattagttccattctggagctggctacaaatgggtaaaga

SEQ ID NO: 783432 - DNA, 75 bp, Homo sapiens
tctgtctctaggaatttcactactctagtttccacgggctcccttgctcagcagtatgcgcaccctaacgctacc

SEQ ID NO: 783433 - DNA, 100 bp, Homo sapiens
cgtggatggattccaccccaacgagacgctaatgaactgaagacgatccttcgagagctaaagtacagaattggcatccagtcggccaagttacttcggc

SEQ ID NO: 783434 - DNA, 100 bp, Homo sapiens
aaagcacaaagcatggagaccctccctccagtccgacctcacaatagaaaaaatatctgcactagaaaacagtaagaattctgacttagagaagaaggag

SEQ ID NO: 783435 - DNA, 75 bp, Homo sapiens
tatttcaagatgatatttattcaccaaacaagttattttaccaagaaaatggtttgcacgactttgaacatatac

SEQ ID NO: 783436 - DNA, 99 bp, Homo sapiens
ccagtggaggcattttggggcagaatacagagatatggaatcaggtggaaccgtcccaaaatgtcccttgctcagaagaaggatcgggtagctcaaaag

SEQ ID NO: 783437 - DNA, 83 bp, Homo sapiens
ctgtgctcgctggcaccccgaacgggttgcttcccccgctgcgagctgtccccgccctactccggaccgccccaaagactcca

SEQ ID NO: 783438 - DNA, 100 bp, Homo sapiens
tgatgttggagaactacagaaacctggtctccctagaaatgtgtgttctgcgaatgactcgagctagacgttcccaggtagaacagcagcagctcatcac

SEQ ID NO: 783439 - DNA, 75 bp, Homo sapiens
ttgcgccagagaaacacaaattaagtactgcttacaatttttaagacaattatctcctatattgatgagcaattt

SEQ ID NO: 783440 - DNA, 88 bp, Homo sapiens
tgcatcagtggtttatgccaacagacggttgatgatgaagcgccggccgtgtaaatgaagatcgggtgaggagcaggacgatgcccaa

SEQ ID NO: 783441 - DNA, 75 bp, Homo sapiens
aaaagtcctttgaaatggtgctggatgaaattagaaagaatcctaatgtacctggctagctggtggtgagtaggg

SEQ ID NO: 783442 - DNA, 100 bp, Homo sapiens
ccaggaaaaaacttccagcaggctgtgcagagcgcgttgaccaagactcataccagagggccacacttttcaagtgaccaatgcaggcaatgagccagac

SEQ ID NO: 783443 - DNA, 100 bp, Homo sapiens
cgcaatctcagtctctctcacgttcccagagcatggatatcgatggtgtctcatgtgagaaaaggtgcaggctgccccatggatgccacacgtggcagcg

SEQ ID NO: 783444 - DNA, 82 bp, Homo sapiens
tttcatcctcaagggctccatgcgaccgctgcacatccagcggagctggagtttgttcagatcatcatcatcgtggtggtga

SEQ ID NO: 783445 - DNA, 75 bp, Homo sapiens
atttaacccccctccaaaaatgttgttaataacagtactggtagtggaagggattgccgtggcccaaaaaaccca

SEQ ID NO: 783446 - DNA, 83 bp, Homo sapiens
cggcgagtgaagagactgtacagcaattggcgggtccccgtggtgccctcaaagcagacctccataccacagcaccacagcta

SEQ ID NO: 783447 - DNA, 99 bp, Homo sapiens
ctcagcagtaactcctccataaaaacaagtgtgtgcatctggctgttagaagaattcatgctcatccggtactcactggcctacgcctgcttgaagtta

SEQ ID NO: 783448 - DNA, 100 bp, Homo sapiens
tttgaaagctggtaatattcttctgggtgaggatggttcagtacaaatagcagatgagaactggactgatgaccaactgcttggttttaaaccatgcaat

SEQ ID NO: 783449 - DNA, 100 bp, Homo sapiens
tgcacctgccttcagaacagggcgctcctgagaccctccagcgctgcctggaggagaatcaagagctccgagctggttgtcttcttgcctgccctgtgtc

SEQ ID NO: 783450 - DNA, 100 bp, Homo sapiens
gggcttcagaggcccaaattgaggcgcaatgatgagaggatgtggtggtctactctgatgtcaatcttgagggctaggaagctcttcgtgggcggtcttg

SEQ ID NO: 783451 - DNA, 100 bp, Homo sapiens
ctcaatttaagcctgatctaacccctagaaacagttgacatgtggtcagtagggtgcatcatgggagaaatgataaaaggtgcagtgctgtttcctggca

SEQ ID NO: 783452 - DNA, 75 bp, Homo sapiens
actggtgaacaagctccgaagaaacggattggagcctgtgacctaccacagggtggtctgtttttctggggggcc

SEQ ID NO: 783453 - DNA, 100 bp, Homo sapiens
ctcacacagtggcttctgctcaccaacagatgaagacagatgcaccaacgagtactatactggcaattgctggagaagattttgcaattgttgcttctga

SEQ ID NO: 783454 - DNA, 83 bp, Homo sapiens
gaatattttgcctgctggaacctgctgtatctactcaagagtggaagttttcacaggcttgcagccaatttactggagcaggg

SEQ ID NO: 783455 - DNA, 75 bp, Homo sapiens
cggcacgcgaagtggccgcatccgcaagcctgacatttaccccggtaactgctgggcatttaaaggctcccaggg

SEQ ID NO: 783456 - DNA, 100 bp, Homo sapiens
agcagatgaagcttttctacagtaatcctcgcttccatgggctccgggcatatctttttcttgcacatcaaggaggccctcttggcaggccacctcttgt

SEQ ID NO: 783457 - DNA, 101 bp, Homo sapiens
ctcatccctgtacgggtgcctggcctcgcttctgtcccagtttactcctggcttgggggcattaggaagcactggaggctcttcgggaactaatggatcta

SEQ ID NO: 783458 - DNA, 100 bp, Homo sapiens
cggcagcagaagctaaagcaggccaaatacttggatgatattgatgatgagatggacccagagatagaagaagcttatgaaaagttttgtttggaatcag

SEQ ID NO: 783459 - DNA, 100 bp, Homo sapiens
gttgctgtgcgactattctccgggagccgtccgtgtcaccgccggaacctggcgcagtgccggtggtggtgtgcacattgagccccggtatagacagttc

SEQ ID NO: 783460 - DNA, 90 bp, Homo sapiens
ctggtctccatcggggcagaaggctgcaggggacagcgctggaccgtacagacctgcctaacatgccagcgcagccaacgcttcctcaat

SEQ ID NO: 783461 - DNA, 100 bp, Homo sapiens
aggagctctttgacttcttgcatgcgagggaccattgctacaattatcagaatccttggaattatggacaatattatcctccccctccaacctgatggga

SEQ ID NO: 783462 - DNA, 74 bp, Homo sapiens
ggatttccaaggaagaatttcctctgaagcaccggtacatgtcccagagcaagcacacggaggcccgggagctc

SEQ ID NO: 783463 - DNA, 100 bp, Homo sapiens
acagtcgactcttctcatcccccaaagatcattctgcctgggaaagaaatgaaagtctttccaatgcaggccaggcagtacatgcagatgctacccaagg

SEQ ID NO: 783464 - DNA, 142 bp, Homo sapiens
acgagcaccatgtcgaatctgagcaaaggcacgggcagccggaaggacaccaagatgcggatccgggcctttccgctgaactagatgcagagcacgcccagaaggtcctggaaatggagcacacccagcaaatgaagctgaa

SEQ ID NO: 783465 - DNA, 75 bp, Homo sapiens
ggggcttccggtggctgatcttcaggatcatgcttggagcagattgtcagtggcttcgccccgaggagagctgac

SEQ ID NO: 783466 - DNA, 80 bp, Homo sapiens
cgatcagagatcggcggagaccctcgaagtgcgcaaacttgacactcaccctgaccggtgatgtgtccaatctagatccc

SEQ ID NO: 783467 - DNA, 100 bp, Homo sapiens
gttctaagattagtcattaatttgagtagttcagtttcaactaaatgtcatgagactgggcttttaacgaatttggataaagagagggcagtgctactac

SEQ ID NO: 783468 - DNA, 100 bp, Homo sapiens
gtggaacggctgcttttggaaggatgctgcagctgattcagagtaggctacaagaagagcattcacttcaagatgtgatatttaaaagtgcttttaaaag

SEQ ID NO: 783469 - DNA, 90 bp, Homo sapiens
cctatagatattttatccacaactggccacagctgtgcttcttgattgatccaaatcctgatcagtcagcagatgatagaccatcctgcc

SEQ ID NO: 783470 - DNA, 51 bp, Homo sapiens
ggccattgagaaattgttgaggcagttttaagcagggtctgaaaacccttg

SEQ ID NO: 783471 - DNA, 75 bp, Homo sapiens
ctgagcctgttggaggaactggcccggaaacaggaggacgaaggaagcagccaccctcgccatggcctccccgcc

SEQ ID NO: 783472 - DNA, 100 bp, Homo sapiens
agaagctgcagccgcacctggccaagggccccctcttctctcctggaggtcagccggccccttgtggctctcaggccagctggaccaagtctcagaaccc

SEQ ID NO: 783473 - DNA, 75 bp, Homo sapiens
ggccttgtcagaacccgagatgagaggagagagaatgtcaaaactggaccaatggggccaggctgaagtattgaa

SEQ ID NO: 783474 - DNA, 87 bp, Homo sapiens
agtccgtatgctgagaacctggagcaggaatgcggggaagctgagtgaagagaatatctcagggatgacaagcttccgtgaagttct

SEQ ID NO: 783475 - DNA, 82 bp, Homo sapiens
ttggaagcagccgatccagcctgcggagcctgtggggcagccctgccaaggtaaccctgctggggtcagttatcttcacatt

SEQ ID NO: 783476 - DNA, 100 bp, Homo sapiens
gggccttgggcccgtaatctcacgacctccgcctgcggcctcctcgcaaaacaaggcacctgcggaactcgagtcatgcaggagcttttgtgatcgtgac

SEQ ID NO: 783477 - DNA, 51 bp, Homo sapiens
ggcacaaggccaggttcccaagagctcagagagagtctacaaggagattga

SEQ ID NO: 783478 - DNA, 50 bp, Homo sapiens
ccttccatagggctgagtctgggaccgagaaataagcgggttttgaaaac

SEQ ID NO: 783479 - DNA, 98 bp, Homo sapiens
ttcagtcgcatcagcatgaagctgccccggatcccgctccggaggcagaaactacccaaagtcgtagacgatcgtcaccggattgaggagaaacgtaa

SEQ ID NO: 783480 - DNA, 99 bp, Homo sapiens
catccgctcgacctcgtgaagatccgcttcgccgaaataaacggtgactggcaaagagctgatgcagtctggaataaaatccaagaagaaaatgttatt

SEQ ID NO: 783481 - DNA, 97 bp, Homo sapiens
caccacatttgtgagaggaaaaatacagaggagacacaccttgaagaaacaacagagagccaacagaatggtgaagaaggcacgtctactcctgagg

SEQ ID NO: 783482 - DNA, 100 bp, Homo sapiens
aaaacgtcacttttaaaaaataagtaatgccatctgttttcctaaaagactgaaatgggggcgaccattcttagcggttaagaagattgtctaccaaata

SEQ ID NO: 783483 - DNA, 83 bp, Homo sapiens
cactcggctcctgtcgtccgttctctcaggctcccgttcagcaatggctgccatccggaagaaactggtgattgttggtgatg

SEQ ID NO: 783484 - DNA, 74 bp, Homo sapiens
ccgactgcactcacacgacgtgcgctatgggtcagggatgatgcagtgtgtgattgcagtcgcggacaaagtat

SEQ ID NO: 783485 - DNA, 98 bp, Homo sapiens
ctggggtcaccttgaaggcaccgcaggagttcatgatcaagtgttgcccacaccaaatgcttcatccagagtcatagtacatgtggatctggattgct

SEQ ID NO: 783486 - DNA, 83 bp, Homo sapiens
cttcacggtgcatcccaagcccaagttatctccagaagaagaagagaaaaggagaatccgaagggaaaggaataagatggctg

SEQ ID NO: 783487 - DNA, 101 bp, Homo sapiens
ggggccccacgacctccacgctggactggtgcgaggagaactactccgtgacctggtacatcgccgagttctatggttatgtccttcggagttacctagcg

SEQ ID NO: 783488 - DNA, 73 bp, Homo sapiens
ctggttgttccgttgcgagctgcagctgcgatctctgtggtaggcccaggtaagaagtgcaaattatgaaaca

SEQ ID NO: 783489 - DNA, 100 bp, Homo sapiens
cccaactgcgcccggtgcggcaagatcgtgtatcccacggagaaggtgaactgtctggataaggtgttcaagcagccctggccagggatcatgcgcacag

SEQ ID NO: 783490 - DNA, 100 bp, Homo sapiens
gtcacctctgtgtcctggtggagccataaggagtgtgaggaagaggctgtctgtgtcattatgtgtgcgtcggtcaagtataatatccggggtcctgccc

SEQ ID NO: 783491 - DNA, 100 bp, Homo sapiens
gactagcggcggcgggagcggcgccgagaggccgtgcgggacgcgggcgccaggaccggccgaacgcagaggtactggttttggattaggaattgttttc

SEQ ID NO: 783492 - DNA, 90 bp, Homo sapiens
tagccagagaacagccctccatcttgcagcccagaaggctgtgtggttccgggtgctggtgctgtggaagtggcaatggcagaagccctg

SEQ ID NO: 783493 - DNA, 80 bp, Homo sapiens
gccgggccctgtcgcgaacctccggcgcgctgccccgccggaccgtggaccacagcgataatcttcttagagttgcaggg

SEQ ID NO: 783494 - DNA, 90 bp, Homo sapiens
gcagacatgaatacatttcccaccttcaaatttgaagccactgtgtcgaactcccagcaggcttaccaggaagcatttgaaattagtaag

SEQ ID NO: 783495 - DNA, 75 bp, Homo sapiens
gatccatttctcctattgaggagtcaaccgcctgcctccagcaccctgaagatgctgtgtgatatgtcctcctta

SEQ ID NO: 783496 - DNA, 100 bp, Homo sapiens
caggtccttgccgagggggtcagcagcccagcccctacccaagacacccacatggaaacggacctgctcagcagccttgtaactacttggtgccagcatg

SEQ ID NO: 783497 - DNA, 50 bp, Homo sapiens
gtacaaaaacggcccttggatgatggagatgattccttcagggttaccag

SEQ ID NO: 783498 - DNA, 82 bp, Homo sapiens
gggaatgatccttactaaccacgaccatcaaatccgtgtcggagtccttacaggttgacatcatggacatatgtgagtccat

SEQ ID NO: 783499 - DNA, 100 bp, Homo sapiens
ggaaggaagattcttcttctgcagaatttcttgaaaaacggagggccgctttagaaaggtggaggagtctggcgagcatgtgatcctgggcactggggag

SEQ ID NO: 783500 - DNA, 100 bp, Homo sapiens
cagaaggcagagtttatttttgagtggttgagatacttggagaagctcttgttggcaaccagcaggggttatgtaccgaaggactctaccgtgtcagcgg

SEQ ID NO: 783501 - DNA, 75 bp, Homo sapiens
aagaacaacagtaatctgcagagaatgggctcctccgagtcaacagattcagagagagtcttgctctgtctcact

SEQ ID NO: 783502 - DNA, 50 bp, Homo sapiens
ggagcccagacaccagccccccaccatggaatactcccccagttgcaaga

SEQ ID NO: 783503 - DNA, 75 bp, Homo sapiens
cccagttcgggcagctggtctaccctgctggaggcgcccaggacaggctgcacctacagatggtgaatatctccc

SEQ ID NO: 783504 - DNA, 90 bp, Homo sapiens
ggcaactagacaccgcgaaatgctgaagcgctgtaaaactcagcttaaggtttgctggttggctcccgagcagacagcaggaaagaagaa

SEQ ID NO: 783505 - DNA, 75 bp, Homo sapiens
accacagcaggtaccccaggcaagaatctgagcagttataacagctgtgagccgtgagctttgaggcggtgggat

SEQ ID NO: 783506 - DNA, 101 bp, Homo sapiens
ggcggcggcgcctcaggcacctcggcccggaacaatccatttcacagatgaagaaacagactcagtgagcacgtgatcacttctcacaactaatggagcca

SEQ ID NO: 783507 - DNA, 100 bp, Homo sapiens
gatagcttgaacagggctgacaacatttttccttttccggtctcgtctacagaggactggtctttcaatagcaagttttcacttcatcgacaacatcacg

SEQ ID NO: 783508 - DNA, 90 bp, Homo sapiens
tttgtgttcacaggaactggtaatgtttctaagagaatggatcttggagaatgtctgaaagtccatgacctggctttaagagcggattat

SEQ ID NO: 783509 - DNA, 83 bp, Homo sapiens
gagcccttgagttggtcacttgaaccttgggaatattgagcaattctgtggtgttcttggtcacacatttatggagtttctga

SEQ ID NO: 783510 - DNA, 100 bp, Homo sapiens
caagttctacttcagtttgataaggctataaatgcagcactggctcagagggtcaggaacagagtcaatttcaggatccgtgggcgtgagcgcttcgaga

SEQ ID NO: 783511 - DNA, 100 bp, Homo sapiens
gcctcccgagtagctgggaccacagggctcagcctgttgctgcttcccttgctcctggttcaagctggtgtctggggattcccaaggcccccagggaggc

SEQ ID NO: 783512 - DNA, 90 bp, Homo sapiens
tcataagcgaaacagcacactgtttgaataaagagcgagtcgcctggtctgccacctcagaacttttcaatgtctgtcacagttccagtg

SEQ ID NO: 783513 - DNA, 89 bp, Homo sapiens
tgggcagtgagaatccaagcaaacatgacagcttctggaacttgcctgggccgagccagtggcccccagaggatgagaaggaggtgatc

SEQ ID NO: 783514 - DNA, 101 bp, Homo sapiens
cccggctgccgccgccgccgcctcggccgaccagggacctgcccgcctgcggctgctccgggaaacaaaccatcaggcctcccagaaagtatccgggatct

SEQ ID NO: 783515 - DNA, 135 bp, Homo sapiens
tcggtctctgtcttggcacctgcaggaaacaagctcctacttccagaaaaagtgctcctgggactccaggataccagtgtctctttctgcacattcctggcacatgagtacccagacctagtgcacaaggtgatc

SEQ ID NO: 783516 - DNA, 88 bp, Homo sapiens
aggggagggggcgttagccccgcgcagccgccggcgtcgccgccatggacctaggaagctcttcgtgggcggtcttgactggagcacg

SEQ ID NO: 783517 - DNA, 50 bp, Homo sapiens
gaaattcttgctggaggctgcgttagccaatatacctttgctatgtgcag

SEQ ID NO: 783518 - DNA, 100 bp, Homo sapiens
gacttggtgattttcctggaaaattataggaggaaaactccctcttcgtcatgaccaacgtgatcctcaccatgaaccagacacagggcctgtgccccga

SEQ ID NO: 783519 - DNA, 90 bp, Homo sapiens
ggaagctggtaggcacgggcggctccgcagtgaccggactcgggggagtttcagaagaggagccccgccgaggcatgagggccgtgctcc

SEQ ID NO: 783520 - DNA, 50 bp, Homo sapiens
tcccctaaactggggcctggaaaaggtgtggacaacagtgagtatatgcg

SEQ ID NO: 783521 - DNA, 101 bp, Homo sapiens
gagatctgggaaaaaatttgtcagatgccagtgaactctgaagtcatgtatccacatttaatggaaggcttcttaccattcagcaatttagttactcatct

SEQ ID NO: 783522 - DNA, 78 bp, Homo sapiens
gcgggtacagcttttcgctgactacattcagatacagatccacgggttttagaaaaacaagaattacagcagccaacc

SEQ ID NO: 783523 - DNA, 100 bp, Homo sapiens
cttttggggggaaactaggtcgatggtcggcggcgcccggatgggcagctgagcttccctctgtgtgttgcagtcctgtggcattatgcatgccccctcc

SEQ ID NO: 783524 - DNA, 97 bp, Homo sapiens
gtgacgtcagttggcacccctttgaagagaagattgtcagcagttcggagggctctgagagatttcatttctgtcctgctgatgaagtctacgttca

SEQ ID NO: 783525 - DNA, 75 bp, Homo sapiens
tcttttccttattcttctgatgtggatccaggtgtctgacttccagcaactgctggcctgtgccagggtgcaagc

SEQ ID NO: 783526 - DNA, 108 bp, Homo sapiens
tgagaggaacaaagagcttataaatacattaggacctggaattcagttgtcgagccaggacggtgacagcgtttaacaaagcttagagaaacctccaggagactgcta

SEQ ID NO: 783527 - DNA, 98 bp, Homo sapiens
cacgacccgctaccctggggcctattacattttccagatcaaatctgggaatgagggcagagaattttacatgcgggatctgccagagcatcttttgg

SEQ ID NO: 783528 - DNA, 100 bp, Homo sapiens
gctgcatcaggaccacattacctttgccatgctgctggcaagaatcaaactgaagggcaccgtgggactccccatccccaggatgtcaacctcagtccct

SEQ ID NO: 783529 - DNA, 101 bp, Homo sapiens
tttaagagaagaaatggacatgattgcctaaatcagccaaacacaggcccaaggcttattgatatttgcggagttgatttctgcgattaagaggacgttgg

SEQ ID NO: 783530 - DNA, 89 bp, Homo sapiens
ggcagaggtggaggcgctttgaaagcccaggatggcggcccaggtgactctggaggacgcgctgtccaacgtggacctcctggaggagc

SEQ ID NO: 783531 - DNA, 100 bp, Homo sapiens
ctcatcattgtgttaatggtgaagcacagcgattcccgagaaatacgaatgtgctttaaagcgagcaagtattaaaattgtgactcctgactgggttctg

SEQ ID NO: 783532 - DNA, 83 bp, Homo sapiens
cgggacagctctctagaaactcgctctaaagacggaaccgccacagcactcaaatggaaatcatattatgtagaatacttggg

SEQ ID NO: 783533 - DNA, 82 bp, Homo sapiens
gggaggaaggaacgaggcaaggagctaaagcagcgtgcgttcagccctgggaaaatgtggtgacctggaagaagaactcaag

SEQ ID NO: 783534 - DNA, 95 bp, Homo sapiens
tacgtggccgtcaacaatcccaagaagcaggaatgaaagtggcgctttctccgccccaggggcatggtctagtggcccagtcaggacgcggaaac

SEQ ID NO: 783535 - DNA, 120 bp, Homo sapiens
accctcggatacgatagaaaatgtaaaggccaagatccaggataaggaaggacctgagggcactcgctttgctcctgtcagtacacactcccaaacagttaaacccagctctaattccaa

SEQ ID NO: 783536 - DNA, 83 bp, Homo sapiens
ctgtcaacaactggatgtccagaaatttgtcagaggaatggctgtgaatggatgcctggaaggaccatcctctaattttctca

SEQ ID NO: 783537 - DNA, 100 bp, Homo sapiens
ctttgatgctagcctgtccgggatcggccaggaactgggtgctggtgcctatagcatgagttggtgacaaagttcctgctgatataaggttaacttccat

SEQ ID NO: 783538 - DNA, 100 bp, Homo sapiens
ccgcgctccctccgccgccgccgccttgctgctgctcaaagctgctgccgccccttgggctaaaaggctcaggcccgatgtcaccgcataggccagagca

SEQ ID NO: 783539 - DNA, 100 bp, Homo sapiens
gttcagtcagattggaccctgtaaaagctgtaaaatgataacagagctcaatagtggcataccagccagctggagacaacagtcacacctttgatgtcac

SEQ ID NO: 783540 - DNA, 100 bp, Homo sapiens
gatcaggtgttaaaaaatgataatgtgcataaaattcaacccagctttcaaagtccagtcaaaatatcagccaaacatcatgtcaatggcaacagaacag

SEQ ID NO: 783541 - DNA, 83 bp, Homo sapiens
cagaggaagccttgaggacctactcacagataggaattgaagttaattggccttggtcctcacagctccaaaaagaaacagga

SEQ ID NO: 783542 - DNA, 96 bp, Homo sapiens
ggctttgagaaattttgagtcctcgagtgaatgggcggatctcatatcttcacttggcaaactcaacaagtacacattttggaactttatacccaa

SEQ ID NO: 783543 - DNA, 75 bp, Homo sapiens
gcagatgagaaggttcagttggcaaaccagatatatgacttggtgatctgcaactctttcaccatctgtaatgcg

SEQ ID NO: 783544 - DNA, 100 bp, Homo sapiens
gggtgggagcgcagcgaagtggactatggccgccggctgagtgctgacatccgtggatatcaaagtattgcagagtgccttagcagccatccgacatgcc

SEQ ID NO: 783545 - DNA, 51 bp, Homo sapiens
cgtacgaataccctccgcctatcaggaggcggcgacggcggcggcgggggg

SEQ ID NO: 783546 - DNA, 125 bp, Homo sapiens
gagaccgtgaccgagagcgtgaccgagagcgcgaatatcgtcatcgttagaaggaccgtataatagacgctggccccaaaggaaactactctcgatttatgaatcacagctgccagcccaactgt

SEQ ID NO: 783547 - DNA, 98 bp, Homo sapiens
agaagagtagagggccaaaaggattccattttgaggaaaaactacagtttgccttgccaggtagaagaatcagtgcctgatttgagatggggtcccag

SEQ ID NO: 783548 - DNA, 98 bp, Homo sapiens
ccagaccttcctctgaaggcaaagtgacctgtgagttcaaggaggccttctccctctttgacaaggatggagatggcactatcaccaccaaggagttg

SEQ ID NO: 783549 - DNA, 100 bp, Homo sapiens
gaagacctgcgaagtccctctccaggtctacatctccgaaatcgcctacccagcagtccgggggttgctcggctcctgtgtgcagctaatggtcgtcgtc

SEQ ID NO: 783550 - DNA, 127 bp, Homo sapiens
agaaagccagcctaatccaaagactgtggaacttttaagtggagtggtggatcagaccaaagatgggtagacacagcatcatctctacccataaaagatggcattctgcaagactgagaagatgccc

SEQ ID NO: 783551 - DNA, 90 bp, Homo sapiens
cacactgaagagtacgtcttcgggtctacccctaatcacattttgtacttcagctgctgatatgaaaattagattatttacttcagatct

SEQ ID NO: 783552 - DNA, 98 bp, Homo sapiens
gcaccggaggggagggccgggcgcggcggcggcggcggtggaggagccggagcataatgatacctcttctggctcagaagatgaaggctcagtgcagg

SEQ ID NO: 783553 - DNA, 100 bp, Homo sapiens
ggaaagagtttggcgttgaaagaagtggtgtttactacaatctggaggcaagatctttcctcagtatgtgctgatgtttgggttgcttgtggaatcacag

SEQ ID NO: 783554 - DNA, 100 bp, Homo sapiens
ctagcggatgggtgctattgtgaggcggttgtagaagacccaacatgagtgaagtttcctgcaagaaacgggacgactatttggaatggccagagtattt

SEQ ID NO: 783555 - DNA, 75 bp, Homo sapiens
aggacggcgagtttgagatccaggcggaagatgacgcccgggcccggaagggtgtccgcaatgttgccagtgtct

SEQ ID NO: 783556 - DNA, 89 bp, Homo sapiens
cctctcgcccacctctacccggcagcgggggcagtcagagcggagccaagatgcgaatgggactttatattcagagcaccaatcaaatt

SEQ ID NO: 783557 - DNA, 98 bp, Homo sapiens
gactcctggagatcgacccgtacttgaagccctacgccgtggacttccagcgcagggagggaagatccctgtgagatggacagctccagaggccatcg

SEQ ID NO: 783558 - DNA, 100 bp, Homo sapiens
gatgacaatgtctttgttccaccagagtcattgcaggaagtggatgagttccacctcattttagagtatcaagcagcaataagagctaactgccatcaag

SEQ ID NO: 783559 - DNA, 82 bp, Homo sapiens
gaaagagtcatacctggagcagcagcagaatcaaattggatatccccaaccttatggccagtggggccagtggtatggaaat

SEQ ID NO: 783560 - DNA, 75 bp, Homo sapiens
gagaaagagaaaggatttctaagcaggaactccccaggtacaggtttgcagattccgccagcagcacagcaagct

SEQ ID NO: 783561 - DNA, 100 bp, Homo sapiens
agaaaatttggaagaaaaccagcatgaaattacttgaccaagttgtccctccagctggtgggggagctgatcaccttctattactattggaagaagaccc

SEQ ID NO: 783562 - DNA, 74 bp, Homo sapiens
tcatctccctgacaacccagataacaggttgctgaagcagaagattgttataatacagctctccgtctgtgtcc

SEQ ID NO: 783563 - DNA, 50 bp, Homo sapiens
gatgcgggccgtgccccttgaggcggctatgaactctccaaagtggaagg

SEQ ID NO: 783564 - DNA, 75 bp, Homo sapiens
cgagtgcggcccggaggcggcggagggcaccccgggcgggcggcggctgcttcttgctctgttgcccaggatgga

SEQ ID NO: 783565 - DNA, 100 bp, Homo sapiens
aagaagtcggacccggaaagaggctttgagagagtgggaagggacgtgtggtgtgctactgcggaaggtgaatggcacagccattatccagctgccctct

SEQ ID NO: 783566 - DNA, 100 bp, Homo sapiens
gaaagagtccatcagatttgtggaaagaagacttggctacatttattgaagaattggaggctgtgctgcaggcgctggggtccgtggtggcagtggagga

SEQ ID NO: 783567 - DNA, 112 bp, Homo sapiens
cggggctggacgcagcaagcggggcgctgtgtccccaagctccccgtcctcgggttaattatagaaaatgccaagtaggaaatttgccgatggtgaagtggtaagaggtcga

SEQ ID NO: 783568 - DNA, 96 bp, Homo sapiens
ctgaacttccctggtcgaacagttttttctaatggctattcaagatctattcttacatacagccgaattggaggacgagtcaagacgctcacattc

SEQ ID NO: 783569 - DNA, 50 bp, Homo sapiens
ctgtctcagcccatccctacaaatccagctccaggtcccacaggggctct

SEQ ID NO: 783570 - DNA, 75 bp, Homo sapiens
cagcgcaaccacgagacggccttccaagcaactccgaagtcaagcccgcactctgattacctttgctggaatgat

SEQ ID NO: 783571 - DNA, 83 bp, Homo sapiens
ctttccgtccaccaagagaaagcgggacagaggagcgggcagcaagcggaaacgagctgaagaagaagctgttcaaacgccgg

SEQ ID NO: 783572 - DNA, 100 bp, Homo sapiens
cgccatgggctcctcgcaaagcgtcgagatcccgggcgggggcaccgagggctaccacgttctgcggggagaaaacatggagatatgaatgactgtgtgg

SEQ ID NO: 783573 - DNA, 75 bp, Homo sapiens
cggaacccgccagggtccagggtccaggttccagcgcccggcggcccaggaacttgctactaccagcaccatgcc

SEQ ID NO: 783574 - DNA, 95 bp, Homo sapiens
ggtgagatggatgagtccagcattctaagacgaagagggctccagacatatgtagagtgtgtcggtcagaaggaacacctgagaaaccgctttat

SEQ ID NO: 783575 - DNA, 97 bp, Homo sapiens
ccggggctggggaaatgtcagctattctgagggccttggaagctggactcagttattttcgccctggtacctgacagtgtaaagaaggagctcctac

SEQ ID NO: 783576 - DNA, 83 bp, Homo sapiens
ctcccgcccacgtcccatttcgcccctcgcgtccggagtccccgtggccaggtcaccgacgatgagggcgcacctgctgtcct

SEQ ID NO: 783577 - DNA, 90 bp, Homo sapiens
tcttcgggttcgtcctcttcttggtgctgtggctgatgcatttcatggctatcatctacacggtgcaacaccggaggatttcagcaacct

SEQ ID NO: 783578 - DNA, 76 bp, Homo sapiens
cacaaatgctccttctcctggagacgcaactcaagctggagaccatggccaaaatggaggtgaaaacctcacttct

SEQ ID NO: 783579 - DNA, 75 bp, Homo sapiens
tatttgtccctcagtggagaacaaggcgtgatcctaatgtcacaggatcatcttctccacgcccctggccgtcat

SEQ ID NO: 783580 - DNA, 143 bp, Homo sapiens
agctgaaccaagaaaaccttatcagcactatttgaaacttttatctcatctggcttggcgcctgaggttctcccattagatggactagaggcttttaccagatttcttaaaactgaattcagtgaagaaaatattgaattttg

SEQ ID NO: 783581 - DNA, 100 bp, Homo sapiens
agcacattgagaggtccaagatgcagcaggtcggaggaaacagccagaccgagagcagcctgccggggcggagctatttccttcgtgctaccatcagccg

SEQ ID NO: 783582 - DNA, 50 bp, Homo sapiens
aacggcttcatcagcaccttgggtgaacacctacctcttcatgatgcaag

SEQ ID NO: 783583 - DNA, 100 bp, Homo sapiens
ataaggaactctatcccaggaatacagctttgcattagctgacaagctctctactgatgatctgaactccctcattgctcatgcacatcgtcgtattgat

SEQ ID NO: 783584 - DNA, 82 bp, Homo sapiens
agtcatgtaactataagcagcttcggaaaggagccaatgagggtggggtggaagacaacccgtgagtattacaccttcatgt

SEQ ID NO: 783585 - DNA, 80 bp, Homo sapiens
ccataaccggggatattctccccaggctacataaatgccttgcatctacgtttcctgctctacgaaacgcactcttttgc

SEQ ID NO: 783586 - DNA, 75 bp, Homo sapiens
gtgtccttgagctgacagaggcagagctggttactgcggaggctgtgcggtatggcatgcagctgtaccagaatt

SEQ ID NO: 783587 - DNA, 105 bp, Homo sapiens
cgtcctcggcggccccggcgccggcaaggggacccagtgcgcccgcatcgtcgaggtcaaaatgcagatcttcgtgaaaacccttaccggcaagaccatcaccct

SEQ ID NO: 783588 - DNA, 100 bp, Homo sapiens
cgcaggggatataaatactatctaccagccccccgagcccagaagcaggcacctctctgtcaaaggaggccccaaccctgagcacaacagcaacctggcc

SEQ ID NO: 783589 - DNA, 90 bp, Homo sapiens
tttcatccctcgtcgaaaggattggattggcatctttagattttccacctatttccctggatattttgatggtcagtactggctctggtg

SEQ ID NO: 783590 - DNA, 87 bp, Homo sapiens
atggagtcttccatcaatcatatctcacagcacccccaaattcagaaggagtcccagtatatcaagtatctctgctgtgatgacaca

SEQ ID NO: 783591 - DNA, 118 bp, Homo sapiens
gtggaggagctgtgcagccgcgaggaggcgcgggaggtgttcgagaacgaccccgagacgactcggagccgtgggtcccgactgaacatcatcatcatcgctgagggtgccattgacc

SEQ ID NO: 783592 - DNA, 100 bp, Homo sapiens
tcatctcgcagaacgccatcaaccagctgaactcagcgagatgctgtacacagaccggcccgactggcagagtgtgatgcagtacgtggcccaaatctac

SEQ ID NO: 783593 - DNA, 90 bp, Homo sapiens
gatgtccaggaaggaggaggaataatatttatggagcatatattatggaacacagaggagatgttaaagtaacccatcttgcaggacgac

SEQ ID NO: 783594 - DNA, 100 bp, Homo sapiens
tgcagtacatgacgagggggagtctcctccagtgactgctcaagaaactaccccccagcagttgaacccaggctttcagctttcttttgcatcatctggc

SEQ ID NO: 783595 - DNA, 100 bp, Homo sapiens
ccagcttgccaccaaagacctgcgactttgctcaggtcaaaatgcagatcttcgtgaaaacccttaccggcaagaccatcacccttgaggtggagcccag

SEQ ID NO: 783596 - DNA, 100 bp, Homo sapiens
ggaaggaggccgagccgggatctcaggtcctcgggggcggcggccacgccaaggacgggacttcaaacaagtgtgaagaggctgtgtggcgagattgtgg

SEQ ID NO: 783597 - DNA, 75 bp, Homo sapiens
ctcaccgaggacggggactcggcgccaatgcttcggcattagagaaagagattggtccagaacagtttccggtca

SEQ ID NO: 783598 - DNA, 83 bp, Homo sapiens
aggacggccatcgagatcgtggtgcagatggccgcggccaacgggcctggtccgacccccagtggcactaacgtgggatcctc

SEQ ID NO: 783599 - DNA, 100 bp, Homo sapiens
cagcggctgagtagagccatgagccgatgtgttttggagcctcgccccccggggaagcggtggatggttgtgaccgagattcccgacgagagagactgag

SEQ ID NO: 783600 - DNA, 75 bp, Homo sapiens
tggatatccacaccatccttctcgctgcagggctcaagttgatgaaggagtccctctgaagatttgcttatctca

SEQ ID NO: 783601 - DNA, 74 bp, Homo sapiens
gagatgtaccccagcccttatttaattcagctgtcaaccaagaaggatggctgacttcaggctgcggaaactga

SEQ ID NO: 783602 - DNA, 50 bp, Homo sapiens
aatggggagcaggaggctgacaatgaggtgatctgtgaaaatggttcgct

SEQ ID NO: 783603 - DNA, 73 bp, Homo sapiens
ttgcgggaaaaggagagctcggctgttccagccaggctctgggagacgtggaggcctctgaagctgaagacca

SEQ ID NO: 783604 - DNA, 98 bp, Homo sapiens
gttcagcctggactcattcagaaaagggcaacaaaccatggatttctcttccccgaggaaagggtatccgcctcaccattgctgaagagagagacaaa

SEQ ID NO: 783605 - DNA, 83 bp, Homo sapiens
cttctctgtcagctctttccccgtcagcatcccagccgtgctcacggtgagtcgctctgcctgtctgatgacgacacagctga

SEQ ID NO: 783606 - DNA, 99 bp, Homo sapiens
cagggggcaggcccgccgaccgccgcttccggccgcccaccaacctgcgcagcgtgtcgccctgggcctacagatgagttctcaggcttggagactgac

SEQ ID NO: 783607 - DNA, 75 bp, Homo sapiens
caggtgaacaggcagccatcctcagcagcagtcagcaggaactgatcatcaaagacggagtctcgctctgttgcc

SEQ ID NO: 783608 - DNA, 100 bp, Homo sapiens
gcaaagccaaaagaaatttcagaaattcaacgtttaaattatgaacagatgttccaggtcatccagccagagcgtgcgctgtacatccaggccaacaact

SEQ ID NO: 783609 - DNA, 88 bp, Homo sapiens
ctgcagaaaaagaggctcttcctcctcctcccgcgacgagtcgacttcaatgttcctatgaagaacaaccagataacaaacaaccaga

SEQ ID NO: 783610 - DNA, 90 bp, Homo sapiens
ctggagctgtggagttgatcctgaatgaaagtggcgcgccgcccctgacgttacccggatcggagaggtaaaacttccttttcctgtaga

SEQ ID NO: 783611 - DNA, 75 bp, Homo sapiens
ggctacggatggatatgtcaggaatgtgattcttcatcttccaaggaatcatcggaatccttcaccatggcatcc

SEQ ID NO: 783612 - DNA, 75 bp, Homo sapiens
tacatggtagagaaccacggggaggactataaggtaatccacgacttcttattctccttgaaggaaagcccagaa

SEQ ID NO: 783613 - DNA, 50 bp, Homo sapiens
tctaccagatggctctcaaccagaacgtggacatctcaagacctccagag

SEQ ID NO: 783614 - DNA, 50 bp, Homo sapiens
caaaggattcggatttattaagcttaataactgaagtgaagtgatggact

SEQ ID NO: 783615 - DNA, 90 bp, Homo sapiens
cggcggtcgacatgttccaggtcccggatagcgagggcggccgcgccggctccaggtattgacctgatggacatggcttcggacatcctg

SEQ ID NO: 783616 - DNA, 75 bp, Homo sapiens
cggatcaatccagatggcagccagtcagtggtggagaaatttctgaataaattggcagaagaacgcagacagaag

SEQ ID NO: 783617 - DNA, 115 bp, Homo sapiens
tcgctcccatcgtcatctttgcatccaaccgaggcaactgtgtcatcaggttgggagaagaacaatcaccaaaaatgcagagtggggagcgggcctgagtgttggacctctcctt

SEQ ID NO: 783618 - DNA, 75 bp, Homo sapiens
ccccagcctccggcggcggcccgcagagaccctcggagaacctcaagaaggcatgaagccagcccctgcagtgcc

SEQ ID NO: 783619 - DNA, 100 bp, Homo sapiens
cccaagaagaccattcagatgggatctttccggatcaatccagatggcagccagtcagtggtggagatcactaaggaggaagagcgagagaagaagtttt

SEQ ID NO: 783620 - DNA, 98 bp, Homo sapiens
gaacaacacggtgttcatcttttctacagatgggaaactcttgtctagtgatgtgactcattacgtgatcccagactggaaagttgttcaagattatc

SEQ ID NO: 783621 - DNA, 83 bp, Homo sapiens
ctcggccgcgcggactgaaggagactgaaggtgagaagccctaccactgcaactgggacggctgcggctggaagtttgcgcgc

SEQ ID NO: 783622 - DNA, 100 bp, Homo sapiens
tgacacgacaaaccactttctgcccctggatatgctgtccctaatgcaactgcacccgtgtctgcagcccagctcaagcaagcggtaacccttggacaag

SEQ ID NO: 783623 - DNA, 75 bp, Homo sapiens
agaaattcaacgtttaaattatgaacagtccatcaataaagccatggagaaagaccatgaagaatacaacattgg

SEQ ID NO: 783624 - DNA, 90 bp, Homo sapiens
cgcggaactcggcggccgccatggcgtccaacatggaccgggagatgatcctggcggattttcaggttatttggaaatagcggtgcttgc

SEQ ID NO: 783625 - DNA, 72 bp, Homo sapiens
aacctcactggaacaatccctgtgccttatagagtgctcacatggagtggccaagaagaagtagtgagtcat

SEQ ID NO: 783626 - DNA, 101 bp, Homo sapiens
caaatacgaagggacctggagcaacgggctgcaggacggctacgggaccgagacctactcggacggagatcactccaagaactgaggcccctgtcagcagt

SEQ ID NO: 783627 - DNA, 50 bp, Homo sapiens
cccagcagaggtaccagccgcagcagcaacgaagtggtgaatctgttaaa

SEQ ID NO: 783628 - DNA, 50 bp, Homo sapiens
cagctggtggcagcatacaaagatgaggaaaactttgagttcctgatcgt

SEQ ID NO: 783629 - DNA, 90 bp, Homo sapiens
attctggttgatgaagaggaaaaagttttgattcagaaaaatctggggcctaaaagcaagttgaccactgaaaaacacacatactatctg

SEQ ID NO: 783630 - DNA, 75 bp, Homo sapiens
ctggaggggctgctgctgggaacacctggagtctccgcgggcaggtctcggcgcggaagatggccggcggcgtgg

SEQ ID NO: 783631 - DNA, 97 bp, Homo sapiens
tgtcagatggattgactatggaaaagttgccaaattggcctccccatggccacccatggaccagtcggcattcacttcctcccttctgcggcccata

SEQ ID NO: 783632 - DNA, 121 bp, Homo sapiens
tctgacgacgtgaaggagcagatttacaaactggccaagaagggccttactccttcacagatcgggagctgcactgtgcgatgggagaataagaccatgtactgcatcgtcagtgccttcg

SEQ ID NO: 783633 - DNA, 98 bp, Homo sapiens
ccgtgttccgtgtctctggattcaagtcccaggagtcctgaccagagagcagaccccaccaacaactgaacgctttggtcaggctgctacaatggaag

SEQ ID NO: 783634 - DNA, 90 bp, Homo sapiens
tagtgatccacgcgcagttcctcaaagaagtttcactgttacatgccttgaagtgatgaggaggtttctgttactatatgctacacagca

SEQ ID NO: 783635 - DNA, 83 bp, Homo sapiens
gtacagcgcttctgggagtccaactcggctgcccacaaggagtcctgaagattatatagacacagaatctcctgtccctccag

SEQ ID NO: 783636 - DNA, 75 bp, Homo sapiens
tcacagtgctgttactaaagcctgcctttccagcacaagtgcatacaccttgatagcaccaaatataaaccggag

SEQ ID NO: 783637 - DNA, 98 bp, Homo sapiens
tcggtgtctgctgcgttcacggcaggattcggttagacaattataggagattttcagaaggaacagaaaaaatttgttgaagagcaacatacaaagaa

SEQ ID NO: 783638 - DNA, 100 bp, Homo sapiens
ccgctgttggcaaatcaagcctagtgcttcgttttgtgaaaggccaatttcatgaatttcaagagagtaccattggggggcttgctttcagaaatcctcc

SEQ ID NO: 783639 - DNA, 100 bp, Homo sapiens
tagactgtcacagaactctgtaaatctgtctcccagcagtcacgcaaacaacttatcagtagtgacttacagtaagagacgggatttcaccatgttggcc

SEQ ID NO: 783640 - DNA, 100 bp, Homo sapiens
ggcttgtggtgcggcctcaccatacaggaacagggcagacgttagcgtgagtgatcactctcaatcccggaaaacaacagttttgttggcatgtgaagct

SEQ ID NO: 783641 - DNA, 75 bp, Homo sapiens
caccgcctcggttcgccctcagccgccccgggagtgcatccgccccaacccttttccccctcgtctcctgtgaga

SEQ ID NO: 783642 - DNA, 110 bp, Homo sapiens
tttggataatgacgacagcaacccgaagacagggaaatttagtttggatgactttaacaattggatttctaaagccataagttctcgagaaactgatcgcctcatcaatt

SEQ ID NO: 783643 - DNA, 73 bp, Homo sapiens
gaagatggggacaaagccgctccacctcccatgtcggcacaggttagaaaatggatttctgactggaatctca

SEQ ID NO: 783644 - DNA, 96 bp, Homo sapiens
gacggtgtggggcggtcccggccccgcagatatcagttttagagaatgtggcgtggagaaattctcaaggaaagagtaaaatgctggtgatgtgct

SEQ ID NO: 783645 - DNA, 100 bp, Homo sapiens
gaaatccattgcccgtgttctcacagttattaaccagactcagaaagaaaacctcaggaaattctacaaggagccgtgtaaagccagtggaatatagtca

SEQ ID NO: 783646 - DNA, 100 bp, Homo sapiens
gctggagacagagctgagggagcaagaggtgtcggaggtctcatctttgaactactgccggagcttctgccagggattccagcagaagttcaccttccac

SEQ ID NO: 783647 - DNA, 90 bp, Homo sapiens
attatctgctctgaaagaattccagccggtctttaaaatgaagcaaattcaacacccaacagcttccttaatagcaaaggtagcaacagc

SEQ ID NO: 783648 - DNA, 83 bp, Homo sapiens
ggagatcgccattatccccagcaaaaagctccgcaacaagatagcagggtattcccatctgtcgacaacacttaatttggaat

SEQ ID NO: 783649 - DNA, 100 bp, Homo sapiens
tgtgtggagttgcaccagcgtgcccgggagtacatctacatgcattttggggaggaggccactgtctgcagctcccgtgaagatgtccactccagaccca

SEQ ID NO: 783650 - DNA, 74 bp, Homo sapiens
gattccggccatttcaatgttgataacatcagagtttgtaaaattctgccaccttttgtggtgacattggatga

SEQ ID NO: 783651 - DNA, 83 bp, Homo sapiens
cgggcgtgcatcatccacggggtgctgcagatcctgttccagcccgtggaccgggagcccgtggaccgggagccggtggtgtg

SEQ ID NO: 783652 - DNA, 134 bp, Homo sapiens
aagacgctgtgtgtggacggaattcgggaccgactgacggccggccggcttcccggaactggaaggatgtacagttacccagcacgtgtacctcctcctcctcctattgctcgggctgtagtgccctcgaaacg

SEQ ID NO: 783653 - DNA, 51 bp, Homo sapiens
attgaactcagctatgcaaagcaactcagggtttcgaaaaaacgatgaaat

SEQ ID NO: 783654 - DNA, 119 bp, Homo sapiens
ggaactagaaaaggcagagatggaacgatctacctatgttacagaagtcagagaggatgaactggacctcacagacaaacacagagaagccatgtttgcacttccagctgagaaaaaat

SEQ ID NO: 783655 - DNA, 90 bp, Homo sapiens
ctgaggacttgtgatcagtgtaaacatggctgggtggcacatgtgtcccttttgatgagaagaataagcctcattctgattcaacagcag

SEQ ID NO: 783656 - DNA, 100 bp, Homo sapiens
caggagcctgccccgccctggggacgaagagctgcagctcctcctgtgcgggtatcctggagttcttccaccaccagctgaaggacatcgtggagtacgc

SEQ ID NO: 783657 - DNA, 90 bp, Homo sapiens
ctgcgctggccgggggcgcgggcggcggcgccggcaggaaggttcgagaacttgtcttggacaattgcaaatcaaatgatggaaaaattg

SEQ ID NO: 783658 - DNA, 75 bp, Homo sapiens
gactactctcagcctactatctgtctggagaagaggtccttatgtcgtcagaagatcgagaagctcaggaggatg

SEQ ID NO: 783659 - DNA, 100 bp, Homo sapiens
cctggacaccatcatgaagtgtgccttcagccatcagggcagcatccaggtggacagcggaacggggccgactacgctgtttacatcaacacagcccagg

SEQ ID NO: 783660 - DNA, 100 bp, Homo sapiens
tttgttcatgagcgtgcagtcactcaatggggattcttaccaaggggcccaggttggagccaacgtgcaatcacaggtgacgactccatgcgtatgtccc

SEQ ID NO: 783661 - DNA, 100 bp, Homo sapiens
tgacatctgtacttcaagaaagctttccagagtgttgaatcttccaccagaaaacttgatcacatcaatatctgcagttccaatttcccaaaaagagtta

SEQ ID NO: 783662 - DNA, 98 bp, Homo sapiens
tgccgcgctcctggccccgcgcgggcggacggcggaggcgcctcccaggtattctgagagaagcctcacaaagtgtattggaattactattgaaacca

SEQ ID NO: 783663 - DNA, 97 bp, Homo sapiens
cgccgcacgagcaccagcctagagccaggttttgaacgaagaatgtgatcagaactggtacaaggcagagcttaatggaaaagacggcttcattccc

SEQ ID NO: 783664 - DNA, 100 bp, Homo sapiens
ttcgccttcgccctttccacctcgcggcagttcggagagaagcctcatcagtgccaagtctgtgggaagaccttctctcagagtggaagcaggaatgtgc

SEQ ID NO: 783665 - DNA, 91 bp, Homo sapiens
gccatacccaataaccaggtgcttggcaaaatcgagcgggccattggttttaaaatcaaagatgggaaaatcggagaaaattgcccttccc

SEQ ID NO: 783666 - DNA, 75 bp, Homo sapiens
ctgcgcatgtttgaggtggccagagatcacctacaccaaacaggctctagattatgaacaactacaaagcgtgaa

SEQ ID NO: 783667 - DNA, 82 bp, Homo sapiens
gaagagagcactgcagccagtgaaaccactgagagaagtcgaggttagagggaactgggaggcactttgctgtctgcaatcg

SEQ ID NO: 783668 - DNA, 75 bp, Homo sapiens
agcaggcgatagcaatgcacagccaatttcatgctccactatagtgctgtaattacaacaattaaccatgatgaa

SEQ ID NO: 783669 - DNA, 95 bp, Homo sapiens
cgtgtggggctgggtctcggagtgggagacgtggagtgcaggcgttcgtggcattcagggatgtggctgtgtacttcacccaggaggagtggagg

SEQ ID NO: 783670 - DNA, 90 bp, Homo sapiens
ctgacgccggagcagctcctaacccagctccagaacctgggtatcaacccagcaaacattggcttcagtaccctgactatggagtctgac

SEQ ID NO: 783671 - DNA, 83 bp, Homo sapiens
ctccgcaccgcggcttaaatgatgtattttgtgatcgcagcgatgaaagaagtctggaacgttttttcttagagttccagaat

SEQ ID NO: 783672 - DNA, 51 bp, Homo sapiens
cagtgactgtggtgcttttgtgttgcaggtttggtgcacctcgatttggag

SEQ ID NO: 783673 - DNA, 75 bp, Homo sapiens
tggacgcgagctgcgctgcaaggtatattttggaacttcacatccaagatactatatctctgccaatgtaactgg

SEQ ID NO: 783674 - DNA, 100 bp, Homo sapiens
agccccatgcactgcctggacgaggaaggcgatgactcagatgggccatctgtgagaaagacacactgcagtggaaggaaacacaaagagaatgtgaaag

SEQ ID NO: 783675 - DNA, 80 bp, Homo sapiens
ggactccagaaaattcagcaaagaagaagcttttaaggctctcaataaacaagactgggtagatggtgagcccacagaag

SEQ ID NO: 783676 - DNA, 75 bp, Homo sapiens
cagaaacaaaatgtcaacaaattgatggaaatttctgaataaattggcagaagaacgcagacagaagaaggaaac

SEQ ID NO: 783677 - DNA, 80 bp, Homo sapiens
ctccagcaccctcatcgccctggccgacaagcacgcaagcaagagcggtgagcggggcgcctatgcctccttcgggagag

SEQ ID NO: 783678 - DNA, 83 bp, Homo sapiens
tggccttcaaccccgagccgctggtgctacagccatccaacatattctttacaatggatgatgtggtcaaggttggagacttt

SEQ ID NO: 783679 - DNA, 80 bp, Homo sapiens
aggcagccaagctcatggcctgccactgcgtgctgcctccggagccagcgtggtggccatagacaacaagatcgaacagg

SEQ ID NO: 783680 - DNA, 98 bp, Homo sapiens
agcacccgccgggtcaccttcgaggcggacgagaatgagaacatcaccgtggtgaagggcatccggatgctgccactttggactctttcactgctgct

SEQ ID NO: 783681 - DNA, 83 bp, Homo sapiens
ccgtgaaccttagggacaacaccgggacacccgcgaggccggaaaatgggggggctgtcggggggctgttaggtgcctggatg

SEQ ID NO: 783682 - DNA, 100 bp, Homo sapiens
aaggtgaaacagattggaaattaattgctatcaatgcgaatgatcctgaagcctcaaagtttcatgacatacaatctttgccagcaacacttcctccttg

SEQ ID NO: 783683 - DNA, 74 bp, Homo sapiens
tcctgcgccggccttgcctcggattttaggtgatgggcaagtcagaaagtcagatggatataactgatatcaac

SEQ ID NO: 783684 - DNA, 75 bp, Homo sapiens
cctggcttttgcagaaagaggagcgttagttgttgccctggcctcccacgactacatcctgaagattgtgcccac

SEQ ID NO: 783685 - DNA, 82 bp, Homo sapiens
cttctttatgtctaccttgactgttacaaacgacggacataagaaagctcgaaatgcttatctcaataattccaattatgaa

SEQ ID NO: 783686 - DNA, 98 bp, Homo sapiens
tcatactgtagaaaaatattcctttgaagaggaatttgagagcgtattttgcggtaaaactggccgaaggctaaagctgaccagaccggactccttgg

SEQ ID NO: 783687 - DNA, 101 bp, Homo sapiens
ctcagagctgcccctggacgaccaggtcatcctgctgcgggcaggtgatgtgtccaatctagatcccaacttctcatttgaaggcaccaaactggatgtgg

SEQ ID NO: 783688 - DNA, 90 bp, Homo sapiens
gtcagtgcgccgctctccagcccgcttgaacggccaggtcagagcagcccaccatgggatggggagggggtggaggctgcaccccgcgcc

SEQ ID NO: 783689 - DNA, 100 bp, Homo sapiens
gagaagaaccatggagactggaggaagaattcccaagccagagctttccaggctaaatggctctctccccaagggtgtggaggcccagaacagaaccctc

SEQ ID NO: 783690 - DNA, 101 bp, Homo sapiens
tgaggcgccgcggtaccatgaggcgccgatgatgctgtgtatctggacaatgagaaagaaagagaagagtatgtcctgaatgacatcggggtaatttttta

SEQ ID NO: 783691 - DNA, 51 bp, Homo sapiens
acgcgccagagcaaaatgggacacacagcagcgtgcagggtcaaagacagc

SEQ ID NO: 783692 - DNA, 50 bp, Homo sapiens
attatccatcttcgccaccaaaatgaaatctggcattttttaaagtttgc

SEQ ID NO: 783693 - DNA, 97 bp, Homo sapiens
ccagcttatagacccaatcaaaaaagaaactagcaaactttttaatgaggaaatgacattaaagtatcagtaaatgattttatcatcaaggcagcag

SEQ ID NO: 783694 - DNA, 101 bp, Homo sapiens
ataggcgtgagccaccgtgcctggctgaaggaacgccgaggaggcagccttgacataaatgatgggcattgtggcaccggcttgggcagtgaaatgaatgc

SEQ ID NO: 783695 - DNA, 75 bp, Homo sapiens
tcagggctccagtcaggccgatccgctccgctcacggaggaggaagccaagaatctggtgagcgaagccatcgca

SEQ ID NO: 783696 - DNA, 75 bp, Homo sapiens
gatccaccagcggttccatcctacacttggggacagtatgatttggtgaaatgcctggctcctattcgagacccc

SEQ ID NO: 783697 - DNA, 74 bp, Homo sapiens
cgccggcaagagctcggtgctggagaacttcgtgggccgaggcagcaggccccaggaggggacccagacaacag

SEQ ID NO: 783698 - DNA, 101 bp, Homo sapiens
cccaggagcccaggggtagacaaaggaggactaagggagtggagcaactgctgtagtccaagcagcttattgtgcccctaaaaaggagaaagtggcaatca

SEQ ID NO: 783699 - DNA, 100 bp, Homo sapiens
caagggccatcgtggtggatcctgttcatgggctcccagccccattgccaataccttcctccactatcgaaccagcaaggtgagggtgctgagggcagcg

SEQ ID NO: 783700 - DNA, 82 bp, Homo sapiens
aggcacttgaccaccccgccctaggccgacccggcggacgcggcgtctgacgcaaacatgcagatctttgtgaagaccctca

SEQ ID NO: 783701 - DNA, 75 bp, Homo sapiens
acagatgtgacacctcggcagttcttcaatgttcaggtccagtccaggtgcagcagcaaggagaacattctcaga

SEQ ID NO: 783702 - DNA, 95 bp, Homo sapiens
cactacagttcatcaacatcaactacgtccctctgaaggcagaagattttcgcaagctctggaaaactccacctcgagagaaagcaggcttcctt

SEQ ID NO: 783703 - DNA, 74 bp, Homo sapiens
ccgggatctcaggtcctcgggggcggcggccacgccaaggacgggtgtaccttgaaagacttttaacatacgca

SEQ ID NO: 783704 - DNA, 87 bp, Homo sapiens
cagcagcccccgaaggccctatcaggacatggagtatgaaagacgccactgaggcggctcccagctgcgttggcgacatggccgaca

SEQ ID NO: 783705 - DNA, 101 bp, Homo sapiens
accacccaagtctgcaatcttaccagggaggccaagcgaccacccaaagaaggactgggctaatgctaatgtcagcagacagattgaggacactgtattat

SEQ ID NO: 783706 - DNA, 90 bp, Homo sapiens
cgccgcaccaggtcttgtagcagcgcctcctcggtcttgagtcaccacgtccgaatataattcttgggttagtaatctgccaaaaaatca

SEQ ID NO: 783707 - DNA, 75 bp, Homo sapiens
tgcctggggtactacggctacagcaaggaatgtttacccttgcggaagttgcatcacttaatgacattcagccaa

SEQ ID NO: 783708 - DNA, 100 bp, Homo sapiens
tgcagcccgagctgaccctaggcctccaccctggcaggaatcccaatttgcctccacttagtgagcggaagaatgaaacctctgcgccatgagagccaag

SEQ ID NO: 783709 - DNA, 75 bp, Homo sapiens
tcttcagattttgaagaagggccgtcgaggaaaagcttccccgggcgctgcctggacaggcctgcctgcgtgctg

SEQ ID NO: 783710 - DNA, 100 bp, Homo sapiens
ggcagctttgaagaacgggacacctttagagaagcttgatcttggaggcctcaccgtgagaccttacaaagccggatctttgaaccaccagctccaggag

SEQ ID NO: 783711 - DNA, 50 bp, Homo sapiens
gagacacagtactctcttaaagaagggctgtaaggagctgtggcgtcgtc

SEQ ID NO: 783712 - DNA, 75 bp, Homo sapiens
gccggagcctgaggacacttctctgtcgtcacagttagctcttggagataaaatcgtgagggatattcgccctgg

SEQ ID NO: 783713 - DNA, 80 bp, Homo sapiens
gagaaggaaggatcttctcatgcacagaggcaacaaatggcaactttctgatgaagctgtggtctaccaatctagacaac

SEQ ID NO: 783714 - DNA, 101 bp, Homo sapiens
ggatcaaaatcagacagtgaagatataacaagatcagcaaatctaactgaccagtgctcagcagaggagcagtcaggttcacaagaaaaccacagttggaa

SEQ ID NO: 783715 - DNA, 100 bp, Homo sapiens
cggatagcgtggagtgacggtgccaccgcggcgcgatatccattaccaaaacttgacatgaacttctcattggagaatagagaagagccatgggtgaagg

SEQ ID NO: 783716 - DNA, 50 bp, Homo sapiens
gatcttgccattcaaaagagaatcaggaaagaccacagcaagattctttc

SEQ ID NO: 783717 - DNA, 82 bp, Homo sapiens
cttgccatgagaccaagtttgccaagcattgcgtgaagtgcaacaaggtttggtgcacctcgatttggaggaagtagggcag

SEQ ID NO: 783718 - DNA, 100 bp, Homo sapiens
gcgcggacgctgaagagcagcggatgaccagtgtcccagtgaaggaacgagtgaaggtgtctcagaactggagactggggcgctgccgagaggggattct

SEQ ID NO: 783719 - DNA, 75 bp, Homo sapiens
cccaatttgcctccacttagtgagcggaagaatggagtggttaatgtgttgctaacaactccactctgggtggta

SEQ ID NO: 783720 - DNA, 98 bp, Homo sapiens
gaagaccgcagtgggataaatctcaaagatctcgtacaagatccttctttaaataagcgggttttgaaaacaaaaaaaagaaggagtggaagaggggg

SEQ ID NO: 783721 - DNA, 75 bp, Homo sapiens
ctcctaagtagctgggactacaggggaacgcccttttgcttgtgactggcagggctgcgacaagaagttcgcccg

SEQ ID NO: 783722 - DNA, 100 bp, Homo sapiens
ttctaaatctcttcagaattacatcatgccttatgccatgactccaatttttgatgagaaaatgctcaagggcaccagtgtcttgtcacctggactccac

SEQ ID NO: 783723 - DNA, 103 bp, Homo sapiens
tctgtagtgtttgccaatgttggagccgtctgcaaagtgtccccggcaagaagatcaggatcctcatgaccagccaaagagaagaagaattaggaagcataaa

SEQ ID NO: 783724 - DNA, 75 bp, Homo sapiens
gtggaagtggttggaaatggcacctatggacaagtctataaggatcggaaactccatggtacagctcagcaactg

SEQ ID NO: 783725 - DNA, 101 bp, Homo sapiens
caaacagtgatatcttcagcgaaagtgaaaccaggatgaataatacggcagctagtccaatgtctactgcaacttcaagtagtggaaggagtacagggaag

SEQ ID NO: 783726 - DNA, 50 bp, Homo sapiens
ggagtttgatgttgttgaaggagaaaagggccaaaaaggtgaacctggat

SEQ ID NO: 783727 - DNA, 75 bp, Homo sapiens
atttatgaaaggagtcatggatgaatgtactcatgtagcaaatttctcagtacgtagagaaatcgacactcttaa

SEQ ID NO: 783728 - DNA, 75 bp, Homo sapiens
gtccccgccgaagtcaccgtgatcctgttagatatcgaagggtgaggatccacgacctccgcagtggtaacatcg

SEQ ID NO: 783729 - DNA, 50 bp, Homo sapiens
gaagatagtacttactacaaagaaatgccagatctggagtaaggaatatt

SEQ ID NO: 783730 - DNA, 90 bp, Homo sapiens
gcggttgcgggggggaagtgactgggcggtgccggcgccggagacgatgccgttgtcagaaagcaacattgaatgcagaagaaatggcgg

SEQ ID NO: 783731 - DNA, 76 bp, Homo sapiens
tgcttggctaaatttctcaacaccacagtcagctaagggttcattccatgatctgctccgtagagaaccaatgctg

SEQ ID NO: 783732 - DNA, 89 bp, Homo sapiens
cgagaggcccgggcgagacttcgggaccgtgtcctgagcgctctccatgcgcccggcgcgagttggattggatgctgctggcaagacaa

SEQ ID NO: 783733 - DNA, 100 bp, Homo sapiens
tttgactgaaaaagtttctctctatagaggtgacatcacattgctagaggtagatgctatagtcaatgccggttcacctttccttgccagtgaagatggc

SEQ ID NO: 783734 - DNA, 78 bp, Homo sapiens
gcgggtggaggttcgagcgctgttctcgctccggagccgctgcacatttcggataaaagaatcagagtgtctcaaccc

SEQ ID NO: 783735 - DNA, 75 bp, Homo sapiens
gaaaacatgaccgctgagcccatgaggaatgcccaattcttctggactcatgaaccgtcgtgatgccattgccaa

SEQ ID NO: 783736 - DNA, 90 bp, Homo sapiens
ttcagaggtctctgtcttctccaccaagcagtcatggctccgatcttcatcttgaagaagagtgacattgggtgactgctgcttggaaaa

SEQ ID NO: 783737 - DNA, 88 bp, Homo sapiens
gggagtctccgcgtcccgctcgctgggagagaggtacctctccttttccctctccctttccctaagacagattacatcaatgccagtt

SEQ ID NO: 783738 - DNA, 51 bp, Homo sapiens
gcccatgcgagtacctgaggaagctcttctgttagaaatagtatctttgtt

SEQ ID NO: 783739 - DNA, 82 bp, Homo sapiens
gaaatccattcaggaatcagaagcttttttgcctcagagcctcccacccagaagatcctgcttccgtggttgaggcgcggaa

SEQ ID NO: 783740 - DNA, 83 bp, Homo sapiens
gatgaacaacctgccttgcgccatgcaccagattggggatgtcaaggtattgcctgatgtgcggctactgcctcggaggctgc

SEQ ID NO: 783741 - DNA, 82 bp, Homo sapiens
ggctcttcccggcgctctcctggctcccttctgccccagctccgtctcggcggcggcggcccccaaatacatcaagatgttt

SEQ ID NO: 783742 - DNA, 97 bp, Homo sapiens
gcgcgccgctgctatcgcgcgccagaaggccgagattgccgcctccagatactggctccaatactacagaatgaatagaaaaaatatgactttttta

SEQ ID NO: 783743 - DNA, 75 bp, Homo sapiens
agatgacctgagaaccttgtgctccaggctgccccataataagtgtggacactgccagcggctgcagccgacttg

SEQ ID NO: 783744 - DNA, 75 bp, Homo sapiens
ctgaaatctcagacggtggcccggaaccggagtggggtcacaaatttacatggacacagaacagtatgaagaagc

SEQ ID NO: 783745 - DNA, 100 bp, Homo sapiens
gcattacacgatgcacttaatgaccctaaaaatggcgattctgcaaccaagcacctgaaacagcagttggaggtaatgcttgaagataatgtttgcttgc

SEQ ID NO: 783746 - DNA, 100 bp, Homo sapiens
tctgaactcaggacttggcaactttcctgctctgggaccctaccaaggtgcccccacgactgcaggctgtgactgatgaccacatccggatgcacaaggt

SEQ ID NO: 783747 - DNA, 101 bp, Homo sapiens
gaggtggcggcggcccagccggggccccgaagaggacagagcccgcggccgcgccgagcgggacaatgcagatcttcgtgaagactctgactggtaagacc

SEQ ID NO: 783748 - DNA, 90 bp, Homo sapiens
aattcccagtaattgctcctttggccttctagggactgacttcaaagaaggaaggaaagaatcaggcagaggcctaacatcgtgtcccag

SEQ ID NO: 783749 - DNA, 82 bp, Homo sapiens
gccgggagtcgctgggtgcgtggggctgcctcgccgcgtctcgccacggttattgcagctgactgcaaaagggtcacagtgc

SEQ ID NO: 783750 - DNA, 100 bp, Homo sapiens
ctaaaaacaagactggggctgctcccatcattgatgtggtgcgatcggcactgtgctgtgttgcgggaagtcagggaccccaaacggagggaccagctga

SEQ ID NO: 783751 - DNA, 50 bp, Homo sapiens
ccagctgatgatttgtccctgtctgaagagactaatagacaagtcacgag

SEQ ID NO: 783752 - DNA, 82 bp, Homo sapiens
cacttgcttgggatcctttatcctggtcatcttctatttccaaaggagccagcgccggcagccaccatggcgtcacgcatag

SEQ ID NO: 783753 - DNA, 75 bp, Homo sapiens
tgatgccagaggtcaacaaggttctggacaagatgaagtctttctgccagtttggcctgtcactgctcctcatcc

SEQ ID NO: 783754 - DNA, 75 bp, Homo sapiens
tgtagcgtggtgcttctgttgctcacaggagatggaataaactgagactgcaggacaaagagaaacgtctgaagc

SEQ ID NO: 783755 - DNA, 100 bp, Homo sapiens
agtccagaatgtcacaggtccagggcagaggaccaacatgggcattttgtttatgagcaaggcgggtcgagtctgaagaatccggcgatgaagaagggaa

SEQ ID NO: 783756 - DNA, 80 bp, Homo sapiens
tgccgccggcgaaggaggaggcgttgccggtgctcggccttgttctccccatgtgggccatagccctcatttcctttggt

SEQ ID NO: 783757 - DNA, 100 bp, Homo sapiens
aaattggggtgccaccagacggagacagcttggactaccagggacccaaccagagcctggcctgggagccaggatggccatccacaaagccttggtgatg

SEQ ID NO: 783758 - DNA, 100 bp, Homo sapiens
ccaactgccccgccaccgtcatcaacgggcagtttgtcgaacgatgttggactcatagtcactgccagaaagggatacttgactttcagagatgtggcta

SEQ ID NO: 783759 - DNA, 101 bp, Homo sapiens
cggcgctcggcatggctctcctggtgctcggacttgtttacactgggcatgtaaacgaaaccatggtcaggtggtctcttacctgttaaaatcaggagctg

SEQ ID NO: 783760 - DNA, 99 bp, Homo sapiens
gtgatatttgccagtttggtgcagaatgtgacgaagatgccgaggatgtctgaaataagcgggttttgaaaacaaaaaaaagaaggagtggaagagggg

SEQ ID NO: 783761 - DNA, 101 bp, Homo sapiens
gcaaggggagtcgtggcgtcgtctgcgaccgctgccttctcggccatgtgaagatgtgcttgcttcccctttgccttctgccatgattctaagtttcctga

SEQ ID NO: 783762 - DNA, 96 bp, Homo sapiens
taatgaggtctgctaaagagagagttcgtcagcccacagatgacatagtgctaatggcccaagctttagagaaaatttttctacaaaaagtggccc

SEQ ID NO: 783763 - DNA, 100 bp, Homo sapiens
ctttcccaggcaaagagggatgttcaggaacagatgatacagtttggaactttatcagatttttttgatgcgctggataaagcagatgaaactcagagag

SEQ ID NO: 783764 - DNA, 100 bp, Homo sapiens
tcccaaggtgctgggattacagggtgaaggttgccgaactgtccccctggctggacatgtggggtttgacagcttgcctgaccagctggtgaataagtcc

SEQ ID NO: 783765 - DNA, 49 bp, Homo sapiens
gatggcccaggttcttcaaaagataacaaaatccagtctcatagcagag

SEQ ID NO: 783766 - DNA, 50 bp, Homo sapiens
ctgtgctccatggcgagctgggtttttagaacttcagccataaaaatggg

SEQ ID NO: 783767 - DNA, 75 bp, Homo sapiens
gatgcttaaaaatcaccagttactttaatgatgtttctgaaagatctatccagcactccgatggccagcaacaac

SEQ ID NO: 783768 - DNA, 85 bp, Homo sapiens
aacatggcgttgctggtgcgagtccttgttctgcttggattctgctagacagacccgacaaagactgtctatcaactggtccaat

SEQ ID NO: 783769 - DNA, 96 bp, Homo sapiens
cagtcagacttcctcaggttctgccgtattcggaggaggagattcggcagaaagtggggacattccggcagatgctgatggagaaggagggagtgc

SEQ ID NO: 783770 - DNA, 51 bp, Homo sapiens
gtttttctcagaagagaattccacaaggtcatttcttcagatagctcccca

SEQ ID NO: 783771 - DNA, 50 bp, Homo sapiens
ttgcagcattacttagagctcggaaggcttaattggcttagtgtcgactt

SEQ ID NO: 783772 - DNA, 51 bp, Homo sapiens
ccgagctccagccgaaggagaagggggaaagttcaggagccctggaaagga

SEQ ID NO: 783773 - DNA, 97 bp, Homo sapiens
cgcgccgcccgccgctggcagcccgtcaccatggcccagcccctagccaggaggccgggaccaaggcccgttttccactaagagatgctgtggagga

SEQ ID NO: 783774 - DNA, 100 bp, Homo sapiens
cgggactagtggaccagctggtgaaggcagacagcgagtggcgacgatatgtacattgaagatgtcagtttctacatgtgggaagtagacattgaaggct

SEQ ID NO: 783775 - DNA, 74 bp, Homo sapiens
atttcagcctgcacggatggtcttgaaacacaaatggtttttggttggctcactattgccggctccgggatgtt

SEQ ID NO: 783776 - DNA, 101 bp, Homo sapiens
gcttcttactctcctcaccaccgaaagccaggaactgaggtagcaatgaagtgatgaggatactgatctctagaagcctgcttcaggagtagaacccacac

SEQ ID NO: 783777 - DNA, 100 bp, Homo sapiens
gcagtggtcgcttcttctccttgtataccaacagatgttttaaagattgtgtattctgtgggtgctcagacaacagcaggatggaattaccttttagagc

SEQ ID NO: 783778 - DNA, 82 bp, Homo sapiens
agatggctactctggagttgaggcagtttgaagagaacacatgaagaagaggatgattttggaaccatgcaagtggcgactg

SEQ ID NO: 783779 - DNA, 82 bp, Homo sapiens
gcttgaccctcagtgatctggatcgacacccagaggaactgtggctgcaccatctgtcttcatcttcccgccatctgatgag

SEQ ID NO: 783780 - DNA, 50 bp, Homo sapiens
gtatcccactagcaagccaaaagaggtggaataacactcccatggatgaa

SEQ ID NO: 783781 - DNA, 74 bp, Homo sapiens
gagctcacgcagatggtgtccacgatgtccgacggctggaaattcgaacaggaatgttttaaaggaagttgggc

SEQ ID NO: 783782 - DNA, 95 bp, Homo sapiens
aacaaggcccgggcctcccgctcctccgtacagaagctgccagtaactcagattctagccatgaaggtcaagaggaatcttcaaaggaaaatgtg

SEQ ID NO: 783783 - DNA, 51 bp, Homo sapiens
ttgcatttcctcgtcgagcgcaacccaagatcctaattatctcatggctaa

SEQ ID NO: 783784 - DNA, 119 bp, Homo sapiens
aagcaccgagaagtctgttccttatcacgtgtgtaaggggaaaaagggtacagctcgcagaaagaagaaggtggtacatagaacagccacagctgatgacaaaaagcttcagagttctc

SEQ ID NO: 783785 - DNA, 98 bp, Homo sapiens
ccccggtgcagatgaacctgtacgccacctgggaggtggaccggagctcgtccagctgcgtgcctagctttatgaaaactttatcagtgaatttgaac

SEQ ID NO: 783786 - DNA, 100 bp, Homo sapiens
aactcttaggagcagcttggcctaaaggatcctttcccggagttcagttatgggtgtgagaggtttgcaaggatttgtgggaagtacctgcccacatata

SEQ ID NO: 783787 - DNA, 90 bp, Homo sapiens
agaaaattgtggaggttttgttggctgaattcggtcagaagagaatccatctgaatagccagtttccaggcacccagcggcttcccaata

SEQ ID NO: 783788 - DNA, 75 bp, Homo sapiens
aaaaagcagggaggttatgaggcttaataaagaagttggattggatgctgctggcaagacaaccattctgtataa

SEQ ID NO: 783789 - DNA, 82 bp, Homo sapiens
gacaaacccaccttcatcaaagggaccattactgggacttccacccccaccacgtgcacagcgagttcgagagcttcgccga

SEQ ID NO: 783790 - DNA, 96 bp, Homo sapiens
ccggctcgggggagaaggcgcccgaggggaggcgccggacagatcgcgtttcggaggcggcgcagtgtcttgggacaaggtgcgcattcctggtgt

SEQ ID NO: 783791 - DNA, 87 bp, Homo sapiens
ctctggttgacttgacagcagtggacgtcccaactcggcaaaaccgttttgaggcaactcgagatgtggtgctgagccgggtgccgg

SEQ ID NO: 783792 - DNA, 90 bp, Homo sapiens
caggttacatacagcttacatcttgcatcctcaagcgaactcttaaaacgcctagatgacgtgtccaacgatgtgaggatggcagccgcc

SEQ ID NO: 783793 - DNA, 50 bp, Homo sapiens
cgagaatgtaactccgttgaagcaaactcaagctccatgaggagatgttt

SEQ ID NO: 783794 - DNA, 90 bp, Homo sapiens
atgccagaaaccatgtgaaaaggcaccttgggatgagggaatacaagtgtcatgtctgtgggggagagaccattctaacacaggtaccgt

SEQ ID NO: 783795 - DNA, 98 bp, Homo sapiens
ggatgctggaggacatctgggggccacaaatgctccttctcctggagacgcaactcaagacagaagcattaaaatgcgtggctcaggctagcaagaac

SEQ ID NO: 783796 - DNA, 75 bp, Homo sapiens
ccgtcccgaccctggccgccccgagcggagcctggagattttgagaagagggggaaaaaggaagtttgtcctgtc

SEQ ID NO: 783797 - DNA, 98 bp, Homo sapiens
aagactgcgcgtgctcaggagcgcggagcggcccgctgagcgcagaggacttgagcagccccagccagtacgacacaggtgttgcactgacgggtctg

SEQ ID NO: 783798 - DNA, 100 bp, Homo sapiens
gcagtgttcgtgggatggggcagcgggctgcagctggcggccggaatccgcgcgcagcccggatgcatttttgtagaagcattttgaggatgaatgtttg

SEQ ID NO: 783799 - DNA, 75 bp, Homo sapiens
ctgagctgcagaagaagatctatgtcattgagggtttttgccaatccagaagactgtgtagcatttggcaaagga

SEQ ID NO: 783800 - DNA, 74 bp, Homo sapiens
ttttaatgattcttccatatgtggcaattgtccaagaaaaggtgttatatgaacttcccaccaacacacagtgg

SEQ ID NO: 783801 - DNA, 90 bp, Homo sapiens
gatgtactgtgcttggctggaaaaccccaaaagtgtacataagaaagtcctatgagtttgaagatttactgcagtcttcctctgagagca

SEQ ID NO: 783802 - DNA, 100 bp, Homo sapiens
gcaaacatcgatggcctactggggataacattcatgcagaacatcagtggtggacttgctttgtgaagagacagttcatgaacaagagtctttcaggacc

SEQ ID NO: 783803 - DNA, 100 bp, Homo sapiens
gcctttaaatgcagcatctgcgatgtgaggaaaggcacctccaccagtggtgcttcatgccccacctccaaccaagatcaaacgggagctgcacagcccc

SEQ ID NO: 783804 - DNA, 82 bp, Homo sapiens
gaagatttgcataaagccaacattcgcaccgtcatggtcacaggtcttgtccaataagcatgtggctcctgatcatcttttg

SEQ ID NO: 783805 - DNA, 100 bp, Homo sapiens
actgtgggacttggtttgcctatgtcaagatcacagaccttagctggatctccaaaatacaagtgaatcacccggcagttctgaggcgtgcggaacaaat

SEQ ID NO: 783806 - DNA, 100 bp, Homo sapiens
aaacatatacagattatgtgattccatgctttgatagtgtaaactcagcacgagccattttgcagaggagaattctgcctaagccaactcgaaaaagccg

SEQ ID NO: 783807 - DNA, 100 bp, Homo sapiens
ggctgagaaccagtatggccagagggccaccgccttcaacctgtctgtggagtatatggggagattgttaacattaatctcgtgcgggacaagaaaactg

SEQ ID NO: 783808 - DNA, 75 bp, Homo sapiens
acctacccccagcaccacctccagcccctgcgcctcggcactctgatggttctaaaacatccctacccaagaaaa

SEQ ID NO: 783809 - DNA, 100 bp, Homo sapiens
cgcctgccgcggctgtcaactcgctccggagcgcggcgccgagcgcagggatacggcgcccagcggggtggatctcgagccagaggggaaagtatttgtg

SEQ ID NO: 783810 - DNA, 97 bp, Homo sapiens
ggatgggcacactgtgggggtgtcctggtgcacccccagtgggtgctcacagctgcccattgcctaaagaagacggcggacccagccgagaagacgc

SEQ ID NO: 783811 - DNA, 82 bp, Homo sapiens
ccttccaggggaaggaccggaaggagaccatgacactgattctgaactgcctgtggaggaaccgattgtgtccacagatgag

SEQ ID NO: 783812 - DNA, 87 bp, Homo sapiens
ccgtgccctcgctctgagctgcgcctggacctggttctgccttctggacaatctttccgggtaaaatccagtacaaggaatatatca

SEQ ID NO: 783813 - DNA, 114 bp, Homo sapiens
ctggaagatgtggcagccggccacggagcgcctgcaggctacagaagaagtttccaaaaatctggttgccatgaaagaaattctgtatggcacaaatgaaaaagagcctcagac

SEQ ID NO: 783814 - DNA, 100 bp, Homo sapiens
ccaaggagctcttacagatggacctgtacgcgctgctaggcattgaggagaaggcagcggacaaagagggcggctacttccctgagaatgtcaaggccat

SEQ ID NO: 783815 - DNA, 75 bp, Homo sapiens
aagggatgtcgtctcagcagtgctcgggcgcaggtgtcgtgaaaactacccctaaaagccaaaatgggaaaggaa

SEQ ID NO: 783816 - DNA, 83 bp, Homo sapiens
gaagatcaggtacacaaatgcacgcgacaggaaccagaatgtgaaaacctttgcatcttctgatagtctagccaaggtccaag

SEQ ID NO: 783817 - DNA, 90 bp, Homo sapiens
cggcgaggggggcgccgcggcgggtggatgagagttggccccgatatccgctcagggacctgctgaagctcacacccgtggaccacccag

SEQ ID NO: 783818 - DNA, 75 bp, Homo sapiens
ctgatcgactccagcatcatgattacctcccagaggttgacggatatattcagacgttacgacacggatcaggac

SEQ ID NO: 783819 - DNA, 83 bp, Homo sapiens
ctggaaacaatggcatttacagaaagagtcaacagcagtggcaacagttcccgatgggtcccggctcggacggtccgatgggc

SEQ ID NO: 783820 - DNA, 74 bp, Homo sapiens
ttgtctcatggagtgcctctgcctaattggcttataaacagttacaaggctagttcaggggatacgataaaaga

SEQ ID NO: 783821 - DNA, 90 bp, Homo sapiens
ctgctgtacatgacgtgcttaatgaaagatcccaccaaatattttggttgtgagctgggagcacagacccagtttgatgttaagaatgac

SEQ ID NO: 783822 - DNA, 100 bp, Homo sapiens
gcagtggcgcctaaagtctgagagagggaagtcgcctctgtgctcgtgagtgcatggggtataaggtccctatcactgttcagtccatcgtcattcagtc

SEQ ID NO: 783823 - DNA, 100 bp, Homo sapiens
gaggatcgtcaggctctaaacaaaattctggacagcctcgggggtaacagcaagaccgccatggtggctactgtgagtcctgcagctgataactatgatg

SEQ ID NO: 783824 - DNA, 82 bp, Homo sapiens
gcaaccccagatccatttacactttacatcaccttcaggccattcagaggaggaaagagaggggaatatgaagtcagccaag

SEQ ID NO: 783825 - DNA, 88 bp, Homo sapiens
acaatggagacgccgccgctgcctcccgcgtagctacagcaagctgggtagcaggcagatccaaaggatatcatgaagtttccagggc

SEQ ID NO: 783826 - DNA, 98 bp, Homo sapiens
tttccttcaaactacgttaagatgacgacagactcagatccaagtcaacagtctctcgtgggcgcctgcggtgggaactactcagccatgtcttctgt

SEQ ID NO: 783827 - DNA, 83 bp, Homo sapiens
tgtctgagctgacagcatatttttttagtcacaagcttattgaattgatcggccacatcaggagcttgaaattgtaattggag

SEQ ID NO: 783828 - DNA, 100 bp, Homo sapiens
ccaggtggcatttttctgaagttgttcattaagacttcccagcattcctacagatataaataggtaagaatgattgatgttggctgatattggagtgctc

SEQ ID NO: 783829 - DNA, 98 bp, Homo sapiens
caagtgcagggagttcccgttacaatcactagtgttgcagggaggcagcagatggctgaaattctgatccgatgtggctggttaatgcatgatctgaa

SEQ ID NO: 783830 - DNA, 101 bp, Homo sapiens
tcactttaattacttgagaatttataatggaattggagtcagcagaactgaaatagaaaggtgactcttttgatggtgggacttgataatgctggtaaaac

SEQ ID NO: 783831 - DNA, 97 bp, Homo sapiens
atttttcatctcttgccaacatactttgtagatactgcaatctactctgacatatcaggatcaccacgcttattaatcataaagataataccaaaaa

SEQ ID NO: 783832 - DNA, 100 bp, Homo sapiens
gtaacattttaccatgcagctactggatcactgccatttagaccctttgaagggcctcgtaggaataaagaagtgatgacccatggatgaaggaccagat

SEQ ID NO: 783833 - DNA, 101 bp, Homo sapiens
aagtattaattcttccactgatatctcaaaaggtgatctggacaaaggaacaggtatctcagataaaatcagtggttctggaagtaactctgatatgatgg

SEQ ID NO: 783834 - DNA, 80 bp, Homo sapiens
tcggaggcgttcagctgcttcaagatgaagctgacagcagccatggcgagcggcagtggagacagcgtcacccgtcggag

SEQ ID NO: 783835 - DNA, 75 bp, Homo sapiens
agacagctgggccggagcagccgcgggcgcccgaggggccgagcgagagttctccggggtgctgcaccagtgtca

SEQ ID NO: 783836 - DNA, 75 bp, Homo sapiens
tcaagaactgccgtcttctttgcctgcactaatgatgatatcatcaagttgaatcgaaaggaagggaagaagcag

SEQ ID NO: 783837 - DNA, 100 bp, Homo sapiens
caggagacgaagagcccgggcggcgctcgtacttctggccactgggcgagcgtctggcaggtgaaatgtaacgagcagcctaacagagtggaaatctacg

SEQ ID NO: 783838 - DNA, 49 bp, Homo sapiens
taagaaattgagatctagtcagattacctgctatgccatggcctgcaca

SEQ ID NO: 783839 - DNA, 88 bp, Homo sapiens
tgcagatcaatgacatttccctgcagatggattaccgggccttggtgcatgagcgagatgaggcagcctatggggagctcagggccat

SEQ ID NO: 783840 - DNA, 96 bp, Homo sapiens
gttgatcttccagcctcaccggattcccccactctttcctcagaagcgcgttgacccggacgacacctataatgagaccccctacgagaaaggttt

SEQ ID NO: 783841 - DNA, 124 bp, Homo sapiens
aggccgtctcgctctgggtctccaggcccgcgaccgtccgccagtcgtcccgaggtaactaggatttctacctcaaccgcgagacctatgcaaggacggtgtggaccaactcgcgcccgcggca

SEQ ID NO: 783842 - DNA, 75 bp, Homo sapiens
gttcattttgaagacagaggagcagctgttaaggaggagatgttaaagtaacccatcttgcaggacgacattgaa

SEQ ID NO: 783843 - DNA, 75 bp, Homo sapiens
ctggactctctgccacatcgttcggttcccacaacagcctggctaccacatactgttgattgtgatgaaatgcca

SEQ ID NO: 783844 - DNA, 100 bp, Homo sapiens
tatgacttctggccagatgtggaaccatatccgtggacctccatatgctcataagaacccacacaatggacaagtggtgaccaagaatatggcccaggtg

SEQ ID NO: 783845 - DNA, 71 bp, Homo sapiens
acttcatagcttcggggatggtcaatcaggtctcggcgcggaagatggccggcggcgtggacggccccatc

SEQ ID NO: 783846 - DNA, 99 bp, Homo sapiens
ggggtgcgcccaagcggggctctggcaaggaaaacctcacagcacgggtagctctgaacggattcagctctcaggaatgtataatgtccgtaaaggcaa

SEQ ID NO: 783847 - DNA, 96 bp, Homo sapiens
ccgctacctgggcagctacagcggcaaggtggagctgagagaactgataaatttcaaacggaagagagtggcagcatttagaaagaatctaattga

SEQ ID NO: 783848 - DNA, 48 bp, Homo sapiens
tttgggaaacctgattgttgtaaatgagacttggaggaggccttggag

SEQ ID NO: 783849 - DNA, 75 bp, Homo sapiens
tggccactgatcccccgaagagcttctgtcgccgctctaggggaaagcaggcaggatgggagagtcgccgataga

SEQ ID NO: 783850 - DNA, 100 bp, Homo sapiens
gcctgttctcgggctgtttggcggatatgacaatggatgatgttcgggaatacgagaaaaacatgcatgaacaaaccaacataaaagtttgcaatcagca

SEQ ID NO: 783851 - DNA, 51 bp, Homo sapiens
gcaggcgctcaccatgttccctggagggcagttgggtgagaagcagcttcc

SEQ ID NO: 783852 - DNA, 90 bp, Homo sapiens
gaggacccgcgtgggcaccctgcaggtggtcagacatgtcatcaactcagctgcaccccagcatggaaactaccaggaggagggtccccc

SEQ ID NO: 783853 - DNA, 90 bp, Homo sapiens
cttgagctccaggagttcgtctcttacgtctgcggaagtgcagctgcctcagttcttagcgcagctgcagaaccttggcctgaaaatgct

SEQ ID NO: 783854 - DNA, 82 bp, Homo sapiens
caacaatgcctttgaccagtatcgagacctgagttcatccgtgagggctgccttcacaagctcaccaagaagggcctgcagc

SEQ ID NO: 783855 - DNA, 73 bp, Homo sapiens
aggaaaaaaagccagtctcaacgttttacttatacaccagtgcaccaattccagctggacatcactgtgaaaa

SEQ ID NO: 783856 - DNA, 75 bp, Homo sapiens
caaaaagttacccaaagaacttctgttaaggtccaggtgcaggtacagcagtctccgcaacaggtctcggctcag

SEQ ID NO: 783857 - DNA, 50 bp, Homo sapiens
ccgtttccacgactttctgggagactcgacagctaacccccgcatcggtg

SEQ ID NO: 783858 - DNA, 101 bp, Homo sapiens
tccgaacccgggaaaagaggaactaaggcggaggaactgagacgtttcgaattccaggtgccagtcattgaaatcccaggttttggaaatctttctgctgt

SEQ ID NO: 783859 - DNA, 129 bp, Homo sapiens
cccagatgcagcagttgatggagcggaaccctgagatcagccacatgctcaataaccctgaactcatgaggcagctggactgggcagcctttggggtcatgacccttccctccatcggcatccccctgc

SEQ ID NO: 783860 - DNA, 100 bp, Homo sapiens
ccttcacgcaggctttaagatgatgagcaaaattggcggcagtaagcacacaatgaatgatcacctgcatgtcggcagccacgctcacggacagatccag

SEQ ID NO: 783861 - DNA, 106 bp, Homo sapiens
tggctccctcctcccagggccaggcgccgctcagaacgtggtctcacgtgtgaaacatggctacagattggctgggaagtattgtgtccatcaattgtggagatag

SEQ ID NO: 783862 - DNA, 74 bp, Homo sapiens
cagctcctgtcatacattgatcgactggcgcctcgcagttggatggcaagcatgtggtgtttggcaaagtgaaa

SEQ ID NO: 783863 - DNA, 100 bp, Homo sapiens
ctacttcattcagaagatcaggtacacaaatgcacgcgacaggaaccaggtacatccaagcagaagtccagttccctccaggtagcagatcaggacctac

SEQ ID NO: 783864 - DNA, 75 bp, Homo sapiens
gagcaggctgagcgatacgacggcgcttgaagaggctcagaaagctatccaacaactctttggcaaaatcaaaga

SEQ ID NO: 783865 - DNA, 82 bp, Homo sapiens
tcttcagccgaggccgccgccgcctctccttgctgcagccatggagtgctcttacagcctgttccaagtgtggcttaatccg

SEQ ID NO: 783866 - DNA, 100 bp, Homo sapiens
ttatcttccagtctcttcttgtcaatttggaaattgcagactgcccggctcaggcttctccacgctgtccctggcggaccagatgagccttctgcagagt

SEQ ID NO: 783867 - DNA, 100 bp, Homo sapiens
gtcggaggagtactcggtgaaatcctgtcctgaagactgtaagaaattcgagctcaactggtagaacaacaaaaatgcctggagcagcaaacggagatgc

SEQ ID NO: 783868 - DNA, 75 bp, Homo sapiens
tgctgggggagatggaggcgaagacaagagagctcattgttcgaggtcaggaaaatggattggatggcaccaaga

SEQ ID NO: 783869 - DNA, 97 bp, Homo sapiens
ttcctggtcatacaccagtactaccaaggacagcttttttcctgcaagggcatttgatgtagaactactgtacatagcacagttctttaaaattcca

SEQ ID NO: 783870 - DNA, 51 bp, Homo sapiens
aactagtgccggcggctctccaccccccagatgccttcaattaagttgcag

SEQ ID NO: 783871 - DNA, 75 bp, Homo sapiens
gagaacagccaagaaatggaccttgtccgggccctcctccagagttctgcaagtcgaaaaacccagaaaaagaaa

SEQ ID NO: 783872 - DNA, 74 bp, Homo sapiens
aagaggtgcttttggtgaagtgcagttgcacccagaggcctccattcaggctgttttttcagatgcccaaatgc

SEQ ID NO: 783873 - DNA, 82 bp, Homo sapiens
gtgctttccacgacggtgacacgcttccctggattgggtcaaaatgcagatcttcgtgaaaacccttaccggcaagaccatc

SEQ ID NO: 783874 - DNA, 82 bp, Homo sapiens
ctggagcctcagttggaagcagccgatccagcctgcggagcctgtggggcagaccaactgccagagttttctctgggtgtta

SEQ ID NO: 783875 - DNA, 50 bp, Homo sapiens
tgaggcctccccaaccatgtgcaattcctcgccgctcctgctatttgcca

SEQ ID NO: 783876 - DNA, 82 bp, Homo sapiens
agatcatccgcaaacacgcgcagaccttcgttgccctctgtgccacaggtcttgggcgtctttggtactggcttttttaggg

SEQ ID NO: 783877 - DNA, 100 bp, Homo sapiens
gatcccagctttgtggctgccgtcatcaccatcaccttcaatccgctctactggaatgtgagaaccatggagtctggcagtaccgccgccagtgaggagg

SEQ ID NO: 783878 - DNA, 88 bp, Homo sapiens
ggaaacaaacttgccagttgggtatcctcctcagtatccaccgacagcattccaagtgatgaatcaccaacaccagcagcagatggcc

SEQ ID NO: 783879 - DNA, 82 bp, Homo sapiens
ttcttcccaatgatgcttcctacttcctttccgtgcataagaagccgaatggaggctactcacagtcgaactacaactcccc

SEQ ID NO: 783880 - DNA, 100 bp, Homo sapiens
atgatgctgatggtgatggagattttgatgtggatgatgccaaagttttattagggaccacggcaaagtcgggcagtgcccccatcctcaagtgccccac

SEQ ID NO: 783881 - DNA, 97 bp, Homo sapiens
ctcctcggcactgtattctttacctgcttcccaatcccactgatgaggatcagcccatgatcacaaaatttgtccaggatagacatagagctagaag

SEQ ID NO: 783882 - DNA, 77 bp, Homo sapiens
ggatttcgctgagcggcacggctacatcaagggcatcgtcaaggctgagaacgggaagcttgtcatcaatggaaatc

SEQ ID NO: 783883 - DNA, 96 bp, Homo sapiens
gaggccatccaagaagttatggagtcctatgaagttgaaatagatgggaagacatatcaaggtatggagagtgcaatcacgctgtggcagttcctg

SEQ ID NO: 783884 - DNA, 100 bp, Homo sapiens
gtgtggtcgcgtctcggaaaccggtagcgcttgcagcatgatgccgtgcgcgaaattcggaagtatgatgatgtgacggaaaaggtgaacctccagaaca

SEQ ID NO: 783885 - DNA, 75 bp, Homo sapiens
tgcacttccattcctgcagtgaaattaactcgagcttggcagaactcaagacatggctgcccagtgtgtcacaaa

SEQ ID NO: 783886 - DNA, 100 bp, Homo sapiens
cactccccccctttattaccctttgtgtcatcctccacagctccagggaaggcactcaaaagtggggggcaggaaaggtgcaaattgagcatgacccaga

SEQ ID NO: 783887 - DNA, 100 bp, Homo sapiens
cggagccggccgtacgcggtgctgcgagggcagaacctgggtaatgtgaatggcatgaagaggaaagaatgggaaaacaaatcagtgggaatagaagtag

SEQ ID NO: 783888 - DNA, 75 bp, Homo sapiens
caaatatagaacactaaagtgttacatgacagatgtatgagaatcatgtcaaccctgccatggacttcacgcaga

SEQ ID NO: 783889 - DNA, 100 bp, Homo sapiens
ggcctacctaaaccagcacttgtctggctttggggccgaacgtgaggctacgctgaccattgcccagtacagattgttagaagatacagtgactttgatt

SEQ ID NO: 783890 - DNA, 74 bp, Homo sapiens
gacaaacagagatatcatttgtcagctgccactgcagagccccgccatggaagacacgccgttggtgatatcga

SEQ ID NO: 783891 - DNA, 100 bp, Homo sapiens
cggctcttcccggcgctctcctggctcccttctgccccagctccgtctcggcggcggcggaatgcaagaattattggtgaacgaactggcttccggccag

SEQ ID NO: 783892 - DNA, 101 bp, Homo sapiens
cccgccgacgcctcagccgcttggggcccgcacggaccctctacttcagtgtgagttcttgatacgaatgaaaggccaagagtttgttgatgagattcaag

SEQ ID NO: 783893 - DNA, 90 bp, Homo sapiens
cttggtctcactgagttctagaatgaagctgcagaccctcgcactctaagcgaaagacatgaggcctcagcctgaaatgaggttgttttg

SEQ ID NO: 783894 - DNA, 82 bp, Homo sapiens
tgagttaagaaacatatttctacagtcagctgtgatgtctgccacatttgcaaaatttcatccaaatcttgttgttggtggt

SEQ ID NO: 783895 - DNA, 113 bp, Homo sapiens
ggcgtcccccgggggcccgtactgcacatcgtggtggtcggatttcaccacaagaagggctgccagctccctcgtgaaagatgcttctgttcctctgattgatgttacaaacc

SEQ ID NO: 783896 - DNA, 83 bp, Homo sapiens
ggaaaaacttcttgccaaccaaatggtgatttacaagtcaagttaaaatgtccccagaagtggccttgaaccgaatatctcca

SEQ ID NO: 783897 - DNA, 82 bp, Homo sapiens
gccaaggcgccaggcaggacgacagcagcagcagcgcatctccttcaggcccctcaccgttccccaaccaacaaactcctcc

SEQ ID NO: 783898 - DNA, 98 bp, Homo sapiens
agtgactgctattgaaccaccaaaagtccattatgaaactggctggagcattggatttgctaaaggagcttaagaatattcctatgaccctggaatta

SEQ ID NO: 783899 - DNA, 83 bp, Homo sapiens
acacatcataaagctttaccaggtggctattatcatggaaaactaatttttcccagagaatttcctttcaaacctcccagtat

SEQ ID NO: 783900 - DNA, 90 bp, Homo sapiens
atcgagcgggtcaagctgctgctgcaggagccagatgaccaagatgctccagatgaacatgagtcgcctccacctgaagatgccccattg

SEQ ID NO: 783901 - DNA, 85 bp, Homo sapiens
aaacaggcacacaagtgtgaggagttgctaaatgctcaggaaattaaggatgcagacactcagggcgtgtgtcttgcacagccag

SEQ ID NO: 783902 - DNA, 50 bp, Homo sapiens
gtgctgctgctgtagctgctcctggaacttgatgggaaacctgcttctcc

SEQ ID NO: 783903 - DNA, 75 bp, Homo sapiens
caggagcccggcaccccccgccgacaaggaggggagtaccctgacttctaccggaagctctacggcctcttggac

SEQ ID NO: 783904 - DNA, 50 bp, Homo sapiens
gtcccggcgccgtcgcgccactcctccgacttgagaatgccagactgtca

SEQ ID NO: 783905 - DNA, 83 bp, Homo sapiens
aaggcaacatcctgtcacaggccatgctctggcaaaaacattacacagatgaatcttgcactttcaagatatcattgcgaaat

SEQ ID NO: 783906 - DNA, 100 bp, Homo sapiens
tatgtgatgatgaccgtcaccaactggttcaaatttggacacctcccacactgagtccccaaccccccatgactcaaattcacaccgccctcaactgcag

SEQ ID NO: 783907 - DNA, 87 bp, Homo sapiens
gcattcagaatttgaccatcttggtgagaaacattaagacctactaccaggacagtggtgattatcctcttaccatgcctggacctc

SEQ ID NO: 783908 - DNA, 75 bp, Homo sapiens
ggccagaagcgggcggcgcgggggagatggtgacagaccatgccaccactgccctgctccactatcagctgcccc

SEQ ID NO: 783909 - DNA, 100 bp, Homo sapiens
atggaagatgggaaagttattgaacggctgggccagagcgtggttgctgaccagttgaaaggaaagaccacagcaagattctttcattcgtctcctccta

SEQ ID NO: 783910 - DNA, 87 bp, Homo sapiens
tcaccaccggatcaacttcgacaaataccagtcggatgatgattctgggtcagcttcaggctctggatctggttcgagttctggaag

SEQ ID NO: 783911 - DNA, 100 bp, Homo sapiens
aattccaggtggaattgctgatagacatgggggcctcaaacgtggagatcaactcctctctgttaatggagtggatatttttgagtgtcgaacttgtggc

SEQ ID NO: 783912 - DNA, 100 bp, Homo sapiens
gcacagtccttctgagattgttaagcagattacttccatcagtattgagccaggagttgaggtggaagacgtcctccctagctccaaacggtccccctcc

SEQ ID NO: 783913 - DNA, 100 bp, Homo sapiens
cccgccgacgcctcagccgcttggggcccgcacggaccctctacttcagatctcactggcatcgaatctatggatcagtgtcgccataccttggaacagc

SEQ ID NO: 783914 - DNA, 75 bp, Homo sapiens
tctgcctgtgtccctgaccatggctccctgcagtaccctttaacgtacgaggatgtcgtccaggaaagattgtgc

SEQ ID NO: 783915 - DNA, 75 bp, Homo sapiens
agagacaaattgcttgttaaaggtcatcctgtacagttctacagcatgaataggcctgcctctcgccatactccc

SEQ ID NO: 783916 - DNA, 100 bp, Homo sapiens
ccagctatccgggttcatcctacatttttgtgcaagaggttggtacaggtcttgggcctacactggagttttatgcgcttgtatctcaggaactacagag

SEQ ID NO: 783917 - DNA, 100 bp, Homo sapiens
gcggccgtggtcaccaggaaggggacgggacggacggtgatggtggtcgccgcggcggcgtgtgcgcccctcagaacggaaagatgctgaaggatgggag

SEQ ID NO: 783918 - DNA, 100 bp, Homo sapiens
ccgcagtcggcaaggagagacgtcgctgaggggcttgcctgaagcgagggatgacagcgcttctgctgcaagtagcatggaggtgacagaccgcattgct

SEQ ID NO: 783919 - DNA, 100 bp, Homo sapiens
ctataaccacggtgtgctgaagataaccatctgtactgtttggattgcataagaaagtcatcaatatggtacacaatttactctccagtcacgactcaga

SEQ ID NO: 783920 - DNA, 100 bp, Homo sapiens
gctataaatcatctctgaagctcgtgaaagaaaataacatccgatcagttcggatggtttctcgctctttgggcgcaaatccagatgacctgaaggaccc

SEQ ID NO: 783921 - DNA, 95 bp, Homo sapiens
tgatctctctcgctgtgagacatgtctgagactcctgctcagtgtagcattaagagagaaatctcatcatctgtgcagccttcttaaagcaaact

SEQ ID NO: 783922 - DNA, 82 bp, Homo sapiens
cttcaatccagttccaaggactccacggggtgtctcaatgcttgtacctactgcaaaactaaacacgccagaggaaatttgg

SEQ ID NO: 783923 - DNA, 90 bp, Homo sapiens
ggcttgtacccattggcaagtgttcctgcaatgctggctatgaagaaagaggttttatgtgccaagcggcaacctttggcactgcatcca

SEQ ID NO: 783924 - DNA, 100 bp, Homo sapiens
gcgcgcccaggatatccagtgcggcctccagagccggcatgtggcgctgtcggtgggcggccgcgagatcctcaagaaacaccatctgattcagatcaca

SEQ ID NO: 783925 - DNA, 82 bp, Homo sapiens
ccagacaatgccggtggaggaatttgtggctggctggatctctgctgttccgatggccccactatggggctccactggctgg

SEQ ID NO: 783926 - DNA, 100 bp, Homo sapiens
ggccgagctgctgcgcagctcctgcccgatccacatgaagaccatgcccgccgccatgttcaggctcctcacgggtcaggagaccccgctgtacatctag

SEQ ID NO: 783927 - DNA, 75 bp, Homo sapiens
ggggactggaagaccatctcgcaaactgtcatcaggagcttaaataggacagattttcacggcagtggatatacc

SEQ ID NO: 783928 - DNA, 75 bp, Homo sapiens
cggcttactgcagccttgacctcctgggctcaagtgatcctcccacctcagctttacataccgagcatcaaatat

SEQ ID NO: 783929 - DNA, 50 bp, Homo sapiens
cgagaggtggagaaaggccggggttccgagtctgaggaagacataacctt

SEQ ID NO: 783930 - DNA, 75 bp, Homo sapiens
ctcacctgtgcgggatggaacaaaaggaactagaggctgctatccagccagatactagcctggtgtcagtcatga

SEQ ID NO: 783931 - DNA, 100 bp, Homo sapiens
cagacgttgtggcggagaagggcagtggctgtagctgccctttccgtttccagggttccgaccaggactttgtttggagaagctgcctatttcttcttct

SEQ ID NO: 783932 - DNA, 100 bp, Homo sapiens
gcaccagcttccagttagtggatatagcacaccatccccagccagaggaattttgttgtcagagaataaaaggaggttgtccataattgactttaagcag

SEQ ID NO: 783933 - DNA, 60 bp, Homo sapiens
gtgacctctgaacaggagtgggacaagctaaattgtgagcgcccccatggcagggacctg

SEQ ID NO: 783934 - DNA, 100 bp, Homo sapiens
cgcggagacctacctgcggcgtcggcagctgctgctccgaggtcaaaatgcagatcttcgtgaaaacccttaccggcaagaccatcacccttgaggtgga

SEQ ID NO: 783935 - DNA, 97 bp, Homo sapiens
tcaacaagaagaacgctctcatccggaggcaggaccagctgcagctgctatttcaggtatgctgctgaaagtgggaatcctctacattggtgggcag

SEQ ID NO: 783936 - DNA, 83 bp, Homo sapiens
ctgacttcaagaatgaagccacggacccttgcgattatatatgaaaactgcgatagttgtcattaaagttaggaaaccaccat

SEQ ID NO: 783937 - DNA, 83 bp, Homo sapiens
ttccccaaccagcctggaggcaagaggctcctgcagacccctggcttcctaattcagaaggagctggcggacatcactttaga

SEQ ID NO: 783938 - DNA, 100 bp, Homo sapiens
gtcgaagcgagggtctgaagttcacgactactagaaggggaggggagtggaaaggctctcagtgaaaaagatccacaagaaggtgctgtggtggttctcc

SEQ ID NO: 783939 - DNA, 75 bp, Homo sapiens
gggggagaccgtaatgagcgtcaaaattatccgaaaccgcctcactggatgctgctgcagattgctgatgatttt

SEQ ID NO: 783940 - DNA, 75 bp, Homo sapiens
gaaactcccagggcccgcccaggacccccaagccgccgcggacgcagggggacttgatctcatcttcatgccagg

SEQ ID NO: 783941 - DNA, 50 bp, Homo sapiens
cacagttgaagctccaggaggtcaaaagaccacagatgacatccttgtgg

SEQ ID NO: 783942 - DNA, 50 bp, Homo sapiens
ccattaaccagtacctgcagcagccattggatttaatgtagagacggtga

SEQ ID NO: 783943 - DNA, 98 bp, Homo sapiens
ctcggcgctgcgatccgcgcatataacgatccagtccttctgtggaacttctgaacatcttttattagtggaaatattttctacacaatgaagtcaac

SEQ ID NO: 783944 - DNA, 75 bp, Homo sapiens
cgtggacgtggtcaagtacgagagtggccctgacggaggggaggaagtttgatgacaaatacaccttgaagctga

SEQ ID NO: 783945 - DNA, 75 bp, Homo sapiens
atacattcctgattacctgccacccattgtgtcttctcaagaagacatcattcagtcgaggtttcacaaagaaca

SEQ ID NO: 783946 - DNA, 100 bp, Homo sapiens
agaagataaacgaggggctggaacacctcgccaaagcagagaaataacacgatgaggcgagtggtacgacagagcaagtttcggcatgtatttgggcaag

SEQ ID NO: 783947 - DNA, 100 bp, Homo sapiens
tgcggccgccgccttcttcctccatggtgtcatggagaaactccagctgggcccagagattctgcagcgggaaaatccaaggcttatttatgccaggctg

SEQ ID NO: 783948 - DNA, 50 bp, Homo sapiens
tggaccacattgtcaattcacaccgaaaatatttacaccagcagctccag

SEQ ID NO: 783949 - DNA, 100 bp, Homo sapiens
gggatactcttccactctctaaaaatgcagatcatttactgcacctaaagacaaaggtctatgttaacaatgaatgggcaaccagtgttggggaaggagg

SEQ ID NO: 783950 - DNA, 101 bp, Homo sapiens
caggcccctgtcaagaaggtgccggtggtgcgagtcttcggagcgaccccggcaggaacctgttttgttcactggaacaatgaggaaaaacctggatccct

SEQ ID NO: 783951 - DNA, 83 bp, Homo sapiens
ccttggttccttgggctggaagacagttaaacaaccagtatatgttatgggaagctggctggaagcagcggtactacaagaac

SEQ ID NO: 783952 - DNA, 100 bp, Homo sapiens
gcagaagggcgactgagtactcaacatattgactgtatttgggctgcagcacagctacgtgtctctctgtgataatgaaaagacaggttgcaaagcccgg

SEQ ID NO: 783953 - DNA, 96 bp, Homo sapiens
ctcaagtggacagtgaatggggacactcgtgtgggcctgtttgccgtctgtgacattcctgcagcccctgaatcctatgaggaactgagatctctg

SEQ ID NO: 783954 - DNA, 100 bp, Homo sapiens
gacaatattcaaaagcagtttgatcaagaaatgatcctagataattgatagatcctgtggttcaactggatttctagatagaagctggattcatgtgatg

SEQ ID NO: 783955 - DNA, 75 bp, Homo sapiens
ttgtagatctagaagtcactttggaagaagtatatgcaggaaattttgtggaaggatcatagacggtatttctat

SEQ ID NO: 783956 - DNA, 100 bp, Homo sapiens
cacagagctaaacgttttagagtaccaaccattgtgtgctgtgaggtaaagggtcctgcagttctgagcttgggttccctttgcctggacaccaaccaag

SEQ ID NO: 783957 - DNA, 75 bp, Homo sapiens
ttgggctccgtgcctgttcttcgtgctcctttcggtaaatttgctatgaagattatggaatcagagagagctctt

SEQ ID NO: 783958 - DNA, 75 bp, Homo sapiens
cagagcggccggaagcgcggagggagccgcgggatggaccgcagacagccagctaaaggtgtggatgagcaaata

SEQ ID NO: 783959 - DNA, 50 bp, Homo sapiens
agtgcggcaaccaaatcggcgccaagatgagacaaaaggacccagtgaaa

SEQ ID NO: 783960 - DNA, 100 bp, Homo sapiens
cacggcggtccccacggtcctggtaacccccctgggcgcccttggagtaccgttcggtgccggtggtggtgtgcacattgagccccggtatagacagttc

SEQ ID NO: 783961 - DNA, 100 bp, Homo sapiens
attcgcaacacaacaatcagatggcaccagggactggcagctccactgccgtcaactcctgttctcctcagagcctgtgcacagccagagaacaacacat

SEQ ID NO: 783962 - DNA, 100 bp, Homo sapiens
aagagtttttcaaacctacgacccagaagagatcgagatggtgatcatggagcgtagcaagctctcagagctggccgccagcacctccgtgcaggagcag

SEQ ID NO: 783963 - DNA, 100 bp, Homo sapiens
gagcagttgtctgatgaagagaagtctccaagaagagtttttagacaaacacacactgatgagagtgctttcaagtggagggaagttaggaagtcgtggc

SEQ ID NO: 783964 - DNA, 75 bp, Homo sapiens
attcgcagtggtcgcttcttctccttggattcctagatgaggttatgaagaagtatggcagtttggttccactca

SEQ ID NO: 783965 - DNA, 82 bp, Homo sapiens
aaggaccatgctgtttttactcgaagccgggagcatcctgatctgccgctgtggtgccagccttggaaacagcactcagggg

SEQ ID NO: 783966 - DNA, 148 bp, Homo sapiens
ccgccgtgctggatgccgtgatctccagcgccggcctcctcagtgcgaagaagctgcagccgcacctggccaagggtactggtgtggcatactcggacagagaagcccaagatgaagcaggaggagcagctgcagcggcagggccggg

SEQ ID NO: 783967 - DNA, 98 bp, Homo sapiens
gtgctgctggtgcttcatactgtctggaacggcaatggcatgtgaatgtaagacctttacttccttccaccaaacactgaaaaacaatagtgtgtaca

SEQ ID NO: 783968 - DNA, 95 bp, Homo sapiens
ttgtactgtgttcgcagtgacctggggaacctgctcaaagccctgggtcgcttggaagaagccaagaaagctggggccttggaaggtgtgccaat

SEQ ID NO: 783969 - DNA, 90 bp, Homo sapiens
ggtgaagtccacaatcaagttccaaatgaagaaggtgtgggcagaagaaaaagctagtgatcaacagtggcaatggagctgtggaggaca

SEQ ID NO: 783970 - DNA, 100 bp, Homo sapiens
ttggtgctgccgggcggccccggctggtgtgacctgtgcggacgagaggtgctgcggcaggcgctgcgctgcactaattcagtgatctcttctccctggc

SEQ ID NO: 783971 - DNA, 101 bp, Homo sapiens
cggagctgctctgcggggccgtggcgctcggctgcgcgctgctcctcgccctcaagttcacctgcagacgcctgactttagaagacctagaagattcatgg

SEQ ID NO: 783972 - DNA, 100 bp, Homo sapiens
taaaataaattcttttgaactagatcgagctgatagagaccctagtaacatgatccataatgagatggcatcaacatcagataaaggtgcccaaggaaga

SEQ ID NO: 783973 - DNA, 90 bp, Homo sapiens
gccaccccggtcaaaggatgctgagtccggagcgcctagccctaccggactacgagtatctggattggagctggagggagcatcactggg

SEQ ID NO: 783974 - DNA, 75 bp, Homo sapiens
catctttcaacaggagcaggagggttacacatcattttggaatgactgtatatcatctggattacgtggctgtat

SEQ ID NO: 783975 - DNA, 82 bp, Homo sapiens
agaaaactgaagtttgccataaaagttgatggagattacctttggcaggaacgaatgcaggaatttgggaactgagctgtgc

SEQ ID NO: 783976 - DNA, 87 bp, Homo sapiens
tgtactcatgtagcaaatttctcaggtgaatcaggtctaggaaaatcgactctcataaacagcctattcctaactgatctgtaccca

SEQ ID NO: 783977 - DNA, 75 bp, Homo sapiens
tttgaccttctgccatgattgtgaggcctccccagccacgtgaaactaaatcagggtgaaatggcccacacgtgc

SEQ ID NO: 783978 - DNA, 50 bp, Homo sapiens
gtgacagcagctttctggtcaaggctatggaaagggcaaatggaatggag

SEQ ID NO: 783979 - DNA, 74 bp, Homo sapiens
caggaagatggccctgcggcgcgcctttactcactggaaacactcttccacgagttctgcatccgtggctggtg

SEQ ID NO: 783980 - DNA, 101 bp, Homo sapiens
gcggcgcggagctggacgccgcgatcgtggggcccgcgaggcgggcagccggggcgtccagaaggtgccatgcgggccagcgagacagtgtcggaggccag

SEQ ID NO: 783981 - DNA, 75 bp, Homo sapiens
ctggactcgccctcctatgtcctgtacagccggttgctgaaccaatccccatctgtagtttctgtcttggtacaa

SEQ ID NO: 783982 - DNA, 100 bp, Homo sapiens
ccagctgcacaatttctccatctccttcttctcttctctgcttggaggggatgtggtttccgttaagctggacaacaggactgcaagatggaggaaggcg

SEQ ID NO: 783983 - DNA, 97 bp, Homo sapiens
acaggaactacgtcccggggaaggcatcaacttctaactcatctcgccaggagaggcctccagtgaaacccttcattctcactcggaacatggctca

SEQ ID NO: 783984 - DNA, 100 bp, Homo sapiens
tcttggaatgcagcttttttggaatcttctgctaaagaaaatcagatttggagaaaattaaggcttacattgattccttccgctttggagcccctcctca

SEQ ID NO: 783985 - DNA, 83 bp, Homo sapiens
ctcggcctctgccggagaaacagaactggtcatgctgctggagtggtggtcctgcacggagtgtacactgttcacggaccagg

SEQ ID NO: 783986 - DNA, 102 bp, Homo sapiens
tttgcagccggccttagtgctcgcgcaggaggaatttgtgaccctggaaattctcatgaaaatgacataatcctgtatgcaaaaattgaaggaagaaaagag

SEQ ID NO: 783987 - DNA, 100 bp, Homo sapiens
gactggaagccagaagcaggcctttctccaccaaggaaaaaacgagaagaccccaaaaccaggaaagcagagagacacagtgtgaaatcgctgctctcag

SEQ ID NO: 783988 - DNA, 75 bp, Homo sapiens
caaagtgcgcccacagcagcaaccttggagcaggcaggaccaagaatcgccttcagccctgtctggtgcatcctt

SEQ ID NO: 783989 - DNA, 99 bp, Homo sapiens
cgccgcgggcaggacgcgcgctgcagggccatgaagcccccaggaggagaatcgagcaatctttttggaagtccagaagaagctactccttccagcagg

SEQ ID NO: 783990 - DNA, 90 bp, Homo sapiens
ctgcggaagtgcagctgcctcagttcttagcgcagacacgatgaggcgagtggtacgacagagcaagtttcggcatgtatttgggcaagc

SEQ ID NO: 783991 - DNA, 100 bp, Homo sapiens
gcattagtgaggataggcagagaagaagggctgaaagcactctactcgggccaggtgattggtgaaaacactaaacaaccctgagcccagggccaacccc

SEQ ID NO: 783992 - DNA, 100 bp, Homo sapiens
aagggaagacttccagtagctccaaggaggttaagtatgtaaagaattcttgaaccgattctacaagtcactgatagacagaggagttaacttttcgctg

SEQ ID NO: 783993 - DNA, 80 bp, Homo sapiens
ggatgcctggaatagaagagaatgacctagcaaaagttgatgatcttccccctggccgagacgcatccagagctttcgtg

SEQ ID NO: 783994 - DNA, 100 bp, Homo sapiens
cggccaacttcggcaagatccagatcgggatttacgtggagatcaagcgcagcgatgatcttatgccttcattcatccggcatggtccaacaattccaag

SEQ ID NO: 783995 - DNA, 88 bp, Homo sapiens
ttcagtggttctttcctttgactccgctggacaaacactaggctcaggcgctgcaccagctctactatgatcccaacattgagaataa

SEQ ID NO: 783996 - DNA, 82 bp, Homo sapiens
tctgagactttctccttcaagtacttggcagatcactctcttagcagagtcatcttagtgggatttggggaagcaacagggc

SEQ ID NO: 783997 - DNA, 51 bp, Homo sapiens
atacatgagacagcagccaaacccccagagatggagtttcactgtgtcagc

SEQ ID NO: 783998 - DNA, 50 bp, Homo sapiens
ctgatgctgaagaggagcaaaggaggctaacacctccccccggcccgtct

SEQ ID NO: 783999 - DNA, 100 bp, Homo sapiens
cagaaggcgccaccatggcggcgcccccgcagcccgtcacccacctcatctttgacatggacggacttcttctgggaacattgaaattgatagtccctat

SEQ ID NO: 784000 - DNA, 101 bp, Homo sapiens
gagaaggacaactggatccacatcacagaggccaagaaattcgacagcctcctgaacatgcccaatgtccgtgatcatgatgcctctgtctacctccgcct

SEQ ID NO: 784001 - DNA, 100 bp, Homo sapiens
agatactctgtgggtctcttagacatgaccaagcagaaggggtttcctgcagaatttgcgatgtacttaaactattgtcgtgggctacgctttgaggaag

SEQ ID NO: 784002 - DNA, 120 bp, Homo sapiens
gagaacccgaagcacctcccggcgccgggacgcttcttctgtggccctatgcacccaggtagccctgggcatggagcacctgtccaacaaccgctttgtgcataaggacttggctgcgcg

SEQ ID NO: 784003 - DNA, 75 bp, Homo sapiens
tgaccacaatggggaggacaacttcgcccgggacttcatgctatgacagagactccactttcaatgtgtttgtgg

SEQ ID NO: 784004 - DNA, 107 bp, Homo sapiens
caaggagagtatcccgctgttcacctacgggcctgatcaaacttgccttcctgttctccaagaccagctcttcctgctgcccacattcctgcaccccctcatgaggg

SEQ ID NO: 784005 - DNA, 99 bp, Homo sapiens
tatgtcaacggtgacaagtgtgggaaccagcgcttctccaccaggatcacgtttgagtgtgctcagatatcgccaccttttgtggtgacattggatgag

SEQ ID NO: 784006 - DNA, 90 bp, Homo sapiens
cgcatgcaggcctcagctcatgtgactcggccctctaagaggcccagcaagatagggtttgacgaggtgcgtgccctggaggaggccaac

SEQ ID NO: 784007 - DNA, 90 bp, Homo sapiens
ccctacttcaagtactccgtcatgatcaacaaggccacgccctacaactacccagggcatggcctttctccacaacagcattatttcatc

SEQ ID NO: 784008 - DNA, 113 bp, Homo sapiens
aacagtggactcaacttcaaagacgttctcaaggagaaggcagacctgggtgtcatggagaaactccagctgggcccagagattctgcagcgggaaaatccaaggcttattta

SEQ ID NO: 784009 - DNA, 87 bp, Homo sapiens
tgaatctgccgcagctagaaatgctcaagaaccagctggaccagtttttggctttcacccccaaccagtgaccaaagacttgaccac

SEQ ID NO: 784010 - DNA, 83 bp, Homo sapiens
gcgggtcctacagagacagttatgacagttacggatgtccccgagcagcggagcatggagtaccctaagctgtatgagccggg

SEQ ID NO: 784011 - DNA, 98 bp, Homo sapiens
atgagacagcagccaaacccccaggggcctttacaacaactaaacggacaggcattccagccccacgggaattttcagtaactgtctcaagagagagg

SEQ ID NO: 784012 - DNA, 96 bp, Homo sapiens
ctgggatctgctgtggaagaacgtccgggagaggcggctggcagacttgaaactgcatctgcagagcactgattatggtaacttcctggccaacga

SEQ ID NO: 784013 - DNA, 75 bp, Homo sapiens
tccccatctggtgcttttcccatggagaacacacaaccagtctcttgatggtcgtctccaggtatcccatcgaaa

SEQ ID NO: 784014 - DNA, 75 bp, Homo sapiens
atggcggacgaggggaagtcgtacagcgcttaaagcttttcaagccaggccaagaagctgtgaagtaccagggtc

SEQ ID NO: 784015 - DNA, 90 bp, Homo sapiens
ctgaaactaatgaaactgttatggagcattgggctcaggatctgaacaaagtccgtgagcggatgacaaagttcattgatgacaccatgc

SEQ ID NO: 784016 - DNA, 132 bp, Homo sapiens
cggtgctcagccaggaggaggtggagggcgagctggctgagctggccatgggctttctgggcagcaggacaaccctccatatgataagggagccttcagaatcgaaatcaactttccagcagagtacccatt

SEQ ID NO: 784017 - DNA, 90 bp, Homo sapiens
tacctggtgcagggcctgattgaggactgccagctggcgctgcagtacaaggcgagtggataattccaacacaagactggcagtccaaat

SEQ ID NO: 784018 - DNA, 134 bp, Homo sapiens
cggatcaggatcggaagcctgcgtaactttctcccttgatccgggagtctttccactgggtactccaaagattcaggtttactcacgtcatccagcagagaatggaaagtcaaatttcctgaattgctatgtgt

SEQ ID NO: 784019 - DNA, 74 bp, Homo sapiens
cacaagcggcgccgcgccctcggcctgcacggtggagctgggcaagaagtaggaagatcatgtattattctcga

SEQ ID NO: 784020 - DNA, 100 bp, Homo sapiens
agacaagacacttttcagaaagacagatactagagtaaaaggatggtttcttctggacaattatatacccacatttatctgctctgtcatatatttacta

SEQ ID NO: 784021 - DNA, 50 bp, Homo sapiens
aattctttcgaggattaaatatttgttcccgacaaggagttttctggttc

SEQ ID NO: 784022 - DNA, 100 bp, Homo sapiens
tcatcctggtgatggcaaatgtcgtggacatggcagatataatgcacctgactgactctgtggtgcgtcgccagctctttcttgacgtgcttgatggaac

SEQ ID NO: 784023 - DNA, 100 bp, Homo sapiens
cccagaaaggcaccactccctggattgccatgctgtcacacctgaatgggcagcccttctgcggaggctcccttctagacggagtctcactctgtcacca

SEQ ID NO: 784024 - DNA, 75 bp, Homo sapiens
atatagagatgtgatgttggagaactacagaaacctcgtctccctgggtatttgacctgtccaaagacgacttga

SEQ ID NO: 784025 - DNA, 75 bp, Homo sapiens
tggatcttacacttgaaatacagactgttggggaacaagagcaggtagcatctaaaggaactggtttaaatccta

SEQ ID NO: 784026 - DNA, 90 bp, Homo sapiens
caaatgaccaatcttcaagatggtcttcagagagcaactatcctccccagactgctgtggatgtttttcgaaggataattttggaggcag

SEQ ID NO: 784027 - DNA, 90 bp, Homo sapiens
cagacatggggaacagggtcacagctctcacccagcgatctagggcagccctgcagaggtacctgttctactgtaatcgctatatgaacc

SEQ ID NO: 784028 - DNA, 100 bp, Homo sapiens
ccaatatcagattgaacctgtgaagaaaatgtgtgttgattttttgaaagaacaagttgatgcttcaaattgtcttgttctcagcacagatattctacac

SEQ ID NO: 784029 - DNA, 75 bp, Homo sapiens
gcccgccaccctgcgctgccgccgctctgaggagttaaagacacgatgaggcgagtggtacgacagagcaagttt

SEQ ID NO: 784030 - DNA, 82 bp, Homo sapiens
aaccggtgtccagcggggctgcgggctacggctgttggcctccggtgtggctgtctctgatggtgtcatcaaggtgttcaac

SEQ ID NO: 784031 - DNA, 100 bp, Homo sapiens
caacctgggtgctgcaggtgttcaagtgcagggagttcccgttacaatcactagtgttgcaggtggaatgaggtaccatctactgtctccagaggaccga

SEQ ID NO: 784032 - DNA, 137 bp, Homo sapiens
ctttccagtcggagacctctgccgcaaacatgctccgccagatcatcggtcaggccaagaagcatccgagcgtgaatctggattgggaaagtcgacattaatcaactcattattcctcacagatttgtattctccag

SEQ ID NO: 784033 - DNA, 82 bp, Homo sapiens
tgcagatcttcaacaagaggacccaggagaaattcgccctcaaagtggatccataaagaacccagccaacccgcagagggag

SEQ ID NO: 784034 - DNA, 101 bp, Homo sapiens
gacatctctcagggtgccggcaccatgaagatctggacttcggagcacgtctttgagatgggagcaaagtgtttacggcatcgtgtgataaaactgccaaa

SEQ ID NO: 784035 - DNA, 96 bp, Homo sapiens
attgattcatcagattttgcattggatattcgcatgcctggggttacacctaaacaggcattggaactcttaactaattgttacattatggttcag

SEQ ID NO: 784036 - DNA, 100 bp, Homo sapiens
gtaaaagccccgcctctgccttcggatagaactgaagcgctgcggcatggcgcgcgcctgcctccaggccgtcaagtacctcatgttcgccttcaacctg

SEQ ID NO: 784037 - DNA, 75 bp, Homo sapiens
caaccacagctctattcccatggacccaggtggagccgccaccaaaatgcagattttcgtgaaaacccttacggg

SEQ ID NO: 784038 - DNA, 100 bp, Homo sapiens
agaaatcttagataagaaggttgagaaggttctgaagaaagtctccaaatacattcaagagcagaatgagaagatctatgctccacaaggcctcctcctg

SEQ ID NO: 784039 - DNA, 100 bp, Homo sapiens
gttcttgatcccaaaccgccgccgttgactttgggaagtcaccaaagcagtacagcctctcttactgggaagaatcatagcttcctatgacccggataac

SEQ ID NO: 784040 - DNA, 100 bp, Homo sapiens
gtccaggtcttcatgctgctgtgggtgatattactggtcctggtagcttccctctgtgtgaggaaaggatagaaatgttcaggacatcatcatacaggct

SEQ ID NO: 784041 - DNA, 96 bp, Homo sapiens
ctcagatcctgaacgactgtttacgggagatgctgctcttcccttacgatgactttcaggttgccgaggagcccaagtagaagaaatatggagttt

SEQ ID NO: 784042 - DNA, 90 bp, Homo sapiens
cggcggcagcagcaccaggctctgcagcggcaacccccagcggcttaagccatggcacagtgaaacgtccccggaggatccacctgcccg

SEQ ID NO: 784043 - DNA, 100 bp, Homo sapiens
acagcagtggagaaggagaacctttgactggagatgccacaactgaatggcaaaaaagtttatcttctggatgccaatgtgaattgtggtctacaaatac

SEQ ID NO: 784044 - DNA, 100 bp, Homo sapiens
gtggggtgccctacacctgctgcatcaggaacacggtgtacgaagccatcgacagcagagatggagcatcttgtgcagagttggtgtcttttaaacatcc

SEQ ID NO: 784045 - DNA, 80 bp, Homo sapiens
acagactgagcgcgtccaggcctgacagctctgcggctcgggccctgaggatctctctaggagctgacactcgaaccttc

SEQ ID NO: 784046 - DNA, 100 bp, Homo sapiens
tcctggcttcttactcagtccatcttctgcttagtatgtgtattcagacaggtggagccgccaccaaaatgcagattttcgtgaaaacccttacggggaa

SEQ ID NO: 784047 - DNA, 97 bp, Homo sapiens
tctggatcaaaaactcagaaaatacgtggttggagagctcatctggaattttgccgatttcatgactaaccagtccgtgcagtcggaggtccttgtg

SEQ ID NO: 784048 - DNA, 100 bp, Homo sapiens
tggccatcttgagtctactctgtcgctcttgtgccctagcaccccgagaaccgtcagtttgagccagatggtgtggccgacgacgatgccctcgctgagg

SEQ ID NO: 784049 - DNA, 100 bp, Homo sapiens
gcacagctcggcgcggagcgtcctgtcaggcggcggccgagggcgtcgcggactctccccgcgatgatgccggaggcactggctacaattaggcttctcg

SEQ ID NO: 784050 - DNA, 100 bp, Homo sapiens
gacgggaaaaggaggataagcaagtcgaatttttgtcttacggtctcacagggatactgggtttgggcattgcggctcccaatctagccttttctcagat

SEQ ID NO: 784051 - DNA, 100 bp, Homo sapiens
tggggaggtcctccatgcgcagtcatgagtcgcttcaagtttatcgacctgaagattatcggctataagagaataagaattgcagaaaataacagtgaag

SEQ ID NO: 784052 - DNA, 100 bp, Homo sapiens
tgatacttcaaaaattgaagctgcaatatggaaggaaattgaagcgtcgaaaaggtcttgattctgagaatgaatttggcccagcagcaaagaaacctgg

SEQ ID NO: 784053 - DNA, 102 bp, Homo sapiens
cttcaagatggtcttcagagagcaactatcctccccagttggagtcattcgttgcccagtttgcagccaagaatgtgcagagagacacatcatagataactt

SEQ ID NO: 784054 - DNA, 75 bp, Homo sapiens
ggccatgctgacctacaagcagaagagtgtcaacagcatctccaccctggagcctgtgagccggtgccagcgcct

SEQ ID NO: 784055 - DNA, 100 bp, Homo sapiens
tctatgcacgcagatgctggagaagtccccttatgaccagggcaagactggagagttaaatcagcttttaaatgcagttaaatcaatgcaggagaagaca

SEQ ID NO: 784056 - DNA, 100 bp, Homo sapiens
aaaatcacagaggtaaagcatcatttcatcacatcctgtcaagggcctcccagtagcattggatgcaggaaaaaatacattgacggtgaaaaacaagccg

SEQ ID NO: 784057 - DNA, 96 bp, Homo sapiens
tatcttctttcattatggagggaggtttggcagatggagaacctgatcgaacttcggtgttagtaaaatggcctttcgccatttaattgagttcac

SEQ ID NO: 784058 - DNA, 75 bp, Homo sapiens
cgcagtcggcaaggagagacgtcgctgaggggcttgcctgaagcgaggggtaactattttacaccacaacagaca

SEQ ID NO: 784059 - DNA, 73 bp, Homo sapiens
tcgaggcggacgcgcggctgcgtcagcactggatttcctggaacaaattttgacatttagccccatggatcgg

SEQ ID NO: 784060 - DNA, 100 bp, Homo sapiens
cgggtcatggagtcccgaaccctcctcctgctgttctcgggagccgtggccctgatccagacctgggcagttgaagtcaagtgattttgctgttctgaag

SEQ ID NO: 784061 - DNA, 80 bp, Homo sapiens
cgcctaccacacacgtgaagtccaggagggtttctcttcccctcccagttcgctgacctcgccctccacgccctccagcc

SEQ ID NO: 784062 - DNA, 82 bp, Homo sapiens
gggggaggcgacgctaagttgctgatcgtggcgactaaaaggccagaatattctctgtggacagcatcctgctcaaacagca

SEQ ID NO: 784063 - DNA, 101 bp, Homo sapiens
ctacgccaagtactatgcacttgtctgctacgatcattctcagcttcccaggcagacccactcagtgatcctgatcagatgaacgaggacaagcgccattc

SEQ ID NO: 784064 - DNA, 83 bp, Homo sapiens
gttgaccaagcctctacaggggcctcccgcgccccccgggacccccacgccgccgccagccttatgccagcctggaccatctt

SEQ ID NO: 784065 - DNA, 128 bp, Homo sapiens
tccctgtatgcatggtgtggggttggtgtgattagcttcgcagtctggaaagctttaggagttcacagtggttggattgagattgttggatgtgctgatcgttcctgttatgacctctcctgtcatgc

SEQ ID NO: 784066 - DNA, 100 bp, Homo sapiens
gcagcatgtacgccaaggggggcaagggttcggccgtgccctccgacagccaggcccgcgagaaaggtggggctggtgtccgagcacttctcgcaggccc

SEQ ID NO: 784067 - DNA, 100 bp, Homo sapiens
tccacagcccatacacatgcacttctgcgctttcacacatgcccagacgcccccccgcgccagcccccttttacccatgcactggtgaccccggcagccc

SEQ ID NO: 784068 - DNA, 82 bp, Homo sapiens
cgggacccggtgtctgctcctgtcgccttcgcctcctaatccctagccactatggctgaaggggatgctaagggagataaag

SEQ ID NO: 784069 - DNA, 50 bp, Homo sapiens
gcgcgtggaacggctgcttttggaagagaatgtaactggtcactacattt

SEQ ID NO: 784070 - DNA, 98 bp, Homo sapiens
ccaaaggctattggatcagctcagcaggacactcttgcactcctgtaatgagcctggcactgtgatgaaacacttttcccgtgtcgtttgagtgcatc

SEQ ID NO: 784071 - DNA, 73 bp, Homo sapiens
tgaccgagagcgcgaatatcgtcatcgttagaagtactacgacatttctgccaaaagtaactacaactttgaa

SEQ ID NO: 784072 - DNA, 76 bp, Homo sapiens
tcctctgcattgccattgttctgagcttttggaaagaacaaacagtggatttgaagaatcagattctggtgctact

SEQ ID NO: 784073 - DNA, 98 bp, Homo sapiens
ggccgcgacacctcctggccatgggggacgtgctgtccacgcacctggacgacgcccggcgccagcacatcgcaggtactccaaagattcaggtttac

SEQ ID NO: 784074 - DNA, 80 bp, Homo sapiens
cttgaaaccgctctcgtaatttgccacggtctcgtcagcctatctcggcccctctcttttcatgtcctgacaaaaacaag

SEQ ID NO: 784075 - DNA, 100 bp, Homo sapiens
ccttcaatccaggacgagacttaaattcagtgaatagccatggagctcctaaaaagaatgggacctttcacttgacctcccttctctcccttgcctactg

SEQ ID NO: 784076 - DNA, 82 bp, Homo sapiens
ggagaggtagccatgatgccccacttggtgaatggagatgcagctcagcagattgtagaaggcatgaaacaaaaaatgtgga

SEQ ID NO: 784077 - DNA, 74 bp, Homo sapiens
ccgggcggagagaactcagcgaggattctgaggtcctagaccagaaggagcacaggctggatggccgtgtcatt

SEQ ID NO: 784078 - DNA, 74 bp, Homo sapiens
aagcagccaaccatgctcaacttcggtgcctctctccagcagactgcgccctgggcgctgcctatggcacagcc

SEQ ID NO: 784079 - DNA, 46 bp, Homo sapiens
ttattctcaagctgtcacaggactggtggaggccattgtcttgcca

SEQ ID NO: 784080 - DNA, 75 bp, Homo sapiens
cttttgtggtagaccgtctaagagaagctgtgattgggttattatacccctgcattgacagacatctaggagaac

SEQ ID NO: 784081 - DNA, 74 bp, Homo sapiens
gtggacccttggagccatcctctacaggacccgctttctaccattaagcaatgctggggtgaaaacaacacggc

SEQ ID NO: 784082 - DNA, 50 bp, Homo sapiens
tccaggtcaccatcgagggccctgaactcagcctcctcccaagctccctg

SEQ ID NO: 784083 - DNA, 83 bp, Homo sapiens
aggaacacagaggacgatcgccccccggacacacccttactctcccatgtggatgccatggagactggaagaccattccaact

SEQ ID NO: 784084 - DNA, 99 bp, Homo sapiens
agtgaaccggagaccccgaaaacggaagcgcagggagaaggaagaggtgtttgaaaaggcaggcagtggttaaaggttcccttccacatccttttgcct

SEQ ID NO: 784085 - DNA, 88 bp, Homo sapiens
gccgatcctccaggcatgccccgctacgagctggctttaatcctgaaagccatgcagcgggtaactgcatcctgcccagcatgacggc

SEQ ID NO: 784086 - DNA, 50 bp, Homo sapiens
ggagcgcagaaccggccgcgcccgttgctggatttgtgcgactcggtgaa

SEQ ID NO: 784087 - DNA, 100 bp, Homo sapiens
cagctacctccccaataggtgcatcagtggagagactttgctaaagaagtggatgggttacttcgaattggagctgttaactgtggtgatgatagaatgc

SEQ ID NO: 784088 - DNA, 74 bp, Homo sapiens
gttcttgtttgtggatcgctgtgatcgtcacttgatcggcttcagctccccaggaatatgattgaaaacagcat

SEQ ID NO: 784089 - DNA, 100 bp, Homo sapiens
cagacattgacctcaccaagagggcgggagaactcactgaggatgaggttaacttggataagctgaaggaaagagctcaaagatttggtttgaatgtctc

SEQ ID NO: 784090 - DNA, 75 bp, Homo sapiens
atttctttggagacaaaactatgccagctatgtatgtcaaaaaggatgttcctttgtggcaaaaacatggacgga

SEQ ID NO: 784091 - DNA, 87 bp, Homo sapiens
ttcacttatctcttctttaacttatcgtggaaataaaacagctgttttgcagattggactacaagatgggcttaggtcacgagcaag

SEQ ID NO: 784092 - DNA, 99 bp, Homo sapiens
gtcgtccgaaccatcccaacccccagtccacccagacagcgcccgagctaggggagggaacggtctggggtgaggtggctttgaccccgggttgcccgg

SEQ ID NO: 784093 - DNA, 50 bp, Homo sapiens
ctccattgctcgggggagaaacaaaggggcaagtgtccagagaatggctg

SEQ ID NO: 784094 - DNA, 121 bp, Homo sapiens
ggatccccgcaaggatgagtgctgccagagagtctcacccgcatggggtgaagcgttcagcctccccagacgacgattacttacaactacgattcaacaaaccagttcgctatgctgccac

SEQ ID NO: 784095 - DNA, 74 bp, Homo sapiens
tcaccatcaccttcaatccgctctactggaatgtggtttggtgcacctcgatttggaggaagtagggcagggcc

SEQ ID NO: 784096 - DNA, 90 bp, Homo sapiens
ctcaaagctgaagaaatgtatagactccaacaattgaggatccagtttgtgtgttctctgtgcaaataccggaccttctatgaggacgag

SEQ ID NO: 784097 - DNA, 75 bp, Homo sapiens
agttatgcttgttggaattggtgacaaaatcagaggcatactttatagatggcccactgcgtgaccttggttcag

SEQ ID NO: 784098 - DNA, 101 bp, Homo sapiens
ccgcggttcctcctcctgtcgctgcccgtgtgattactgagactcagtccattgctgatggttttaaagaggcagttcgttatgtccttccacgtcttatg

SEQ ID NO: 784099 - DNA, 51 bp, Homo sapiens
tagatattgtacctgctgtagagagccataagtgtgatccttggtgacagg

SEQ ID NO: 784100 - DNA, 88 bp, Homo sapiens
tggagaccctgctgtcttctgccagccggcgcctgcgtgtgcttgaggccgaaacccagaccctgtacacgtatcctgaaaactggag

SEQ ID NO: 784101 - DNA, 83 bp, Homo sapiens
accgacagtgccctgagggccttcgagagctaccgcgccagacaggaaggtgctcgggtcttcggggcactgggtcccatcgg

SEQ ID NO: 784102 - DNA, 100 bp, Homo sapiens
ccaggagttcgtctcttacgtctgcggaagtgcagctgcctcagttcttagcgcaggggacatcacccagaagggctatgaaaagaaaaggtccaaactc

SEQ ID NO: 784103 - DNA, 83 bp, Homo sapiens
acaacattaatcagatactgcatttaagtcgttccccatcaggaagtcctcgcagaagtgcaagtcctgaaagaatggactga

SEQ ID NO: 784104 - DNA, 94 bp, Homo sapiens
tggacgtctgtgtccggcacttcctgcaggccacagacaatgcagatcttcgtgaagactctgactggtaagaccatcaccctcgaggttgagc

SEQ ID NO: 784105 - DNA, 101 bp, Homo sapiens
gagatatctgcaatgatgtactgtgggtgaatttgtaagtgatgtcctgctagttccagaaaagtgccagtttttccacaaagagcggatggaggtgtgtg

SEQ ID NO: 784106 - DNA, 96 bp, Homo sapiens
ttcgatccatcagcctccacaagtcagcgtcattgtgaaaattggaagacacttatataaactttggcattgtgtttagcacacaaaagaccctgt

SEQ ID NO: 784107 - DNA, 101 bp, Homo sapiens
gttcagcatgaaccgcagccaccggcacggggcgggcagcggctgcctgggcactatggaggtgaagagcaagggatgtttcagcagcccctgagaaggaa

SEQ ID NO: 784108 - DNA, 75 bp, Homo sapiens
acatgtttgaggcccgggaatttcttcgaaaaaagcttattgggaagaaggaggttgtggctcactggattgctg

SEQ ID NO: 784109 - DNA, 100 bp, Homo sapiens
tcgcttagaccttcctactggtgatggccagccatcccttgaaccccctatggctgctgcttttggtggagccgccaccaaaatgcagattttcgtgaaa

SEQ ID NO: 784110 - DNA, 82 bp, Homo sapiens
cctggctcggagcagcagcctctgaggagtgcctgtgaagaaaacggggtattgccctgaggcttatattctgcctcagttg

SEQ ID NO: 784111 - DNA, 82 bp, Homo sapiens
acacgaagagctgccgtcgctgcagagaccccgctatggctaaggaagaggcccagcagaagggactcgctgagccaccccc

SEQ ID NO: 784112 - DNA, 83 bp, Homo sapiens
cgctcccctgagtaagagtcagccagccgcggatggggagcgtgagtggcgagggacagaagatgagcctgtcggtcctggag

SEQ ID NO: 784113 - DNA, 80 bp, Homo sapiens
gtgctgcgagggcagaacctggaggacagaaaaatggttcgtattgttcttacaaagacaaagagagatgcagcaaattg

SEQ ID NO: 784114 - DNA, 50 bp, Homo sapiens
aggcctgctcggccctcacaggcttgctacacggacatcccaaagattat

SEQ ID NO: 784115 - DNA, 74 bp, Homo sapiens
catcacctctcagcacgattttcccgagagttcacagacaatgcagatcttcgtgaagactctgactggtaaga

SEQ ID NO: 784116 - DNA, 73 bp, Homo sapiens
tttgaccttctggatgtccttgagttcaaccagaacctgtcattaggcccatggggagacgtgtgtgcctgtg

SEQ ID NO: 784117 - DNA, 96 bp, Homo sapiens
cagtttttcgtcgagagattcactatggaatcgaaaaagcttgtggtgaaggggggcaaaaaaaagaagcaagttctgaagttcactcttgattgc

SEQ ID NO: 784118 - DNA, 100 bp, Homo sapiens
gagaggcaccgggatcgtgaccgagaccgtgaccgagagcgtgaccgagagcgcgaatatcgtcatcgttagaaggacccaaccctggaagaaaagatgg

SEQ ID NO: 784119 - DNA, 82 bp, Homo sapiens
tggggttctgagactccctgtcccggaccgcaggatcttttgccagaaatgagggcatactggcctgacgtaattcactcgt

SEQ ID NO: 784120 - DNA, 50 bp, Homo sapiens
cttggattcagacgccgattcgcccaggtgtaatctagctcctgtggtgg

SEQ ID NO: 784121 - DNA, 76 bp, Homo sapiens
cagggaggatgtcgggacaccccggaagctgggaaatgaatttcagaaactgtggaggagtgtcactgtagattcc

SEQ ID NO: 784122 - DNA, 101 bp, Homo sapiens
cgacctagtatttgaatttgctagtaacgtcatggaggatgaacgacagggacaggagagagtggcaagagtacgtttatcaagcagatgagaatcatcca

SEQ ID NO: 784123 - DNA, 50 bp, Homo sapiens
gcgcatcttattaaccaaaatgtggtcactgaactgatgcaggagcagtc

SEQ ID NO: 784124 - DNA, 75 bp, Homo sapiens
gcctggatgtgtcggtgaccatctcgcaggatgccggcagaatccggacaatcagatagttcaaaccagcaagga

SEQ ID NO: 784125 - DNA, 100 bp, Homo sapiens
ccacccacgatttgagggcaagagctgcagccccctgacgcctgtggcctctcagacccggcccacgttgagagcctgcaggagaaggcgcaggtggccc

SEQ ID NO: 784126 - DNA, 75 bp, Homo sapiens
aacttcctgttctgatagcgtggaaggtgctggagaatctggtaaaagcaccattgtgaagcagatgaggatcct

SEQ ID NO: 784127 - DNA, 98 bp, Homo sapiens
cgggacccggttccccggcccacagtgggggtgtgcaaacccgagagaactggtttaagctatgaagaaggacatccctcacactctgaaacagatct

SEQ ID NO: 784128 - DNA, 83 bp, Homo sapiens
aggcctctctcctgatacagcaggcgctcaccatgttccctggaggtaaagaagctaagtggaagagtgtttcctcctctggc

SEQ ID NO: 784129 - DNA, 83 bp, Homo sapiens
gggaggtcggcggccccaaaagaactctaatgaatcattgattgaccagcactattttaccagttggaatgaatgatcagaaa

SEQ ID NO: 784130 - DNA, 100 bp, Homo sapiens
tgggacacacctccattggatttaaaagacagtcctcgtcagcactgactttcagctatggaatcgatgcagcagcttttttatgagaattacgagcaga

SEQ ID NO: 784131 - DNA, 75 bp, Homo sapiens
gcagccaggagatggttcgggcctagcggagccgggactggaggtacattttacatactttgggaaaaaaaaacg

SEQ ID NO: 784132 - DNA, 101 bp, Homo sapiens
aaacattcgtctcggaaaccccgcctcttacagtcacgaggtattgactgggctcccaagagcgaccgcattgtcacttgtggggcagaccgcaatgccta

SEQ ID NO: 784133 - DNA, 120 bp, Homo sapiens
aaaaatgcagcatatagaaagtatacagaacagattacaaatgagaagctggctatggttaaagcggcttcacaggctgctcaagaagccgagatcaatgccagaaaagccaaaaactct

SEQ ID NO: 784134 - DNA, 100 bp, Homo sapiens
gatgtggtgctgcccgagaaggtggacgtgctggtgtctgagtggatggggacctgcctgctggctcgagaactcttcctaaaagcagtagaagaagaac

SEQ ID NO: 784135 - DNA, 75 bp, Homo sapiens
taaccgagaggaacgagctgctggaggagcaggtggaacacatcagggaggagatgttttctggcaaaggccttc

SEQ ID NO: 784136 - DNA, 82 bp, Homo sapiens
tcagttcgtgtgtggagacaggggcttttatttcaatgatggtggtgctaccccagtacaggatgaacgggattcagggtca

SEQ ID NO: 784137 - DNA, 100 bp, Homo sapiens
cgcttgagatcggcgctttgagaactgagcgcatgtggagttcggaggaaaagggctcagctttccagagtgttgaatcttccaccagaaaacttgatca

SEQ ID NO: 784138 - DNA, 75 bp, Homo sapiens
aggacatgcgtttgagatctactgtgaacttggcatccagagatgagccccagaagttatctccaaaaagggata

SEQ ID NO: 784139 - DNA, 100 bp, Homo sapiens
gcatgtgcaatgaattctcacagatatttcaactgtgtcagtttgtaatggaggattcgtgattagtggagtactatctccagacacaatatcgtctaaa

SEQ ID NO: 784140 - DNA, 83 bp, Homo sapiens
ctggatttccaaggaagaatttcctctgaagcaccgtgtcggagatgtatgcagtgtgacgccaagtttgactttctcaccag

SEQ ID NO: 784141 - DNA, 100 bp, Homo sapiens
gctgctccccaggacctgagcaggaacctggagttttcaggcgtcctgcctctgcggctctgccccctgcatcctgtgcagctgctgccccgccagccgc

SEQ ID NO: 784142 - DNA, 83 bp, Homo sapiens
gctgagctggggccccgcattggccgactgcagcaggtttatgatgataaagactacaggagaattcggtttgtaggtcgtca

SEQ ID NO: 784143 - DNA, 96 bp, Homo sapiens
ggagaagctctaccccggctactacaccaggagctgaggcttcgaagacctcagaggacttctctcagcactcacagaaacctcctacaccctcgg

SEQ ID NO: 784144 - DNA, 100 bp, Homo sapiens
aaagcaccatgacgtccatccatttcgtggttcacccgctgccgggcaccgaggaccagctcaatgacagtgtttaactgctgaagagatcttttccctt

SEQ ID NO: 784145 - DNA, 100 bp, Homo sapiens
caagtagtccgatggctgcggctgcgccgaggcgccctactcaggtagattttcgttccgtcacccaggctggagtgcagtggtgtgaccttggcttgct

SEQ ID NO: 784146 - DNA, 82 bp, Homo sapiens
ccccctccggcgtgttcatgcccccggggtttattcactggatctctgaatacccaggccccctccaccatggccagccggg

SEQ ID NO: 784147 - DNA, 96 bp, Homo sapiens
gctcccgatggcgggagctccaggaaaggctgagggtaaaaagctgggattggtaggctgggtccagaacactgaccggggcacagtgcaaggaca

SEQ ID NO: 784148 - DNA, 50 bp, Homo sapiens
gattcttccaaggaaccagtgcgaagccaagtatcttcaagaccttctca

SEQ ID NO: 784149 - DNA, 100 bp, Homo sapiens
ggcaacaagagcgacctggtgcgctctcgtgaggtctcggtggatggcttgtggaatatacccgtgctgatggcacagttggccgaagagtgaagcccta

SEQ ID NO: 784150 - DNA, 82 bp, Homo sapiens
agcgcgggcagcgaaccgggggagcgaggcacgacaatgcagatcttcgtgaagactctgactggtaagaccatcaccctcg

SEQ ID NO: 784151 - DNA, 100 bp, Homo sapiens
atgaaatgctgggacttgtgcccatgaggtattctctactgccgctgatggtcaaacgcaagtggaaattaaagtgtgtcagggtgaaagagagatggct

SEQ ID NO: 784152 - DNA, 90 bp, Homo sapiens
acaacatctatcaacagaagatcaaggtggcagtgctccttttggacttttctctaggtttggcgctaaactcttcttgtgagctcactc

SEQ ID NO: 784153 - DNA, 88 bp, Homo sapiens
ttctcagaagacagagggttttcttttgagtggctgtttggtggccattctccgtccctaggactgcccccctcttccacagtggagc

SEQ ID NO: 784154 - DNA, 98 bp, Homo sapiens
agcatggtcagtgccgtttaacctttattgtggtggagtccaccccgctgtgtcatccgtccttggctcaggatttggagagcttgcaccaccaaaaa

SEQ ID NO: 784155 - DNA, 83 bp, Homo sapiens
ccgcgattctcagggattgatcgcctcttcagggatacccacccaccatcccagggtctacaacatccacagccggaccgtca

SEQ ID NO: 784156 - DNA, 90 bp, Homo sapiens
atatcctggtggctggcagtatgcttgatgagacgtgcaggtaccatcaggaagcagcgggataagctgataaaggaaggaaagtacacc

SEQ ID NO: 784157 - DNA, 110 bp, Homo sapiens
tccgctgctgctgaggagaggagcgtcaacagcagcaccatggatgctgtcttcgcaggtgccatgcctacaatggcaagcgtcaagctgtctacacttcatcccattgt

SEQ ID NO: 784158 - DNA, 98 bp, Homo sapiens
gaagataaagaatgttgccttaggaggaccaggtctccaaggacaaagcccttcagagcatggcgtccatgtcctctgcccagatcgtctctgccagt

SEQ ID NO: 784159 - DNA, 100 bp, Homo sapiens
gatctacagcatggatgagggcatccgcacccgctctaagtcagccaaaagtagctttgcagtttggggagggctgttttccatgattgactgtagtatg

SEQ ID NO: 784160 - DNA, 50 bp, Homo sapiens
gaggagaaaggccggagccagccgaggcaatgagaagcacgaccttcatg

SEQ ID NO: 784161 - DNA, 60 bp, Homo sapiens
ctggctggaacacacatcagtcacgcattgaagttgatatcgatgtggagcacggaggga

SEQ ID NO: 784162 - DNA, 87 bp, Homo sapiens
tattctgaccagattcagcaacctctaactaaccaggtggtggccctaggggatgttccagatggcactctggtcactgtgatggct

SEQ ID NO: 784163 - DNA, 90 bp, Homo sapiens
agctgccagatccgctgatctagtgcttctcgaaaaaaaccttcaggcggcccatgggccaacccatggccagcacagacatgatggaat

SEQ ID NO: 784164 - DNA, 100 bp, Homo sapiens
cccacgctgcatcatgagtgcagccggctgcaggagcagctagcgcagattatgatgatggcttttcaatgaagcatacagccaccgcccgtttccagag

SEQ ID NO: 784165 - DNA, 50 bp, Homo sapiens
gacggggtttcatcatgttggccaggctagtcttgaattcctgacctcag

SEQ ID NO: 784166 - DNA, 100 bp, Homo sapiens
tgcctttgagcggactcccttttaagcacctgttcttcccggagcctatcagcaaagccattcccaaggctatggctacatgcaccagaccagtgtgtca

SEQ ID NO: 784167 - DNA, 149 bp, Homo sapiens
ggcgaagcctggcggaccttcatctacggcttctatttctacaagatagtaacggacaaagagcccgaccgaggtgacagagctgaatgaacctctctccaatgaagatcgaaatctcctctctgtggcctacaagaatgtggttggtg

SEQ ID NO: 784168 - DNA, 100 bp, Homo sapiens
ttgaaacttttatctcatctggcttggcgcctgaggttctcccattaggactgatcctttgaaatactccagccatgactaaaagagaagcagaggagct

SEQ ID NO: 784169 - DNA, 98 bp, Homo sapiens
tggacgccatcgtcaacgccgcccaccttgggacaccttgactccaagcccagcagtaagtccaacatgattcggggccgcaactcagccacctctgc

SEQ ID NO: 784170 - DNA, 100 bp, Homo sapiens
tgttgaatgacatgggagacacgccgcttcatcgagctgcctttacaggacgaaagacattaggtatgcatcagttaacttttgcccatagaactcgagc

SEQ ID NO: 784171 - DNA, 76 bp, Homo sapiens
aacatactgccttatgggacagatcaaggacagcaatcagacctattgctttgagagctgtgacctccattgctcg

SEQ ID NO: 784172 - DNA, 75 bp, Homo sapiens
cgcggccgactcgcaagatggcgccggtttgtatttcagcagtcagaaaaatttgcaaaggtggaaaaccaatac

SEQ ID NO: 784173 - DNA, 89 bp, Homo sapiens
ggattccaagtaactcttatttgtgggagctggtgaggtggccaacttcgctgcgtatgcgtttgcaccagccactctagtgactccac

SEQ ID NO: 784174 - DNA, 75 bp, Homo sapiens
acagtgatgaggaaagctgtgaaagttctcaagcgcgatgtacaatacggtgtggagtatggaccgcgatgacgc

SEQ ID NO: 784175 - DNA, 83 bp, Homo sapiens
aacatggataagcatgccctgaaaaagtatcgtcgagaagcctatcatcggctgtaagactggaaagtacttaccagaatcga

SEQ ID NO: 784176 - DNA, 90 bp, Homo sapiens
gaatgatattcagtggtgtttttctcaggtgaaaggagcagtagatgatgatgtagcagaaggggtcaccagtcgttggcacaccaagaa

SEQ ID NO: 784177 - DNA, 82 bp, Homo sapiens
ctgcttcaagccccgcgagtcgcatctgctcaacgacgaggacctgacgcaggtgaagatcatgacggagaaggaactcctg

SEQ ID NO: 784178 - DNA, 75 bp, Homo sapiens
gccgacgccgaggccttcaccgcctacctgaacccttaggagaaatcttgagagtggacagcaattgtgaagatc

SEQ ID NO: 784179 - DNA, 49 bp, Homo sapiens
gctcctcgatatcagtctatgagaagggccttgctctattactgtgaag

SEQ ID NO: 784180 - DNA, 80 bp, Homo sapiens
aggcagcataactttaaatcttccccaagatgtatggaatgtcggattgcacatcctattgtaaaatgtacttactgcag

SEQ ID NO: 784181 - DNA, 100 bp, Homo sapiens
actgagggtgaagtggcaggaggaggaggaggggctccggctggtctgtggtgaggtgacccagggcctggtcatcgggcagctgagcagccacttctcg

SEQ ID NO: 784182 - DNA, 75 bp, Homo sapiens
tgagaccgaaatagactctgaagtaatatctggactttgaaattgccaactacacagacccccagagcaaactgc

SEQ ID NO: 784183 - DNA, 83 bp, Homo sapiens
acctgagcctcttctacatcggtttctacctcaaggacatggagcgcttgaaagagatataacacgtgggaaccggaggagaa

SEQ ID NO: 784184 - DNA, 75 bp, Homo sapiens
tgatagtgctgaggcacctgccagctaaggcccaaatgcagtctggagatgatcgaccacattgtgggaaaccag

SEQ ID NO: 784185 - DNA, 89 bp, Homo sapiens
ggcctacagcttattatcgtcatcctgccggggaagacaccagtgtatggtgtaccttcagttgaatttttagaatctcccattacggc

SEQ ID NO: 784186 - DNA, 82 bp, Homo sapiens
ccacaagacatttcctgctcggaaccttgtttactaattaatggagctaccacatggtcaggaggaagagactcacaaagaa

SEQ ID NO: 784187 - DNA, 82 bp, Homo sapiens
caaacctccgggcccccaggcatggctagctcgtgaagtaagaactctgctagagaggaaatggctgcttcatcatcatcct

SEQ ID NO: 784188 - DNA, 73 bp, Homo sapiens
aagcaagtggcacagaagaaacagcaggttaaagctgaagctcaacaaagatatagtgatctctgtgggcatt

SEQ ID NO: 784189 - DNA, 74 bp, Homo sapiens
atcgctgagcagctgggtgacggggatgaagtgcagtcattggagaaatcgatgaagaaacagattctgcgctt

SEQ ID NO: 784190 - DNA, 99 bp, Homo sapiens
aggaactttgggtcctgaatcttctgggagctgaggaaccagatatcttgaaaagctgccagaaaggcgacattgactacagcaccgtgctcctcggca

SEQ ID NO: 784191 - DNA, 75 bp, Homo sapiens
catgagcgatgttaccattgtgaaagaaggttgggttcagaagagggagcaaattggtcaggagatgttggaaaa

SEQ ID NO: 784192 - DNA, 75 bp, Homo sapiens
gggggattctcgacctgctaacagaactggaccttttcggacgcttggaagagggagttcagatgcgtctttatt

SEQ ID NO: 784193 - DNA, 90 bp, Homo sapiens
tacctatgaaaagcagatttgtgataaacttgctgtagaagaaaccaaagattcacagtctgagaatgaggcttcaccagtaaaacggcc

SEQ ID NO: 784194 - DNA, 98 bp, Homo sapiens
gagtcacgtcgctagcaaacctcatcccgcccgtgaaggccacgccattaaagcgcttcagtcaaaccctgcaggtttatgaaggcgagcgtgccatg

SEQ ID NO: 784195 - DNA, 75 bp, Homo sapiens
agccggaaggctcgcatccaagctgcaacaagagtgagccatggagctacgtgtggggaacaagtaccgcctggg

SEQ ID NO: 784196 - DNA, 75 bp, Homo sapiens
tgcccctgtccgggggatgactgattctcctccgccagggcagctggtggaatttttgaagaaaatggaatctcg

SEQ ID NO: 784197 - DNA, 82 bp, Homo sapiens
ccgccgccgagccgtctcctgcagcggcccccgccggttttccaagagataacttcaccaagatgtccagtgataggcaaag

SEQ ID NO: 784198 - DNA, 75 bp, Homo sapiens
ctggctttcaacacctacgtccacttccaagggaagaaggagaaagggccaacccctgaagaagcaatacagaaa

SEQ ID NO: 784199 - DNA, 101 bp, Homo sapiens
accagtgagagcattttggaagaggaaccacaagaaaatcaaaagaaacttttgcccttatcagtaacacctgagtgggggaagaaggtagcctgtggctc

SEQ ID NO: 784200 - DNA, 74 bp, Homo sapiens
ggccagttgggtaccgggaggggcgaaggcgggcggcagaggcgatcaggtactccaaagattcaggtttactc

SEQ ID NO: 784201 - DNA, 74 bp, Homo sapiens
ctgatgtccagcatgtgcattttgctagatcacctggatggagaaggcaagtgtccagagaatggctgggatga

SEQ ID NO: 784202 - DNA, 90 bp, Homo sapiens
agcaggagtgccagctggcaagcggtcctgcagacacagccaagtacatcgtgcaagtggatggtaagatagggctgttccgaggcctga

SEQ ID NO: 784203 - DNA, 100 bp, Homo sapiens
acagaggtgcctggggcaacctccaccttgacggttccagaattaaatgtgagggagtctgacgtaagagtttgtgatgagtcatcatgtaaatatggag

SEQ ID NO: 784204 - DNA, 50 bp, Homo sapiens
gcagcatcacccccggacagcaagttgcgacaaccaccagttaagcgttt

SEQ ID NO: 784205 - DNA, 60 bp, Homo sapiens
tgaggaaagcaggaggaggtggcggcggcgggaagatgacgtggcccagtggaacatcgg

SEQ ID NO: 784206 - DNA, 82 bp, Homo sapiens
gatttgtgtattgaaaagaagaaacttgattctcggttgaatacactacagaatcagcaggaagccagttgagggaagttct

SEQ ID NO: 784207 - DNA, 124 bp, Homo sapiens
ctggtttgtgctgcgtggggatcagcttttctactacaaggacaaagatgagatcaagccccaggcaatttgaatcaacccatagaagtgacagcgctgtattcatttgaaggacagcagcctg

SEQ ID NO: 784208 - DNA, 133 bp, Homo sapiens
ctggtggcgggcccgggctgcggcgtgtgcgcgcccgccagctgctccggagatacggttgcagatatcaagaaagtcaacaacttcatcagagaacaagacttatatgctttgaaatctgttaagattccag

SEQ ID NO: 784209 - DNA, 82 bp, Homo sapiens
ccttagctgtgctcgcgctactctctctttctggcctggaggctatccagcaggtggcgagaggcgtgctgaccagtctgcc

SEQ ID NO: 784210 - DNA, 75 bp, Homo sapiens
gccggagcccgagtggatcggggacggagagaacacgagcccatcaggttccagcaacagatagaaatgctttaa

SEQ ID NO: 784211 - DNA, 75 bp, Homo sapiens
agcagggactgaaggtggtgggctgcgcccgcactgtgggcaacatcgaggggaaggtgtggctcattgacttta

SEQ ID NO: 784212 - DNA, 96 bp, Homo sapiens
aaataaaggcgaacgctagtttccgagctcatcgcgggtccaagcctgtagccccaaatcggataatctctgcagctgataacaagcaaaagagaa

SEQ ID NO: 784213 - DNA, 72 bp, Homo sapiens
cgcacacgctcggcgctgcgatccgcgcatataacggtgtttacacttcctgctgctgtgcttccaggtaca

SEQ ID NO: 784214 - DNA, 89 bp, Homo sapiens
atgcagcatctgcgatgtgaggaaaggcacctccaccagaacaccttccaccatgaccacctcagcaagttcccacttaaataaaggca

SEQ ID NO: 784215 - DNA, 87 bp, Homo sapiens
tactaggccaacaccagctttaaatagtggaggcggaaagatctagtttgaagcactaagaagaataagacatcagtttgaaaagag

SEQ ID NO: 784216 - DNA, 82 bp, Homo sapiens
ggatccttctgtcatagaaactcacatgagacaaatgcgctcagcttcaattggaaactttaccctcccagaggtagctgag

SEQ ID NO: 784217 - DNA, 96 bp, Homo sapiens
cgccgtgtccaggccaccaagccccaagcctctcgccatgaatctgcagagatctttgtagtctgccaaggaagaagctccctttacatcatcttg

SEQ ID NO: 784218 - DNA, 51 bp, Homo sapiens
ttggtgaagagttactagctcaagtaacagtcttgatggaggaagcagccc

SEQ ID NO: 784219 - DNA, 83 bp, Homo sapiens
aagttgctgaaggcaggagggaaaaagatggaggagctcttattactggccaaggaaagcagtcggagcaaccatacaatttg

SEQ ID NO: 784220 - DNA, 100 bp, Homo sapiens
catgagccaaggcccccccacaggggagagcagcgagcccgaagcaaaagtcctccacactaagcggctttaccgcattcttcaggtcatctgaaccttc

SEQ ID NO: 784221 - DNA, 90 bp, Homo sapiens
tccagagttctggtttaccatcttcagaaatgtggacatgctgagtgaattagtccagttcctgagggaagacctcaattaccatgaccc

SEQ ID NO: 784222 - DNA, 83 bp, Homo sapiens
cacgtggactccctttaatccagtgactgtcaggtcgatcatatataacgaaggaggcccaacttcattcaataaggagcctg

SEQ ID NO: 784223 - DNA, 74 bp, Homo sapiens
cgcctcccgcagaccatgttccatgcaaaagactgttgaagtagagagcattttgcccagctcactcggattct

SEQ ID NO: 784224 - DNA, 100 bp, Homo sapiens
caccccggcggcggctggagagcgaggaggagcgggtggccccgcgctgcgcccgccctcgcctcacctggcgcagtgagcatgtttttgaacacattaa

SEQ ID NO: 784225 - DNA, 96 bp, Homo sapiens
ttttttgagaaaggaaggaatatatcctgactgattgtgtacacttaaagcgttctgggaatatgaatcccttctgcaccctggaatcaccagtcc

SEQ ID NO: 784226 - DNA, 82 bp, Homo sapiens
gataattaattacacaaacccttcacagactgctctgggaaagcaggcaggatgggagagtcgccgatagaaccacctcttc

SEQ ID NO: 784227 - DNA, 93 bp, Homo sapiens
gaaacaagcgtaaccggcagaaccgaagccggggccaaggctatggttgtgaccgagattcccgacgagagagactgaggggaagagaggaag

SEQ ID NO: 784228 - DNA, 75 bp, Homo sapiens
tgaaaaggacatgtacctggttcctaaactcagcttgatagaaagaatcttcaagagggagacatagggaaaagg

SEQ ID NO: 784229 - DNA, 101 bp, Homo sapiens
acgccatggcccccagcatgggctcctctgtcaatgacgctttaaagagagataaagatgccatttatggtcactctctgaaagagaacaaagtaattttc

SEQ ID NO: 784230 - DNA, 83 bp, Homo sapiens
ctgggtgactcagcttcgagcttgtgccaaataccacatggaaatgaattctaaggtttacccagggttgatgataaccgctg

SEQ ID NO: 784231 - DNA, 97 bp, Homo sapiens
ggcaagatggcacccaagccccagtctcgctgcacctctacccgctcagcagttggaaatctacatttctgaaggaacccactcaacagaagaagac

SEQ ID NO: 784232 - DNA, 99 bp, Homo sapiens
cgccgcctccgccgctgcctcaggagcggaacaacgtcggcgagcgggaattcaaagaagctttttcactatttgacaaagatggtgatggaactataa

SEQ ID NO: 784233 - DNA, 75 bp, Homo sapiens
aacggagtgtgcgacggattgggaggaacatgcttaccctgctgatgaactcatgcctttaacctgtagaggtcg

SEQ ID NO: 784234 - DNA, 120 bp, Homo sapiens
tcccatcgacggtcagtgcgcacgttgtaatcagctgaggccatgtcaggagacggagccacggagcaggttctgtggacaatcacaatgggaatccaaggagggtctgtcctgttcggg

SEQ ID NO: 784235 - DNA, 82 bp, Homo sapiens
tgaggtcatcggggatgtggacgaaggggccgacctcctaggagggtgtgaagacagagaatgaccacatcaacctgaaggt

SEQ ID NO: 784236 - DNA, 75 bp, Homo sapiens
tattaacaactggaggaacaggatttgcaccacgagatgtcactccagaggcggcttcaatgatccatcctaaag

SEQ ID NO: 784237 - DNA, 89 bp, Homo sapiens
caagagggtgttcgactgctagagccgagcgaagcaccatggtgaatccgggcagcagctcgcagccgcccccggtgacggccggctcc

SEQ ID NO: 784238 - DNA, 74 bp, Homo sapiens
atcctctcatctcagcctccaaaagtgctggcattacagttactccacaggatccgctgaacataggatgttgc

SEQ ID NO: 784239 - DNA, 100 bp, Homo sapiens
ggcggaggtcgataagctggaactgatgggaggttatattcaaaagaaaaaggaactgtggggaatctgtatctttattgcagcagttgacctagatgag

SEQ ID NO: 784240 - DNA, 51 bp, Homo sapiens
ctggactcggattcgttgcctgaggagagctcaaaggatggctactgacat

SEQ ID NO: 784241 - DNA, 75 bp, Homo sapiens
tttcacggacaacctcagaggacaacgaagtgttcgaacttaacactacaagcggaagccttccttcaacaacac

SEQ ID NO: 784242 - DNA, 74 bp, Homo sapiens
ggagcctcaggcggacagatggactgtaagtaattgtgtaagtgactgcattggaactggatgtccagtgtgtt

SEQ ID NO: 784243 - DNA, 100 bp, Homo sapiens
tgggtccattatatgatccatgaaccagggattgtggtccatcaggagtctgtgtgtgccacctatggaagtggcttaagcagcacgtgtattgtagacg

SEQ ID NO: 784244 - DNA, 100 bp, Homo sapiens
agactcacaagaggggaagctgacagagatacctacagacggagtgctgtgccacgtacaaattctgagctgtctaacccctctgaaacggaatctgagc

SEQ ID NO: 784245 - DNA, 74 bp, Homo sapiens
ggcgcctcattcgggtggagctgagccggagacagagttgtctgctggttctcagcttgaagaagattctgcag

SEQ ID NO: 784246 - DNA, 76 bp, Homo sapiens
cggtttgtaggtcgtcagaaagaggaaacctggacaagcatgaagaactagaggagcttgtagcaaggttcttagg

SEQ ID NO: 784247 - DNA, 100 bp, Homo sapiens
caccctctgccgagtctcaatatctgtcttcggtggactccttcggcagtccacccaccgccgccgcctcccagattgacgtgagtgaattcagatataa

SEQ ID NO: 784248 - DNA, 83 bp, Homo sapiens
ccagcctttggtcatcaccagggtgcagcagtaccgcgtcgccatgactgccaaggactgctccatcatgattgcactgtctc

SEQ ID NO: 784249 - DNA, 75 bp, Homo sapiens
tggtgggacagtgaggctgacaagtcgctgctcattggagtctttaaacatggtgtgaagatatgtgacgtgtat

SEQ ID NO: 784250 - DNA, 75 bp, Homo sapiens
aagaactaagtaacgatctggatgcccagaatggagatttacagacagtcatctgggtggaggacacccttttgg

SEQ ID NO: 784251 - DNA, 80 bp, Homo sapiens
ggacaatggacttctggctttggccactttacttcctgccagatgatgttgaatttgaagtatcatcggaccgacggact

SEQ ID NO: 784252 - DNA, 108 bp, Homo sapiens
aggagaggcccgcggtgaccgaggcctgggccccgggaggattccctgggagcacccaccagctgagatctgcacatcagccacaatcctctcaggacggcggaaagg

SEQ ID NO: 784253 - DNA, 75 bp, Homo sapiens
ccgacagcaggaggactgtgccatctgggaggcccagaaggtgctggacagggaaatgccagatagcgcagcagc

SEQ ID NO: 784254 - DNA, 76 bp, Homo sapiens
gttcaatacacctcccacctgtcctcaggcatatcaaaggatgcctttgtggaactgtacggccccagcatgcggc

SEQ ID NO: 784255 - DNA, 101 bp, Homo sapiens
ctcacctcgatgcagccagtagcttggatccttgtgggcatgatccataatcggtttcaagcaaaccagtccagctacgggggcccagccagccagcagct

SEQ ID NO: 784256 - DNA, 82 bp, Homo sapiens
caaatatcctcggaagagcgctcccaggagaaacaagcctcccccagggaagaacttcactatgcctcggtggtgtttgatt

SEQ ID NO: 784257 - DNA, 50 bp, Homo sapiens
cgcggggccgctccggcccgctccgaggagaacctccatttctaccagaa

SEQ ID NO: 784258 - DNA, 75 bp, Homo sapiens
tgtacctgcagaacccaaattggcgtttgtcatcagaatcagaggacacaacatttgcctgcaacaaggacagcg

SEQ ID NO: 784259 - DNA, 96 bp, Homo sapiens
cagagccagggggaccctctgccgccagcacacaccggcacctaccgcacgagcacagggaacatccttctgtatcagaaattcccatgtttccat

SEQ ID NO: 784260 - DNA, 83 bp, Homo sapiens
ctcattaacaatgcatttcagctcgtcagaacaaaatgtgcatgtcttcaactgacagcaaggaatgccaaaacttccccctt

SEQ ID NO: 784261 - DNA, 100 bp, Homo sapiens
ccaggatgaagaggttggagatgggaccacatcagtaattattcttgccaaagtggaacaggtgaagttcgatgccacatccatgcatgtcaagcctcag

SEQ ID NO: 784262 - DNA, 74 bp, Homo sapiens
cgaggggccaaggcagaagaaatcttggagaagggtctaaaggttttggccacttgaccaggcagctgatgacc

SEQ ID NO: 784263 - DNA, 76 bp, Homo sapiens
tgtatacccagaagaaatgattgtggcattgagagaagctttgacaactcctggaatccttcttcaacatcccaac

SEQ ID NO: 784264 - DNA, 98 bp, Homo sapiens
gttaccagtggccttccaggttgttatctgcaggtgtggcaggttgcagaggacagtggatgacgatgactattcatcatctacgagtttgcttggtc

SEQ ID NO: 784265 - DNA, 50 bp, Homo sapiens
aaactgtggcagaggtgactgaggatgctgatcctcccgctggcttccag

SEQ ID NO: 784266 - DNA, 75 bp, Homo sapiens
cagctctgcgcgccggagaccgagactccggcagcgaaaacagtgttacaccagaagagcagccggcctcctgta

SEQ ID NO: 784267 - DNA, 101 bp, Homo sapiens
ctcgcgacgcgcccggcccggagcccccagcgcagcggccgcggtgttggtaaatcatgcttattgctacagtttacagacaagaggtttcagccagtgca

SEQ ID NO: 784268 - DNA, 96 bp, Homo sapiens
cgacgtcgtgatccagaagtccagagctgaggactgcctgtttgcaggtgagaagccctaccactgcaactgggacggctgcggctggaagtttgc

SEQ ID NO: 784269 - DNA, 123 bp, Homo sapiens
tacacccccaaagagcaactgaagattcatacgcagctggcagatattatcatagttgctgcaggatctagtgaaaagccatttgatgtatgcggtcagagaagaagtggaggtcctcaaaga

SEQ ID NO: 784270 - DNA, 102 bp, Homo sapiens
tgctgaaaatccgaagtgccgcggaaagtggaggtgagggccgcccgccctagaggtgcccgtccgagaggcaggtcaaggtcagcatctcctcgacgatca

SEQ ID NO: 784271 - DNA, 82 bp, Homo sapiens
ctgatgttcaggcataaggttgtttacaggttgctgctaaatgggaaaaacttagcttagtactgatagatgactttattgg

SEQ ID NO: 784272 - DNA, 96 bp, Homo sapiens
tttgtgaagcccaaggatgtggccgttcctttgctgagtattctagcctccgaaaacatctggtggttcactcagatggagtttcgctctgttgcc

SEQ ID NO: 784273 - DNA, 100 bp, Homo sapiens
gcaccgcaaagcggggacccagaccctggagcctcagttggaagcagccgatccagcctgcggagcctgtggggcagcatcttcatgatacagttaagag

SEQ ID NO: 784274 - DNA, 80 bp, Homo sapiens
aggaatcccaatttgcctccacttagtgagcggaagaatgactgaggctgatgtgaatccaaaggcctatccccttgccg

SEQ ID NO: 784275 - DNA, 90 bp, Homo sapiens
agttgctgcaatgtctgtgtctaatctatcatgataacggcaaaagcttctatcatttttgttactcttcagtacaatgtcaccctccca

SEQ ID NO: 784276 - DNA, 75 bp, Homo sapiens
ggtgtccctggccaagcccaagcaccgcgtggcctcaggcccaggcccaaggccaagtgagagagcccaggccac

SEQ ID NO: 784277 - DNA, 75 bp, Homo sapiens
ggacgcggggtctcgcggcgcctggcagcagagaccaccagaagggtcatgtccaaagtaatggagatgttccag

SEQ ID NO: 784278 - DNA, 89 bp, Homo sapiens
aagggacttgcaggaactgcagaagaagctgtctctgctgatagactccttccagaataactcaaagtaccttctccaggcaaattccg

SEQ ID NO: 784279 - DNA, 100 bp, Homo sapiens
agatttactggagttgcaagtgggagcactggaagtacgggcagttgcagtgttggagctaaagtgctggagaatctggtaaaagcaccattgtgaagca

SEQ ID NO: 784280 - DNA, 98 bp, Homo sapiens
gtggcttaaactcttggcatttggctttgcctttctggacacagaagtatttgtgacagatgagtataggatcaaaccagtggaagaggtcaaataca

SEQ ID NO: 784281 - DNA, 100 bp, Homo sapiens
agtccagtgctaggaaacattcccccaggagatggcatgccagtaggtcctgtaccaccagggttctttcagagcaatatactttgctgcttattcaaac

SEQ ID NO: 784282 - DNA, 100 bp, Homo sapiens
gcccgcccgccgccgccgcctggccgctatggatctattcgactttttcagagactgggacttggagcagcagtggtacctactgtcaacaacgggaagt

SEQ ID NO: 784283 - DNA, 50 bp, Homo sapiens
gccgagcaggctgagcgatacgacgggcttgctctcaattttgcgcaagt

SEQ ID NO: 784284 - DNA, 101 bp, Homo sapiens
gcggcagtctctccctgccaggctcttcatccaaggtttactgggaaactggtgctcagatcacatctcctcatgataaagaaattctaaaatgtatagaa

SEQ ID NO: 784285 - DNA, 98 bp, Homo sapiens
ggaggataagatcaatgccctcattaaagcagccggtgtaaatgttgagcctttttggcctggcttgtttgcaaagagcatatcatgtcccgagtggg

SEQ ID NO: 784286 - DNA, 75 bp, Homo sapiens
ctcaagctcatattttgaagtgtttacggttttaccgggcagaagttgaagccctccattcttcgggtatgacag

SEQ ID NO: 784287 - DNA, 74 bp, Homo sapiens
ccggagctagctggatcctctaggcagacgtttgatgcaaatgatttgtatcaggggcagaattttaacaaggt

SEQ ID NO: 784288 - DNA, 75 bp, Homo sapiens
ggcccaggtgtggcgtctctgtccccatctggttttagccgcggcgagtcctttgcacatgttggcaacacacgc

SEQ ID NO: 784289 - DNA, 82 bp, Homo sapiens
tcaaggataagggcgacagcaacagctctgccggctggaagagctgccatcagtcatgctcttaaacggggactgcccagag

SEQ ID NO: 784290 - DNA, 95 bp, Homo sapiens
aagccagactacagctggttcttgaagctgctggtaacaccatgttgttgagagtgttacctgctgtgtatgaaaagcagcctcagccaattaat

SEQ ID NO: 784291 - DNA, 131 bp, Homo sapiens
caccacgtccagcttcaccacgcggctgcacaactgcaggaacaccgtcacgctgctggaggaggttgcaagaaagctcaagtagcctatggagaggatgcaaggcttccagctgatgccctcagccaggc

SEQ ID NO: 784292 - DNA, 83 bp, Homo sapiens
gttcggctggacttctccatcaccaagacagctctggctctggctattgctcaggagctgggtagtaaggtccccttctgccc

SEQ ID NO: 784293 - DNA, 83 bp, Homo sapiens
tgtttctccccaaaataaccattctccagatccagccttcacagttgttgatcacatagcatggtcatccactcacagcttaa

SEQ ID NO: 784294 - DNA, 82 bp, Homo sapiens
cttggactgagtcctgcaggacacagatcgggctgacccgcgagttcgtgctgttgcccgccgcctccgagctggctcatgt

SEQ ID NO: 784295 - DNA, 74 bp, Homo sapiens
gtcgctcttgtgccctagcaccccgagaaccgtcagtttgagccagatggtgcaatggatgagcttcatagtct

SEQ ID NO: 784296 - DNA, 100 bp, Homo sapiens
ggactccagacagcgaccccagatgaagaaaaggttaagaagttcttacaagagttctaccaggatgatgaactcgggaagaagcagttcaagtatggga

SEQ ID NO: 784297 - DNA, 100 bp, Homo sapiens
ggaaaagacaattgatgacctggaaggtttcactgtccaacctggaaaccgatggagtctagaggtgggacaggtatatgtcattacagtagacgtcttt

SEQ ID NO: 784298 - DNA, 76 bp, Homo sapiens
tttgatagcaagaccgagcaggggccgcaggtggtgaacatcccgtccttcattgtccgcctggattcccagaagc

SEQ ID NO: 784299 - DNA, 129 bp, Homo sapiens
ggcgtcagcagaggggccactgctgggccctgaggctgcaccaagtggcgaaggagccggctccaagggtgactatgaccagagcaggaccaaagtgctgcacatgagcctgaaccccaccagtgtggc

SEQ ID NO: 784300 - DNA, 75 bp, Homo sapiens
aagacaaaggtagctggatccgtagaggagcacatggatgaagtatgctcctcgcagcttctaacttcagtaagg

SEQ ID NO: 784301 - DNA, 100 bp, Homo sapiens
ccgcgtttcagccctagggaagggccaattcctgtccccccagcagcatggcatcgtgtgctgaaccctctgagccctctgccccactgcccgccggggt

SEQ ID NO: 784302 - DNA, 71 bp, Homo sapiens
ctgctaggcattgaggagaaggcagcggacaaagaggtacggttcctggagcagcagaacaagatgctgga

SEQ ID NO: 784303 - DNA, 100 bp, Homo sapiens
ccctgtacgtgtacatcatttacggcatgtacttctgcatgaacatctccagccagggaactgtggctgcaccatctgtcttcatcttcccgccatctga

SEQ ID NO: 784304 - DNA, 100 bp, Homo sapiens
atctctcagctggagcaagaagaggacctgtgcagggcagagcaggaggccccccgaggacaatcatatcctgattcagcccttcctccacaaaggcaag

SEQ ID NO: 784305 - DNA, 100 bp, Homo sapiens
aacccaagcagtggcgaagggaatcgcaaggctcttccctgaccattttctactgtccctgcgcgagacaattcctcctcgcttcaagaagatgaagaag

SEQ ID NO: 784306 - DNA, 97 bp, Homo sapiens
ggcggcgcagctcggaacccgccagggtccagggtccaggttccagcgcccggcggcccagggggggccctcagcctcttggccttgaacgggctgt

SEQ ID NO: 784307 - DNA, 82 bp, Homo sapiens
ggaggccagttaaatgtctctgcctcccgcgacgatgcccctcaacgttagcttcaccaacaggaactatgacctcgactac

SEQ ID NO: 784308 - DNA, 90 bp, Homo sapiens
ggaagacagttactgaaaaagagctctatgaagcactagtgaaggttatcaataatcccaggagcacatgcagacacaccaggccggccc

SEQ ID NO: 784309 - DNA, 75 bp, Homo sapiens
aatcagctcgtacttacttggagagacatatgtctgaatttatggagtatcttcagtttagatcttggaggcata

SEQ ID NO: 784310 - DNA, 90 bp, Homo sapiens
acagccagtgagaagaatgagtataaaggatgggttttaactacagacccagtctctgccaattgtggacatcggatacccaaggagacg

SEQ ID NO: 784311 - DNA, 82 bp, Homo sapiens
gcagctttacaggagcgacttgacaatgtccctcacaccccttccagctacatcgaaacggattaatgaaaatcaagttcca

SEQ ID NO: 784312 - DNA, 75 bp, Homo sapiens
attcacttccttctcatccttttccaccagctaaaggtttaccgacaagactgtgaaactttcgggatggtggtg

SEQ ID NO: 784313 - DNA, 80 bp, Homo sapiens
ctggtgtgggtttcccaagcaaggttccttggaagaagatgtctgcagagacctgcctagagctggaacgttacctccag

SEQ ID NO: 784314 - DNA, 87 bp, Homo sapiens
cactcaggctgaacgcaagattcgtatcattatggcagagcccctggaatcatattgacaggtcatgaaaatgagaccaaaagatct

SEQ ID NO: 784315 - DNA, 76 bp, Homo sapiens
tgactttgtaggctccgccaagaggcgccgcaggaggacccagatgatgtggtaccagttggccaaagaagagcct

SEQ ID NO: 784316 - DNA, 100 bp, Homo sapiens
gtcgcgaccgcgggtgcatccagtttctgcgcccagacatatgtagagtgtgtcggtcagaaggaacacctgagaaaccgctttatcatccttgtgtatg

SEQ ID NO: 784317 - DNA, 75 bp, Homo sapiens
cctcggtgctgtggtgcagagctagttcctctccagctcagccgcgtaggtcctgtccaaaatgcattgctgtct

SEQ ID NO: 784318 - DNA, 100 bp, Homo sapiens
ttttccttggagagtcataacatatcactgactgatttctcacattggcaaactgagagattttcttctggaacacaggaaagattatattaatgcttat

SEQ ID NO: 784319 - DNA, 101 bp, Homo sapiens
ccttgtgggcatttgatgtgcacctcttgccttacggcatggcaggagatgagtatgatgtatgtgccatttgtttggatgagtatgaagatggagacaaa

SEQ ID NO: 784320 - DNA, 51 bp, Homo sapiens
tcttctgtggcttccagcgtcaaagtttccagagatgaatgatatgctgag

SEQ ID NO: 784321 - DNA, 50 bp, Homo sapiens
aaaaggcctaagaattttggcattggccggcatgagggacaggagccctt

SEQ ID NO: 784322 - DNA, 101 bp, Homo sapiens
cctgcagccccggcctccacctgctgcccttagccagccagtgttgcccttggccccctcgtcgtctgccccaggaagaggatcacctagcccgggtagaa

SEQ ID NO: 784323 - DNA, 104 bp, Homo sapiens
tttgaaatcgacacacaaagaatagagttgagcctgtgggacacttcggtcccgcagcgtggacaagcagcatgccgtcatcaactacgaccaggacagggacg

SEQ ID NO: 784324 - DNA, 99 bp, Homo sapiens
aaaaaggggacaacaaatgaagcaattcgtctgagcattttaaagtttctcacgtactctttttacattgcaatgatctattaatgagatgaagcggtt

SEQ ID NO: 784325 - DNA, 100 bp, Homo sapiens
cgaatagcacaaacacagccagctgggatgcttgaagatggaaagaaatttgattcctcccgggacagaaacaagccctttaagtttatgctaggcaagc

SEQ ID NO: 784326 - DNA, 88 bp, Homo sapiens
ggattgtactgtatggggactccaattgcttggatgacagtcaccgacagaagggccgtcaccgatgggttgtatatactactgaaat

SEQ ID NO: 784327 - DNA, 99 bp, Homo sapiens
tgtacccctgaagtgagtcaggagctgtatgaccttaacgtggagctctccaaggtatgcagtaattttggccttcgatgtgagaattgaacgagatgc

SEQ ID NO: 784328 - DNA, 87 bp, Homo sapiens
gagcacccgcctccgggcatcttcaactgtgaaagaaaagatgttgtcccggttaagagtagtttccaccacttgtactttggcatg

SEQ ID NO: 784329 - DNA, 100 bp, Homo sapiens
tttggatgtggaggggaatagactccatctatccatatgaggttgtctgcattcaaaagagcattctattaaagctaccttaatttggcgcttatttttc

SEQ ID NO: 784330 - DNA, 101 bp, Homo sapiens
gagaagaaatagaaaataattcttaccatatgcacccagcaggtaatatttctaaagcatgtctaatattgagaagcatagaggagttaaagcataaacca

SEQ ID NO: 784331 - DNA, 80 bp, Homo sapiens
cgctccccagggagggagtccgcagcctgagccgctgttgtgacaagaaaagctgtggcaaccgaaatgagactccctca

SEQ ID NO: 784332 - DNA, 82 bp, Homo sapiens
tgttgccgaagagattggactgggagggcaacgagcacaacaggagctacgaggagttgacaatgcagatcttcgtgaagac

SEQ ID NO: 784333 - DNA, 74 bp, Homo sapiens
gaatctccagtttttgacgggggccattcagcaactgggtggggctggagtgcaatggtgtaatcttggctcac

SEQ ID NO: 784334 - DNA, 101 bp, Homo sapiens
accaaataagctatatactttggttacctatgtacctgttaccactttcaaaatcacccttctagacttcagaccacagacaacctgctccccatgtctcc

SEQ ID NO: 784335 - DNA, 51 bp, Homo sapiens
gatttctgcatttccaactgagttagcaaggggccctcaacgccgcggaca

SEQ ID NO: 784336 - DNA, 100 bp, Homo sapiens
tcattagcgtgaaaaccacaagcaggtccaaagagagaaacatagataccctggagcgaatagccgggctggaacaggaggacttggtggaggcgcacgg

SEQ ID NO: 784337 - DNA, 75 bp, Homo sapiens
ctttgaaattctacaaggaacttcaggcacatggtgctgatgagtcatctggggacctggagaatgatgagcagg

SEQ ID NO: 784338 - DNA, 108 bp, Homo sapiens
ctgaagagcgacaagccgctggcagccgcggatctcaccgccgctcaggtgctgctcacggccgtgaactgctacagcgtgaaggccgccacccgggtccaggatgcc

SEQ ID NO: 784339 - DNA, 83 bp, Homo sapiens
atccattagaagtgctttgtttgcatttaattgaatcagctctggagcctcccagctcaattgcctgggatttatacaagata

SEQ ID NO: 784340 - DNA, 75 bp, Homo sapiens
gtggacgcctggcccaccctgagtgtgctacaaagtacacagataaagacaatggagggatgcttgtatggtctc

SEQ ID NO: 784341 - DNA, 74 bp, Homo sapiens
tgagcctgaacctccttctgtcaaggtcacaactatgactccagcctccaaccccatcattggtgtcctcttgt

SEQ ID NO: 784342 - DNA, 100 bp, Homo sapiens
actttctgggatccagcgagcgacatggtgcggtactggaatgggggtggaaaggaggaatcatccagtaagatgaaagtggcaggaaatgagacatcag

SEQ ID NO: 784343 - DNA, 100 bp, Homo sapiens
accacactcacctctctctgctcatgcagcaacgcacctcttgctttttcctccaaagtatgttatgttaagtttcgtgatccatcaagtgttggcgtgg

SEQ ID NO: 784344 - DNA, 84 bp, Homo sapiens
agggaatgctcctggctggtgcggacacaacccaataggttttaaaatcaaagatgggaaaatcggagaaaattgcccttcccc

SEQ ID NO: 784345 - DNA, 75 bp, Homo sapiens
cgaaaaccgtgtatgagggattcatctcggctcagggaagtttggttggcttagtggattatccagatgatgaag

SEQ ID NO: 784346 - DNA, 100 bp, Homo sapiens
ctggctttggctccttcgagctggtcagccagatctctgctgagtcccgcagcccccggaagccaatagactccctcagggactctcggtccctcagcta

SEQ ID NO: 784347 - DNA, 50 bp, Homo sapiens
ccgccggctacagcgggaagagcgaggccatgtggaagtgttacatcacc

SEQ ID NO: 784348 - DNA, 101 bp, Homo sapiens
agtctgtgtccttccagctgcagatacggaggaccatgggtagcaacaagagcaagcccaaggatgccagccagcggcgccgcagcctggagcccgccgag

SEQ ID NO: 784349 - DNA, 75 bp, Homo sapiens
agccagcgcacctaagggtgaactactgaagagggtgcttaacccattacttcgcaagctttgttgcttctgaaa

SEQ ID NO: 784350 - DNA, 75 bp, Homo sapiens
cagcaaagggtcctggaaggaaagaatgaagaggccctgcaagaaaataatgttgagtttccatgaagaacagga

SEQ ID NO: 784351 - DNA, 100 bp, Homo sapiens
tcctgtctctcctcatgctagtagctgccttctgctctccagcgctctcagcaccaacatgcaagagctctgcgaggggatgaagctgctggcatctgac

SEQ ID NO: 784352 - DNA, 100 bp, Homo sapiens
tggaatttgctgagaataaggcaaagaccaggttgtcactgattcgtagatcaatgcaggagcgagaacccgagcagcgccatgagcaacactaccgtcg

SEQ ID NO: 784353 - DNA, 100 bp, Homo sapiens
ctaggatgggaagaggcatatgacccacaggttggagattacttcatagaccacaacaccacaacgaaggttttgggaacagtaaaatggttcaatgtaa

SEQ ID NO: 784354 - DNA, 75 bp, Homo sapiens
actgggaaccatcactcctgacggggcaggactgactgcattgcacagatgatggatatttacgtatgtttgaaa

SEQ ID NO: 784355 - DNA, 71 bp, Homo sapiens
ttgtttgcaacgaccgtctggggaagaaggtccgcgttaaatgttccgctactgccgcatgctggaagagg

SEQ ID NO: 784356 - DNA, 95 bp, Homo sapiens
gacaggcggctttgcatcggaaatcagctctacagttcaggaatccaatggaaagaccaggacattgagaatctgtaccaaaacctggggattaa

SEQ ID NO: 784357 - DNA, 100 bp, Homo sapiens
cagtaggtagatactggaaatgtaggttgcaatgaggtgtcgctgcagcagcatgcacttcttggtagcagaatggaatgaaccatccatcaacttctat

SEQ ID NO: 784358 - DNA, 97 bp, Homo sapiens
gaaattttgagtcctcgagtgaatgggcggatctcatatcttcacttggcaaactcaacaagcaaatcctgaaggaacccaaagtggctgcttctgt

SEQ ID NO: 784359 - DNA, 75 bp, Homo sapiens
agaagggcgactgagtactcaacatattgactgtatttgggctgcagcacagatctatagcatgatgctgcgatt

SEQ ID NO: 784360 - DNA, 75 bp, Homo sapiens
ctcctgctgcgtgactcacaggcacattgcagagagaagctgccgctcccaaaagtgactgagaccgaagatgat

SEQ ID NO: 784361 - DNA, 100 bp, Homo sapiens
ttctcccctgcacttcgctgcagcagcgatggattttgggtggggaagtcctccttgcggagttggcgccagctagctcttgaacagctggatgagcaag

SEQ ID NO: 784362 - DNA, 100 bp, Homo sapiens
cttttcagtgccagtccatccatcacgaccacatttgtcatgatgacagtgacaaggtcaaaatgcagatcttcgtgaaaacccttaccggcaagaccat

SEQ ID NO: 784363 - DNA, 101 bp, Homo sapiens
cgagcggtggtttggacgccggcggagacgcgggcgagtgaaatcaaatacattgcccatctcgctgcagtctataagaagtagcctactgctaggcttca

SEQ ID NO: 784364 - DNA, 82 bp, Homo sapiens
tcattatttgccagatctgcagagatcaaaacaagccctccaggaactcacgcttgaagaaaatttgcctacacgttgtgga

SEQ ID NO: 784365 - DNA, 90 bp, Homo sapiens
cggggaccctgccagcctggacttcgcgcagtgcctggggtactacggctacagcaaggtgagccctattcccagaggcaggtggtgctg

SEQ ID NO: 784366 - DNA, 75 bp, Homo sapiens
cacttgatctgaaaatgtttgaggctattggatggacaattccaagctcgagtgtctcggcaaactctgttggca

SEQ ID NO: 784367 - DNA, 75 bp, Homo sapiens
ccactggattgggaaagaccatggcaggctaaagaattacctccaaagccattgtcaagaccacagcagtcatct

SEQ ID NO: 784368 - DNA, 82 bp, Homo sapiens
gctgctcctgctgccgccgctgctgctgggggccttcccgccggccgccgccgcccgagagctgccatcagtcatgctctta

SEQ ID NO: 784369 - DNA, 100 bp, Homo sapiens
tttacataagaagttacctttttcaggtggtgatcgtggcagaggtggccctggtggcatgcggggaggaagaggtggcctcatggatcgtggtggtccc

SEQ ID NO: 784370 - DNA, 75 bp, Homo sapiens
ccgggcggcgcgctgcccacttgcccagcctgccacaaggaggctgaaccgtctgagcccagaagtgctgaggtg

SEQ ID NO: 784371 - DNA, 74 bp, Homo sapiens
gagattcataggaccaaagcatggggaggtggcttcctgtttgaagggctctcagatgatgaggatgactttca

SEQ ID NO: 784372 - DNA, 136 bp, Homo sapiens
gccgatcatggcggatggcccccggtgcaagaggcgcaaacaagccaatcccaggaggaaaaacggaggcaggtggaagtcatcataaagtttctgtttcacccgtcgtccatgttcgaggactctgtgaatctgt

SEQ ID NO: 784373 - DNA, 100 bp, Homo sapiens
tctggaaagttcttgtcaataccaagacatttctcttgggaagttgtgcatctgacaggaatatagtactgtacgatatgaggcaagctactcctttgaa

SEQ ID NO: 784374 - DNA, 82 bp, Homo sapiens
tgggtgactcagagagggaagagattcagccagcacactcctcgcgagcaagaaaactctcccaccatgtcgcagaatggat

SEQ ID NO: 784375 - DNA, 90 bp, Homo sapiens
gccccagtgaccttgaacgattccgctctgcggcgggtgtccctaaactagcagtttagggtgtcagagggtattgtgcctggccccccg

SEQ ID NO: 784376 - DNA, 100 bp, Homo sapiens
accttttgatggaacaaatacagccagagcagtgcacgaaaagcagaaatttgatatgatcaaggatcaatttttaaagccttatgtttgatcatcggcc

SEQ ID NO: 784377 - DNA, 82 bp, Homo sapiens
gacagaagcagccatggaaaaattaatcaacagagtgggacctaatggtgagaggacacagattatccttatttgggtacca

SEQ ID NO: 784378 - DNA, 73 bp, Homo sapiens
atctgggcctcggagaagagctcggtcatgaagaaatgcaaggctgccgtgggcccatctggggcagggaaga

SEQ ID NO: 784379 - DNA, 83 bp, Homo sapiens
gttgggattataggtgtgagccaccacacccagccactaagcaccactgggttgtatccatgctgctttcatttttgtgatga

SEQ ID NO: 784380 - DNA, 75 bp, Homo sapiens
cgccagcctgcgaaggtggcggcgctgctgctcgggctgctcttggaggatgttaaagtctttagtgaagatggg

SEQ ID NO: 784381 - DNA, 100 bp, Homo sapiens
cgcctcagccgccgccgccgccgttttcgcctgcagctgctcaccgattgccatcagtttccaaacttaatggcagcgttgttactgatggtgaacgaga

SEQ ID NO: 784382 - DNA, 88 bp, Homo sapiens
tggctgatgcctgcttgatttacctcagtgtcaaacagcccgtgaaattacaagaggctgccaggagaacaaaatccagtctcatagc

SEQ ID NO: 784383 - DNA, 82 bp, Homo sapiens
tccagtgggatgaacagacaaaccccacaagcactgcatacgtggatcctctatccttcagagactctggaacccctgtggt

SEQ ID NO: 784384 - DNA, 98 bp, Homo sapiens
cgccgtgctctccgggcacgtcaaccccttcctcccgtatatcagattcgggaactggagcctctcctctgtcacagtgacaatccatctcagctcat

SEQ ID NO: 784385 - DNA, 90 bp, Homo sapiens
ctctggtggactggaccgtgtccctgagtctcgtgtgtcatgagtacgtcatgtccattgacagcctccagctgggctatgcggaggatg

SEQ ID NO: 784386 - DNA, 90 bp, Homo sapiens
agctttagtgaaatgggctaataatgctggcaaagtggaaaaatgtgcgcagcttcatggagtttggccacaagatgttgttgacggaac

SEQ ID NO: 784387 - DNA, 100 bp, Homo sapiens
ctttactctggggtcccggctgccctgtggcctcgctcctcggaggaattatatccagatcgagagacagaagattctgaaagggttcaatgaaatgaga

SEQ ID NO: 784388 - DNA, 80 bp, Homo sapiens
gcaggaagaatctatacacagccatgccccttccgattgggagggacaagaccatggtgaatccgggcagcagctcgcag

SEQ ID NO: 784389 - DNA, 97 bp, Homo sapiens
tgaaggcggccggggccgggacgccatgtccatggaggaccccttctttgtggtgaaagggaaagcagatggtggagctgaatatgccacttaccag

SEQ ID NO: 784390 - DNA, 75 bp, Homo sapiens
tgggaacaagcggaagaccatggcagagaagaggcagctgttcatagaaatgcattccaacatgccatgggagga

SEQ ID NO: 784391 - DNA, 89 bp, Homo sapiens
tgacataaaacagttgatagcaaagaagataaagttgacagcagaggcagagggggacttgatctcatcttcatgccaggccttgggtt

SEQ ID NO: 784392 - DNA, 75 bp, Homo sapiens
atgtatgctcaagaaaagggcatatattacattcagactttggacaaagtttaccaaatgaaaagcaaacctcgg

SEQ ID NO: 784393 - DNA, 98 bp, Homo sapiens
atctcagttaaagaagatgaagaagtcttcaggggagattgtctactgtgggcaggtgtttgtgaacacagtatccataggattcttggactacaaga

SEQ ID NO: 784394 - DNA, 75 bp, Homo sapiens
ccggagccgcagaggctcccgggctggactcaggcttctcagtctggctcttgctgattgaattcctttggtgca

SEQ ID NO: 784395 - DNA, 83 bp, Homo sapiens
gcagcggaaaatgatccagtcacaggtcatcatcagatttgaaatatttaaagtggatacaaaactatttcagcaatgcagac

SEQ ID NO: 784396 - DNA, 75 bp, Homo sapiens
tttagaccttaaaggagctccaccaaaggtctcgtacctctcagagtgaagatagtgatccggggagacaggaac

SEQ ID NO: 784397 - DNA, 100 bp, Homo sapiens
tggtggccaaagtggatgaggtgaagtccacaatcaagttccaaatgaagaagtcctcctgtcaggcgccagagaggaagaagggatcgtctgtctcgac

SEQ ID NO: 784398 - DNA, 82 bp, Homo sapiens
ggagcaagcggagctcccccaagagccggaaagaaacgatggaaagaactttctaaggaagacttatctcctgcctttgatc

SEQ ID NO: 784399 - DNA, 50 bp, Homo sapiens
cgcagactaggcaccagcatgcagagtatgtttgaaagatgtatggtgat

SEQ ID NO: 784400 - DNA, 100 bp, Homo sapiens
agctggtttttcccctggagaaagaggagccagccattgctcccattgaacatgtgctcagtggctggaagataattttccccagatggcccatcagaag

SEQ ID NO: 784401 - DNA, 74 bp, Homo sapiens
aacgtgagcaagcccaggcacagccgacgccgcgggaggttgacggatatattcagacgttacgacacggatca

SEQ ID NO: 784402 - DNA, 100 bp, Homo sapiens
tgtgtgcaagcaaatgcttttattcaggacccagagttcaacaatacagatcagattgacctgtatgatgatgtgctgacagccacctcacagccctcag

SEQ ID NO: 784403 - DNA, 98 bp, Homo sapiens
gagggctgagcagtcaactcaaatgcaagtccaagaggaggaggaggcggaggtccaagcggaaaggccttctggcggccgcccctggtttctcctgg

SEQ ID NO: 784404 - DNA, 75 bp, Homo sapiens
ccttatgagctcggttttcttatgcttataagagtggaacagggcagctggtggaatttttgaagaaaatggaat

SEQ ID NO: 784405 - DNA, 82 bp, Homo sapiens
tggagctgaggaaccggaccccggcagctgccctgggaggagcggggacactgaggacctctctccaaattggcctctcaac

SEQ ID NO: 784406 - DNA, 90 bp, Homo sapiens
cgtggactgggctggccccggaagcccccacgggctctacctgaccctgcaggacggcggctccctggaccaggtgctgaaagaggccaa

SEQ ID NO: 784407 - DNA, 98 bp, Homo sapiens
gagtggctgagtgaaggcttcgccactcacttggaggatgtgttttgggccacagcacagcagtaagagttccctatttcattgatttgaaaaaacca

SEQ ID NO: 784408 - DNA, 100 bp, Homo sapiens
ggccataggcaatacatggcctattcagctgtaccagtccgccattttgctaccaagaaagccaaaggatctctctaggagctgacactcgaaccttcac

SEQ ID NO: 784409 - DNA, 83 bp, Homo sapiens
gaagaagaagaagtctggaggcttccagtccatgggcgctgatcccgctggccctggaaggcacggacgtggggcagacaaag

SEQ ID NO: 784410 - DNA, 76 bp, Homo sapiens
ggggccccgaagaggacagagcccgcggccgcgccgagcggggtcagcccaaggccaaccccactgtcactctgtt

SEQ ID NO: 784411 - DNA, 146 bp, Homo sapiens
cggcgggcggtcctgccagccccgacgggatgcccgcagccatgctcccctacgcttgcgtcctggtgcttttgggagctactcccgagcccggagaggacccacgcgtgacccgggccaagtacttcattcgagatgagtttctg

SEQ ID NO: 784412 - DNA, 90 bp, Homo sapiens
taaacatctaactagaagggatacccttccatttcaaagaacagaatgctaaggaagctgtggcaagttcaaaccttgtactactcagct

SEQ ID NO: 784413 - DNA, 98 bp, Homo sapiens
aggagaagctatagactacttctactccaccaggaagaattgaaaaagtatgggttcgagatggagctgcatatttttatggccccatcttcattcac

SEQ ID NO: 784414 - DNA, 100 bp, Homo sapiens
ttgctcttgcttttcctcgctggggtgtacgacacgatgaggcgagtggtacgacagagcaagtttcggcatgtatttgggcaagcggtgaaaaatgacc

SEQ ID NO: 784415 - DNA, 74 bp, Homo sapiens
ggctccagaaacgggtcctgctgctcaccaaggccctgctgctcctgggggccgccgccctggcctgcctcgcc

SEQ ID NO: 784416 - DNA, 90 bp, Homo sapiens
gtccggtccgttgcctcaaaccagtcagagatggagttctcttcacttcaggacatggtgatggcttctctgactggatgactgagcgag

SEQ ID NO: 784417 - DNA, 85 bp, Homo sapiens
ctggcagaaacagaggactaattttggcagttctaaatttgaatttgaggttggaagcgaagtggaagcactgaacctccaggtg

SEQ ID NO: 784418 - DNA, 90 bp, Homo sapiens
cttacggaaaaggaacagattgttcctaaaccagaagaggaggttgcccagaagaaaaagatagcagtcctttcccctcatcaattccac

SEQ ID NO: 784419 - DNA, 85 bp, Homo sapiens
aacgtcaagtacttcctgcacatgtgtgagcgggcctgcatgcacctggggcacctcaaggacatgaagaatgcaaccctctccc

SEQ ID NO: 784420 - DNA, 50 bp, Homo sapiens
tgactgcgtcaggcatctcaatcatgaattcaattcgtcataatctgtcc

SEQ ID NO: 784421 - DNA, 83 bp, Homo sapiens
atacgactgaccctggagctgaaggccaggttttgcagtggtctgaggtgaaaggtgtagcagtcactcggcctacacccaca

SEQ ID NO: 784422 - DNA, 80 bp, Homo sapiens
tgagaaagaagatgatgaatggattcttgttgacttcatagatgctgttttgacattaacccctttggagctgggagttg

SEQ ID NO: 784423 - DNA, 75 bp, Homo sapiens
cgcgagcggagcggcgcgtgggtcggttgcggtcggccccggcagaacccttaggagaaatcttgagagtggaca

SEQ ID NO: 784424 - DNA, 100 bp, Homo sapiens
cgactactgtcagcagctgtgccaggttcttgatcaatatgaacgagaaggatttaacttcctagccaaggtgtttaattcttcacattccttcttagaa

SEQ ID NO: 784425 - DNA, 98 bp, Homo sapiens
gtgggtacttgaagattaaaggccttactgagaggaagtggcttttaggaagaagaggctgtgcattaaatttattccacgggattcaacggaagctg

SEQ ID NO: 784426 - DNA, 75 bp, Homo sapiens
ggctgtagccaagaactattcggttctctacttccaacagaaggataaaagaatcagagtgtctcaacccttgac

SEQ ID NO: 784427 - DNA, 51 bp, Homo sapiens
gcacagacggctgacggctcacactgtacatcaggaacgtctctatcaaga

SEQ ID NO: 784428 - DNA, 98 bp, Homo sapiens
actttttttattggtgatcatgctaatatgttccctcacctgaaggttcaaaccttgtactactcagctgatcacaagctgcttgatgggaacctact

SEQ ID NO: 784429 - DNA, 75 bp, Homo sapiens
cagcatcccagccgtgctcacgttgatattcactgatggactccaaagaatcattaactcctggtagagaagaaa

SEQ ID NO: 784430 - DNA, 99 bp, Homo sapiens
aatcacccaacatgctggtgtacagaaagacaactgacatatatccacaagaagtgccatagtgaacctgatggacctgggattgcagcattaactagt

SEQ ID NO: 784431 - DNA, 100 bp, Homo sapiens
ctacccagggttctagaaatccaggcaggcatctatcttgaaggctaggcagctggaagagaaagaccgagtgctaaagaagcaggatgcattctacaaa

SEQ ID NO: 784432 - DNA, 100 bp, Homo sapiens
aggagatgtactcagcccacatgcccgctcacctgcgctgtgatgcctgcagagctgtggcttaccagatcctgcagctcctgaaaggcaagctggtggt

SEQ ID NO: 784433 - DNA, 100 bp, Homo sapiens
ctcaaaaggtgatctggacaaaggaacaggtatctcagcgttttaccaacgaggatcatttggctgtccataaacataaacatgagatgacactgaaatt

SEQ ID NO: 784434 - DNA, 100 bp, Homo sapiens
tgaaagagaagatgttcaaaagaaaacattcacaaaatgggtaaatgcacaattttctaagtctgttcccagttctccaaaggagtctatgccatctttg

SEQ ID NO: 784435 - DNA, 83 bp, Homo sapiens
ccagccgcaccatgccgctcctaagcctgcacagccgcggcggcagcagcagtgagagggtggatgtgaacactgaccggaag

SEQ ID NO: 784436 - DNA, 100 bp, Homo sapiens
tcgccagtcagtgttgtgtggaagccagaacatcgttctcaatggcaagcatgtttttggcccagaggagcctctgctctcttagcggtagagcaaaatt

SEQ ID NO: 784437 - DNA, 100 bp, Homo sapiens
caggacccgaagcctaaattccaggaggaatgacgtgggcggcgaaaagctgctgcagaagaagtggaccaccttcctgaaggcccagctgctctgcacc

SEQ ID NO: 784438 - DNA, 50 bp, Homo sapiens
gccgcaccattgcagaccatgacttatcaaactggtttcaaagcacagag

SEQ ID NO: 784439 - DNA, 100 bp, Homo sapiens
ggcagcaacatggaggaattcgactccgaagacttctctacgtcggaggaggacgaggactacgtgccgtcggtttcctactatgttggaaccttgggga

SEQ ID NO: 784440 - DNA, 74 bp, Homo sapiens
gaaatgccaaatgattcagtccttgaaaacaagtggtagacggaggagaagtccatccccaccacccaccagaa

SEQ ID NO: 784441 - DNA, 48 bp, Homo sapiens
aagatggcatctggctggttcaggttccatcataatgaatggatccaa

SEQ ID NO: 784442 - DNA, 99 bp, Homo sapiens
caactggctcagtattcacagggaaagctgtgagggttaatttggagtggcccctggagtcagtttcctacaccatccgaggccccacccagcacgagc

SEQ ID NO: 784443 - DNA, 50 bp, Homo sapiens
tttttgtcagattatcaggatgaggttagcagacttgaagaaagagaagc

SEQ ID NO: 784444 - DNA, 100 bp, Homo sapiens
ctactggctgcgctcctttctggccggaggaacagcatatgccatatatgagctggctgtggcttcatttcccaagaagcaggagtgacttcagtcatcc

SEQ ID NO: 784445 - DNA, 88 bp, Homo sapiens
ctcccgagtagctgaaattacaggtggcgtgtgacgagcatggctcccggggtttcggctttgtccattttgagacccatgaggccgc

SEQ ID NO: 784446 - DNA, 100 bp, Homo sapiens
gggcgcagataggggtagcctggaggcctgcagtccgcgcggccgcggggagggacgagagggcctgacgtacaggtgctggagaatctggtaaaagcac

SEQ ID NO: 784447 - DNA, 100 bp, Homo sapiens
ctccagggaaaggatgacatatttttggacctgaaacagaaattctggaacacctatatgtagcaggacccagtgctccataaaggataatagtttccag

SEQ ID NO: 784448 - DNA, 100 bp, Homo sapiens
tgacagacttggacaacatgtcccaacattacatcccaaggaatggcttcttgtgggaaccaaacaaggacatcttcttctctataggattcggaaggac

SEQ ID NO: 784449 - DNA, 100 bp, Homo sapiens
gcctaacaagatggaagcaggtttaaaattttacataagaagttacctttttcagatttggtacacacagaggggcagcttcaaaatgaagaaattgtgg

SEQ ID NO: 784450 - DNA, 82 bp, Homo sapiens
ttcacagcacagttcctgggaaggtggagccaccagcctctccttggtgaagaagaattttcttatgggtattctctaaaag

SEQ ID NO: 784451 - DNA, 75 bp, Homo sapiens
agaggatcaagcatgcctgtcaactggaacggcagagtcgaaacaaacaatgagggcgaaccagtttcttacatg

SEQ ID NO: 784452 - DNA, 99 bp, Homo sapiens
gaaaggagcaaagcaacagaagtttatcaaggctgtcacacatcaagttaaatttggtcaacaaaatccacgtcaggctcacattctacttgactgtgg

SEQ ID NO: 784453 - DNA, 82 bp, Homo sapiens
agtcttcccgcgtccgccgattcctcctccttggtcgccgcgtccttggctggcgtggcggaatgtacgtgttccagctctt

SEQ ID NO: 784454 - DNA, 82 bp, Homo sapiens
aaagcacctggccccgctacagcaaaccagatctggtggctggacccagagctgacctatggctgcgccaagcccttcgtct

SEQ ID NO: 784455 - DNA, 75 bp, Homo sapiens
tgacgccatgtcgggttattcgagtgaccgagaccgcggccgggaccgaggaaatggtggagtcaatgaagaaag

SEQ ID NO: 784456 - DNA, 100 bp, Homo sapiens
ctggcttccctctggatgctgacagaaacaagggatgtgatggtggcaggtgggatggagagcatgtccaatgttccatatgtaatgaacagaggatcaa

SEQ ID NO: 784457 - DNA, 96 bp, Homo sapiens
tccagcaccatggggaagcgggacaatcgggtgagcctggacggccgtatcgaagtcaaagggcagcatggaagctcatcactgcatattaaagat

SEQ ID NO: 784458 - DNA, 75 bp, Homo sapiens
cagccaccctcgaccctgaactggaataattagggttacattccgaaaagcaaatgggagatggacacatctgag

SEQ ID NO: 784459 - DNA, 108 bp, Homo sapiens
caaaggcaagaaggcaacgacgttccatctgtggaaggacctaccaaccagacctgcctagagctggaacgttacctccagagcgagccctgctatgtttcagcctca

SEQ ID NO: 784460 - DNA, 73 bp, Homo sapiens
ggcatcgtggccccactgcctggagagtggaaaccatggcttgcccagagccggcaacagcaacaaaatgtgg

SEQ ID NO: 784461 - DNA, 100 bp, Homo sapiens
gccccagagtgcctggagatgcagttataatgccattcagagaagtagccaagccaacagagcctgatgagcatgctgccgggccgcaagtacagccctg

SEQ ID NO: 784462 - DNA, 82 bp, Homo sapiens
cctgagccggccgagcggcgacggaccgcgagtttggtgccctggttgtcagatgttggaaagcagtaggacggaacatact

SEQ ID NO: 784463 - DNA, 100 bp, Homo sapiens
gcttcttccagagccaaggaggaagggttgtccgggtttaggaatgtatgaaacacccctgttcctagctcatgaagaagagtcaggtggccgaagtgtt

SEQ ID NO: 784464 - DNA, 50 bp, Homo sapiens
gtgttgtaaatgacacaaagccaggcttcaggggccctgtcaaagttaac

SEQ ID NO: 784465 - DNA, 48 bp, Homo sapiens
tgcagttgcgtgttgttcagaaaggattcaggagcagttccagaaaaa

SEQ ID NO: 784466 - DNA, 50 bp, Homo sapiens
tctgcgctgagcggcggccagccggcaggacagagcgggatgccaccagc

SEQ ID NO: 784467 - DNA, 100 bp, Homo sapiens
gggagctggtggagccaaggaaacaggatgctgatagtctccagcgggcctggactgtgggctggtgtgtggaactgggggtgatcgctgagctgaaggt

SEQ ID NO: 784468 - DNA, 90 bp, Homo sapiens
ctgctttcttcagcctatgtagacagccacaaatgggaagcaagagaaaaagaacattactgtcttgggccaccactgtacgttacaaag

SEQ ID NO: 784469 - DNA, 74 bp, Homo sapiens
taggcgcatctctggagttgatcgttactatgtgtcaaaggtgctggctgccagctgctgcgccccccatgtag

SEQ ID NO: 784470 - DNA, 75 bp, Homo sapiens
atggatgatgttgaagttgtttatacaattgatcataggtatattgaactgttcctgaattcatgtccaaaagga

SEQ ID NO: 784471 - DNA, 75 bp, Homo sapiens
cgacaggctctacagctccgcagaattcaagaattcagcttagagaactatcaacacaggacaatgcaagcccat

SEQ ID NO: 784472 - DNA, 50 bp, Homo sapiens
ctcaggcgtgcgcggacggtgtgcggcttttctgggagaagaggctacaa

SEQ ID NO: 784473 - DNA, 51 bp, Homo sapiens
gcccattatccctgtcactcagccccggcaccgttcacctctggaaaagga

SEQ ID NO: 784474 - DNA, 135 bp, Homo sapiens
tgcaaatccagccacagcagacaatcatggatatacggcacttcactgggcttgctacaatgggagaaactctggaaaccttgacaatggcaacagtgtgtctcttcagcgcacaacctcagctggcagatcagg

SEQ ID NO: 784475 - DNA, 75 bp, Homo sapiens
gttgatctggataatgtggtcaaaaaggcaaatcctgatcctaactgttgtcttggagtatttgggctgagcttg

SEQ ID NO: 784476 - DNA, 100 bp, Homo sapiens
gactgtgtccatgttagaactcatagaaggaaggaatgcagctcatttcagaaaagcctgagacggaagctgtggtgaaggagaaactcactggtttaca

SEQ ID NO: 784477 - DNA, 100 bp, Homo sapiens
catcttgtcgcgagctgctgatacagaagagatggatattgaaatggacagtggagatgaagcctaagaatatgatcagtattccagtaccagtacccgg

SEQ ID NO: 784478 - DNA, 100 bp, Homo sapiens
gttaaggattccaagtaactcttatttggtttctgctttgggacaaccatacatctaattccttaaagtagttttatatgtaaaacttgcaaagaatcag

SEQ ID NO: 784479 - DNA, 95 bp, Homo sapiens
agtgtacaacttccccgcaggcggcgtgggcatgggcatgtacaacaccgacgagttctacagcgagtcgggcatgcctaccaaacatctttcag

SEQ ID NO: 784480 - DNA, 113 bp, Homo sapiens
gagatcggttgctggaaaactctccgtctttgctaatggagtcgtgacttcaattcagatggatttgcagccgctgcaagtgtgtggaagggccgtgttcgtgttggcaaaga

SEQ ID NO: 784481 - DNA, 98 bp, Homo sapiens
gatttgttaaggattccaagtaactcttatttgatgttggatgacaataaccatcttattcagtgtataatggactctcagaataaaggaaagacctc

SEQ ID NO: 784482 - DNA, 75 bp, Homo sapiens
ttaacaggcagcaaaatgagctcttcagaagaggagttcatgatcaagtgttgcccacaccaaatgcttcatcca

SEQ ID NO: 784483 - DNA, 100 bp, Homo sapiens
ttgtatgtcattggaacaggtgaacgtggaaatagcgcttctgaaaaatgggagaagaggtgtggtggaaaggtcttccagaaccagaggctaagcacac

SEQ ID NO: 784484 - DNA, 74 bp, Homo sapiens
aacggaagcgtctttgctcaaggatcccagttttctctggatgacgtgaagcacgaggtcccagcaaagtctga

SEQ ID NO: 784485 - DNA, 75 bp, Homo sapiens
attgcagacattaagaagatggccaagcaaggccagatgaaccaaaaacttttgctagaaaatcagcttttacga

SEQ ID NO: 784486 - DNA, 74 bp, Homo sapiens
tcggctacaacatttggcagaggtatcagcagatgttgcacacaaacttggtataccttgctacaatagcagat

SEQ ID NO: 784487 - DNA, 51 bp, Homo sapiens
gggagattctgctcacggaactgcaggtacgcatagctgctaaattcatca

SEQ ID NO: 784488 - DNA, 100 bp, Homo sapiens
gaaggctctggataaggaccagtacctgcccaggaaactggatgccccaggtgaggatgaggaggaagatggtgtcagtgaagcggccagcctagaggag

SEQ ID NO: 784489 - DNA, 82 bp, Homo sapiens
tggaccttgggcagctcagttcacaaggccagaagcggactcctagaagaggggagcagcaaggatggaatgacagccgtgg

SEQ ID NO: 784490 - DNA, 98 bp, Homo sapiens
ctgggatcctacgtgcatgaagatggacgaggtcctgtacagcatcgccgagaagctgagatctgtatctgtggacctgaatgttgatccctcgcttc

SEQ ID NO: 784491 - DNA, 50 bp, Homo sapiens
ctctgatgtcaatcttgagggctagtcgtccctggggatgagcccaggga

SEQ ID NO: 784492 - DNA, 94 bp, Homo sapiens
ccaacacctttccccagctctgcgcgtaccgcgctctttggaaacgaattgtgcgcgcggagccatggttatcatgtcggagttcagcgcggac

SEQ ID NO: 784493 - DNA, 83 bp, Homo sapiens
atgctcacatcttcaggtgcctcattcacatacgtcaaggaaattgaggtgtcgtgaaaactacccctaaaagccaaaatggg

SEQ ID NO: 784494 - DNA, 83 bp, Homo sapiens
ttataggagtttgcacacaaagacagcctgtctacatcattatggaactggtttcagattcagaatggacagtttagaagaac

SEQ ID NO: 784495 - DNA, 105 bp, Homo sapiens
cccacttttagaagaagatccgaatatctttgcctatgcctgtgatttttctccaagagccattgaatatgttaagaatgagagggagaaacttcaaataaagat

SEQ ID NO: 784496 - DNA, 80 bp, Homo sapiens
agagctctgacgttcccagggagttgataggtgctggagaatctggtaaaagcaccattgtgaagcagatgaggatcctg

SEQ ID NO: 784497 - DNA, 76 bp, Homo sapiens
gatggctataatggatttggtaatgatggaagctgagctgaacacattacgatggatgatggaaacataaggtaca

SEQ ID NO: 784498 - DNA, 71 bp, Homo sapiens
ccctgaaactggttggtgaagaaggatttgtagaacctaatccaccaatagatcaagttatacagaaacca

SEQ ID NO: 784499 - DNA, 95 bp, Homo sapiens
tgtcattgaagaggtagaagactcaaaaccagataccactgctcctccttcatctcccaagcaagaagtcgagaacttcaaaaaggtcaatatga

SEQ ID NO: 784500 - DNA, 100 bp, Homo sapiens
aaaccactgaggatcagattttgaagagagatatgccaccagcatttattaaccccgtgctgatcccattccaatatgtagcttctgtttggggactaaa

SEQ ID NO: 784501 - DNA, 100 bp, Homo sapiens
ttcatcaccttcgtggtcgtctggtcctactacgcgtacgtggtggagctctgcgtgtgtgtaccttcagttgaatttttagaatctcccattacggcag

SEQ ID NO: 784502 - DNA, 101 bp, Homo sapiens
caagggtggtttaattcctcttcataatgcggcatcttatgggaccagtgaatggaggctaagctatgtcaataaggaatttgctgtctgtccctcttacc

SEQ ID NO: 784503 - DNA, 75 bp, Homo sapiens
gtgggatttgaacacctgaagctccccatcaagggaatgaacttcacagtgctgcagggtgcacagctgatcgcc

SEQ ID NO: 784504 - DNA, 97 bp, Homo sapiens
gccgcggccgaggaggcagcgcgacctccgcacgatcgacctgatgccccatgacctcatcactcagctcttgcgcgtcctggccatcgagaccaag

SEQ ID NO: 784505 - DNA, 100 bp, Homo sapiens
aaaagagtaacggaaatccttgggtttgaagatgatgttgtgattgagtttatattcaaccagctggaagtgaagtaccgtcatagtggccctccttatg

SEQ ID NO: 784506 - DNA, 100 bp, Homo sapiens
ccacatcttcctgacccgcttcaagaagcctgctgagttcaccacagatctgtgacttcctccgcggagccacagtccatagaatcctcggccagcaggt

SEQ ID NO: 784507 - DNA, 75 bp, Homo sapiens
tgtttgcctggagggataaaacagctcgcagggaagatgaaagttacggcaacgtagagcttgctctgacttctg

SEQ ID NO: 784508 - DNA, 100 bp, Homo sapiens
cccaggaactcacagagtggattccgatgtcagtattgaatatggtggtgaggcgtgaccctggcaacactgaacctgtgaaagccaaggaagagctcat

SEQ ID NO: 784509 - DNA, 74 bp, Homo sapiens
gccaaggagctactgcaaatgtctttcgtggaagacataaggcagcctgcttctgcaaagtggtacgatcgaag

SEQ ID NO: 784510 - DNA, 75 bp, Homo sapiens
tgttctctgtgttaaaccaatcagttgcgaccttctcttaacagataattcttgctaatcacttcaatgaaggag

SEQ ID NO: 784511 - DNA, 100 bp, Homo sapiens
attacatctacaagaggggacaagtacctttatgaaccagtgtatcccaaagaccatcatgcagacatcagagactgggtcggacacaggctcgacagtg

SEQ ID NO: 784512 - DNA, 88 bp, Homo sapiens
tttgctggatttaagcactgctgcactttatgaggtttgtgaaatggctgctgacatttctgaatccagcggggctgactgcaaagga

SEQ ID NO: 784513 - DNA, 75 bp, Homo sapiens
tgctgagccagtatgacaacgagaagaagtgggagctcatctgtgatcagggaatgcagctggaagatctcaaac

SEQ ID NO: 784514 - DNA, 100 bp, Homo sapiens
aaactgaataatgatgataatgtagatggcctccttgttcagttgcctcttccaggggctgctccttcctctccaagactcgggtggtccaggagcacgg

SEQ ID NO: 784515 - DNA, 80 bp, Homo sapiens
aaactccacgaagccaacgcccaggaagatgatccctatgatcttgaagatgtttctgcacagaaatgagggaaatacaa

SEQ ID NO: 784516 - DNA, 75 bp, Homo sapiens
gcatccagagagaggctctttgaactttggatgctttattgtacaaagaatgaaactagtgatcgagaagatggc

SEQ ID NO: 784517 - DNA, 75 bp, Homo sapiens
caaggactcaccccgtttccgttggaatcgaagcctcttaaaatggcagatgacttggacttcgagacaggagat

SEQ ID NO: 784518 - DNA, 100 bp, Homo sapiens
cctgcccctggacctggccgagtcggacgccatggaggggctgctgaaggcggagatcgcccgccgagaacacacgaggagatgccacagagcatcgtgg

SEQ ID NO: 784519 - DNA, 80 bp, Homo sapiens
ctctgttgaagcaaaggccggggcagacctcctacataagcagtactataatggatgtagacagcacaatttccagtggg

SEQ ID NO: 784520 - DNA, 75 bp, Homo sapiens
tggcatcgacaaaagaaccattgaaaaatttgagaaggaggctgctgagatggcgggtgaaaaagttgagaagcc

SEQ ID NO: 784521 - DNA, 90 bp, Homo sapiens
gcagtggtcgcttcttctccttggcccccgacagctgctctcgggagccgcctcccgacacccgagccccgccggcgcctcccgctcccg

SEQ ID NO: 784522 - DNA, 100 bp, Homo sapiens
catcttgcttctgagcaaggtagttttgatggtgctggagaatctggtaaaagcaccattgtgaagcagatgaggatcctgcatgttaatgggtttaatg

SEQ ID NO: 784523 - DNA, 82 bp, Homo sapiens
caaggacttgtgtactcagcaatgccgactgcctacaacactgggcttaaaagacaaccttcttgcttctgggacatccagc

SEQ ID NO: 784524 - DNA, 51 bp, Homo sapiens
gtagacctgggccagaatggtgaggagattaaagtatggacagccaacccc

SEQ ID NO: 784525 - DNA, 75 bp, Homo sapiens
gctgccccctcaaggtgctatctcagagaccagaaaatttgaagccattacttccagctggtatacaggataaac

SEQ ID NO: 784526 - DNA, 97 bp, Homo sapiens
acacagttctggatgatgtgggccatggtgtcaaggagtacaagcgcaagctagccagagtttccctggtgcgcaaagaactcaggtcccggatcca

SEQ ID NO: 784527 - DNA, 89 bp, Homo sapiens
agcccaggacctccaggggaacaatgaggcctacgcagagctcatcgtccttgacaacagcccagacccttggacctgaggaatcccaa

SEQ ID NO: 784528 - DNA, 75 bp, Homo sapiens
aggatgtgcaaccctccaagtggaactgtgatgcagatccatccgccctagcaaaatatgttctggctttggtaa

SEQ ID NO: 784529 - DNA, 100 bp, Homo sapiens
tcagagctgcagaagagtccaggaaacacatcaacacctgggtctcaaaaaagaccgaaggaaaaattccggaactgttggcttcgggcatggttgataa

SEQ ID NO: 784530 - DNA, 96 bp, Homo sapiens
ctcctctatttcctctgctatatcctccctcagaccgccccgcaagtactcaggatcgattcctgggaacaccaccatggagggcctggcctttgg

SEQ ID NO: 784531 - DNA, 51 bp, Homo sapiens
agcatcccaggacctaccagaatctggtgaatgaaaactttgccattgatt

SEQ ID NO: 784532 - DNA, 75 bp, Homo sapiens
aaagaagacaagagagaacgcaaacagtttgaagctgaggattttttcctaaggacggtctgaagagccaagagc

SEQ ID NO: 784533 - DNA, 90 bp, Homo sapiens
aaaacccagggctggaagatgtggcagccggccacggagcgcctgcagggatgtgagctcatttcaactcctgatcaagaccacactgac

SEQ ID NO: 784534 - DNA, 77 bp, Homo sapiens
atcttgctgggagtggacttttccagtaaggaaagggtggcatggagaaatcgttgtcaaaacagagatgtccgtca

SEQ ID NO: 784535 - DNA, 71 bp, Homo sapiens
tcaccgtggagatgatcctgaagctcattgccttcaaacccaaggaaagaccacagcaagattctttcatt

SEQ ID NO: 784536 - DNA, 80 bp, Homo sapiens
accatctacttcatttttgatctcaggaagaccagagctgaggcttcaacggaccacaccaaaatgccatctcaaatgga

SEQ ID NO: 784537 - DNA, 75 bp, Homo sapiens
agagtgtctccagcatcctgcaagtgaatgagtccctggaacgccagatgcgtgaaatggaagagaactttgccg

SEQ ID NO: 784538 - DNA, 100 bp, Homo sapiens
tgggattccaccgagaagatcggggacctcttcgtggcctcggcatgtgacgtccttttctccaagcttgtcaagtatgatgagctttatgctgcactga

SEQ ID NO: 784539 - DNA, 101 bp, Homo sapiens
ccatcaaaatccagatgctggatgacacccaggaggcatttgaagttccagagctcttgtccctggcaaagcgaaagcgcagtgactctgaggagaaggag

SEQ ID NO: 784540 - DNA, 100 bp, Homo sapiens
cagaaggtctctggagacatcttcagcagggttttggccaaattgggcgagggcacaaaataaccacttaccccttctcaccgaggaagagcgggagaaa

SEQ ID NO: 784541 - DNA, 100 bp, Homo sapiens
ctgaatgaccaggtgtaaagtgcaagagtaatatgctatgactgagatgacacacaataatttttggttgaagaagatagaaatcagtgtttcagaagca

SEQ ID NO: 784542 - DNA, 84 bp, Homo sapiens
gcggcgccccggccgaggtggcggcggctcctcaggtgagaagccctaccactgcaactgggacggctgcggctggaagtttgc

SEQ ID NO: 784543 - DNA, 151 bp, Homo sapiens
gaaactctataatgtcatcagcctcgagtttagccacaccaggctggagaatatggtgcagaggccctccacgtattcaagtcaaacaacgttgaaatggattgggtgttgaagcatactggtccaaatagtcctgacacggccaatgatg

SEQ ID NO: 784544 - DNA, 94 bp, Homo sapiens
gctgatcccaaaaaacctattggaggaaatatcatcgcccatgcatcaacaaccaggaggtgggccccactatggtgggcgatgaacagtcgga

SEQ ID NO: 784545 - DNA, 100 bp, Homo sapiens
attcacaaggcagctcgctctgggagcctagaatgcatcagtgcccttgtggcgaatggggctcacgtcgacgcaccgcctaggcaagccagctgacgcc

SEQ ID NO: 784546 - DNA, 100 bp, Homo sapiens
ttacaccagatggtgagagcgatgaggtcggagtgattcccagtaaacgcagctgtccctttccccccaacacatcgcttgacatctgaagaagtatttg

SEQ ID NO: 784547 - DNA, 83 bp, Homo sapiens
actggaagctctacgctactgccatgataataacataattcacagggatgtgaagctgatcactggagattccatcgttagtg

SEQ ID NO: 784548 - DNA, 83 bp, Homo sapiens
ctgctattctccgagcttcgcaatgtcctcctccgcctcctcctctctgcatgcgcgtcagagcccgtgccaagaacaagcag

SEQ ID NO: 784549 - DNA, 100 bp, Homo sapiens
caggcctcctcctggggaatgtgcctcagcttctgtttgcctgagaatacagatcaacccacagaacaaagcggatttccaaggcatctccccagagcga

SEQ ID NO: 784550 - DNA, 75 bp, Homo sapiens
ggaaaatggcggtgtctacagtgttctcgacttcgtcgctgtaatggaggggaaagttccagtcgcagcgctgag

SEQ ID NO: 784551 - DNA, 90 bp, Homo sapiens
gttcttatgctgaagcacttcgagaggacactttgccaccatcaccttgaccttcatcgacaagaacggagagactgagctgtgcatgga

SEQ ID NO: 784552 - DNA, 83 bp, Homo sapiens
ggccaggctgtgggagaccgaggtgttgacttcaaaatcaaaactgtagagctaagaggaaagaaaattagattacagatctg

SEQ ID NO: 784553 - DNA, 74 bp, Homo sapiens
agggagaggaattacgggaacagaaagaaaagtccgaaagagctgtatgccgagattttgctgtcctggaggac

SEQ ID NO: 784554 - DNA, 100 bp, Homo sapiens
cagaactgttccttcagccaaagaaacaagccgtggaataggtgtatcaagtaatggtgcaaagcctgaaaacattaaccaggtggtatttgttggaaat

SEQ ID NO: 784555 - DNA, 129 bp, Homo sapiens
atataagaaaaaactgcaagagagagctgaagaagaagaaagagaaaagagggctgctgcactggaaggttacctgtgcatgacagatgagtggttctctgagtatgtctacgaagtggtggtggacag

SEQ ID NO: 784556 - DNA, 80 bp, Homo sapiens
agcagggctgagatgggcaccgcggatctggggccgtcctcaggtttggtgcacctcgatttggaggaagtagggcaggg

SEQ ID NO: 784557 - DNA, 75 bp, Homo sapiens
agaagtttccgcaggactacttccccgagcttcctgcctgacacagctcacttcaagaagtgcacaatgtcagaa

SEQ ID NO: 784558 - DNA, 97 bp, Homo sapiens
cctgagttccgtgtgcagttccaggacatgtgtgcaaccattggcgtggatccgctggcctgtgaagattgtccccagtggatggtccctatcacaa

SEQ ID NO: 784559 - DNA, 98 bp, Homo sapiens
aaattgttggcgggtttcatgggcgtcatgaataacatgcggaaacaggtaataatagacgtggatggaatacaactagccagagatattccaatgtc

SEQ ID NO: 784560 - DNA, 101 bp, Homo sapiens
aggtcccggaccccccggatctgacggggcgggacctggcgccaccttgcaggatggattggatgctttggtatatgatttggattttcctgccttaagaa

SEQ ID NO: 784561 - DNA, 100 bp, Homo sapiens
caagacagttcacaagaaaccagattcctgaacaagatgaaacctatttagaggatagtttttgtgttgatgaagaggagtcttgcaaaggccaatcaag

SEQ ID NO: 784562 - DNA, 87 bp, Homo sapiens
ttttcaactttttatctgaggacaagtatccattaattattgtgtcagaagagatcctgaaggacacagccctgcagaaagtgaagc

SEQ ID NO: 784563 - DNA, 90 bp, Homo sapiens
ccgcggggcgctcatctggctctgctacgacgcgctggtgcacttcgcgctggtctccagaaatgctttgggttcatctttcattgctgc

SEQ ID NO: 784564 - DNA, 75 bp, Homo sapiens
cgacatcaagagctgcgagatccaacagaatccagcaagctaaagtgcaaattcttcccgaatgtgtgttgcctt

SEQ ID NO: 784565 - DNA, 100 bp, Homo sapiens
gccgcctgccgcttcgcgcactacttcgtgctgtgcgggatcgacgcggacagcgggctggagcctgacgagctggcggaaaccaatagagccatggcga

SEQ ID NO: 784566 - DNA, 98 bp, Homo sapiens
ccaagctacttggagtagggacaaaatatcttggctcacgtatttaagagcctgaatattccagtccagcctcctgagcccagggacctgcagatcag

SEQ ID NO: 784567 - DNA, 74 bp, Homo sapiens
gaccaaacatccagatctggagtgccggcacaggaatataatgttaacgatgactctatgaaacttggaggaaa

SEQ ID NO: 784568 - DNA, 100 bp, Homo sapiens
agctttgtctccttcgacttggagtctttgtccaggacggatgagacttcagcactcaagtttgaaataagagcaacaggttttccagagccaaatccaa

SEQ ID NO: 784569 - DNA, 100 bp, Homo sapiens
ctcagctgtgacatgaaacaagttcctgccttaactcctctttacttgctgtcagctgcggagacaatccacgttgctattgtctgcgccggatacaatg

SEQ ID NO: 784570 - DNA, 100 bp, Homo sapiens
gaaaatgtgaaaacaataggtcatatgatcaggctgtacacaaataaaaacagtacgctcaacggtacagacatcatcactcaagagatgacaacagctg

SEQ ID NO: 784571 - DNA, 98 bp, Homo sapiens
gaagccgaggctccactaatctctttagtaaattaacttcaaaactcacaaggaggttgggaatccacgtgttgaacttaccctctcagagctccaag

SEQ ID NO: 784572 - DNA, 75 bp, Homo sapiens
gactcacggctgcttggagcgtccgccatgaggagaaggggcaagattcttgccaagagaattaatgtgcgtatt

SEQ ID NO: 784573 - DNA, 50 bp, Homo sapiens
gctttgggctgatgctgacatcagaaagaccacagcaagattctttcatt

SEQ ID NO: 784574 - DNA, 108 bp, Homo sapiens
ctacacttgagccacaattggttttgaagtgcatttacaagatgcatttttgtagaagcattttgaggatgaatgtttgcaaatcattttgaaattgccaagtgccac

SEQ ID NO: 784575 - DNA, 85 bp, Homo sapiens
cgcggcattcggggaatctgcagggcagctcaagtcactatagaagaaatcactcctcttgtccccccacaatcaggagataaag

SEQ ID NO: 784576 - DNA, 75 bp, Homo sapiens
acaagtggcgtggttgtgaggactatagttcctggaggattagcagatcgagtcaatgtgacggtggactacatt

SEQ ID NO: 784577 - DNA, 87 bp, Homo sapiens
atggctgactacctgctgtacaccctcaacaaacaccagcgctttgggctttgaagacaagattcccaaaaggagattctctgagat

SEQ ID NO: 784578 - DNA, 82 bp, Homo sapiens
gcaaagcgaggctgaagaaggccaaggctgcagaagccaaagccacggtcaaaatgcagatcttcgtgaaaacccttaccgg

SEQ ID NO: 784579 - DNA, 82 bp, Homo sapiens
agcctcatggagcggcggaggctcaaccagctgctcctgcccctgctgcagacctgcttttttaaaggctgcagaaaacttc

SEQ ID NO: 784580 - DNA, 100 bp, Homo sapiens
gagtgtgccagacgttcctgtaaaagaggacaccaacagtgtggtggagaaagcaatggatgaaatcaaatcccaagatggttatgtccttcggagttac

SEQ ID NO: 784581 - DNA, 100 bp, Homo sapiens
ctgcaagcgcccaaagccaatgggaatcacctggttcaagttccggaactttaagatcatttaccgccgctatgctggcctctacttctgcatctgtgtg

SEQ ID NO: 784582 - DNA, 100 bp, Homo sapiens
tgtctgaagctgtccaattcagaacacctaaagaaatttaaaagcctgttgattcaagaactttctaaagtatttccggaagacatggctaagtatcgaa

SEQ ID NO: 784583 - DNA, 75 bp, Homo sapiens
ggaaccaaggagacgctcctggcactgcaggtgattttaaaaatcgagctgagatgatagatttcaatatccgga

SEQ ID NO: 784584 - DNA, 76 bp, Homo sapiens
gtcatgagtcgcttcaagtttatcgctgttcgggggtcttgtctggattttggttgcctcctccaatgttcctcta

SEQ ID NO: 784585 - DNA, 100 bp, Homo sapiens
ctcctggccctggccctgatcatcctgctgggcttcgtccagatcgggaaggatgacgtccggttgtttgccttcgtgcgcttcaccaccggggatgcca

SEQ ID NO: 784586 - DNA, 75 bp, Homo sapiens
aatcagaccttcaactggaatacaatggctttgaagcgtatgttgaatttcaatgtgcctcatattaaaaacagc

SEQ ID NO: 784587 - DNA, 97 bp, Homo sapiens
acagggtatctgaagtaaaaggggctacaaggctttggccgaccaagtgtgtaccatgctgctattgtcatcttccttgaattctttgcgtggggcc

SEQ ID NO: 784588 - DNA, 100 bp, Homo sapiens
gagagagagctattagagattgtgaagaagaatttcgatctccgccctggggtcattgtcagttgctgctgacacgccgaccgcctgctgcttcagctac

SEQ ID NO: 784589 - DNA, 100 bp, Homo sapiens
ctggccagcacgctggactgcgagacggcccggctgcagcgagcgctggacggagaggaaagcggctcaagcaagatttaatgaatcaagtcagaagttg

SEQ ID NO: 784590 - DNA, 50 bp, Homo sapiens
tttagagagcatcagcaatacctcttgttgctgtaccacatagaattcac

SEQ ID NO: 784591 - DNA, 98 bp, Homo sapiens
tcatgacaactgcaatttccaaggttaagaatagacccaccagcatttcgtgggatggtcttgattcagggaagctctacaccttggtcctgacagac

SEQ ID NO: 784592 - DNA, 75 bp, Homo sapiens
ggacccagctgagcgggcggtcattcgcatcgcagcccgtggaccgggagcccgtggaccgggagccggtggtgt

SEQ ID NO: 784593 - DNA, 98 bp, Homo sapiens
gttacttggagacacatctctcccaaagtgccctataaggactgccaggcaataatgaaggttcttttactgaaggatgcgaaggaagatgactgtgg

SEQ ID NO: 784594 - DNA, 100 bp, Homo sapiens
acatggagcgggcagaggatgcagtggaggccatcaggggccttgataacacagagtttcaagcgtctgctgcagagaccatgtctgccgacggggcaga

SEQ ID NO: 784595 - DNA, 75 bp, Homo sapiens
ctctctgttcaagggaattttgatctaaataggtgcttgaggaatccaaagccctcgtgcgctgcaacatgaaga

SEQ ID NO: 784596 - DNA, 82 bp, Homo sapiens
gggcagtaccttcttcaagagaaatggagcccttctccaaggatcagttccacaagatggttgagctgacagtggcggcccg

SEQ ID NO: 784597 - DNA, 75 bp, Homo sapiens
tgaccttctgccatgattgtgaggcctccccagccacgtgaaactggcccagtcatatatgcacagttagaccac

SEQ ID NO: 784598 - DNA, 71 bp, Homo sapiens
aacatcacacccctgcgcagggccacagtggaatgtgtgaaagatcagggggccgtggagcccatgcagat

SEQ ID NO: 784599 - DNA, 75 bp, Homo sapiens
ccgctctgggatcccggccaccagcaattgtccgatgcggcattccaaaagaactcactgtcctgattgggatag

SEQ ID NO: 784600 - DNA, 74 bp, Homo sapiens
aagaacaagccgtacccaaagtctcgcttctgccgaggtgtccctggaaaactaggtgtctgtgttcactccag

SEQ ID NO: 784601 - DNA, 102 bp, Homo sapiens
ctttggttacctatgtacctgttaccactttcaaaagagcacgtgcagaaactaattcccgtgtcagtggtgttgatggatatgagacagaaggcattcgag

SEQ ID NO: 784602 - DNA, 75 bp, Homo sapiens
aacaaattcttgttttgcagagcaaggtcagaagagatcaattctacagaaatttccagtggttctgttgaggct

SEQ ID NO: 784603 - DNA, 100 bp, Homo sapiens
aaatcaagtttgccaaaaccctggaagaagggtatctcccagagccccagctggtgtggccaggccccaggagtaggatggggctccccctacgagggcc

SEQ ID NO: 784604 - DNA, 100 bp, Homo sapiens
tgtggaggaaaacaacttcgagggcagagttttacacatccataagtagacctttttggagcctcaccagccaattcaatggcgtcctcttctactgtgc

SEQ ID NO: 784605 - DNA, 50 bp, Homo sapiens
ggcccgtcaagctgcgcctgacagtgaattagtgccatcttacgattcag

SEQ ID NO: 784606 - DNA, 97 bp, Homo sapiens
ctggggctatcgtcgtgacatggcattgtctgatgttacagaagaatctgaaatcatttcggaagccagcagacctgcagaacttggctcccgggac

SEQ ID NO: 784607 - DNA, 49 bp, Homo sapiens
ccgccgaggactccagcacaccgagggaggccactgtctgcagctcccg

SEQ ID NO: 784608 - DNA, 100 bp, Homo sapiens
tagtggattaaaatctcccaagaggaatgacaaacaaccagctcttcagattttaccaaatgttgcaagaactctggagttcttatggtagtaaaatgcc

SEQ ID NO: 784609 - DNA, 96 bp, Homo sapiens
caacatggctgacatgctttataatttggccatgtttatgagtggactaagtgaaagcaaacaaacccatgtacacctgaggaatgtcgatgctgc

SEQ ID NO: 784610 - DNA, 98 bp, Homo sapiens
ttgcccgaagtttttacatacaaattctactagtcacacctggccattcagtgcagttgctgaattaataggaactttactctgaggtgcaaacccag

SEQ ID NO: 784611 - DNA, 100 bp, Homo sapiens
ccaatttgagagattccttggttaaaattctgcaagactacaatttgcaagaacctgttggagaatgtactccttggaaataaggaagaaagaggatcca

SEQ ID NO: 784612 - DNA, 100 bp, Homo sapiens
ggcaggctgccatgacaaccaggcaatgctggatagataccgaattcttatcacaaaggtattacatgaaacctttcctaaacatacatttctgatgaac

SEQ ID NO: 784613 - DNA, 100 bp, Homo sapiens
tctcttgaagctgtaaaggtgaagacagtgtgccagataccattgatgaaggaaatgctaaagcgattccaaggtccttgaatgggcaagagggcacatg

SEQ ID NO: 784614 - DNA, 100 bp, Homo sapiens
gaaggagctggcagagcagaagtctgtggagaccgcaaaaagggaaactgaacagccaagactcctataacaattttaccaacaacaaccctggcaaccc

SEQ ID NO: 784615 - DNA, 76 bp, Homo sapiens
aaccagaaagagattgggtacttaatggatcactactcttggaatcaaagataaatccaaatactgcatatcagaa

SEQ ID NO: 784616 - DNA, 73 bp, Homo sapiens
tgcagaggtgctggagctggcagacaatgcctgtggaagacaagtcagaccccccagaggggtctgaggaagc

SEQ ID NO: 784617 - DNA, 75 bp, Homo sapiens
cgacgctgctggtggccaagaccaaggcctctccaggaagtgcacggctgtctataacgtgctgccgggtctcag

SEQ ID NO: 784618 - DNA, 87 bp, Homo sapiens
agccgggagttacaccgccaccgccaggttattcagcttctcaaggctggaaaagcgaaggaagtttcctacaatgcactagcctca

SEQ ID NO: 784619 - DNA, 100 bp, Homo sapiens
ggccctgtgatccctcaagactggtccacggagtgtatgaccacaaacagccatcaagtacaagccagctgccatgttgtgagcacataccacatagctc

SEQ ID NO: 784620 - DNA, 100 bp, Homo sapiens
ccagaggctcagcggctcccaggtcaaaatgcagatcttcgtgaaaacccttaccggcaagaccatcacccttgaggtggagcccagtgacaccatcgaa

SEQ ID NO: 784621 - DNA, 101 bp, Homo sapiens
cgcccttagcggcccggcgttgaattccgggaagtgggagcttcaggctcgctccgtgcggacaggaatttgctgttgctggctatgaattctgcatttca

SEQ ID NO: 784622 - DNA, 82 bp, Homo sapiens
aacgaatcatccacgcacctgcagctctgctgagagagtgcaagccgtggggcatgtactggcattgaaaacattgacgaag

SEQ ID NO: 784623 - DNA, 96 bp, Homo sapiens
cgggacctgggctgggaacccgcggtggagcgggacacgaacgtggaactgtggaaggtgcatcagtgaagaaatggaccaatgtgtataatcatg

SEQ ID NO: 784624 - DNA, 50 bp, Homo sapiens
ccacaagtaccacaagcatggcaaggaatacttcattgctccatcagtag

SEQ ID NO: 784625 - DNA, 90 bp, Homo sapiens
atgttgaaactatttaaagaggttgctagcttacagctcattcttggaatcccagaacaggccttaagtcttctccacatggccatcgag

SEQ ID NO: 784626 - DNA, 82 bp, Homo sapiens
ggcggaggcgcctcctgtctcagcttcctgcctgacacagctcacttcaagaagtgcacaatgtcagaacgtggaattaagt

SEQ ID NO: 784627 - DNA, 80 bp, Homo sapiens
caccaagcagaggaacaagaacgcgctcctccgcctgctgcccgggctggttttcaccatggagcagctgagctcagcaa

SEQ ID NO: 784628 - DNA, 75 bp, Homo sapiens
agagaaagaaaatgccgaaggcactcagacagcttatgttcctgaggaagaattgaaggcagcagaaatagatga

SEQ ID NO: 784629 - DNA, 75 bp, Homo sapiens
ctgcaacacttacacagcagcaacagcctgctacaggtgcatcatgggcttcatcagcaaggagcgagagcgtgc

SEQ ID NO: 784630 - DNA, 98 bp, Homo sapiens
aataagttgcagcctcccgacttataccctggtacttctagtctaaaacaggatttgactctactaatccagtgcgatgtatgatgtatggctttggg

SEQ ID NO: 784631 - DNA, 90 bp, Homo sapiens
cttgggtcctccgagagcagcagcgactgctggagttaataccaccgacaaagagatggaggtgcttcacttaagaaatgtctcctttga

SEQ ID NO: 784632 - DNA, 127 bp, Homo sapiens
ggcggctttagtggcagcatgaagcgcaccccgactgccgaggaacgagagcgcgaagctaagatgtgattgatctcactggagatgataaagatgatcttcagagagcaattgccttgagtttggc

SEQ ID NO: 784633 - DNA, 102 bp, Homo sapiens
aaggagacaagtgtcacagcctggttggaaaacccaagatatttatcattcaggtggttttagaggtggaagaggaggtggaggtgggggcttcagaggagg

SEQ ID NO: 784634 - DNA, 83 bp, Homo sapiens
ggaggttcgagcgctgttctcgctccggagccgctgcacatttcgtcctcctgcatatgcccaagaggattgggagtggaatg

SEQ ID NO: 784635 - DNA, 98 bp, Homo sapiens
gcggacggaaagtttatgccgacggaaagtttatgccgacggactgtgtccggcgatgggcacggggacattgccgagaatggctgcgcccccacccc

SEQ ID NO: 784636 - DNA, 75 bp, Homo sapiens
acctgcttcagagacatgagaagattcatactggacagtcattttgtttactcattcagccctgttgcaggtccc

SEQ ID NO: 784637 - DNA, 100 bp, Homo sapiens
cctccactccatgaacatcatccaccgagacctcaactcccacaactgcctggtccgcgaggtggagatgacccctgagaagttcagtgtcttaatggag

SEQ ID NO: 784638 - DNA, 75 bp, Homo sapiens
gttcaaagtccagtatctctaggagaagatttgcagtggtggcctgataagctgagatctgtatctgtggacctg

SEQ ID NO: 784639 - DNA, 98 bp, Homo sapiens
atcagtaagaagagcaaagtaaatgctgtcttttcccaaaagacaggctcttcacctgaagtactatggactacaaattttggaaaatgtgataaaaa

SEQ ID NO: 784640 - DNA, 75 bp, Homo sapiens
cagccactgccccgacagggggtcaagagaacctactctgaggcggcttacagggagaacacagttggcctccac

SEQ ID NO: 784641 - DNA, 90 bp, Homo sapiens
gcccggtgaccacttttggaccaaaggcctgtgtgctgcagaacccccagaccatcatgccaccagcccctcgggttccaagatgcagct

SEQ ID NO: 784642 - DNA, 100 bp, Homo sapiens
gatgatgttgacttggggatccaaaggcacagacaaatatggtctctttagaaggccttaccaaagtagttgatccttctcagctaactcctgagtttga

SEQ ID NO: 784643 - DNA, 100 bp, Homo sapiens
gagaatactaaagtggaacaaactgactgagacttaccgtgttatcccagaaggttttgctgttactgctcagtgtagtcacaccttgaataagaaatgg

SEQ ID NO: 784644 - DNA, 100 bp, Homo sapiens
gacatggacatgagccccctgaggccccagaactatcttttcggtgaatgaggcctctggggatggggatggagaggatgccgttgtgatcctggagaag

SEQ ID NO: 784645 - DNA, 73 bp, Homo sapiens
gattgcagccgagaacgagctcaaccaggcactactgcagtcttcagttaagcaacaagtagaagctattgaa

SEQ ID NO: 784646 - DNA, 100 bp, Homo sapiens
atccaattgcacctaccaaaaaaatcattgatcctcttccccccattgatcattcagagtacagaacctgctaaggccatcaaacctattgatcggaagt

SEQ ID NO: 784647 - DNA, 50 bp, Homo sapiens
cttccccattatttcgaggaaggaataacatccaggagatgagggctcgg

SEQ ID NO: 784648 - DNA, 98 bp, Homo sapiens
ccgcgaggagccgccgcgcgcccgcgccctccgcgcgacgccaggtaccagcctccgaacctcgccatctctaccctctactggaaggcctggcccct

SEQ ID NO: 784649 - DNA, 95 bp, Homo sapiens
tttgatatctggggccaagggacaatggtcaccgtctcttcagtgtttaactgctgaagagatcttttcccttcatggcttttcaaatgctaccc

SEQ ID NO: 784650 - DNA, 75 bp, Homo sapiens
cggggcggcggcggcggcggctgcggcccaatataggagttcatgatcaagtgttgcccacaccaaatgcttcat

SEQ ID NO: 784651 - DNA, 90 bp, Homo sapiens
gaaggcgcgagtgaggaaaggaggtactgtaggtccacctgggcttgcgaaggcacagattccccgtccacagctcacgaccagatgcac

SEQ ID NO: 784652 - DNA, 90 bp, Homo sapiens
tgctgatattgatattattacagcttcatatgcaccagaaggagatgaagaagctgctaacctgtgccaaacctccacggctgctacgac

SEQ ID NO: 784653 - DNA, 100 bp, Homo sapiens
gaaatgatccgggacctgtgccaggcagacaagttaagtgggcagaccaacatccacctcagcaaaaacttcttcctgacgaatcgcgccagggagcgct

SEQ ID NO: 784654 - DNA, 75 bp, Homo sapiens
gctggctgcggcagcaggggactagcgtgagaggaccatctgaatctgataatttttctcataacctgagaggag

SEQ ID NO: 784655 - DNA, 100 bp, Homo sapiens
aagcgaagttggcagcaggtctggtgtgctggtgtttggggcacgtccagcctctttggagaaaaagatcgttcagaagtttaccagaattaaaagatgc

SEQ ID NO: 784656 - DNA, 98 bp, Homo sapiens
ttttggtttccctggcaggggttgaactgtggagtgtgtggatctgactgcagccatgagcagcaatgagtgcttcaagtgtggacgatctggccact

SEQ ID NO: 784657 - DNA, 88 bp, Homo sapiens
gattacacacagcaagttcctgcttctgggacagctctactgacgtgatcctgccatgaagcagtttctgctgtacttggatgagtcc

SEQ ID NO: 784658 - DNA, 76 bp, Homo sapiens
tccggctccaagaaggttatctcctcagccaacagagctgtggttgaaactatggaggagtatatgttggcctacc

SEQ ID NO: 784659 - DNA, 100 bp, Homo sapiens
gaacatccgagggtgcctgggaatcggtcgcctggaggaccagtatttcccatggaggcttcccatcgacggtcagtgcgcacgttgtaatcagctgagg

SEQ ID NO: 784660 - DNA, 83 bp, Homo sapiens
ccggcagctgccggcggcgcggcgagagagcggctgacagaggggatgcgagaagtcaatgaaaggattctattttgcaaagc

SEQ ID NO: 784661 - DNA, 90 bp, Homo sapiens
tggaacccgaggaggaacctggcggtgctgccgtgagggaagtttatgaggaggctattgagggcacctacattgacaagaaatgcccct

SEQ ID NO: 784662 - DNA, 100 bp, Homo sapiens
gtgcctccagacactgctccctgtgaaattctgaagataagtctgccattcagtacagcgttcggagcagatacagagggttctcagtggataattggct

SEQ ID NO: 784663 - DNA, 100 bp, Homo sapiens
cgccattcttgattatcataatcaagttcggggcaaagtgttcccaccggcagcaaatatggaatatatggagtggaagctggacacactatgtgacttg

SEQ ID NO: 784664 - DNA, 100 bp, Homo sapiens
cgcatttcggatctggaaacctctagaacaagttatcacagaaactgcaaagaagatttcaactcctcctctgcctgtgagtttctggatattgtagagc

SEQ ID NO: 784665 - DNA, 101 bp, Homo sapiens
acattaaattcttccgttcagagtattaggtatggaaaatcgaggaccagggagagtaccttgccagcaattttgtagttatgattttcgatgaagagctg

SEQ ID NO: 784666 - DNA, 100 bp, Homo sapiens
aaaccccgcctcttacagtcacgagaggaatttgcccagagtgccatacgctatggacaagtcacaccactagaaattgatattctatatcagcttgcag

SEQ ID NO: 784667 - DNA, 82 bp, Homo sapiens
cgccggagagaatatcagcgacaggactacatggatgccatggctgagaagtgagaaagatcagtctaaagaaaaggagaag

SEQ ID NO: 784668 - DNA, 75 bp, Homo sapiens
aacgacctgtggaaacctgtgatccattctcattaaataaatctctggatatctcccggggccaattcagcatct

SEQ ID NO: 784669 - DNA, 82 bp, Homo sapiens
cgccgatgtccctgatccctggagcgacgacggccgctgcctaagctggaaaaatgtttctccatcccagagagatgaagta

SEQ ID NO: 784670 - DNA, 89 bp, Homo sapiens
cccgagcagacggagtacacggagcagcggccccggccccgccaacgctgccgccgggtcagaggtttcctatccccctcaagccccca

SEQ ID NO: 784671 - DNA, 125 bp, Homo sapiens
tgttagatatgcccccactgaggtcgggctccatgagatgcacatcaaatacatgggcagccacatccctgggaatgtgaagttttctgtaagaaccatcctgccccattctcaaaagtcattac

SEQ ID NO: 784672 - DNA, 75 bp, Homo sapiens
gagaaaaccatctccaaagccaaaggtcagcccaaggctgccccctcggtcactctgttcccgccctcctctgag

SEQ ID NO: 784673 - DNA, 82 bp, Homo sapiens
gggccggccgcccagacgctgcccgcgggcccggccacggcggagccaagcttgaaaactatttttctagtctgaaaaaccc

SEQ ID NO: 784674 - DNA, 100 bp, Homo sapiens
aggaccacgtcaagacttgtggcaagtgtcgagtcccttgcagattccacgccatcggctgcctcgagacggctgaccccgcactacatctacccaccag

SEQ ID NO: 784675 - DNA, 100 bp, Homo sapiens
ccacaacaacacattttgcagaggaaattgacaatggcccttcagctatgctaggtctataatgggaagtgtcacagttcggtatttctgttatgggtgc

SEQ ID NO: 784676 - DNA, 82 bp, Homo sapiens
ctcagcacatggtgggggccacaccatttgccgtggccaggctagaggtgagcgagtgctgtgctttcatgggcctcttctt

SEQ ID NO: 784677 - DNA, 74 bp, Homo sapiens
ggacgaggtcctgtacagcatcgccgagaaggccctggccaacgtcaacattgggagcctcatctgcaatgtag

SEQ ID NO: 784678 - DNA, 101 bp, Homo sapiens
gaggcagaggtggaggcgctttgaaaggacccagatgatgtggtaccagttggccaaagaagagcctggtgttggtgcatgtgctttggactagcatttat

SEQ ID NO: 784679 - DNA, 83 bp, Homo sapiens
cagagccacccagcgtgccaggcctcccagaccaggaagtggccatgcgcaagctggtgcgctcagtgactgtggttgaggac

SEQ ID NO: 784680 - DNA, 100 bp, Homo sapiens
aatttgctacttaaatcgtacttctctgaagaagccgtgggggaaaagaccccctctccagccctgggggccctggatctcggaggagcaattacaattt

SEQ ID NO: 784681 - DNA, 98 bp, Homo sapiens
ccccgcgggcggagactgggctccaccgaggaggctggaggcagtgggaagccgtgtccgccttttaagattgtgattctggatgaagcagattctat

SEQ ID NO: 784682 - DNA, 96 bp, Homo sapiens
atgtaagaaacagtgctttctgaaacaacaaagccaaacttccattggtcagtattatcagaaaatccacccagcttcaccattactgtgacgtct

SEQ ID NO: 784683 - DNA, 96 bp, Homo sapiens
acatctgggggccacaaatgctccttctcctggagacgcaactcaagcttaggtacagaaagcgtccgtttaattcagaaaatgcaaagaaagcac

SEQ ID NO: 784684 - DNA, 100 bp, Homo sapiens
cttccactgatatctcaaaaggtgatctggacaaaggaacaggtatctcagggttacacatcattttggaatgactgtatatcatctggattacgtggct

SEQ ID NO: 784685 - DNA, 75 bp, Homo sapiens
cgggagatggagcatttgagacaggtaatgagaggccctaagatcccagaggatgccataagaggaaaagtcagg

SEQ ID NO: 784686 - DNA, 100 bp, Homo sapiens
ggcggaggaggagacggcaggtcgggaggcaaaaccttcaactgaggacttgggggataagaaggaaggtgaatatattaaactcaaagtcattggacag

SEQ ID NO: 784687 - DNA, 100 bp, Homo sapiens
tgatgatcaaggtagacaatattactacagtgcagacggatctcggtcagaatgggaattgccaaaggatccaaactactggatacaggtgcatcgcttg

SEQ ID NO: 784688 - DNA, 80 bp, Homo sapiens
ctttgaaaatcaacgacaacttgagcacaggtactgtccaagaagctggaacattattatccagcaagaatgttcgtgtc

SEQ ID NO: 784689 - DNA, 74 bp, Homo sapiens
cccaacggggaggccaacgtgaagaaaccctgtattcagtggatcagctggcaccacccaaatagataaattgg

SEQ ID NO: 784690 - DNA, 75 bp, Homo sapiens
tgtcattcacaaccccctgaaagccttagcctgcgacgcttatgattagagccaacaatttgaaatggcctgctc

SEQ ID NO: 784691 - DNA, 101 bp, Homo sapiens
aggagccactgagatgaggaggcgtcgcgcgcgcctgtagctcgcgggcctcgcagcgcttctctgaagtagctttggaaagtagagaagaaaatccagtt

SEQ ID NO: 784692 - DNA, 75 bp, Homo sapiens
tcctgggtagctgggattacagatatctcttccaaacgcatgatgaaggaggtcttgtcaacagggcaaggcaat

SEQ ID NO: 784693 - DNA, 75 bp, Homo sapiens
cgaaatccagactctttttaagaggcttcgcgcagttccaaccaacaaggaagcccccaatgtgccttggaccag

SEQ ID NO: 784694 - DNA, 100 bp, Homo sapiens
ctccttctgctggccgtggcgggggtcgcggaggtggcagggggcctggctccgggcagtgcgggacacttcacggccatggtatggaagaacaccaaga

SEQ ID NO: 784695 - DNA, 100 bp, Homo sapiens
ttatgaccggctgagcccccatcattgggagaaatccccactcctccaagaaccaacccccaaattggctgggacaggggaaagctctggcaatttaaat

SEQ ID NO: 784696 - DNA, 73 bp, Homo sapiens
ggctacaaaggctccaccttccacagggtgatcccttccttcatgtgccaggaccatcagcacgtgcccatcg

SEQ ID NO: 784697 - DNA, 83 bp, Homo sapiens
atggtcatgagctttgtgaacctgggtttggtgcacctcgatttggaggaagtagggcagggcccttatctggaaagaagttt

SEQ ID NO: 784698 - DNA, 89 bp, Homo sapiens
attctgattcagcatcgacgaacccatactggttgatgaagatgaacccctgttcctcagcttaatcaatgacctgttcccaggactgc

SEQ ID NO: 784699 - DNA, 118 bp, Homo sapiens
gcaaccattgacgccatgtcgggttattcgagtgaccgagaccgcggccgggaccgaggaacatccagtcatggataaaaatgagctggttcagaaggccaaactggccgagcaggct

SEQ ID NO: 784700 - DNA, 50 bp, Homo sapiens
ctcttcatggaaatgcattgtcagcattagtgccagcagtagttcccaag

SEQ ID NO: 784701 - DNA, 74 bp, Homo sapiens
cggtgtggccacggacatccaggcactgaaggcagccttcgacgtcagctttatcctgtggataaacgcagagt

SEQ ID NO: 784702 - DNA, 82 bp, Homo sapiens
ttcgatgtatctaaacttggcaccaagtatgagaaattaatggacttacgaaatgaatacctgcaagcggatgaggctaata

SEQ ID NO: 784703 - DNA, 103 bp, Homo sapiens
gcaaaggggaggttacgcagcaaaccatccagaagatcatggaagggaagtggttgctgtgtatgttactggtgcttggaactgctattgttgaggctcatga

SEQ ID NO: 784704 - DNA, 75 bp, Homo sapiens
tgcccccttttcctggtgcatgtgaagttatcaaaaacagcctggagcattggtaagcgtcacactgccaaagtg

SEQ ID NO: 784705 - DNA, 95 bp, Homo sapiens
ctttcttgtcaactgctcacgacagaaggcgtctcatggcgttggaataccggctctcagcggctttcctgctcattttccacaaggccgcggca

SEQ ID NO: 784706 - DNA, 73 bp, Homo sapiens
tcagcctggccaggcaaaagcctttggccagggaggcagggctggcacaggtgtggacaatgtggatctggag

SEQ ID NO: 784707 - DNA, 100 bp, Homo sapiens
ggaagacggactcgtatcggtaccccaggacagcgtgtccctagagcgcttcccaagtcaaaatataaacaccgctcgttcccgcctttctaccacatgg

SEQ ID NO: 784708 - DNA, 50 bp, Homo sapiens
gcttcagtcccagtgcagggacctcaaggctggagtgcaatggcgcgttc

SEQ ID NO: 784709 - DNA, 75 bp, Homo sapiens
ccgcgactacagccactactacacgaccatccaggacctgcgggacaaggcaagcacgaggagcggcaggacgag

SEQ ID NO: 784710 - DNA, 75 bp, Homo sapiens
ttacatcatacttggacatatcaagcattggtgcacgatgtactgcgggacgaccctgggacagtctccactggg

SEQ ID NO: 784711 - DNA, 99 bp, Homo sapiens
agaaactgaagcgggacgttgaggcaaacacagagcagcccaagctgagtagagatgagcagcggggtcgaggcgccctcttacaggacatttgcaaag

SEQ ID NO: 784712 - DNA, 100 bp, Homo sapiens
taaacactgcattgtgttgctgcagattgccaaagtattgtcttctaagaactctgaagcaatgtcagacattgagggaagctctcattgctgcaggaaa

SEQ ID NO: 784713 - DNA, 51 bp, Homo sapiens
actaccaacgtttggaccagaaggtagcaaaccatgtgatttcttctgact

SEQ ID NO: 784714 - DNA, 50 bp, Homo sapiens
cagtcctgaaagctgcattcatgtgcagcctgggagctctattccacctt

SEQ ID NO: 784715 - DNA, 75 bp, Homo sapiens
atgccagcatcatctttggaatctctgccactgcagagccccgccatggaagacacgccgttggtgatatcgaag

SEQ ID NO: 784716 - DNA, 101 bp, Homo sapiens
gtggctgcgtcaccgccgcccccccagacaagatggacaccgcggaggaaggtatggcatttcaaatatagatacaaccattgaaggaacgtcagatgacc

SEQ ID NO: 784717 - DNA, 48 bp, Homo sapiens
tgaaggacttcccataggaaagatgtgtcgtggaggccgaatgtttgc

SEQ ID NO: 784718 - DNA, 50 bp, Homo sapiens
ccatgaggaaagaattctccgagaactcctgggacccttggacagagggg

SEQ ID NO: 784719 - DNA, 83 bp, Homo sapiens
gttcgtgctgctgggattcgcgctgctgggcacccacggagcctccggggctgtggacatcctcatcatggatgatgacgacg

SEQ ID NO: 784720 - DNA, 75 bp, Homo sapiens
caacgtggtagtagtggaagggggctctgcggttaccctcccttctatgacgagaatgatgccaaactctttgaa

SEQ ID NO: 784721 - DNA, 50 bp, Homo sapiens
caaacttgacactcaccctgaccgttaaagccttccatctgaagtatgat

SEQ ID NO: 784722 - DNA, 96 bp, Homo sapiens
aaaacagcaggcacccaagcgggcggcagaacaaaatccagtctcatagcagaggagaatataatgtttacagcaccttccagagccatgaaccag

SEQ ID NO: 784723 - DNA, 100 bp, Homo sapiens
caaactgagacacataatgttttctacgaggtcttgctggagttgctagaacaatgtgtggatggcttatggaaggcagaacgttatgaaataatttctg

SEQ ID NO: 784724 - DNA, 75 bp, Homo sapiens
cgaaccgcagtatcatgctggccaagaagatcatcattaaggacggaggcacgggaatgacagaggaagaggaag

SEQ ID NO: 784725 - DNA, 100 bp, Homo sapiens
ctggcagcctatgctcacattgtccctgtgtctagcagtttcagagaatcaggaaacccaggcccaacggcaggtggatgcaagaagaaatgttccccaa

SEQ ID NO: 784726 - DNA, 82 bp, Homo sapiens
gccgccgccgctgccgctgccgctgccgcacctccgtagctgactcggagcatcagatccatgctgctgctgactcggagcc

SEQ ID NO: 784727 - DNA, 75 bp, Homo sapiens
cgcgtccgccgattcctcctccttggtcgccgcgtccttggctggcgtgagcggttggttccccgaggcgtacgt

SEQ ID NO: 784728 - DNA, 74 bp, Homo sapiens
gtcactggtgtatgtcatggaagagctccttaataagcatttatagtcagtttttggcagcaatagaatcacta

SEQ ID NO: 784729 - DNA, 98 bp, Homo sapiens
ctgtgctcgcgctactctctctttctggcctggaggtacgacaagagggaggatgtgcagccggggacaggcatgctggcatacacacacatcctcat

SEQ ID NO: 784730 - DNA, 100 bp, Homo sapiens
aaaaattcaagaagttgaaaaacgcttttcacgtcacctggagagatgcacaggtgtgggcaataatagtgaaggtggaagaggaaaggcaggtgcaaag

SEQ ID NO: 784731 - DNA, 55 bp, Homo sapiens
gatatcgaggatacccagagcttaaaggtactccaaagattcaggtttactcacg

SEQ ID NO: 784732 - DNA, 74 bp, Homo sapiens
aggtcgttgatctggagtcccggaagaccacgtacacctcagtgactttctcattctccctgggtacatcgact

SEQ ID NO: 784733 - DNA, 83 bp, Homo sapiens
ctttcctgctggtggcaaccgcctacgagacactcaaggtgtccctggccagtgtccttccacctgtccacaagcatggggaa

SEQ ID NO: 784734 - DNA, 75 bp, Homo sapiens
tggcatgactaggatgcccaagagacgagttgtactgctgtcacaggaaatggacgctggattacaagcatggca

SEQ ID NO: 784735 - DNA, 100 bp, Homo sapiens
cgactccctagcagcagccgccgccagagaggcccgcccaccagttcgcccgtccccctgccccgttcacaattcaggatggctaaaggtgaccccaaga

SEQ ID NO: 784736 - DNA, 97 bp, Homo sapiens
gaggcacccgatatatgttctctaggccttttagaaaacatgctgccactgcagagccccgccatggaagacacgccgttggtgatatcgaagcaga

SEQ ID NO: 784737 - DNA, 75 bp, Homo sapiens
ccccaacccggtaaaatgtgggcgataattcctttcttacaagatcctggctctgcagagagaacagcccagaaa

SEQ ID NO: 784738 - DNA, 100 bp, Homo sapiens
gaaccagctgtgggagaaggcccagcgacaaattgtggctactaatttgccccctgaagatcaagatggctctggggatgactctgacaacttctccggc

SEQ ID NO: 784739 - DNA, 74 bp, Homo sapiens
cgatgtttcaatattggaagcgctttgatttacagcagctgcaggctggcgcccatgcggctctacacgctctc

SEQ ID NO: 784740 - DNA, 82 bp, Homo sapiens
gtgtaccagaattcggccatgagccgctacatactcatcatggggctcctgtacaaggcctccggtgtggctgtctctgatg

SEQ ID NO: 784741 - DNA, 106 bp, Homo sapiens
cagggcctgcagcgggagctggacggcgagcgcgagcggcgcgagaaagagcaggccgggctctcgccatgggtcactgtcgcctctgccacgggaagttttcctc

SEQ ID NO: 784742 - DNA, 100 bp, Homo sapiens
tggctcgaaaggcaagagcccagcatcggttttcaggtgagacagcagatactttgatgggtcttcgttactgtaaggagagaggagctttaactgtggg

SEQ ID NO: 784743 - DNA, 90 bp, Homo sapiens
cagaaatccatgcacaaagacctggctgccatcttggaagagaagaagcaaggagggcccgccattggcttcagggatgacttcttaggg

SEQ ID NO: 784744 - DNA, 76 bp, Homo sapiens
ctacagtagacaacagatttctcttttctggaaggttgggggccgtcccgctcctaaggcaggaagatggtggccg

SEQ ID NO: 784745 - DNA, 87 bp, Homo sapiens
gcagcaacgtgcggtgggaccacgagagcgactttgcctcccgggccaaactggcagttcaaaaactagtacagaaagttggatttt

SEQ ID NO: 784746 - DNA, 85 bp, Homo sapiens
aagccacgtgcagacatctacaaccttcgatctcctgacgaggccatcactgtgcatgtccccatgccctcagcaggagtcgtgg

SEQ ID NO: 784747 - DNA, 90 bp, Homo sapiens
ctcaagtaccagcagcaccaggagtccctctccgcccagttacaagacctccaatggaagtccgggcacatggcggagagcctcaccaac

SEQ ID NO: 784748 - DNA, 74 bp, Homo sapiens
attgccttattttttctcatggatgttcttcttcgagtatttgtagaaggttcctgtgccttaagaacattaga

SEQ ID NO: 784749 - DNA, 75 bp, Homo sapiens
gcgaagccttgaaaaagctgccctgagacggtgtcccgccgaaagcttggaactgcagttggctttttgctacca

SEQ ID NO: 784750 - DNA, 96 bp, Homo sapiens
catcttaggctgtgctgtgaactgtgaacagaagcaaggaaatttctcctcttctctccatggaggctatggcatttgttactgaagagaggaaac

SEQ ID NO: 784751 - DNA, 75 bp, Homo sapiens
gagcctgtcccaagccctggtgccaggtgtccatccccgtgctgaggatgccctggcccagccccagccctggtg

SEQ ID NO: 784752 - DNA, 75 bp, Homo sapiens
ccggcgtctgcgcttccccatggggctggcctgcggcgcctgggcgctctgagataacgaaggaggcccaacttc

SEQ ID NO: 784753 - DNA, 52 bp, Homo sapiens
cttttccttattcttctgatgtggatccagttggaggagagcagattagtgc

SEQ ID NO: 784754 - DNA, 50 bp, Homo sapiens
ggtcagtgatggagctgcttcagttcctgagggaagacctcaattaccat

SEQ ID NO: 784755 - DNA, 100 bp, Homo sapiens
cagcgagcgctggacggagaggaaagcggtggatctccttacgtagcagccaaaataaatgaagcaaaagacttgctagaaacaaccaccaaacattgat

SEQ ID NO: 784756 - DNA, 88 bp, Homo sapiens
cacccacgaatctgcccacccctcctgtaacccagcctgtttcacttcttgcataattgatatactgtggttactctacctatttgtg

SEQ ID NO: 784757 - DNA, 100 bp, Homo sapiens
agctgatgcaggtgaacgacactctgacttccgaagatgccggactccggaacagcaagaactgcaccgaaccagctcagcaaaacccagcagctcagat

SEQ ID NO: 784758 - DNA, 98 bp, Homo sapiens
gtttgctgctcttggtgttttagttacatccctttatcaagtggtagaaacctgtgggttcttgttgtggggcggtttccaaaggaacacagaattgg

SEQ ID NO: 784759 - DNA, 50 bp, Homo sapiens
gtggaggaaaacaacttcgagggcagacaaaatgatgcttcaacacccag

SEQ ID NO: 784760 - DNA, 98 bp, Homo sapiens
ggcgaaggaggcagaggcacttatgcttgtcaggtgctaaaatgatgtattttctggacaagtcaaggcaggagaaagcaattgctatagccactaga

SEQ ID NO: 784761 - DNA, 100 bp, Homo sapiens
tcagagagggctaccttgtgaagaaggttcgtcacaaggcatcgcagaaggtttatgctatgaagcttcttagtaagtttgaaatgataaaaagatcaga

SEQ ID NO: 784762 - DNA, 100 bp, Homo sapiens
atgagatccagtttgggcacctgcagcgacctacccactacaatacctcttgggactgggctcgatttgagggagcccacctacgatgcagaattccagc

SEQ ID NO: 784763 - DNA, 104 bp, Homo sapiens
ctgcttctccttttcatgagtgttcctgtggtctctgcacctcctttctggtctgaaaagccctcaagaaagcctcagtgatcttggtgccatagagagtctcc

SEQ ID NO: 784764 - DNA, 76 bp, Homo sapiens
tatgatttactggatgaactgataaaacccaccagtctagatttgtaagactccagggcctcccagccgtgaataa

SEQ ID NO: 784765 - DNA, 100 bp, Homo sapiens
tggtggtgacacctcccctcgctatgagagccaacagaatgggacgcctttgaaagtgaaaagatgtcatcgcaacagataaagaagacgttgccttcaa

SEQ ID NO: 784766 - DNA, 75 bp, Homo sapiens
ggagcccggagctggggcgacgaggcgattgcgggggcctgggctaggtgctggagaatctggtaaaagcaccat

SEQ ID NO: 784767 - DNA, 74 bp, Homo sapiens
gtgacccagaccctctcctttccctttgagaccgtgaagagaaagatgcagcaaagttctcatatagatgtggt

SEQ ID NO: 784768 - DNA, 75 bp, Homo sapiens
gcgcctatggcgaggtcggacgcgtcttctttcaggctgagggtatggacctgtctgccaatcaggacgaggaga

SEQ ID NO: 784769 - DNA, 101 bp, Homo sapiens
acaccagcatggactgctgcaccgttcaagtgctggattgtgtcatgtgaccatcccaaaactcagagcaccctatggccgtctttgccctctgtcacata

SEQ ID NO: 784770 - DNA, 98 bp, Homo sapiens
ccgcttgttctcgccgtccagagcaaggaacaggccgagcagtggctgaagagatgtaacctagaagtcaagcggtaaaacaagctttgcaactatgt

SEQ ID NO: 784771 - DNA, 83 bp, Homo sapiens
ctccatcaagcctcaggagctgctggccttcctggatgctctgcagaaccaggctgaggccagcagcaagatcatcggccagt

SEQ ID NO: 784772 - DNA, 100 bp, Homo sapiens
ggtaatgccatcggtggaaaagcaacgttcttggatgcctgggagccagagactgctgctactttgaaacgtacgatagaggccctgatggacagaggag

SEQ ID NO: 784773 - DNA, 75 bp, Homo sapiens
gccagctctgtccgctgcccacagcctagcagtcgggaccgtactgaggtttttggattcaaagcataaaaacca

SEQ ID NO: 784774 - DNA, 100 bp, Homo sapiens
ccggccatggcggacaacgagaaactggacaaccaacggctcaagaatttcaagaacaaaggccgcgacttggagaagttccacctggtgccaagcatca

SEQ ID NO: 784775 - DNA, 51 bp, Homo sapiens
gttgaaggtgactgtcagtggcaaaatcagctggaatgaactcctcattgc

SEQ ID NO: 784776 - DNA, 75 bp, Homo sapiens
cagaaccttccctgattacagaatcttggtttccagccagagacgacactcttccatggcccggatacattccat

SEQ ID NO: 784777 - DNA, 101 bp, Homo sapiens
aacccgcggtggagcgggacacgaacgtgccggcacagtcttcactaccgtagaagaccttggctccaagatactcctcacctgctccttgaatgacagcg

SEQ ID NO: 784778 - DNA, 82 bp, Homo sapiens
cgggtggcttacagacgctgccagcatcgccgccgccaggtcatcatcagatttgaaatatttaaagtggatacaaaactat

SEQ ID NO: 784779 - DNA, 100 bp, Homo sapiens
caactttctactcctaaatctacgaaatcctccagttcctctccaactagtccaggaagtttcagaggattaaagataagaattgctggcaacatatgca

SEQ ID NO: 784780 - DNA, 100 bp, Homo sapiens
aagatgtgggaacagagattgagacagcaatggtcacctctataggaatgcacctgtctctgctggatgaaccgaatcctaacagtccagccaatagcca

SEQ ID NO: 784781 - DNA, 82 bp, Homo sapiens
ccagcttccagttagtggatatagcacaccatccccagccagttgatggaaatcacaatcttctgacaaagctttctctgga

SEQ ID NO: 784782 - DNA, 75 bp, Homo sapiens
gtcactgtcctggtacaaggatgaggaggtgaccagcaatggcagcatcgggagggacccgccagcggagaccca

SEQ ID NO: 784783 - DNA, 83 bp, Homo sapiens
ccctgggccagcctatggagatgctccagaaggtcctgagcctcggccacatcagcaccgactacccgctggccgaaaccatc

SEQ ID NO: 784784 - DNA, 100 bp, Homo sapiens
cttcatctgtacctaatgcagacaatgccttcacattattttatgtgaaatttcgagctgctgcccccaaagtcagaagaccatcaagcttcagatgatc

SEQ ID NO: 784785 - DNA, 122 bp, Homo sapiens
agacgatctgcacttcgcattttggcattgacatttaattttagggtcctttatatagaagggagagtagggatgctgagaacttgctggagtcacagccactgggatcctttctcatcagg

SEQ ID NO: 784786 - DNA, 100 bp, Homo sapiens
ccagaaatgaacctgcccacggtgtccgcgctcagggtcggcttcttcaagcggaaccggccacccctggaagaagatgatgaagagggggagtgatggt

SEQ ID NO: 784787 - DNA, 75 bp, Homo sapiens
ggacccgcggtccccgctcttgctggttcgtgctggccgtgggcagcgccgtctttgatgccatgttcaacgggg

SEQ ID NO: 784788 - DNA, 51 bp, Homo sapiens
cgactcggtgctcgccctgtccggtgctggagaatctggtaaaagcaccat

SEQ ID NO: 784789 - DNA, 74 bp, Homo sapiens
gaccccgtcccgaccctggccgccccgagcggagcctggaggttcatcatgcctagtggcgtataagaagaccc

SEQ ID NO: 784790 - DNA, 75 bp, Homo sapiens
ctcgcttctgccgaggtgtccctgtgatgtcttggcattgcccattttcaagcaggaagattccagccttccatt

SEQ ID NO: 784791 - DNA, 134 bp, Homo sapiens
agctccaagatatggcagctaggcaacagcagcagattgaaaatcagcagcagatgttggttgccaaggatgaaaactttcggaagagaaagttgcctgtggtaagttcagttgttaaagtaaaaaaattcaat

SEQ ID NO: 784792 - DNA, 75 bp, Homo sapiens
gagcacaaactccacgaagccaacgcccaggaattgattatggattaagtttaccacttggagaagactatgaac

SEQ ID NO: 784793 - DNA, 51 bp, Homo sapiens
ctagaaggaagttcctggccattcaggtgctatacttggtagatcagaaac

SEQ ID NO: 784794 - DNA, 100 bp, Homo sapiens
ttgtctttctcagcaccttggcgaagccttgggtttctttcttaaaggactgatttttagaactccacatttgagagtgcctggtgaagaatgtgatggg

SEQ ID NO: 784795 - DNA, 49 bp, Homo sapiens
tgtcactccaacctcttttcgctggagccatgtctgaccaggacgtttg

SEQ ID NO: 784796 - DNA, 50 bp, Homo sapiens
cacataccaaattggatctatccaggttgtccttctattcaggccactct

SEQ ID NO: 784797 - DNA, 82 bp, Homo sapiens
tctttgagtttcggagaggagtaaagaggtgttgacttcaaaatcaaaactgtagagctaagaggaaagaaaattagattac

SEQ ID NO: 784798 - DNA, 51 bp, Homo sapiens
ccgccaaagaccccgtccggtagtactatactggcaattgctggagaagat

SEQ ID NO: 784799 - DNA, 74 bp, Homo sapiens
cgcccttcctcggcgggccggactgctatcaagcccagagagagacgtggagagggacgtcttcctgtatagag

SEQ ID NO: 784800 - DNA, 100 bp, Homo sapiens
atctccctatcaatgtatttaagggaacggcctttaagagctggaagatgaaagctccgattccacacttgattctcttatacgctacttttactcagag

SEQ ID NO: 784801 - DNA, 100 bp, Homo sapiens
taagaggcatacaccacttagtaaactaatgaaagcctattgtgaacgacagaatgtgtgctttatcacaccccagtttttatatcagttctactgtttg

SEQ ID NO: 784802 - DNA, 50 bp, Homo sapiens
tggcagtgctcaaactcaccgaccaggaaattgaacttagctcattaagg

SEQ ID NO: 784803 - DNA, 100 bp, Homo sapiens
ctgcaaggacaagtccgatgagaagccatcctactgcagatgaccattctgccccccttggagaaactgcggctgctgctggagaagctgagcaggttcc

SEQ ID NO: 784804 - DNA, 82 bp, Homo sapiens
agccggcgggtacctgcggccaattcggtggaacgaggacgcggactgcgaaggcaggaagccatcttcgacaagagcacag

SEQ ID NO: 784805 - DNA, 90 bp, Homo sapiens
agattagaagtttgacatcttctaaaactgctactattggcagtaggtttaagcaaggtgtttaatgaacgctgccgaattcacttcaag

SEQ ID NO: 784806 - DNA, 100 bp, Homo sapiens
tttaagagaagctcaaggccgaagccgagcagaggatctaaatacaagagtggcctattggaacacgtggccatcagtaatcatgagcaacccattcgca

SEQ ID NO: 784807 - DNA, 83 bp, Homo sapiens
catcgagaaatggccgcgtcggcagagggaggaagaaggagacttcagagaaagaggccgtgtgatggaagcaaaatcagaga

SEQ ID NO: 784808 - DNA, 100 bp, Homo sapiens
ttccagagagcaatatggctggttccccaacatgcctcaccctcatctatatcctttggcagctcacaggtaaacttatgagtgctttgctgagtggcct

SEQ ID NO: 784809 - DNA, 98 bp, Homo sapiens
aaagacagtgttctgctttcatggagttcacagaagagtcgaggagttcttgccagtagtctcagtccatttcgtgaaggaagatttatagagaggag

SEQ ID NO: 784810 - DNA, 100 bp, Homo sapiens
actttaaagtccgcttctttgtgttaaccaaagccagcctggcatactttgaagatcgtcatggggtcctggatgcctcatcccttagtttcaacaccag

SEQ ID NO: 784811 - DNA, 74 bp, Homo sapiens
ctcatggggaaaatctccccggtgactttcagtgatattctaatggagttcctgctcaatgtcaccacagcacc

SEQ ID NO: 784812 - DNA, 100 bp, Homo sapiens
ggataggagaaggatgtggactgcagtgctgcagtgccaggagctgtggagtccaagtgtgactgccaagaggaatccagcaaagccaaaaagcccaagc

SEQ ID NO: 784813 - DNA, 100 bp, Homo sapiens
cacggagcggccgggcgggacaggaccatggccaacctggagcgcaccttcatcgccatcaagccggacggcgtgcagcgcggcctggtgggcgagatca

SEQ ID NO: 784814 - DNA, 100 bp, Homo sapiens
aaggctaatcttcagcaagctattgtcacacctttgaaaccagcctgccagttttctccattcaagatagtccctttggagatgcgcccctgggtcgaag

SEQ ID NO: 784815 - DNA, 49 bp, Homo sapiens
gggaacgcagctgaaagcgtgaactgtaacctaaaggcagacccagaag

SEQ ID NO: 784816 - DNA, 75 bp, Homo sapiens
atttagcctcagtacaacatgtgaaaaatctgttacttgatgaacttcagaaggcacctgaatggacagaagagg

SEQ ID NO: 784817 - DNA, 89 bp, Homo sapiens
gtttcaacatgcgcaaaatcaccaaagggaatgtgactatcaaggacttcattcacctctcagccacccatccctgcagtcctccctaa

SEQ ID NO: 784818 - DNA, 106 bp, Homo sapiens
ccggccagaaggtggctctgaagaaggtgctgatggaaaacgagaaggaggggctgtcggaaaaggtaacagaagatggaactcgaaatcccaatgaaaaacctac

SEQ ID NO: 784819 - DNA, 100 bp, Homo sapiens
gtgcggcggtcagtggccagggcagcctcggagagaagccaaggcatgcgtggtgcacggctctgacctgaaggacatgacatcggagcagctcgatgag

SEQ ID NO: 784820 - DNA, 74 bp, Homo sapiens
gcaggaccaagggaagtgtcttcacaaagatgagttaccagatgtatgctactcatggtgggtcctggcttccc

SEQ ID NO: 784821 - DNA, 98 bp, Homo sapiens
gcacaatgaactgctagacctcccagatactatagggcacacgtgtttcacgttgacaggtttgcttgggacgctagtaaccatgggcttgctgactt

SEQ ID NO: 784822 - DNA, 83 bp, Homo sapiens
gtctggtggctccgcggattataacagtacctttgtgttggatgaatttaagcgcaagtactccaatgaggacacactctctg

SEQ ID NO: 784823 - DNA, 80 bp, Homo sapiens
tcaagttctttcctgccagtgccgacaggacgtccatctcaggttttgcgcacagctgcttccagtatgccatccagaag

SEQ ID NO: 784824 - DNA, 50 bp, Homo sapiens
cgcacgagcaccagcctagagccagttccagggtctccctccactgctgt

SEQ ID NO: 784825 - DNA, 100 bp, Homo sapiens
cgaacgcttcgctggccatttaggagctctgctcaaagccagacggcatcaagcatgatggaaccatgtgtgatacctgccgccagcaaccaatcattgg

SEQ ID NO: 784826 - DNA, 75 bp, Homo sapiens
gcgccggcgagaagcggccgagccagcagcaggacttccttcgctgggcatctggctgggattcttgttggacta

SEQ ID NO: 784827 - DNA, 83 bp, Homo sapiens
caccttacacccaatagaaattgctcgacaactcactttacttgaatcagatctataccggatgaccagtgtcccagtgaagg

SEQ ID NO: 784828 - DNA, 83 bp, Homo sapiens
ggatgcagtggaggccatcaggggccttgataacacagagtttcaaggttgattcttcaccacactgaaaccattaggaaaaa

SEQ ID NO: 784829 - DNA, 100 bp, Homo sapiens
caagaactttgctgctctacttgaggaacatgacatttttgttccagaggatgatgatgatgatgactaacagaaattcggaactatccgggcagatttg

SEQ ID NO: 784830 - DNA, 82 bp, Homo sapiens
gcctgagcctccgggacgagggtcgggaaacacccgccgggcagcagaggtctggatggatgaatacaaaaatttctattat

SEQ ID NO: 784831 - DNA, 75 bp, Homo sapiens
aaaatttcgatattgaagtgtcaaaatccatagatggaaaagatggttttcctttggaatatggataaatacacc

SEQ ID NO: 784832 - DNA, 100 bp, Homo sapiens
cagttactccacggaaagcagcttcagcagcactccagagaggcgtttccatcaaccagttttgcaaggagttcaatgagaggacaaaggacatcaagga

SEQ ID NO: 784833 - DNA, 83 bp, Homo sapiens
ccgggttgctcgctgcggacgccattttcttctgcacttctgtctggagaggttacaggaggttccagtggcatcgggaagtg

SEQ ID NO: 784834 - DNA, 71 bp, Homo sapiens
tatgtactgtgtcagccatcatgtgtgtcagcatgagagatcgccacatcacagaatcgtatctatctcac

SEQ ID NO: 784835 - DNA, 100 bp, Homo sapiens
atggagaccagtctcacaaatctcatatgcagtccattattgacaagaatggtaccaaaccaccactggatgcagatgtaaatttggaagcaattgctgg

SEQ ID NO: 784836 - DNA, 98 bp, Homo sapiens
ggcgcatcgtgttcgaggcggagaccgagggggagccccgcgcgcggcgtcggggcccagatcattgatctgatgatgctggtcatcgatgtgaccaa

SEQ ID NO: 784837 - DNA, 100 bp, Homo sapiens
ttgatggcacatacgaaacccaggacagagcgggatgccaccagcttgtccaaagggaagttccaggagctcctggtgggcatcgttgtggagaatgacg

SEQ ID NO: 784838 - DNA, 75 bp, Homo sapiens
aaccaacgaggtggccgaatcttccttcaggatatcaagtgttctggacttggtgcctctttctgttatatgctt

SEQ ID NO: 784839 - DNA, 100 bp, Homo sapiens
cacacttcgcggcttcttcatgctttttcttctcaccatttctggccaaaactacaaacaagacttcgcaggagaactacgatgacccgcacaaaacccc

SEQ ID NO: 784840 - DNA, 75 bp, Homo sapiens
cgtcgacatgagtgatgtggaggaaaacaacttcgagggcagaaggaccattcttagtggcactggggaaatctt

SEQ ID NO: 784841 - DNA, 100 bp, Homo sapiens
cccgggattggaccgacgcagccatgcataccctcggggaagtctgggtacagaagacatctgaaatgaatacagataaacagtatttttgtcgtactca

SEQ ID NO: 784842 - DNA, 100 bp, Homo sapiens
cctctgtgctcgtgagtgcatggggtataagtatctccagatgaaatggccactgcttgatgtccaggcagggagcctccagagtagacaagccctcaag

SEQ ID NO: 784843 - DNA, 75 bp, Homo sapiens
cacaccctcgtattctcctgcccttccccaggttgtgaccgagattcccgacgagagagactgaggggaagagag

SEQ ID NO: 784844 - DNA, 100 bp, Homo sapiens
tcccagctggagcaagggaccgagctatgggtggctgagagaggaaccacccagggctgccatccagatgaggctgccagccttgagagcaccaccgtta

SEQ ID NO: 784845 - DNA, 98 bp, Homo sapiens
tgagtacctgaaccggcacctgcacacctggatccaggataacggaggctggctcctcacagccagtgaccttgcagccagtgacctcaaaggatttc

SEQ ID NO: 784846 - DNA, 100 bp, Homo sapiens
tctggcgcgctgggacctgcacaggccggagagagccgtaggcaggaccccgggacaccctggaagccaggaaatgaactggtcatgctgctggagtggt

SEQ ID NO: 784847 - DNA, 95 bp, Homo sapiens
tcgctggcagccgctgtacttggttatcaatactctggctgaccatcatcatcgtgggactgactttggtggaagtccttggttacatgtcatta

SEQ ID NO: 784848 - DNA, 113 bp, Homo sapiens
gtctgtgcagtggcacctgcgcgaagctggccaaagcctgcccagacggctcacctgtgcgggatggaacaaaagccacttctgccccaccaacgttgggccaaccaaaagga

SEQ ID NO: 784849 - DNA, 100 bp, Homo sapiens
gggactttgcgaaaggatcgcggggcccggagagcaagtgcagccgcggagccctgtacacaggcttttccatcctggtgactctgctcctcgctggcca

SEQ ID NO: 784850 - DNA, 75 bp, Homo sapiens
gaggaactggcccggaaacaggaggacattggtttatcttggaagctaaagggcattgctcatcctgaagatcag

SEQ ID NO: 784851 - DNA, 90 bp, Homo sapiens
gtgaagagaggcgtctacaagagcgattgctacacatggacagtgatgatgaaattcctatcagagaagagagtgagagtgtgctgacgc

SEQ ID NO: 784852 - DNA, 98 bp, Homo sapiens
gcttcatctgcgatggacagaataactgtcaagacaacagtgatgaggaaagctgtgaaagttctcaagccctgaaacatgtatctgatgacatgaag

SEQ ID NO: 784853 - DNA, 83 bp, Homo sapiens
ttcagaaggatatcgacgtcgtgatccagaagtccagagctgaggactgcctgtttgcagttggagcttagtgataatataat

SEQ ID NO: 784854 - DNA, 100 bp, Homo sapiens
gaggagggggaccttgaagacgacttcgaccctgcccagcacgaccagctcatgcagcatcaagctgtccagtcccgtgaaacgcccacggaaggagccc

SEQ ID NO: 784855 - DNA, 100 bp, Homo sapiens
agtcgcttcgccgactactttgtcatctgcggactggacacggagaccgggctggagccggacgagctgtcggatgggactgagtatgggctgagtgaag

SEQ ID NO: 784856 - DNA, 82 bp, Homo sapiens
caagtttgcagatcgggagcgcaaggtcgccctcaaggccatgatcaaaacgctagagcaggctgacctcattctggccatg

SEQ ID NO: 784857 - DNA, 90 bp, Homo sapiens
taaactgaagaagacacctactgaggctaggtggagcacagtgaaagaattcaagatgccacctaatataaactggaaagaaataatgaa

SEQ ID NO: 784858 - DNA, 98 bp, Homo sapiens
cacagttcctgggaaggtggagccaccagcctctccctgcaatgggtagaaggcctgagatcaatcatacacaacttcagggccaacaacgtcagtcc

SEQ ID NO: 784859 - DNA, 51 bp, Homo sapiens
tgacaacaccgttcccccagccgggctggcaagtgaaccggagcaaacgac

SEQ ID NO: 784860 - DNA, 100 bp, Homo sapiens
gataaactcaacatcgacagcattatccaacggctgctggaagagttacactgttagaccttatgatagccaagataacgagtgatgagccactcaccaa

SEQ ID NO: 784861 - DNA, 94 bp, Homo sapiens
tgagattgacgcggtgaactctgtccagttttcaaaccacacaggtgagaagccctaccactgcaactgggacggctgcggctggaagtttgcg

SEQ ID NO: 784862 - DNA, 100 bp, Homo sapiens
gggagctagtggaagttactgccgcgccaccgagtccggaccggagactttggggcctaactagcatgcaatgatgctacctgttctgacccatcatatc

SEQ ID NO: 784863 - DNA, 75 bp, Homo sapiens
cgccttgctggcctacgtcgcctgacaagattagatgcaccccggttggaaacaaagtccctgagcagctccgtg

SEQ ID NO: 784864 - DNA, 100 bp, Homo sapiens
caaatggatggattaatccctggggtagaaccacgtgaaatggcagctatgtgtcttggattggctcacaggcagtctgggctcttggcaacattgctgg

SEQ ID NO: 784865 - DNA, 100 bp, Homo sapiens
caaattcgtcaagatgcagtaaaagtccaagcagctcagtctgaggctaaggttgtatctcagtatcatgagctggtggtccaagctcgggatgacttta

SEQ ID NO: 784866 - DNA, 99 bp, Homo sapiens
gctaaacagctgaaagaacagcagatggtaatgaggggccaccgagatacctctatggttcatgagcttaatagggatgatccaccaacacattctcag

SEQ ID NO: 784867 - DNA, 100 bp, Homo sapiens
agaaggacctgctgcacttcaggggaaatttcataccataattgagttcccacttgaaagtggccttgttcccagtgtaccagatgacctggatggcatc

SEQ ID NO: 784868 - DNA, 100 bp, Homo sapiens
atgtttggagtttaggctacagagcattcaggtgatggggaagataaccgtccaggaatgagaggaggccatcagatggttattgatgttcaaacaggtg

SEQ ID NO: 784869 - DNA, 100 bp, Homo sapiens
ccccttgctttggatcttggttgtggaagaggttacattgcacaatatttgaataaggctgagtcatcactagagagtgggaagggcagcagcagcagag

SEQ ID NO: 784870 - DNA, 74 bp, Homo sapiens
gcaagcctaactcaagccattggcacacaggtggagccttacaaagtaaacctctctcaagatttagagcatca

SEQ ID NO: 784871 - DNA, 100 bp, Homo sapiens
cttcctcatgtggtggaaggggtggctattatcatggaaaactaatttttcccagagaatttcctttcaaacctcccagtatctatatgatcactcccaa

SEQ ID NO: 784872 - DNA, 100 bp, Homo sapiens
gtggcagcctgctcgtcacttgcctcccgggagtcgctgtggcaaaaggttttggggccttgtcacagatgccagatgatttgcatcgaccagcaaactg

SEQ ID NO: 784873 - DNA, 122 bp, Homo sapiens
ggccactccgaaccagaccgcctgtaatgcagagtcaccagtggccctggaggaggccaagtggtttgagtccagccaatgacactggagccaaaaagaagaaaaagaaacaaaaaaagaag

SEQ ID NO: 784874 - DNA, 83 bp, Homo sapiens
cgatctcctcgtctcccgctccgccctcccttttccctggtttggtgcacctcgatttggaggaagtagggcagggcccttat

SEQ ID NO: 784875 - DNA, 100 bp, Homo sapiens
cccggtgcactttgtcttccatgacaccaagttggatgccatgctggaggagttcaagaaggcgggtattcccctacatctcagccatggtgaacaacgg

SEQ ID NO: 784876 - DNA, 75 bp, Homo sapiens
caaatcgcgcaaaggggatgtcctgcacatgcactacacgtgcacgatctgattttctggagagatgtgaagaag

SEQ ID NO: 784877 - DNA, 100 bp, Homo sapiens
agccgaagatggtggcggctactcctcctgtttcactgttacatgccttgaagtgatgaggaggtttctgttactatatgctacacagcagggacaggca

SEQ ID NO: 784878 - DNA, 106 bp, Homo sapiens
gccaggggcccgagggcggggaccggcggcgctggaggagcgaggcagctgtactaggactgggaacgggtgtcagctgtgatgcatgtttaaaaggaaattttcg

SEQ ID NO: 784879 - DNA, 83 bp, Homo sapiens
gttgcgattattgaccagtggatctgcgcacacgccagtgtcaacagcatctccaccctggagcctgtgagccggtgccagcg

SEQ ID NO: 784880 - DNA, 100 bp, Homo sapiens
gcagcgcagaggacgcagtcaaagagaaactgctgtggaacgtgaagaaggaggagagtagttatcttgatggaattagaagttttgaagtcagctgaag

SEQ ID NO: 784881 - DNA, 84 bp, Homo sapiens
cgtccctcccgctggtcaccactccggcaccagacaatgcagatcttcgtgaagactctgactggtaagaccatcaccctcgag

SEQ ID NO: 784882 - DNA, 51 bp, Homo sapiens
cttggagaactatcaaaagttcttaggattactacagcatcccatttccca

SEQ ID NO: 784883 - DNA, 83 bp, Homo sapiens
gacgcggtgggccgcccctccgggcctgctttcttccccgggcgatgtgcagagatctttgccaggggtcaaagcgtcgggaa

SEQ ID NO: 784884 - DNA, 51 bp, Homo sapiens
tccatgtggatggcctttgcaattgcgggccaatccgagcctacatccttg

SEQ ID NO: 784885 - DNA, 100 bp, Homo sapiens
cagccggaccgtcacccgctatcctgccaactctatcgtggtcgtaggaggctgtcctgtctgcagaaacgcttcgttaagggactcaggcagtacggga

SEQ ID NO: 784886 - DNA, 104 bp, Homo sapiens
ttcggtggactccttcggcagtccacccaccgccgccgcctcccaggcccagctgagagccagcctggaggttacccagcagcaggccacccaggccgaaggcc

SEQ ID NO: 784887 - DNA, 101 bp, Homo sapiens
tggtctacatcctgcgggtgcctttgaaaatcaacgacaacttgagcacaggaactgtggaaggtgcatcagtgaagaaatggaccaatgtgtataatcat

SEQ ID NO: 784888 - DNA, 75 bp, Homo sapiens
tggtcttacattgctgcatcaagaaacccaagctgctgagggcttggagaagatctctgcctacatgaagtccag

SEQ ID NO: 784889 - DNA, 98 bp, Homo sapiens
ttcacccaacataactttcaagagaacctcaagaaggcatgaagccagcccctgcagtgccgtccacccgcccctctgggcctgcctgtggctctgtt

SEQ ID NO: 784890 - DNA, 80 bp, Homo sapiens
cccaggagcaacagcagcagatggccggggcagcagtatcgctcatttgaactggccaaaaatagggaccctgagaagga

SEQ ID NO: 784891 - DNA, 87 bp, Homo sapiens
tacaatcaagctaaggagaaactgcagcgagctgcaattgcccagaaaaagggttctggaaggccagctgtcctccttcttgcacaa

SEQ ID NO: 784892 - DNA, 80 bp, Homo sapiens
agctgtgcagccgcgaggaggcgcgggaggtgttcgagaacgaccccgagacggttctggaggacacgtgccggcggcag

SEQ ID NO: 784893 - DNA, 75 bp, Homo sapiens
ctcagttggaagcagccgatccagcctgcggagcctgtggggcaggaccagtcctgcctctgttgtagaagacat

SEQ ID NO: 784894 - DNA, 96 bp, Homo sapiens
gtcacttgctgggattcacacacggcacggaggcagagtggcagcagccagccatacgtcgtgtgccggcagtgtcctgagtacagaaggcaggcg

SEQ ID NO: 784895 - DNA, 90 bp, Homo sapiens
ccgctgtgctatatcacaagatgaacaatgagaagcaggcagaagattgcatcacacgccacagacccctttgcttctgtttttgggaat

SEQ ID NO: 784896 - DNA, 100 bp, Homo sapiens
tcccggagaccatgaccaagagcaaagatggcttcctagggttacagaatgtctgaaggggacagtgtgggagaatccgtccatgggaaaccttcggtgg

SEQ ID NO: 784897 - DNA, 90 bp, Homo sapiens
cacagcaaccagcaccagatgaaggagcattcctcttgggctgccagctgttggtatatccaggagcttttaatctgaccactggaccag

SEQ ID NO: 784898 - DNA, 51 bp, Homo sapiens
gcaaccatgcagctattaaccagtgtcagttcaattttgtggggaaattgc

SEQ ID NO: 784899 - DNA, 97 bp, Homo sapiens
ctgatcttgtacttggattcagcaaggaaccttccgaatttcgctaaggagtttgtgatcagtgatcggaaggagctggaggaagatttcatcaaga

SEQ ID NO: 784900 - DNA, 100 bp, Homo sapiens
tgctggccatgagataatcgtgcagtattttctgaatcacgttatcaatagtctggctgtctatcgtcatcgtgagactgactttggtgtaggagttcga

SEQ ID NO: 784901 - DNA, 83 bp, Homo sapiens
ttgctggtgcatgcgtcgtcggcctctgggcagcaggaacttggctgtgttgtcctgcctcagagacaaattcatctattgta

SEQ ID NO: 784902 - DNA, 75 bp, Homo sapiens
ggactgctcacgttcatcatggtgcctggctgccaggcagaaacaaaaccatgggcagtgtatgctgggctgtta

SEQ ID NO: 784903 - DNA, 147 bp, Homo sapiens
ctgattcctgccttgtcttctccactgttcctggaggaatccgagaagagcagagcggagggagccccagacacgctgtgagccgtgagctttgaggcggtgggatgtgtcagcagaatgtctcctgcccccgagagcgaccccgag

SEQ ID NO: 784904 - DNA, 100 bp, Homo sapiens
agagctagttcctctccagctcagccgcgtagtcctgtgcctcctgattgctgagtgttcacctggaccttctgactaccttccctgtgctattccatca

SEQ ID NO: 784905 - DNA, 98 bp, Homo sapiens
ttgttacaagttggcttatgagtggaacatggctagcaggaatgcttactgttgcgtggttcgttattaacagatctccagtctatgtgctgaagaag

SEQ ID NO: 784906 - DNA, 100 bp, Homo sapiens
ctcgtttgtgtagtttctcctgaactgctcttggtctccatgaaggctactggcaggagcacatgagagaggtgccagagtgggtcatcgctccttgatg

SEQ ID NO: 784907 - DNA, 82 bp, Homo sapiens
acatcacaatcccattattcagagcgcgtatggagtggaaacgcttgtagggcttcaccagatgagttttgatcatcctgag

SEQ ID NO: 784908 - DNA, 100 bp, Homo sapiens
gggctcgagtctacctggatgaaaactacaaatcccaggagcacttcacgacatccacgacagcgatggcagttccagcagcagccaccagagcctcaag

SEQ ID NO: 784909 - DNA, 87 bp, Homo sapiens
ggaaatcagccctggacctggcagatccttcagcaaaagctgtccttacaggtgatgatgaacagtctacacagatggctgcaagtt

SEQ ID NO: 784910 - DNA, 100 bp, Homo sapiens
cgtcgccgtctgggccgcgctggccgtcggactggagctctgggctgcggcgcacgccttgcccgcccagattttgcaagaacgaggctcaaggatgtga

SEQ ID NO: 784911 - DNA, 82 bp, Homo sapiens
gcaccagtaaaatatggtgaactcattgtcttagggtgtaccttcagttgaatttttagaatctcccattacggcagtagac

SEQ ID NO: 784912 - DNA, 106 bp, Homo sapiens
aatttgcacatccttcgaaaagctgccaagttgaaaatggacgagtaatcgcctgctttgattcattgaaagtaagaatgattgatgttggctgatattggagtgc

SEQ ID NO: 784913 - DNA, 100 bp, Homo sapiens
gccaagaaaggcagcgaggtggagagcggatcaactcactatcctgaaggtccattctcccaagaagaggggacagaaagacagatctatttgtaagaaa

SEQ ID NO: 784914 - DNA, 110 bp, Homo sapiens
agctgcgggagagccgggtaccggccgtggaagcggccaccgactactgtcagcagctgtgccaggtgacctaccagttgaagattccgtgtactgctttatgcactgtt

SEQ ID NO: 784915 - DNA, 105 bp, Homo sapiens
aagtcagttccttgtggagccggagctgggcgcggattcgccgaggcaccgaggcactcagaggaggaagctcttcgtgggcggtcttgactggagcacgaccca

SEQ ID NO: 784916 - DNA, 104 bp, Homo sapiens
cccatggacacattcactgtggcaagtgtcctacacctggggctggcgactgtgcactggagtgacctggccggtgcctggccagccctacctgctctcattgc

SEQ ID NO: 784917 - DNA, 100 bp, Homo sapiens
atcagcatcactgaaaacgtgctgcatttcaaaggctgatgagccctgaaaacacactcctgcagcccagggaggaggaaggggtcaagtatgagcgcac

SEQ ID NO: 784918 - DNA, 74 bp, Homo sapiens
ctggggccagggaaccctggtcaccgtctcctcaggagtgcctgtgaagaaaacggggtattgccctgaggctt

SEQ ID NO: 784919 - DNA, 75 bp, Homo sapiens
tcctggtcctggccatgtggaagagatcctgatcaaggtgcaggtgtatgtgagcggggagctggtgcccctggc

SEQ ID NO: 784920 - DNA, 80 bp, Homo sapiens
cctgtccaccgagcagatgctgtcgtccgaggccgtggccgtggctttatcctgtggataaacgcagagtgaacgagttt

SEQ ID NO: 784921 - DNA, 75 bp, Homo sapiens
agcggcctcagggttcaggcaatgcaaataagtacttggaccatgagactgtttcagccactttcatcgacagca

SEQ ID NO: 784922 - DNA, 83 bp, Homo sapiens
cgggctccgggaaaactacactggccagcggaatggccaaagactatgacgggtcttcctagcacatcagggacaactgccag

SEQ ID NO: 784923 - DNA, 90 bp, Homo sapiens
caagcggtttgggaccttgaacaaggcaaatatggttttgtgtgcccaagcacgtgtgggaagcgggcgtgcaccgagaacaatgagtgc

SEQ ID NO: 784924 - DNA, 82 bp, Homo sapiens
tgttgtcctgtgctggggctgacagaagtttgcctgcaatggtactgtaattgagcatccggaatatggagaagtaattcag

SEQ ID NO: 784925 - DNA, 100 bp, Homo sapiens
cattttgcagttgttgaaattgtccccgcagttttcaatcatgctccctcgtgaaagatgcttctgttcctctgattgatgttacaaacctccctactcc

SEQ ID NO: 784926 - DNA, 100 bp, Homo sapiens
tctatcataagtcgccaaaaacaaatggggcaggaaattgggaatgaattggatgaacaaaatggctttcttgatcatggatggtgaagatataccagat

SEQ ID NO: 784927 - DNA, 83 bp, Homo sapiens
tgcaagattccattcacgttgtcatcaatggcttctttcctggaatcagtgtgaaatcacccgaggaggcagagagagtgaag

SEQ ID NO: 784928 - DNA, 100 bp, Homo sapiens
ttggcggtccctgtgacctgtggagacacggccagatctgccctccagtagacgttacatccaagaggaaataatccaggcaaggaagcacaagctgatc

SEQ ID NO: 784929 - DNA, 75 bp, Homo sapiens
cgtgcccggccccgcgtcgtctggcgccgccgccgccagcgcggacctcagcagccatgtcgaagccccatagtg

SEQ ID NO: 784930 - DNA, 96 bp, Homo sapiens
ttgggacccttgcatggtgtttcaaagggtggtgaagaactaagattctgtttctggcgtctgcatacgcaagtccccaactcgctgaggagagct

SEQ ID NO: 784931 - DNA, 97 bp, Homo sapiens
gagctgctccacatcaccgacatgaagggaacaggcatcatggactgtgcgcccaagtattaagggacatcagcgagagaggcagggatcttgagca

SEQ ID NO: 784932 - DNA, 82 bp, Homo sapiens
attccctgcggtgtgcaagtccgactggaacagatgccatggacaatattaccaggcagaaccaattctacgatacccaagt

SEQ ID NO: 784933 - DNA, 73 bp, Homo sapiens
atgctgaattatgccaaaaccaggatgccttctacaggggggaaaagcttgtgaacctgaaggagctggctga

SEQ ID NO: 784934 - DNA, 95 bp, Homo sapiens
gtacaagatgtgttactatcgctttggacaggtttacacagaagccaccttatatgacttggctgtccttaaaaaaaaggttaaggaaaaagagg

SEQ ID NO: 784935 - DNA, 90 bp, Homo sapiens
gctgcggcgtgtgcgcgcccgccagctgctccggagatacggtccctggatggccggttgcaggtgtcccatcggaaggggctccctcat

SEQ ID NO: 784936 - DNA, 90 bp, Homo sapiens
ccatttgccgtggccaggctagagcacccccccaggcagcagcagcagttttcatctctggatgacaagccccagttcccaggggcctcg

SEQ ID NO: 784937 - DNA, 75 bp, Homo sapiens
actccctgcaaagaaacaagagtgcttatcccagctaagctccagggattaaggctgctgtcccaagcatcaaat

SEQ ID NO: 784938 - DNA, 83 bp, Homo sapiens
ttctcttcattgccttcaactttggacctgtcaggactggccagacaccaatcggctgctgggcagtgccaatgtggtgcccg

SEQ ID NO: 784939 - DNA, 82 bp, Homo sapiens
agagagtctccgggtccctggaaagaaatggtgtcaacctccaacaacaaagatggacaagccttaggtacgacatcagaat

SEQ ID NO: 784940 - DNA, 74 bp, Homo sapiens
acagatggaggaggagcagaaagcaatgagtctctgctggatgaaccgaatcctaacagtccagccaatagcca

SEQ ID NO: 784941 - DNA, 100 bp, Homo sapiens
gatggatctgagagacttacatgcttatttcagataaaaagattgatgagcctctgttgcagggatccagagaagaactggaatagaaattgtgtgaaag

SEQ ID NO: 784942 - DNA, 75 bp, Homo sapiens
attcgcagggaggatgtcgggacaccccggaagctgggaaatggattaatgcagtatcgaatggacaagtccgag

SEQ ID NO: 784943 - DNA, 82 bp, Homo sapiens
ggaaagcggcggactatgtccgaagcaaggatttccgggactacctcatgagacaatgcagatcttcgtgaagactctgact

SEQ ID NO: 784944 - DNA, 74 bp, Homo sapiens
gccaacatggcggcgcccagtggcgtccacctgctcgtccgcagagtcatatttgatcagaaattggatgaacc

SEQ ID NO: 784945 - DNA, 103 bp, Homo sapiens
gctttggctgcccggctgctgcagcccgcgcacagctgctcccttcgccttcgccctttccacctcgcggcagttcgggagtgcatccgccccaacccttttc

SEQ ID NO: 784946 - DNA, 51 bp, Homo sapiens
ctgaatcttggtgtttggacataggaggccccacctccgacactggggatt

SEQ ID NO: 784947 - DNA, 96 bp, Homo sapiens
ttgagcaggcttcatgtgcgctgcagtcagaggccacctctttctttgtgggccggatgggtccttgagtgtgtgatggatgtcagatgtttccta

SEQ ID NO: 784948 - DNA, 90 bp, Homo sapiens
gtggctgctctgcgcctcacggccagatcccaggctgaacaactttttaaagcaacaatgagttacctccttggagggggcatgaagcag

SEQ ID NO: 784949 - DNA, 110 bp, Homo sapiens
gatcccattgtacccagagtgcagagccgcctttccagcatgcaggggctgctcagggagtgcatccgccccaacccttttccccctcgtctcctgtgagaattccccgt

SEQ ID NO: 784950 - DNA, 96 bp, Homo sapiens
ggagatctgcctcaatggaacccctgctctggcctacctggcggagcccatgatgctgcccaaacctgggacctattacctcccctgggaggttag

SEQ ID NO: 784951 - DNA, 75 bp, Homo sapiens
tgactactggggccagggaaccctggtcaccgtctcctcaggcttgcagccaatttactggagcagggatgacgt

SEQ ID NO: 784952 - DNA, 100 bp, Homo sapiens
ctggggatccctgctcttcgctctcttcctggctgcgtccctagcttagaccatgctcagcctccaagcagccttgtcatcgacaaagaatctgaagttt

SEQ ID NO: 784953 - DNA, 83 bp, Homo sapiens
cggcgcggccacggagaagggcgcgattatcttgacaatggtaataataaaatggcaattcagcaagcagataaactgttgaa

SEQ ID NO: 784954 - DNA, 75 bp, Homo sapiens
gagcttcttcctatttgccatgggtttaccgacaagactgtgaaactttcgggatggtggtgaaaatgctgattg

SEQ ID NO: 784955 - DNA, 98 bp, Homo sapiens
ccaagaccatcctgaagtcaactccctggaggaggtggtgaggctggtgaagcccacagccatcataggatccttcatctgtacctaatgcagacaat

SEQ ID NO: 784956 - DNA, 96 bp, Homo sapiens
tggttcctttcgtgctggcgccgcgacctccggatgacccgggcttcggcccccaccagagactcgattaagatgttctacgaggagcatttgcac

SEQ ID NO: 784957 - DNA, 100 bp, Homo sapiens
atgaagctctgctgggaagcgaatccggaagctcggccgacatttcctgctctcaaaggtctatggccctgtgttcactctgtattttggcctgaaaccc

SEQ ID NO: 784958 - DNA, 97 bp, Homo sapiens
gtgactctgagatcccagcttctcttaaccagggcctctcactcctgctccatgagcctgtcctgggggaacagagaggccctgcggtggctacggg

SEQ ID NO: 784959 - DNA, 75 bp, Homo sapiens
gggtgatgacatgggacttggaaaaacagtacaggatggaatccgacgtggtaggcccagagcagatactgtccg

SEQ ID NO: 784960 - DNA, 100 bp, Homo sapiens
tggcaaagactggcaaaagcacaaggattctcgctgtgacagagacaacaccgagtatgagaagtatggctgatggcaagcattgtacttttccacatct

SEQ ID NO: 784961 - DNA, 98 bp, Homo sapiens
tacactggaacagaatcaacccagaacggatagctccctcctggaaaagggttgcttttgtaatgaagaagcacttaaatactcatctactaggcaag

SEQ ID NO: 784962 - DNA, 75 bp, Homo sapiens
ttttttattatgttgcacggaggtgagaattatgaagatgatgacctagtaaattctgatgaggttatgaagaaa

SEQ ID NO: 784963 - DNA, 83 bp, Homo sapiens
ctggagagaccccgcggctgggcgttcatctaccacgctttcgtaataccctctaccatctgctttggtcagggtgccgctcg

SEQ ID NO: 784964 - DNA, 98 bp, Homo sapiens
attttgggaaactcgactttggagaaaccaccgtgctggaccgcttttacaatgcagttaaagagaagttgactgcggatccagacagtgaaatagct

SEQ ID NO: 784965 - DNA, 75 bp, Homo sapiens
ggagcagtgggttctggtggagatggtacaggcgctttacgagagattgccttgcaacaggtttccatgttcttc

SEQ ID NO: 784966 - DNA, 74 bp, Homo sapiens
cagtgcccgctttgttcagctgcagcatggagagatagataaacggtttgatggtatccatgtggtgagtggat

SEQ ID NO: 784967 - DNA, 75 bp, Homo sapiens
tctgtctgcagcccagacactgagagccgctttcatcaagggaaagaatatggcaaagctgatgcaagatgggtt

SEQ ID NO: 784968 - DNA, 102 bp, Homo sapiens
caggtggcctggagcaagaccgctgacaagatcgagggcttctgtgctggagaatctggtaaaagcaccattgtgaagcagatgaggatcctgcatgttaat

SEQ ID NO: 784969 - DNA, 80 bp, Homo sapiens
aggaagcttgtgagaagtggaagaggcccttcagaatctccagccaagtcctccgtgctcgtggtgggaatcgtcatcgg

SEQ ID NO: 784970 - DNA, 100 bp, Homo sapiens
atacaccaccaaactttgttcttgctcttgttttgccctcaattgtaattctgggtaatggaactgctggtccatctgaataaacgtataaaaagccgcc

SEQ ID NO: 784971 - DNA, 116 bp, Homo sapiens
aggagcagcacaggcagaagcactttgagaagaggcggaacccggcagcaggcctgatccaggttggcatcaactaccagtcccccacagtggtgcccgggggtgctgtagccaag

SEQ ID NO: 784972 - DNA, 98 bp, Homo sapiens
gccgcggcggcagcagcagtgagaggttaaacccatccagagtaatggctgcggccttacccaggaccctgggggagttgcagctgtatagaatatta

SEQ ID NO: 784973 - DNA, 100 bp, Homo sapiens
gtaagaaccgccggggacgaaacaataaagaccggaagctgagtttttatccgcaggcagccacatccagacgttgatggggtcccaaagccttcagcat

SEQ ID NO: 784974 - DNA, 82 bp, Homo sapiens
cgccgccgaagaagcatcgttaaagtctctcttcaccctgccgtcatgtctaagtcagaggaggagaaagtgcaggccatgc

SEQ ID NO: 784975 - DNA, 96 bp, Homo sapiens
acgctaccctccccctgctaagccacacccagaagaagctcattcacacagaagacccatttaatgatgaacatcaggagaggcaagaggtggaaa

SEQ ID NO: 784976 - DNA, 49 bp, Homo sapiens
ccgcagtacaagaactggagaggctacagatgcacatgttgaatggagc

SEQ ID NO: 784977 - DNA, 100 bp, Homo sapiens
cgggttttgatcgcgcgtttgtgtaggtccatatacttttgttcagcaacatcttatgattggcacagatcctcgaacaattcttaaagatttattgccg

SEQ ID NO: 784978 - DNA, 100 bp, Homo sapiens
aatgatacaattacctgcacgacacatggaaattggactaaattaccagaatgcaggggtacatctaccctttagattccttgacctggattgaatactg

SEQ ID NO: 784979 - DNA, 71 bp, Homo sapiens
tgctctgctcctctatgctggacatcaaatttccaggtcgttgaggacttccacatggagattggcacagg

SEQ ID NO: 784980 - DNA, 80 bp, Homo sapiens
ggagtcggggacccaggagtttcctgtgtccagcgctgccggagccgcctgagatggagttttgctctgttgcccaggct

SEQ ID NO: 784981 - DNA, 100 bp, Homo sapiens
cagaggccaggctttatgggagcatgggttaccagcgacgcaccctgctaccacatactgttgattgtgatgaaatgccagttgaagcacctgtcctgcg

SEQ ID NO: 784982 - DNA, 83 bp, Homo sapiens
ataagagctgtcagttttctgtggatgaaggcgtcgaccagaagattatgatattcataacagcagaaagaaaccaaggattg

SEQ ID NO: 784983 - DNA, 98 bp, Homo sapiens
aacatgaagctaccggccagggttttctttactctggggtcccggctgccctgtggcctcgctcctcggagggtgcactttacaggtccccgatgaac

SEQ ID NO: 784984 - DNA, 96 bp, Homo sapiens
ccgaaaagcgtttccgcagacagaagtggggagaagcggagaccagcatgttttggaaatttgatcttcactcatcatcccacatagacacacttc

SEQ ID NO: 784985 - DNA, 87 bp, Homo sapiens
aaactccctgtgtgacaccttccgagaccagtccacctacatcagccgcttacaaacacgcagatggcaagaagattgatggcagga

SEQ ID NO: 784986 - DNA, 100 bp, Homo sapiens
tggagatgtccgagcccaaggcaattgatcccaagttgtcgacgaccgacagggtggtgaaagtgtgcaccggcacagacatgaagctgcggctccctgc

SEQ ID NO: 784987 - DNA, 75 bp, Homo sapiens
ttatgaagtagtgaaggtgattggtagaggtgcatttggagaagttcaattgcaaaagctggcaggctgacagag

SEQ ID NO: 784988 - DNA, 97 bp, Homo sapiens
cttcatggtgcggctcatcttcgagagctttgacagatccaaatgcttctgctgcccagcaggctgttctccagcagcacatcaatagtctaacata

SEQ ID NO: 784989 - DNA, 73 bp, Homo sapiens
tcacccttgtagagtcattcctgcctttgagcggactcccttttaaggggacacccgttccagtgagatgccc

SEQ ID NO: 784990 - DNA, 82 bp, Homo sapiens
accatcggacaggatttctccgcctcagcccaacggggagatctctgttgaggagctggcgcggaatctggtcatcaaggtc

SEQ ID NO: 784991 - DNA, 80 bp, Homo sapiens
acgaaattgaaattacctccgagggaaacaagaaaacatcaaagaggtctagcaaagagatggggtcttgccatgttgcc

SEQ ID NO: 784992 - DNA, 100 bp, Homo sapiens
cctctgcaaagcttttattgtcacagatgaagacatcaggggttcaacagaaatatttggtggttacctgcaactatgaagctaggaaacttggagttaa

SEQ ID NO: 784993 - DNA, 100 bp, Homo sapiens
gggctgaagggttagcggagcacgggcaaggcggagagtgacggagtcggcgagcccccgcggcgacagcaggagcattggtttgaaaaggccctacgag

SEQ ID NO: 784994 - DNA, 98 bp, Homo sapiens
tactcctacctcccggcatttaaagtcataaagatagggaggtggtgatggagcacccctcttctggaagtgactggtctgatgttgaggagatctcc

SEQ ID NO: 784995 - DNA, 90 bp, Homo sapiens
aaacagaaagacctccaggagaagatcagtgggaaggagtctccccaggacagtgctatcacccgggatattaaccgaacattcccagcc

SEQ ID NO: 784996 - DNA, 92 bp, Homo sapiens
cttagagacagcagtagtccctggcagtgcccagtttgcaggttgaaggagaaagccagcctgaccctggctgtggggacactccccttccc

SEQ ID NO: 784997 - DNA, 100 bp, Homo sapiens
agtgctgggattataggcgtgagccaccgtgcctggctgaagcagcctcgtcttacagcgtgactgcaaagaaaaagacttttgttttgcaaaagaaaag

SEQ ID NO: 784998 - DNA, 98 bp, Homo sapiens
gagacccaaggaacagtgccaagttagatgccgattacccacttcgagtcctttattgtggaggttatcaatactctggctgaccatcatcatcgtgg

SEQ ID NO: 784999 - DNA, 97 bp, Homo sapiens
aagacaccacacattgcgcagtcgggaccatcgccggagcctgaggacacttctctgtcgtcacagttagcatgattctggaacagagtgcacacca

SEQ ID NO: 785000 - DNA, 75 bp, Homo sapiens
agtttaaacagccaaaacagttcattcatattcagcgcaattttatatgatgacaaaggagcatgtttggagagt

SEQ ID NO: 785001 - DNA, 75 bp, Homo sapiens
cctggatccaggataacggaggctggcgtttagtcacatcaagaaatagaacagaattcagccatggccccaaga

SEQ ID NO: 785002 - DNA, 78 bp, Homo sapiens
ttgtgaattggaagtttttgctaaagtactgagagctttggataaaaggtggtgtaaattggtccaatgtaacttgcc

SEQ ID NO: 785003 - DNA, 90 bp, Homo sapiens
cttctcctggagacgcaactcaaggaagaggagatcccagaactggagattgacgtggatgagctcctggacatggagagtgacgatgcc

SEQ ID NO: 785004 - DNA, 83 bp, Homo sapiens
cgcacgccgagtcctactccagcggcggcggcggccagcaggactctccttcagcaactccagaagcttcagactttggtgat

SEQ ID NO: 785005 - DNA, 82 bp, Homo sapiens
acatgtggtggtggttgcacagtcgccttttccagtttggagagacgtttgcacttgcaggaaagacatggtgaagatttca

SEQ ID NO: 785006 - DNA, 82 bp, Homo sapiens
ggcgcgcccagggaaggcatttccagcccgcccacccagagctgcctgagaactggacagacacgcgggagacgctgctgga

SEQ ID NO: 785007 - DNA, 100 bp, Homo sapiens
cgaggaatgaagtgattgctgacattaattgcaaaggtggttattaacttggtgatgcttttggctgaaatgaaaatacaggaccgcgctgttccatcct

SEQ ID NO: 785008 - DNA, 100 bp, Homo sapiens
gcaaaatgcccgccacggtataataaaaatattcaatgcactgcaagaaacaagagccaacaagcatctgttatatggggatcctggaccgttggcaccc

SEQ ID NO: 785009 - DNA, 96 bp, Homo sapiens
cccagctctactccaggccccgtccgcccgggggcgccgcccaccgcgcctcgctcgctgggagtgtccactcgccttccaccagcatggcaacgt

SEQ ID NO: 785010 - DNA, 83 bp, Homo sapiens
gaaactagagcaaataaccgttttgaaattgtgatttgtggagctatgatttcttcagtggtgaatttgtggtgtcacctgaa

SEQ ID NO: 785011 - DNA, 83 bp, Homo sapiens
tccttggtggaaatgttggtggaaacatcagatctctccatattttggctctgtcaacagactcaatagaaagactcccagtg

SEQ ID NO: 785012 - DNA, 75 bp, Homo sapiens
cgcggccggaccgagcgcctcgacctcggtctgagttacctagaaaagtacgagaaagttcatcattttggggag

SEQ ID NO: 785013 - DNA, 83 bp, Homo sapiens
ctgtcatcatgtcgcgttacgggcggtacggaggaggtcatgttctctttcgaggccggccgccgctgcccctcaggccctgg

SEQ ID NO: 785014 - DNA, 99 bp, Homo sapiens
gaaatgctgactttaccacagaattttgggtatggcccatctcctgtacgcttggagcgacctttggctacgtggctggccttgttatttcaccactct

SEQ ID NO: 785015 - DNA, 100 bp, Homo sapiens
gcctgaccctggtgtgcagctcggccccgggccccctggagctggacctgacgggaggaatcggagaagcagctctgtctgattgaggcgcagaccatgg

SEQ ID NO: 785016 - DNA, 82 bp, Homo sapiens
ttggtgtgattagcttcgcagtctggaaagctttaggagttcacagtgaacagcgccttttgatagtcctaagtaattgctg

SEQ ID NO: 785017 - DNA, 80 bp, Homo sapiens
cttaggcactatgtcgtccgaggcccagagatgaccccttatgaaggttttaaaatcaaagatgggaaaatcggagaaaa

SEQ ID NO: 785018 - DNA, 90 bp, Homo sapiens
actaccagcacatgctgcgtgtcatcaagaagtactggctccagttccgggaaggcccctgggatggagtctcgctctgtcgcccaggct

SEQ ID NO: 785019 - DNA, 100 bp, Homo sapiens
caggggagggtggcactggctctcctggtccagctctcaggacaagaacaaagtgtgctgattcacagtctgagaatgaggcttcaccagtaaaacggcc

SEQ ID NO: 785020 - DNA, 90 bp, Homo sapiens
gacttgaagaaacctcgcggaaagaaatgcttctttgtgaaattttttggaacagaagatcactaaagctgttgatggatacgtgaagcc

SEQ ID NO: 785021 - DNA, 98 bp, Homo sapiens
gaagaggccaagactgcgttcctgctcaacatccaggagctccagggtcagaggtcggatgtctacagcgacctcaacacacagaggccgtattacaa

SEQ ID NO: 785022 - DNA, 99 bp, Homo sapiens
ccaggatgagtcaaatgaagaacggcaggatacagacatgtgtggccatgaggtctgccggaagtgacttgttggtgttatctcctgagttaaaatgtg

SEQ ID NO: 785023 - DNA, 98 bp, Homo sapiens
catcgtggggatcttggcagcgctgcagggttttggggaaggatcaccccgatgttgccaagcagttaaataacttggccttactgtgccagaaccag

SEQ ID NO: 785024 - DNA, 100 bp, Homo sapiens
ttgtggagcaatcttttctacagaaggttaaaagcatcttgactcctgaaggcatgcccaagagaatcgtaaatgcaaaaattgcttgccttgacttcag

SEQ ID NO: 785025 - DNA, 100 bp, Homo sapiens
cctggaggagcgcatgcaacagaagtatgaggccagccgggaggacatctacaagcggatccaacttagaaataatgtttcattcaagataaggctcgtg

SEQ ID NO: 785026 - DNA, 75 bp, Homo sapiens
cgccttgcagcactgctggaccaggacccccgcagcaaacacaagtttaagatccacacgtactccagccccacg

SEQ ID NO: 785027 - DNA, 100 bp, Homo sapiens
acggaaatgtgtcatcgaaagccagggcccagataaaggccactgtgaaacgcaaggtatatgaagattctggcatcccccttccagctgagtcacccaa

SEQ ID NO: 785028 - DNA, 107 bp, Homo sapiens
ttactatgacagaggatatgatcggggctatgatgatcgggactactatagcagatcatacaggagagaacattgaaagtattctctaagctatttgaagagagtga

SEQ ID NO: 785029 - DNA, 75 bp, Homo sapiens
agcaggatggactatcattactcctccaacaccaatcatcccagacgtggaaattgatgacttgaaaaaaattac

SEQ ID NO: 785030 - DNA, 100 bp, Homo sapiens
tttgtattattctgcgtggaagctacacttactccagtgggaggaggactccagtcgttgaggacttccacatggagattggcacaggaccagactcaag

SEQ ID NO: 785031 - DNA, 82 bp, Homo sapiens
cgaaggtggagcaggtcctgagcctcgagccgcagcacgagctcaaattccgagaaactatgttccaacttcctgtcaacaa

SEQ ID NO: 785032 - DNA, 97 bp, Homo sapiens
ccagtgcctgggccgctgggagccgttattggctgccgttaaggaccgttacgtttcccggctagtgtcagcagtgggatacctgcgcttgaaggac

SEQ ID NO: 785033 - DNA, 100 bp, Homo sapiens
gacataccactatatcagataagcttgacattacagccaagatggtgctgtcccagagacaacgagatgaactatggcagaaacggtggacacaagcgaa

SEQ ID NO: 785034 - DNA, 75 bp, Homo sapiens
acaatggttatggatttttctaccatatcagagatgacagataaactgccagggagaagaatgagaagacaggag

SEQ ID NO: 785035 - DNA, 75 bp, Homo sapiens
ctttattctgtgggctctgattctccaatgggaataccaagggataacacttacttgtgcctggctgtgctggat

SEQ ID NO: 785036 - DNA, 75 bp, Homo sapiens
gtcggcggcgcccggatgggcagctgaggtcactatcatatgacaaaggctttgccgcagttcatcttcctccct

SEQ ID NO: 785037 - DNA, 75 bp, Homo sapiens
cagatatggcagaagtgaagtcaatgttccgggaagttcttccaaagcaaggccatcatctctcagcaaggtgac

SEQ ID NO: 785038 - DNA, 83 bp, Homo sapiens
cctctgccccttggtgggctgaagcttcatggaggctgctcaaacagcggaagatgccatgcagataatggaacagatgacca

SEQ ID NO: 785039 - DNA, 117 bp, Homo sapiens
aaaacatgacgtctccagccaaattcaaaaaggataaggagatcatagcagagtacgatactcaggtcaaagattcatcgaacaggccacatcggacagtgttcacccgagccatcg

SEQ ID NO: 785040 - DNA, 100 bp, Homo sapiens
atcaacacgttcttaaaaacctcgggcggcatgacggatccagagaaactcatcaggatttatcctgtatggtttgaagtggtgaacatggatttttctc

SEQ ID NO: 785041 - DNA, 89 bp, Homo sapiens
gtgattaatgcgcttttcctgaaggctcctgatgagaggaggcagagcatgcttgagaagggaggataaaaactttcagaatgagcaaa

SEQ ID NO: 785042 - DNA, 48 bp, Homo sapiens
agtttgccatcccaaggccgaaggttaaacccatccagagtaatggct

SEQ ID NO: 785043 - DNA, 101 bp, Homo sapiens
caaagctggttttgctggggacgacgctccccgagccgtgtttccttccatcgtcgggcgccccagacaccagaattaaacaaccaccatgtcgagcaaaa

SEQ ID NO: 785044 - DNA, 100 bp, Homo sapiens
ggaaaacgacagagaagcttctgaaaacatttttgaaaagacaagccatcaaaactgccttcagaagcaaaagataacgtggttagaaggccattcactg

SEQ ID NO: 785045 - DNA, 75 bp, Homo sapiens
aaaaaacctctgaccgtgaagagacatgagatgattgccaaacccccaggtagatgatgagctggagatcaaggc

SEQ ID NO: 785046 - DNA, 101 bp, Homo sapiens
agacatggccaaagactacatggagaggatggcagcgcagcctagttgcacaagtgaagctgatgtggaggctgtcatggataagttgtttgatgagctgg

SEQ ID NO: 785047 - DNA, 75 bp, Homo sapiens
ctggaagagaggacgcggtcgagtagacgaaggggaggaccaggctggcgatgaagatgaagatgatgaatggga

SEQ ID NO: 785048 - DNA, 100 bp, Homo sapiens
gggataaacgcttatccactcactcacccttccgaactcttaacatcaatgggcaaatccccacaggagaaggagtattcaggaaggaacacaatgtacc

SEQ ID NO: 785049 - DNA, 120 bp, Homo sapiens
ggctcacttcaacctggatgagagtggcgtgctcagtctagacagggttcaagggcagcaggaaagacgagatcctgggcatcgccaacaaccgactgatccgcatcgacttggccgtgg

SEQ ID NO: 785050 - DNA, 95 bp, Homo sapiens
ctggattctgaggaccagcagatggccagtcacgagaacccagtaagactttgaccccgacgcaggcttcagtgattgccgcggatcagaagcct

SEQ ID NO: 785051 - DNA, 100 bp, Homo sapiens
tgagatcgtggacaagatcatgggcaaaggacagatccaggtgtacatcggtgagctcccgcaggacttcctccgcatcacgcccacacagcagcagcgg

SEQ ID NO: 785052 - DNA, 97 bp, Homo sapiens
aggaagatgcaagcggtttgggaccttgaacaaggcaaatatggttttgaatggatgatgaacttgttgttggacatagtgcaagatcagacatctc

SEQ ID NO: 785053 - DNA, 96 bp, Homo sapiens
tgcgaccccgactacctgcgcggcgcgctcggccgcctcaaggtcgcccaagtggggacaaaacatggatgatgtcatggttttggtggattcaga

SEQ ID NO: 785054 - DNA, 83 bp, Homo sapiens
ctttccactcggctcctgtcgtccgttctctcaggctcccgttcagcgtccgtctccaagagagtatgaagagagtgcgtctg

SEQ ID NO: 785055 - DNA, 100 bp, Homo sapiens
cggccacccaccatggccgcagaccagcgcccgaaggccgacacgctggccctgaggcaacggctcatcaggccacatgactactccgcagatgggttta

SEQ ID NO: 785056 - DNA, 100 bp, Homo sapiens
gctctattggactaccgtgaggatggtgtgaccccatatatgattttctttaaggatggtttagaaatggaaaaatgtagcttttcatcctactataaag

SEQ ID NO: 785057 - DNA, 74 bp, Homo sapiens
ggcgggccgaggagccgggcgcaatggagcggaagagtgagcagcggttccatcgcagtgaacgccgactcttc

SEQ ID NO: 785058 - DNA, 97 bp, Homo sapiens
ggtgcagagattaaatgcggtttccaagcacacggagatcctgaaggagctagacgagtgctacgagcgcttcagtcgcgagacagacggggcgcag

SEQ ID NO: 785059 - DNA, 90 bp, Homo sapiens
tctgaactgactgccccgcatcaccggagcgtcccagctgcgaggaggagctgacatggacccaaatcctcgggccgccctggagcgcca

SEQ ID NO: 785060 - DNA, 101 bp, Homo sapiens
cgccgccggccgtggggagcggacgcagtgatttgctccccctcgtgcagcaacccccacacccagcaccagggtctcccatgggattgctgggatcttgc

SEQ ID NO: 785061 - DNA, 75 bp, Homo sapiens
agagtgggaactttctgtcttgtgatccattgcctggtgtaaagaagacattccagtgtgagctttgcagttaca

SEQ ID NO: 785062 - DNA, 74 bp, Homo sapiens
gcagtggtcgcttcttctccttggccctcaaagacctcaaggcactgggctgcagaaaggcgatgaagaagttt

SEQ ID NO: 785063 - DNA, 83 bp, Homo sapiens
cttcgagtgacccgggtgccgaggagcgggaagagttgctgggctccttccgcttccagccgttcgagtcctatgactccagg

SEQ ID NO: 785064 - DNA, 100 bp, Homo sapiens
gaattcagaaggagctggcggacatcactttagaccctccacctaattgcagaacaccttccaccatgaccacctcagcaagttcccacttaaataaagg

SEQ ID NO: 785065 - DNA, 90 bp, Homo sapiens
tcgacaccaccatggacgaggaacaggtggagctgtcccggaaggagaagctgagatgtgtcctgtttgccggtactgtcaaacgcccga

SEQ ID NO: 785066 - DNA, 51 bp, Homo sapiens
ccaactggaccgcgttcctgttccagatcctatagcaatggaactcagcga

SEQ ID NO: 785067 - DNA, 75 bp, Homo sapiens
gtggttcacccgctgccgggcaccgaggaccagctcaatgacagcttctcggacaaactatttagtggaaaaggc

SEQ ID NO: 785068 - DNA, 74 bp, Homo sapiens
acttgctaaaggaaataggttattcatgagatttgctacaaaagagttaggaagtaacatggtagtacctcagg

SEQ ID NO: 785069 - DNA, 74 bp, Homo sapiens
cccagacgggccggcccagagctcccgggtcgtctttcgtgtggccgcgaggtcctagcagaagatgtgactca

SEQ ID NO: 785070 - DNA, 100 bp, Homo sapiens
agaagatgaagtcaaattggccctgaaaaaagacagagaaactatgggacacagatatgttgaaggtcagaagagatcaattctacagaaatttccagtg

SEQ ID NO: 785071 - DNA, 101 bp, Homo sapiens
gctgctgctggtgttagcgctcagtcaaggtactagcaaaggccagacgtcttactcaacaacttccctgccaccacctccaccatcccatccggccagcc

SEQ ID NO: 785072 - DNA, 50 bp, Homo sapiens
aaacaagtgtctgcttatgtcgagttcggcgtgtactgcagccactgccg

SEQ ID NO: 785073 - DNA, 75 bp, Homo sapiens
gctgttggagtgctgaaggctgtgcactgtggagagtggacagtcattttgtttactcattcagccctgttgcag

SEQ ID NO: 785074 - DNA, 100 bp, Homo sapiens
atggagctcagagaagcttttgccaaagttggtctccaccagctcctggccgggttcgaggacaagtcagcctatgcgctctgcacgtttgcactcagca

SEQ ID NO: 785075 - DNA, 100 bp, Homo sapiens
ggaaccaacccagccgaccccccaggttctgaagaaggccttccaggccacgctcaggtggctcctgagctcacccaagacccccggctgctctgatctc

SEQ ID NO: 785076 - DNA, 83 bp, Homo sapiens
tggacacaagcctcattttggaatattgcaggactcctagaagtaccccaccccacccctgctccttggaggacaacgtgatc

SEQ ID NO: 785077 - DNA, 75 bp, Homo sapiens
tgatgaattacatagcccaagtagtcccagcttgaagtacatctggattccttatgtgtgcatgttagcagcatt

SEQ ID NO: 785078 - DNA, 87 bp, Homo sapiens
gcgagaggtgcggcgaaggaggcagaggcacttatgcttgtcaggcgaaggaggtggaggagaccatcgagggcatgctcctcaggc

SEQ ID NO: 785079 - DNA, 87 bp, Homo sapiens
atgggaacttgtgtgttaaagtaacagatgatttagttaaggtggagtataccctgggagaggagtcggaagcccctggccagaggg

SEQ ID NO: 785080 - DNA, 100 bp, Homo sapiens
gacaaacaaaagaccctgcactgattccatgccattgcagtgtcaactaggcctcagttacttttcagtttgcccaaattgagcccatctcaacatttgg

SEQ ID NO: 785081 - DNA, 75 bp, Homo sapiens
tggaacaaagcccctgcaggccccaggtttccgagtactatactggcaattgctggagaagattttgcaattgtt

SEQ ID NO: 785082 - DNA, 100 bp, Homo sapiens
gttccacccgacgcatgagtggcaggcccttcagccagctggagagatttaccagcatgagaattaagaaggagaaggaaaagcccaattctgctcatag

SEQ ID NO: 785083 - DNA, 87 bp, Homo sapiens
ctgttgtagaaactctagtcaaccataggaaagacctcctgccccccgaggtctgcagtctcctgaacccagcagccatctacgcca

SEQ ID NO: 785084 - DNA, 74 bp, Homo sapiens
cagtaacggcacagcctctcagtcaacatctccttcgcagccgcgcaaaaaaaacaaagccacagacccaagca

SEQ ID NO: 785085 - DNA, 100 bp, Homo sapiens
aaagatgatgatgttgtaagccttagcagccttgatctgaaggctaaagtaaataatgccagcctgattggactgggttatactcagacccttcgaccag

SEQ ID NO: 785086 - DNA, 75 bp, Homo sapiens
agtgaccacactgaggaaccggcttcgaagccctcggatggtggcccttgcatgcttcagttcatgatgttggag

SEQ ID NO: 785087 - DNA, 51 bp, Homo sapiens
caccgcctacaggagtatgatgcaagaatgtgacagtgatgataacatggg

SEQ ID NO: 785088 - DNA, 101 bp, Homo sapiens
ttgcgggactcagtcccatcactccaaggagagaaggcagccagcagttagattccattcatgtaacacagttggagagagataccgttttagtgtgttta

SEQ ID NO: 785089 - DNA, 96 bp, Homo sapiens
agccagagctgagcggcgcgggctccagactcgccgtggtcaagttcaccatgagagggaccttaaaggctttgatccaggagagaaatactttca

SEQ ID NO: 785090 - DNA, 100 bp, Homo sapiens
aagagattcagccagcacactcctcgcgagcaaggttcgagaacttgtcttggacaattgcaaatcaaatgatggaaaaattgagggcttaacagctgaa

SEQ ID NO: 785091 - DNA, 74 bp, Homo sapiens
caagccctgaatgccaatgtgtggtccaatgtagtgatgaagaatggcctcattgctacgatttcagagtaccc

SEQ ID NO: 785092 - DNA, 108 bp, Homo sapiens
ttcgctcgtggatcgatacttcactcgctggtacaaaccgggaagaggatcacctagcccgggtagaagaggcaatcacccgtatgcttgtgtgtgccctgaaaactg

SEQ ID NO: 785093 - DNA, 97 bp, Homo sapiens
ttattcagcgactagtaagcctatgtcatttcatccaccacattacttaggtgtcatcttcaacgatgtctatgcagcttccaagttcgccctggag

SEQ ID NO: 785094 - DNA, 96 bp, Homo sapiens
caccactggacctccaaggaagccacgtgcagacatctacaaccttcgatctcctgacgagccaatggaagcactgttgtgaagaacttatgaaaa

SEQ ID NO: 785095 - DNA, 100 bp, Homo sapiens
agaaagcatactgcgagccctgctacattgtagaaactgaggaccaggtgctggcaaccttctgtggcagggagaccacagacacagagcagactcccgg

SEQ ID NO: 785096 - DNA, 93 bp, Homo sapiens
ggtgccgacatggggcttaagatgtcctgcctgaaagacaatgcagatcttcgtgaagactctgactggtaagaccatcaccctcgaggttga

SEQ ID NO: 785097 - DNA, 90 bp, Homo sapiens
caggaatgcaggatggcggcggtgaagaaggaagggggtgctctgaggcattatattgtacttctagcaagtgcaccaacagaaaaacaa

SEQ ID NO: 785098 - DNA, 88 bp, Homo sapiens
gcgcttggcctgctctacaactgctggcagcgccggctgcccaagctcaagcacgtgacaggtgcagttcaggagcagatgagatcca

SEQ ID NO: 785099 - DNA, 75 bp, Homo sapiens
ataggctgcgctaccggaatgtcatccagcgagtgattaggaatctctgaaggaagaagatgaatcagatgatga

SEQ ID NO: 785100 - DNA, 100 bp, Homo sapiens
tacagatcacacgcccactaaagcccagaagaatgtggctaccagcgaaggacaaaagatccttcatcaccgaagtgacgttttagaaacagtggtcctg

SEQ ID NO: 785101 - DNA, 98 bp, Homo sapiens
tgggaagcagtttctcggatgaactttatgtggacgtgacttacatagctgggagaaccaccacagacgacgagctagaagagatgctggagagcggg

SEQ ID NO: 785102 - DNA, 100 bp, Homo sapiens
ctaccaggccctgcactgccctacaggcactgagtatacctgcaagggcccaggagacaccagcgggggctgccgctgcagggtaaatgggattccttgc

SEQ ID NO: 785103 - DNA, 100 bp, Homo sapiens
tatgagcagtgagctggagaccaccagcttctttgactcagatgaggatgactccaccagcagaaatgagccgtcagactgctacagcattacctaccgg

SEQ ID NO: 785104 - DNA, 100 bp, Homo sapiens
agatgtgtcagatgagaagttacgagactacatctggaacacactcaactcaggacggactgcttccccacaacaaagagaaatgatggatcaggcagct

SEQ ID NO: 785105 - DNA, 100 bp, Homo sapiens
ggaaaagcaacgttcttggatgcctgggagagtagtgagtcagtcaccctggacctgctgacctacacagacctggagtccctgcggaaccgcaagatgg

SEQ ID NO: 785106 - DNA, 74 bp, Homo sapiens
tttggagaaaaccctcagaagaatttaatggatatctagagaagaagaaggaggttcctgctgtgccagaaacc

SEQ ID NO: 785107 - DNA, 100 bp, Homo sapiens
ccaagagagaccttggagtaattcgtcgacagaacattcagaagattctcggccttgccccttcacgagccgccaccaagcaggcaggtggatttcttgg

SEQ ID NO: 785108 - DNA, 98 bp, Homo sapiens
cgaagagagtcaccgaccatgacgggtacaccaggggttggaaaaaccacactaggcaaagaacttgcgtcaaaatcaggactgaaatacattaatgt

SEQ ID NO: 785109 - DNA, 50 bp, Homo sapiens
ttttcctccacctaccttcccgagaggagccgaggaaggtctgcttcacc

SEQ ID NO: 785110 - DNA, 83 bp, Homo sapiens
ccaccttcagtatctcagtcctccagtgtttggatattcaggtggtgatcgtggcagaggtggccctggtggcatgcggggag

SEQ ID NO: 785111 - DNA, 98 bp, Homo sapiens
ggaccattaatggacaaaaacatgagtcaatatgtattgtggcattcaaatcctagcactctgggagagattggattcaccacagacccccgaatggc

SEQ ID NO: 785112 - DNA, 75 bp, Homo sapiens
cgtggagcgtgggcgtttcgcagactcctaagatagttctgccccagagacaagtatgaataccacagacaacgg

SEQ ID NO: 785113 - DNA, 75 bp, Homo sapiens
agcatctgcgatgtgaggaaaggcacctccaccagaattcaattcgtcataatctgtccctacacagcaagttca

SEQ ID NO: 785114 - DNA, 90 bp, Homo sapiens
gcggccacggtgatgagccgggcctggcggacgcggcgccatcgcagtcaggccgagacgcatccagagctttcgtgaccggggactgtt

SEQ ID NO: 785115 - DNA, 82 bp, Homo sapiens
gtggggctggcggcccaaggctgaagagacctccagcaagcagaggacggggaggtttactgcatcgacgcgcggttctacg

SEQ ID NO: 785116 - DNA, 98 bp, Homo sapiens
agccatgttgctcacacaaagcctgtttggtggtctcttcccacggacgcgcgagacaatgaggaggtaagaatgattgatgttggctgatattggag

SEQ ID NO: 785117 - DNA, 83 bp, Homo sapiens
caagaacggcggtacccgggtggttaaacttcgcaaaatgggaatgggtactgttcaaaaaggaatgccccacaagtgttacc

SEQ ID NO: 785118 - DNA, 50 bp, Homo sapiens
aggtactacccgtcttctatctggatctccagtacaatgttgaatagaag

SEQ ID NO: 785119 - DNA, 83 bp, Homo sapiens
gcctgaggtgccctaaacacactatgaccgaggccacaagaggaagctgaatgaagaggacgccgccagcgagtccagcaggg

SEQ ID NO: 785120 - DNA, 75 bp, Homo sapiens
cacgtcccatttcgcccctcgcgtccggagtccccgtggccaggcagcttcaaaagatggtccatgatattaaaa

SEQ ID NO: 785121 - DNA, 100 bp, Homo sapiens
tttcccagctgctaaaggaagaggaaggaaggcgtggaagtgcgagtggccagaatcttcaacacctttgggccacgcatgcacatgaacgatgggcgag

SEQ ID NO: 785122 - DNA, 75 bp, Homo sapiens
ttccgttccagttcacaaacctggcagctgtggttgtgtcaaaccgattggtgacatctccatgctgtattgtca

SEQ ID NO: 785123 - DNA, 75 bp, Homo sapiens
gttcaatacacctcccacctgtcctcaggcatatcaaagacaatgcagatcttcgtgaagactctgactggtaag

SEQ ID NO: 785124 - DNA, 78 bp, Homo sapiens
aacttatggaactggccgggctgagctgtgctacagccatcgccaagggtggcaattttaagcccagccagaaaggtt

SEQ ID NO: 785125 - DNA, 101 bp, Homo sapiens
cagaggaatagaaactttggaatctgtacccattattggtggtttttgggagactatctttggcaacaggtattaatattaaccgaggcctcctatgcttg

SEQ ID NO: 785126 - DNA, 82 bp, Homo sapiens
ttggagaagaggttgttcacaacaggtatccagcaatgaggacctggtgtgagttcttgatacgaatgaaaggccaagagtt

SEQ ID NO: 785127 - DNA, 100 bp, Homo sapiens
attcagaggggccggtctctctaaatatgccccaggtcaaaatgcagatcttcgtgaaaacccttaccggcaagaccatcacccttgaggtggagcccag

SEQ ID NO: 785128 - DNA, 100 bp, Homo sapiens
cttagtagatgcattgaggatgtgtttaaggctgtcattatttgtatcaaaaacaaagaatttgaaaaggcttcaaaaattttgaaaaaacatatgtcca

SEQ ID NO: 785129 - DNA, 96 bp, Homo sapiens
aactggctaatccgaaatgggcatattgccacaaggtatgaaattgaaggctgtgaagtgatttgggccattaaagataaagctatagggaatact

SEQ ID NO: 785130 - DNA, 73 bp, Homo sapiens
ggtggtgttctggagactccacagccccacccaggcaacatgagtgagaatgaggaagaggaaatttctcagc

SEQ ID NO: 785131 - DNA, 100 bp, Homo sapiens
ccagatgaagctgtagcgtatggtgctgctgtccaggctggtgtgctctctggtgatcaagatacaggtgacacaggggagatcaagtcagaagtccgtg

SEQ ID NO: 785132 - DNA, 75 bp, Homo sapiens
cgtccccggcgcgaagaggctggactcggattcgttgcctgaggtgctccatacttgcttgcagtgcctacgtgg

SEQ ID NO: 785133 - DNA, 75 bp, Homo sapiens
ggagtttccagaccctcagaggcaaagaaagctcatcacagctcacgccctggccaacgtcaacattgggagcct

SEQ ID NO: 785134 - DNA, 76 bp, Homo sapiens
ttctacaggaagatgctgagaaactgcggaaagaattgcatgaaggaccacagaatactggccatggtgcaacttc

SEQ ID NO: 785135 - DNA, 87 bp, Homo sapiens
cattaccctggacctggaaaccatttttggcaattgaaggaacagactaaaaatcgtgtcctggaaggaaactacaggtactaccag

SEQ ID NO: 785136 - DNA, 75 bp, Homo sapiens
ctacggcgtgggccgctaccaggaggtcaaccccggactctctgggtggctcagcccacagtatccttattgcca

SEQ ID NO: 785137 - DNA, 101 bp, Homo sapiens
tgatgaacagatgttcccttgtcgattcattaaaatagggtgctgataagactgtgaaaggcccagatggactgaccgcctttgaagccactgacaaccag

SEQ ID NO: 785138 - DNA, 100 bp, Homo sapiens
acccgaggcgctagggaagatcgcaccgcggacgcccgctgagcttggcgcacgggccgaccagaacccagcgggtgccgcttctccacccgaggcttcc

SEQ ID NO: 785139 - DNA, 124 bp, Homo sapiens
gaccgcggggcgctcatctggctctgctacgacgcgctggtgcacttcgcgctgcattccatattggaagaagagatttctacacatgaaaaaaatgcctttgtttagtaaatcacacaaaaat

SEQ ID NO: 785140 - DNA, 87 bp, Homo sapiens
ctttccctaaggcagccatcaaaagggataccgaagtgtataaagctacagtaaaagatgacctcaccaagtggcagaatgttctga

SEQ ID NO: 785141 - DNA, 80 bp, Homo sapiens
gttttgaaatcgacacacaaagaatagagttgagcctgtgggacacttcggccgagcctcttgaagccattcttacagat

SEQ ID NO: 785142 - DNA, 99 bp, Homo sapiens
ctgagacaagctgttatgttgcctgagggagaggatctcaatgaatggattgctgtgaacactgaatgcaatatccatacatctccttctccgggaatt

SEQ ID NO: 785143 - DNA, 100 bp, Homo sapiens
aagaaggaatcatcgaggcatgggggtccacactgcaatgtttttgtggaacatgggcgccaatgcttcggcattagagaaagagattggtccagaacag

SEQ ID NO: 785144 - DNA, 83 bp, Homo sapiens
cctctttctgggtgactatgtggacagaggctatttcagtatagaggcccgatgagagaaagggaaagttaaggatgctggag

SEQ ID NO: 785145 - DNA, 75 bp, Homo sapiens
gtcccacggtggaagcgagagaggaggtttctgcagatcctgctttgtgacttcgagtgaagtgtggaagcgctg

SEQ ID NO: 785146 - DNA, 100 bp, Homo sapiens
ctgctgtacttcgtctatgtggcgcccggcatagcataagctgtggccatgactactgaagtaggctctgtgtctgaagtgaagaaggactctagccagt

SEQ ID NO: 785147 - DNA, 118 bp, Homo sapiens
tcacaagcacttaacgcttttggaagtggagattatactgctgctatagccttccttgataagattttagaggtacatcaggaacgtctctatcaagaatacaatttcagcaaggctg

SEQ ID NO: 785148 - DNA, 51 bp, Homo sapiens
cttggtaaatcctgcaagccaatcccagggccaaatccttgtagctgtctt

SEQ ID NO: 785149 - DNA, 82 bp, Homo sapiens
ctggggctcctgctactctggctccgaggtgcaagaaagcctttgaggtgaaggtgtatgaaagtcatcataacagatgttt

SEQ ID NO: 785150 - DNA, 83 bp, Homo sapiens
gtttacctgcctggacagcaagatgatggctacactagcccccattctctggcgcagacggggaagcggagccaacatgccag

SEQ ID NO: 785151 - DNA, 87 bp, Homo sapiens
agcatcggcatgctctatctgtactgccggcacctcaaccagatgaggaagtacaactttgagcaaagccttctagacaagctcagt

SEQ ID NO: 785152 - DNA, 75 bp, Homo sapiens
gaaaattttctcctggtagacctcggtccaaacaggtattttaacagcagtgataacaatttacagtattgggga

SEQ ID NO: 785153 - DNA, 80 bp, Homo sapiens
gccgctcgtcagactccagcagccaagatggtgaagcagatcgagagcaagtgcctccggagccagcgtggtggccatag

SEQ ID NO: 785154 - DNA, 75 bp, Homo sapiens
agcttcaagcttaggaccacccaccatgcctatccaggaagtgctggactccctggtcagcaatgtcaacattga

SEQ ID NO: 785155 - DNA, 50 bp, Homo sapiens
agcagtggaagatggggttgggccccagaatccagggcctgaaaacccag

SEQ ID NO: 785156 - DNA, 75 bp, Homo sapiens
tcaccgccccctcctgccccttcatgcatgcgcggaggccgcctgctagcaagattcaaccctatgaaaagataa

SEQ ID NO: 785157 - DNA, 90 bp, Homo sapiens
ttaaggattccaagtaactcttatttggttaaacactttaagatgagaaaaattgatctctgtctgagctctgaagggtccgaagtgatt

SEQ ID NO: 785158 - DNA, 83 bp, Homo sapiens
cctgcggaggagaccggcgaggagaagcagggaaaacaaagtgcatgatgaagtcttcagactgtgtcataaagcatgctggt

SEQ ID NO: 785159 - DNA, 82 bp, Homo sapiens
gaactcaagctcaacaactgtggcatgggcattggcggcggcaaggtcagcccaaggccaaccccactgtcactctgttccc

SEQ ID NO: 785160 - DNA, 75 bp, Homo sapiens
caggcgggtaaacatggtggacagaaagtcagcctcttgtgtttctcttcagcaacgggtagcagaattggaaaa

SEQ ID NO: 785161 - DNA, 88 bp, Homo sapiens
cttggcgacattgacaatgatggctttgaaggaaagaatacccacctcatgtccaaaaagttgaaattaatcctgtaaggttaagtcg

SEQ ID NO: 785162 - DNA, 100 bp, Homo sapiens
cattaaaacgagtcttcactacccagaatcatttaatcatccatttcatcaaaaaagttcatatcaggtgttagtgcttcccctggccctccaaagcaca

SEQ ID NO: 785163 - DNA, 78 bp, Homo sapiens
gattttcctgttccattttgtgcctcctggacacctcagatcttagcaaagcaatgtctcaagatggtgcttctcagt

SEQ ID NO: 785164 - DNA, 90 bp, Homo sapiens
taacatttagcctggaacagagcggcactcggcctgagcgggtgctgtctgaggtctgtgggcaggacatcaccaccaagcacatgctac

SEQ ID NO: 785165 - DNA, 100 bp, Homo sapiens
agccccaaacagagaacatccaggccaaatttgagtttcatcatggtgactatgaaaaacagtttctgcatgtactgagccgcaaggacaagactggaat

SEQ ID NO: 785166 - DNA, 100 bp, Homo sapiens
gcgcaccgttaaactcctgctctgtttactgtggattggatattctcaaggaaccacacatgtattaagatttggtgctggagaatctggtaaaagcacc

SEQ ID NO: 785167 - DNA, 83 bp, Homo sapiens
caacagctcacttttcttccaaggataagttgcaagagttcaaacttctcatggaacatctggaccctgatgaagaagaagaa

SEQ ID NO: 785168 - DNA, 100 bp, Homo sapiens
caaggaaaaaacgagaagaccccaaaaccagcttcgccgacacgaggtgaccatctgcaattacgaagcatctgccaacccagcagaccatagggtccat

SEQ ID NO: 785169 - DNA, 82 bp, Homo sapiens
gtgctggactccaccaacgccgacggtatcagcgccctgcaccaggaatcaaagatcaactcccactgaggacaaatggacc

SEQ ID NO: 785170 - DNA, 100 bp, Homo sapiens
cgcccggcgcccctgagccggccgagcggcgacggaccgcgagcttcctgcctgacacagctcacttcaagaagtgcacaatgtcagaacgtggaattaa

SEQ ID NO: 785171 - DNA, 100 bp, Homo sapiens
aatcgagggcagaagatctgggtttgagtccagcagtgctttaggtgattcgcaaggggtggctcaccatcagcaacattggcatcatgaaaggcggctc

SEQ ID NO: 785172 - DNA, 101 bp, Homo sapiens
cggcgggactgcactcgagtgtccagacctgctcgatggaatgaatctgaagtctgctgcagtaaaacacagaaggctttaaaatgttttcttgcataaaa

SEQ ID NO: 785173 - DNA, 78 bp, Homo sapiens
agccttccacatcagaagtccacagagatcaggttttgaacgaagaatgtgatcagaactggtacaaggcagagctta

SEQ ID NO: 785174 - DNA, 100 bp, Homo sapiens
ccgcagcgacggcggcgacagcagaaaagaggcacagttagatgaagaaggacagtttcttgtcagaataatatatgatgactccaaaacttatgatttg

SEQ ID NO: 785175 - DNA, 74 bp, Homo sapiens
ttgacagtcacaattttgtaataagtgtgcaggatgacagaattcgagtcgaaaggatggataacatttatttt

SEQ ID NO: 785176 - DNA, 97 bp, Homo sapiens
caagaggaagtgatattattgtagatctagaagtcactttggaagaagtatatgcaggaaattttgtggaaattactttctatgaagacaaaaattt

SEQ ID NO: 785177 - DNA, 74 bp, Homo sapiens
ctcctgagtagctgagaccacagctcctgtccaaatatgacccccagaaggaggcagagctccgcacctggatc

SEQ ID NO: 785178 - DNA, 98 bp, Homo sapiens
caaaatgtcaacaaattgatgggtttctgctttgggacaaccatacatctaattccttaaagtagttttatatgtaaaacttgcaaagaatcagaaca

SEQ ID NO: 785179 - DNA, 50 bp, Homo sapiens
gaactggatgtcagcaagaatgactgctctggcccatttagagtctcttg

SEQ ID NO: 785180 - DNA, 100 bp, Homo sapiens
tggtgtgcatcagcatcccccctccactcacccggcagatatccgtgaaggctctaggaccaagaatcgccttcagccctgtctggtgcatccttggcag

SEQ ID NO: 785181 - DNA, 90 bp, Homo sapiens
cggcggctcagttgtccatgaccctgaaggtccaggagtacccgaccctcaaggaagcgttgttgacgaccatggacatcatccacgatg

SEQ ID NO: 785182 - DNA, 74 bp, Homo sapiens
gaaaattctgggcatatttataataagaacatatctcagaaagattggctccatctatgagatctctgggaatg

SEQ ID NO: 785183 - DNA, 75 bp, Homo sapiens
agatgctaataacggagcccaggattgaagaatggcggtcacgagcagccaagtttgaagagatgtgtggactag

SEQ ID NO: 785184 - DNA, 90 bp, Homo sapiens
cagcctcctaagtagctgggactacagggacaaactctgcctgggcgagtccttttcctgcgttatgtcgttcagaccctagaagatgac

SEQ ID NO: 785185 - DNA, 100 bp, Homo sapiens
cgggtaggctcctccctgcgacagaccttcagcttcctctcgggcatgaccggaaaggccaaggaagctcttcgtgggcggtcttgactggagcacgacc

SEQ ID NO: 785186 - DNA, 100 bp, Homo sapiens
acaccaccggcacagtgacggcttcagagggtactactgagcgagtgtgcttgatccagggaacggttgaagcactgaatgcagttcatggattcattgc

SEQ ID NO: 785187 - DNA, 100 bp, Homo sapiens
aatcaccaaccaacatacacactacactcaaagatcacatggatccttattgggccttggaaaacagatccatccttttacaatccctgctattattcgt

SEQ ID NO: 785188 - DNA, 90 bp, Homo sapiens
gtaaaagtggcagaagatggttccattattttggatgaagaaaggtaccttaacatggggaatcttcttaaagttttgacatgcacagac

SEQ ID NO: 785189 - DNA, 151 bp, Homo sapiens
cactgccctggggcagctgaactgagcgtatgtgccacgccgcccaggagacccctctgctgcaccacttcatggaagctggagaagcttcgagagaaggagcgtaagaaggaagccaagcggaagatctccagcctgtccttcaccctgg

SEQ ID NO: 785190 - DNA, 73 bp, Homo sapiens
agaaaacaaaatggtggtatcatgcagcttcatggagtttggccacaagatgttgttgacggaacgtgtgtag

SEQ ID NO: 785191 - DNA, 97 bp, Homo sapiens
gggacggccggtcaggctcgccgccgagctgatcaggatcctcatgaccagccaaagagaagaagaattaggaagcataaatcaaagaaaaaattta

SEQ ID NO: 785192 - DNA, 74 bp, Homo sapiens
ccccaccatctacagcaacgtgatcaaaggcgcgatggctacgggcgcggatgtacgggacattctagaactcg

SEQ ID NO: 785193 - DNA, 50 bp, Homo sapiens
ccggccgcgcccgcggaaccagaccaggcgcattggagtgactgtctggc

SEQ ID NO: 785194 - DNA, 75 bp, Homo sapiens
cgggaggaagcagggcaaggccgatcccacttccagccgggcccctcatgtatccactggccgaccgcagagtgt

SEQ ID NO: 785195 - DNA, 75 bp, Homo sapiens
ttggaagcagccgatccagcctgcggagcctgtggggcaggtgctgcccataaactcgtgtgttatttcaccaac

SEQ ID NO: 785196 - DNA, 82 bp, Homo sapiens
ctgcggcatcgccggcctcgctatggtcatgcaagacaagataatctgccttccgaaaagagtgcagcctgctcagaaccac

SEQ ID NO: 785197 - DNA, 100 bp, Homo sapiens
gattactacgacaccggcgaggaacttggcaggttttgaggttttgctgaagatattcctgaagaatcatcccaggtgccacactaaaaaaatgatccag

SEQ ID NO: 785198 - DNA, 100 bp, Homo sapiens
gacgtgctggtgtctgagtggatggggacctgcctgctggatgttgcttcagagtgtgaagtcaaatgcatgccaacattccagttttttaagaagggac

SEQ ID NO: 785199 - DNA, 100 bp, Homo sapiens
attcccgtagcagctcttcagcaagtggctcctatggtcacttatctgcaagtgcaatcagtgactggtacaatccaagtggcccaaaggatagaccgag

SEQ ID NO: 785200 - DNA, 100 bp, Homo sapiens
gagccccgtggatccgctggagcggagccggccgtacgcggtgctgcgagggcagaacctggtgagttattctccccacctcagaagtaccagcttttgg

SEQ ID NO: 785201 - DNA, 100 bp, Homo sapiens
tttgatttattaaatttaaatagattagtaactggcatagacaactatgggcagcttgcattgaaaggctctagttacagtggacttcttgaacgacatc

SEQ ID NO: 785202 - DNA, 96 bp, Homo sapiens
gctattttgaaacctggaggatggaaaggtgcaaaaatctatcaccagcaacagaagcatggtgacatggaccagaaggagagagatgttatcatg

SEQ ID NO: 785203 - DNA, 98 bp, Homo sapiens
acagctaagatgccaggaccacctggaagcctagaaatggaagaaggtagataatgactataatgcccttcgagaaagactcagcaccttgcctgata

SEQ ID NO: 785204 - DNA, 50 bp, Homo sapiens
accgaagcgttcgtatctggaagatgatgaataaggtatttggaggtact

SEQ ID NO: 785205 - DNA, 50 bp, Homo sapiens
tgagggccgggcccagtcaccgaccgggcaagctctgtgtgattgattgg

SEQ ID NO: 785206 - DNA, 75 bp, Homo sapiens
ttacacttcgactctcaaagcaataccaggatagctgttgtttcagagaaagacgcaaacatgcagatctttgtg

SEQ ID NO: 785207 - DNA, 97 bp, Homo sapiens
ggacatcgagcctgagggaggggaaaggcgcagggaccacagccgctttgtcaactgtgtgcgattctctcctgatgggaacagatttgccacagcc

SEQ ID NO: 785208 - DNA, 74 bp, Homo sapiens
tggagaggtagatgacgaggaagatgaagaagagcttggtgaggctacggaaacaggccgagaagaacgtggag

SEQ ID NO: 785209 - DNA, 75 bp, Homo sapiens
aaagaagattcgggacacacagaaatataaacctttcaagagtcaagtaaagattggcccccgccgcatccacac

SEQ ID NO: 785210 - DNA, 75 bp, Homo sapiens
aaaaagaagctgcataccctgagccagattgaaacttctattgcaacagttcagagcagcccgacggccatggag

SEQ ID NO: 785211 - DNA, 74 bp, Homo sapiens
caggtcctccgaggagccgggagctgcaagctccagtccccaaaaggcaaaaatgtgaccactggactccctgc

SEQ ID NO: 785212 - DNA, 83 bp, Homo sapiens
tcgatggtcggcggcgcccggatgggcagctgaggaagctcttcgtgggcggtcttgactggagcacgacccaaggtaggtgg

SEQ ID NO: 785213 - DNA, 98 bp, Homo sapiens
gttgacctcttacctgctacacagtgtacaaaacctagatattatcctactgaagatgtgcctcgaaagctgttgagccacggcaaaaaacccttcag

SEQ ID NO: 785214 - DNA, 82 bp, Homo sapiens
tccaggagttcgtctcttacgtctgcggaagtgcagctgcctcagttcttagcgcaggccacttctctatagcatgggcaga

SEQ ID NO: 785215 - DNA, 100 bp, Homo sapiens
tcctcaacaccagcaccgcagatgttgtcaaggtggcctaccaggaggccaggggtgtcgccatgtggcttctagaagagtgagtctggaaaatactgcc

SEQ ID NO: 785216 - DNA, 89 bp, Homo sapiens
acctccgagcgcaaggacagcgcgaggtccgcgcagcccagcgcagccatgttaatttggagtggcccctggagtcagtttcctacacc

SEQ ID NO: 785217 - DNA, 75 bp, Homo sapiens
accaggatctcgggctcggaacgagactgcacgtacctggagtagaacagaaaaattattatgtctgtgttccct

SEQ ID NO: 785218 - DNA, 75 bp, Homo sapiens
attcctgattacctgccacccattgtgtcttctcaagaagcttcaagtggaaataaagagattatttcgcatatt

SEQ ID NO: 785219 - DNA, 100 bp, Homo sapiens
ggtgcgctgggggccggggcgcgtcgcagaagccccatgtgccactcccctgatctgcagcttcggtaggccggtggacctggagaaggacgactaccag

SEQ ID NO: 785220 - DNA, 100 bp, Homo sapiens
cggtttacagcgaagtccacccagcgtttccgaggtgaaggcgccgcgccaggccggggggcggtatgttgagtcgatgggatgatagccagagattttt

SEQ ID NO: 785221 - DNA, 75 bp, Homo sapiens
ccagaacttgcagcaacaatagacagaacctccactcaatacaccagaaaacagagagtatcttgcagaaattat

SEQ ID NO: 785222 - DNA, 96 bp, Homo sapiens
ggtatcttccttgatcagcctttacagtaaaaatgacccatctatggctgcttaatgttctgcttggattctgctagacagacccgacaaagactg

SEQ ID NO: 785223 - DNA, 75 bp, Homo sapiens
cggaggaagtgtggacagtggacctacatacaatgattgagaggatccagaatccagatctctggaatagctacc

SEQ ID NO: 785224 - DNA, 90 bp, Homo sapiens
aaaccagggctccacagttaggagagtgctgccctgcccaggaggtacatgctgcgggagcgggagggggccccagagcctgcatcctgc

SEQ ID NO: 785225 - DNA, 76 bp, Homo sapiens
ttaagcaaatcaagcctttgttatcagaattatttcctaacggatgttcagcgttcaagaaaattactcccaatat

SEQ ID NO: 785226 - DNA, 75 bp, Homo sapiens
attcaagattatttgcaacagctcacgggagcaagaacggataccttaggaaagccagctgctaaggatgtccat

SEQ ID NO: 785227 - DNA, 74 bp, Homo sapiens
gcgaggatgcaccttcccctgccttggaaagaccttagctggatctccaaaatacaagtgaatcacccggcagt

SEQ ID NO: 785228 - DNA, 83 bp, Homo sapiens
aaaacgatgacattttcaggaaaatcctgccgttggacataccagatggtcgaagagctccacttcctgctcattaccggagc

SEQ ID NO: 785229 - DNA, 73 bp, Homo sapiens
gagccgcctgccatgccccagccagtccccacagcataacagatgccctccaaatccttggttatggaatatt

SEQ ID NO: 785230 - DNA, 75 bp, Homo sapiens
cagaactctaaggaaagatcaagtagaactgggtgctggagaatctggtaaaagcaccattgtgaagcagatgag

SEQ ID NO: 785231 - DNA, 100 bp, Homo sapiens
accattaagctcatcagcaatggcgcctatgggtacaataagaacatgtcagaagttcctaattcagtacaacaggagacagctgttgatcttgttgcag

SEQ ID NO: 785232 - DNA, 75 bp, Homo sapiens
acaactaggagagtgtccccatccggtgagactttgcagacgatgccatggacaatattaccaggcagaaccaat

SEQ ID NO: 785233 - DNA, 75 bp, Homo sapiens
aggcggcgagagatggtcaggtctggagctcgaccgggccagggcacacacatgcttcaaccgactggatcttcc

SEQ ID NO: 785234 - DNA, 75 bp, Homo sapiens
caacttcctcaccagcaccttacagtactgccaaatctgtcgaaagggagataatgaagaactgcttcttctttg

SEQ ID NO: 785235 - DNA, 113 bp, Homo sapiens
tgggactcctacgacaacttcagtgggcatcgagatgacggcatggagggtttattacccagaactctttgtctgggtcagtcaagaaccatttccaaacaaggacatggagg

SEQ ID NO: 785236 - DNA, 100 bp, Homo sapiens
tttgctttatgattatgggaatgctaccaaagcctcaggatcccaatgaagatacagaatggaatgacattttaagagatttcggcattcttcctcctaa

SEQ ID NO: 785237 - DNA, 52 bp, Homo sapiens
cggcgacgcagcccgcggcagaagattagtgatgatgaaccaggttatgacc

SEQ ID NO: 785238 - DNA, 80 bp, Homo sapiens
attccagagagctaaagccgatggtcagcccaaggccaaccccactgtcactctgttcccgccctcctctgaggagctcc

SEQ ID NO: 785239 - DNA, 90 bp, Homo sapiens
gaagaactctgaagatgattcagccttctgcatctggatctcttgttggaagagaaaatgagagtacaggggctcaggtccaggtggcag

SEQ ID NO: 785240 - DNA, 83 bp, Homo sapiens
agaaacccactgaagacgtctgcgtgagaatagagaccaccgaggcataatcaccagcaacacccgggacaataatacggggg

SEQ ID NO: 785241 - DNA, 100 bp, Homo sapiens
atgaggcagagcctaagagaactatggcaacatcaggtgactgtcccagaagtgaatcgcaggtaaatgaaattgcctttataaatacccttgaagccca

SEQ ID NO: 785242 - DNA, 75 bp, Homo sapiens
gttgctgagagtgttaattctgctcctctcctgggcggcggggatgggagatgagttcccacttgctcacctctt

SEQ ID NO: 785243 - DNA, 100 bp, Homo sapiens
ttccacattgctgcatttgttctgcctgacttggaccctggaaaacctggccctcttcaatttctgacaaaaggagtccaacctataccttctcagggag

SEQ ID NO: 785244 - DNA, 100 bp, Homo sapiens
ggctctgcggctggtccaggccttccagtacacagacgagcatggggaaggacagagcgggatgccaccagcttgtccaaagggaagttccaggagctcc

SEQ ID NO: 785245 - DNA, 98 bp, Homo sapiens
aggggctaggccggcttgaaaagagaatcttctgctgactctcaacttttcctggaaaaaatggatcattcccaccatatggggatgagctatatgga

SEQ ID NO: 785246 - DNA, 75 bp, Homo sapiens
cttgcctcgctcactgcacgccagaacctgaggagagaatggcatgccagaatgatctttgctgagtgttccccc

SEQ ID NO: 785247 - DNA, 50 bp, Homo sapiens
aaaggaatcgtgctggaaaaagttccagccaagaggccctgcatgtgacg

SEQ ID NO: 785248 - DNA, 74 bp, Homo sapiens
agctcccattaggagccgctggctgcggcagcaggggactagcgtgagaggccttcacctaccaccatatccag

SEQ ID NO: 785249 - DNA, 83 bp, Homo sapiens
atttcatttacccgtgcgggtatacacaggctttttagatggaaaatttcatggaaatccaatgcatgtagctgtggttattt

SEQ ID NO: 785250 - DNA, 98 bp, Homo sapiens
gaacagcacctcggacaaccaggggaatgtgaccctgaaggagctgaatgctcgccccatggaagtgttcatgtgcagtgtgctcaagaggcaaggtt

SEQ ID NO: 785251 - DNA, 75 bp, Homo sapiens
ccgggatgctgtactccttgtctttgcaaacaaacaggccactgagaatgcaaaggaggaagtgaggcgaattct

SEQ ID NO: 785252 - DNA, 100 bp, Homo sapiens
ggaagagggactggaaccatctcagaagccatgcccctcaggctggaacttgccctgtctcctcgcagatgagagtaaacatcagtctccaaagataact

SEQ ID NO: 785253 - DNA, 82 bp, Homo sapiens
tgaatggcaatggcacaaagttctctcgatcagggcatacatctttcttcgacaaagggactatacaggctccaacccaagt

SEQ ID NO: 785254 - DNA, 76 bp, Homo sapiens
ttctgagctctgtgctgaacaaggaaacccagcgtttgctggcagaaccagttcctggcatcaaagccgaaccaga

SEQ ID NO: 785255 - DNA, 100 bp, Homo sapiens
agccctctggcggaagccatcagctatggagataggcagatgaagtatcgagatcgttatgattcagaccggtatcgggatgggtatcgggatgggtatc

SEQ ID NO: 785256 - DNA, 75 bp, Homo sapiens
gcgcatcgtgttcgaggcggagaccgagggggagccccgcgcgcggcgtcggcctgggctgtagagacagggaag

SEQ ID NO: 785257 - DNA, 100 bp, Homo sapiens
aacttccatgggcgcgtcacacaggcctccgtgaagaacttccagatcatccatggcaatgaccgcggccgcccgccttggcccgtctctggagtgctgg

SEQ ID NO: 785258 - DNA, 100 bp, Homo sapiens
gcgacctgggggagccgcccccgacacggcccacggaggtcctgcacataggaagcgcccacaaccgaagtgccatgccctttaccgcctcgcctgcctc

SEQ ID NO: 785259 - DNA, 74 bp, Homo sapiens
gtagagaggaccccggtacatctgaaagccgggaaatgatctgtctcgtaactgtgtaatcaaggaactagcac

SEQ ID NO: 785260 - DNA, 96 bp, Homo sapiens
gtgaccaactggtatgtgtcctcccttgcacagccacatgaggatgggacacaggagctcagtgccatggtctccatgaactgatttttttgtgca

SEQ ID NO: 785261 - DNA, 100 bp, Homo sapiens
gcttttcacctctggttcctacatctggattgtagccataagtggacttgtaacaaggagggagcgcattcttccaccttctgggtgctgctgagtatct

SEQ ID NO: 785262 - DNA, 126 bp, Homo sapiens
attatgtcatcatgacaactgcacataaagaaaaatataaatgcatacttccccttgtgacaagtggggatgagaccaccgctcttgataaggagaggcaggttttccgacgaagacgcaaccagg

SEQ ID NO: 785263 - DNA, 100 bp, Homo sapiens
acagaaaaatgcacaacagagggacaacaaaagcctcctacaagagtcctaccaaaatatggactccaattgccttgacagtgtttttagtggctgttgc

SEQ ID NO: 785264 - DNA, 101 bp, Homo sapiens
ctttgtgaagacttttgtcaagttcccacctgctgatggtaatcaccgtgtgtttgcagtaagttgtgagatgttccacttacttacatgatcatttcgag

SEQ ID NO: 785265 - DNA, 99 bp, Homo sapiens
cagcgcacccaccaagcagctgtaccctggtgcagaacatgtctcaatccatagaggtcttggacaggcggacccagagagacttgcagtacgtggaga

SEQ ID NO: 785266 - DNA, 75 bp, Homo sapiens
gagaagcaagaaggccctggacacagcaatatctctgggctttcacagggcagctgcaatgactctccgcacggt

SEQ ID NO: 785267 - DNA, 74 bp, Homo sapiens
gctgccccaatccccggcagctctctcagaagctggataagaaatcatctccatccacaggaagcctagattct

SEQ ID NO: 785268 - DNA, 83 bp, Homo sapiens
ccgcgggtccgtggagctggagcagatcccccagccggctgagacaggtcagcccaaggccaaccccactgtcactctgttcc

SEQ ID NO: 785269 - DNA, 87 bp, Homo sapiens
tcaagctcatattttgaagtgtttacggctccagaaggtcctgagcctcggccacatcagcaccgactacccgctggccgaaaccat

SEQ ID NO: 785270 - DNA, 75 bp, Homo sapiens
aatattacacttctctccttatcccctcagcagagtgtgtttaagaccaaaaaatgtaaccgattcattgagcac

SEQ ID NO: 785271 - DNA, 76 bp, Homo sapiens
aattagccactgccaaagatccctgctggccaaaacattctgattaccgctacaagcgatatattccagaaacatt

SEQ ID NO: 785272 - DNA, 75 bp, Homo sapiens
gtgatcgttggcggacattttggttgcctgtgatttgcttcggaggattattcgtatcttgaatctcagtaagag

SEQ ID NO: 785273 - DNA, 82 bp, Homo sapiens
aggccatgctcacgggggagtccgtgccacagatgaagattccaactccacagagtgaccagagagaggacgtggctgaaga

SEQ ID NO: 785274 - DNA, 76 bp, Homo sapiens
gcccggctcccgcaccatggaggaggacgacagctacgtgtgttgttggtggctgcaatgccagctttgcttctca

SEQ ID NO: 785275 - DNA, 100 bp, Homo sapiens
ctcaagaatggagtctaatggggaaggtggagggagcaaagtcctgcacactggagtggtgtactagcggatcaagtatggacactgactcagactgagg

SEQ ID NO: 785276 - DNA, 80 bp, Homo sapiens
agtacagcgcttctgggagtccaactcggctgcccacaaggagatctattccagaggggagcttcaccacttcattgacg

SEQ ID NO: 785277 - DNA, 118 bp, Homo sapiens
cgccttccagctccggctcccgctgcctgcaccatgtccgccagagagcctgtgtggtgcccctatctccttgttccaagggcctctcttgccttgaaagccttcttattacaccagc

SEQ ID NO: 785278 - DNA, 51 bp, Homo sapiens
tgtcaaaaaggaccagttgggcaagatgccttcaattaagttgcagagttc

SEQ ID NO: 785279 - DNA, 74 bp, Homo sapiens
ttggtatactacatggcaaaatgggaaagacactgccctaaccatcatggaggtggccgaggtggaaagtcctc

SEQ ID NO: 785280 - DNA, 75 bp, Homo sapiens
aaagaatcttgtcactttagccactgctactacagatacgggaaaataccttgccgtggcatcccatgataactt

SEQ ID NO: 785281 - DNA, 100 bp, Homo sapiens
cctggaggagtccctgaagatctatgctcctctgtacttgtgttatagttttgccgctggactcttccctcccttcccccaccccatcaggatgatatga

SEQ ID NO: 785282 - DNA, 90 bp, Homo sapiens
taacagcattggtcctgtgtcatcaataaacatgattcccgtgctcctgaacctgagccacgaccctgaggttggcctgcccgcaccgcc

SEQ ID NO: 785283 - DNA, 114 bp, Homo sapiens
agccctcgctgtcatcctcattgctactgccctctgcgctcctgcatctgcctccccatgcagaagtcaattcatctggaaagactatctctgagtcagacttaaaccactctt

SEQ ID NO: 785284 - DNA, 100 bp, Homo sapiens
gggaccttgtttgcctggggcaatggagaaaagcccttctgcgatgttttacctggctgcggctgtgtcagatttctatgttcctgtctctgaaatgcct

SEQ ID NO: 785285 - DNA, 100 bp, Homo sapiens
ccaccacggagttccggtacaagctcctgcgggccggcggggtgccctacgagacgctgaacaaacgctttcgcgccgctcagaagaacattgaccggga

SEQ ID NO: 785286 - DNA, 75 bp, Homo sapiens
cacagggcttcaacaagctagctgagctccaaagacaacaggccctccctctgccctcccgtctgtgagctccct

SEQ ID NO: 785287 - DNA, 141 bp, Homo sapiens
ccgcactcctgttcctggtcctgacgcccccctcccgcccggaaagctgcccagccaccagcaaccccccagggactttgaacatgtcggggatcgccctcagcagactcgcccaggagaggaaagcatggaggaaagacc

SEQ ID NO: 785288 - DNA, 82 bp, Homo sapiens
tggcacgcagcctggggactctgcctcgtgccgctgagcctggcgcagatcggtatgtgagactctgtgaagtagtcgacca

SEQ ID NO: 785289 - DNA, 74 bp, Homo sapiens
tagagccttggatccaggagaacggcggctgggatatccgacatgaagccagtgacttcccatgtagagtggcc

SEQ ID NO: 785290 - DNA, 50 bp, Homo sapiens
ctaaacttggcaccaagtatgcctggagcattggtaagcgtcacactgcc

SEQ ID NO: 785291 - DNA, 113 bp, Homo sapiens
ggagcggtggggcagaggctgcggagccccaggagggccggagccctcatgacttcagtgacctgcttctgcccctctaggtctatcagccacagtctctgcaagtttccaag

SEQ ID NO: 785292 - DNA, 88 bp, Homo sapiens
atgctacaggacaagcaaacctcagcctggaggcacttttccaggattccatatggctctcatatcattccattccatctctgccaag

SEQ ID NO: 785293 - DNA, 50 bp, Homo sapiens
atgtccttcctggactgtgggcatacggaattcctgcccctagaggagtg

SEQ ID NO: 785294 - DNA, 90 bp, Homo sapiens
cggctccggtcacgtcaccgtagcattggggagtcagcaatgtccgttgtgttaaatcagctgctgcccatgattaagcctgtaacccag

SEQ ID NO: 785295 - DNA, 100 bp, Homo sapiens
agaaatgagcagaaaggagttggggcttgatgaaggcgtggatagcctgaaggcagccattcaggtgaatgaaaactttgccattgatttgatagcagag

SEQ ID NO: 785296 - DNA, 100 bp, Homo sapiens
atgaagcctaagaatatgatcaggtgacctcacggtggacattccgatgcccaggatgccctcaggccctgtctcatgatgactcccacttccacgagcg

SEQ ID NO: 785297 - DNA, 100 bp, Homo sapiens
acaagaagttgcagctgattaaggactatcgggagaaagtggagtccgagctgagatccatctgcaccacggtgctgaatgccagaggattcaacatgag

SEQ ID NO: 785298 - DNA, 90 bp, Homo sapiens
tcccggctctcgtcagcctcccgccggccgtctccttaacaccgaacaccgagtccaggcatgataaagaaaagatagaaaagaaagaga

SEQ ID NO: 785299 - DNA, 86 bp, Homo sapiens
cagagagagcgatcaacacgctgaacggcttgaggctccagtcaaaaaccattaaggccacgtgctgtacgccgacatcaagatgg

SEQ ID NO: 785300 - DNA, 75 bp, Homo sapiens
gcgacagtggcggcggcgccatggcagggcttgcaggtcgcaatggaagaagagatcgccgcgctggtcattgac

SEQ ID NO: 785301 - DNA, 73 bp, Homo sapiens
acccaagaacattgtggagaagattgactttgacagcctgtagtggtggagacacgcccagtggatgatccta

SEQ ID NO: 785302 - DNA, 134 bp, Homo sapiens
gtctgcaccttcagaaacagtgctgaagcctttaaatgcagcatctgcgatgtgaggaaaggcacctccaccaggattcagtggtcccaatttaaaggctattttattttcaaactggagaaagtgatggatga

SEQ ID NO: 785303 - DNA, 50 bp, Homo sapiens
ccccactcctgggccgtccctgaaggcttgcacagaaatctggaggcagt

SEQ ID NO: 785304 - DNA, 100 bp, Homo sapiens
cggagcagtatttcaatgtggaggtgtgatgaatgcagactctgctaccattttggctgtttggatcctcctttgaaaaagtctcctaaacagacaggct

SEQ ID NO: 785305 - DNA, 83 bp, Homo sapiens
ccagatccacgtgggactcctacaatgcagatcttcgtgaagactctgactggtaagaccatcaccctcgaggttgagcccag

SEQ ID NO: 785306 - DNA, 75 bp, Homo sapiens
tgcatacttggaatgaatccttctagagacgtccacgatgccatggacaatattaccaggcagaaccaattctac

SEQ ID NO: 785307 - DNA, 51 bp, Homo sapiens
tgtaaacgaggccattttgctgtattatggtcgaaagatgctgttcttcat

SEQ ID NO: 785308 - DNA, 83 bp, Homo sapiens
ggaaagggccgcctcgtctccgctcctgggggaccgcaggctctgcagaacattgctgccatcagcctggccatcaactaccc

SEQ ID NO: 785309 - DNA, 100 bp, Homo sapiens
caacagaaagagcttctgaaggaagactttaaagctgcttctgcaaccccgtggccaactggattcacgcccgctccacgaggaagaagcgctgccccta

SEQ ID NO: 785310 - DNA, 112 bp, Homo sapiens
ggattttcgtctaaaaataacaagaatgggaggagaaggttccaaagaactactggttcagattttagctcttcccaagttgtgaaaatagtgaaggatgcttagactactt

SEQ ID NO: 785311 - DNA, 51 bp, Homo sapiens
cctcctacctccttctgcttcggtcatccgtccttggctcaggatttggag

SEQ ID NO: 785312 - DNA, 50 bp, Homo sapiens
ggagaccatagctgcacagccaggcagagtggcatgattccgactggata

SEQ ID NO: 785313 - DNA, 50 bp, Homo sapiens
cctagcagtcgggaccgtactgagcaattctgtggtgttcttggtcacac

SEQ ID NO: 785314 - DNA, 101 bp, Homo sapiens
ttccatggaagacttctggaagatgaaacgactacaaagtgccatgacagaaggtggtgtggttctacgggaacctcagagaatctatgaataaatggaag

SEQ ID NO: 785315 - DNA, 75 bp, Homo sapiens
agaccgcggccgggaccgaggtctcagatgcaaacatcagtgggaattgtacccacacaagcaattgcaacaggc

SEQ ID NO: 785316 - DNA, 90 bp, Homo sapiens
gggagcaaattttactttctgacaatgcagcttctcttgcagtgcaggaggaatgccagctcctgagcaggcctcattggtggaggaggg

SEQ ID NO: 785317 - DNA, 97 bp, Homo sapiens
atcttcaccatctaccactggtggcaggctgtggccatcttcaccgtgtacctgggctcgagcctgcacatgaagaatgcgtcaacctttgaggatg

SEQ ID NO: 785318 - DNA, 75 bp, Homo sapiens
tacctgcgctatgaagacacgcttcttctggaagaccagccaacaggttggtcaaagaaaaagtgatgtatgaaa

SEQ ID NO: 785319 - DNA, 74 bp, Homo sapiens
atagaagacaaggtgcggtggtcctccatgtgctctgtgaacaagcacatcatgattgacttggggactggcaa

SEQ ID NO: 785320 - DNA, 50 bp, Homo sapiens
gttcgaggagatcatcctgcagtgagaagatggtataaactggtccatca

SEQ ID NO: 785321 - DNA, 91 bp, Homo sapiens
caaccattgacgccatgtcgggttattcgagtgaccgagaccgcggccgggaccgaggaacagcagagaggggcagcaggatgaatgtggg

SEQ ID NO: 785322 - DNA, 100 bp, Homo sapiens
ctgggtatcaaatatgacccaagcattggtatctacggcctggacttctatgtggcctgcactgcccaaagtcttggaaacttgctggatatgatgtacc

SEQ ID NO: 785323 - DNA, 100 bp, Homo sapiens
aaggccgggacccggttccccggcccacagtgggggtgtgcaaacccgagagaactgggagatgcgctctgtgctgcggaaggcgggctccccgcgcaag

SEQ ID NO: 785324 - DNA, 132 bp, Homo sapiens
gcatgcgtgctgtggtcgcctagtaaacggggctgctggtgggccgcgtcgaagacatggaccagggctacggaggtgagaagccctaccactgcaactgggacggctgcggctggaagtttgcgcgctcag

SEQ ID NO: 785325 - DNA, 100 bp, Homo sapiens
taccgacccgagttatgcccaccctccaactttgcgacggaaatgtgtcatcgaaagccagcaatggctgccatccggaagaaactggtgattgttggtg

SEQ ID NO: 785326 - DNA, 88 bp, Homo sapiens
cagccgcaagtacccgtccatcatagtcaactgcgtggaagagaaggcgcctcgttcagaggctgtcactgtcctcggctctctggtc

SEQ ID NO: 785327 - DNA, 75 bp, Homo sapiens
tggcagtgcgtcaatcagagcgtcctgtgcggtactccaaagattcaggtttactcacgtcatccagcagagaat

SEQ ID NO: 785328 - DNA, 120 bp, Homo sapiens
ttgaaccagctcctgtaactgtacatattgatcatcttgtggtagagagaagtgacgatggctcttttcatatcagagtcttgtgaaaatgccattgtgtgctggaaacctggcaagatg

SEQ ID NO: 785329 - DNA, 75 bp, Homo sapiens
aatcacagtttttcaaaggactgccaaaggttctaccaaaactgcccaaggtggacccccaaaagtacaagggca

SEQ ID NO: 785330 - DNA, 100 bp, Homo sapiens
gctgcctgtcattcagttcctccagaagagcatccagcggcacctggacgacctgtcgaaactatgcagctgtcttctcctcagtgctggcgctctgact

SEQ ID NO: 785331 - DNA, 74 bp, Homo sapiens
ccgacgcaaaccaaggatctggggatcttcgcactatcccaagggtctccctccactgctgtagtaacccgggt

SEQ ID NO: 785332 - DNA, 100 bp, Homo sapiens
aagtactgagcctgttggaggaactggcccggaaacaggaggacgcgtctacggtgacgtgcagcgcgtgaagatcctgttcaataagaaggagaacgcc

SEQ ID NO: 785333 - DNA, 80 bp, Homo sapiens
ttaccgagagtttgaaagtgcgattgtggaagctgctcggataagtttataccatggatagcacaaaggagaagtgtgac

SEQ ID NO: 785334 - DNA, 90 bp, Homo sapiens
ccctcatcctagccgcttcatggacttggatgaactgcagaatcaggggtggacccgaactccccggtgctcttggaggacccagtcctt

SEQ ID NO: 785335 - DNA, 141 bp, Homo sapiens
aatgaccaatgtgtgatttcagtggaataaatggcgtccaaagtcacagatgctatagtctggtatcaaaagaagcactgggtattgtacccctccaatatgtgtttgttatgacctttacacttgatgatggaacaggag

SEQ ID NO: 785336 - DNA, 75 bp, Homo sapiens
gggaacgtgagtatcaaccaagagcaaaatatgctgtgaattccatcaagaagaaagtcaacgacaagaacccac

SEQ ID NO: 785337 - DNA, 75 bp, Homo sapiens
gaagaaattcgacaagaaggatgaggagtcagttcattatgctgacatatcttttcatgttggcctggctgggag

SEQ ID NO: 785338 - DNA, 75 bp, Homo sapiens
ctctcctccttcttcctcaactatctcgctgacacgcaggagagaaaatgcagccccagagaaggatgagactgg

SEQ ID NO: 785339 - DNA, 75 bp, Homo sapiens
attttcgcctgcttgcagagctttccagcccgtttgtgaatcagcggttatttggaaatagcggtgcttgcagcg

SEQ ID NO: 785340 - DNA, 100 bp, Homo sapiens
ggctagcatgatggaggcagccatgtactaatggtcacttgatgtgcgctggctgttttatccacctactagcagatgcccggctgaaggaggagcaggc

SEQ ID NO: 785341 - DNA, 97 bp, Homo sapiens
ctcgctcccgccaccgccggacttcaatgcccagtccccagctcgccagcgaaatcttcagaggaactagacatggacaaggtgacagcagcaatgg

SEQ ID NO: 785342 - DNA, 96 bp, Homo sapiens
ggcaggagggcctaaagtccaagtttccctaggacttctgcatgcccatgccacacatatcctgtggcccccagagcgctggcagaaattggaatc

SEQ ID NO: 785343 - DNA, 75 bp, Homo sapiens
aggtggctcaggaggtctggcagctgctaagctcgtttgtggtggaaagacagccctgcatgccaacgcaccctc

SEQ ID NO: 785344 - DNA, 87 bp, Homo sapiens
aaatcgtgcacatccaggctggtcagtgtggcaaccagatcggtgccaagacaatgcagatcttcgtgaagactctgactggtaaga

SEQ ID NO: 785345 - DNA, 83 bp, Homo sapiens
atgcagagatacagcaaaagagtctacatagagaaaagaaaccttgtttattccctgtgaaaatgagaagatttctaaacagc

SEQ ID NO: 785346 - DNA, 100 bp, Homo sapiens
gaagaaggctgctattgaaagagagtatgcacagtgttatagttttgccgctggactcttccctcccttcccccaccccatcaggatgatatgagacttg

SEQ ID NO: 785347 - DNA, 75 bp, Homo sapiens
cagcagcaccaagtcgggctggccccgacagaacgaaaagaagccctccgaggccaggagtggtggctcacacct

SEQ ID NO: 785348 - DNA, 75 bp, Homo sapiens
caatcagtgccgagcaattgtgatgagatattctgctgagtggaagatccccatttctgcacttgtctcatttgt

SEQ ID NO: 785349 - DNA, 101 bp, Homo sapiens
cgaggtccctctttggggtggctctttgctaagtgctgctgttgcttcccgtgtagagaataactgaagtgaagtgatggactccgatttggagagtagta

SEQ ID NO: 785350 - DNA, 83 bp, Homo sapiens
gatgccacaaccataatagaatgtctacattcctaaaccagggtggttatgaccgctactcaggaggaaattacagagacaat

SEQ ID NO: 785351 - DNA, 100 bp, Homo sapiens
cttctggtactttgtatctcagttaaagaagatgaagaagtcttcaggggagattgtctactgtgggcaggtgtgtgctgaagatggatcaccactgccg

SEQ ID NO: 785352 - DNA, 50 bp, Homo sapiens
gggcatacatctttcttcgacaaagggcccagtgacgagcaccatccgga

SEQ ID NO: 785353 - DNA, 98 bp, Homo sapiens
tccagcgctccttgctcgcaaggcgggggaggcggcggcccagccacgatgatgatagaggtactgacaacaactgactctcagaaactgctacacca

SEQ ID NO: 785354 - DNA, 101 bp, Homo sapiens
gcctgcacagccgcggcggcagcagcagtgagagcaggacagctggcctgaagctcagagccggggcgtgcgccatggccccacactgggctgtctggctg

SEQ ID NO: 785355 - DNA, 100 bp, Homo sapiens
gaagaaataatgacccaattacaagttctaaatgcctgtaagattggaggtatttctgggaaaagccagcttctgtttgcactggtcttcacaactcgtt

SEQ ID NO: 785356 - DNA, 103 bp, Homo sapiens
cccgtgcaggcggtgcccccgccgccgcccgtgcccacggagcccaaacaggtgccctacgagacgctgaacaaacgctttcgcgccgctcagaagaacattg

SEQ ID NO: 785357 - DNA, 74 bp, Homo sapiens
gctgtgttccagttagctttgctaccagttatgcaggtcatcatcagatttgaaatatttaaagtggatacaaa

SEQ ID NO: 785358 - DNA, 51 bp, Homo sapiens
aactggttctacacgcgagctgttgcccagaagattgttgccacaaggaag

SEQ ID NO: 785359 - DNA, 50 bp, Homo sapiens
ggctgaagcgactgagtccgcgatggagttaccggtattgtaagaacaag

SEQ ID NO: 785360 - DNA, 82 bp, Homo sapiens
aagccgccgcctcgacccagggcccgcgggccaggagagcgctcggcggaagtcccgggcccagagcccggccagcaggagc

SEQ ID NO: 785361 - DNA, 82 bp, Homo sapiens
gtgaaattgaggaatcccaattgaagtttttgaggaattacatgaatgacagtcttcgaaccaatgtgtttgttcgatttca

SEQ ID NO: 785362 - DNA, 103 bp, Homo sapiens
tccaccctgctgggaatcccgttcttcgccatggtgcgaggacgacgggcagacgttcttcagcctagatgacgggaacaccaaattctctgacctgatccag

SEQ ID NO: 785363 - DNA, 100 bp, Homo sapiens
accggagctgttcctattcggccatctttgctcctccctgcaactaactccattcttaattggatattgacggccaagcactcctgcttctgacccttcc

SEQ ID NO: 785364 - DNA, 75 bp, Homo sapiens
tctgggcttcatagcattcgcctactccgtgaaggttgactgcattcagccagtgccaaaagaggagcccagtcc

SEQ ID NO: 785365 - DNA, 51 bp, Homo sapiens
ccgttgcaatggataagtttggattcagtcaccattactttaagtactgca

SEQ ID NO: 785366 - DNA, 75 bp, Homo sapiens
aactcctctttacttgctgtcagctgcggagtgttatagttttgccgctggactcttccctcccttcccccaccc

SEQ ID NO: 785367 - DNA, 82 bp, Homo sapiens
taagcctgcacagccgcggcggcagcagcagtgagaggctcccgctggtgtccctggagcatgggaggctgctgagcgtgag

SEQ ID NO: 785368 - DNA, 100 bp, Homo sapiens
gaacccatcgggcagctacacatcttgaaagagaagctcttcctgtgagcttcttctcagcctgttgataaccatgttagcccatcttccttcttgggcc

SEQ ID NO: 785369 - DNA, 75 bp, Homo sapiens
gcaactctcagttcgagagtaaagggggaaatttgcagtggtgagaaaatgtataaagaaagattctgggaaaga

SEQ ID NO: 785370 - DNA, 100 bp, Homo sapiens
gtccaccagatcatccatgtgagtgaccatgcagcaaaagaaggagggtcctctcagtgattaaggaggctgaacagtacccagggggagattcgtgtcg

SEQ ID NO: 785371 - DNA, 97 bp, Homo sapiens
cgccccgcccgcaggtgctatgctgtgggccccgctcagtattaattttaaagacccacagtttgctgaagattacatttttaaagctgtaatgctt

SEQ ID NO: 785372 - DNA, 100 bp, Homo sapiens
gtcacatgctgtggttccttatgcatcacctgagacagagacgccatcaccgggtcagaatggcggcagtggagcatcgtcattcttcaggattgcccta

SEQ ID NO: 785373 - DNA, 97 bp, Homo sapiens
gcgcccgcggacgcaggggcgttcaatggtctattctggataagcaggttttgtgaagacatttattctttcttggacctcagatttaccagacatc

SEQ ID NO: 785374 - DNA, 101 bp, Homo sapiens
gccaagcagaaggtgccgcccgtgctgcaggtgctgcattgcggggatgagtccatgctggacattggaggagatctataaggacaggcagaaattctcag

SEQ ID NO: 785375 - DNA, 101 bp, Homo sapiens
ggtcgatggtcggcggcgcccggatgggcagctgagaaagctcctgctgcttctgtaccccgcctgtccctcccagctgcgcagggccccttcgtgggatc

SEQ ID NO: 785376 - DNA, 50 bp, Homo sapiens
aagaaattactgtctcaagtgatacgggggaaatttgcagtggtgagaaa

SEQ ID NO: 785377 - DNA, 82 bp, Homo sapiens
cagcgggcgggggcccacgaggcagctgtgcggagggtagtggcagccatgaaccggatggaccagaagaagcacgagaagt

SEQ ID NO: 785378 - DNA, 100 bp, Homo sapiens
ttctgtcgtgtcgtcgctgctggcacttcaggctctggtgaaattaaagagccccttgaaatctctatatcacaagatgtacatgattcaaaaaatactt

SEQ ID NO: 785379 - DNA, 98 bp, Homo sapiens
cctggacaccttcaactccagcacctggaatttctgctcacagaattggagtcaggtgttcaggcgcttcgtggaggttggccgggtggcctatgtct

SEQ ID NO: 785380 - DNA, 101 bp, Homo sapiens
gcgggaagaacaagcagcgaactaaagggaacctgaggctctagaggacaaaatcccagtccttggcacaaactcaggaaatggaagccggagtctgtttt

SEQ ID NO: 785381 - DNA, 100 bp, Homo sapiens
gcaatatcaactaactgtgcaggcatttcagtagaaccatggaggagctggttcatgaccttgtctcagcattggaagagagctcagagcaagctcgagg

SEQ ID NO: 785382 - DNA, 75 bp, Homo sapiens
cagccctgccagctgcgccgggacggtgagatttgtggatttaaaattcacgggcagaatgtcccctttgatgca

SEQ ID NO: 785383 - DNA, 90 bp, Homo sapiens
cggccaggtacgcgccgccgccacagttgcgctgctagcgacgaggttctggacgtggcatgaggagcgcttcctctacatgctcatgga

SEQ ID NO: 785384 - DNA, 97 bp, Homo sapiens
tggcttgtggtgcggcctcaccatacaggaacagggcagacgttagcgtgagtgatcactctcaatcccgggtgaggacaccagtgatgaattctga

SEQ ID NO: 785385 - DNA, 97 bp, Homo sapiens
gatatactattgtactatggacttcatcgctttataaatactctggagcagtgcaatgtgtgttccaagcccatcatggagcggattctccgagcca

SEQ ID NO: 785386 - DNA, 93 bp, Homo sapiens
tactggggccagggaaccctggtcaccgtctcctcagggcgtgatggtgggcatgggtcagaaggattcctatgtgggcgacgaggcccagag

SEQ ID NO: 785387 - DNA, 82 bp, Homo sapiens
tgggcgccgcgccgcacgagcaccagcctagagccaggttttaaaatcaaagatgggaaaatcggagaaaattgcccttccc

SEQ ID NO: 785388 - DNA, 101 bp, Homo sapiens
gcggcagcggcggatggagctggagcagaaggtgcaggaggtgctgaaggccagcctgttcgacatgggcggtgagtattactgcttcgcttccgacatca

SEQ ID NO: 785389 - DNA, 113 bp, Homo sapiens
ctagtccagaagctggcaaaagaaaactatcagtttttgcagacggacaaaaaagaacaggagaagtctgaacacaaaacgttgtgtgacgtgatcctcatggtccaggaaag

SEQ ID NO: 785390 - DNA, 82 bp, Homo sapiens
aagccctttgttctaaaattacctcataggacagatggcgttcaggaagtggcttatattcactcaaaccagaatgtaattg

SEQ ID NO: 785391 - DNA, 103 bp, Homo sapiens
cccatggaataaagagctgtatttgatcaggtatgagagaatcgaaatcccaatccatattgtacctcatgtcactatcgggaaagtgtgccttgaatcagca

SEQ ID NO: 785392 - DNA, 97 bp, Homo sapiens
atttctggttaacactggaactactctaacatttgacactgaacttacagtgcaaacggaccacttaatagtgagtcttccaaccagagcttgtgca

SEQ ID NO: 785393 - DNA, 118 bp, Homo sapiens
tctcttcatgggccatgcccggtgaccacttttggaccaaaggcctgtgtgctgcagaacccccagaccatcatacaaatttacatgtattggagaccagaccagaagcccttctgaa

SEQ ID NO: 785394 - DNA, 95 bp, Homo sapiens
ctacaaccctgaagtgcttgatatcacagaggaaactctgcattctcgcttcctggaggaccctgatgctcccataagacagaaaatgccccttg

SEQ ID NO: 785395 - DNA, 75 bp, Homo sapiens
cgcgcttcgaagccgagaaagcccgctgggaggccgagcgcgccgagttacaggagggtgtgaagacagagaatg

SEQ ID NO: 785396 - DNA, 75 bp, Homo sapiens
tttcgcatcctggggacgaatcctgagcttgccagagacgggcggcgcaaggcggtggatgaggagggctgctcg

SEQ ID NO: 785397 - DNA, 80 bp, Homo sapiens
caggaaccaccagtgacagactttgcttgtgccatctgcccccatcgaccggtactggacaccctggccatgctgactgc

SEQ ID NO: 785398 - DNA, 76 bp, Homo sapiens
tgcaagcaggcaacctgaatacaggtatggacctgtctgccaatcaggacgaggagaccgaccaggagaccttcca

SEQ ID NO: 785399 - DNA, 96 bp, Homo sapiens
ccagcagatgcaggaaaatttcgatattgaagtgtcaaaatccatagatggaaaagatggacacattcagctaacgtattttagcaggtggagtga

SEQ ID NO: 785400 - DNA, 100 bp, Homo sapiens
ccatggcgaagcacgagcagatcctggtcctcgatccgcccacagacctcaaattcaaagtgtggacaacagtgagtatatgcggaatggagacttctta

SEQ ID NO: 785401 - DNA, 100 bp, Homo sapiens
tggtcttctgtcaaaaacacagggatgagcatgcagcagattggaataaatatgatgaccgattgatgaaagcagcagaaaggggggatgtagaaaaagt

SEQ ID NO: 785402 - DNA, 82 bp, Homo sapiens
taaaagaggacaccaacagtgtggtggagaaagcaatggatgaaatcaaatcccaagtgtccccagttgtcctcatccaggg

SEQ ID NO: 785403 - DNA, 83 bp, Homo sapiens
aagctgagcgagctgtcagagcccggggacggcgaggccctcatgtaccacacgcaccgaacaagatttgtgatgaaatggag

SEQ ID NO: 785404 - DNA, 80 bp, Homo sapiens
ccaaggaggtcacccgcgtgctaatggtggaaacccacaacgaaacctgctcctccaaagccagagcccaagcctaaaaa

SEQ ID NO: 785405 - DNA, 100 bp, Homo sapiens
tttcctccagaagcacaaaatgattttcctgttgcaatgcaggttctgtacagagtaatgagatgtgtgacggctgcaaaccaggtgtttttttctgagg

SEQ ID NO: 785406 - DNA, 100 bp, Homo sapiens
gaagaaactaaagcttgacggcttggacgaagatggggagaaggaagcgagactcatacgcaacctcaatgcattccagttggcttttgagtggatacgt

SEQ ID NO: 785407 - DNA, 100 bp, Homo sapiens
cgggcggccgcggcgcggcgggaccatggagctcagagcgcagccccggcgccggcggcgggaccgcggaccgggggtccactggacggggcctgagcta

SEQ ID NO: 785408 - DNA, 75 bp, Homo sapiens
ctttcagaaacttattcacagttaccaaagctgagacgtctcagagaggctgtgcagctgctggaggactataag

SEQ ID NO: 785409 - DNA, 96 bp, Homo sapiens
ggaacatcctgttactgagatgatcacaggaactgacttggtggagtggcagcttagatgcaagtatgacttttgctggatttgccttgaagagtg

SEQ ID NO: 785410 - DNA, 100 bp, Homo sapiens
acagcaacttgtgattggcggtgaccggatattcagttgcacatccccacatcaatgcactgccaatgtggaatactagagcaaagagagagaaactgac

SEQ ID NO: 785411 - DNA, 83 bp, Homo sapiens
gtgcatctggctgttagaagaattcatgctcatccggcttggacttaaagtatgatgttgaatatccttgatgaacattgatg

SEQ ID NO: 785412 - DNA, 91 bp, Homo sapiens
caacgcctggctcggagcagcagcctctgagagacagggcagggcattgttcatgcactgaccgacctcagcagccccggcatgacctcag

SEQ ID NO: 785413 - DNA, 75 bp, Homo sapiens
aagagtgcctctgctgtgtactggagtgagtttgaagaagttcagaaatctcctgcaaagaagctgagccatgca

SEQ ID NO: 785414 - DNA, 100 bp, Homo sapiens
cttcgggtctcacccttcggcctccgcacttctccatatggcagcagcctggacctcagcactggcaggccctcgggaccaaggatcacgtcatgactcc

SEQ ID NO: 785415 - DNA, 100 bp, Homo sapiens
ggatacaaatggttcacagttcttcatggaggcatgcatctccccatgtgctatgatgctggctctggtgtacattgaacggctccggcaccgaaaccca

SEQ ID NO: 785416 - DNA, 100 bp, Homo sapiens
gccaagtacccgcgtgcatacggctgccggcatggcacattacaacttcaagaaaattacggtggtgccgtccgccaagcttcccaagctcttccttcag

SEQ ID NO: 785417 - DNA, 90 bp, Homo sapiens
gccaagcagccttagccctagtgtagagggttctggctggtgtggaccatcatcatcatcctgagctgctgctgtgtttgccaccaccgc

SEQ ID NO: 785418 - DNA, 75 bp, Homo sapiens
gcgctgcgcccggacagacaaggacttaaccaccaccatgtcgagcaaaagaacaaagaccaagaccaagaagcg

SEQ ID NO: 785419 - DNA, 83 bp, Homo sapiens
tagaactcagggttgcagcgtctggagcacaagaccctgagaaatcgagttatggtgaatggttgcatggatttgaaaaaaag

SEQ ID NO: 785420 - DNA, 97 bp, Homo sapiens
gtccacggagctcaatggcggcagtcgcgctgagggactcggctcaggctctgacgcccgctctgcggcttcggtgtttgaacaggccacagtccag

SEQ ID NO: 785421 - DNA, 75 bp, Homo sapiens
ctccaggggaacaatgaggcctacgcagagctcatcgtccttgagaaatggaaggtgaacttgaagttatttggg

SEQ ID NO: 785422 - DNA, 100 bp, Homo sapiens
gagagaaatacgttttcaatggattgccacagtaaggtttttgagtcatgatgcaagaatctgggactgagacaaaaagtaacggttcagccatccagaa

SEQ ID NO: 785423 - DNA, 50 bp, Homo sapiens
gtggaggaaaacaacttcgagggcagaaaaacttggaatataacgtggag

SEQ ID NO: 785424 - DNA, 74 bp, Homo sapiens
tgaatttaaaggagcagccctggtgtcacctatcagtaaaagacatatctgaagagatggattaagaatgcttt

SEQ ID NO: 785425 - DNA, 71 bp, Homo sapiens
cacttcccgcttgggcgcccggacggcgaatggagcaggggcgcgcaggcatctgggaacaaagtcagtcg

SEQ ID NO: 785426 - DNA, 73 bp, Homo sapiens
aatcccatcctctttcgaggtgttggtattttcctgacagcagcccttggatttcccgaggctttgattcctg

SEQ ID NO: 785427 - DNA, 83 bp, Homo sapiens
tcccctggctggagtgccctgcctggagggagccctcctggctgggggcaagagacgagttgtactgctgtcacaggaaatgg

SEQ ID NO: 785428 - DNA, 50 bp, Homo sapiens
agatatggcgcaactgcggcgcatcctgcccggcctgtacatcggcaact

SEQ ID NO: 785429 - DNA, 98 bp, Homo sapiens
cgagctgtgaccgccgccactggggcagccagcacaatcgggcggaggtggcgctgccccttcaggcaaagcgaaggctggagctaggagaaagcggt

SEQ ID NO: 785430 - DNA, 100 bp, Homo sapiens
gtccaggtgatcatggagacgcggcaggtggcctggagcaagaccgctgacaagatcgagggcttctgtttgagaaatttctgtggttcattagctcaga

SEQ ID NO: 785431 - DNA, 100 bp, Homo sapiens
tgaaggagaaattcgactatggcaacaagtacaagcggcgggtgccccgggtgaaaggtgtagcagtcactcggcctacacccacagcatcgaccttgtg

SEQ ID NO: 785432 - DNA, 100 bp, Homo sapiens
acttagcttcaaagaaggcaatcagggattagaaagttatgtggcagataaagaattccatgcacctctaatcatcgatgagaatggagttcatgagctg

SEQ ID NO: 785433 - DNA, 75 bp, Homo sapiens
gtgtctgtgaagtagacaatgagttgcgtatttgtgctagagataagtgcttgtctcctcactaggtcatttgga

SEQ ID NO: 785434 - DNA, 75 bp, Homo sapiens
aatacatgatttaaacaagagatttccacagaaggacgtagacaagtttggcaacgagatcacccagctggcccg

SEQ ID NO: 785435 - DNA, 97 bp, Homo sapiens
atgatgtgttgaaggaagctgttcttaagaaactaggaggagacaatacccagttggaggctgctgaatggttggtttcagtgctgatgaaacttgg

SEQ ID NO: 785436 - DNA, 88 bp, Homo sapiens
gccggtcacctccgcgcggacaccaggttggtgttcgaggaagagacattgttgttcttggtgtggagaagaagtcagtggccaaact

SEQ ID NO: 785437 - DNA, 82 bp, Homo sapiens
gcggccatcgtcatcctgctgctgaagatctggaagacgcgctcctgcgccgggccgagaactactggtggcgtggccagaa

SEQ ID NO: 785438 - DNA, 82 bp, Homo sapiens
aagaacatgaaacacctgtggttcttcctcctgctggtggcagctcccagatcttccccgggcgctgcctggacaggcctgc

SEQ ID NO: 785439 - DNA, 100 bp, Homo sapiens
caggggacagcgtcatcagggaatgtcagtgacttggcgcagactgtcaaaacctttgataaccttaagcccaccttgggacaccttgactccaagccca

SEQ ID NO: 785440 - DNA, 100 bp, Homo sapiens
cgtggcctcctctccgccctagcgctgaggacttgaaagaggagattgatattcgactctccagggttcaggatatcaagtatgagccccagctccttgc

SEQ ID NO: 785441 - DNA, 138 bp, Homo sapiens
gaatcatggcggctgcgctgttcgtgctgctgggattcgcgctgctgggcacccacggagcctccggggctgatcattgagaagcagccaggccacattcggagcagggttttcagggaggtggagatgctgtaccag

SEQ ID NO: 785442 - DNA, 100 bp, Homo sapiens
gcggccgtacaagtgtgtgcagcctgactgtggcaaagcctttgtttccagatataaattgatgaggatgacgatgtcgataccaagaagcagaagaccg

SEQ ID NO: 785443 - DNA, 100 bp, Homo sapiens
ccgtcgctctgtgacctgctggcattgaatgatttatagctaagactccaggacacccctgaagccgagaaatgtaaagatgacggcgccttgaggtaag

SEQ ID NO: 785444 - DNA, 75 bp, Homo sapiens
gctccacaatgaactacaaaccattggcttccaggagtagtgaagaagttctcactgcagaagattgtgaaaatg

SEQ ID NO: 785445 - DNA, 90 bp, Homo sapiens
tggatggataagaattttgataaaatcagagtgtggctgcaaagtgaaaagcttgaacatcggcttcagctccccaggaatatgattgaa

SEQ ID NO: 785446 - DNA, 95 bp, Homo sapiens
ctattatatcgatccacccaaaaattcaggacttcatagacctcacgttgtcgaagactcaacgaaagactccaaccgttattcataaacattac

SEQ ID NO: 785447 - DNA, 78 bp, Homo sapiens
aaagatggcggcagggaccagcagttactgggaagtgtgaagcctcagtttaggtcatctggtggttcagaacactca

SEQ ID NO: 785448 - DNA, 100 bp, Homo sapiens
tcaaatggtatttttgattttcctcttccagtccttaaagcaggtgttcctccaagaaaagctggttatattgaagacctggttttgatgctgcctcaga

SEQ ID NO: 785449 - DNA, 100 bp, Homo sapiens
gaatgaagtgcttcctggagctaaggccagcattgaaacaggggaccgtgtctggaggatgcctctcttcgaacattatacaagacaggttgtagattgc

SEQ ID NO: 785450 - DNA, 74 bp, Homo sapiens
aagaaaaatgtccttaaagcaattgagcaggctgatctactgcaggagcttggatttacactgggcaacgtggt

SEQ ID NO: 785451 - DNA, 109 bp, Homo sapiens
aggagctgtgcagccgcgaggaggcgcgggaggtgttcgagaacgaccccgagacggaagccatcttcgacaagagcacagggaaggttgttttgaagacgttcagcct

SEQ ID NO: 785452 - DNA, 75 bp, Homo sapiens
gtgctcaaagccatcgtgaacaatgccttcaaacatagaggcggggtttcaccatgttgcccagactggtcttga

SEQ ID NO: 785453 - DNA, 100 bp, Homo sapiens
ctgcagtacctgcagaaggtctctggagacatcttcagcagggcagctggtggaatttttgaagaaaatggaatctcgaggccccctttcgtgcgacacg

SEQ ID NO: 785454 - DNA, 50 bp, Homo sapiens
gggttttccagatcctagacagtaagatgcatcatcccattcagatgaaa

SEQ ID NO: 785455 - DNA, 82 bp, Homo sapiens
tggccgctgctgtcgctatggagacaggagagctcaaaggatggctactgacatgcagaggaagagaagcagcgaatgcctt

SEQ ID NO: 785456 - DNA, 82 bp, Homo sapiens
ctgactttcagctatggaatcgctcaccatggatgatgatatcgccgcgctcgtcgtcgacaacggctccggcatgtgcaag

SEQ ID NO: 785457 - DNA, 90 bp, Homo sapiens
gattgagattgaacaacttttggcaagggcatctaataggattcaggaatcaaagaatcagtgtactcaggtggtacaggaaagagagag

SEQ ID NO: 785458 - DNA, 80 bp, Homo sapiens
gagacctgccgtgggaccccagagattcccaatcgtatacatgggagtgtcgctctggaaacattaaggcagcagcaggc

SEQ ID NO: 785459 - DNA, 141 bp, Homo sapiens
gcggtggttgtgtgggaaacttccctgggaacagaacctgaaggaccctgtggctgtgcagactgctaaaacaaacactattcctgatcagagaactccagttgcttcaacacacagtatcagtagtgcagccaccccaga

SEQ ID NO: 785460 - DNA, 100 bp, Homo sapiens
ggactattttcacgttttaatgccgagagttgattatggaagattcccacaagagtaccacgtcagagacagcacctcaacctggttcagcagttcaggg

SEQ ID NO: 785461 - DNA, 100 bp, Homo sapiens
gaaagagtcaacagcagtggcaacaggcacatgaggcagcattggaagccagagccagtccagagatgagtgaccgaatacagcacttggagagagagat

SEQ ID NO: 785462 - DNA, 100 bp, Homo sapiens
gcagcagtggatcctggaaacctgagaacccagacttcttctctgccatgggggatgatcagtgtgtcccggcatggatatccggaacaacctcactagg

SEQ ID NO: 785463 - DNA, 100 bp, Homo sapiens
ctgctcaagacggagaataccaagctgcgtaggaccaaatccggacaaaggacagagtctttgacagtatcagccacctcatcaaccaccacctagaaag

SEQ ID NO: 785464 - DNA, 80 bp, Homo sapiens
ccttgcctagtgggccttccttcccagttacagaatgtctgaaggggacagtgtgggagaatccgtccatgggaaacctt

SEQ ID NO: 785465 - DNA, 100 bp, Homo sapiens
ctggagctcaacggcagcatcctgagtgcaaactgccctatgatgtgacccctgagcaggcgctagctcatgaagaagtgaagacacggctagacagctc

SEQ ID NO: 785466 - DNA, 75 bp, Homo sapiens
ggcagtgctcaaactcaccgaccaggtgtggacactgccagcggctgcagccgacttggaatgacctgggagaca

SEQ ID NO: 785467 - DNA, 90 bp, Homo sapiens
gggaagggcgagactggagcagagccgctgggcgccggagccgaggcgagcgccgcgcgcaccactgcatcttggactcaagtgattctc

SEQ ID NO: 785468 - DNA, 82 bp, Homo sapiens
gtggtggtcggatttcaccacaagaagggctgccaggagcatattaatgaaaagtgccataaactgaaaaaccaaacatgag

SEQ ID NO: 785469 - DNA, 100 bp, Homo sapiens
cgactacagcatggtggagtcgcctctgatctgcaaagaaggagaaagcgtgcaggaggcacgcggacctccagtggccggctccggaggcttggtgact

SEQ ID NO: 785470 - DNA, 80 bp, Homo sapiens
gttggatcacactcgtgcagtcaattatttcagcaaggtgaatcaattcagatatttgctgagattgagaactgctcttc

SEQ ID NO: 785471 - DNA, 73 bp, Homo sapiens
tttttctcagaagagaattccacaagctttgctgcaagataacatcgctgatgctgtagcttgtgcaaagagg

SEQ ID NO: 785472 - DNA, 75 bp, Homo sapiens
ccagcaaccatgagtggttccatgatgggaagtgacatgtttgcttgcctaaactggacttgaagcaatttaaac

SEQ ID NO: 785473 - DNA, 96 bp, Homo sapiens
ataaggacaaaagccaagaggaggacagttcgctacacagcaatgcatcgaggttatggacctcaaaggccaaatgatctacattgttgaatccag

SEQ ID NO: 785474 - DNA, 100 bp, Homo sapiens
cagccgcgcttctgtccgcctgcagctttattcacagtgacagtccctaaggaactgtacataatagagcatggcagcaatgtgaccctggaatgcaact

SEQ ID NO: 785475 - DNA, 82 bp, Homo sapiens
aacgaggcaaggagctaaagcagcgtgcgttcagccctgggtcactctctgaaagagaacaaagtaattttctgaagggaag

SEQ ID NO: 785476 - DNA, 83 bp, Homo sapiens
atgcagcttcagcagaggctgcagggccagcagcaatgatgggacagaatttggaggatcaatttatcagaaagtttgtgaag

SEQ ID NO: 785477 - DNA, 98 bp, Homo sapiens
tatttcagaactgttctcaggactcattattttaacatttgggagaaacacagccagaagcactggccccctcaccttttcctttccagctgtttggg

SEQ ID NO: 785478 - DNA, 100 bp, Homo sapiens
taccagtgcaactgccagccaggcacgtcagtaaaagaagccttgagccctataaaatttaacagatggggtctcccagaagtagatccagaaactatgc

SEQ ID NO: 785479 - DNA, 75 bp, Homo sapiens
caacaccacaataatccacagccaagcttcaaggttactgactttttatgatgtttggtggctatgagactatag

SEQ ID NO: 785480 - DNA, 90 bp, Homo sapiens
agtgagagcacttaaaggccacgtggaacagaagagactaagcaatgggaaacttggtctccatcatcaccagttccagtagtgaaaaac

SEQ ID NO: 785481 - DNA, 100 bp, Homo sapiens
ccttctgctctccagcgctctcagcaccaaggtactggaagatgaaagagactatacaagggaccgggtcctgggggcctgagcctcctggacccggcat

SEQ ID NO: 785482 - DNA, 100 bp, Homo sapiens
ctgaaggcgggtagtccttcgcgtcttcatttcctcggtttcctggggtcgcggctgcctccgctgcctagaccgaagttttcggctttgtgagaaacct

SEQ ID NO: 785483 - DNA, 90 bp, Homo sapiens
gtccaaccttctcaacctcctgctgctgtctttgtttgccggattagatccttccaagggtgcctctgccaactggtggaatcatcgcca

SEQ ID NO: 785484 - DNA, 100 bp, Homo sapiens
caacaaaacaggtcatcactaagaaatcaggtgtagttctgctgaatcctattcctaagtttgacggtgagaacatgtatatgagcatgacagagccgag

SEQ ID NO: 785485 - DNA, 99 bp, Homo sapiens
atgggtatccatggtgacaagagtcaacaagagcgtgactgggttctaaatgactctattccgacatcctccaacatggaggaaacgcagcagaaatcc

SEQ ID NO: 785486 - DNA, 100 bp, Homo sapiens
gagcctctctcctctgcaacctgataggatttggctacccagcctacatctcgatgtccttggtgaggattttgaaaatttgatcttcacaagagttgcc

SEQ ID NO: 785487 - DNA, 50 bp, Homo sapiens
cagcagacatgccttgttggaatcgagtgagcgattacagtctgacctgg

SEQ ID NO: 785488 - DNA, 87 bp, Homo sapiens
cctcggggcccctccagacccttccgcaaggagccaccatgttggtgataccccccggactgagcgaggaagaggaggctctgcaga

SEQ ID NO: 785489 - DNA, 74 bp, Homo sapiens
gagacctctacttagctcagcaattcttaccttgggtcaccagtcgttggcacaccaagaagctgccccgcaag

SEQ ID NO: 785490 - DNA, 75 bp, Homo sapiens
ctgaagtctcctcagcccagtcactgaggcaccgggggagacgcggagggacagaagatgagcctgtcggtcctg

SEQ ID NO: 785491 - DNA, 90 bp, Homo sapiens
ccgccgctcgcgccgggcccgtggccggcaagtgcagccgcggagccctgtacacaggcttttccatcctggtgactctgctcctcgctg

SEQ ID NO: 785492 - DNA, 74 bp, Homo sapiens
ctgaggaggcgagctagccgggagttacaccgccaccgccagattcatgttacatgtaaagctgtcctcatttg

SEQ ID NO: 785493 - DNA, 74 bp, Homo sapiens
gaggaaacctagccctgtctattcatttgggtagctttggatatgttaaatcctcatgttactttgcctgtttt

SEQ ID NO: 785494 - DNA, 104 bp, Homo sapiens
atggctgcagtccgtatgctgagaacctggagcaggaatgcggggaagctggagagattaaacagattctagaaaatgaacttcagatacctgtgtccaaaatg

SEQ ID NO: 785495 - DNA, 100 bp, Homo sapiens
ttctgggtgactatgtggacagaggctatttcagtatagagatccttgccagcacattacagaatatttttgttgaaccttcttgagaattcagagaaac

SEQ ID NO: 785496 - DNA, 58 bp, Homo sapiens
ggcgccggagacgatgccgttgtctgcctcagccacctccctgacgctgtcccactgt

SEQ ID NO: 785497 - DNA, 100 bp, Homo sapiens
cgcccaacccaggtccccgaagcaagcctcctgatttaaagaggactactgagcccagccaggctgtatgccattgctgccaaagaaaaagatattcaag

SEQ ID NO: 785498 - DNA, 75 bp, Homo sapiens
tgtacatccactggacctaaaatatgaccctgatccaggtgtgataaagcggaattgggaatatatatgtagcca

SEQ ID NO: 785499 - DNA, 100 bp, Homo sapiens
gccatactgtcggtggagaagaggtggaatgaatcttacttgttgaatatcttctggttactagttggattcatttgtgaaagaatcattttcccctgtg

SEQ ID NO: 785500 - DNA, 96 bp, Homo sapiens
cgccgctgcgcccgacgctccctgtctgggaccttctccctgcctggacccctactattgcaacaagaaatctccaaattggacatccagagcagc

SEQ ID NO: 785501 - DNA, 76 bp, Homo sapiens
gcagaacgaattcagtgatatcattaagtccagatctgctcctctggtgcaagtgtggtagctattgacaacaaaa

SEQ ID NO: 785502 - DNA, 76 bp, Homo sapiens
gcaagaaggatcgtaacaacacggaagtggagaggttttcagaggctgaccggttccctgatgtgttacctgcttc

SEQ ID NO: 785503 - DNA, 98 bp, Homo sapiens
aaaaacccccatcctgggaaaaatggggaagctgctcaaagattagaacgactccgaaaagagagacaaaaccagatcaaatgcaaaaatattcagtg

SEQ ID NO: 785504 - DNA, 88 bp, Homo sapiens
agtcagcagtttttgaactccatcaaaaagggatatgagatcctgactccaaactccattcccaagggtttcatggacgggaagcagg

SEQ ID NO: 785505 - DNA, 100 bp, Homo sapiens
ccaacagcacagtacccaagggagaagccaaacctaagcggcggaagaaagttcttcacacacccccattcggcgtagtacccagagagctcaagatgtg

SEQ ID NO: 785506 - DNA, 75 bp, Homo sapiens
ccagaaattctgcttggtgatgagtatgatgcacctgcagtaggtttaactatagatcaacacatcatcttgcat

SEQ ID NO: 785507 - DNA, 101 bp, Homo sapiens
cgagaaagagagtgggagagagagaggcagagagggagagagggagagtgacagcagcgctcggttgaagatgacagcgatgcagagacctatggagaaga

SEQ ID NO: 785508 - DNA, 90 bp, Homo sapiens
agaaatcttagataagaaggttgagaaggtgtctttaatacatctggtggaagtcactccggtcagaattcaggtaccctcaatggtgga

SEQ ID NO: 785509 - DNA, 82 bp, Homo sapiens
gcacggccgaggacttcgccgaccagagctccacgcaggagatcggtgaggagctgatcaacggagtcatctactccatctc

SEQ ID NO: 785510 - DNA, 75 bp, Homo sapiens
cctggccaagggctccacacaccaagaccaaggtcctgtccctgctatcagtggggcactgaagaaagcaggact

SEQ ID NO: 785511 - DNA, 95 bp, Homo sapiens
ccgaggaggcagggtctgatggggaccgtataatagacgctggccccaaaggaaactactctcgatttatgaatcacagctgccagcccaactgt

SEQ ID NO: 785512 - DNA, 100 bp, Homo sapiens
aagatgccagtgcagcttgtcagaatgaacctctcttgattaagggattgtcaatgaggcagatcagattccgatttgacgggcaaccaatcaatgaaac

SEQ ID NO: 785513 - DNA, 101 bp, Homo sapiens
acagccagggagaaagcctggatgctcaaggtttttcgttggaatatacgttgcacatttatggcgattctgagtgtgagggcagacttctgccaggctca

SEQ ID NO: 785514 - DNA, 71 bp, Homo sapiens
caagcaaggctacaaatgcaggcgtggctttgctggagggacagacagttgatcatagtggagctggtgag

SEQ ID NO: 785515 - DNA, 100 bp, Homo sapiens
actggagctcttccgtggcattagtagtcagcccttccctgaactacactgtgctgccttaaaagtgtttacgtactgtaagattgatgttaaaggcatg

SEQ ID NO: 785516 - DNA, 97 bp, Homo sapiens
cttgacctttaggtgcttttatattcatctcaaaaacaaaattctgaactcaggacttggcaagtgttggtgtctgtccagtcccttatattagtag

SEQ ID NO: 785517 - DNA, 99 bp, Homo sapiens
cttcgccacttacagtatgcaacacattttcctatacctctgcaagttgtcctcgaagaaggtacaattgcttttaaaaattgggttaaaacaggcaca

SEQ ID NO: 785518 - DNA, 101 bp, Homo sapiens
gcgggacaagaaaattcatgcgaccagatgatgtgcttctgcatcgcactcatgatgagattgtcctcctgcattgcttcctctggcccctggtgacattt

SEQ ID NO: 785519 - DNA, 100 bp, Homo sapiens
gaagttcctgatggagctgtaaagccacccacaaacaaactacccattttcttttttggaactcatgagacggaacagaaagaacagcttcaaaagatga

SEQ ID NO: 785520 - DNA, 100 bp, Homo sapiens
ggttacctggacactgcttagagaatcctctccaggaatgccacccagcacagttagaagaatgggctctcaaaggggctactacaaagttctgggaaag

SEQ ID NO: 785521 - DNA, 100 bp, Homo sapiens
gccactccagtcggtgttgagcacggcgagcagtctcaggcctttagtgatgatggcttgcccacaggtgacgttcccatggatggcatgtccgtgtctg

SEQ ID NO: 785522 - DNA, 83 bp, Homo sapiens
gggcccagctgtgctgctgtgttaacctggaggcattatggaacagatcccaaaaggataatcacttacaatgaagccatgga

SEQ ID NO: 785523 - DNA, 100 bp, Homo sapiens
agcagatctactactcggacaagtacttcgacgaacactacgagtaccgcaatcccacagagtattgatgaggaaactgaagtttggagcgatcacatca

SEQ ID NO: 785524 - DNA, 82 bp, Homo sapiens
ctttatcctggtcatcttctatttccaaaacactacaacaacaggagtgcaaacttctctacagccgaaaagagggtcaaag

SEQ ID NO: 785525 - DNA, 100 bp, Homo sapiens
agcgtgggaacgcgggcggcgagacggcggcaggacggcggcagggcagcaaggagcgcttccactggcagagccacaacgtgaagcagagcggcgtgga

SEQ ID NO: 785526 - DNA, 88 bp, Homo sapiens
caggccaaactggtaaatgacgaaggggcttcttccagagccaaggaggaagggttgtccggtttcaccagtgatcattaaagaatgg

SEQ ID NO: 785527 - DNA, 100 bp, Homo sapiens
cagaggatctgcaagtacccgctcctccttaagaggctgacccgcggctgattgagtccctctcccagatgctgtccatgggcttctctgatgaaggcgg

SEQ ID NO: 785528 - DNA, 100 bp, Homo sapiens
tggagcagctggcgcaacaaggcaagatcaaagagaagatgtacggcaagcagaagatctattttgcggatcaggttagcagaggagccggacacagagg

SEQ ID NO: 785529 - DNA, 98 bp, Homo sapiens
aatcaaaccaatcaaggcaccaagacgcaggggggatatccacagttcgatcaagcagggagaaggttttaaggtgaaaacgaagaaagaaatccggc

SEQ ID NO: 785530 - DNA, 100 bp, Homo sapiens
gctaccggaatgtcatccagcgagtgattaggaaaggagatgtggcattactgaactgtacagccattgtgaataccagcaatgaaagtctcacagataa

SEQ ID NO: 785531 - DNA, 101 bp, Homo sapiens
ccttgaacgttgtcccgcctgggattgcgagagtgtgaacatggctacgcctcttcattcccgtccatgccgagcccccgactgcagcattcaaagccccc

SEQ ID NO: 785532 - DNA, 75 bp, Homo sapiens
cgcgggcccatgaggaggcctggggaccatgggctccaggatcaaggtgcaacaccggaggatttcagcaacctc

SEQ ID NO: 785533 - DNA, 74 bp, Homo sapiens
cctcgagccgcagcacgagctcaaattccgaggccccttcacagatgtagtcactacaaatcttaaattgcgaa

SEQ ID NO: 785534 - DNA, 88 bp, Homo sapiens
tgcggccagtcgccactgctgctttgatgcggcctggaagaattgatagaatcatctatgtgcctttaccggatgcagcaacaagaag

SEQ ID NO: 785535 - DNA, 75 bp, Homo sapiens
ggtcccacgatgaaactgaaacggctcacagttttggagaagtacaaagatggagtctcgctctgttgcccaggc

SEQ ID NO: 785536 - DNA, 83 bp, Homo sapiens
cagtcgcgagcgaacgaccaagagggtgttcgactgctagagccgagcgaagctcttccgtgtgtgctaagatcgtgcagctc

SEQ ID NO: 785537 - DNA, 82 bp, Homo sapiens
tgaatgtttccatctcttcagagatgaaccaggtcaaaatgcagatcttcgtgaaaacccttaccggcaagaccatcaccct

SEQ ID NO: 785538 - DNA, 51 bp, Homo sapiens
ggattccaagtaactcttatttggttaaaaagatcaagtggcatgagcagc

SEQ ID NO: 785539 - DNA, 82 bp, Homo sapiens
gccatcgttgctgccttcttcgtcaaggtggcgacagacaaagttgcagaaaagctgagctctactctctcatgggtgaaga

SEQ ID NO: 785540 - DNA, 74 bp, Homo sapiens
cggaccggggcgggtccagtcccgggcgggccgtcgcgggagagcctctgcagagatgtgggcagctggtcagg

SEQ ID NO: 785541 - DNA, 83 bp, Homo sapiens
gtgctatcaaggaaccacgctctcgtctggtttgatcacaagacgggcaaggtcaaaatgcagatcttcgtgaaaacccttac

SEQ ID NO: 785542 - DNA, 75 bp, Homo sapiens
ctgccggcctgtgtggtggactgtggcacggggttggtacaggtcttgggcctacactggagttttatgcgcttg

SEQ ID NO: 785543 - DNA, 96 bp, Homo sapiens
gtttgaggagagcactcggaacccctcactcatgaagcagggcttgggcaccgatgataacaccctcatcagagtgatggtttctcgagcagaaat

SEQ ID NO: 785544 - DNA, 83 bp, Homo sapiens
tcagttgctgagaagcctgacataccaggactgcctgagacaagccacaagctgcaaaatgatgcttcaacacccaggccagg

SEQ ID NO: 785545 - DNA, 74 bp, Homo sapiens
gcggcggcgtagccgtagaggattcttcaaacacctaaatgaaagtgataaattcaaaactgatccttttagtt

SEQ ID NO: 785546 - DNA, 75 bp, Homo sapiens
cctgtctcagcctcctgaatagctggaaatacagcaaacggccagtgttggttcttcagaatgaagcactttatc

SEQ ID NO: 785547 - DNA, 100 bp, Homo sapiens
gacgacgacagtgcggacgggctgtgggagctgccggtggagccggccgagcggaggcctgagtgcacccgctgcaggttgtggttcaccttgaaactat

SEQ ID NO: 785548 - DNA, 75 bp, Homo sapiens
acacgcttcttctggaagaccagccaacagattctactcaacatgtcccttcagaaacaagtgaggaccctgaag

SEQ ID NO: 785549 - DNA, 100 bp, Homo sapiens
aagaaagaggacgctttactctaccagagcaaggggtggagaaaggcagtgaggatgtgcggctgatgaaacccccttctccggaacatcagagccttga

SEQ ID NO: 785550 - DNA, 100 bp, Homo sapiens
gatcagaaaacagctctggaaaatgacagccttcatttctctgaacatactgccttatgggacagatcaagccaaagaggtgctgaaaaaatatttggag

SEQ ID NO: 785551 - DNA, 75 bp, Homo sapiens
ttgatagtcgtaccatatgcagaagttttgagcagcaccaggagacttgccggggggatgccaggtttgtgtgca

SEQ ID NO: 785552 - DNA, 83 bp, Homo sapiens
cccaggacttcggaactagacgagctgtgggtcatcaggaagaactgctgagaagacaagtcttagtttcaaatctgatcagg

SEQ ID NO: 785553 - DNA, 90 bp, Homo sapiens
aaaggtctgctcggcaggacctggagtgtgacaaaatctccttggagagacagcctccgggaggagttcctgggacacagccattgctgc

SEQ ID NO: 785554 - DNA, 100 bp, Homo sapiens
acctgaggatcatcgacgggggctcaggctacctgtgtgagatggagcccgtggcacactttggcctggtgagacggtttaagcggaagcatcttactgc

SEQ ID NO: 785555 - DNA, 100 bp, Homo sapiens
caaaacgagactgttaataaaacctaccccagggtaggacggactgttcggtctcggcgcggaagatggccggcggcgtggacggccccatcgggatccc

SEQ ID NO: 785556 - DNA, 98 bp, Homo sapiens
ctgcctcctaggaacgccgggaaagggtgttgaaagcagcaggggcctagaagacattaaaccgataccacagaaatacaaaggatcattagagacta

SEQ ID NO: 785557 - DNA, 100 bp, Homo sapiens
aatttcttggacttgaatctcccgccacagcacaacacaggtctgggagggatccctgtagcagctgtcaataccagcaaatatgcagaaagctatcgga

SEQ ID NO: 785558 - DNA, 74 bp, Homo sapiens
gctgtgcatccacactggacgcgagctgcgctgcaagcagcctcccgcgacgatgcccctcaacgttagcttca

SEQ ID NO: 785559 - DNA, 75 bp, Homo sapiens
gtggagatccgaaggaatgaaatccggttctggagagtcttggcttctgggaggaagtcagagggattatctcag

SEQ ID NO: 785560 - DNA, 99 bp, Homo sapiens
gccagccacagtggcatccccaacatcatcctcacaggtgctgccttcacctgcctggagactgccttccgcctggacgccctgcaccggcagatgaag

SEQ ID NO: 785561 - DNA, 75 bp, Homo sapiens
ttacagcctgtactacctgaaggagcttcagctgcccctgaagaagaagttgggatatctaaagcagaagcctta

SEQ ID NO: 785562 - DNA, 75 bp, Homo sapiens
tcttgggtcctccgagagcagcagcggtaaaaatgttgtacatcagctctcagtaaccctagaagacttatataa

SEQ ID NO: 785563 - DNA, 99 bp, Homo sapiens
aacccttcgctggcgggagcgcggttcggggccgcagaggaaatggccagtgatgaactgagggagttgaggaatgccatgacccaggaggccatccgt

SEQ ID NO: 785564 - DNA, 75 bp, Homo sapiens
ctcggacgccagcggacacgcgggcgagcaggtggtccattatggctgacatgcaaaatctggtagaaagattgg

SEQ ID NO: 785565 - DNA, 100 bp, Homo sapiens
agcatctggacagtcaacacgggcaccatgaagcacttcctgaggttgcatcataaatacaaaggactgaagttataaaagagaaaagagaagtttgctg

SEQ ID NO: 785566 - DNA, 50 bp, Homo sapiens
ctggggcccaaagggaccataaagatgaaatggacaggctactagcatgg

SEQ ID NO: 785567 - DNA, 100 bp, Homo sapiens
cttccaatgaggctgctggccctggattatggagcggacattgtttactgtgagaaactggcgatggaatatgagaggagccctctggaaagaaaaggac

SEQ ID NO: 785568 - DNA, 100 bp, Homo sapiens
atcacctcatcttcaagaatccgtaggaattctcccatgtgtatcgcattaagttcaaggagagctttgctgagatgaacaggggctcgaacgagtggaa

SEQ ID NO: 785569 - DNA, 75 bp, Homo sapiens
tggtcaacattgatggaaaacaaatcaaactgcaaatctgggatacgggttgagttccagaataaattctacagc

SEQ ID NO: 785570 - DNA, 83 bp, Homo sapiens
actcagcattaagtagcatgggattactcatgacttcgcactcatggcagcctcacagcctcccgcgacgatgcccctcaacg

SEQ ID NO: 785571 - DNA, 88 bp, Homo sapiens
gccaagaggaggacagttcgctacacagcaatgcatcgagcctacaacacagcagtcccctcaggatgagcaggaaaagctcttggat

SEQ ID NO: 785572 - DNA, 74 bp, Homo sapiens
agaatggcgcatgcgcatattcagggcggaaggcgcgctaagagcagctgctgaaatgggttgcggattgaaca

SEQ ID NO: 785573 - DNA, 100 bp, Homo sapiens
cttggagtgctgtcccttggaacaggaggagtaagattgagggaagaaggagaaagggccaacccctgaagaagcaatacagaaactgaaggagacagag

SEQ ID NO: 785574 - DNA, 101 bp, Homo sapiens
tgaaaatggagaaacgtcaattgtcatttctgatgtgctcccgggtgggcctgctgatgggctgctccagtcaagagcaatctgaatccaaatgcaaagga

SEQ ID NO: 785575 - DNA, 75 bp, Homo sapiens
gtcctggccttgctgtcctccagctctgctgaggagtacgtgggcctgttgtccccctacctcaagagcctgtcc

SEQ ID NO: 785576 - DNA, 82 bp, Homo sapiens
ggggccggctgaccaggaacctgggcgagcagcggcgggggcccgagggatggcagatgatcagggctgtattgaagagcag

SEQ ID NO: 785577 - DNA, 75 bp, Homo sapiens
cacatctactccatggatgagaaccttgagttccacatcaagtggatcaatcttcctgtcctacaactgacaaag

SEQ ID NO: 785578 - DNA, 82 bp, Homo sapiens
tggtggcggcggcgctttcggcgcgggcccgggccccgagcgcccgaacaggatgcactgcgcaactctggtggcgatgggc

SEQ ID NO: 785579 - DNA, 100 bp, Homo sapiens
gcccgccagttgcttgatcaggtggaacagattcagaaggagcaggattaccaaagggcagaagctcctcctggggtagagacagatcttattgatgttg

SEQ ID NO: 785580 - DNA, 60 bp, Homo sapiens
cgggcatggtggtctggggcaacgcggaaggcacttccaggggctcataccccttcagtc

SEQ ID NO: 785581 - DNA, 82 bp, Homo sapiens
gcagccggaagctagcatggcggccgccggggctgcggctacacacctagcacctgaactcctggggggaccgtcagtcttc

SEQ ID NO: 785582 - DNA, 75 bp, Homo sapiens
gaaaaaattgaaagagaaaaggaattagcagaagacattatgtcagagctgcggtgcaaccctgggcagtttgcg

SEQ ID NO: 785583 - DNA, 75 bp, Homo sapiens
ggatacgacccatgaaccggcgagatcatagcaatggatcatttaacttgaaagctttgtcaggaagctctggat

SEQ ID NO: 785584 - DNA, 76 bp, Homo sapiens
tggctgtggctgccagcttccttgtgagcaagaagtgagtgagatcattggccgagacctgagtggcttccctgca

SEQ ID NO: 785585 - DNA, 50 bp, Homo sapiens
tcgtcgctacctcctcggacagaaaaatatgtcgtaactgcaagtgtggc

SEQ ID NO: 785586 - DNA, 82 bp, Homo sapiens
tttggtcatcaggagtcccagcctgcttcagagtggggccaagaagaaagcacagttggaatcgaagcctcttaaaatggca

SEQ ID NO: 785587 - DNA, 78 bp, Homo sapiens
agctctgcagccacatactatccgtttgttcaggaaccaccagtgacagaatctctgagctgcccagcatagtccaag

SEQ ID NO: 785588 - DNA, 89 bp, Homo sapiens
aggactccaaaatggcgtcagttggcggtgggagcaaggaaaaggaggcaaaacccccacaggaagacctgaaaggggcgctggtggca

SEQ ID NO: 785589 - DNA, 74 bp, Homo sapiens
gcgaccgcaacctggccatgggcgtgaacctcaccagggtgtacaactatgagcctttgacacagctcaagaat

SEQ ID NO: 785590 - DNA, 50 bp, Homo sapiens
gattcgttacagccagagattggtactccaaagattcaggtttactcacg

SEQ ID NO: 785591 - DNA, 75 bp, Homo sapiens
agccctacgccgtggacttccagcgcagggtgtcaaattgagaaccaggtagatccccaccacctacagtaaaaa

SEQ ID NO: 785592 - DNA, 100 bp, Homo sapiens
gggtgcccgcggccacttttgccttcccgggcttcagggatgacttcttagggggcaggggaggtagtcgcccaggcgaccggcgaacaggcccccccat

SEQ ID NO: 785593 - DNA, 75 bp, Homo sapiens
gttacctatgtacctgttaccactttcaaaagaaggcaacagcccccaggggagcaaccagggagtcaaaatcac

SEQ ID NO: 785594 - DNA, 83 bp, Homo sapiens
ccccggagccgcccgaagcgcccgcgagccgccggccgggagggatccgggtcctgaaggtcatgatgatgggcagcgcccga

SEQ ID NO: 785595 - DNA, 100 bp, Homo sapiens
cgtgatagaaaatatacagcgagaacttgaggaacgcagacagcaggatagcaaaacctgatctcataaaacctaggtcacaaaggacagccctgcaaaa

SEQ ID NO: 785596 - DNA, 101 bp, Homo sapiens
acttttggggggaaactaggtcgatggtcggcggcgcccggatgggcagctgagatcaggcctttgtgacactaaccacaaacgatgcctacgccaaaggt

SEQ ID NO: 785597 - DNA, 74 bp, Homo sapiens
agtgagagaggaaatgccagctcttctcagaaagaaaagtattcccggcaggagcaggaggaggagggccggaa

SEQ ID NO: 785598 - DNA, 82 bp, Homo sapiens
agtcacacacaacgcttgttatgttttcatcacttctctccagaaggtcagcccaaggccaaccccactgtcactctgttcc

SEQ ID NO: 785599 - DNA, 100 bp, Homo sapiens
caaacagaagggactactggacaagaaagtgactattttaccccacagggagaattccgtgtagacaaagcaggatcccctactttgttgaattgcctta

SEQ ID NO: 785600 - DNA, 82 bp, Homo sapiens
gtcctacaacagtttggcgtgcaacatggggcttgagaaagggtgtccctggccagtgtccttccacctgtccacaagcatg

SEQ ID NO: 785601 - DNA, 83 bp, Homo sapiens
tgcaatgctgatgtttgataaaactaccaacaggcacagagttgatattcactgatggactccaaagaatcattaactcctgg

SEQ ID NO: 785602 - DNA, 100 bp, Homo sapiens
tatgctgccaaaattatcaacaccaaaaagctttctgctaggggcacgtgtggttctcaaatataggcattctgatgggaacttgtgtgttaaagtaaca

SEQ ID NO: 785603 - DNA, 75 bp, Homo sapiens
acagttaatcctcaatttaagcctgatctaacccctagaaacagcctgtggacatctctacagcaatgagtgaac

SEQ ID NO: 785604 - DNA, 75 bp, Homo sapiens
cggagaccaccccagctacgaacagattcagattgggtggatcacaagaactaatctttcatgatttggaaaccg

SEQ ID NO: 785605 - DNA, 50 bp, Homo sapiens
gaagaacctgaaggacacactagcagtgtttggccagcgcttggatgaga

SEQ ID NO: 785606 - DNA, 87 bp, Homo sapiens
aagtgcctgcagttcagacccttctctcccctccactttctcccgggagtgtggccatctggggccgtgtggtatttgccactcagg

SEQ ID NO: 785607 - DNA, 101 bp, Homo sapiens
ggaaactaggtcgatggtcggcggcgcccggatgggcagctgaggtccatgaaagacctcctcctccttctccacctccctctacaatatatgagtatttt

SEQ ID NO: 785608 - DNA, 100 bp, Homo sapiens
ccccccaaggttgccaaatgcacagccaagcctagcagctcgggcaaggatggtggaggcgagaacactgaggagatggactcaccctgtcacccaggtt

SEQ ID NO: 785609 - DNA, 100 bp, Homo sapiens
tctttgggactagtcgtcttgtttgcctagactacagttttcaagtatttaaggaccatttatttcaaaagggaatctctgcatatagctacaaagtcac

SEQ ID NO: 785610 - DNA, 96 bp, Homo sapiens
ccgcagcacagccgcgacttcaaggacttaaagagagatctacttcagagccagcagtcccgccagaagaggctgagccacacactgagcccgagg

SEQ ID NO: 785611 - DNA, 87 bp, Homo sapiens
gaagacgaagaagcagaagcgtctgctcaggttgcagcaggagagagacaatgcagatcttcgtgaagactctgactggtaagacca

SEQ ID NO: 785612 - DNA, 46 bp, Homo sapiens
cttggagtgcagaactgaaagagcttaaagctgaagaggagctttc

SEQ ID NO: 785613 - DNA, 96 bp, Homo sapiens
cctggaattacttcaatcaattgccatctaccttgggatcaaacggaaaccgccccccggctgctccgattcccctggagtgtgaagctgaccagc

SEQ ID NO: 785614 - DNA, 100 bp, Homo sapiens
acttagaggaactgcaggcccgctatcccaatcgctttaagctctggttcactctggatcatcccccaaaagcacaacctccaagagggaaaacatttct

SEQ ID NO: 785615 - DNA, 74 bp, Homo sapiens
gcacccagctttcttcactcttccggtagcagtagctgatgtgcagtttggccccatgagatttcatcaagatc

SEQ ID NO: 785616 - DNA, 87 bp, Homo sapiens
gttatcaataatactttaatgtcattatcaggtgaagcgctggatatttaccagataattgaactcaccaaaggctccttggaaaaa

SEQ ID NO: 785617 - DNA, 83 bp, Homo sapiens
cccaggtgtaagcgcagaaagcaggcgaacccgcggcgcaataacggtggagccatcgaagcccccacccacaggctgacaga

SEQ ID NO: 785618 - DNA, 75 bp, Homo sapiens
agtttttggcaccatatactactttttccagaattcatacaaagagtggggctcgaatggttcgtgaactctttg

SEQ ID NO: 785619 - DNA, 75 bp, Homo sapiens
atacccaccagtttgcagtgggtggacgagatcagtttgtaaggtgtggtgctggaggctgtggcatggctagca

SEQ ID NO: 785620 - DNA, 75 bp, Homo sapiens
cagtgattctacatctcaagctcatattttgaagtgtttacggcctcctaattacatccatggggcacatcaagc

SEQ ID NO: 785621 - DNA, 98 bp, Homo sapiens
cgcacccagagtcaaagccaagagaaggcaacagtatggaggtgcaagtagatattgagtcaaagccatccaaattcaggcacaacagtggaagcagt

SEQ ID NO: 785622 - DNA, 74 bp, Homo sapiens
accatctccatcacccaccaacaacaccacaataatccacagccaagtactatactggcaattgctggagaaga

SEQ ID NO: 785623 - DNA, 82 bp, Homo sapiens
gggaagagaagatcatcgagcatttcaaacggttcgagaacttgtcttggacaattgcaaatcaaatgatggaaaaattgag

SEQ ID NO: 785624 - DNA, 90 bp, Homo sapiens
tcttacagatggacctgtacgcgctgctaggcattgaggagaaggcagcggacaaagaggaccaagaatcgccttcagccctgtctggtg

SEQ ID NO: 785625 - DNA, 97 bp, Homo sapiens
aggaagcaagcagttcagaagagccaaggaataaacatgcaatgaacccaaaagggaagcgggagaacagcctccaggaagacagaggcagcttcgt

SEQ ID NO: 785626 - DNA, 98 bp, Homo sapiens
cggtattattctttgatagaaatccaatagttgatccacctgaagaattaggagctagtatttctgtcacaacagatgagctagagaaattgctctat

SEQ ID NO: 785627 - DNA, 50 bp, Homo sapiens
cgggacgcctgggtccctgatggggagccaggaggaactctctcccagtc

SEQ ID NO: 785628 - DNA, 75 bp, Homo sapiens
tgtgggaacgggatgtttccagtgacaggcaggagccagggcggagaggcaggccctagactggagctggttaca

SEQ ID NO: 785629 - DNA, 51 bp, Homo sapiens
gctactgctggcaacattcctgtatagaacaagatgcagtgaatactttta

SEQ ID NO: 785630 - DNA, 90 bp, Homo sapiens
ggatcattggtttatgcaggaattaaatcaattgtaaagtcatcgttgggactacaggaatatgtggaagctgtctcttttcaacacttc

SEQ ID NO: 785631 - DNA, 90 bp, Homo sapiens
cagaaatgtggacagaagacgatgccagtgaacaccataatacctactagtcagtttcctccaggggcgagaggtcaatgatcttaaaag

SEQ ID NO: 785632 - DNA, 82 bp, Homo sapiens
gatgcagttatgggctctgtcgccgtggacagctcagcagctcctcctcctatagtggggacatcagcaggcaccacaacag

SEQ ID NO: 785633 - DNA, 83 bp, Homo sapiens
ggcctgcagcgggagctggacggcgagcgcgagcggcgcgagaaatgctgcaacctgagcgtgagcgagagtccccgagaccc

SEQ ID NO: 785634 - DNA, 133 bp, Homo sapiens
catcattttcacctcgcgtcgcgcccgggaggaaggaacgaggcaaggagctaaagcagcgtgcgttcagccctggggcacaaatcctgaagagcccgtgggcgtggactgctcatctgtaaagaaagtggag

SEQ ID NO: 785635 - DNA, 100 bp, Homo sapiens
aaacttgcggaagctggagatcacaggcgtgtcttgtcgggacgtctatgcgaagcggtcctcactgagcagcgagtcgtcccccgtgtcctctccggcc

SEQ ID NO: 785636 - DNA, 100 bp, Homo sapiens
tgtcaagcgaagccttgaaaaagctgccctgagacggtgtcccgccgaaagtattctaccttgtaaatactgttatttgtatatactgtaaatgatgaca

SEQ ID NO: 785637 - DNA, 112 bp, Homo sapiens
aatacatcgatctggtctgtggtgatgatgaaaaccctagcgcctattatagtgattcttctgtgcttcaccatctacataatgaatcccagtatgaagcagaaacaagaag

SEQ ID NO: 785638 - DNA, 75 bp, Homo sapiens
atgcttactgttgcgtggttcgttattaacaggagtgtggccatctggggccgtgtggtatttgccactcaggag

SEQ ID NO: 785639 - DNA, 89 bp, Homo sapiens
aaggaccacgcatccatccagatgaacgtggccgaggaaggatgcctgtggccctcggagagcacagtgtcaggcaacggaatcccaga

SEQ ID NO: 785640 - DNA, 90 bp, Homo sapiens
agaaaagagaaaggaggctgtgaagaaagtgattgctgctatgaccgtggggaaggatgttaggcagaaagtgaaactcttcactgctca

SEQ ID NO: 785641 - DNA, 75 bp, Homo sapiens
acaacaagttggccagggtgccctcagggctcccagacctcaagctcctccagagagaatggcttactacacctc

SEQ ID NO: 785642 - DNA, 50 bp, Homo sapiens
acacctctgtgcagaccacatcgagcgttgcacctggacttgatatgaaa

SEQ ID NO: 785643 - DNA, 82 bp, Homo sapiens
ccacccagaccgaaaaccccagagatcttcaggtgttcctgcatgaagccaccgtgcgcctgatggcaggagccagccccac

SEQ ID NO: 785644 - DNA, 100 bp, Homo sapiens
gaggaaccagtcactcctactagtggagggggtccaatgtcaccccaggatgatgaagcagaagaggtgaatgaactcattcttaaacagaagcaaagat

SEQ ID NO: 785645 - DNA, 100 bp, Homo sapiens
atgtctcgctccgtggccttagctgtgctcgcgctactctctctttctggcctggaggctatccagcctgatgtagcccagcagttccagtatgctgtgc

SEQ ID NO: 785646 - DNA, 100 bp, Homo sapiens
agaagaacaagaagttgagaccgagaatgtggaaacagccagaagatcagctgccatgttacttgactcacaccaaccctagagtggatgagattgtcct

SEQ ID NO: 785647 - DNA, 90 bp, Homo sapiens
gcgaattattgaaaatgtggatgtgatcacaaggcctaagggtacccagtgtgttgaacaaattcaagagttggttctacgcttctgtga

SEQ ID NO: 785648 - DNA, 75 bp, Homo sapiens
attttcgccctacgttttcaacggaggcatggcttctcgctgtttctgggatgctgacactgacaactatactca

SEQ ID NO: 785649 - DNA, 51 bp, Homo sapiens
ccagtccttttccatgcactggaggagagatgacctctcccgacaggatga

SEQ ID NO: 785650 - DNA, 99 bp, Homo sapiens
gtgtgtggggtcgagcttcctgataacgaggctgtggagcagcacagggcctactgcagtgcatgaaggtggtatggactcagaactctgaagtctgag

SEQ ID NO: 785651 - DNA, 110 bp, Homo sapiens
gggtgccctcaatgagcacatgaccagcttagcttctgtcctaaaggaggagatgttaaagtaacccatcttgcaggacgacattgaagattggtcttctgttgatctaa

SEQ ID NO: 785652 - DNA, 98 bp, Homo sapiens
ctgatcgtcactccttccttaaggctctttattaccaagggtgagcctggtctgcctggatacccagggaaccctggtatcaaaggttctgtgggaga

SEQ ID NO: 785653 - DNA, 83 bp, Homo sapiens
ctcgcgtttccacttcagagatctgaaagttcgtcgctgcttcctgtgctccaggagaggacatctcctgtattcctgtccag

SEQ ID NO: 785654 - DNA, 100 bp, Homo sapiens
gcctctgtgtacgctgaggggggaggaaacagtgacattcaaggatgtggccatggactttacaccagaggagtgggggaagctggatcctgcacaaagg

SEQ ID NO: 785655 - DNA, 98 bp, Homo sapiens
cgcagtagatcctggagatgtggttacacagcttgaatcatctttctataacttgccctgtgttgctgatttcatcattgatattctgctcggatcac

SEQ ID NO: 785656 - DNA, 102 bp, Homo sapiens
ctgggcgctgccgctgctgctgctgctgctgcgcctgggccaggtgtacatcggtgagctcccgcaggacttcctccgcatcacgcccacacagcagcagcg

SEQ ID NO: 785657 - DNA, 75 bp, Homo sapiens
tgctgaccaccaatcagatccgtaaggttgtgaccgagattcccgacgagagagactgaggggaagagaggaagg

SEQ ID NO: 785658 - DNA, 75 bp, Homo sapiens
actattcggttctctacttccaacagaagaattggaggcatatgctggagttatcagtgcacttcgggcacaggg

SEQ ID NO: 785659 - DNA, 83 bp, Homo sapiens
gggctgcggcgtgtgcgcgcccgccagctgctccggagatacgagaacagcccatcttcaccacccgagcgcatgtcttccag

SEQ ID NO: 785660 - DNA, 75 bp, Homo sapiens
ggcagctgcccttagccctctgggtaaaaaagagtgtcaagtggacatgcaaagcttgtggagagaagcagtcct

SEQ ID NO: 785661 - DNA, 75 bp, Homo sapiens
ttctcttcaccagctcttcagatcaatatgatagcatagaagccaatgtggaaaatgcagaggtgcacgttcagc

SEQ ID NO: 785662 - DNA, 75 bp, Homo sapiens
cggttccttctcctcttttcttacatcattcccataagatcggtttgggcttggccagccaggaagaatacctgg

SEQ ID NO: 785663 - DNA, 90 bp, Homo sapiens
gtcaacgagcggggcaaccactgcgagtactgcttcaccagggccaaggagattaagatcaagttgggaattctcctccagaagccagac

SEQ ID NO: 785664 - DNA, 100 bp, Homo sapiens
attactaggaaaagttgtaagtgtggtgtctgcaacggagaggactgaatggtatcctgctttgatacatcagcccacagcaaggcgggctccagcagcc

SEQ ID NO: 785665 - DNA, 76 bp, Homo sapiens
ggccgacttcgatgatcgtgtgtcggatgaggagaagttcaactagagagaaattgagaagaagcatccactgaag

SEQ ID NO: 785666 - DNA, 78 bp, Homo sapiens
gcactgggaccccggaatcccgcgcgctgcccacgattcgcttctgaggagctggtcaggctcaccatcgagaagcag

SEQ ID NO: 785667 - DNA, 98 bp, Homo sapiens
tgggatccagtacgagttgaatcattgttcaaataaggctctgctgccatgaaggtgaagattaagtgctggaacggcgtggccacttggctctgggt

SEQ ID NO: 785668 - DNA, 82 bp, Homo sapiens
ctacgggctggtggaagcgctgctcacagtcagtgtcggcctggtctccaagtcctctcctaagaagcctcgtggacgtaac

SEQ ID NO: 785669 - DNA, 75 bp, Homo sapiens
cgaccatcaaatccgtgtcggagtccttacagataaagcccccaccctctgctgtcacacagcgcaacaaacagc

SEQ ID NO: 785670 - DNA, 75 bp, Homo sapiens
atgcctcctgctgttctcttaagaaagattccaacccaatggaacgtcaaggtcgtgggaaataaaaggcagttc

SEQ ID NO: 785671 - DNA, 101 bp, Homo sapiens
gaggaattcagtttcttgggggtgaatggtgatattccccctcggttaaaaaagagtgctcatgaaatcatcctcgacttcatcagatccagacctccttt

SEQ ID NO: 785672 - DNA, 100 bp, Homo sapiens
gaaattcaaatgattagagatccagccagaggatgggcctggaccagagcacttctaggctaagtgctatttatggaggtacctatatgctgaataaacc

SEQ ID NO: 785673 - DNA, 100 bp, Homo sapiens
cttcctcaacatggctgcgcccttgtcagtggaggtggagttcgggacctgaaggccaatgagtcacggttgaaggacattaacaaggtagctgaagacc

SEQ ID NO: 785674 - DNA, 75 bp, Homo sapiens
gtaatcccagcacttggggaggctgagcaacaaggcgtgcaggtattttgatgaaggacgtgggagctgcccatt

SEQ ID NO: 785675 - DNA, 90 bp, Homo sapiens
aaatcaggaacatctctttcaatgacaaaaagtttgtcattaaacccatcgacaagaaggcacctgtgtatactcttgatgtaccagatg

SEQ ID NO: 785676 - DNA, 90 bp, Homo sapiens
ctctgatctacgaaagtcatgttacccaacaccggaaggacagaataacgggctcccagattcacaagccccaccaagaggatcacccca

SEQ ID NO: 785677 - DNA, 98 bp, Homo sapiens
ggagcaattctccaatacttacagtaatctcatattaacaggctcactcagtaacttgatggattttgtgaagaaaacaggcatttgcgcttcaaagt

SEQ ID NO: 785678 - DNA, 73 bp, Homo sapiens
gaagactgcatttcaacttcaagaatgacatatctgaagagatggattaagaatgctttggattaaggattgt

SEQ ID NO: 785679 - DNA, 75 bp, Homo sapiens
ggatgacatctcacttacacctgacccagagcctacccatgaaggagggcctgaggctatggcaggaggagcagg

SEQ ID NO: 785680 - DNA, 95 bp, Homo sapiens
tcagagtggaaaaagtaccatcatttgaaacaggtgatttgatgaaggctgctgcaggagagttcgcagatgatccctgctcttctgtgaagcga

SEQ ID NO: 785681 - DNA, 90 bp, Homo sapiens
gcaggaggaaggcatggactcggagattggctgcctcatccgcttctatgcaggaccttaaaggctttgatccaggagagaaatactttc

SEQ ID NO: 785682 - DNA, 82 bp, Homo sapiens
ggccgccgaggggcccgcagtagctgcgctcccggggaaggagccccacagtccccaggtggtgatgatgtccagcaactct

SEQ ID NO: 785683 - DNA, 121 bp, Homo sapiens
gattactttagtatcaatatctgctacaacatcacattttcatgcatcattttttcaaaataggaatgctgcctttttatatggtcttggtttggtctacttccattataatgcatttcag

SEQ ID NO: 785684 - DNA, 97 bp, Homo sapiens
ataaggaaagttgactgaaaatggggcggaagaaaatacaaatcacacgcataatggatgaaaggaaccgacagtctgaaccggacggcttttctca

SEQ ID NO: 785685 - DNA, 100 bp, Homo sapiens
ccagcgtccaagcccgagaccgcggctcctatgaggacggggacttggttgccttttccagtgacgaggaattgacaatggccatgtcctacgtgaagga

SEQ ID NO: 785686 - DNA, 82 bp, Homo sapiens
atttcgttagctttctggattatatcaatgactgcaagcacctattatggggcactatgaacgaagaggagcagtttgtaaa

SEQ ID NO: 785687 - DNA, 101 bp, Homo sapiens
cactgaagatgaagcaaggcccaatgacccaggcggaactttatattgctgttggaatatctggagccatccaacatttagctgggatgaaagacagcaag

SEQ ID NO: 785688 - DNA, 90 bp, Homo sapiens
cagacaggaagaacagaagatgaccttgtgcccacagcaccttctaacgactagtggtcgtggctgaacattgtgaacgtagtctggaag

SEQ ID NO: 785689 - DNA, 89 bp, Homo sapiens
tggagatgggcagacggattcatttagagctgcggaacaggacgccctctgataaaactttagaaactgttcctttggagaggaaaaag

SEQ ID NO: 785690 - DNA, 100 bp, Homo sapiens
agcctggcaggcatgtgtcctgggctgtctgtggacctggagcctgctgtcataggaagaaatgttggctatttggcgatgagaggtggtgaacagtgac

SEQ ID NO: 785691 - DNA, 78 bp, Homo sapiens
gcatgactaccatgacatcattaagcaccccatggacctcagcactgtcaagaaaactttagaaactgttcctttgga

SEQ ID NO: 785692 - DNA, 75 bp, Homo sapiens
ttcaatcatcattttgagctcaaagagtttatgcgaattccatgtgtggatgctggattgatttcaccactggtg

SEQ ID NO: 785693 - DNA, 76 bp, Homo sapiens
gcatcgaggacccagggaccctgcacatctggaagaccaacaggctgcagtagatggtcccatggacaagaaggaa

SEQ ID NO: 785694 - DNA, 90 bp, Homo sapiens
acttgcagcacaatgaactgctagacctcccagatactatagattctgaaggaagatttccattaggtaatttgtttaatcagtgcaagc

SEQ ID NO: 785695 - DNA, 50 bp, Homo sapiens
ccgccggagcagcatcatcaaggaacaagactgccaatggagactgccgc

SEQ ID NO: 785696 - DNA, 98 bp, Homo sapiens
ctgcggaagccgtcgcccgtggcagaatgtccctcttccagtggaaagcccaaccatgcagacatcttgctcataaacttacagtatgtttcagaagt

SEQ ID NO: 785697 - DNA, 75 bp, Homo sapiens
tgtcctgataggatcaaagacaaatggaaagttcctaatggagttggggaagtcagcataaagagcagatttccg

SEQ ID NO: 785698 - DNA, 83 bp, Homo sapiens
cagcgacagacccctcggggtgtccatcacaaaagccgagaatgattacggacctgaagccaaagaacaagatgcgctagtgg

SEQ ID NO: 785699 - DNA, 82 bp, Homo sapiens
gcgggtgcgtctgccgcagagtcggcacctgaaggacatggagtttgcctgagaatacagatcaacccacagaacaaagcgg

SEQ ID NO: 785700 - DNA, 75 bp, Homo sapiens
cggcagagttgttatttttcagcgtgaacaagaggatgtctccccgttcaatgttgtggcctggcacgggaatta

SEQ ID NO: 785701 - DNA, 50 bp, Homo sapiens
accaagagagacgtcttcctggagcggaatcaggaaacccaggcccaacg

SEQ ID NO: 785702 - DNA, 101 bp, Homo sapiens
gaaccgccggcgggccatggccactctgccgagcgcagagcgccgcgcgttcgcgctcaagatcaacagcctaactctggtgaactggatcctttgtatgt

SEQ ID NO: 785703 - DNA, 100 bp, Homo sapiens
ccgtctaccagatcaacgtcctccgggaccggagtcagaaccctccgcagagtaaagttgattatggaagattcccacaagagtaccacgtcagagacag

SEQ ID NO: 785704 - DNA, 80 bp, Homo sapiens
atgcggtggcatcgacaaaagaaccattgaaaaatttgagaaggaggctgctgaggttcacgagctcatgaagctgtgct

SEQ ID NO: 785705 - DNA, 102 bp, Homo sapiens
atctgtctcctgatcatcattcagcctagatattatcctactgaagatgtgcctcgaaagctgttgagccacggcaaaaaacccttcagtcagcacgtgaga

SEQ ID NO: 785706 - DNA, 100 bp, Homo sapiens
gctgagtggttgtgtggtcgcgtctcggaaaccggtagcgcttgcagcatgcgtctgcttctgcgctttgcctgggagaggccctggtggcctcgttcct

SEQ ID NO: 785707 - DNA, 102 bp, Homo sapiens
caccgccgcccccccagacaagatggacaccgcggaggaagatgccagaccagtttgaccaggcggttgtgctgaaccagctgcggtactcagggatgctgg

SEQ ID NO: 785708 - DNA, 100 bp, Homo sapiens
tgctgtcactgctctgaatcgaaaggataatggctacttcctgattaaacccactctccacagaaatctactttcttcaatgtgttaaccaatagtcagg

SEQ ID NO: 785709 - DNA, 98 bp, Homo sapiens
ggacgcctccctcagccagggcaagactaaggagctggaattgtctatttcacagcaatattaccagtgacttgaaagcatttacagacaagtttggt

SEQ ID NO: 785710 - DNA, 75 bp, Homo sapiens
agggctccgggcccaagtttgaggagagctcctccaagttccccctgatgacgctgcagctgctggacttctgcc

SEQ ID NO: 785711 - DNA, 101 bp, Homo sapiens
ccagaagctctgatttgaagagaataaatggattttgcacaaaaccacaggaaagtcccggagctccatcccacaaagaggcagctgaacgtctttcaaaa

SEQ ID NO: 785712 - DNA, 48 bp, Homo sapiens
ctgagactggagtgagagggtcttctgaaacgatcttcaagacacaga

SEQ ID NO: 785713 - DNA, 82 bp, Homo sapiens
cggcgaggggaagccgcgcggccggccggccgactagggtggcggcgggaaggccaaggtctctggcagacccagcagccga

SEQ ID NO: 785714 - DNA, 90 bp, Homo sapiens
caccaacagatgaagacagatgcaccaacgaggttacccttaagttacaggagtcccagctgcctgggccagaccagttacagcagtttc

SEQ ID NO: 785715 - DNA, 88 bp, Homo sapiens
ccggtctcctttcccggccgcacaggtttaaggaagaaatctctaaacgttttaaatcacatactgaccaacttgtgttgatatttgc

SEQ ID NO: 785716 - DNA, 86 bp, Homo sapiens
aaacaggcgccgcgggctccgcgcccggccggacccgggcccgagctcctgtccaaatatgacccccagaaggaggcagagctccg

SEQ ID NO: 785717 - DNA, 100 bp, Homo sapiens
cctggaggaggaggccatcatcatgaaggacgtgcccgactggaagatgagcagcaccagcagtaagagggctccgaccacggcaacccagaggctgaag

SEQ ID NO: 785718 - DNA, 73 bp, Homo sapiens
tgaaattctgcagcacatcggcgaaagcaatcagaaacggagactgttcatctgtttatcccagctctatcag

SEQ ID NO: 785719 - DNA, 83 bp, Homo sapiens
cgcctgtctgctcgtggccagcggcgccgccgaagccctgggcgctgcctatggcacagccaagagcggtaccggcattgcgg

SEQ ID NO: 785720 - DNA, 100 bp, Homo sapiens
cgctctggctgtgctgcgcgacccccgcgcatggtagaaaattatggcatgccgtttagcagaactgaagatgggaagatttatcagcgtgcatttggcg

SEQ ID NO: 785721 - DNA, 101 bp, Homo sapiens
ttcgagtgacccgggtgccgaggagcgggaagagttgctgggactccgtgggaaggaggcttgtttaaactacggatgcttttcaaagatgattatccatc

SEQ ID NO: 785722 - DNA, 87 bp, Homo sapiens
gggagcgagcgcagcaaagcgcccagcctgccgcctcgctgtccctgcggcttctggggtctgaagatgatgagaaactgaaaaaga

SEQ ID NO: 785723 - DNA, 50 bp, Homo sapiens
gtgaaaagcccagcgacccatgagcgtcaccctggacccacagtcggcca

SEQ ID NO: 785724 - DNA, 75 bp, Homo sapiens
agctgcctggtcctgctgcaggtggcaagctctggggcaagctctgtgtgattgattggaagacatcagagaaac

SEQ ID NO: 785725 - DNA, 95 bp, Homo sapiens
atttgctagtaacgtcatggaggatgaacgacagagtttcgctgttgttgcccaggctggagtgctggagtgcaatggcatgatctcggctcaac

SEQ ID NO: 785726 - DNA, 100 bp, Homo sapiens
gaagagttctacaacctggtgcgcttccggatcgggggcaagcggaaggtgatgcccaagatggaccagattgcattctcacaacacaatacaatcatgg

SEQ ID NO: 785727 - DNA, 88 bp, Homo sapiens
gagaaacccactgaagacgtctgcgtgagaatagagaccaccgaggctactgcagcactggggtgtcagttgttggtccgacccagaa

SEQ ID NO: 785728 - DNA, 83 bp, Homo sapiens
cttgtggccctgggctttaccatctttgtggctgtgcttgccaggcctggctccaggatagctgggagtatggccaccctgct

SEQ ID NO: 785729 - DNA, 75 bp, Homo sapiens
gtactacaggatgatggctttctcttcctctgggtcacaggcaggttacaattcaacaaacatggtgtgttgcgg

SEQ ID NO: 785730 - DNA, 121 bp, Homo sapiens
tgcagccgcgaggaggcgcgggaggtgttcgagaacgaccccgagacgatgccatggacaatattaccaggcagaaccaattctacgatacccaagtcatcaaacaagaaaacgagtcagg

SEQ ID NO: 785731 - DNA, 90 bp, Homo sapiens
caagaagcagccagaaccatcacctgcattggttccatccttgactgttactacagaaaaagttcttttgaagtaaccagtgatcttttt

SEQ ID NO: 785732 - DNA, 75 bp, Homo sapiens
ttgtttactgagcccgcagcactcaatcccttacgggatggggaacatgcagcaataagagctaactgccatcaa

SEQ ID NO: 785733 - DNA, 96 bp, Homo sapiens
acatgtaaagattcatcgttgcaacgaatcttttatatatctgctctctcccttacgatacaagttaacaggatatgcttctggcctgtttctgga

SEQ ID NO: 785734 - DNA, 98 bp, Homo sapiens
agaatgtgtcttctttaccaaagattccaaggccacctggggcacccagggtgacttctccacaacccatgcactgccagctgtgaaggtgaagctgt

SEQ ID NO: 785735 - DNA, 82 bp, Homo sapiens
ccgtccccgccagtcagaagttgagaagttttcatgggctgagctgctgagttcagcctgggaactgaggccaacaagggag

SEQ ID NO: 785736 - DNA, 73 bp, Homo sapiens
atcttctgtgaagctgaacctgagagatatagtccgagttgtctctgcagggacagtactgcttttaaagaga

SEQ ID NO: 785737 - DNA, 109 bp, Homo sapiens
gaacctctatgccgacatcgacgccgcctggcaggccctgcgcaccaggtgaaaggtgtagcagtcactcggcctacacccacagcatcgaccttgtgaacccagcgac

SEQ ID NO: 785738 - DNA, 74 bp, Homo sapiens
gcagagcactgcgccgtttgggaacgcaactttgaggagacagtgcggtggagtattgttacaatcacatttga

SEQ ID NO: 785739 - DNA, 75 bp, Homo sapiens
aaattactctcatctgaagatatagaagggatgcgacttgtatgtagggatgcctggtgtgcaggagtatataca

SEQ ID NO: 785740 - DNA, 83 bp, Homo sapiens
ggctgctggtttttcaagctgcctcacaagggtgagaactctgtctcagtcgacgggaagtgcagtgactccacgctactgag

SEQ ID NO: 785741 - DNA, 73 bp, Homo sapiens
ggatgagtacgataccgaagcgggctgtgtgccccttctccacccagagaaaggatcttgttcgagtagaagc

SEQ ID NO: 785742 - DNA, 90 bp, Homo sapiens
cgctagcgttcgccttcagccaccatggggaatgggatgaacaaggctctgtgtggctgcacagtgaacgtccccactctggacggcagg

SEQ ID NO: 785743 - DNA, 75 bp, Homo sapiens
cgttctgaagcccgagaggagccacaatggagacgccgccgctgcctcccgcaaatggtgtcaacctccaacaac

SEQ ID NO: 785744 - DNA, 97 bp, Homo sapiens
aagaaatcctcagaggaaattacccagtatattcaaagctacaagggatttgttgacataacgaaaggaggtgtggcatcaggattcaagcacgtgg

SEQ ID NO: 785745 - DNA, 89 bp, Homo sapiens
gccatttcacatccagcagaggaggcgggggcagccgctgagacggtttttcacaagtcaaagaagtttggcagagatcacggagctaa

SEQ ID NO: 785746 - DNA, 100 bp, Homo sapiens
cctggaagggctcaaccaagagctggaggaggtatttgtgaaggagcagggagaagaggagctgctgaggatttggaacattgctaccaataaactgacg

SEQ ID NO: 785747 - DNA, 98 bp, Homo sapiens
ttggaagagggagtcaccactggacctccaaggaagccacgtgcagacatctacaaccttcgatctcctgacgagcagcaattccatttccgtgaggg

SEQ ID NO: 785748 - DNA, 98 bp, Homo sapiens
tcagctattgacatgtatggacatcaattttgcattgagaacctgcagtgtccggtttttctacagaccctggcttatggagatatgaatcatgagtg

SEQ ID NO: 785749 - DNA, 82 bp, Homo sapiens
aagtttctggtcactccccaggattatgcgcggagatacaactcgtcaacgaatcaaattcagtgatgacagagtatgcaag

SEQ ID NO: 785750 - DNA, 74 bp, Homo sapiens
gccgccgccaccatgcccaagagaaaggtctcggcgcggaagatggccggcggcgtggacggccccatcgggat

SEQ ID NO: 785751 - DNA, 83 bp, Homo sapiens
gacctttcaaatgtttcttctgatgactcagtacaacttcatgcctacatttcagacacagcttttaacctggagacttgccg

SEQ ID NO: 785752 - DNA, 50 bp, Homo sapiens
tgtctatgttaatgtcgtagaccctaagcatgaatacaactttgtctgag

SEQ ID NO: 785753 - DNA, 100 bp, Homo sapiens
ccggaatcccgctcggagccagccagccgtcccgagctaccagcaggaattggaacgagcatggagagaatatgataagttagaatacgatgtaactgtt

SEQ ID NO: 785754 - DNA, 80 bp, Homo sapiens
cttagctgtgctcgcgctactctctctttctggcctggaggctatccagcgacatttcattaccatccagaagtgtctcc

SEQ ID NO: 785755 - DNA, 100 bp, Homo sapiens
cctgttatggctgcggtccagaacccggccctcaccgccctcaccacccctatccagacggctgcccttcaagtaccaaggaaggaacagagccacagag

SEQ ID NO: 785756 - DNA, 82 bp, Homo sapiens
ctgctgctggacccggcctgggagaagcagcagcgcaagaaataaactatcaatcttgcccagactggagaaaggactgcag

SEQ ID NO: 785757 - DNA, 100 bp, Homo sapiens
ccactgatatctcaaaaggtgatctggacaaaggaacaggtatctcagagttgctggagaatgtaaccctaatccataaaccagtgtcgttgcaaccccg

SEQ ID NO: 785758 - DNA, 135 bp, Homo sapiens
ttctatcctacagtctatgttagaaattgcagatcctattgttttggcactgggagcatctagagacaattggctgattgcaattctggcccaactcaaccctctctttggaccgcaattgaaaaatgaaaccat

SEQ ID NO: 785759 - DNA, 100 bp, Homo sapiens
ggacaagagctattgatagaagctatttagctggtacctactgctatatcacctagtgtgacatttcggaattaatggaacaatgaaggaagctgtacac

SEQ ID NO: 785760 - DNA, 100 bp, Homo sapiens
caacatccagctacgactggtacaaggcctgtggaggctcaatccagaccagtgtgaatgctctgtcagcagatgtgctgggtcgatgccaggtgtttga

SEQ ID NO: 785761 - DNA, 83 bp, Homo sapiens
ccttatcccggagagctgacaatgatgaatctcaccggccaagagccactgcacaatgaggagctggcaggagcaggccgggt

SEQ ID NO: 785762 - DNA, 97 bp, Homo sapiens
aaggagatcgctgaggcctacgacgtgctcagcgacccgcgcaagcgcgagatcttcgaccgctacggggaggaagtttcacccccagagggagccg

SEQ ID NO: 785763 - DNA, 100 bp, Homo sapiens
ggggagacgatgctgttgctttgcagatcacagtgctggaagcaggaacccagggaatatgaaaacgggggccactgccttggctcaacagccctgacag

SEQ ID NO: 785764 - DNA, 74 bp, Homo sapiens
ccgtcaccaagtacaccagcgctaagtaaacaaaccttcgagatctgcggtctggggtctggttgaaagatggc

SEQ ID NO: 785765 - DNA, 100 bp, Homo sapiens
ctggccggatggaaatcctaatgacagtctccaaattcgcctccatctgtaccatggtcctcagaatggttggaatgaccctccagctttgaacagagta

SEQ ID NO: 785766 - DNA, 100 bp, Homo sapiens
ggtggcggcgtttggatgattgtctctcggcggcggagtcgcgtcagcctcgagtttgaccagcagcaggggtcggtgtgtccctctgaatctgagatct

SEQ ID NO: 785767 - DNA, 74 bp, Homo sapiens
ctccggcgctcgccatggccgacgaaaagcccaagctcatcagcatcggatcttcctataactacggcaatgag

SEQ ID NO: 785768 - DNA, 75 bp, Homo sapiens
gtggactgcagcctcggcggtcagcagtgtcggagatgtatgcagtgtgacgccaagtttgactttctcaccaga

SEQ ID NO: 785769 - DNA, 73 bp, Homo sapiens
tttcgtgcaactgaaaatgacattgctaataacatttccccagaggagctcaaaatggagttgccggagagac

SEQ ID NO: 785770 - DNA, 95 bp, Homo sapiens
cctgtcaacctctcaggggacttgctgggtgacttcatggtcatgacgattttcttcaatgtgagcaggcggtttggctatgttgcctttcaaaa

SEQ ID NO: 785771 - DNA, 100 bp, Homo sapiens
ctgggctccagatggagaattatttgctgttggatcgtttcatactttacgcttgtgtgataaaactgggcataccctcggggaagtctgggtacagaag

SEQ ID NO: 785772 - DNA, 100 bp, Homo sapiens
tattggatatggagcctttggtgttgtctgccttgaaaagatcttttgaggtcgaggaggtcgagacacccaactccaccccaccccggagggtccagac

SEQ ID NO: 785773 - DNA, 80 bp, Homo sapiens
gaaaccatggaggagcactgcaagcttgagcaccagcaggttcgaacctctgacatgggtggctatgctacttgccatga

SEQ ID NO: 785774 - DNA, 75 bp, Homo sapiens
ggcagcggcggaggaaggcggcgcaccccgagagttgctgatcatctgggctgtgatccacaaacccggttcttt

SEQ ID NO: 785775 - DNA, 75 bp, Homo sapiens
gggagaggcgagctcgcgatgagtggtctcggcaggctcttcgggaagggacacagcagggcaagagcggtaccg

SEQ ID NO: 785776 - DNA, 50 bp, Homo sapiens
catcccttaatagtcatctacatagaatgtgacagtgatgataacatggg

SEQ ID NO: 785777 - DNA, 50 bp, Homo sapiens
tgaagtggtgaaggagtgtgtgcagcgtggaatgcagtagccctctgggc

SEQ ID NO: 785778 - DNA, 75 bp, Homo sapiens
cagaagtccagagctgaggactgcctgtttgcaggtatcacatcggtatcctcgaattcaaagtatcaaagtaca

SEQ ID NO: 785779 - DNA, 75 bp, Homo sapiens
cacgttcatgggcgagggaacagatgagaaacccggcaatgaaaccagacgaggacagccggctgctgcccctgc

SEQ ID NO: 785780 - DNA, 75 bp, Homo sapiens
gcaaccgcagcctccgcggccgagagtgcagcgagcagcggaggaggagaaagagatggacctcccggactcggc

SEQ ID NO: 785781 - DNA, 75 bp, Homo sapiens
ggcaaattgtggacactccaccgcatgtagcagctgggctgaaggaatgtatcctgtcaggtataatgtcagtga

SEQ ID NO: 785782 - DNA, 80 bp, Homo sapiens
cctttccacctcgcggcagttcggttaaataggattgcgaatcaggtggccattcagcggaagaagcagtttgtggagcg

SEQ ID NO: 785783 - DNA, 100 bp, Homo sapiens
ctgcctccgcggactcaagtcggttcagcaaagtgtcaccacagtgatggcagtggaggacagcacgctgcaagtagtggtacgggtgcggccccccacc

SEQ ID NO: 785784 - DNA, 75 bp, Homo sapiens
gtcgacctaaagcctgactggggcaagaggttgacggatatattcagacgttacgacacggatcaggacggctgg

SEQ ID NO: 785785 - DNA, 98 bp, Homo sapiens
cctcgacttcctgggatccagcgatcctcccgcttcagcctctagagtagccgagaccacaggcccaaaacatgctgaagaaggtggaaggcttggag

SEQ ID NO: 785786 - DNA, 100 bp, Homo sapiens
caaggacagcacctgcctagagaacgctgaccccgcactacatctacccaccagccatcgtgcagcccagcgtggtgatcccagccgcccctgtcccgtc

SEQ ID NO: 785787 - DNA, 96 bp, Homo sapiens
gacttcccagactcaggtgatcctcccaccttagcctcctgagtagctggacctacggatcgaaagctgctttgcgtcgcagttggagcagcaccc

SEQ ID NO: 785788 - DNA, 73 bp, Homo sapiens
aacaacaattatgaaacaacctggcccatgagatgatagctgtggaagtttaaaattggtggtgaatggtgga

SEQ ID NO: 785789 - DNA, 91 bp, Homo sapiens
gttttctgccggctgtaaagtcatcacctcctgggatcagatgtgcattgagcaaccatgtccaagggacctgcagttggtattgatcttg

SEQ ID NO: 785790 - DNA, 98 bp, Homo sapiens
gcggtcccatggaggaggaggcgagccgcagcgccgcggcgacgaacccagggaggaccaagaatcgccttcagccctgtctggtgcatccttggcag

SEQ ID NO: 785791 - DNA, 100 bp, Homo sapiens
aatgacaaactgacggaaaaggagagagagtcacagtaatgaaaggcagtaatagaaataaggatcattcagcagaaggagaaggggttggaaaacgacc

SEQ ID NO: 785792 - DNA, 100 bp, Homo sapiens
tacaagctcatggatcatgtggggactgagccatccattaaggaggtgggcaccatgtccttgaagcttcaggcaagcaatgtaaccaacaagaatgacc

SEQ ID NO: 785793 - DNA, 100 bp, Homo sapiens
gcctaagtttccagaagactttgacgatggagagcatgcaaagcaggatatcaatgcttacaattgtgaagagcccacagaaaagttaccttttcccatc

SEQ ID NO: 785794 - DNA, 73 bp, Homo sapiens
ctgagtgaccccaccacgcctctgtgacctgggttttaaaatcaaagatgggaaaatcggagaaaattgccct

SEQ ID NO: 785795 - DNA, 75 bp, Homo sapiens
aggagtgtgccatattccaatggctgagccgttttgccccaaaacgagagagatcctgctcacactaaaatatga

SEQ ID NO: 785796 - DNA, 98 bp, Homo sapiens
tcagatgaaacctgcagatagtgaaaagtccaacggaaattgcagcttatttaataacatttgagaaacacgaagaatggctaaccacctcccctaag

SEQ ID NO: 785797 - DNA, 100 bp, Homo sapiens
ttcaaccaagaatcgaaaactgatcgatgattatgactctactaagagtggattggatcataaatttcaagagtctcgctctgttgcccgggctggagtg

SEQ ID NO: 785798 - DNA, 89 bp, Homo sapiens
atgttggggggacgtgtgaaaactttgcatcctgcagtccatgctggcttcagcaaccaggagggattgactgagatcttaacaacagc

SEQ ID NO: 785799 - DNA, 50 bp, Homo sapiens
ctggcactgcgcttcttcaaagaggaggtggaaaagatgaataagaagat

SEQ ID NO: 785800 - DNA, 100 bp, Homo sapiens
gtgagagtcgtcagtgccctattccttcacatgtaattcagaaattagggacaggctacgtgtgccgcctggccattcaaactgtcaattttaggtccag

SEQ ID NO: 785801 - DNA, 100 bp, Homo sapiens
ccggcctgaggtgtcggccggatccctccttctcccggcgcctcaagcggaagggatcttacctcttagcagcttcaaatgattttgcaagccgaatctg

SEQ ID NO: 785802 - DNA, 100 bp, Homo sapiens
gacatcaaggatgtggggcagatgctgatgggcaaactaggttgaaccatgattccggtgacagagctccgctactttgcggacacgcagccagcatacc

SEQ ID NO: 785803 - DNA, 58 bp, Homo sapiens
cgacgaggagcagggcctgactgcgcagacagtgagaccgtgcactaccactatggcc

SEQ ID NO: 785804 - DNA, 100 bp, Homo sapiens
ggaggacccgtcttctgggctgggtgtgaccaagcaggatctgggcccagcaggagtccactgagtaccggagacaggtgcagtccctcacctgtgaagt

SEQ ID NO: 785805 - DNA, 82 bp, Homo sapiens
agaagcagatgctgcattattttcagaactccacagaaaacttcattcacagataacgaaggaggcccaacttcattcaata

SEQ ID NO: 785806 - DNA, 83 bp, Homo sapiens
caccacaaggccaagggcaagtgatttgacagcaaccatgtccaagggacctgcagttggtattgatcttggcaccacctact

SEQ ID NO: 785807 - DNA, 99 bp, Homo sapiens
tctaccttctggaagctactactacgtggtgcttggaaagggatctaccgaacagaaagggacaaagggacattgtatgagctcaccttcaaaggggac

SEQ ID NO: 785808 - DNA, 51 bp, Homo sapiens
aattctgaactcaggacttggcaagaacttgtcgagatggtaaaagcaaag

SEQ ID NO: 785809 - DNA, 100 bp, Homo sapiens
ctacatctcccacaggaagtgtcacacagcagtcaagtatgtcccaaacgtctagtgaagtcaccctgctgagaaatgaagtggcacagctgaaacagct

SEQ ID NO: 785810 - DNA, 50 bp, Homo sapiens
cgaatcttctggatgtccctggattgaatactactataattccttgaccc

SEQ ID NO: 785811 - DNA, 100 bp, Homo sapiens
gagaagtatgacaacagcctcaagatcatcagcagaccccaaatcagatcaagtcgggaactccataccgaactccgaagagtgtgagaagaggggtggc

SEQ ID NO: 785812 - DNA, 75 bp, Homo sapiens
agaggatctggtgtaccaggcgaagctggccgagcaggctgagcgatacgacgtgatgatggccaaagagaagcc

SEQ ID NO: 785813 - DNA, 98 bp, Homo sapiens
gttgcaacggagataaattcccggaaccgcgattcggcgtgtcagaccagaagggaaagatttcagcattcatcgacttgtcctggggacacacacat

SEQ ID NO: 785814 - DNA, 83 bp, Homo sapiens
accctggcgaccactgcttctccgtgggcagcattggcgaccagcgcttcacggtaatactgcattgcatgattgtgcagaat

SEQ ID NO: 785815 - DNA, 100 bp, Homo sapiens
ggaccccaagaagaccattcagatgggatctttccggatcaatccagatggcagccagtcagtggtggagactgttggcaagagtagcaagatgctgcag

SEQ ID NO: 785816 - DNA, 49 bp, Homo sapiens
cgatcagtaaacacagagactggggccctgggaggagcggggacactga

SEQ ID NO: 785817 - DNA, 100 bp, Homo sapiens
cgggagtcgcggaacagcaggcccgagcccaccgcgccgggccccggacgccgcgcggaaaagtctccagagaatacagagggcaaagatggatccaaag

SEQ ID NO: 785818 - DNA, 75 bp, Homo sapiens
gggaacccattcccagtctggaggccatttatttgctgagccccacggagaagatccacatctcaaagaagtggg

SEQ ID NO: 785819 - DNA, 98 bp, Homo sapiens
aagactggtccacggagtgtatgaccacaaacagccatcaagaggaattaaggaatttgcaagagcaaatgaaggccttacaagagcagctaaaagta

SEQ ID NO: 785820 - DNA, 50 bp, Homo sapiens
ctagcgtcctggaattacttcaatcaagctgaactccagtgcacccagtt

SEQ ID NO: 785821 - DNA, 100 bp, Homo sapiens
tggcacttcattggccacctacagaaacaaaatgtcaacaaattgatggcttttatcaaaatacaactcaaacctagctactccaatagcaattaaagca

SEQ ID NO: 785822 - DNA, 100 bp, Homo sapiens
ccagcatcgcaccccaagaaaccagatgatccctctgataagccaccttgccgaggctgctcctcctacctcatggagccttatatcaagtgtgctgaat

SEQ ID NO: 785823 - DNA, 74 bp, Homo sapiens
ttgacgaggctgcggtgtctgctgctattctccgagcttcgcaatgttggtggctgaattcctgcaggaccaga

SEQ ID NO: 785824 - DNA, 48 bp, Homo sapiens
gaagaactggaacgttgtaaagtgcagctttatgaaaacccaaccaca

SEQ ID NO: 785825 - DNA, 83 bp, Homo sapiens
tcgcgtccggagtccccgtggccaggtgaagtggatcctaaagagaggatagcacgccaacgaaaattattacagaagaaact

SEQ ID NO: 785826 - DNA, 75 bp, Homo sapiens
ccctcagtaccagagacagaagcagatggattcgtccttttaggaactgccttctgttgaagaactcactattat

SEQ ID NO: 785827 - DNA, 75 bp, Homo sapiens
ttgtgaatctcacatttaccaaggatgttggttcctgcaaacaagaactgaccctatcacctctgcctcacagtg

SEQ ID NO: 785828 - DNA, 100 bp, Homo sapiens
ccaacgatggtctttcctctgcattgctgatcttgtacttggattcagcaaggaaccttccggcgattgaaaatgattgcatccaggacttcatgttcca

SEQ ID NO: 785829 - DNA, 83 bp, Homo sapiens
tgccatcctgaacgtctctccctgtcctagctctgtaactgtttacaacaatgcagatcttcgtgaagactctgactggtaag

SEQ ID NO: 785830 - DNA, 74 bp, Homo sapiens
cgccggcctcttggagtcggagcttcgcgacggcagcggcaagaagtctgcgggccaggcatcgacatccgcaa

SEQ ID NO: 785831 - DNA, 75 bp, Homo sapiens
aagctggccaaagcctgcccagacggctcacctgtgcgggatggaacaaaagcggcctcccagccaacatccagc

SEQ ID NO: 785832 - DNA, 95 bp, Homo sapiens
ccggagcctgtcgcggctgctaagcgctcggcgcctggcgctggcgctggccaaggctgctgaggccgcggaaggagcagggcacatacgccctg

SEQ ID NO: 785833 - DNA, 73 bp, Homo sapiens
gaagcctgcaaagtaaaccctttccccaaggacagttggaattcagagcccttctatttgtcccacgacgtgc

SEQ ID NO: 785834 - DNA, 96 bp, Homo sapiens
gagactgcagagggagtagtgcgatcctgcgcgcgggggaactagctggagggcaaggcgggaacactgctcaagtaaagctctttgtgacagggc

SEQ ID NO: 785835 - DNA, 100 bp, Homo sapiens
gggcaccgatcttcctgttcattctgcaagaacccaagagaagagttttgcggcctccaggtggtggatccaatttttcattaggttttgatgaaccaac

SEQ ID NO: 785836 - DNA, 100 bp, Homo sapiens
tcagcctggaaggagggaagggctccctacacggagacaagcctctcaccattaacaggattttcaaagaggctgagaacagaaagggattctctgaagg

SEQ ID NO: 785837 - DNA, 100 bp, Homo sapiens
acactgtggtgttgtcattgcctgagcgcgtcgagccagacagactgctgagcgactatattgagaaggaggtaaagtgccggtggtggtgtgcacattg

SEQ ID NO: 785838 - DNA, 88 bp, Homo sapiens
cggacgggcgccacattctcaacaccacggaattccatgatattgactgggtacagacagagaagcacgtgtttgagcaggcatccag

SEQ ID NO: 785839 - DNA, 74 bp, Homo sapiens
gctttgtgttcaagcggaaaaccaattggtttaaaagaagagccagattaaaaggagcccaagccccatctcat

SEQ ID NO: 785840 - DNA, 114 bp, Homo sapiens
gggaactgcaagacaggaagagaggccgtgcccctcaggttggatggcaagcatgtggtgtttggcaaagtgaaagaaggcatgaatattgtggaggccatggagcgctttggg

SEQ ID NO: 785841 - DNA, 98 bp, Homo sapiens
gagtacctgcccagaggggcccactcgctgtccctctgcgggccaggcatcgacatccgcaacgactatcagcagctgaagcgcctggagaactgcac

SEQ ID NO: 785842 - DNA, 88 bp, Homo sapiens
caagctcgtagcctgccactccgtgctcgtggcattcctggtggctttccatcagaacaagcagctcatcggtgacagggggctgctt

SEQ ID NO: 785843 - DNA, 100 bp, Homo sapiens
gcaaacacgccgtccttatgaacttcctgttcaccatgctgcgggaagagtgtacggccccctcccgcaaagctttgacaaagagtgggtggccaagcag

SEQ ID NO: 785844 - DNA, 101 bp, Homo sapiens
agagattattttattcgaaatttacatgatgccttatcaggacatacttccaacaatatttacgaggcagtcaagtatggcatttcaaatatagatacaac

SEQ ID NO: 785845 - DNA, 100 bp, Homo sapiens
cccagacttgtcgcacggatgcagaaaacttaatggaggaggctgagagccttgcaaaggaccatcgcatgaaacttatgcaacaacaacaggaagtggc

SEQ ID NO: 785846 - DNA, 90 bp, Homo sapiens
tgaagacccagagatgtaagatcccctgcaactggaagaagcaatttggcggaggtccagatggttcctgtgactccagcttcagtagcg

SEQ ID NO: 785847 - DNA, 83 bp, Homo sapiens
atcccgtcaggggttgcaggtgtgtgggagatctgactgcagccatgagcagcaatgagtgcttcaagtgtggacgatctggc

SEQ ID NO: 785848 - DNA, 74 bp, Homo sapiens
cgtgcctttgggtgataagggcaattaccagctctggctgggtcgccacaacttgtttgacgacgaaaacacag

SEQ ID NO: 785849 - DNA, 98 bp, Homo sapiens
caaaggctgctctgaagcgcacgacctccgactactttctccttcaagggcgcaaaccagaagaagagggtgtggaagataacgggctggaggaaaac

SEQ ID NO: 785850 - DNA, 100 bp, Homo sapiens
aaatcagcagttatgaggcagagcctaagagaactatggcaacatcaggtgactgtcccagaagtgaatcgcagagagctattgcttaccttttcccaag

SEQ ID NO: 785851 - DNA, 100 bp, Homo sapiens
gtggcctccacctcggccgccctgcccagctgcctgcccccggaggtgcccacgcagctgcctggacaatctgcagccaggagagcagggacgtcctgtg

SEQ ID NO: 785852 - DNA, 99 bp, Homo sapiens
gtgtccgctgtgcccgggcctgcaccatgagcgtcccggccttcatcgacatcagtgaagaagatcaggtcctatggcagcgtatacaaagctattcat

SEQ ID NO: 785853 - DNA, 50 bp, Homo sapiens
attggataaaaactcagctgagttcacagatgactacattgcaattggag

SEQ ID NO: 785854 - DNA, 98 bp, Homo sapiens
gtccttgactccatgaagcttaccccctcaggcaggctggcagagagcagggtgtatgtacaaagacttttgaagaggtgtgggagcacacatgattt

SEQ ID NO: 785855 - DNA, 101 bp, Homo sapiens
gcgtccctgtgacctggccgatgaggaagtactgagcctgttggaggaactggcccggaaacaggaggacgatgggcgggatccccgctgtgaacggccgc

SEQ ID NO: 785856 - DNA, 106 bp, Homo sapiens
cgcgcggcgcacggacctgggacgcggagtcctgaagccggcggacggttttcgtacgggcggccgtgcgcgaggcgagttgccaccttccagagaagaggtacga

SEQ ID NO: 785857 - DNA, 83 bp, Homo sapiens
ggaggacctcacttccccggggtgtaataatgttaactgagctctctatcaatatcagctcacatcattgaaaagataatttt

SEQ ID NO: 785858 - DNA, 90 bp, Homo sapiens
ctccatccgaatgtgtctgccccccaggcagtggagctactgctgtggttcaggcagccctatgcaaacccaggcaagaacgtgtagcaa

SEQ ID NO: 785859 - DNA, 100 bp, Homo sapiens
cgcagcctgcctttccttccccctcggaaaatggttcccactgccgggcgagggccgttgctccagggagaactgcaaatatcttcatccacccccacat

SEQ ID NO: 785860 - DNA, 82 bp, Homo sapiens
cacgcaccgactatgtcgcctgccaccgagccgggcccacctccccaccaaggaagttccagggtctccctccactgctgta

SEQ ID NO: 785861 - DNA, 100 bp, Homo sapiens
cgcggactgtgatgaccagtctgatgagcgcaactgcagtacaggtttgcagattccgccagcagcacagcaagctctacagatgagtggctctttggca

SEQ ID NO: 785862 - DNA, 133 bp, Homo sapiens
acatttgtttctgtgatttactgttctggcacagacaggctgtgtgcatgcaccaaagcttgtgtggaattattccgggacttagcagtatcttccttccccgaatgaatccatttgttttgattgatcttgc

SEQ ID NO: 785863 - DNA, 100 bp, Homo sapiens
atggctgtgtgcccggtgcaaaagaaatgcgtggacagcaatacgtaggtaacctttccagagatgtgacagaagtccttatacttcagttgttcagtca

SEQ ID NO: 785864 - DNA, 82 bp, Homo sapiens
ccacctctatggcagcaacgcctccctggcccagtgaaggtcatgccttttgccaacttgatgagcctcctgggcccctcca

SEQ ID NO: 785865 - DNA, 90 bp, Homo sapiens
ggattcttcagaaagtgaacttggcattttagatctaattcaattagtaacaggagtatgggaaggcaaatacaacttcttctgtcaggg

SEQ ID NO: 785866 - DNA, 80 bp, Homo sapiens
cctctgtacgcccgttcactgccacataaagaagatccctaatagtcatttctcaacaattatatagtcaactgatgtaa

SEQ ID NO: 785867 - DNA, 88 bp, Homo sapiens
aagatggcggccaccatgaagaaggcgggtgctgaaaagtcacccaccacttcagctgaccttaagtcagacaaagccaactttacat

SEQ ID NO: 785868 - DNA, 83 bp, Homo sapiens
aggactgcgtggtataccaggaagcatggggaacatgggcatgccaggctgggttaatactcttgttggtgggcagaaggaag

SEQ ID NO: 785869 - DNA, 87 bp, Homo sapiens
agccttcccagtagctggaactacagtgtctaccatcagagggagatctctgccccctggggctgagagaccccaacctttccccaa

SEQ ID NO: 785870 - DNA, 100 bp, Homo sapiens
atgcactttactacaaagatggacttctctgtacaggatcttagaaatgaagttgaaaaattacgcaatgaagtgaatgaaagagagaaagcaatggaaa

SEQ ID NO: 785871 - DNA, 101 bp, Homo sapiens
aaactacatctgtattggaacgcctgaagattttctattgctgtcaagtaccacctcactgggccattcaggaaagttcacatccttggctccttccaaaa

SEQ ID NO: 785872 - DNA, 98 bp, Homo sapiens
tcgtcgtagaaagagaacgtattggaatgagtcttgggcgtctttggtactggcttttttaggggtctgcctggggattacccttgctgtggatagaa

SEQ ID NO: 785873 - DNA, 96 bp, Homo sapiens
tgatgttggagaactacaggaacctgctttctctcgatgaggataacatccctccagaagatgaaacccgcgctgaccgcagcaagaagcttttca

SEQ ID NO: 785874 - DNA, 82 bp, Homo sapiens
gactgagtcctgcaggacacaggctccatgttggctcaggcagacaagcttccaatgactgacaagagggttgccagcctcc

SEQ ID NO: 785875 - DNA, 88 bp, Homo sapiens
aactgtatgatatggcagatgtatgggtgaagatccaagatgttctacaggagaagagatcaactttgggaaacttatcacaaagcct

SEQ ID NO: 785876 - DNA, 127 bp, Homo sapiens
attgccttaccaaatctccaggtttttcgttatacctcttcactcaggctctgcccagaactcaaggaacacgatgaacctattctgaagcacttgaaagatattaaagtgaagttctcagatgctg

SEQ ID NO: 785877 - DNA, 50 bp, Homo sapiens
actatggcgctgaaacggattaataagagtggagactgctgcacggactc

SEQ ID NO: 785878 - DNA, 101 bp, Homo sapiens
ctacgcctctcgggcctctgtggcctcagagcgtctgggccacactgtctgggaagaggttagagcagccagcgggtacagaatggattttggaagaggga

SEQ ID NO: 785879 - DNA, 74 bp, Homo sapiens
caacagctcacaaaggagaaagagcactaccaggtgttaggtatattactcgaggggtttttaaatattgtcag

SEQ ID NO: 785880 - DNA, 101 bp, Homo sapiens
cgctgctgtacttcgtctatgtggcgcccggcataggagtaaaagtccctcgcaatttccgactgttggaagaactcgaagaaggccagaaaggagtagga

SEQ ID NO: 785881 - DNA, 75 bp, Homo sapiens
gcccccgtggccaccgcctccagcttgccaccaaagacctgcgactttgctcagatagcctgggctggaagctct

SEQ ID NO: 785882 - DNA, 121 bp, Homo sapiens
cagccaaaatcgggaacttggagatggtcagcctgctgctgagcacaggacaggtggacgtcaacgcccaggttagtactccagtagttaagcaaggaccagtgtcacagtcagccacaca

SEQ ID NO: 785883 - DNA, 100 bp, Homo sapiens
ccaactttaacgacatagtcaagcagggctacgtgaaaatccgcagcaggaagcttgggatagttttgaggcagctgtgccatcaaatagccacattgtt

SEQ ID NO: 785884 - DNA, 100 bp, Homo sapiens
tgaaggaaaacctccttatgctgatatacatccaatgagggtaggccgccttttgcagcagttagcaatgactggctctgaagagggagatccccgaaca

SEQ ID NO: 785885 - DNA, 100 bp, Homo sapiens
ctaccttctggaagctactactacgtggtgcttggaaagtgaaattcgtaaggacaccttgaaggccattctgttggagttagaatgtcattttacatgg

SEQ ID NO: 785886 - DNA, 83 bp, Homo sapiens
ctttggaggtggaaacactgcctgggaggaagagaatttgtccaaatacaaagacaggttatgaagacagtatggagtttcca

SEQ ID NO: 785887 - DNA, 82 bp, Homo sapiens
acaacatcatctatgtctacaagattggagaagattgggtatttggtttcccagtccactatactgacgtctccaacatgag

SEQ ID NO: 785888 - DNA, 75 bp, Homo sapiens
accaggcgaagcaggtagtggcgctgaatcgctcctgccgcggggagaagaaactgaggcctggaatttgattaa

SEQ ID NO: 785889 - DNA, 75 bp, Homo sapiens
cgacaagggtgttcccgaactagagtgggtgaccattgtgaggtagatattttgttctaattttccagatgagga

SEQ ID NO: 785890 - DNA, 75 bp, Homo sapiens
gatcttccaacctgggaagaaaggctggagcattggatttgctaaaggagcttaagaatattcctatgaccctgg

SEQ ID NO: 785891 - DNA, 89 bp, Homo sapiens
gagatattttcccagctgggtggtgtcgcctgacaggagatgtattacaacccccaggaactagtgggttgagttccagaataaattct

SEQ ID NO: 785892 - DNA, 83 bp, Homo sapiens
ctagtcctgagcgtgtctgtgtgcgagtgggctgcctatgtgttatccaaataccagtactttgtctgcccagtggaataccg

SEQ ID NO: 785893 - DNA, 83 bp, Homo sapiens
ctgctcctagaaccgaacgagccagtgagaacactctgctccagccaaggtggtgagggcagctgttcctaaacagcgcaaag

SEQ ID NO: 785894 - DNA, 75 bp, Homo sapiens
ggcgaggaatcgccgtggcgtcttggtgttctccacgctggttcgcagattatggtgacaagctgaacatggagc

SEQ ID NO: 785895 - DNA, 98 bp, Homo sapiens
caaactgctcatacagaattacgcatttccacttctaatgtgtggtttcttcaagagaaataagaaagatcattatgatgccacatatcacaaggctg

SEQ ID NO: 785896 - DNA, 50 bp, Homo sapiens
attttacctggcaagctgcagggcagattgccatcacgaaagccaaagtg

SEQ ID NO: 785897 - DNA, 83 bp, Homo sapiens
ggcgccaagatcccagtcacaattatcaccgggtatttagcggacaaggcaaaatctcagcaagttcggacctctagtacaat

SEQ ID NO: 785898 - DNA, 75 bp, Homo sapiens
gaccaagatcaggaacctgccctggaactcgctttgaacgcttgcttatgagaataggacatcaatcaaagaatg

SEQ ID NO: 785899 - DNA, 74 bp, Homo sapiens
ccttgtcgctgtggagctgttgaaggttttttgcatgtctgacacccatgactccacctggaccttatggctcc

SEQ ID NO: 785900 - DNA, 100 bp, Homo sapiens
agccacccgcccgcccaaggtctctcgcgggcgggagaacggaaaactcccaacttcctgaaggcgcagcccccagccccacccatgtggctgagctggc

SEQ ID NO: 785901 - DNA, 80 bp, Homo sapiens
cgcacaagtcaggtccggcacatgtttccgcggagcggacccagcaatgacggagttgtaagacgttcatcgccgtgtta

SEQ ID NO: 785902 - DNA, 100 bp, Homo sapiens
caagaacgtccagaagcgactcaaccgcgcgcaggaaaaggtgaatggaggcattgagaacacattagagaaggaggtgatgcagtatgactactattct

SEQ ID NO: 785903 - DNA, 85 bp, Homo sapiens
tcgtcccctgcctcaccaagcatgtgctccgggaaaaccaggattatgtccctggagagcggcacactgcagaagttcgtggatg

SEQ ID NO: 785904 - DNA, 51 bp, Homo sapiens
ggaactcttagctgagcaggcgagaggctcttgtcaggatggtgaagctgt

SEQ ID NO: 785905 - DNA, 88 bp, Homo sapiens
attgactactgccacaattccgctgatgttctaatcatgtcagataaagatgatattgagactccactgctaactgaagcagccccca

SEQ ID NO: 785906 - DNA, 75 bp, Homo sapiens
tctcttcccacggacgcgcgagacaatgaggagggcaagttaaagtcttcagagccctgtatacgtttgaaccca

SEQ ID NO: 785907 - DNA, 100 bp, Homo sapiens
acggaagatttaaaaagcagccggggcctccgtattgaatgaaagacccagtgcaaagacatcaccatgaacactagcaatatgaagatcaatgatgcag

SEQ ID NO: 785908 - DNA, 50 bp, Homo sapiens
aattgtgcggaaatatctagtatcagattcagaatggacagtttagaaga

SEQ ID NO: 785909 - DNA, 82 bp, Homo sapiens
gaaggattcaaatgctagcagacacggtggctactctgcctcggggacgaaagcagataagttttttcagtcagccatgagc

SEQ ID NO: 785910 - DNA, 83 bp, Homo sapiens
agaaaatgtgtgttgattttttgaaagaacaagttgatgcttcaaattgtcttgatgtgaagttcatttccaatccgccctcc

SEQ ID NO: 785911 - DNA, 97 bp, Homo sapiens
agacggtgcagggctccgggcaccaggagcatatcaagcactacctggcagcaccatctaaacctgtatcatctgctgtggtcccagttactcagga

SEQ ID NO: 785912 - DNA, 96 bp, Homo sapiens
cgctggtcgttggcttctctcccttcctctggctatgggacaaacacacccagctctacggtctctgcagtgtgtacacaaggaaggaaatggcag

SEQ ID NO: 785913 - DNA, 101 bp, Homo sapiens
ggagcggcgcccccgccgctgccgccgcgacccttggcgcctgcccctgcaacgggaggtgatgcaggttctgaatgctgatgccattgttgtgaagctga

SEQ ID NO: 785914 - DNA, 82 bp, Homo sapiens
tggtgcagccaccctcgctccctctgctcttcctcccttcgctcgcaccatggctaccggctctctgaccagttccacgaca

SEQ ID NO: 785915 - DNA, 75 bp, Homo sapiens
ccaataaaaataaactgcttgaacatcctttgactggttagccaggtaagaatgattgatgttggctgatattgg

SEQ ID NO: 785916 - DNA, 83 bp, Homo sapiens
actccggcgctcgccatggccgacgaaaagcccaagcatcctgaggttagcattacacttctcccagtggagcccatgacttc

SEQ ID NO: 785917 - DNA, 90 bp, Homo sapiens
ccagcacggagggacttctgcagagagagtgcgcagaaggattccgggagcacagttccgccgatgttatgtgccaagaaccttgcaaag

SEQ ID NO: 785918 - DNA, 85 bp, Homo sapiens
tctgaactgaagaagcttgggctcacttccacaaatcaggagcgagaacccgagcagcgccatgagcaacactaccgtcgtcccc

SEQ ID NO: 785919 - DNA, 100 bp, Homo sapiens
gaagaaaaagaagacttgcttcagcatttctcagtgaccagcgccatgtccagccaggtggtgggcattgagcctctctacatcaaggcagagccggcca

SEQ ID NO: 785920 - DNA, 115 bp, Homo sapiens
gcgggcactgcggcgccgaggcgcggcggcaggacgggaaccacgcgagctgcagccagctgtgtcagcgtgttatgatgccgtcccgtaccaacctggctactggaatccccag

SEQ ID NO: 785921 - DNA, 75 bp, Homo sapiens
atcactcgctcccttgatgatcttgaggtgaataagccttacgggaaagtccagatctacacagcggatatttca

SEQ ID NO: 785922 - DNA, 75 bp, Homo sapiens
ttttgtctgcccctattgtaagtgcagatggaacacaacagacttctgagaagttccagaaaataaatcagatgg

SEQ ID NO: 785923 - DNA, 90 bp, Homo sapiens
gtctgcggaagtgcagctgcctcagttcttagcgcagaagtgcctagctgccactccatttatatgaggcaagaaggcttcctggctcat

SEQ ID NO: 785924 - DNA, 100 bp, Homo sapiens
gcctggagcagggtggccgtggcagcgtcctgcagttcatgcccttcaccaccttgaaaacaccacacactgtgagtttgcctacctgcgggaccttctc

SEQ ID NO: 785925 - DNA, 113 bp, Homo sapiens
tggcaccaatgtgatggtgacagtggccaagtccttcgaggcaccaataaaatgtacctgcgcgccctgtacctggggctgcagagccgctggcgcggggagcggctgcggcg

SEQ ID NO: 785926 - DNA, 130 bp, Homo sapiens
accactcaagagtcataggattagatgatccaagtcaccaagaaattactgtctcaagtgatacgactgcctctttaagctatgtcccatgaaccgctactctgcccaaaagcagttctggaaagccgct

SEQ ID NO: 785927 - DNA, 74 bp, Homo sapiens
tttataaaaatggagatattgttcgctttcacaggctgaaggtatctaaaacagcaccaactggagaatatttg

SEQ ID NO: 785928 - DNA, 82 bp, Homo sapiens
cgagcaggctgacctactgcaagaggttttaaaatcaaagatgggaaaatcggagaaaattgcccttccccatggccagctt

SEQ ID NO: 785929 - DNA, 100 bp, Homo sapiens
cttcagcagggcagctgaggatgaaggagaacatatttgccagagccaggaggaactctctcccagtccgcctttgttgaatccatccacgccacagtcc

SEQ ID NO: 785930 - DNA, 90 bp, Homo sapiens
aactcctacgaggacaaaagcaacgacttcgtatggattgtgcagactggtgcttaaaatggaagtcgatattaatggagagtctagaag

SEQ ID NO: 785931 - DNA, 75 bp, Homo sapiens
gcactatcccaagactgctggcaacagttttttgctccactcaagcctgttagaatcaccatggaatacagctcc

SEQ ID NO: 785932 - DNA, 100 bp, Homo sapiens
caacatgatggtcagaaaaggggacacggcggtgcttaggttttctacagcctctgctgtccccctggccaaaacagatacttggccaaaggacgtgggc

SEQ ID NO: 785933 - DNA, 50 bp, Homo sapiens
tttgacgacactgatggtttggaggaggcctcggtggtaccagaagagga

SEQ ID NO: 785934 - DNA, 101 bp, Homo sapiens
caagcagaactgaaggatgccctggggagtggaggaacgggccaaggacctttattgggcttgaggtcacttcagggcatgcccagttcctggacctggtt

SEQ ID NO: 785935 - DNA, 75 bp, Homo sapiens
gaagtctgcgtgctttagaatggatgaacaagagttaaccgttcacaagattcctttgcagttcacccttggagg

SEQ ID NO: 785936 - DNA, 75 bp, Homo sapiens
actgtatgccagcagcttgttgtacagagtatgctgctgctgttccgctttgcgtcctcgctacaaacgcctggt

SEQ ID NO: 785937 - DNA, 100 bp, Homo sapiens
atgtgcgtggctacggtcctcacggccggcgcttacctctgctacagggtggagccgccaccaaaatgcagattttcgtgaaaacccttacggggaagac

SEQ ID NO: 785938 - DNA, 51 bp, Homo sapiens
cctcctccagctgttgttgctgctggttcattccagccaacaaatgaaatg

SEQ ID NO: 785939 - DNA, 75 bp, Homo sapiens
ttggtgcgggagctggaggagctgcgctcggagaacgactatctcaaggtccctgtgcgttttattgcgacctgc

SEQ ID NO: 785940 - DNA, 80 bp, Homo sapiens
agggaaagggataggagaaggatgtggactgcagtgctgcagtgccaggatcccatggtccattattgcctttaccaagt

SEQ ID NO: 785941 - DNA, 83 bp, Homo sapiens
catcatgttggaccaggctggtctctaactcctgacctcagatctctggaaacatggctacagaacatgttaatggaaatggt

SEQ ID NO: 785942 - DNA, 75 bp, Homo sapiens
agaggcatctgttctatcttcccatcataaaaaaaatccaaaggactgcatgacacaccataggatatagtcaag

SEQ ID NO: 785943 - DNA, 90 bp, Homo sapiens
cgagatatctggccgcctctgccgcagctggagggacacggccaacacggtgaaggaaaagttcgggaggaagctttatgaatccttact

SEQ ID NO: 785944 - DNA, 82 bp, Homo sapiens
tcgccatcaaggctctgaagaaaggggacattgtggcccgagacgaggtggagagcggatgtgatgctggtacaacccagag

SEQ ID NO: 785945 - DNA, 74 bp, Homo sapiens
tggcttcctcgattctgcatcaataagagctaactgccatcaagagccatcagtatgtcttcaagctgcatgcc

SEQ ID NO: 785946 - DNA, 98 bp, Homo sapiens
gctgcagcctcagccaggagcacgtagagtcactctgctggttgctgagcaagtgtaaagacctcagccaggtggagcctcaggcccaggcccaaggc

SEQ ID NO: 785947 - DNA, 75 bp, Homo sapiens
acaattctaaaaccatgacctgtagagcagctctaaattgggaagcaatgccggaaacaagtctcttaaaaatca

SEQ ID NO: 785948 - DNA, 100 bp, Homo sapiens
cgacggccttgagcgaggaggagctggacaatgaagactattactcgttgctgaacgtgcgcagggaggggttggtgccatctacatccgtcgccggccc

SEQ ID NO: 785949 - DNA, 87 bp, Homo sapiens
atgtggtcgagagattgtctgtactgatagcatctaatccgaaaatgagagcacacctattcagcaactcctggaacacttcctccg

SEQ ID NO: 785950 - DNA, 82 bp, Homo sapiens
cgcagccgctgcatctccgccagtccgcgcagaaaggagaatcacttgaacccaggaggaggaggttgtggtgagccgagat

SEQ ID NO: 785951 - DNA, 82 bp, Homo sapiens
tgttgtgcctcttcatattggcgatcctgttgtgtccagctgggagctccccgacctccaggagggcaagatccaagccatc

SEQ ID NO: 785952 - DNA, 101 bp, Homo sapiens
cttggcaactttcctggcccttttgaagaggaaatgaagggtattgccgctgttactgatatacctttaggttacagtcaaaatcatcttcgacaagcaca

SEQ ID NO: 785953 - DNA, 78 bp, Homo sapiens
acaccgtggtgacattgtatcattggtaaacattgctgaggctcttgtcagcaaaggtctagccacagtgatcagata

SEQ ID NO: 785954 - DNA, 50 bp, Homo sapiens
accccattttgactttgcacgggttcttccgaatgatccagtctttcttg

SEQ ID NO: 785955 - DNA, 87 bp, Homo sapiens
ctgatggagagctgaacattactcttccagaagaggctgagggtaaaaagctgggattggtaggctgggtccagaacactgaccggg

SEQ ID NO: 785956 - DNA, 83 bp, Homo sapiens
cctcagtttctggagctgttccgagggaattggctcgggaaaaggtaatgcgagaagttaaagccttagccaagcttgaacac

SEQ ID NO: 785957 - DNA, 98 bp, Homo sapiens
cctgtgtggcaaacagtgatatcttcagcgaaagtgaaaccaggcacttctaccctagccgggcccagcccccgagcagtgcagcctcccgagtgcag

SEQ ID NO: 785958 - DNA, 139 bp, Homo sapiens
tgtggttcttcatcgtgctattcctggtctacatcctgcgggtgcctttgaaaatcaacgacaacttgagcacaggtctcctaaaaacccagaacagaagatcattaagagagtgattgctcttgaaggagatattgtc

SEQ ID NO: 785959 - DNA, 74 bp, Homo sapiens
ggaggtcctgccgtccatgcggaagatcgtcgccacctggatgctggagatagcctgggctggaagctcttcta

SEQ ID NO: 785960 - DNA, 74 bp, Homo sapiens
cgacgttccatctgtggaaggacctaccaaccagagctggagtggaccagagaaattgcttgctttagatgaac

SEQ ID NO: 785961 - DNA, 101 bp, Homo sapiens
gaggctgaaggccgggccccgcgagtgccatggcggccgccctgggagcgagcggaggagcaggcgccggagaatgtcgtactctcaggaggctccaccat

SEQ ID NO: 785962 - DNA, 100 bp, Homo sapiens
cccgccggtccccgtggtgaagtgggtcttccaggcctctccggccccgttggacctcctggtcctcctggtccccaaggtgtcaaaggtgaacgtggca

SEQ ID NO: 785963 - DNA, 99 bp, Homo sapiens
tacatggacctgcctttctcctcctccccaagtcgcagtgccactgcaagcccacagctgtcacaagatgaaggtagaggcacattatacaaatacaga

SEQ ID NO: 785964 - DNA, 99 bp, Homo sapiens
cggagcggccggggcctggggctgcctgccgggcggccgggcgcggcgagcccagattataagcgccatggctatggctagtgttaaattgcttgccgg

SEQ ID NO: 785965 - DNA, 83 bp, Homo sapiens
ctcagactcagaggaagaaagggctcatcgcttagcagaactacaggaacagtgaagtgaagacttacgatccttctggtgac

SEQ ID NO: 785966 - DNA, 97 bp, Homo sapiens
gggaggccccaagtatactctctcacagcagccttgggcacaaccagtgccctctggtggtcagaagatgctgtgctgtctcgttaggatgaatgga

SEQ ID NO: 785967 - DNA, 75 bp, Homo sapiens
aagatgaccagaggactagacctgaagtttcaaagagagacaagagagacacctccaacttcgacaaagagttca

SEQ ID NO: 785968 - DNA, 75 bp, Homo sapiens
aaactcaagcagcgagtcatccaggtgtaatcgaatcctggaccggaaaggggaagcagtgccattcaagaataa

SEQ ID NO: 785969 - DNA, 98 bp, Homo sapiens
gcatgatgcaggcccaggaagccgtaagcaggatcaaggtaaacctctttgtgctgctctctgtggtttgtgtcctcttaaatctagctggatttatc

SEQ ID NO: 785970 - DNA, 100 bp, Homo sapiens
tgcatcattcagatgtctggaagcaccaccagtcccagagggtggaaggagccaggacgcacccccactgctgctgcaggagccgctgctgagctgcgtg

SEQ ID NO: 785971 - DNA, 50 bp, Homo sapiens
cagatggctctaacctcagtggttatccagttttccttgagggattatgt

SEQ ID NO: 785972 - DNA, 83 bp, Homo sapiens
cccaaatcccggaaactccagcgtgtctccagccgtgagccaaatctcctcagccacctgttgaagaagaagatgaacacttc

SEQ ID NO: 785973 - DNA, 75 bp, Homo sapiens
cgtggtcatgagggcattatgtactttgtggaaaaggagtgtgaaaccaagattgcacaagagatagccagtctt

SEQ ID NO: 785974 - DNA, 82 bp, Homo sapiens
tttgacaacatcgacatcaagtcggccggggatttaggtgtggacactgccagcggctgcagccgacttggaatgacctggg

SEQ ID NO: 785975 - DNA, 74 bp, Homo sapiens
caagaactgaggagcaccaggagacgcaactcatcggttgatgcgatgaagagagttgaagaaatcaaacagaa

SEQ ID NO: 785976 - DNA, 75 bp, Homo sapiens
atccacagtatccaaaatagccaggacatgaggcagatcagtgacgtccacctggaaggccgctgtggtggaagg

SEQ ID NO: 785977 - DNA, 82 bp, Homo sapiens
agctcgccgctccctagcaccttctccagtcgacactctcgcgcccggaggcccgatgagagaaagggaaagttaaggatgc

SEQ ID NO: 785978 - DNA, 98 bp, Homo sapiens
ccgagcggtgactccccgccgctcccgggggccgtgacggctattttggcattctgctggatatatgttcgtaaataccaaagtcggcgggaaagtga

SEQ ID NO: 785979 - DNA, 100 bp, Homo sapiens
caagctcactgccgacttcagggaggatccggacccccgcaaggtcaacctgggagtgggaggttataagcacatgtccttggccctgaataggactggc

SEQ ID NO: 785980 - DNA, 50 bp, Homo sapiens
ctacgaggtgctggatgcggccgggccctcgggaccaaggatcacgtcat

SEQ ID NO: 785981 - DNA, 100 bp, Homo sapiens
tgtttcttcttgctgctgcctaagtctcatttgactgatggattttaaaacctttgggattatatgagggttctgtacattggcctggcctgcaatacgg

SEQ ID NO: 785982 - DNA, 83 bp, Homo sapiens
ggcacagcaaatgctgaggactcagaccggtctctgcaagagttggtgttcgaggaagagacattgttgttcttggtgtggag

SEQ ID NO: 785983 - DNA, 83 bp, Homo sapiens
ggcggagcttcgccaaggctggcgcagtcgaacatccagtcatggataaaaatgagctggttcagaaggccaaactggccgag

SEQ ID NO: 785984 - DNA, 75 bp, Homo sapiens
gagaagcacaagatcatgcacagagttgacatgaagacaatggagactgcagagaaactggctagatttgttgct

SEQ ID NO: 785985 - DNA, 50 bp, Homo sapiens
cgcgagatgtggaggctcatgtcgaggtaaagtcagtgataaatcttttg

SEQ ID NO: 785986 - DNA, 100 bp, Homo sapiens
ggtgaaggtccggggcttgccctggtcttgctcggccgatgaagtgcagaggtttttttctgctcaaaagccaaaagtctctgagaacgactttgaagat

SEQ ID NO: 785987 - DNA, 90 bp, Homo sapiens
gacacactatggtgcttcagccaagtgaaaggcactatcgagattggaaccacagaagatggttatgtccttcggagttacctagcggac

SEQ ID NO: 785988 - DNA, 100 bp, Homo sapiens
ccgtggccccgagggcggatccgaggcccactacattatgtgagactgtgggaaaagctgagatatggctaatacgaacatattgggattttgaatttcc

SEQ ID NO: 785989 - DNA, 75 bp, Homo sapiens
acgttgtcccgcctgggattgcgaggttttcttccacccctgagatggcaagaccagccccttgtcttcctcagc

SEQ ID NO: 785990 - DNA, 75 bp, Homo sapiens
atcaaatccaagggcggtgttgtgggcatcaagataatcaggacacccggagcaacctggacataactgtcggct

SEQ ID NO: 785991 - DNA, 90 bp, Homo sapiens
cgtgaggacagtgagactcgaacagcagtgacatcagtgtctggcccaggtgagcacctccgaaatgccctgtggcatactggccacacc

SEQ ID NO: 785992 - DNA, 75 bp, Homo sapiens
ctggatcatttggaacagtctacaagggaaagtggcatggtacttacaatttcatcagaaattcctaaaagaatt

SEQ ID NO: 785993 - DNA, 100 bp, Homo sapiens
ggaggctctcactaaccacaggcatcagttggtactcgccatgaaactcaaagatcgagaggtcaatgagctgaaggagaaaggcaacaaggccctgagc

SEQ ID NO: 785994 - DNA, 71 bp, Homo sapiens
ctgggcagcctgctggaccctgccaagaagtcgcccatcgcagcagctcgagtgcacggcctggagataga

SEQ ID NO: 785995 - DNA, 75 bp, Homo sapiens
ccgccaatggcaagttggagggagagatgcaaataccagtggtcccaggctgcacccatggcagaaggaggaggg

SEQ ID NO: 785996 - DNA, 82 bp, Homo sapiens
ctttcatgcagtgacatgttgataaaaaatgatgacaatgcagatcttcgtgaagactctgactggtaagaccatcaccctc

SEQ ID NO: 785997 - DNA, 100 bp, Homo sapiens
cagatactctgcccaaccgcacggtcaccctctgtaaaggtgcctcccactacggcctgaccaaagataggaagaggcgctcacaagatggctgtccaga

SEQ ID NO: 785998 - DNA, 100 bp, Homo sapiens
gctgccatacctgagttgagaactccggttgacctgacagttcaagaaaaggagaaatatcttaatgtgtctcgctggttttgtcacattcagcattatc

SEQ ID NO: 785999 - DNA, 90 bp, Homo sapiens
ctggtttcacactccaccaagcatcccattacagatagaagagggcacctcaacacctttgcttcgaatagcctgggctcgaatcatatt

SEQ ID NO: 786000 - DNA, 88 bp, Homo sapiens
aggactctatacagggacgtgatgctggagaattataggaacctggtctccctggaaaagcacttggttctgcttcgagatggaagga

SEQ ID NO: 786001 - DNA, 75 bp, Homo sapiens
gttcggcttcatcgtgggctcgcagggcgccgagggcgcgtgtctgagatgctgccaccgcagaagaagccctgg

SEQ ID NO: 786002 - DNA, 87 bp, Homo sapiens
ccagcaaataggaaaattaagtttagtagtgctcctattaaggagaatggtgttgaacgcgtgtgtcctgagagcctgctgcagtcc

SEQ ID NO: 786003 - DNA, 75 bp, Homo sapiens
gtgaaagtaaacattccctttgtccgtctgaattaccaggaaggctttgtgatacctgatgaagggggcccacag

SEQ ID NO: 786004 - DNA, 100 bp, Homo sapiens
gcaatggacaagctgaagaaggtgctgagcgggcaggacacggaggaccggagcggcctgtccgagatgatgaggagtctgatgaggaagctgtgaagaa

SEQ ID NO: 786005 - DNA, 98 bp, Homo sapiens
ggggagtgtcgcagccctgaagttgcctcttctggtgtcaaagcttttggacattcctggggtattgttgcagcatctggcagtgagactgaggatga

SEQ ID NO: 786006 - DNA, 87 bp, Homo sapiens
gatcatggcgttggcattgaacctgtatttccggagaacacaggcatttcagaatttgctacctctccagagaaagtcagtgattac

SEQ ID NO: 786007 - DNA, 75 bp, Homo sapiens
tctctgccgtgaatcattcctgcagatgaaaaagtgtgacttggcagctgatgatgtctttctacctaaagatat

SEQ ID NO: 786008 - DNA, 100 bp, Homo sapiens
caaaatgttcaagtgatgtttagaaataacttgtgagatgccgtagggccaggtgagctgctgtgaaggactcattcttggtagccggcagttactggca

SEQ ID NO: 786009 - DNA, 100 bp, Homo sapiens
agattgatattctcacaagtctggaggctgtagaaatctaacatcaaggtgccaacaggagctatggatttccttggaggaacaccaggatgctttggaa

SEQ ID NO: 786010 - DNA, 82 bp, Homo sapiens
tcggtggactccttcggcagtccacccaccgccgccgcctcccaggagcattggtttgaaaaggccctacgagacaagaagg

SEQ ID NO: 786011 - DNA, 102 bp, Homo sapiens
actactgttgaaaaaatttccagtgagaatcaggaaacccaggcccaacggcaggtggatgcaagaagaaatgttccccaaaacgacccagtgacagtggtg

SEQ ID NO: 786012 - DNA, 95 bp, Homo sapiens
tattagggcaatttgtctcaataaaagcccaggaagaagacgaggatgaatgagctgaaagccagtggtggcgaaatcaaaattcataaaatgga

SEQ ID NO: 786013 - DNA, 50 bp, Homo sapiens
ggcggttcctgggctgctccgcctatgtgcttcccaagctgtatgtgaag

SEQ ID NO: 786014 - DNA, 100 bp, Homo sapiens
ctctacagcagcttcactgcctgaaaatgaaaactgaacaaagggattaaattgtgagagatgctgcaatttgtcagtaatcaagtgggagagttccctg

SEQ ID NO: 786015 - DNA, 83 bp, Homo sapiens
ggatggtacctggccccaaaaggaatcctggagaggaggacagtgacaacagcggctatgtgactacgtttgtgacctcctct

SEQ ID NO: 786016 - DNA, 80 bp, Homo sapiens
aaaaccagcattcaacttgtctgcctttggaacactttcccctgttgtgcccacgtgcctcagggccttggtagaaatgg

SEQ ID NO: 786017 - DNA, 97 bp, Homo sapiens
tctctggagacatcttcagcagataaacaacttgatgcagatgtttcccccaagcccactatttttcttccttcaattgctgaaacaaagctccaga

SEQ ID NO: 786018 - DNA, 87 bp, Homo sapiens
ttgtcactccaacctcttttcgctgacatgggaaagcggaaccaccaaaaggagtgatgatcaacgatctcatgataaatctggatg

SEQ ID NO: 786019 - DNA, 75 bp, Homo sapiens
ggccgtaaccccgaaggaaatgttgtggacctggcctattagcagatgccaagatgcgggtatttgaacgttcag

SEQ ID NO: 786020 - DNA, 100 bp, Homo sapiens
ccaggaggccagaaggaaatacaagttaaagtctgacacggctgctgcagctgtgcgccaaatgaatccacatatccgggtgacaagccaccagaaccgt

SEQ ID NO: 786021 - DNA, 90 bp, Homo sapiens
tgccctgcagtacctgcagaaggtctctggagacatcttcagcaggtgactccccggacagctcaacaccaaagctttcgcgggcacagc

SEQ ID NO: 786022 - DNA, 75 bp, Homo sapiens
ccccagtcacacccctgcccgaacaggaggcgtctccagcaaggcctgcaggactccctggaggaaaagcggaag

SEQ ID NO: 786023 - DNA, 89 bp, Homo sapiens
ggcaaagtcttttgtgctcccctcccccatcaaaggaaaggggaaaatgtctcagtcgaaagcaaagtacccacgtttgttcgaatgct

SEQ ID NO: 786024 - DNA, 51 bp, Homo sapiens
gaggccaggggtgtcgccatgtaccatgcggagaccatcaagaatgtgcgc

SEQ ID NO: 786025 - DNA, 51 bp, Homo sapiens
acagaagcgactttggtgagactctgggtagaagagcagaggatggctctg

SEQ ID NO: 786026 - DNA, 106 bp, Homo sapiens
ttccacatggagattggcacaggaccagactcaagacacacaactcataacagttgatgaaaaattgttgttctacgctgctgcgtatcattcaatgttgatgtga

SEQ ID NO: 786027 - DNA, 134 bp, Homo sapiens
cggggagcttacccagcttaaagagctccacattcaggggaaccgcctcaccgttctgcccccagaactaggtctattattagcagaagatttttctgcatagttggcacgctgtacctgtatcggtgtattac

SEQ ID NO: 786028 - DNA, 98 bp, Homo sapiens
ttctctacatttgtgaaagtcagtttctgaggaatttcatcaggaatactcccccagttgcaagaggcgcaggaccgtggaagacttcaacaaattct

SEQ ID NO: 786029 - DNA, 75 bp, Homo sapiens
ctcacatccaacacctcccagtatgacacatattgcttcaatgcttcaggaagcgttgttgacgaccatggacat

SEQ ID NO: 786030 - DNA, 82 bp, Homo sapiens
gagagcctgaggagtggcggggccgccagaggtaacatattcccgaagcacaggggaaaacgaacaagttagtcgcagccag

SEQ ID NO: 786031 - DNA, 74 bp, Homo sapiens
agcttctgttaaggattctcagaagaatgggtatttgaagtataccatacaactgttttgaaaatccagcgtgg

SEQ ID NO: 786032 - DNA, 100 bp, Homo sapiens
tcaaaatcgtcttttcctgctggtaaataacactgaaatatgacatgtgaaaaagtccttgatttgatgtgctacatggtactccccattcaagatggag

SEQ ID NO: 786033 - DNA, 76 bp, Homo sapiens
accagagctgttcctattcggccatcttggctcctccctcggtgctggagaatctggtaaaagcaccattgtgaag

SEQ ID NO: 786034 - DNA, 75 bp, Homo sapiens
acagtgctgctgccctcggcctgctctatgactactacaaggctcaggccacagggtcaccacatacatcgccca

SEQ ID NO: 786035 - DNA, 73 bp, Homo sapiens
cttactgcaggattttcagcttcagcaagcagtgccggtggtggtgtgcacattgagccccggtatagacagt

SEQ ID NO: 786036 - DNA, 99 bp, Homo sapiens
ctcggagggagcccggcggcttcggaacctgtcccgggggctggtgaacgtggccgccaagctgacccacaataaagatgtcagagacctgtttgtgga

SEQ ID NO: 786037 - DNA, 100 bp, Homo sapiens
aagtaaatatacgctttgttggtggactactctcagcctactatctgtctggagaagagaaactgttttggctgggcctacttcacctataccttctctg

SEQ ID NO: 786038 - DNA, 105 bp, Homo sapiens
tacgcgccgtgtaactgtgaatctttcaaagctctggacttattggacaaaatgttgacattcaacccacacaagaggattgaagtagaacaggctctggcccac

SEQ ID NO: 786039 - DNA, 75 bp, Homo sapiens
ctggctcttgccctcatcctggttctggaatcctcagttcaagggtggctgttgcaccacgccctccctcctgcc

SEQ ID NO: 786040 - DNA, 100 bp, Homo sapiens
gccgaaagtcgcagagctgaagcagaagatcgaggacacgctatgtccttttggcttcgaggtttaccccttccagtgtgcccagctggctggaaacctg

SEQ ID NO: 786041 - DNA, 100 bp, Homo sapiens
atgaacgatggcctctcttttatctccagttctgtcatcatcaccaccacacactgtgttccaagaccaaagattaaattaagagaaggtaaagctggac

SEQ ID NO: 786042 - DNA, 75 bp, Homo sapiens
ctggaaacgaggcactcagttggaagagtccagcaaggtcaaccactctccaagcttctccaccgactctcggtt

SEQ ID NO: 786043 - DNA, 83 bp, Homo sapiens
gagaagtccctgggactgagtaaggggaataaatacagtgctcagggcgagcgacaggtcgccactgggacactgtgaaccag

SEQ ID NO: 786044 - DNA, 82 bp, Homo sapiens
ctgaaggcggacagtctcctgcgaaaccaggcaatgggtgacttaagagattaaaattaatttggttgctgttggttctgaa

SEQ ID NO: 786045 - DNA, 75 bp, Homo sapiens
ttacaacgttaacctaaggaacagtggattgacttctaaagaatcttggtacgtgaggaagaaacccagaagagg

SEQ ID NO: 786046 - DNA, 100 bp, Homo sapiens
gcaacgtgttggaccttccggagcttctcagaagacagagggttttcttttgaggagatggcgaatattttggctcagaagcaactgcgttccatcattt

SEQ ID NO: 786047 - DNA, 90 bp, Homo sapiens
ttctcatgatagcttccaagggacaaggtgtcaacaatgtgccggcgcagttgtgtagcagttgagtaatgctggttagctgttaaggtg

SEQ ID NO: 786048 - DNA, 98 bp, Homo sapiens
cgcccctctaagcccggagcccggcgctttccccgcaagatggacggtttcgccggcagtctcggttacactcctggcacaccttacaaagtgtcctg

SEQ ID NO: 786049 - DNA, 109 bp, Homo sapiens
cataaatgatgaccagtgtttactcctctctgagactgtctggggagctctccgagaggagaaggcagagcccccccaggctatgaatgccctgatgcggttgaaccag

SEQ ID NO: 786050 - DNA, 75 bp, Homo sapiens
caggacagcacctagtcgtggccggaggagtctcagagctgtcagaaagagtaatcaagtcagaggattatatga

SEQ ID NO: 786051 - DNA, 88 bp, Homo sapiens
ttatggaagaaaatggaattggtgaagaagatgagcgaactcagggcattaaactcttgaaaaccagactttggcattatgttcctgc

SEQ ID NO: 786052 - DNA, 82 bp, Homo sapiens
ccgaacttcagggtttccaccgttcgttcaaggcaagtgaaccggagcaaacgacttccgatccagtctgcgctgttgcggc

SEQ ID NO: 786053 - DNA, 101 bp, Homo sapiens
ggcctccgccaccgtgcacatccgaatgggtaatcatagcctcctggtattgcacattcatgggaataatgaatttatttggactagaaactaagacctgc

SEQ ID NO: 786054 - DNA, 98 bp, Homo sapiens
cgccctcccagagctcctcctgcgctttatgaaggcaaagaacagatggagtttgaagaatccatgagacggctctttgaatccatcaacaatctgat

SEQ ID NO: 786055 - DNA, 101 bp, Homo sapiens
gggcggtgccggcgccggagacgatgccgttggccggtgcataaacttctcccgagttccatctcagtaaaagggaagcaggaagaccaagaaggtacgaa

SEQ ID NO: 786056 - DNA, 82 bp, Homo sapiens
ctgagaggggctgcggccggagcgggcggctgagacaaaggcgacgatatcagtttttcttgcaggtgaagcaagatgtcct

SEQ ID NO: 786057 - DNA, 75 bp, Homo sapiens
ccctaatcgtggcgcacgccgaagccgcctcctgtactatactggcaattgctggagaagattttgcaattgttg

SEQ ID NO: 786058 - DNA, 99 bp, Homo sapiens
gtcctgctcgccgtccccgccatgctgtctctagactttttggacgatgtgcggcggatgaacaagcggcagatttggagcaagaggtggtggtggcct

SEQ ID NO: 786059 - DNA, 90 bp, Homo sapiens
caccagctgaaggagcggtttgcaaacatgaaggaagtcaagccaagccagaccccgcagccgaaggacaagtgaagcagccccctgagc

SEQ ID NO: 786060 - DNA, 83 bp, Homo sapiens
cgcgctgacaggggggcctggccgcgcagccgcctaagttcgaggcccaggcgcctccatcagcgccgcctgcgccccgggcc

SEQ ID NO: 786061 - DNA, 100 bp, Homo sapiens
ggaagaggcattgaggactttccttacctgtttttccagctcacccactgccagcagaggagccaaaaacctgtatatcatctccgtgaaggggatcaag

SEQ ID NO: 786062 - DNA, 75 bp, Homo sapiens
ggaccaaaaattcactcactttgcaatggaaggtatgacataatgaagacttgctgggatgcagatcccctaaaa

SEQ ID NO: 786063 - DNA, 100 bp, Homo sapiens
gccaacctcaccaacgccatccgcgagactgggtttggtatgcagaatgttgaaattcctcatcttcctcaagattttgaagttgcaaaatataacacct

SEQ ID NO: 786064 - DNA, 74 bp, Homo sapiens
gagaactggtcgccatcaagaaagtattgcaggacaagagatttaaggtacagagtgaagacagtgtcctcctg

SEQ ID NO: 786065 - DNA, 82 bp, Homo sapiens
aagatcaagaccggcgtggtgaagcggttatgaagacagtatggagtttccagaccatagtagacatttgctacagtgtctg

SEQ ID NO: 786066 - DNA, 100 bp, Homo sapiens
tctacgaagaccgaggaaaagctgcggctgcagaagaaagatcagcaactggagcctaaaaaaagtaccagccctaaaaaagctgcggagcccactgtgg

SEQ ID NO: 786067 - DNA, 100 bp, Homo sapiens
ttggcaacatattgactgcatggggattgataggcagcatattcctgatacatatctatgtgaacgttgtcagcctagcatcgagagtaaacatgaggtt

SEQ ID NO: 786068 - DNA, 75 bp, Homo sapiens
tgggaagatggtagctgtaaacctggccactggaaaacgaagcctctacaaccccacgtcagagtgtgggattct

SEQ ID NO: 786069 - DNA, 106 bp, Homo sapiens
ggtttcccgggagatcccaggcggtgacagagtggagccatggctagaggttttaaaatcaaagatgggaaaatcggagaaaattgcccttccccatggccagctt

SEQ ID NO: 786070 - DNA, 50 bp, Homo sapiens
gagtttcaagcctgagtgtgaagattgaaggtgctggggatacatcagag

SEQ ID NO: 786071 - DNA, 83 bp, Homo sapiens
ttgtgaaagcttttattctcggctttcaggtggaggaattcctcctgatcagcagagactgatctttgctggcaagcagctgg

SEQ ID NO: 786072 - DNA, 73 bp, Homo sapiens
gacaccgcagccaccgcggatgcaaagtggaagcagggaaaggcctggagatgaggaagctggttctctcggg

SEQ ID NO: 786073 - DNA, 101 bp, Homo sapiens
agtgattggagaacaaagaggtgaaggagtattcccgtagctggcttcctttccccttttgaccgggaacaaacctttgattcacagcttgagaaagtcca

SEQ ID NO: 786074 - DNA, 75 bp, Homo sapiens
acctacctgtctgcctgctttgctggctgcaacagcacggaattgaaagatgttggccatcgtgatcagatggct

SEQ ID NO: 786075 - DNA, 82 bp, Homo sapiens
cggatctcaccgccgctcaggtctctgctttctatccgtcaagatgataaagtcgtgtgcccgagaaccaaagaagtcttcc

SEQ ID NO: 786076 - DNA, 85 bp, Homo sapiens
ggcaggcatctgtgggatctgtaatagaaatgtttttgctgcagagggtttaaagcttacttccagtgttcaagctttttcaaaa

SEQ ID NO: 786077 - DNA, 90 bp, Homo sapiens
agtacattaatactgcttctaagacagttgttaccccttctacaaaactgacccgttcatcttcccagagtgcccgcatgtctacttttg

SEQ ID NO: 786078 - DNA, 75 bp, Homo sapiens
tggccttcacaatccaagttccacaatatattgactactgccacaattccgggagactcatgcatctgtatgccg

SEQ ID NO: 786079 - DNA, 82 bp, Homo sapiens
gaacaatgattctgaaaagaacggagcttgaagcaaagctgcaggttttaaaggtgtgagttcttgatacgaatgaaaggcc

SEQ ID NO: 786080 - DNA, 82 bp, Homo sapiens
cggagcgtcccagctgcgaggaggttttaaaatcaaagatgggaaaatcggagaaaattgcccttccccatggccagcttgt

SEQ ID NO: 786081 - DNA, 75 bp, Homo sapiens
tttccaaatgaatttgcaaaacttactgtagatggcctgatatgaaggagtcacgcctcccgcctcccggagctg

SEQ ID NO: 786082 - DNA, 96 bp, Homo sapiens
cccgcgcagggtcgcgatgctgcccggtttggcactgctcctgctggccgcctggacggctcgggcgctggagcgctgtgcttcgccgtgagccgc

SEQ ID NO: 786083 - DNA, 100 bp, Homo sapiens
aggagatcccggtgcagaagaacatcctggcggcggccagcccgtacatcaggttactttatggaattgggctcttagagaacaagaaaagactgaagtt

SEQ ID NO: 786084 - DNA, 100 bp, Homo sapiens
gcggtgttctgcccaacatccaggctgtactgctccccaagaagactgagagtcaccacaaggccaaggggactttgaacatgtcggggatcgccctcag

SEQ ID NO: 786085 - DNA, 98 bp, Homo sapiens
aatgtgttctattacttgacctatgaaggagctgtcaatctgaattcaataactgatcctgtgttgagagaggtggagccgccaccaaaatgcagatt

SEQ ID NO: 786086 - DNA, 100 bp, Homo sapiens
gatcaacccacaggaatatccatggcttttgtgctcattttggttctcagtttctacgagctggtgtcaggtgcactttacaggtccccgatgaaccaag

SEQ ID NO: 786087 - DNA, 83 bp, Homo sapiens
ggcaacttcgctgtggtgaagctggggcggcaccggatcaccaagacggaggtgggtttggaggatttgggacaacatctaca

SEQ ID NO: 786088 - DNA, 90 bp, Homo sapiens
agatttaccagaagtagatggagcagatgatgaactcaatgttcgaaaagttacactgtctacagataaaaacaagtatggcattcggct

SEQ ID NO: 786089 - DNA, 116 bp, Homo sapiens
gaccgcgcgcagggcctgcagcgggagctggacggcgagcgcgagcggcgcgagaaagtttttagaacttcagccataaaaatgggcagaattttccttgatcatatcggtggtac

SEQ ID NO: 786090 - DNA, 50 bp, Homo sapiens
cgctgcgctaggggaagcgggcaggttttataggatcacattgacaaaag

SEQ ID NO: 786091 - DNA, 80 bp, Homo sapiens
gttcagcatctctctgtggatcattgctgcctggaccgtccgtgtctgtgaaagtcctcctgcatatgcccaagaggatt

SEQ ID NO: 786092 - DNA, 100 bp, Homo sapiens
agtgatctctgagaagaacaaattagaatcagattatatggccgcatcttcacaactccgtcttacagagcaggctcccagctgtctcaagcaatggaag

SEQ ID NO: 786093 - DNA, 50 bp, Homo sapiens
gtttccatctcttcagagatgaaccaggaagcaggtcctggggaccaagg

SEQ ID NO: 786094 - DNA, 83 bp, Homo sapiens
aggctcgagtgcacggagcgtcccttccatcaggagaggtgtccttaagtttgctcgcttggtcaagtcctacgaagcccagg

SEQ ID NO: 786095 - DNA, 80 bp, Homo sapiens
atattttcaggatttatgctcctgaagctccttacacatcccctgataaactaaagacctctgtgagtgaaagccttcag

SEQ ID NO: 786096 - DNA, 82 bp, Homo sapiens
ctcagctcgtctctaaacccttctaaaagagcaccaaaacagactgaggaatatctaactgattttgagccaattcaatgcc

SEQ ID NO: 786097 - DNA, 100 bp, Homo sapiens
aggaaatactggttcttgaaccgaagactcataatgcactggtgaggtggattgatgatgaatcttctggcacacctggagcaactccagaacacagtcg

SEQ ID NO: 786098 - DNA, 82 bp, Homo sapiens
ccttagctgtgctcgcgctactctctctttctggcctggaggctatccagcgtccggtggcagccttcaaggtcgccacgcc

SEQ ID NO: 786099 - DNA, 83 bp, Homo sapiens
catccccgaccacttgcggcctgagtatggggtgagcccctccagactccgaataggagatcaagagtttgattcattgcctg

SEQ ID NO: 786100 - DNA, 98 bp, Homo sapiens
cggagaacttgcagaggacaaagatgaaatccgtataccagatgtcgaacctgctgcttttctcgctatgctgaagggttaagcatctgaaaggccag

SEQ ID NO: 786101 - DNA, 100 bp, Homo sapiens
ggagctgctggtttcattcgaggtttcgggccggatggcactggatctttaaaacgcagtggttcctttagcaaactccgggcttccattagacgcagca

SEQ ID NO: 786102 - DNA, 101 bp, Homo sapiens
gggaaggccgaccgactgccgcggtccacctcattcatttaaccgagatgagacaataatcattgctttggcatcagtctctgtattagctgttttgatag

SEQ ID NO: 786103 - DNA, 98 bp, Homo sapiens
taaattacatattccagtaatggtggatgaagttgttcattgtttgtcaccacaaaaaggacagactacacttgctgctttgaaggatgaagttgtat

SEQ ID NO: 786104 - DNA, 75 bp, Homo sapiens
gatgtctacaggcgctgacggccacccctccagaaagatcaactgaaatcggcaaacttctgagttcctacttgc

SEQ ID NO: 786105 - DNA, 100 bp, Homo sapiens
cttctattctgcactcctcagcctggataccagcatcctgaaccagctgtgttttattatgcacagtcttcaggatgtgcttatgcaggattccaggtta

SEQ ID NO: 786106 - DNA, 83 bp, Homo sapiens
gggagactctgctgacacccatcacccacatctcacacaaattgtggctactaatttgccccctgaagatcaagatggctctg

SEQ ID NO: 786107 - DNA, 82 bp, Homo sapiens
acacctgtgtgctgggctttcacgtctacgcacctgaactcctggggggaccgtcagtcttcctcttccccccaaaacccaa

SEQ ID NO: 786108 - DNA, 75 bp, Homo sapiens
aaccaccgtgtaaccactatgagcagtgcctacaaaaccttaaagtgagaaagatcagtctaaagaaaaggagaa

SEQ ID NO: 786109 - DNA, 100 bp, Homo sapiens
gggcggagcctgccgaagcgccctttgtctgcggagtaccctatgatgagaggacctgatcctgctgctgctccatatagtactcagaaatcatctgttc

SEQ ID NO: 786110 - DNA, 90 bp, Homo sapiens
aacacagttatgggtcgcaagaagaagaagcagctgaagccgtggtgctgtaatagctcttcaagtctgcaataaaaaatggcctccaac

SEQ ID NO: 786111 - DNA, 75 bp, Homo sapiens
tgcacatttcaacagtcatgcaggtgcaacattagaggaaatcaatcagcactgggactggctggaacaaaatct

SEQ ID NO: 786112 - DNA, 98 bp, Homo sapiens
ggtgttattatggactttcaaacatctgaagatgacaatttattagatggtgacactgcagttggtctcatcacaactacgtcaaggaagctagaccg

SEQ ID NO: 786113 - DNA, 80 bp, Homo sapiens
aatattgttgatccttacggaagatgatggcttcaacagatccattcatgaagtgaatcaaatggctatagcatgtggat

SEQ ID NO: 786114 - DNA, 97 bp, Homo sapiens
taatcaattgtgctgacaacacaggacagtactgcttttaaagagacagtgttagggatcttggaagcacagccaacatgtgtgacattgaagaagc

SEQ ID NO: 786115 - DNA, 75 bp, Homo sapiens
ggtccgtgcggcagcagctccagagctttgtcaaagaaacctcaagaaggcatgaagccagcccctgcagtgccg

SEQ ID NO: 786116 - DNA, 100 bp, Homo sapiens
atgagcgggaactcctgggccaacatggggcaggagtgcatcaagtgccacatcaacgtgtatccacacaagcaggctgttagagaaacgctagcatcca

SEQ ID NO: 786117 - DNA, 99 bp, Homo sapiens
cggacattagtattgaagaaatgattgaaaagttacagaaggtactatttcttgatcatccaaaaaagaagattcgggacacacagaaatataaacctt

SEQ ID NO: 786118 - DNA, 100 bp, Homo sapiens
aactggacgaggagaacagtgaactccggtcctgcacgccctgtctgaaggccaacattgagcgtctggaggagtcagccaagatgtttaactacgcggg

SEQ ID NO: 786119 - DNA, 100 bp, Homo sapiens
gcctcggcctccggcgcagcccggaaatgtccggcaagatcgagaaagcagagattatgcatgatgtgataaagaaggtcaagaagaagggggaatggaa

SEQ ID NO: 786120 - DNA, 82 bp, Homo sapiens
atagacttcaaccagcctttggtcatcaccaggctgtttttggaaggaagaaagatggaaagcggtgcagttctgctggaat

SEQ ID NO: 786121 - DNA, 80 bp, Homo sapiens
cagccatgaagccaaccgtcccgaggatctggtgaagaatcatctgatgtatgctgtgagagaggaggtggagatcctga

SEQ ID NO: 786122 - DNA, 83 bp, Homo sapiens
ggacaacaaaaagcatgaggaacgtctgggcacgagccagcattcgaacgttcactccattttattttctggtggagccggtg

SEQ ID NO: 786123 - DNA, 89 bp, Homo sapiens
tggaacccgaagaagaaaggattcgttacagccagagattgttccctgacatcgtggagttctgcgaggccatggccaacgccgggaag

SEQ ID NO: 786124 - DNA, 49 bp, Homo sapiens
gccaccttctatgggttaaggcaacaggaatgttacgttcataacttac

SEQ ID NO: 786125 - DNA, 75 bp, Homo sapiens
ggaccaagctggagatcaaacgtgttggagcgggccggagagaagtagagtgggctgcgaggagaaggaaacagg

SEQ ID NO: 786126 - DNA, 153 bp, Homo sapiens
ctttcttctatttcttgtggatattatggctaataacacaacaagtttagggagtccatggccagaaaacttttgggtgttttagagcactttgctgcaagggaccaccacctgcacgaccagaatatgacctggtttgcataggcctcacag

SEQ ID NO: 786127 - DNA, 71 bp, Homo sapiens
atctgcctgagagatctccaagaattacaggcctgcaggacaagctgaacaagagggacaaagaggtgaca

SEQ ID NO: 786128 - DNA, 75 bp, Homo sapiens
atggagagaaggtggcgcaacggatccgtggggccacagacctgcccaagaatagcctaacatggcagaccagag

SEQ ID NO: 786129 - DNA, 101 bp, Homo sapiens
catgtccgcgcacaatcggggcaccgagctcggcttgcattgatgacaatgttgatatggtgaagtttctggtagaaaatggagcaaatattaatcaacct

SEQ ID NO: 786130 - DNA, 78 bp, Homo sapiens
ggcaaggaagtgctgctggaagtatcagcagcgtcgccagcaggagaatatgcagcgccagagccgaggagaaccccc

SEQ ID NO: 786131 - DNA, 82 bp, Homo sapiens
cgaggcaagggggagatcactcccgctgcgattcagaaggctctgacgcccgctctgcggcttcggtgtttgaacaggccac

SEQ ID NO: 786132 - DNA, 90 bp, Homo sapiens
gaggaagatccgagaaatcgtgctcagttacagttatattgccatggcactgaacgcagaggaggcccgccttcttcatgtcaaggagac

SEQ ID NO: 786133 - DNA, 98 bp, Homo sapiens
ttttgattttatggatccaccaggtcacagtcgaactgttattggaattgaagagaaaaaaaaccgaacattatgcttactaatacttgatcctggat

SEQ ID NO: 786134 - DNA, 83 bp, Homo sapiens
ggcgaacgcttcgctggccatttaggagctctgctcaaagccagacggagccttcacgtaaatgggtccagtcatgcctccca

SEQ ID NO: 786135 - DNA, 100 bp, Homo sapiens
ttccagaattacgggcaagcgctgttcaaacccatgaagctgaaggtgatgtggccgccctcaaccgacgcatccagctcgttgaggaggagttggacag

SEQ ID NO: 786136 - DNA, 117 bp, Homo sapiens
cgcgaggccctggaggctgccgagcgtgaggagactcagcagaaggtgcaggtccttatgtcgtcagaagatcgagaagctcaggaggatgaattgctggccctggcaagtatttac

SEQ ID NO: 786137 - DNA, 87 bp, Homo sapiens
agaaaccccgttgacaaggcactgctttttcatgacgcagaagaagatctttacaatccaaggctgctacccggtgatccggtgtct

SEQ ID NO: 786138 - DNA, 50 bp, Homo sapiens
agtgtgctgtgagagatctaccactagcccttagagatttgtttgattcc

SEQ ID NO: 786139 - DNA, 50 bp, Homo sapiens
ctcccaacgtgctgggattacaggacacatattgaaggaaatgtggatat

SEQ ID NO: 786140 - DNA, 100 bp, Homo sapiens
cgcggagatgtgacccggcagtacggcaaatatggcggagcaagaaaagcctaggcttctcgagcctttggattatgagactgtcattgaagaacttgaa

SEQ ID NO: 786141 - DNA, 51 bp, Homo sapiens
ggaagatgaaatcaatctcatcctcagataataacggactttgatatgaca

SEQ ID NO: 786142 - DNA, 98 bp, Homo sapiens
ccagatgggtgagagatgtgatcactggtttcgtggcctgaccaaggacctccaagtgaatggtagtgtctagaaagggtatgtcccttcaagagaga

SEQ ID NO: 786143 - DNA, 75 bp, Homo sapiens
gtttttctgttttgcctgaatacatgatttaaacaagagatttccacagaaggccggatcacctcaacagtcacg

SEQ ID NO: 786144 - DNA, 80 bp, Homo sapiens
ggcgagcgggtgcgtctgccgcagagtcggcacctgaaggacatggagtttgacaagtatgcgcccaagctggacagccc

SEQ ID NO: 786145 - DNA, 75 bp, Homo sapiens
tgtgttcacccccgacttccaggagtttgtcaataaatgcctcatcccaacgtcaagcccatggcctatgccaac

SEQ ID NO: 786146 - DNA, 100 bp, Homo sapiens
agcaaacagaaatttgtgctcaaaacccccaagagaaattaatggacttacgaaatgaatacctgcaagcggatgaggctaataaaagacttttggatca

SEQ ID NO: 786147 - DNA, 75 bp, Homo sapiens
ggcctacgccatcaacctggccgctgtgggcaccgtggccttcggctgcacaggccagcgagaccgaggagaatg

SEQ ID NO: 786148 - DNA, 89 bp, Homo sapiens
aaaaattatttatccaacagctcctcccagcgatctagggcagccctgcagaggtacctgttctactgtaatcgctatatgaaccacat

SEQ ID NO: 786149 - DNA, 100 bp, Homo sapiens
ctacgaaggctattacagccagagtcaaggattatggcatcgtcaaagcattgtggtgtcttttttactgctgcttgctgtgcttatagctacgtattat

SEQ ID NO: 786150 - DNA, 51 bp, Homo sapiens
aaggggtgtttttccgtaagcatactcagaactgataaatttcaaacggaa

SEQ ID NO: 786151 - DNA, 100 bp, Homo sapiens
tccacttaaaccacatcaacagagaatgggctctagaccaagatagaacagcccttcagaaagtgaagaagtctgtaaaagcaatatataattctggtca

SEQ ID NO: 786152 - DNA, 100 bp, Homo sapiens
tcccgagtagctaggactacaggggccttcagaaggaagaagttgttttgcttacacatggagatagtgtagacaaagtagctgatggattcaaggttgt

SEQ ID NO: 786153 - DNA, 100 bp, Homo sapiens
cattggaactccctactggatggcaccagaagttattgcctgtgatgaaaacccagatgccacatatgatttcaagccaatgttttcagttgcaccaagc

SEQ ID NO: 786154 - DNA, 83 bp, Homo sapiens
cagacacggtggctactctgcctcggggacgaaagcaggcttcacaggctgctcaagaagccgagatcaatgccagaaaagcc

SEQ ID NO: 786155 - DNA, 100 bp, Homo sapiens
cgtcctttttcgtttttcggatgatgccttcaatactacctttatttccaccatagatatgcacccaatgtccagggagcgtgcaaaatttgtcaaaagt

SEQ ID NO: 786156 - DNA, 100 bp, Homo sapiens
gattcatttagagctgcggaacaggacgccctctgattctgatcatcggatatcatggagtctggcaagacggcttctcccaagagcatgccgaaagatg

SEQ ID NO: 786157 - DNA, 75 bp, Homo sapiens
gaggaggaagatggcgggacggctgccggcctgtgtggtggactgtggcacgggattggtggaacgagaatgcct

SEQ ID NO: 786158 - DNA, 90 bp, Homo sapiens
tgaactcattaccttcaagtatggaaatagcagtgcttcaggaatagaaatcttggcaatcgaaaggaaagctgtgtgaagagacaaagg

SEQ ID NO: 786159 - DNA, 76 bp, Homo sapiens
gctggctgctgctggccgaagcgaagggcgacgccaagccggaggaatacagattctgttcatcttgctctgaaat

SEQ ID NO: 786160 - DNA, 100 bp, Homo sapiens
gggattccactctccagtgtaatgattattgacaacaggggccctcctcgccaaagacagcctagagaggacggcaatgaagaagataaagaaaatcaag

SEQ ID NO: 786161 - DNA, 98 bp, Homo sapiens
cgcaaggctcttccctgaccattttctactgtccctgcgcgagccctggcaggtgcccggcccgccccccaccctccggctcccagggcctgctggag

SEQ ID NO: 786162 - DNA, 75 bp, Homo sapiens
ccacaggcttagctgttaacgggaaagacggtctggaaaatcccgaagcagaagcccgtattcatctaggcattc

SEQ ID NO: 786163 - DNA, 82 bp, Homo sapiens
aggtgaaccttcgaccttggacttctcagcctccagaatggaggctactcacagtcgaactacaactccccggggtccggcc

SEQ ID NO: 786164 - DNA, 74 bp, Homo sapiens
gcaaaccagatatatgacttggtcattgtggaaagacatttgccattttggaaagatttctgaatcgtagccag

SEQ ID NO: 786165 - DNA, 116 bp, Homo sapiens
gccagagggagttgagccgcggcgtgtgcgccgagcgctactcgcaggaggtcttcggaaagtcgtggaaggcgctgacgctgtcccagaagaggccgtacgtggacgaggcggag

SEQ ID NO: 786166 - DNA, 101 bp, Homo sapiens
ccagaaggaagatggcggatctggaggagcagttgtctgatgaagagaagccaggcccagacatgtccgtccttgtaagttaaaagcttccatgggagcct

SEQ ID NO: 786167 - DNA, 100 bp, Homo sapiens
tccgccccagacctgtcggcgaaagggctcaaactgtccaggttgctgaagttgaaccacagtcacagccacagccttccccagaacttctgcttccaaa

SEQ ID NO: 786168 - DNA, 83 bp, Homo sapiens
tatggcagcggcagcaccgggagtcagcagagtgaagggtgagaactctgtctcagtcgacgggaagtgcagtgactccacgc

SEQ ID NO: 786169 - DNA, 100 bp, Homo sapiens
ccaatagggatattgtagaaactgtctttaacctgacatcccagttaccagtgtccttgaattgatagtggcttctgtttgtcagtctcatataagaact

SEQ ID NO: 786170 - DNA, 96 bp, Homo sapiens
cgaaggtgaagagttgtcccagctcggcccgcgggggagccccgggagccgcacgatgtgaagttcatttccaatccgccctccatggtggcagcg

SEQ ID NO: 786171 - DNA, 100 bp, Homo sapiens
ggattctcttattagtaacttgctgcgtctcatacaaaccatgcggcctccagcgaagccttccactagcaaagcttcataaacaagcagatatgcaaga

SEQ ID NO: 786172 - DNA, 98 bp, Homo sapiens
taaattttcatcctgagtctagatcttcagatagttctgttattgttcagcctttttctaaacctattttggactggtttgtacagatatgtttggcc

SEQ ID NO: 786173 - DNA, 100 bp, Homo sapiens
ctatcctgttgagtggcaaagcaagaatcctaaggagctggcaaacagccctgactgtccccagatgtgtgcctataagctggtgaccatcaaattcaag

SEQ ID NO: 786174 - DNA, 82 bp, Homo sapiens
ccagagtcattgcaggaagtggatgagttccacctcattttagagtatcaagcaggaatcagagatcattgatttcttcctg

SEQ ID NO: 786175 - DNA, 75 bp, Homo sapiens
gacgaggaaagaggaggaaaacaaaagctgctacttatggaagatacaaaggtctggctcttgctgattgaattc

SEQ ID NO: 786176 - DNA, 90 bp, Homo sapiens
atggcacttcattggccacctacagaaacaaaatgtcaacaaattgatgggatccagtgctgcctccttgtaccctgtgctcaactttct

SEQ ID NO: 786177 - DNA, 74 bp, Homo sapiens
ctcctgtaacccagcctgtttcacttcttggctttctccatatttacgtgcttgtaactctggcatgacctttg

SEQ ID NO: 786178 - DNA, 100 bp, Homo sapiens
gtggagaacaaatccaagattagcacaggacccactgatctcagcatgaagagacaattggcgactagctcaggatcctccagcagctcaaactccagac

SEQ ID NO: 786179 - DNA, 129 bp, Homo sapiens
agggcggacacggccaccgcctcagcgggagaggagtctccaccaggactgaccgctgccgcccagcacgtccaggattggagacacaaaatcagaaattaagattctaagcataggcggaggtgcagg

SEQ ID NO: 786180 - DNA, 51 bp, Homo sapiens
ccgacctcagatgctcccttctgctcctggcattgaatgccccagaggagc

SEQ ID NO: 786181 - DNA, 100 bp, Homo sapiens
tccaagcactttgccatcacagtctgtgacggtctggacatcagccccgagagggatgccacaatttggaagcccgattcatgccagagctgccgttgcc

SEQ ID NO: 786182 - DNA, 100 bp, Homo sapiens
gcagccgctgttcccaggatggtgatccgtgtatatattgcatcttcctctggctctacagcggaaatttatcagtggtgtggttcctcgtgcaacaaat

SEQ ID NO: 786183 - DNA, 100 bp, Homo sapiens
cacgcagcagccgctgccgccgccgcgggagccgctgcccgaactcccggcccgaactccaggttctgggccggagaaggggcgacgttcgggcaccccc

SEQ ID NO: 786184 - DNA, 95 bp, Homo sapiens
taggtcccggttggtagagggtttgagtccgcatcgccacagctgaaggctgcgagggactaagagcagagttcctttggtagaagtgaaagctt

SEQ ID NO: 786185 - DNA, 100 bp, Homo sapiens
gttcttgggtcacctgggcctgagctcccagctcctccagcagccgacaggaggcccgtcaagatgcaggcaggcattgccaccccagggatgaagacag

SEQ ID NO: 786186 - DNA, 90 bp, Homo sapiens
cacccgcttccatgcggttcgggtccaagatgatgccggtgattgatgagatttatcgtgtgttgagatatgtcaattctaccagagccc

SEQ ID NO: 786187 - DNA, 100 bp, Homo sapiens
gaggaggaggcggaggtccaagcggaaagaactggacttgaagccatcatggagacatatgcattctggagacctcctgtgcgcacactcaccttcgaag

SEQ ID NO: 786188 - DNA, 100 bp, Homo sapiens
ggatcgccaggtgctggaggacttcccaacgggtcagtttgaaaaggaggatcgagctcactgtggagtatccatggagatgtggagccttgtcaccaac

SEQ ID NO: 786189 - DNA, 51 bp, Homo sapiens
cagctgcctcccagggtgaatacaggtgtctgatgatttgtgagcctcaag

SEQ ID NO: 786190 - DNA, 48 bp, Homo sapiens
gccgccccattatgatgatgtcgaggttccagcaacagatagaaatgc

SEQ ID NO: 786191 - DNA, 89 bp, Homo sapiens
ctgagcgttctcaacttggttattgtaaaaaaagagatcccagaagacccacttgtggctgaagagtactacgctgatgcatttgattc

SEQ ID NO: 786192 - DNA, 98 bp, Homo sapiens
aggcacagccgacgccgcgggtattctaccttgtaaatactgttatttgtatatactgtaaatgatgacatcggtgggcactaaccgagcccggggaa

SEQ ID NO: 786193 - DNA, 75 bp, Homo sapiens
attccattggagaacccaaaggaaaagcgaccagagttttcaggagttgaaaatgacaatgaaactgagcctgtg

SEQ ID NO: 786194 - DNA, 99 bp, Homo sapiens
cttttctaaaccaatttgtggtgcacactgtacagttcctcaaccgcttttctacagtttgtgaggagaatttctctgcaaagaatgtccaaaaattca

SEQ ID NO: 786195 - DNA, 75 bp, Homo sapiens
tacttccagaaaaagtgctcctgggactccaggataccagaacttggtcctgatgtctgaccatggagatgtgag

SEQ ID NO: 786196 - DNA, 100 bp, Homo sapiens
aaaattctgtgggctcatcaccaccttccaaaatagcgagtatggaaattccaaatgccctgtatgatgagattcgtcagtttcgcaaggcctgtgggga

SEQ ID NO: 786197 - DNA, 96 bp, Homo sapiens
tttgagcagctgctccgaggggtctggaagccagagaccaacgagatcctgcacatgtctttcaggcagtaaccaagggagcgtggccaggcgctg

SEQ ID NO: 786198 - DNA, 89 bp, Homo sapiens
ggtgcgtctgcagctggcgcggaagagtttctccttggaccaagatgactgatggaaaactctccacctctacaaatggcgtagccttc

SEQ ID NO: 786199 - DNA, 108 bp, Homo sapiens
ttttcccattggatgagtcgggcaatgtggttcccagtgacaccaacattctggacacgtgggcgatatcatgtttaggtattactacaaatgaaagaatgaatgcca

SEQ ID NO: 786200 - DNA, 100 bp, Homo sapiens
ccagaattgaaagtatcttgatgtctttacctctaactgcccggttcaaaccttgtactactcagctgatcacaagctgcttgatgggaacctactagat

SEQ ID NO: 786201 - DNA, 75 bp, Homo sapiens
aatgagccttcaaacatatttgagagtgttgcggagataggaacatgggagagaaacaatctgggtaacatgaaa

SEQ ID NO: 786202 - DNA, 100 bp, Homo sapiens
cgtctgcggaagtgcagctgcctcagttcttagcgcaggtttccaatacttatctacaggaatcgccatgaccccagctctgagggaggcaacagcaaag

SEQ ID NO: 786203 - DNA, 75 bp, Homo sapiens
tctggaggacggagaggacctgttcaccagcactgtctccaccctagagaatgagatgctggaggaaggacatga

SEQ ID NO: 786204 - DNA, 90 bp, Homo sapiens
gtgatgcagggatgcctggaatagaagagaatgacctagcaaaagttgatgatcttccccctggccccttcacagatgtagtcactacaa

SEQ ID NO: 786205 - DNA, 100 bp, Homo sapiens
gtgctctgtatgagcttgcaggaggaaccaacttcagcgacacagttcaggctgatccccaaacggcatagaatgtcaagctaaccaggcgtccgctact

SEQ ID NO: 786206 - DNA, 75 bp, Homo sapiens
tggtacctggaagctgtgtgcccagatggtggatgcttccaaaagcatcgaagctgtccatgaggacatccgcgt

SEQ ID NO: 786207 - DNA, 75 bp, Homo sapiens
tgcattggtaactggtggagaccaaattttgaacctcctcaggcctacctggagtccttctacaagttctgcacc

SEQ ID NO: 786208 - DNA, 98 bp, Homo sapiens
gaacatgtctgagtcggagctcggcaggaagtgggaccggtgtctggcggatgcggtcgtgaagataggaaatgacctcattcttgatggctgctgct

SEQ ID NO: 786209 - DNA, 83 bp, Homo sapiens
aggcggccttgaacattgagaaagaactaccaaagccaagacacgttttcagcgccatcatgaccgggtcctataacaacttc

SEQ ID NO: 786210 - DNA, 75 bp, Homo sapiens
aatatgaatttttatttggcagatctgaagggaaagctccagatactaggactgctgagatgtcctctattcttg

SEQ ID NO: 786211 - DNA, 75 bp, Homo sapiens
tgaagatcctggtgtcgccatgggccgccgccccgcccgttggcaacatcgaaaccaaccataacctgccaccgt

SEQ ID NO: 786212 - DNA, 100 bp, Homo sapiens
ctggcagcccttaaaaaaggaataattggaggagtcaaagttcatgtggatcgtctacagccatggtctgaaaaagttcttttcttgtcgtggaattgca

SEQ ID NO: 786213 - DNA, 74 bp, Homo sapiens
catcaccctgacctgcttacgcccagttactccacaggatccgctgaacataggatgttgccacaaaatctacc

SEQ ID NO: 786214 - DNA, 83 bp, Homo sapiens
atcgggggcaagcggaaggtgatgcccaagatggaccaggtgctgccttcacctgcctggagactgccttccgcctggacgcc

SEQ ID NO: 786215 - DNA, 100 bp, Homo sapiens
agtcttcaggagagcctagatgagctcatacaggatatgggccctcacattttccaaacctgtccatctgctaactattttgactgcagagccatgtcca

SEQ ID NO: 786216 - DNA, 100 bp, Homo sapiens
cggcgatccgggcgctcgagacttaccagagccacaagaggagctgatcacgcagtacctggctgagcttcggaaccccgaggagatgactcgctgtggc

SEQ ID NO: 786217 - DNA, 99 bp, Homo sapiens
gggctctgaaagctagaagaaaaggtgtacttgcaagaaacctcaggacttgagtaacagcaacatggtcaaaatgcagatcttcgtgaaaacccttac

SEQ ID NO: 786218 - DNA, 95 bp, Homo sapiens
agaaagaggaggggaggaggaggaggattcagggaataggagctggggagcccttctgcgccacaggtgcctggaatacttattaagaaacgatg

SEQ ID NO: 786219 - DNA, 77 bp, Homo sapiens
acagacgcaagatggcggacagtgcggaactaaagcctcaaggaataggttctcctagtgtctatcatgcagttatc

SEQ ID NO: 786220 - DNA, 100 bp, Homo sapiens
aggatattcaaatagaagccttgctgatgagagcctgtgagcccataattcagaacttctgccaccaaccaggttttcctgtgactgtgacagtagagag

SEQ ID NO: 786221 - DNA, 100 bp, Homo sapiens
ctggagcagagccgctgggcgccggagccgaggcgagcgccgcgcgcaccactgatcatcaatgctgtggtactgttgattttattgagtgccctggctg

SEQ ID NO: 786222 - DNA, 100 bp, Homo sapiens
tctgacctcctcctctgctgtcaccaatggactctccctagtttctcacccacggataataaatttgctacatgctctgatgacggcactgttagaatct

SEQ ID NO: 786223 - DNA, 74 bp, Homo sapiens
cgcatgtggagttcggaggaaaagggctcaggaattgcattttgtgaaaaaagaacaagaattttctgcaagga

SEQ ID NO: 786224 - DNA, 83 bp, Homo sapiens
caagagtgttgactttaaggtttcgctggccaaagggagtgtggccatctggggccgtgtggtatttgccactcaggagacat

SEQ ID NO: 786225 - DNA, 98 bp, Homo sapiens
cggccgcctggctccccatactagtcgccggtaaaacatggctaaaagcttacggagtaagtggaaaagaaagatgcgtgctgaaaagagaaaaaaga

SEQ ID NO: 786226 - DNA, 73 bp, Homo sapiens
tgccctgctcaccaagcacacccgcaaggtcctagagctcctgaaggtggcctggaagaggcggctcatcttc

SEQ ID NO: 786227 - DNA, 83 bp, Homo sapiens
ggagcgctctgtggtgcctggggctgaacgcggctttctggctggtggatgaccgctgtgtggtggagcccgcggccggggac

SEQ ID NO: 786228 - DNA, 83 bp, Homo sapiens
gagaaggctgaggaactcagcaaccagctagctactcgagagtgtaaacaggaacatcgataagtagtgtaaaaacttgcaca

SEQ ID NO: 786229 - DNA, 88 bp, Homo sapiens
cgaagcttgaaagacttggtaatggcgacgggtttgacaatgcagatcttcgtgaagactctgactggtaagaccatcaccctcgagg

SEQ ID NO: 786230 - DNA, 100 bp, Homo sapiens
ccggcatcccaagccgcctcccgccgccccggcccggcgcgcagggggacttgatctcatcttcatgccaggccttgggtttgacaaacatggcaaccga

SEQ ID NO: 786231 - DNA, 100 bp, Homo sapiens
tgaggagccgcctctgcggctccaggagggcgcaggagcgggactgagagcgcctggaggctcgagcggaggaaagaagattggcccatgcacaagctgg

SEQ ID NO: 786232 - DNA, 98 bp, Homo sapiens
ccccagcatgctctctgccggtggcatcacagccaccacagcatctttctgaagccgggagagggcctgtaggggtgagcatctgcctggagtgtaac

SEQ ID NO: 786233 - DNA, 75 bp, Homo sapiens
ttacgcgccgtgtaactgtgaatctttcaaagattcccaggactccggctctctctgcttctgtttccggtggct

SEQ ID NO: 786234 - DNA, 83 bp, Homo sapiens
cctgaaccgcatcttttcctcttctgaacatgcacccccagcagccaccagcagaaagacctggtggaagaggaggctgagga

SEQ ID NO: 786235 - DNA, 110 bp, Homo sapiens
caagttcacgaaagcctacaaaagtgtggagaggttccttcaggaggatcaggtatgcaaccactcatgtattcggttcaggaagcattaaatgccagaccatggtggat

SEQ ID NO: 786236 - DNA, 100 bp, Homo sapiens
gacctgcaggcagcaccggaggcccaggtctccgtgcagcccaacttccagcaggacaagtcttcacctcctcctcgtcctcttcgagccgtcagacccg

SEQ ID NO: 786237 - DNA, 101 bp, Homo sapiens
aaagagccctggaatatgaagagacatgcgatggtagatcaacccccaggcgtagcgtgcctcctgtgattgttgaagagctgtggtgtgctgctgagtgg

SEQ ID NO: 786238 - DNA, 99 bp, Homo sapiens
gaagccccacgtcgggatcgtccactacgaaggccacctacaaatagcagccccgtcgcagaatttagtctcaaaggaaacttcaaccacagcactgca

SEQ ID NO: 786239 - DNA, 100 bp, Homo sapiens
tcagtgatggaggacagagtgcgtaacaaatgtggcaattattttggatctatcacctgtcatcataactggcttctgcttgtcatccacacaacaccag

SEQ ID NO: 786240 - DNA, 97 bp, Homo sapiens
gaagcccggagcctcagcgctcgcccctgctcatgcttttactgactctgctatcagtgctaaagtgaatggcgaacacaaagagaaggacctggag

SEQ ID NO: 786241 - DNA, 74 bp, Homo sapiens
ttgtgatgatgagctgatcttaatcaaaaaacctggaaacgtagcaaaattgagacttctagttcagcatgaaa

SEQ ID NO: 786242 - DNA, 138 bp, Homo sapiens
cttcagtccccgccgagccgccaccgcaggtcgaggacggtcggactcccgcggcgggaggagcctgttcccctgagctgatggtgagaccattctaaaaggcctccagtccattttccaggagcaggggatggcgga

SEQ ID NO: 786243 - DNA, 99 bp, Homo sapiens
acgaagggacctggagcaacgggctgcaggacggctacgggaccgagacctactcggacggaggtacttaaaacagatgctgaggaacttgtctccaga

SEQ ID NO: 786244 - DNA, 75 bp, Homo sapiens
ccctggggcccgggggcgcgggccggggtggcgtctacggtgacgtgcagcgcgtgaagatcctgttcaataaga

SEQ ID NO: 786245 - DNA, 75 bp, Homo sapiens
tctcaatacataaagaacagcgtaactccagacatgacttcctagcatgggctgttgtgctggagagaacgagag

SEQ ID NO: 786246 - DNA, 98 bp, Homo sapiens
tctttccaaaaggtcaaggttcacaagctgcaagctttcttcctggtggcagatgacatcatggattcatcccttacccgccggggacagatctgctg

SEQ ID NO: 786247 - DNA, 83 bp, Homo sapiens
aggttcgcggctctaacggggctttctacaaggtgacagagctgaatgaacctctctccaatgaagatcgaaatctcctctct

SEQ ID NO: 786248 - DNA, 83 bp, Homo sapiens
cgtggaagcagcagtcagaaggggaacggatctgtgtgcccacagctcctggagccccacagagtctcgctctgtcgcccagg

SEQ ID NO: 786249 - DNA, 75 bp, Homo sapiens
ggatgagcctgcagagcgcgcagtacctccggtatgttaagctactgcgacagatacagcgaaggcataaaacat

SEQ ID NO: 786250 - DNA, 75 bp, Homo sapiens
aaacattgtcacaggggatgatattcagacacagattgacaagtatctctatgccatgcggctctccgatgaaac

SEQ ID NO: 786251 - DNA, 100 bp, Homo sapiens
ccagtggaggcattttggggcagaatacagagatatggaatcagccctgcctctttcttgtcgcagtcagtttcatcatcagatagaaacagtgttacag

SEQ ID NO: 786252 - DNA, 100 bp, Homo sapiens
attaagttggagcagggagaggagctgtggataacgggaggtgaatttccatgtcaacatagtcctggacttggatgttgtgggtgatggtatgcagtgt

SEQ ID NO: 786253 - DNA, 101 bp, Homo sapiens
aagtttcccaggactccagaaaattcagcaaagaagaagcttttaagagctacagagacttctgaagtggagagtctgcgacctcctcggttcttcaatga

SEQ ID NO: 786254 - DNA, 98 bp, Homo sapiens
tcctgccattgttcgtcgggctgcagcagtggcgggcgcaggagcccggccccggagccaccggacagagtttagggtatggatttgttaactatatt

SEQ ID NO: 786255 - DNA, 90 bp, Homo sapiens
ccctcagccccgtcctcttgtcctcctcagcctcggatggttcgtggagacccaagggccattgtggaatatcgggacctggatgcccca

SEQ ID NO: 786256 - DNA, 74 bp, Homo sapiens
gagggccctgcagaaggatctcagcctctctgccctcactgtgaaccctgaggccggcagcccagcaaatctgt

SEQ ID NO: 786257 - DNA, 98 bp, Homo sapiens
gccgccaggctcctccgcttccctgggtccaccgcggatccctcccgcttgtcaggaggcggccagcgggtagaacgtcatgacatgaataccttaag

SEQ ID NO: 786258 - DNA, 98 bp, Homo sapiens
ttgcccgcctgcatcagtgcaaaactcctattatccaccgggacctgaaggtggcaggttcaagaaagagattgtcgttgatggacagagctatctgc

SEQ ID NO: 786259 - DNA, 82 bp, Homo sapiens
tggatcatttttacagttttccagaactccacaaagttctctcctgcgctatggtggaaacctgtccctccaaagtgccatg

SEQ ID NO: 786260 - DNA, 100 bp, Homo sapiens
ttttgacagaatacaaattaaaagcaattgaatatgtgcatggatacttttctagtgaacagacttaaataagctggatggatttggtgattctacaaaa

SEQ ID NO: 786261 - DNA, 75 bp, Homo sapiens
gcgcgtggaacggctgcttttggaagattactgatctctcattacccaactatctgatggcatcttcggttggac

SEQ ID NO: 786262 - DNA, 82 bp, Homo sapiens
ggcggacgaggggaagtcgtacagcgttatttctcaaactctgaggctgcggagttcacacattgaaatctgtcatcttttt

SEQ ID NO: 786263 - DNA, 90 bp, Homo sapiens
gcagtacaacatctacaatgttggctcaaggtatcttggagatggccgcttccatctggagtctgtcatgattgccaaccccaatgtccc

SEQ ID NO: 786264 - DNA, 90 bp, Homo sapiens
gatgctggagaccttgacacttatatcctccctgggttccatcttagcccacatccagaagcaaaagcacttcaatgagcgagaagccag

SEQ ID NO: 786265 - DNA, 51 bp, Homo sapiens
gcggacgaggggaagtcgtacagcggtgtggtatgacattcaaagctacca

SEQ ID NO: 786266 - DNA, 90 bp, Homo sapiens
ggcggtcaagagaagaccccgctgggatggatccgggtgctgtggacttggagaaagtggccaatgtgattgtggaccattctctgcagg

SEQ ID NO: 786267 - DNA, 100 bp, Homo sapiens
caggatggattgccagggcttcctggcccgaaaggagagcctcaaacccgctggttcagaaccaacacctaagtcacgcattgcagaccttcctcctgcc

SEQ ID NO: 786268 - DNA, 82 bp, Homo sapiens
ctcccgggtagctgggactacaggagaactcctggaagccccgtcttcctcctcatgcccattgcctgaccagagccaccct

SEQ ID NO: 786269 - DNA, 75 bp, Homo sapiens
ctgcgctgtgatgcctgcagagctgtggcttaccaggatcccctaacaacagtgagagagcaatgcgagcagttg

SEQ ID NO: 786270 - DNA, 106 bp, Homo sapiens
ccgaggacgaaggggtagcgggagtgatgtctgtggggccgccggcggcccggcttcagtggacatcctcatcatggatgatgacgacgtccccagctggcctccc

SEQ ID NO: 786271 - DNA, 75 bp, Homo sapiens
tgtttgtggatcgctgtgatcgtcacttgggaatctggaaacccaggaaaataccaaatccagatttctttgaag

SEQ ID NO: 786272 - DNA, 82 bp, Homo sapiens
ttttttttcaagaactgccgtcttctttgcctgcactaatggtcttctcagtacagcatggtggctggggcaggccgagaga

SEQ ID NO: 786273 - DNA, 100 bp, Homo sapiens
cacttaatgaaggtggaacagcagaactcctaaacaagggctcaatttgaacaactgtgtgcttcccttttggccagggttgaaccacctttaaaagcag

SEQ ID NO: 786274 - DNA, 98 bp, Homo sapiens
gctcccgctcgggcggccgcggacatgtgcaggatgtccttcaaggttcgatacaagaggctgttttcctagcgtggcttgctgcctttggtaagaac

SEQ ID NO: 786275 - DNA, 98 bp, Homo sapiens
aaaccgagctcccgtctgccttgcagtcacatcgatcagacaacaacatggcaggaccccaggaaggccatgctgtcccagatgaacgtcacagcccc

SEQ ID NO: 786276 - DNA, 98 bp, Homo sapiens
atccgctacgagggcatcctctacaccatcgacaccgaaaactccaccgtagcccttgccaaagggttctgatgactgtcttgtgaaaatatgggcaa

SEQ ID NO: 786277 - DNA, 85 bp, Homo sapiens
ttttaagtaaaaattttcagaagcacatgtattataacagaccaggtggttacagctattcaatttggtggaaaaacaatgccaa

SEQ ID NO: 786278 - DNA, 100 bp, Homo sapiens
cttgtcactggagtgcaagaagaaattcccacctgtcaaagaggttatcaagttatacccaaccagcagcaaaactaccaaggaatagttggagttcagc

SEQ ID NO: 786279 - DNA, 90 bp, Homo sapiens
accctgcagccaggactcgatggagatatttcacattttcaggaacaaaatgatttaaaagcattgctagaaaatctccttcaaaatatc

SEQ ID NO: 786280 - DNA, 82 bp, Homo sapiens
gcgcgccgctgcccgcgccacaggattggatagctttagtcaaagcagctgctgcagctgcagccaagaacaaaacagggag

SEQ ID NO: 786281 - DNA, 83 bp, Homo sapiens
cgcgactacagcatggtggagtcgcctctgatctgcaaagaaggagaaagcgtgcaggtgcaactgacatgggtgaaccccag

SEQ ID NO: 786282 - DNA, 74 bp, Homo sapiens
gtgaacaacctgaacgtcaccgaggagaagtaccaggaggcgttggccaaggacctgcctagagctggaacgtt

SEQ ID NO: 786283 - DNA, 97 bp, Homo sapiens
ggtggggctggagaacccgaagcacctcccggcgccgggacgcttcttctaatcgcatggaagagagcaaagccttatttaaaaccatcatcaccta

SEQ ID NO: 786284 - DNA, 98 bp, Homo sapiens
aagcatcccattacagatagaagagcaaattgccatcgcaagagagggggacctgctgacaaaggagcgcctctgctgcggcctgtccatgtttgagg

SEQ ID NO: 786285 - DNA, 100 bp, Homo sapiens
cagtgattcccggaccctggaagagaagagggtggctaatgattaaggggcatacaaacttgcctgattccagggatgtatggataggggatgagcgagg

SEQ ID NO: 786286 - DNA, 88 bp, Homo sapiens
gagtcattctcatcacgccgaccccactttgtgaaacagcctgggaagaacagtgcatcatacaagaacgtcgaaatgctgagcagca

SEQ ID NO: 786287 - DNA, 100 bp, Homo sapiens
cctcgaacatcgtcagcccccaggaggccttgccgggccggaaggaacagacccctgtagcggaatgtggtgacagatctattttcgagggaagaactcg

SEQ ID NO: 786288 - DNA, 98 bp, Homo sapiens
gcgcccatatgggggttctggagagcggggtgtgggtacatatccagccatactcatggaccccagtgatttccccagtccatttgacccattgaccc

SEQ ID NO: 786289 - DNA, 100 bp, Homo sapiens
attttaactcaggaaagtcggaaaactccagaagtggtccagagcacacggccgataattgagggttccatttcccagattttgaacacagcacgaaaac

SEQ ID NO: 786290 - DNA, 82 bp, Homo sapiens
gccaggcttgccgcttcatgaagtgtttaaaagtgggcatgctgaaagaagattatatagaagctgaaagttcttatagtcg

SEQ ID NO: 786291 - DNA, 83 bp, Homo sapiens
caactgggaggtggccatcttcggaccccccaacaccctctacgaaggcggctacttcaaggatacttttgtggaactctatg

SEQ ID NO: 786292 - DNA, 82 bp, Homo sapiens
ctggagagcctgcaggacggcgcggcagagtccccgtacgcctacagtaacggtgacttaagagattaaaattaatttggtt

SEQ ID NO: 786293 - DNA, 82 bp, Homo sapiens
cactcggctcctgtcgtccgttctctcaggctcccgttcagggctgcccttgagatggagttgctgcctctttggctctgcc

SEQ ID NO: 786294 - DNA, 75 bp, Homo sapiens
cccatcttctgctgggactgaagctgacctccaacagaagccaggcaggatggggaagcagaatagcaaactggc

SEQ ID NO: 786295 - DNA, 100 bp, Homo sapiens
ctttgttgaaaagcgaagccgttagtcccttaatacaaaggattatttactggcaagatgagcaggattaccatgaaagaaaagtccagatggactgagg

SEQ ID NO: 786296 - DNA, 80 bp, Homo sapiens
ccggttgctgagccgggagcgctgactggcccggctgggcaggatgggaatttcttagccataggctcacatgacaactg

SEQ ID NO: 786297 - DNA, 75 bp, Homo sapiens
gcgcggcggccagaggaaccccgaggtcaaaatgcagatcttcgtgaaaacccttaccggcaagaccatcaccct

SEQ ID NO: 786298 - DNA, 100 bp, Homo sapiens
ccacagtccttctgcagtccctcgtccagccacccccaggtgcttggtatttctacccctatgggctgcagacattccaccctgctttggtttcctggtg

SEQ ID NO: 786299 - DNA, 97 bp, Homo sapiens
ctcatctcctactgtcccacggccaccgaagagcatccacccaacccaccagtatcaccaggaaaaactgtaaatgatgtcaacagcaataataaca

SEQ ID NO: 786300 - DNA, 74 bp, Homo sapiens
ttggtttataaatcaatcagttcaatcaggttgcatctgtaagataacgcatttcagctgctgtgcatcgtatt

SEQ ID NO: 786301 - DNA, 115 bp, Homo sapiens
catgtacacagcctgtacccttctgctcctttcctggcagcaggggtttcaatgggagggatgtcctggaacaggtggaggcctatcaagctgaggctcgtgaggctctggccac

SEQ ID NO: 786302 - DNA, 75 bp, Homo sapiens
ctaggagaaatcgaggagctgcggctctaccccccggagtagtcaaaccacacactccattaataaggtttcctg

SEQ ID NO: 786303 - DNA, 80 bp, Homo sapiens
ctgggagatccatagggaggacggcggaacatctggaggctgggaaatgaagtctcaggggatccagaactgcagccagt

SEQ ID NO: 786304 - DNA, 101 bp, Homo sapiens
ccggcaactactttggattcacccacagcggggcggcggcggcggcggctgcggcccaatataggtatcctgaagaacttgcctggcacacaaatttaagt

SEQ ID NO: 786305 - DNA, 73 bp, Homo sapiens
atctttgctcttccatccgcctttgatcgtcttcctcttcagccatccagatttcagaagaaagtggtagctt

SEQ ID NO: 786306 - DNA, 96 bp, Homo sapiens
tcgatgagctgcaccgtctatgcaaagctttcacagctggtagttaacgcaggaggggttgctgccgtgattgactgcattgggtcctgcaaaggg

SEQ ID NO: 786307 - DNA, 139 bp, Homo sapiens
ttggacctcaccccagaaatcctcagccctggctccagaggatcatggcagctcctatgagatttggatttacagtgtgagataatcagctacatagaagtacccacttatgaaacagatatatcctctacacaacttc

SEQ ID NO: 786308 - DNA, 82 bp, Homo sapiens
gtctgaggacaaccacctgagcaatacttacagaacctgctaaggccatcaaacctattgatcggaagtcagtccatcagat

SEQ ID NO: 786309 - DNA, 100 bp, Homo sapiens
ggaaaataactccacggatgtcttggtagaggttcctagaagccaaaccaaactgacaataatgcttgaaaaattaggaatggattatgatgggcggcct

SEQ ID NO: 786310 - DNA, 75 bp, Homo sapiens
gctagagcgaggctactcactggtatcaggtggatgatgaagacttacaagatgaacctttacagatcacagttc

SEQ ID NO: 786311 - DNA, 90 bp, Homo sapiens
cagcccgtgaccagcacgacaccttcttccttcgaggtttcggatctgacagagaaattagaggagaggatctatcagatttataatgac

SEQ ID NO: 786312 - DNA, 51 bp, Homo sapiens
gaagaagaaggattagcagatgaagaggaaacagagcaaatgcagcgttac

SEQ ID NO: 786313 - DNA, 82 bp, Homo sapiens
gcggcagaagccgagttcaacatcctcctggccaccgactcctacaagcacttgcacctcctgcgccgccgccccccatcca

SEQ ID NO: 786314 - DNA, 95 bp, Homo sapiens
atatttttggacctgaaacagaaattctggaacacctatatggtgaactgcgccaggccactgtggccatgatgaacaggaaggatgagctggag

SEQ ID NO: 786315 - DNA, 75 bp, Homo sapiens
aagcagccgatccagcctgcggagcctgtggggcaggttttagctaaagaagatactgaggcagctattcaatca

SEQ ID NO: 786316 - DNA, 75 bp, Homo sapiens
cagcagttggcacacatggttaaggaacaggaggaaaccattcagagtcactattccaggtcctcaggatatagc

SEQ ID NO: 786317 - DNA, 50 bp, Homo sapiens
ggctgctacgcaccgtcaagaaggagattgcttatgcccgtatagagggg

SEQ ID NO: 786318 - DNA, 75 bp, Homo sapiens
gacgcagatgtggacttgaaagaagctgcagcggaggaaggcgaggataaggagcacaagtgtcctttgatttgt

SEQ ID NO: 786319 - DNA, 82 bp, Homo sapiens
ccacgcaaccccagatccatttacactttacaagctcccagctcctccagcagccgacaggaggcccgtcaagatgcaggca

SEQ ID NO: 786320 - DNA, 126 bp, Homo sapiens
gcgttcttgagtcgggaaatggccgctgtgtggttgcaacggagataaattcccggaaccgcgattcggcgtgtcaggttttgctgatttgggaaaataaagactatggatcaactaggagtattg

SEQ ID NO: 786321 - DNA, 90 bp, Homo sapiens
ctgttatgatcagcacaaccttgttgcatgccagataaatgatcaggtgctggagaatctggtaaaagcaccattgtgaagcagatgagg

SEQ ID NO: 786322 - DNA, 75 bp, Homo sapiens
gggctcgcgggggcgcggagaagaggatccaggaaagtcgtggcattcctggtggctttccatcagaacaagcag

SEQ ID NO: 786323 - DNA, 50 bp, Homo sapiens
atttggatcatacagcagatgtccaagtgactcgtccaagaagaagagag

SEQ ID NO: 786324 - DNA, 75 bp, Homo sapiens
aagaatattcccaagtccttcacccgggagaaggagaggaacgcgcggaggaagaagaagaaagcgccggcggcg

SEQ ID NO: 786325 - DNA, 100 bp, Homo sapiens
ggatgagcgaaggctacgagctgccctagaagaggtatacccagacctcactccagaagagaggccgagatggtggtgcctgacttctcggagcttttca

SEQ ID NO: 786326 - DNA, 83 bp, Homo sapiens
ctcctgcgaggcctcccgggctccgggaaaactacactggccagtgcatccactctgggagagcgtggacctggttcctgggg

SEQ ID NO: 786327 - DNA, 50 bp, Homo sapiens
tattgcaatataggggaaaagcagactgattcttgctattccaaatcctc

SEQ ID NO: 786328 - DNA, 100 bp, Homo sapiens
ctgcatcaacaacatcaatgacttcctgaaaggatgtgcaaccctccaagtggaaggtcggtgtacccgagagaactgcaagtaccttcaccctcctcca

SEQ ID NO: 786329 - DNA, 90 bp, Homo sapiens
gcacctcccaccccaggcgcagtatctgccgtcccagtcccagcagaggtaccagccgcagcagacattcacggcatggtgtaactccca

SEQ ID NO: 786330 - DNA, 90 bp, Homo sapiens
gggcccgggttcgccgagccgcaggagagacacgctgggccgaccccagagcggcgctggacaggtcgcaatggaagaagagatcgccgc

SEQ ID NO: 786331 - DNA, 49 bp, Homo sapiens
ccgacgtcgaccagcagagactggcgtcctgcctctgcggctctgcccc

SEQ ID NO: 786332 - DNA, 96 bp, Homo sapiens
tgggtggttggtatccatgaaaatccccagcaactaagatcatcattttctgggtggaagtattcagctaaagactggttgatgagtgatgtagac

SEQ ID NO: 786333 - DNA, 75 bp, Homo sapiens
ttaagaacaatcagcagagcacagaccaggacgcagaaagctccttcgagaactcatagaacggaagaccagctc

SEQ ID NO: 786334 - DNA, 73 bp, Homo sapiens
gccgctgggcgccggagccgaggcgagcgccgcgcgcaccactgagctgagctcaatgtgcagcaatggatga

SEQ ID NO: 786335 - DNA, 110 bp, Homo sapiens
caagtatccccgttcgccaccaattatgggagggctggccaacttctgctacagacgactcagttggtgaactcttgaaagattggcgacgtcttaatgttgctataacc

SEQ ID NO: 786336 - DNA, 75 bp, Homo sapiens
acccagtgaacaaatccgggggcaaggccaaaaagaaggtaccccaagaagctagtgcagacttattcagtgttt

SEQ ID NO: 786337 - DNA, 98 bp, Homo sapiens
ctggggttctgagactccctgtcccggaccgcagaaattccgggtagatatgcctggctcaggcagtgcattcatccccaccatcaacgccatcacga

SEQ ID NO: 786338 - DNA, 83 bp, Homo sapiens
tccggtgcttcggatctactacacctcgaggctgctggaagtgaacaagcagtgggaccagcatttccggtccatgaagcagc

SEQ ID NO: 786339 - DNA, 89 bp, Homo sapiens
ataatagcaaacatcgatggcctactggggataacattcatgcagaacatcaggacgtgttcctcatgatccggcgccacaagaccacc

SEQ ID NO: 786340 - DNA, 75 bp, Homo sapiens
accatctatttcaaaaggagttagcgcttcttggacacttaatgattgttggcaagaaatgtgctgctgatctgg

SEQ ID NO: 786341 - DNA, 100 bp, Homo sapiens
gacaggaataagaagaacggtaaatttgaagccaacaagcacaagccatggattgaggcagagtaccagggcatcgtcatggagaatgacaacacggtcc

SEQ ID NO: 786342 - DNA, 87 bp, Homo sapiens
gattttgctagagctgaaggctgtgataatgaggaagatcttcaaatgggcattcacaaggaatcagagatcattgatttcttcctg

SEQ ID NO: 786343 - DNA, 75 bp, Homo sapiens
ccgcttcctggatgacaaccaaatcatcaccagctctggggataccacctgaggcatttcatccttcatgaagcc

SEQ ID NO: 786344 - DNA, 100 bp, Homo sapiens
gcccgcccccgcccggcaccgcggacccacccggacctcggcggggagatggagccccttcccagctgcctgcctgccctagccagctcccaggtgaaga

SEQ ID NO: 786345 - DNA, 76 bp, Homo sapiens
attcgttgaaggacaccagctgcggaatttgcggctttggcagggtgtttgtgaaccgaagtttagcaatggaaaa

SEQ ID NO: 786346 - DNA, 75 bp, Homo sapiens
ctgcgcccccgggagcgggcgcccagaggtgaagatggtggcacgtggtttcttgatctgaaaagcaagggtggg

SEQ ID NO: 786347 - DNA, 75 bp, Homo sapiens
cgcacgcggtgcagggtaacatggcggatgcggaagtccagggccaaggcttgtgttcaatcgtgtgaatggccg

SEQ ID NO: 786348 - DNA, 98 bp, Homo sapiens
atggatgtgatgcctgctagccaaaaggcaacgcacctcttgctttttcctccaaagtatgttatgttaagtttcgtgatccatcaagtgttggcgtg

SEQ ID NO: 786349 - DNA, 100 bp, Homo sapiens
ataattttcctcacacacagttacttgccaagacgattgaagaatccattacattgggcgtatggaagagggcagcattggccgttttatcttggaccag

SEQ ID NO: 786350 - DNA, 88 bp, Homo sapiens
tggccttgttactagagaccctgaatggcagccagttctcctgtgcctcctgttggctctctttgcatctggcctcatccaccgagtc

SEQ ID NO: 786351 - DNA, 100 bp, Homo sapiens
gacgaaccttggagagaggagaacgaacatcttctggacctttgtccagctccaaatgagaagatgaagcaagtgttaaagaagactatagaagaagcca

SEQ ID NO: 786352 - DNA, 88 bp, Homo sapiens
aggctggaagctttatttctctgaagttggggaggaagttagtatacttccagtggaagacctgagagggtacctgaagagataccgg

SEQ ID NO: 786353 - DNA, 107 bp, Homo sapiens
gcctgccagagggtggtggtcatggtgggggccggcatcagcacacccagtggcattccagacttcaggcccctacaaaggcttcagagtagatatctctgccaaca

SEQ ID NO: 786354 - DNA, 75 bp, Homo sapiens
agttaggattttattactggcagcatgtatatcttttctcaaccagaacgtaagttctttccaaagaaaatttgt

SEQ ID NO: 786355 - DNA, 82 bp, Homo sapiens
cctcggctggtggcaagtattgctgtgggtgctgggacttcccgtccgcggcgtggagggcgccatgtcagaaccggctggg

SEQ ID NO: 786356 - DNA, 101 bp, Homo sapiens
tatcctcgaattcaaagtatcaaagtacaatttaccggaaacttggatttaactggccagaagcaggtattcaaagcagagaacaatccctgggtgacccc

SEQ ID NO: 786357 - DNA, 82 bp, Homo sapiens
ggggcatagacttcaaccagcctttggtcatcaccaggctgaaactagaggaccgttctgtggtgccccgagatgtggtccg

SEQ ID NO: 786358 - DNA, 100 bp, Homo sapiens
agctcaaggaaacctttccaacacagatgtccaagctgccaagcaatgaagggctattggcctgtcagctgctcccatccatcccctgcttactgcattg

SEQ ID NO: 786359 - DNA, 80 bp, Homo sapiens
tcgccttcgttgagttcgaggacccgcggttattcagcttctcaaggctggaaaagcgaaggaagtttcctacaatgcac

SEQ ID NO: 786360 - DNA, 100 bp, Homo sapiens
gacgctggttcatacactccaagatgctgtgaaacaagctatgcagaagcatcttcttcaaggctggttacggttctctgaaggaaatatcttagagttg

SEQ ID NO: 786361 - DNA, 100 bp, Homo sapiens
cgagctgtggggatctggcactgtggttcctgcatgaagacagtggctggcggtgcctggacgtacaatgtcagagatggctttggattccccgttctgt

SEQ ID NO: 786362 - DNA, 75 bp, Homo sapiens
catggctcactccccggtgcagtcgggcctgcccggcatgcagtacgaggatgtcgtccaggaaagattgtgcag

SEQ ID NO: 786363 - DNA, 82 bp, Homo sapiens
gcctcaccctcatctatatcctttggcagctcacagggaactctaatgatccaggacaaagaagttaccctggagtatgtat

SEQ ID NO: 786364 - DNA, 75 bp, Homo sapiens
gtggactccttcggcagtccacccaccgccgccgcctcccagatctctgttgaggagctggcgcggaatctggtc

SEQ ID NO: 786365 - DNA, 110 bp, Homo sapiens
attgctagaatcgtggatggaagcagattcactgagttcaaagccttttatggagacacattagttacagtatttgtttaccagcaacttcagttggtcaagatgccatg

SEQ ID NO: 786366 - DNA, 50 bp, Homo sapiens
ctttctcggactgtattattttctgaaaggatgggggcctgaagagggag

SEQ ID NO: 786367 - DNA, 90 bp, Homo sapiens
acacttcgagagttcttccaaagtcgcccaggcaccttctccatgcattgcaagatccagctccaggtcccacaggggctcttcttcccc

SEQ ID NO: 786368 - DNA, 50 bp, Homo sapiens
ggattgtagccataagtggacttttgtcatctatcccaggcctagatgat

SEQ ID NO: 786369 - DNA, 98 bp, Homo sapiens
cgacagcaccttcacaataactgttgatcagaaaaccttccatttccagggatccccatcacaaggaggggagggctaccatcccagctgcaaactct

SEQ ID NO: 786370 - DNA, 143 bp, Homo sapiens
gtccgggacagggatgtctacctggtaatagaggacttgaagcagaaagcaagtgaatacgagtcagaagggactgctgagatgtcctctattcttgaagagcgtattcttggagctgatacctctgttgatcttgaagaaac

SEQ ID NO: 786371 - DNA, 100 bp, Homo sapiens
aagaaagctgcggcctgtatcaccagaggagattagacgtagcagattaggtgcccaaggaccaagtccttgacactgtctacctgttccatatgccccg

SEQ ID NO: 786372 - DNA, 83 bp, Homo sapiens
gccgccccctccggcgtgttcatgcccccggggaaggcccgaacaagacaggaacgtcctgtgccctggactgtggagctggc

SEQ ID NO: 786373 - DNA, 141 bp, Homo sapiens
acagattttggtgcagctagagaattagaagatgatgagcagtttgtttctctgtatggcacagaagaatatttgttcctctgtgacgagggtgcaggtatctctggggactacatcgatcgcgtggacgagcccttgtcc

SEQ ID NO: 786374 - DNA, 78 bp, Homo sapiens
tgggacagggggatttggaaatgtcatccgatggcacaatcagtgcaagagaagcctgagccagtgccgctggagagc

SEQ ID NO: 786375 - DNA, 100 bp, Homo sapiens
ctgcccctggctctgctcccccagactctgttggatcagaaggtcaagctgccaatttgtggtgtctgaagaccaagactacacagctcattttgctgat

SEQ ID NO: 786376 - DNA, 100 bp, Homo sapiens
atcgaaggggacgtggtagcggcggcgggggcacagccagggagaataaaggcagccccgttgatgactgaaaatgacaaagcatccacctaacagacga

SEQ ID NO: 786377 - DNA, 90 bp, Homo sapiens
ccaacatttgatggtgaggaggaaccctcgcaagggcagaaggttgaagaacaggaggtcaacgtattgaaacttactgttgaagacttg

SEQ ID NO: 786378 - DNA, 87 bp, Homo sapiens
ggcattgcaaggtacattgagcaggctacagtccactccagcatgcaaatgcagccctgaggatttggctactgcatataacaacag

SEQ ID NO: 786379 - DNA, 75 bp, Homo sapiens
aaaatggcggtgtctacagtgttctcgacttcgtcgctgaaggtgcttcctggaggggcctgccccactgttcct

SEQ ID NO: 786380 - DNA, 100 bp, Homo sapiens
cttctccgcagctgccaggatttgggccgccaggcttgggctggggctgggatggggtgcatgaagtccaagttcctccaggtcggaggcaatacattct

SEQ ID NO: 786381 - DNA, 51 bp, Homo sapiens
cagcctcctgcataactgggactacaggcaagaaactatattcagtctttg

SEQ ID NO: 786382 - DNA, 82 bp, Homo sapiens
ctgggagcttctcagccattttccacagatcagaacaatcccgaagagatgacttggagtctctgggctacgtgctaatgta

SEQ ID NO: 786383 - DNA, 75 bp, Homo sapiens
actctgctgggggagatggaggcgaagacaagagagctcattgatcagcttgaacgggtctttttacgacttggc

SEQ ID NO: 786384 - DNA, 50 bp, Homo sapiens
cttcgtacccgtcttgattgaggttttgagcaaaattttggactgtgaag

SEQ ID NO: 786385 - DNA, 100 bp, Homo sapiens
agtttgggcacctgcagcgacctacccactacaatacctcttgggactgggctcgatttgaggactttgctgaagaattagcaacactgtctaatctgtt

SEQ ID NO: 786386 - DNA, 75 bp, Homo sapiens
tccagatgctcctgcgttctgatgtcgtgcccatgacagcaggctagacagcaacaagcagaattggcccaacag

SEQ ID NO: 786387 - DNA, 102 bp, Homo sapiens
tcctacctgaaacatacggagattgacaatcaatgggccatcttggacggcatgtactggcattgaaaacattgacgaagctattacattgcttgaacaaaa

SEQ ID NO: 786388 - DNA, 50 bp, Homo sapiens
caggaggcgtgctcccatctccgaccatggtgaatccgggcagcagctcg

SEQ ID NO: 786389 - DNA, 75 bp, Homo sapiens
agcagccttagccctagtgtagagatgatcatgacgcagtcctgaggtttaatggggcacccacagccaacttcc

SEQ ID NO: 786390 - DNA, 75 bp, Homo sapiens
tggtgcagagctagttcctctccagctcagccgcgtagaaaaggcgacggcggattgacagaagtatgattggag

SEQ ID NO: 786391 - DNA, 75 bp, Homo sapiens
gctcaagaagatcatcaagcgcaagcacaccctaccgaattacaagatcagtgtcatcagcaaggtggtccctgc

SEQ ID NO: 786392 - DNA, 90 bp, Homo sapiens
tcctcctgctgctactgtgtccagcgcagagtttattaaccacttaacctctcagaactgaacaaagacaacattgttcctggaacgccc

SEQ ID NO: 786393 - DNA, 83 bp, Homo sapiens
ataaagacatcttaattgggcacgaaagagttgcagaatgaagaagagtctggagaacctgaacaggctgcaggtgatgctcc

SEQ ID NO: 786394 - DNA, 83 bp, Homo sapiens
aacagatccaactgtttcctggttataaggtgtcgtgaaaactacccctaaaagccaaaatgggaaaggaaaagactcatatc

SEQ ID NO: 786395 - DNA, 74 bp, Homo sapiens
cagaatctcagtccaacaaaaggtccttctagatcctatggtaaaagaagaaaacagtgaggaaattgacttta

SEQ ID NO: 786396 - DNA, 83 bp, Homo sapiens
ctggcgcccctgctctgcctggcgctgctgcccgcgctcgccgcacgaggttctctacttaaaagacaatgactactgatgaa

SEQ ID NO: 786397 - DNA, 99 bp, Homo sapiens
agccgaacttcagggtttccaccgttcgttcaaggaaaacccttctgccacgctggaggacctggagaagccgggggtggacgaggagccgcagcatgt

SEQ ID NO: 786398 - DNA, 100 bp, Homo sapiens
gtgaaacttgtccgtgccaaatttcctgaacacaccattatgacttatgaaaatatgcatcagtttaatactgtcttggaattcatgagatggaagcata

SEQ ID NO: 786399 - DNA, 82 bp, Homo sapiens
gcgcccggcgcccctgagccggccgagcggcgacggaccgcgaggctggctacagcaaacatcattcaagatgtccagcaaa

SEQ ID NO: 786400 - DNA, 75 bp, Homo sapiens
cccggccggtccctcgcctcccggccgagctgacggccaagcagatagaacttcagttcactattggcgaagcca

SEQ ID NO: 786401 - DNA, 100 bp, Homo sapiens
ggcgacgacgggggaatgtggcgctggatccggcagcagctggaggcaagtgaggcctatctggttggcctttttgaagacaccaacctgtgtgctatcc

SEQ ID NO: 786402 - DNA, 98 bp, Homo sapiens
agcaggcagtcacaccttcctgtgagtgagaaccatagcagaaccttcaaagcacctctcaagtcggcaccccgagcagaaggcagaccggtattttg

SEQ ID NO: 786403 - DNA, 95 bp, Homo sapiens
cacttcgcattttggcattgacatttaattttagggtcctttatatagaagggagagtagggcatgccagaacagtgggctcgattactacagac

SEQ ID NO: 786404 - DNA, 90 bp, Homo sapiens
cgcctggcatgaggggctccccgggtcctccaggccctatcgatgctgcagccgtccagcagcccgctctgggggaagcttcgtgtggac

SEQ ID NO: 786405 - DNA, 75 bp, Homo sapiens
aaaaaacatcaagatgtatcagccactgctggctgttggtattgatgaagatgaccctactgctgatgataccag

SEQ ID NO: 786406 - DNA, 76 bp, Homo sapiens
gatcacagagcctatttacccagaagtagtccatatggctgaggaattcctctacagattcttgccacagaaaatc

SEQ ID NO: 786407 - DNA, 100 bp, Homo sapiens
ctcgcctcctcgcagcagcgccatggttaacacagaaatctgcctcctgggccatgccgcttctaaggcctgtttcttctcatgagccccagcacaagac

SEQ ID NO: 786408 - DNA, 75 bp, Homo sapiens
gactctatacagggacgtgatgctggagaattataggaacctggtctccctggggattaatgaaaatcaagttcc

SEQ ID NO: 786409 - DNA, 96 bp, Homo sapiens
tgggagcggatccctgagctcgtcaagcagctgtcggccaagctcatcgccaacggttttataggatcacattgacaaaagtaccatggagtttta

SEQ ID NO: 786410 - DNA, 100 bp, Homo sapiens
ccagcccgcccggccgcaggaccgccggggcctggccgccggtccggcgtgcgccaagttcagggatatgtggtgcctgtcataagctccagagagctgc

SEQ ID NO: 786411 - DNA, 100 bp, Homo sapiens
cacgtgcagacatctacaaccttcgatctcctgacgaggttggggtctgctaggtccccggaatgagttgtttgacgcagccaaataccgagtgctagct

SEQ ID NO: 786412 - DNA, 100 bp, Homo sapiens
tccgggattcccagccatggcagattcctccgggcagcagggtctctaattaacagaagatggcaaagcccagccacagcagctatgtccttcagcagct

SEQ ID NO: 786413 - DNA, 90 bp, Homo sapiens
attttcgatagagacgttttccggagggattccatcataggcgtggtgtccctcgtggccgttcacccctccaccgtcaacccgctcggg

SEQ ID NO: 786414 - DNA, 100 bp, Homo sapiens
cccacgtcgccaggcacaagacacgtcggatgttgcagcagagccagcagctagcgcaggtgatgctgggaggttcctggttacagacactggaggctag

SEQ ID NO: 786415 - DNA, 100 bp, Homo sapiens
cacgcagcggctgcgggggctggagaagcagcaccgcgtggtccggcaggagaaggaggagctgcacaaggttccagcaacagatagaaatgctttaagt

SEQ ID NO: 786416 - DNA, 90 bp, Homo sapiens
atggacccaatgaacatctgggatgacatcatcacaaatcgctccctgtgctgtcaggaatctacaggacttggctcgtatttacattcg

SEQ ID NO: 786417 - DNA, 113 bp, Homo sapiens
agaaaaatgagaattataaagccctcgtcagaaggaattatgggaaacgcagaggcagaaaccaggttttaaaatcaaagatgggaaaatcggagaaaattgcccttccccat

SEQ ID NO: 786418 - DNA, 124 bp, Homo sapiens
aagcgctgctggactacaaggacgagttctcgggcagaggcgacctccccgcgttccatgcgcacagggacagggggggggccctcagcctcttggccttgaacgggctgttcatcttgattca

SEQ ID NO: 786419 - DNA, 100 bp, Homo sapiens
cagctacaccaccaacgcctttcccggagagtacatccccaccgtgccacggcgtatgcctccgaggacggggtcctgaccgaggccatgatggacaccc

SEQ ID NO: 786420 - DNA, 88 bp, Homo sapiens
tggagctgaagcgcaggctgcggggcgcggagtcgggagacaatgcagatcttcgtgaagactctgactggtaagaccatcaccctcg

SEQ ID NO: 786421 - DNA, 101 bp, Homo sapiens
tgagggggaccgggagaggcaccaaatctggcctgggggcccgagaagcttcctctcaggtgtttcagtcacctccagtaacacgggcgtgccagatatct

SEQ ID NO: 786422 - DNA, 100 bp, Homo sapiens
tccgctgctgtcgcatccgtttcacctgggccctggccctgctgcaggttatttcttatgagggtcatggatatcccctatctaaacttggaaggaccag

SEQ ID NO: 786423 - DNA, 83 bp, Homo sapiens
cgcagccgtagacaccagctccgaaatcaccaccaagataatggcatcagctgctaaggaatttaaaatggacaacttttcac

SEQ ID NO: 786424 - DNA, 75 bp, Homo sapiens
ataaagatttctctagacatgggatgcatgttccaacatttcgtgtccagctcctggactgttttgtgatcccag

SEQ ID NO: 786425 - DNA, 100 bp, Homo sapiens
tgcccgagtgctacttctactccaagttcggttagggaaagtttctcctgaagatgtagaatatttcaattgccaacaggagctggcttcagagttgaat

SEQ ID NO: 786426 - DNA, 100 bp, Homo sapiens
ggaagcgacctctcctcgcccccctctgcaacgggctcatcaactcctacgaggacaaaagcaacgacttcgtatggttccctcgacccaggaccccctg

SEQ ID NO: 786427 - DNA, 76 bp, Homo sapiens
ttaggccatcctccaaaagagctggctggagagatggctcacagctggattcatgcccagtaaagggacacctgaa

SEQ ID NO: 786428 - DNA, 51 bp, Homo sapiens
gtggaggcgccgcaagcgctgagatacctactggagcaggatttcccaggc

SEQ ID NO: 786429 - DNA, 98 bp, Homo sapiens
acggatgaaaatgaagacgacattcagtttgtcagtgtatctttcagatgaaggcattgaagcttgcacaagctctccagacaaagtcaatgtaaatg

SEQ ID NO: 786430 - DNA, 100 bp, Homo sapiens
attttggaagagggagtcaccactggacctccaaggaagccacgtgcagacatctacaaccttcgatctcctgacgagctatttgatcactccatggaag

SEQ ID NO: 786431 - DNA, 83 bp, Homo sapiens
agaggaaggaattgtcttagaaagtcctcattatgctgtgaaaatattagattttgtatcagattgtaccatctcataaattg

SEQ ID NO: 786432 - DNA, 82 bp, Homo sapiens
gcaaagatgacttacttgccttggatacaccaggcgttgtggggcagatgatcgaggcagctgaagagcgcccgtggctgtg

SEQ ID NO: 786433 - DNA, 97 bp, Homo sapiens
ggtggagtccggcccccgaaagaggttataaaggaactggtggtatctgctggagagagtgtccagataaccctgcctaagaatgaagttcaattaa

SEQ ID NO: 786434 - DNA, 100 bp, Homo sapiens
gctcaaattgacccaaagaagttgaaaaggaagcaaagtgtgaatatttctgcaatgaatcgctccctggctaatgtgattcttggaggctatggcacca

SEQ ID NO: 786435 - DNA, 100 bp, Homo sapiens
cctgttgtaactccatgcaataaacagttcctgagtcaatttgaaatgcagtccaggaaaagctctgcattagctgctaatgtatgtaaaaagattactg

SEQ ID NO: 786436 - DNA, 75 bp, Homo sapiens
cgctgctcgagctgctgctggattgaactcagagaagccgggaggttggaaagaaccatgactgtattcaggaag

SEQ ID NO: 786437 - DNA, 90 bp, Homo sapiens
ctcgtcatgctctttgtagcgtggtgcttctgttgctcacagatcttggatttgcctgagttgattgataattccaagtataaaactaac

SEQ ID NO: 786438 - DNA, 89 bp, Homo sapiens
ctcgccgcagatccgctgtacttgcgtccgctacagtatgtcaatcgcttgccccagcacaggccggtctaattgaagccaacggagaa

SEQ ID NO: 786439 - DNA, 90 bp, Homo sapiens
catctacctgctcaacccctgtcacctggtcaccatgatgcatgtgggtgtacatggcattagaatagaattcatcaatgaaaaaggatc

SEQ ID NO: 786440 - DNA, 100 bp, Homo sapiens
aataatttattttcatcgcttctatatgtttcattccttcaagcaattcccaagatatgttggcagagtcagcatatatgattccaaaaggcaatccggg

SEQ ID NO: 786441 - DNA, 50 bp, Homo sapiens
tcagcctcccaaatagctgggactacaggcgtgagccaccatgcctggcc

SEQ ID NO: 786442 - DNA, 46 bp, Homo sapiens
ctcccaagtagctgggattgcaggccgggtgctcgtccactgccgg

SEQ ID NO: 786443 - DNA, 96 bp, Homo sapiens
agtggaaaggtgaccaagcccaaagaggagaaagatgcttctaagggctacagatgcacatgttgaatggagctcttctggcattgctgtttcctg

SEQ ID NO: 786444 - DNA, 82 bp, Homo sapiens
tgtggataagctggaacagatctatgaatgcagaggtgtgattgcctatatcagttcttccagctcagcctcaagccctgcc

SEQ ID NO: 786445 - DNA, 99 bp, Homo sapiens
ataaaggaaagacctcagagtgttctcacatggaggatgaaaaggaagatagtaaagttatacctacagaatgtgccatcaaggtatttaaaacaaccc

SEQ ID NO: 786446 - DNA, 80 bp, Homo sapiens
ttcgggtgggagtgacccgattttccagactatagggtatgaccccatcatttccccagaggtctcggcctcctttggtg

SEQ ID NO: 786447 - DNA, 100 bp, Homo sapiens
aaaaaattccgtgacgaggccagaaggctagaagaatcagacgtgctccaggaggccagaaggaaatacacttggtcacagggcttcccaggaggtgtgg

SEQ ID NO: 786448 - DNA, 101 bp, Homo sapiens
cgaagagccaagagtcagtattccggccagcttcacgaagtcagagagtgattgcctcaccatcctatccatgccattctgctattcctcatgctggtgcc

SEQ ID NO: 786449 - DNA, 82 bp, Homo sapiens
ggttttcccaccacctccaaatcatgcaagacacaggttacgaaaagcggctgtactgaggacagcggtggaggccgaggtg

SEQ ID NO: 786450 - DNA, 73 bp, Homo sapiens
gaaggggtcccgaagccccctgcaggaactctacaacccaatccaggtgtggtggccgagcctggagcctgtg

SEQ ID NO: 786451 - DNA, 76 bp, Homo sapiens
aggagccagaaaagccggcaaaaccacttacagctgaaaaggatattggtgctggaaaaggcaaatactatgctgt

SEQ ID NO: 786452 - DNA, 75 bp, Homo sapiens
tgatcaaagcagcagctctggaggaacataatgctgccatgtgtgattggtccagatagctgccttatccaactg

SEQ ID NO: 786453 - DNA, 100 bp, Homo sapiens
gtcacaaggaacagctatcggatcatcagtgtggacggagccaaggtagctacagcaagctgggtagcaggcagatccaaaggatatcatgaagtttcca

SEQ ID NO: 786454 - DNA, 100 bp, Homo sapiens
ctttgaccacccgactctcatagaaaacgagagtatatgcgatgagtttgacctgaagattatcggctataagagaataagaattgcagaaaataacagt

SEQ ID NO: 786455 - DNA, 74 bp, Homo sapiens
gattatctgcactccgaacgcaagatccaccgagacatcaaagctgctggagccagttctgcttctcggcaagg

SEQ ID NO: 786456 - DNA, 73 bp, Homo sapiens
ggggctgtggctccgggactgcgaatcattgatcagcgattcgagaaggtttcctactttgtatttggtgatt

SEQ ID NO: 786457 - DNA, 75 bp, Homo sapiens
gtcaggtctggagctcgaccgggccagcactcctgtaggaggcctgctgatggcatttcagaagtactctggtga

SEQ ID NO: 786458 - DNA, 100 bp, Homo sapiens
gaggagcccctccgcccggcagctgccccgtctgagaagttggaagcgagatagagaaaaaagggatgatcaagatgacgtttccagtgtgagaagtgag

SEQ ID NO: 786459 - DNA, 100 bp, Homo sapiens
gggaactccagatgtgcgcattgacaccaggctcaacaaagctgtctgggccaaaggaataaggagctgagatttcagaagagaactcggaaggtggact

SEQ ID NO: 786460 - DNA, 98 bp, Homo sapiens
tggagggcatcttcaaccacaaaggtttggtgcacctcgatttggaggaagtagggcagggcccttatctggaaagaagtttggaaaccctggggaga

SEQ ID NO: 786461 - DNA, 83 bp, Homo sapiens
acttactgttaatgtagtagcagtgattgttgcttttacgggcgcctgcattactcaacacttttccagccattaactccagg

SEQ ID NO: 786462 - DNA, 74 bp, Homo sapiens
gatcctggaggtggatctgaagaacggactctaaaatagagctcaagcttgagaagagagaaccactaaagggc

SEQ ID NO: 786463 - DNA, 86 bp, Homo sapiens
cagattactgagagtcttccgttactagtttgtctttcctagatccagacacggggactgcagagaaaggctgtgtgcatccgctg

SEQ ID NO: 786464 - DNA, 89 bp, Homo sapiens
aagctgcccagccaccagcaaccccccaggttttcctaggacattaggacaagccgaagccctggacaaaatctgtgaagtggatctag

SEQ ID NO: 786465 - DNA, 82 bp, Homo sapiens
gagctgtgcagccgcgaggaggcgcgggaggtgttcgagaacgaccccgagacggaaagatgaatgggagggctgattttcg

SEQ ID NO: 786466 - DNA, 75 bp, Homo sapiens
tcacctttggatttcatcgcttaggttgaagatgacagcgatgcagagacctatggagaagagaatgatgaacag

SEQ ID NO: 786467 - DNA, 50 bp, Homo sapiens
ctctgggatctttcagtagaactgcaaggtaaaccagacttgaatacaac

SEQ ID NO: 786468 - DNA, 98 bp, Homo sapiens
gcagcctgtggctgtgcagggccccgagccggcccgggtcgaggatgaggatgggacagaagaggataacagtcgtgttgaacctgttggacatgctg

SEQ ID NO: 786469 - DNA, 83 bp, Homo sapiens
tgatattgtacgatttctggtacagttagatgactacagcctcacgattttgatgaatgtcgatttgatattagtgtaaatga

SEQ ID NO: 786470 - DNA, 101 bp, Homo sapiens
ccgccgccgccgcccccgccgccagctcaccatggatgatgatatcgccgcgctcgtcgtcgacaacggctccggcatgtgcaaggccggcttcgcgggcg

SEQ ID NO: 786471 - DNA, 75 bp, Homo sapiens
gccattagcgggggcctttcctgaggacggcgtacggagtgtgggtaaaatctgtaaaaactgggtcagtttttt

SEQ ID NO: 786472 - DNA, 100 bp, Homo sapiens
caagtcctctccatctgatcccatgaccacctccagagctaatcaggacactgcccatctctaagataagaacctggaaaggggactctgttggccattg

SEQ ID NO: 786473 - DNA, 100 bp, Homo sapiens
cgtggagtacccgggagtggtgcgtgatgtggctaagatgctgccgactctgggcggcgaggaaggcgtctcccggatcgggagcggtgccgagaaaaat

SEQ ID NO: 786474 - DNA, 82 bp, Homo sapiens
acaagcagatctactactcggacaagtacttcgacgaacactacgagtaccgctgtttgcagacaaggtcccaaagacagca

SEQ ID NO: 786475 - DNA, 51 bp, Homo sapiens
gtgatttccagaggatttacactatggttcactttcttacacactatgctg

SEQ ID NO: 786476 - DNA, 74 bp, Homo sapiens
ccgagggaaacaagaaaacatcaaagaggtctagcaaaggtgtttttcaagattgaagagaaagaaatagaaca

SEQ ID NO: 786477 - DNA, 100 bp, Homo sapiens
ccgttgctgtggagacgcctggagcatctttccttgaagaagtacattattgacattgtggttgaaagtacagctccagcagaagctttgaaagatggag

SEQ ID NO: 786478 - DNA, 100 bp, Homo sapiens
gcgcaacatccgggagtttgaggaagaaaaggtgaaacggcagaatgaaatcgccaagaagcgcgaaaccttgaaagccatttgatgtcccctgctgaga

SEQ ID NO: 786479 - DNA, 82 bp, Homo sapiens
ctgagggtgaagtggcaggaggaggaggaggggctccggctggtctgtggtgagatccggccccacatcgcaactcttcgta

SEQ ID NO: 786480 - DNA, 100 bp, Homo sapiens
gccccacccgcaccccatctggaccgcatcgctgaatgtgcccggacctgcgccttctggaaccatgatggcagcattgacttccgagagtatgtgattg

SEQ ID NO: 786481 - DNA, 75 bp, Homo sapiens
tttgttaaggattccaagtaactcttatttgattgctcgctgtaagcagctcatctgtgaccccagctacgtaaa

SEQ ID NO: 786482 - DNA, 80 bp, Homo sapiens
ccagcatgggctcgcctgtcaacgcgcagcctacccgttccatcccgggctatcccagttccccactgccagggaacccc

SEQ ID NO: 786483 - DNA, 100 bp, Homo sapiens
ttaatcctcaatttaagcctgatctaacccctagaaacagggaactctaatgatccaggacaaagaagttaccctggagtatgtatcaagcctggatttt

SEQ ID NO: 786484 - DNA, 51 bp, Homo sapiens
gtgggacccatcacttacgaaaaaccaggaactgcatatattcatggaatg

SEQ ID NO: 786485 - DNA, 96 bp, Homo sapiens
agaaaagaaaaggccatcaagacagttgtggacctctcaacctgatggccaaaagaaaggaagaaaatttttcctctcctaaaaatgccaaaaggc

SEQ ID NO: 786486 - DNA, 50 bp, Homo sapiens
tgtcaatgccgctgacaagcatggtgctgggtcttcagctctaaagaggc

SEQ ID NO: 786487 - DNA, 82 bp, Homo sapiens
ctgggccatgagagggaaggaaacaagccagatgacttcaaacctgcttctattgacacttcttctgaaggataccttgagg

SEQ ID NO: 786488 - DNA, 98 bp, Homo sapiens
ttgagtgtccttcaacaggtagaagatctagaaaggagagttgcatcagcaagtttgcaagtgaagggttctcatgtatcagccatcttctgtaaggg

SEQ ID NO: 786489 - DNA, 82 bp, Homo sapiens
agcattttgcaacgcagttcggagttattatgaggacaaccttaaacttccaccacaagaggaatataaagaggtccctcct

SEQ ID NO: 786490 - DNA, 82 bp, Homo sapiens
gcccacctcaatggcctaagcaagtgtctgcagtgccaaatgtgtgacccaggactgcaagatggaggaaggcgggaaccta

SEQ ID NO: 786491 - DNA, 74 bp, Homo sapiens
ggcaacgacgttccatctgtggaaggacctaccaaccaggtgcccctgggcgctgggattgctctagcctgtaa

SEQ ID NO: 786492 - DNA, 100 bp, Homo sapiens
cccagaaccactgcctacaaaccaccctctcctgaccctgaagaactgtgggcaattgaaggaacagactaaaaatcgtgtcctggaaggaaactacagg

SEQ ID NO: 786493 - DNA, 74 bp, Homo sapiens
cggcctctgcaggcttgccgaagaagggagactctttttgatcagaacaatgctgcaaaaaaagaagagtcaga

SEQ ID NO: 786494 - DNA, 87 bp, Homo sapiens
ccgtcggccatgactgtgtatgctctggtggtggtgtcttacttcctcatcaccggagctgctggagccagttctgcttctcggcaa

SEQ ID NO: 786495 - DNA, 100 bp, Homo sapiens
aaagaatgaaccgcttgcttcttatttagctgcttttaaggaaatctgtcctggtggaatgggttatacggtttctggcgttcatagacgcaggccaatc

SEQ ID NO: 786496 - DNA, 96 bp, Homo sapiens
caactatgtttggatgttggatctacactttctcaagcactgtgatcttcaaatccctgtgtctaggtcgtttgggaaacgccttggagagtcaag

SEQ ID NO: 786497 - DNA, 88 bp, Homo sapiens
acaaactgggtcccaatgatcaatacaaggaccaagttttcatgattgactccaagtgtgaatctggaaaaggacgctgctctttcaa

SEQ ID NO: 786498 - DNA, 100 bp, Homo sapiens
agacctgctaccggcctctgcggggggacgggctggctccgctggggcgcagactccactccacttggctgtgatcaccaaccagccagaaattgctgag

SEQ ID NO: 786499 - DNA, 108 bp, Homo sapiens
cgcggactctggcaccaacaaaactatctctttgaggctccaactattatgtgcgcatcctgagcaccatcgatcgggagctgctcaagcccaacgcctcagtggccc

SEQ ID NO: 786500 - DNA, 94 bp, Homo sapiens
tgagaaaatgggagcagttttcatggatgcccctgtttctggtggtgcccttcgttttaaaagaaagattattggattaaaagatgagttttac

SEQ ID NO: 786501 - DNA, 83 bp, Homo sapiens
acagcgccttgttccagcagggcctgatccagcaacttgagttggtggaaccaagtggctggattcatgttcccttaactgac

SEQ ID NO: 786502 - DNA, 100 bp, Homo sapiens
ggatgtcatcagaagaccaacatttgtgcctcagtggtatgtgcagcagatgaagagagggccagaggagaaggtgtgacgtttcttggtcataggaggg

SEQ ID NO: 786503 - DNA, 50 bp, Homo sapiens
tttaaagtgggcactgcaaaagtggaggagatgttaaagtaacccatctt

SEQ ID NO: 786504 - DNA, 75 bp, Homo sapiens
gctccctccaccttctcaagatcagtctcaggaagaggatgaaatggattctggcacgatggttcgagcagtggg

SEQ ID NO: 786505 - DNA, 83 bp, Homo sapiens
gcctgtgggcacagacaaggagctcagtgacctcctggacttcagcatgcgagcagctgatgcagctgtacagtgcgcgccag

SEQ ID NO: 786506 - DNA, 96 bp, Homo sapiens
gcctttacagtaaaaatgacccatctatggctgcttaatttgagagaatatcagcagaggaatagccctggtgttcctacaggagcgaaaaagaag

SEQ ID NO: 786507 - DNA, 82 bp, Homo sapiens
tttctgcgacttgtgttgggactgagcacagcaatggaggaaacagctatatgggaacaacatacagtgacgcttcacaggg

SEQ ID NO: 786508 - DNA, 74 bp, Homo sapiens
gaggagctgtggataacgggaggtgaatttccatgtcaacatagtcctgaacccagcgggtgccgcttctccac

SEQ ID NO: 786509 - DNA, 100 bp, Homo sapiens
accaccaagaaaccacccctggcccagaagcccagcgtggcccccagacaggaccaccagctggacaagatcgagggcgtgttcgagcggccgagcgacg

SEQ ID NO: 786510 - DNA, 100 bp, Homo sapiens
gggtgattggtgtggccttattcctgttggacagccttgtatgcaggttacaaccacaggcctcaagtggaacctcatgctttctcctgctcaagacagc

SEQ ID NO: 786511 - DNA, 51 bp, Homo sapiens
aaaccttcaagaacctgacctctgtagtatatttaaagttggagttcgttg

SEQ ID NO: 786512 - DNA, 51 bp, Homo sapiens
aggaaattcaacaggagctgatcaaccaagtgcgtaagagacgagttgaag

SEQ ID NO: 786513 - DNA, 92 bp, Homo sapiens
cggagagcgagagcgcgaaggaaatctggccgccgccgccgcgagcgctcccgcggctggactctattacctggcagaactgatagaagaat

SEQ ID NO: 786514 - DNA, 100 bp, Homo sapiens
atcatagccgagtatgaaagtcaagtcaaagcactgccagtgaaagatgtagaagataaacctgaacaacaaaccagaacaagagagactgacaaatcac

SEQ ID NO: 786515 - DNA, 83 bp, Homo sapiens
cttcgtgctgctcgacgtgctgtgcttactggtcgagttgcatgctgagaatttgaaaaatgaagatgatgtagacactggac

SEQ ID NO: 786516 - DNA, 90 bp, Homo sapiens
ggactgcaccgcaccgagggcgagctccagtgtcactactccatccagaagggagctgcgtttctgggacttggcaccgacagtgtccga

SEQ ID NO: 786517 - DNA, 90 bp, Homo sapiens
gggaaccgcctcaccgttctgcccccagaactaggtacctgaaagaattccgcacagagcagtgcccactctttgtgcaacacaaatgca

SEQ ID NO: 786518 - DNA, 90 bp, Homo sapiens
aagactgtatgatagtgttagttccacagatggggaggacagtctagagagaaaggatagcagtgagattcacttcaaagtgaaaatgac

SEQ ID NO: 786519 - DNA, 98 bp, Homo sapiens
gacgtcgtgatccagaagtccagagctgaggactgcctgtttgcagcaacagtatcaaagtgctctattttgggcagataaagtagcttcactctctc

SEQ ID NO: 786520 - DNA, 98 bp, Homo sapiens
ggacctgctgatggcccgcagcttcggtgacaaggtggacgtctgatttatgaagctccccatccacctatctgagtacctgacttctcaggactgac

SEQ ID NO: 786521 - DNA, 82 bp, Homo sapiens
ggcaaggaaagcagcatagagaatgagatagccgtcctgagaaagaactgtggaaggtgcatcagtgaagaaatggaccaat

SEQ ID NO: 786522 - DNA, 50 bp, Homo sapiens
cagcgagggcgccgagcaacttcgatcgccatggatcggatgaagaagat

SEQ ID NO: 786523 - DNA, 100 bp, Homo sapiens
aaatttgaaaaggagaaaatgaatgccaaatgggacacggtagacttgggccttctgcgctttgtcacggctgtcgggacacagggcgccatttcaaaag

SEQ ID NO: 786524 - DNA, 111 bp, Homo sapiens
ttttaactttcattgtcttttccgcccgcttcgatcgcctcgcgccggctgctctttccgggtgacttaagagattaaaattaatttggttgctgttggttctgaacaaat

SEQ ID NO: 786525 - DNA, 75 bp, Homo sapiens
gtcacacacaacgcttgttatgttttcatcacttctctccagaaggctacgcccaggaggaacagctgaaagaag

SEQ ID NO: 786526 - DNA, 77 bp, Homo sapiens
taaactgccaaagttcaccatcctccaaacaagtgaaatgccagatatacgaaacccagaaggaactcagtacagtt

SEQ ID NO: 786527 - DNA, 82 bp, Homo sapiens
cttacaagcctccagtctcaaattatccagtatttgattttcatcaagcagctgatggtatccaggaacaacagagacaaga

SEQ ID NO: 786528 - DNA, 75 bp, Homo sapiens
ccctgcaggtggtcagacatgtcatcaactcagctgagctgagctcaatgtgcagcaatggatgacgacagcctg

SEQ ID NO: 786529 - DNA, 101 bp, Homo sapiens
tctagcaaaacacagctgttacagtgtttgatgatggtgatgagcgaacattgagacgtacctcactttgtctgaaaggagagagacattttgcagagagt

SEQ ID NO: 786530 - DNA, 97 bp, Homo sapiens
atggtacccaacgcattgaatgtggggctcccagaccttcaaaccaaagggccaatacctggatatggttctgagtgtgaacatggctacgcctctt

SEQ ID NO: 786531 - DNA, 98 bp, Homo sapiens
gtcgctgtgacaacttgtgtaagagctataccagttgctgccatgactttgatgagctgtgtttgaagacaggcaagataacccctgtgacagaaggc

SEQ ID NO: 786532 - DNA, 100 bp, Homo sapiens
agatctacatctgtctccagaaaccagcagatattcctgcgggacatagaacaggtgccacagaaacatcttgaggagcagattgctaaagttgatagag

SEQ ID NO: 786533 - DNA, 100 bp, Homo sapiens
ctgcttctccttttcatgagtgttcctgtggtctctgcacctcctttcttggcaggttctgaataaggcaaagagtcatattccagaactggagcaaacc

SEQ ID NO: 786534 - DNA, 100 bp, Homo sapiens
ggaagaaggaagagcaacctggaaactgacaggaaaggatgacaagttgggagtcacaggactatttaagaaacaactgaggcatcagaccaactttccc

SEQ ID NO: 786535 - DNA, 96 bp, Homo sapiens
atccaccggagccccttcaaaaaagattacgtccctattggccctcgattttcaaatcttgtattacaggctcttctcgttttactgaaaaaggca

SEQ ID NO: 786536 - DNA, 50 bp, Homo sapiens
tggcaaccgccgtctatcaggctgcgaggtatctttaaaatagcttcctg

SEQ ID NO: 786537 - DNA, 100 bp, Homo sapiens
tttctatcagttctctgaccttgattggaatgttggcagctataacttacacatgcatgcaagatatgggaaatactaaagcaagactactctatgaagc

SEQ ID NO: 786538 - DNA, 98 bp, Homo sapiens
agcgccagctcagcgtgcccatcccggggggcagcaacggcgacatccagcaagacaatgcagatcttcgtgaagactctgactggtaagaccatcac

SEQ ID NO: 786539 - DNA, 75 bp, Homo sapiens
tctttgaggacacagcctcgctggaggcagtttctgaacgtgcgcatcgaccccagtagcctgtccttcaacatg

SEQ ID NO: 786540 - DNA, 50 bp, Homo sapiens
ggttgaccaactggtggaacccctggggttatgtaccgaaggactctacc

SEQ ID NO: 786541 - DNA, 58 bp, Homo sapiens
ctgggagctggaggaaccgcgcaatggctgccatccggaagaaactggtgattgttgg

SEQ ID NO: 786542 - DNA, 83 bp, Homo sapiens
tggagctgggtcagtccgccgctcaccccgcggccgcaccttcccgccttctcagatgccttcaattaagttgcagagttctg

SEQ ID NO: 786543 - DNA, 100 bp, Homo sapiens
cctcaaacccctcagacaatgaattcacaacctcaaacccgttctccgtttcataggcgaatttacaaaggaataccactccagctcagaggtgaagtct

SEQ ID NO: 786544 - DNA, 100 bp, Homo sapiens
ctttactgagaattttccacctcctgacacaacaccactcaccagggaaagaatagttggctggtaccacacaggccctaaactacacaagaatgacatt

SEQ ID NO: 786545 - DNA, 51 bp, Homo sapiens
tctcctccgtcaccagccacatctaccagggttctccaaaaaatgtggaat

SEQ ID NO: 786546 - DNA, 75 bp, Homo sapiens
gctgaaggcaactatggatgctgggaaactgtgacaaagcataaatcatggacaccagagaataaggtggacctc

SEQ ID NO: 786547 - DNA, 75 bp, Homo sapiens
cgcggcatcaagcaggtccggacccactggctgctggagcttgtcaccaccagaagccaaagatgttgaccagga

SEQ ID NO: 786548 - DNA, 87 bp, Homo sapiens
cgcccaggaagcccctctgaagcctcctcgccgccgtttctgagaagcaatggctgccatccggaagaaactggtgattgttggtga

SEQ ID NO: 786549 - DNA, 100 bp, Homo sapiens
agcaatatgctgcatttaaaagatggcattttgaaaccctggaatattttccaagtgaactaggttacattggcgaatttgaaatcattgatgaccacag

SEQ ID NO: 786550 - DNA, 110 bp, Homo sapiens
gaccagggacaccagctgggcactcctctatttcctctgctatatcctccctcagaccgccccgcaagtactcaggatcggtcccgtcaggaagcccaagtatgtggaaa

SEQ ID NO: 786551 - DNA, 82 bp, Homo sapiens
gaagagcgacaagccgctggcagccgcggatctcaccgccgctcagggcatgtcgggccccaggcctgtggtgctgagcggg

SEQ ID NO: 786552 - DNA, 74 bp, Homo sapiens
ggcgttcccaggtgggagcctggagggcaaagcgtggtgcgagcagatcccgcccaatgacccccgcatcaaga

SEQ ID NO: 786553 - DNA, 100 bp, Homo sapiens
gttgagcctgtgggacacttcggactagacgcttgaagcaaagctgccatcccagaagacgacatgctctcagcaacccccctgtatgggaacgttcaca

SEQ ID NO: 786554 - DNA, 51 bp, Homo sapiens
gagtatgtggccttgcaacttttggtcagcagatccggaagctcatcaaag

SEQ ID NO: 786555 - DNA, 100 bp, Homo sapiens
gggatcgagagagagatcgtgaccgggatagagaaaggagctcagatcgtaataaggatcgcagtcgatcaagatcccaccaaatattttggttgtgagc

SEQ ID NO: 786556 - DNA, 90 bp, Homo sapiens
taactaccttctcatcttctacctcagtttctcactgcttatctacataaaaagaaaatgttggggcttttcaggaagcataataagatt

SEQ ID NO: 786557 - DNA, 75 bp, Homo sapiens
cagatttacaaactggccaagaagggccttactccttcacagatcgagactctccaacatgtgccttctgaccat

SEQ ID NO: 786558 - DNA, 100 bp, Homo sapiens
gagagatctctaaaaaagtggctcagattcagaatggtatcgagaaccttccctgcgaacttcagaggaacttccagctgatgcgagagctggaccagag

SEQ ID NO: 786559 - DNA, 95 bp, Homo sapiens
ccgttcttgcctcaggccagtcgcctccaggccaagagggatccttcacccgtgtctgatacttccgggtcatcctcctcctcctcctggccctg

SEQ ID NO: 786560 - DNA, 110 bp, Homo sapiens
gttcccatccaggacaccttccccttcctgaacatcaatggatttccagactgtattaccatcatttgagctcttctcaaagtatggaaaattatattcaaaagctggac

SEQ ID NO: 786561 - DNA, 100 bp, Homo sapiens
ggtcggaagctctgaggcccggggcttccggaggtcgcggagatggaattggagcagagagaaggctgcctttgccttcattgtggtgaaagatagtgcg

SEQ ID NO: 786562 - DNA, 100 bp, Homo sapiens
ctcagtggggaggccttcgactggctgcttggggagattgagtccaagttcaaccaagccattaatggtgcaaagcaagccgacagtgacatccctctag

SEQ ID NO: 786563 - DNA, 100 bp, Homo sapiens
gcatctgaagaccatggatcacaaccggaaccgcagggttgccaaggaaagtgtactgcagttttacccgaaagctaatatcgttgcctaccatgacagc

SEQ ID NO: 786564 - DNA, 101 bp, Homo sapiens
agctgattgactacgggaagctgcggaagtatatcctttcgggctctgatgacttcaacctgtacatgtggagaattcctgcagatccagaagcaggcaag

SEQ ID NO: 786565 - DNA, 90 bp, Homo sapiens
acgccagccgcaccatgccgctcctaagcctgcacagccgcggcggcagcagcagtgagaggctccagcccccttttggacatcgttggc

SEQ ID NO: 786566 - DNA, 100 bp, Homo sapiens
tggataaaccacaaaatgggtaatatactataggacagagcgggatgccaccagcttgtccaaagggaagttccaggagctcctggtgggcatcgttgtg

SEQ ID NO: 786567 - DNA, 83 bp, Homo sapiens
agaaattggaacagtgattgatcagattgctgaaacactatgggaacagaacaacatgcctggaattcaaggagccacatctt

SEQ ID NO: 786568 - DNA, 100 bp, Homo sapiens
gccccgagcccggcgcctggctgagtagcaagtgaaccggagcaaacgacttccgatccagtctgcgctgttgcggctcccgtttgggatttgatttgca

SEQ ID NO: 786569 - DNA, 98 bp, Homo sapiens
caagtacctggtttcacaccacgcctggcaatattacaggattcttacagaagcagagattgatgctcaccttgttgctctagcagagagagactaaa

SEQ ID NO: 786570 - DNA, 75 bp, Homo sapiens
ctatgaccggcgtcgagaatttcaactgatcccagctctcactatgtgattaccctgaaagcatttaataacgtg

SEQ ID NO: 786571 - DNA, 95 bp, Homo sapiens
cagaattcacaagatccaatcccttgtccttaaaagactttgtgtggacagtaatgacctcacgtttccgattgcctgctggcagaacctacaat

SEQ ID NO: 786572 - DNA, 82 bp, Homo sapiens
ggatggagaaggaggaggaatcggagcaggacatcgagactttacatggctctgttcacgtcacgctgtgtgggactcccaa

SEQ ID NO: 786573 - DNA, 75 bp, Homo sapiens
attccaacatcctgctagacttgttaaggacctggcctgggccgtcagctactacatccggttcttcatcaccta

SEQ ID NO: 786574 - DNA, 97 bp, Homo sapiens
caacctccacctgttcagcgggcacctcagcaccctcagattgagcttccccaacctctttaagagggggcaagaatgagcccgaaccagagcagcc

SEQ ID NO: 786575 - DNA, 50 bp, Homo sapiens
cagtctttgtacagagagataaaggaagcaaaatgtggattcagcaaaca

SEQ ID NO: 786576 - DNA, 83 bp, Homo sapiens
caccactgtgaggcctacagctctgccggggaggaggaggaggaggaagaggaggagaaggaccttaaaggctttgatccagg

SEQ ID NO: 786577 - DNA, 98 bp, Homo sapiens
aggaagctgctggaaggcgaggagagcaggagccgggtgtgggctgagccctgcctgattgatgctgccaaggaggagtacaacggggtgatagaaga

SEQ ID NO: 786578 - DNA, 100 bp, Homo sapiens
cagctgtagcaaaagtgggaagccaagcctttcctcccgtagcaggacccagtgctccataaaggataatagtttccagtacactatccctcatgatgac

SEQ ID NO: 786579 - DNA, 82 bp, Homo sapiens
ccagacggctcacctgtgcgggatggaacaaaagctggcagagaggctgatgacatcgtgaactggctgaagaagcgcacgg

SEQ ID NO: 786580 - DNA, 100 bp, Homo sapiens
atgtgacaaatcgttcaagacagaaaaggctggacgtgactctggacccagacacggcctaccccagcctgatcctctctgataatctgcggcaagtgcg

SEQ ID NO: 786581 - DNA, 101 bp, Homo sapiens
gggagcggcgttggaggccaccgtttccagatctctagctcctataccaccaccaccaccattacagcgcctccctccagggtcctgcagaatggaggaga

SEQ ID NO: 786582 - DNA, 108 bp, Homo sapiens
ccgcgcgcagggcctgcagcgggagctggacggcgagcgcgagcggcgcgagaaagaacttgctactaccagcaccatgccctaccaatatccagcactgaccccgga

SEQ ID NO: 786583 - DNA, 101 bp, Homo sapiens
cctccgaagtagctgggactacagttgagggagaagacttgcaacaagaagatggacccacaggagaaccacaacaagaggatgatgagtttcttatggcg

SEQ ID NO: 786584 - DNA, 90 bp, Homo sapiens
ctgatgaggggcaggagcctgctggttgtggagatccccaggtctcggaagggtgctgacctggaccgggagaagaaggctgccgagtgc

SEQ ID NO: 786585 - DNA, 100 bp, Homo sapiens
ccacctaattgatttccgggagtccgcaccaggggccctcagggaagagaccctgcaaagatcctgggagaccaagatgtatcggcaagcagtgtaaacg

SEQ ID NO: 786586 - DNA, 90 bp, Homo sapiens
caggagtacgaggtctccagcaggtccaggaggtgcagcccatcaccagttatgacgcggcaggctccttcctcctcctgggctgcaaca

SEQ ID NO: 786587 - DNA, 80 bp, Homo sapiens
cacttccccggggtgtaataatgttaactgagtgttatagttttgccgctggactcttccctcccttcccccaccccatc

SEQ ID NO: 786588 - DNA, 100 bp, Homo sapiens
aacgggatcctctgctgcatagtttcggtcatctaaaggaggttttaaacagtataacagtgaataaccctataccttccaatttgaaatcagaagcaaa

SEQ ID NO: 786589 - DNA, 99 bp, Homo sapiens
ccagtattacaaccacttctgcagtcctggccaagtgaattttgaagattgcaccggtcgacaaaggacagcctatttttccctcgacacccgattcaa

SEQ ID NO: 786590 - DNA, 75 bp, Homo sapiens
gcacgaactgcaggcgcggtggttccccagcagaaccactctgcatcggaactgccttctgttgaagaactcact

SEQ ID NO: 786591 - DNA, 120 bp, Homo sapiens
acgaatacgtgagcccggagcagctggctggctttgataagtacaagggaagcacttggagaatatttagatgggaagaaggagagtgaggaggatcaaagcaagagctacaaacagaaa

SEQ ID NO: 786592 - DNA, 100 bp, Homo sapiens
actcatctactaggcaagcatggagttggcaccccaaaagaaaggaggaacagcacagcatgctgggctctggatttaaagctgagcgcttaagagtgaa

SEQ ID NO: 786593 - DNA, 82 bp, Homo sapiens
ctttgacgccagcttcttttctgtaactaggatttctacctcaaccgcgagacctatgcaaggacggtgtggaccaactcgc

SEQ ID NO: 786594 - DNA, 75 bp, Homo sapiens
cgcgatggccacaacctcatctccctgctggaggtcctctcgggggacagcctgaattgaaagagagtctctctc

SEQ ID NO: 786595 - DNA, 101 bp, Homo sapiens
cgatatgataaagacgatgaagccccctctgatggtggacatggaagcgttcctcacactgactgacggtgacttgaaggagctgggaattaagacagatg

SEQ ID NO: 786596 - DNA, 97 bp, Homo sapiens
tgaccggaggcggcggcggcgagcggttccttgtgggctagctttggcagcatgtaagcagctgtttgccaagaacccaggtcactgctaagaaagg

SEQ ID NO: 786597 - DNA, 89 bp, Homo sapiens
aagaaacaaagcccattgagctccctgtcaaagaggaagaaccccctgaaaaaactgttgatgtgagaactctcaccctgctcctcagc

SEQ ID NO: 786598 - DNA, 100 bp, Homo sapiens
gcttacacggcggtccccacggtcctggtaacccccctgggcgcccttggagtaccgttcggggatactcatatttatgatgcaaggcgattgaattcca

SEQ ID NO: 786599 - DNA, 101 bp, Homo sapiens
cgggcgagcggtggtttggacgccggcggagacgcgggcgaggttggaaaagagactgttcaaaccactgaggatcagattttgaagagagatatgccacc

SEQ ID NO: 786600 - DNA, 101 bp, Homo sapiens
cctggatgagacatttgctacagcatcccacattaagtcaacggtagaaaatctggtgtattaactgtgaaaattttagagctgcatgaggaatgtgccat

SEQ ID NO: 786601 - DNA, 96 bp, Homo sapiens
gttatcaccatcccactccctgtgtccaatgggttgatgatgcaaaactgaatcaactgaggagggaaggcattcgctatgccaggattcagctat

SEQ ID NO: 786602 - DNA, 76 bp, Homo sapiens
caagcatcttctgtcctgaatacagtatctccttaagtatcgtcagtgaagcaggagcatcaatctacagtgtcag

SEQ ID NO: 786603 - DNA, 83 bp, Homo sapiens
gtatggaaagcttgcagaagattatgccagtgaggctgagaatagagtggtggcaatgaccatgagatcttcacagaccccag

SEQ ID NO: 786604 - DNA, 80 bp, Homo sapiens
ctggagagcttgacattctcaaagactggtgctatgaagctgctgctcccggcagatcggcttctcctttgtacgaccca

SEQ ID NO: 786605 - DNA, 100 bp, Homo sapiens
cgggtacagaatccaagagatgagagaggacccaacatggggcagaagcttgaaatcctcattaaagatactctcgacttctgctggatgtgtctaggag

SEQ ID NO: 786606 - DNA, 73 bp, Homo sapiens
gtttctcccggaagtcttcctcgggcagcaggtgggagtgtggattgatgttggcagccgttttgagactgag

SEQ ID NO: 786607 - DNA, 85 bp, Homo sapiens
tcccgggggcgcagggaaggagggcgtccgagtcaacaaccgcttcgagctgtctctgctttctatccgtcaagatgataaagtc

SEQ ID NO: 786608 - DNA, 83 bp, Homo sapiens
cagagtctgcagcagcccgccccgcccggcagcgagcggcgccttccaactccgggagatggtaacctgcacctcaatgtgac

SEQ ID NO: 786609 - DNA, 90 bp, Homo sapiens
ccgcggatccccaagcccgccacgccgcccagcccggccccgcccgcgccggaagagccacgccgaggctgaggggatctggcggtggag

SEQ ID NO: 786610 - DNA, 83 bp, Homo sapiens
acagttacgaggatgaatggggccggctacatgatgtcagagtctgtgggactaacttccgagaagtcaccaccaatcaagag

SEQ ID NO: 786611 - DNA, 99 bp, Homo sapiens
cagggagctgcttggcagtgccagagcccaggccccagagccctgctggagaggaggcagactgaggcagcagtattctaccttgtaaatactgttatt

SEQ ID NO: 786612 - DNA, 82 bp, Homo sapiens
ctcaatatctgtcttcggtggactccttcggcagtccacccaccgccgccgcctcccagccaaaacagagtggagtacgaga

SEQ ID NO: 786613 - DNA, 100 bp, Homo sapiens
aaaaaggtttcaggtggagcagatcggagagaataaataccgggaaccactcgttttgactattattttatcactctttgtgaaacttcacaatgttcgg

SEQ ID NO: 786614 - DNA, 50 bp, Homo sapiens
ggagtatttcctgaactgtgtgggtagtatgtaccaaaccaaagccgtca

SEQ ID NO: 786615 - DNA, 51 bp, Homo sapiens
caaacctgtaccagcagctggaccagaagtctggtccagaatctgttccac

SEQ ID NO: 786616 - DNA, 90 bp, Homo sapiens
ggaaaactaagcagtgatgaagacctcgaaataattgttgatcaaaagcaggctttctctggatctggcaatagactggatggaaagaag

SEQ ID NO: 786617 - DNA, 100 bp, Homo sapiens
cccgcagaacctccacagtcaagaggacggggtgagcccctccagactccgaataggagatcaagagtttgattcattgcctgctttactggaattctac

SEQ ID NO: 786618 - DNA, 116 bp, Homo sapiens
tgaacagtcgtgggtgcccagctgggtggatgtgactccagtcagcagagcagaagccaggagaggttttggtcttggacctgatgaccttcgaggatgtggccgtgtacttctcc

SEQ ID NO: 786619 - DNA, 95 bp, Homo sapiens
agaagagaacagctcatgaaaaagaaaagtatcagccgtcctatgataccacaatcctcacagagggaactctaatgatccaggacaaagaagtt

SEQ ID NO: 786620 - DNA, 51 bp, Homo sapiens
gttaaggattccaagtaactcttatttgaccagagtctcactgtcgcccag

SEQ ID NO: 786621 - DNA, 95 bp, Homo sapiens
ggaagaataggcgtagttggaggctgtcaggaaactggcaagggaactgaatttttcagtggatgaaatcaatcaaatacgtgtggaaaatccaa

SEQ ID NO: 786622 - DNA, 90 bp, Homo sapiens
tcaacaacgaacttaaagagatgaatggtgagaccacaaaggccccacagtatcaaatatccgcctggctggattagagtatgttctgca

SEQ ID NO: 786623 - DNA, 75 bp, Homo sapiens
ggcagttgttcgaattaactctcccaattcaaagaaatacaggtatcaggatgaagatacacctcctcaagagca

SEQ ID NO: 786624 - DNA, 100 bp, Homo sapiens
tggacactgaaaccaccgtggaagtcgcctggtgtgaactgcagggtagtttgaagtttgagtatcctcacgacatggcagctggattcctgagagagag

SEQ ID NO: 786625 - DNA, 75 bp, Homo sapiens
gccggagctgaccccggaggaggagcagaatgttcgcatcttaccacatacagttctttacatggctgattcaga

SEQ ID NO: 786626 - DNA, 83 bp, Homo sapiens
cccatgaagatggaactctttggcggagacaaacacccaaactcctttatccccttggcaaaatcctgacagatgactttgca

SEQ ID NO: 786627 - DNA, 83 bp, Homo sapiens
ctgccagtcgccgccctctctcccgcgcgcgcccggcgcttcggctccgctccctgtgcggtggttattaacttggtgatgct

SEQ ID NO: 786628 - DNA, 82 bp, Homo sapiens
ccaagctatgagtacctctataatttggtggactgctgggacgggcccgatgggaagccggtcatctaccatggctggacgc

SEQ ID NO: 786629 - DNA, 100 bp, Homo sapiens
cagcaagaacgtctacaaagccgtaggccactacaacgtggctatcccctctgacgtctcccacttccgcttccattcatggctccgatcttcatcttga

SEQ ID NO: 786630 - DNA, 100 bp, Homo sapiens
ggctgggggggggaaagacgaggaaagaggaggaaaacaaaagctgctacttatggaagatacaaaggagcagttcagagccccagttgcagacgacttg

SEQ ID NO: 786631 - DNA, 100 bp, Homo sapiens
aatagctcattttagtagagggcaataaatgccacatgagatgatcacctcagcagaaaactgtccttgaatgggcaagagggcacatgaagtacggcgt

SEQ ID NO: 786632 - DNA, 87 bp, Homo sapiens
ctggccacctccatagcaagcagagtggagcctttcaggctggcatggagagcttaaggggcaactgaaggagacacactggccaag

SEQ ID NO: 786633 - DNA, 75 bp, Homo sapiens
ccttgctcccatccctgcagcatgaacaagacccggaacccgctggtggccgtgtattacaccaaccgggccttg

SEQ ID NO: 786634 - DNA, 130 bp, Homo sapiens
atctgcgaacacagtagtggaagatgtaaagcaatatttcgagcagtttggcaaggctgaccggttccctgatgtgttacctgcttctgctactgatccaaactgcagaacttctcattcatccccaagg

SEQ ID NO: 786635 - DNA, 100 bp, Homo sapiens
ccagcggagcgaacccgagagcgtggagcgggctgggccagggcacctgtgctggttgcacttgctttgattgaatgtggaatgaagtacgaagatgcag

SEQ ID NO: 786636 - DNA, 82 bp, Homo sapiens
cttctccactttcgccagcccgtgccgcgagcgcggcctgcaggagtgggaagtggtggttcaagtggaggatgatggggat

SEQ ID NO: 786637 - DNA, 90 bp, Homo sapiens
cgccaacggccgctgccgcagccgcgagggcggctacacctgcgagtgcttcgaggacttcactgccctgggcgctgcctatggcacagc

SEQ ID NO: 786638 - DNA, 75 bp, Homo sapiens
ggtgggatcgttggctatgtaaaaacagcaatggactcttgtggctgacttcactcaccatgctcacactgcctc

SEQ ID NO: 786639 - DNA, 100 bp, Homo sapiens
ggagcacaggcttgtccggggagcagtatgccggaagctggttttcaggccacaaatgctttcacagaccagcatctcagacatgtcgaaaaagatgttt

SEQ ID NO: 786640 - DNA, 100 bp, Homo sapiens
cagcgacagagccaaaatcagagctggaacctgaggagagagacctgcctagagctggaacgttacctccagagcgagccctgctatgtttcagcctcag

SEQ ID NO: 786641 - DNA, 100 bp, Homo sapiens
ctgtattgtcctgtggaattttcaaaggagatcgtctgtgtcccttcatacttggaattacacttccccaagctgctggggctcctttttcccctcctgg

SEQ ID NO: 786642 - DNA, 103 bp, Homo sapiens
ccttttgtgactctggattcaaacataccactggatcttctcacacttgtattctttctgatcaataccagatgcaagatgtgttggagaaatctgatcatct

SEQ ID NO: 786643 - DNA, 75 bp, Homo sapiens
agcggaacagccacagcagcctcccaaggagtctgcaagttggcctcagctgttgaagaacgctctgcagagagc

SEQ ID NO: 786644 - DNA, 75 bp, Homo sapiens
ggacagatggcacagaaaccgctgcgcctacaccctgtagaccttgaatctgcagaaagcagctccgagccccag

SEQ ID NO: 786645 - DNA, 90 bp, Homo sapiens
aggaggaggtggcggcggcgggaagattgagtgttgaaaagatagacctgaagggattatcacacacaaaaaatgacagaaatgttgaat

SEQ ID NO: 786646 - DNA, 83 bp, Homo sapiens
aagaaaacctcatgaatagcaatcacagagactcggagagcatcactggaaccctaaggactctgcaatatgaataattccct

SEQ ID NO: 786647 - DNA, 50 bp, Homo sapiens
aaggaattacataacatcaaacgtggagttggcgtggacctggatgaaaa

SEQ ID NO: 786648 - DNA, 51 bp, Homo sapiens
gcagtacctgaccactctctcccaggccatcatgcagaagggggatacaaa

SEQ ID NO: 786649 - DNA, 90 bp, Homo sapiens
cggagctggagctggagctctcggaggataccacctcctcaagctcctccagaagtttggcaaggtaaagcagtttgacttcctcttcca

SEQ ID NO: 786650 - DNA, 100 bp, Homo sapiens
cttaatgaagaacaaagaaaacagttacaggacatagcaactctggctgatcaaagaagagcagcccatggtttcagcgcaagtacctctaccaaaaagt

SEQ ID NO: 786651 - DNA, 50 bp, Homo sapiens
cctcattgactacgcccgcatgagagagctgcctgtgtcagggaatctgc

SEQ ID NO: 786652 - DNA, 100 bp, Homo sapiens
tcaggaggccctggctatctatccaccatgtgggaggaggaaaatcatcttatcagacgaaggcaaaatgtatggcatagagaaggagacgtgccagaag

SEQ ID NO: 786653 - DNA, 88 bp, Homo sapiens
aagaatctatacacagccatgccccttccgattgggagggacaagattgagatggcacagaagctattgaactctgacctgggtgagc

SEQ ID NO: 786654 - DNA, 75 bp, Homo sapiens
ctttgacggtggatttggttgcagaccaggttctgaatcccatgctgggcaggctaggcagctggaagagaaaga

SEQ ID NO: 786655 - DNA, 100 bp, Homo sapiens
atccagtatatcacgcgcttctgcaatccaagccgactgatgactggagaggatggctactatttcaccaatctgatattgaaatggattccaggcgtgt

SEQ ID NO: 786656 - DNA, 75 bp, Homo sapiens
gctgcctcgagttaatcagttctggttatgggaagctggctggaagcagcggtactacaagaacaaatttgatgt

SEQ ID NO: 786657 - DNA, 100 bp, Homo sapiens
ctttgtggtattaaacatctgcattcagctggtataattcatagagcgcatattaaatttcctattgactacccctattcaccacctaccttcagattct

SEQ ID NO: 786658 - DNA, 51 bp, Homo sapiens
cctgggggcaccgctgccgttccgagctctggattaatcgaattacagctg

SEQ ID NO: 786659 - DNA, 96 bp, Homo sapiens
aacaagactgtccttcggacaagttttaggtagcccagccatgacccataggaatctgacttcctccagtctgaatgacatttctgataaaccgga

SEQ ID NO: 786660 - DNA, 78 bp, Homo sapiens
acagctgcagtctctgagagaattcacgagcaggttcgggaccggcagggtagaagagcagaggatggctctgtcatt

SEQ ID NO: 786661 - DNA, 74 bp, Homo sapiens
tagtcctgtgctcaacattgcttatcgtacaagccagctgccatgttgtgagcacataccacatagctccatgg

SEQ ID NO: 786662 - DNA, 88 bp, Homo sapiens
ccttctctgtcagctctttccccgtcagcatcccagccgtgctcacggaaggaagcagccaccctcgccatggcctccccgcccgcct

SEQ ID NO: 786663 - DNA, 100 bp, Homo sapiens
caggatccgagcgttctgcacaccgaggaaatgcgcttcctgagggagtgggtggagagtgatcggagggtatggttggcatggaattgaatttcatctg

SEQ ID NO: 786664 - DNA, 100 bp, Homo sapiens
ctgactgcaaaggagacccaaggaacagtgccaagttagatgccgattacccacttcgagtcctttattgtggagaaataacatctgctttgctgccgag

SEQ ID NO: 786665 - DNA, 75 bp, Homo sapiens
ggacggtcggactcccgcggcgggaggagcctgttcccctgaggctggttggaaggaaaatcatgcaacattcat

SEQ ID NO: 786666 - DNA, 98 bp, Homo sapiens
gacgctccaagaggctcctcagtgtgggcgagtaaaatgccctgcgtgtgagaagcaggtttttcgttggaatatacgttgcacatttatggcgattc

SEQ ID NO: 786667 - DNA, 100 bp, Homo sapiens
ctgcatatggccagtttggccaaggagatgtacagaatgggccaagctccactgttcagatgcaaaggttgccaagctgttctgcctttctggaatggtg

SEQ ID NO: 786668 - DNA, 75 bp, Homo sapiens
cttaaagtgtggtctttagtggaaaaaaagaacccatcttttacttcggtgatgtggaatactctgtggatgaga

SEQ ID NO: 786669 - DNA, 74 bp, Homo sapiens
ggggaaaaagcggccaaagaagtgaagctgctgctactcggtgatttgtggagctatgatttcttcagtggtga

SEQ ID NO: 786670 - DNA, 74 bp, Homo sapiens
ctgctagaggaggcgttgcaggacagcccccagttttctggatatgccgcagaaggatccgtgccagaagcaag

SEQ ID NO: 786671 - DNA, 100 bp, Homo sapiens
gaagaatcaatgctttggcccctggtgacatgtacatggtgtaatgacagggtctctctgtggtggagcaagagaaactggacaacctgatgctggagtt

SEQ ID NO: 786672 - DNA, 78 bp, Homo sapiens
ggggtcggcgccgagtgggaggatggcggaaatgcctgaggaaacccagacccaagaccaaccgatggaggaggagga

SEQ ID NO: 786673 - DNA, 75 bp, Homo sapiens
cgggattccttgccccagttgcaggtaattgctgccatggaaacacaactgtctaatgggccaacttgcaataac

SEQ ID NO: 786674 - DNA, 98 bp, Homo sapiens
ccattggctgtttcaataagtatttctggaagtagtcgaccatgtttggatttcttacaagaagtcacaatgtgcccaagcacgtgtgggaagcgggc

SEQ ID NO: 786675 - DNA, 98 bp, Homo sapiens
aaggtgaaggcgctgcagtgcgccctggcgctggagatcagctcaatttctcactatgtgcaatagacactttggcagtgttgtggcacaaaccattc

SEQ ID NO: 786676 - DNA, 82 bp, Homo sapiens
cagggacagcacctcatcccctggatgggggaccacaagatcctcatcgacagaacctgcaaccatggtcgtgccactagcc

SEQ ID NO: 786677 - DNA, 100 bp, Homo sapiens
gagtacccgccaacaagcgggaccgagcaggaatccgtatctgggaacaggtgctggacgtcattgctcctccttatacctctgacttcgtgcaactttt

SEQ ID NO: 786678 - DNA, 90 bp, Homo sapiens
cacaaacagcacagctccatttggcctgaagcctcgatcagacacgaagatcgattgagaagttattagaatgggaaaacaataggttat

SEQ ID NO: 786679 - DNA, 100 bp, Homo sapiens
cgagcactaattgaaggacaattcatggccaagaggattcacgcagaaggcctgggctatcgagtcacagcacagtcagcagcctccattcaagagttga

SEQ ID NO: 786680 - DNA, 75 bp, Homo sapiens
taagttgggagaagggaaggctggaggaactttgcatacagcaataccaagaaggagggtgacctgatagctgct

SEQ ID NO: 786681 - DNA, 90 bp, Homo sapiens
tctcttacgtctgcggaagtgcagctgcctcagttcttagcgcagaacaaaatccagtctcatagcagaggagaatataatgtttacagc

SEQ ID NO: 786682 - DNA, 80 bp, Homo sapiens
gtatggaaactcatcaggacggaagcacaggggccactcagagtcgcccgagaaagtatgtattcccgtgtgccagagtg

SEQ ID NO: 786683 - DNA, 51 bp, Homo sapiens
attttgctctgcgaaacatcatccagaagatctgaacagaattaagacgaa

SEQ ID NO: 786684 - DNA, 100 bp, Homo sapiens
gaagatgaggaggtcgctgagagctgggaagaggcggcagacagcggggtgtgaccatgaagctcatggatgaggtcgccgggatcgtggctgcacgcca

SEQ ID NO: 786685 - DNA, 100 bp, Homo sapiens
atgaacgggagcagtatgtggaccgagcccggtactcagccttttaaaaactggagccaaaattgcctggaaaagagcagtgagaggagtccgggagatg

SEQ ID NO: 786686 - DNA, 100 bp, Homo sapiens
ctgctgtgggcgctgctggcgctctggctgtgctgcgcgacccccgcgcatgctcttcaccaccaggagtgttccttgagaaggactatgagatttaccg

SEQ ID NO: 786687 - DNA, 100 bp, Homo sapiens
aaaattacgaactcactgagctggaagtcattcaacgggaattgaatagggatcgtgggactttaccagatcggtttgtaataacacctcgaagacgcta

SEQ ID NO: 786688 - DNA, 100 bp, Homo sapiens
aagaagactcttgtcacactaattgccaacaacaatgctgtcggcagtactcagtggaagggtgatattatgacactgacactgctattttgaaacctgg

SEQ ID NO: 786689 - DNA, 82 bp, Homo sapiens
ccgtcatctcctgccccgccgaggcttgaccccccatcatcttcgtttcggacagagcaaacagcaacaaggagctgggtgt

SEQ ID NO: 786690 - DNA, 109 bp, Homo sapiens
agcttttaaagtgtttgaaagattttgcattcaacattcaggctatcaggatcagaagccatcagttatttcccttcaaaagcttattgctagagaagttgctaatgag

SEQ ID NO: 786691 - DNA, 82 bp, Homo sapiens
cttcacctgtgggtttcacgtggacgaagactgcctcaggattccttcaaccaaaagagttttaaaatcaaagatgggaaaa

SEQ ID NO: 786692 - DNA, 75 bp, Homo sapiens
aggcagggccagcagcaggcgggagccctgggcgctgcctatggcacagccaagagcggtaccggcattgcggcc

SEQ ID NO: 786693 - DNA, 101 bp, Homo sapiens
ctggcctctcacctcaacctggccatgtgtcatctgaaactacaggccttctctgctgccattgaaagctgtaacaagaaacctgctcctccaaagccaga

SEQ ID NO: 786694 - DNA, 75 bp, Homo sapiens
gtgccctggggctgagccctcaggtatcagggctcatggcgactgctgcagcatcaacccgaagaccgggggcgt

SEQ ID NO: 786695 - DNA, 50 bp, Homo sapiens
cggggaggtcacctgacgaggagagtgaagatagtccaagtcctaagaga

SEQ ID NO: 786696 - DNA, 82 bp, Homo sapiens
gccttcagtccttagggacaccgagtgacacgcaggagcttcgggacagcctgtgtggaaacaggaagagaactagaactgg

SEQ ID NO: 786697 - DNA, 100 bp, Homo sapiens
tgacttcctgtgcttagaaggcaaagaattcaaccggctcatccgcaacgagaaaggcgagggagcccacctacgatgcagaattccagcacttcttgag

SEQ ID NO: 786698 - DNA, 80 bp, Homo sapiens
gccgcctctgtattacttaccaggtttttagaacttcagccataaaaatgggcagaattttccttgatcatatcggtggt

SEQ ID NO: 786699 - DNA, 97 bp, Homo sapiens
atttccaccagttcatgctccagcagcagctcagtaatgcccagctgcatagcctggctgccgtccagcagaatttaattgtcctgaatccactcac

SEQ ID NO: 786700 - DNA, 100 bp, Homo sapiens
ggaaggaaatcatgtcaagcgaagccttgaaaaagctgccctgagacggtgtcccgccgaaagctccagtggctgttggacaattatgagacagcagaag

SEQ ID NO: 786701 - DNA, 100 bp, Homo sapiens
agagtgatgcaagaagtgaatccccccaaccagcaccagactggggctcccagaggccatttcataggattgttcagattccattctgtggggaaattga

SEQ ID NO: 786702 - DNA, 100 bp, Homo sapiens
aggcggagaaggtgtacatcgtgcatggcgtccagactgtgccctgtccacggtgcctcctgcatgtcctgctgccctgagctgtcccgagctaggtgac

SEQ ID NO: 786703 - DNA, 89 bp, Homo sapiens
gcccagcacttggagcgtgaggaagcctgggccgaggccactggtgcatatgttcccgggagggataagccagacctgccaacctggaa

SEQ ID NO: 786704 - DNA, 100 bp, Homo sapiens
gatggcccacaagcagatctactactcggacaagtacttcgacgaacactacgagtaccgaaggggacatcagaaaagtgtgaagcatgagaagggttag

SEQ ID NO: 786705 - DNA, 100 bp, Homo sapiens
cggccaggagctggttctggtggcggcggggccgcgggagctggcgcggggtccgccgggggaggcgggttatctaccttgcctgctcctatgccacagt

SEQ ID NO: 786706 - DNA, 75 bp, Homo sapiens
ccacaaacttgaagatggatatcagctacagactttcctgagtcagggtggagccagccatcctgagacgtccgt

SEQ ID NO: 786707 - DNA, 90 bp, Homo sapiens
atttaatctctcctgtaagaaatggagctgtcagacgttttggtcaaacaatacaggaattgaatgatctggcacgggaccctccagcac

SEQ ID NO: 786708 - DNA, 90 bp, Homo sapiens
ggccaatgttcctgatagttttaatgaagggggacttgatctcatcttcatgccaggccttgggtttgacaaacatggcaaccgactggg

SEQ ID NO: 786709 - DNA, 51 bp, Homo sapiens
gatcaagttctcgtggagtcagacaatgagagatcgagatggtgatcatgg

SEQ ID NO: 786710 - DNA, 96 bp, Homo sapiens
actcgtgtccatcaaaatccagatgctggatgacacccaggaggcatttgaagttccatatgcagatctcaatcgccacgtggatgccttgaatgc

SEQ ID NO: 786711 - DNA, 74 bp, Homo sapiens
tgtatttgtgttgttactgatgcagagatacagcaaaagagtctacataggaataagacgagttggaagaagac

SEQ ID NO: 786712 - DNA, 100 bp, Homo sapiens
gttagcagtcacgacctccagcacagagctgaggaactgcgtgtggagtcagcccagtctggatgcacaggaggatgctggcggcacagtgagtgaggcc

SEQ ID NO: 786713 - DNA, 80 bp, Homo sapiens
agacaaagaaacactctccttctgccacatttgttttgagctaaatattgaggacacatcaactggatcattctgctcat

SEQ ID NO: 786714 - DNA, 100 bp, Homo sapiens
gatgtgacctgttcacgcaggggaaacttgaacattcgcaggatcatggggttgacagcagcattttccagaatcctaaaaagcttcatctaactattgg

SEQ ID NO: 786715 - DNA, 82 bp, Homo sapiens
agcctctctcatcttgggaatctgcgtcagaagtcactcgcagtcccgtcagcccaggagtacgagagggcctccaaagtgg

SEQ ID NO: 786716 - DNA, 100 bp, Homo sapiens
ctccgccatgcaaggctggcgcgtctccatggaggcaagtatatcgcgtcaacacagcgacctgacgggacctggcgcaagcagcggagggtgaaagaag

SEQ ID NO: 786717 - DNA, 80 bp, Homo sapiens
tcctcctgcatctcctcctgctccccatcgccatcccctatgcaggaactgtggctgcaccatctgtcttcatcttcccg

SEQ ID NO: 786718 - DNA, 80 bp, Homo sapiens
tccaaatttccttttccaactaaggtcagatgtaccaacagtaccagcaacaggccggctatggtgcacagcagccgcag

SEQ ID NO: 786719 - DNA, 82 bp, Homo sapiens
cccgacggcccgcccctcaaggacaacctcggcctgagacaccggaggaccggtgcagggctcgcggcctggcaagaatgta

SEQ ID NO: 786720 - DNA, 101 bp, Homo sapiens
cagggattctctcttgctgcctcagttgctaggggaagagactgggccttagcagggaattcggcaccggttgagaggtagtgccaatgctgtgaggatcc

SEQ ID NO: 786721 - DNA, 100 bp, Homo sapiens
aatgaattaattcgagaaagaagtgaaaagagtgtagaggtgacatttgctctgaactggatgatacgaatgatgtcagatttggaatctaacatcgtgg

SEQ ID NO: 786722 - DNA, 100 bp, Homo sapiens
cagccttcccagtagctgggaccacaggtaacacaagtggcaagacagccgggaacccctaccccatccccttattcagcacatgaaataaacaaggggc

SEQ ID NO: 786723 - DNA, 50 bp, Homo sapiens
cttccgttcttcacccctacaccttggagcaccagaatttcctgagtttg

SEQ ID NO: 786724 - DNA, 83 bp, Homo sapiens
gcgccggctatggccgtgccctggggctgagccctcagagcctcattttacagatgaggaaactgaggctggctgcgtgctca

SEQ ID NO: 786725 - DNA, 90 bp, Homo sapiens
cccagagaggggagccggcgaggatcaaaatcttcgaaggaggctgccactgggcccaagagatgggtgctctcctaggcgccccttccc

SEQ ID NO: 786726 - DNA, 75 bp, Homo sapiens
tcacaccttcagtccttcgagcaagtcaaaatgcagatcttcgtgaaaacccttaccggcaagaccatcaccctt

SEQ ID NO: 786727 - DNA, 90 bp, Homo sapiens
cgcgcttcttccccactcccgagacagtccctgaaaaacagctgaatgatattgaagattgtgacctcaatgtggtgagactgtgttttc

SEQ ID NO: 786728 - DNA, 100 bp, Homo sapiens
ggcgagtggaaccgtaaaagccccaatcttagcaagtgcggggaagagctgggtcgactcaaggtgtaaagaagacattccagtgtgagctttgcagtta

SEQ ID NO: 786729 - DNA, 75 bp, Homo sapiens
caggcagagtgctgatgtgaaaaataccacgacaaaaccaccctaagctacgaagtgaagagtgtcctcggaaag

SEQ ID NO: 786730 - DNA, 98 bp, Homo sapiens
tctgcttttcaagtatgccaccaacagtgaagaggaagctgcagtaaaggaagatgaagaagaagtttcagataagggcagtgattctgaagaagaag

SEQ ID NO: 786731 - DNA, 75 bp, Homo sapiens
ctcctgttcctggcggcgtagggcccatgacagttgcaatgctcatgcaggctggtgtgcaatggtgtgatcttg

SEQ ID NO: 786732 - DNA, 82 bp, Homo sapiens
acgtccctcaaaccttgcttctaggagataaaaagctctaagcgaaagacatgaggcctcagcctgaaatgaggttgttttg

SEQ ID NO: 786733 - DNA, 100 bp, Homo sapiens
ttttggaggccggggccgcgctgagggcgcccagctggtacggttcctggagcagcagaacaagatgctggagaccaagtggagcctcctgcagcagcag

SEQ ID NO: 786734 - DNA, 98 bp, Homo sapiens
aaattttttgctgatggagagctggaatctatgggattttcagctcgatacaatttcacacctggccaagaaagcagagaactcatcaaatgaggagg

SEQ ID NO: 786735 - DNA, 100 bp, Homo sapiens
agcctattatgcccagacaagtccccagggaatgccacagcatcctccagcacctcaggagttcatgatcaagtgttgcccacaccaaatgcttcatcca

SEQ ID NO: 786736 - DNA, 87 bp, Homo sapiens
tgacttgtttgatgttcgtgactttggaaaggaactgcaagcacatgttgaccagataactgaaatggcagcagtaatgaggaaagc

SEQ ID NO: 786737 - DNA, 100 bp, Homo sapiens
aagctgcctctgaggatatttctggctgtcgccaactccatggctttccaggtccaagggatgtccttcattgcagcagtactcattctcaatttggaag

SEQ ID NO: 786738 - DNA, 100 bp, Homo sapiens
aatagaagctgtggatgaatttgcttttctggaagtaaacctatgatggacttgttgatattcctttgtgcacagtatcacttaaatccatcaagttaca

SEQ ID NO: 786739 - DNA, 83 bp, Homo sapiens
cttctgtcatagaaactcacatgagacaaatgcgctcagcttcaattgcaaggagtaaataatgctgaaaaatttgactatgt

SEQ ID NO: 786740 - DNA, 75 bp, Homo sapiens
tccaagtagctgggactacagacatgcgccagcacgcctgacttttgcagatcagatatttggaatatttaactg

SEQ ID NO: 786741 - DNA, 87 bp, Homo sapiens
gtagggaaatggtcgtgctttcggtccccgccgaagtcaccgtgatcctgttagatatcgaaggattgaaagaaggtggcaagagga

SEQ ID NO: 786742 - DNA, 100 bp, Homo sapiens
agcgtcgccgctatgaagaaagtggttcaacagctccggctggaggccggactcaaccgcgtaaaaccaaatatcatgcagcttcgtgacagactttgta

SEQ ID NO: 786743 - DNA, 82 bp, Homo sapiens
atggaacatctctctccagagcatgaggtttttagaacttcagccataaaaatgggcagaattttccttgatcatatcggtg

SEQ ID NO: 786744 - DNA, 100 bp, Homo sapiens
ggtgacgaggacctagactgtgacaacgaccacgtctccaaaatgagtcgcatcttcaacccccatctgttggatttggtctagggagtcccagaaagaa

SEQ ID NO: 786745 - DNA, 75 bp, Homo sapiens
gcagattatatcgcatcctatggctcaaagaaagatgattatccaagaaatatttttcttcatggccctgatcag

SEQ ID NO: 786746 - DNA, 75 bp, Homo sapiens
ccgcaccccaggatggatcccccagaggtggcacaagaatggctcaactctccaaatagagagaatttctatcag

SEQ ID NO: 786747 - DNA, 100 bp, Homo sapiens
atccaaagttaatgccaagaagcagccgccagttgggatcaaatgtgagcctatggatcaagagccatcatcaaccactttaaccccaaaattgagtcct

SEQ ID NO: 786748 - DNA, 98 bp, Homo sapiens
gcggccatctggggatattcccacaaggatgaggtcattaaggagtccaagcaggagcacaaggatgtgatgtgaggcaggacccacctggtggcctc

SEQ ID NO: 786749 - DNA, 88 bp, Homo sapiens
caataaaaactgctggaggatcaagaagggcttcgtgcccaacatgcaggacaaccttaaacttccaccacaagaggaatataaagag

SEQ ID NO: 786750 - DNA, 75 bp, Homo sapiens
atgccctgcagtacctgcagaaggtctctggagacatcttcagcagaatccacactggtgatagaccatacaaat

SEQ ID NO: 786751 - DNA, 83 bp, Homo sapiens
cttggcccttgttcccccaaatgtctgactctgactctcggactgagaaacgcaaggaatgtgggtgccggcaggacaggcga

SEQ ID NO: 786752 - DNA, 90 bp, Homo sapiens
ggcgtaggaggcggtgcctctgcagcaagcgtggggcgcgggaacccgagcaggtgaagcagatcctccgcaagcgccagatccgtccac

SEQ ID NO: 786753 - DNA, 89 bp, Homo sapiens
ctaaaagagagggagagtgatctttctagcaaaacacagctgttacagcatggcacattacacttctgtggatttaaagtccttgcccc

SEQ ID NO: 786754 - DNA, 89 bp, Homo sapiens
aagtcaagcccctctggcccaaaggctggatgcaggccagggacaggtgcctggtgctgctcttcctaaccctctcaacatgctggggc

SEQ ID NO: 786755 - DNA, 100 bp, Homo sapiens
gtctgtacctactgatggtgctgtaaccacctcacagattccagcttcggaacaagagaccctggagtctccaagagcttttagattaccccggggagga

SEQ ID NO: 786756 - DNA, 74 bp, Homo sapiens
ccatattctggaatgacgtaaaagaccctgtctcaattgaagaaagagcggcgggcaggaagacctatgccatg

SEQ ID NO: 786757 - DNA, 100 bp, Homo sapiens
agctcgtattccgtgtgccatgaactgtgtcaagggctccaagtgccaggtaaaagcagctgttaagtatgcccttagcgtaggctaccgccacattgat

SEQ ID NO: 786758 - DNA, 83 bp, Homo sapiens
gtgcccaccagctccccatcgcagaggccatgctgacctacaagcagaagagagacagggtttcaacgtgttagccaggatgg

SEQ ID NO: 786759 - DNA, 99 bp, Homo sapiens
tctgtgcagtggcacctgcgcgaagctggccaaagcctgcccagacggctcacctgtgcgggatggaacaaaaggaacgtgttgtgggctttcacgtac

SEQ ID NO: 786760 - DNA, 100 bp, Homo sapiens
cgctcccgggatcatggtgttctacttcaccagcagcagcggaaattgacaatggcccttcagctatgctaggtctataatgggaagtgtcacagttcgg

SEQ ID NO: 786761 - DNA, 98 bp, Homo sapiens
attgcagccagcatcaacccagccacagatatgatggacgtggtcacctgcatgacctttctgagtacgatgctgagtattccacgtggaacagagat

SEQ ID NO: 786762 - DNA, 98 bp, Homo sapiens
ctgcagatcatcctggcgatctacttcctctggcaggttatgcaagtcgtccgagagcaaatcactcgagctttgccctccaaacccaactctttgga

SEQ ID NO: 786763 - DNA, 83 bp, Homo sapiens
gtccaagatgcagcaggtcggaggaaacagccagaccgagagcagcctgccggggcggagcagcccctgtcaaagggaacagg

SEQ ID NO: 786764 - DNA, 75 bp, Homo sapiens
aagagtcttgtccacagctggcaaattcagtgcagatcagcccccattcactggggagaatagaaagaaaacaat

SEQ ID NO: 786765 - DNA, 90 bp, Homo sapiens
tgccatggccttctacgttgtgaaaatggtttgggccccatggtatccctgtgacagtatttcccaaaagggaatataaggataaaccag

SEQ ID NO: 786766 - DNA, 90 bp, Homo sapiens
tgatgacagcagagagtggcagggctgaggacccaaagtcatttcccaggctggcggagagcatgatgggcccacctcctggtatgagac

SEQ ID NO: 786767 - DNA, 74 bp, Homo sapiens
gggaacataggacgacagttagctatgagtataagactacctcccaaactgaaacagaatgaagtagctaatgt

SEQ ID NO: 786768 - DNA, 98 bp, Homo sapiens
taaagagaccggcaaagttcacgtgactgtggatctcaagtactaccggccaactgaagtggtggccctcatgacactgacgctcttcccggtccggc

SEQ ID NO: 786769 - DNA, 96 bp, Homo sapiens
aacttaaaaagcagtctaaacctgtgaccacccctgaagaaattgcacagatgacaagagcacctcaaaggcagcagcctcaaggagcagccatgg

SEQ ID NO: 786770 - DNA, 53 bp, Homo sapiens
ggagttgccgcagccccaggctgagacagattctcgccctgttgcccaggctg

SEQ ID NO: 786771 - DNA, 90 bp, Homo sapiens
gccggccagaagcgggcggcgcgggggagatggtggttgtgtcaaaccgattggtgacatctccatgctgtattgtcacaagcacatatg

SEQ ID NO: 786772 - DNA, 90 bp, Homo sapiens
ttcttgtcaactgctcacgacagaaggcgtctcatggcgttggaataccggctctcagcggctagctgcggtgcaaccctgggcagtttg

SEQ ID NO: 786773 - DNA, 83 bp, Homo sapiens
gtttttctcagaagagaattccacaagtgagaaagatcagtctaaagaaaaggagaagaaagtgaaaaaaacaattccttcct

SEQ ID NO: 786774 - DNA, 96 bp, Homo sapiens
ggctccaccgaggccatttaccggcgctacagcaagttttttgacctccagggtgccaagtaccggggctccatccatgacttcccaggctttgac

SEQ ID NO: 786775 - DNA, 100 bp, Homo sapiens
cattgccgacggtgaacgagcgggacacggaaaatggtaatactgaacaacctgtccaaactagcaagattggacttggaagaagagagtatcagagttt

SEQ ID NO: 786776 - DNA, 74 bp, Homo sapiens
caggtcccggatagcgagggcggccgcgccggctccagggtgagcttgtcggccacagactgctacattgtgca

SEQ ID NO: 786777 - DNA, 98 bp, Homo sapiens
ggaacccaaacccgtcaatcaagtctacactgttcaaataagacccaatgtctgtggatcacgttataatgcttactgttgccctggatggaaaacct

SEQ ID NO: 786778 - DNA, 90 bp, Homo sapiens
ggagataaattcccggaaccgcgattcggcgtgtcaggcatatggctacccattctccccagaaatctcaccagtgtgctcactgtgaga

SEQ ID NO: 786779 - DNA, 75 bp, Homo sapiens
tgctggtacagagccccacacaagtgaagatggttgcggaaagagtagctgcagaaagggcagaatcttgtggca

SEQ ID NO: 786780 - DNA, 100 bp, Homo sapiens
ggacatcccctgcagcctcctctcggagtgtttggctgccccacaactgtggccaacgtggagacagtggcagtgtcccccacaatctgccgccgtggag

SEQ ID NO: 786781 - DNA, 100 bp, Homo sapiens
tgtgctgcgcgacccccgcgcatgcccatgactgaagagttgctgaaacaacaaaagctgaattcacatgagaccactataactcagcagtctgtatctg

SEQ ID NO: 786782 - DNA, 82 bp, Homo sapiens
gtcgaggcttttgcggctccggcgtgccggaaagtggttggaggcaaagtaaagaagcccggtaaacgtggtcggaagccag

SEQ ID NO: 786783 - DNA, 100 bp, Homo sapiens
gggggagctgcgacgcgcaagggctgcggagccgcgggccggcgagcgcgtcgccaccatgtttatacaacaaccagatcaccgatgtcggagccaggta

SEQ ID NO: 786784 - DNA, 83 bp, Homo sapiens
ttcaagccaagagagttaaaactaaacatctttgctattgcctctacagacccaggagctcgaggccatgagcagatatacca

SEQ ID NO: 786785 - DNA, 82 bp, Homo sapiens
ctagaacccagcgcaggagtaaattgaaagaatcacttggctaactatatgtcagaaagcatcagcttttctcgatggaccc

SEQ ID NO: 786786 - DNA, 98 bp, Homo sapiens
gcatggccaagtccagatatatggagctctacacgtatcctcctgcctagcgcagggggagtcggtgaagtacttcctggacaacttggaccggatcg

SEQ ID NO: 786787 - DNA, 75 bp, Homo sapiens
gccaggtttactggagtaggtgttagtaagatgtaaggctacgaaaacttgctggagagaaggaagaactactgt

SEQ ID NO: 786788 - DNA, 101 bp, Homo sapiens
gttcagttggcaaaccagatatatgacttgatatgcacccaatgtccagggagcgtgcaaaatttgtcaaaagtggccttttattgtaaaacgacacgaga

SEQ ID NO: 786789 - DNA, 83 bp, Homo sapiens
cccgtcccgaccctggccgccccgagcggagcctggaggatgaccgagtgggagacagcagcaccagcggtggcagagacccc

SEQ ID NO: 786790 - DNA, 100 bp, Homo sapiens
ggcgcgcccgcggagaggccggggccaagactaaggggctgcagagcggggtggacattggcgtcaagtactcggagaagcaggagcggaatttcgacga

SEQ ID NO: 786791 - DNA, 83 bp, Homo sapiens
gggagctggacggcgagcgcgagcggcgcgagaaattggaattgatcacaccttttcagttgtacttcaatcctgaattaatc

SEQ ID NO: 786792 - DNA, 75 bp, Homo sapiens
cgcctagccctaccggactacgagtatctggggcaaacttgaagataaatcttttgactccagctctttagagga

SEQ ID NO: 786793 - DNA, 96 bp, Homo sapiens
cgcgtcggggcgccctctccactgcgcgcggtttcagaaaagggatccctaacatcagaagagtttgctaagcttgtgggaatgtctgtcctccta

SEQ ID NO: 786794 - DNA, 51 bp, Homo sapiens
actggttctacacgcgagctgcgtgtccggagcggtgactggaaggggtac

SEQ ID NO: 786795 - DNA, 90 bp, Homo sapiens
gccagttgcagccttctcagccaaacgccgaccaagggtgttactgtgttgcccaggctggtcttgaaatcctgggttgaaacaattctc

SEQ ID NO: 786796 - DNA, 50 bp, Homo sapiens
ctcatgttctccttcgtcaacgaccggccctgggcagtgacggggttcgg

SEQ ID NO: 786797 - DNA, 88 bp, Homo sapiens
ctgtgacctgcagatattgggagatccacagctaagacgccgggactccctggaaacctagaaatgaccctgggcctgggagaggagt

SEQ ID NO: 786798 - DNA, 99 bp, Homo sapiens
caagagaaactttatgtgcctgtaaaagaatacccagatctgcccaacatgttcggcgaccttcggtccacgtttattgccttgatgattgggtcctac

SEQ ID NO: 786799 - DNA, 100 bp, Homo sapiens
taaagccaggacttgttaaaaagatcaatagattgcctacccccattgcaggactggtgaagtattacagacacttagcacctgatcacttgctgcaaat

SEQ ID NO: 786800 - DNA, 75 bp, Homo sapiens
gacagcttggcctggtaggatcagaggaatgcatcagagtacccagttacaggtttatgataatggatcgctttg

SEQ ID NO: 786801 - DNA, 102 bp, Homo sapiens
ctttgagaggcggaggaaaaggagtcgtaatagggctatcaatagaaaatgtagaggatagtactgatgaggatgctcctttaaacagcccaggatcagaag

SEQ ID NO: 786802 - DNA, 80 bp, Homo sapiens
aaggagaagtggagaagaaatcagtcagccgcaggtttgtggaaggaatgcttaacatttgttacaatgccgttgatcgt

SEQ ID NO: 786803 - DNA, 100 bp, Homo sapiens
ttatacagagtatgactgcaacagaaatgaggtgtgttggccgcagcttctatatccatggactcagtattatcaagctcaccagaacaagctagaagaa

SEQ ID NO: 786804 - DNA, 50 bp, Homo sapiens
aacagttaattattcttgtaatgaagggtcccccggcagagggcagtaga

SEQ ID NO: 786805 - DNA, 99 bp, Homo sapiens
ttgagagacagaggcaccccggacagagacgtgaagcactgaatagcagagtggccaaaagaacagtttattccaccatatgttccacgattccgcaat

SEQ ID NO: 786806 - DNA, 100 bp, Homo sapiens
aaagaacaccaggccaagcagaatgaacgcaaggagctgcagggcatcagaacacaccatgatggctgtgacctaagaccctcaggaagccccggggtca

SEQ ID NO: 786807 - DNA, 109 bp, Homo sapiens
ggcgggagacgagaagcctgaaaagtcgcagcgagctggagccgccggaggtctggctctgggagaggagtggacagcagctggttgagatacatccccatctggagac

SEQ ID NO: 786808 - DNA, 98 bp, Homo sapiens
tgcttttatattcatctcaaaaacaaaattctgaactcaggacttggcaaaataactgtgtagaatacattgaggatgatgaggagcacgtggacatt

SEQ ID NO: 786809 - DNA, 101 bp, Homo sapiens
cgtacagacatgcaaagtaaagtggtatggcccatctcctgtacgcttggagcgacctttggctacgtggctggccttgttatttcaccactctggatata

SEQ ID NO: 786810 - DNA, 95 bp, Homo sapiens
gggagccaacatggcagcggggttcgggcgatgctgcagggataccgttaaccctggataaagagaatggaggttacctctgtccgtgtagattc

SEQ ID NO: 786811 - DNA, 98 bp, Homo sapiens
aactctctcagcggctttctgaactagattggtagagacctggttttaccatgttggccaggctgtggtctcaaactcctgacctacggtgatctgcc

SEQ ID NO: 786812 - DNA, 128 bp, Homo sapiens
acagaaataatacctaaatatggcagtataaatggagcaacaaggctgactataagaggggaaggaaacttggatttaactggccagaagcaggtattcaaagcagagaacaatccctgggtgacccc

SEQ ID NO: 786813 - DNA, 100 bp, Homo sapiens
ggggaatccagttgctgctcctacagcctaatcacacggatgctacagagagatcccaagagaagggcttctttagaagagattgaaaatcatccttggc

SEQ ID NO: 786814 - DNA, 88 bp, Homo sapiens
tccagaagtggagaccagcagaactccaccaggctcccagccaacctctgataaaccctcccagcggccatcagagagcacaaattgt

SEQ ID NO: 786815 - DNA, 82 bp, Homo sapiens
cacggggcaggctgagttcctcttgctcacagagctctgtaaagtctctgctttctatccgtcaagatgataaagtcgtgtg

SEQ ID NO: 786816 - DNA, 75 bp, Homo sapiens
tcaccagctgctggaagtcgaacatggcacgaaagagatcaaggcaccaccaagtctgaagatcgtgctgctttg

SEQ ID NO: 786817 - DNA, 100 bp, Homo sapiens
ttttcatcttaccctggattttcaacctcagagccctggaagaaagcgggacttttcccctgttccttggagtcagtattttgagtccatggaagatgta

SEQ ID NO: 786818 - DNA, 97 bp, Homo sapiens
tcagaggcggaaggactcctggaatgccacaaatgcaaatacttgtgcactgggagagatctgtttgagaagatggttcccgtgtcagtacagcagt

SEQ ID NO: 786819 - DNA, 75 bp, Homo sapiens
cggccttcgagaaaatgcaggagaagcgggtagttgatgtcacttggcgatattcctgcaaacatgaagaggtga

SEQ ID NO: 786820 - DNA, 75 bp, Homo sapiens
gcgagttacgagaattcccggccgctgcaagggtaatagctcttcaagtctgcaataaaaaatggcctccaacaa

SEQ ID NO: 786821 - DNA, 82 bp, Homo sapiens
gcccgtccacacccgccgccagatcatggaagggaagtggttgctgtgtatgttactggtgcttggaactgctattgttgag

SEQ ID NO: 786822 - DNA, 76 bp, Homo sapiens
attggctcatttgatgaagaggataccaaagggattaaggtctgttgcggttctcccacttttccataagcagaac

SEQ ID NO: 786823 - DNA, 51 bp, Homo sapiens
agcatatattatggaacacagtggctttctagaagatgaccatagaggacc

SEQ ID NO: 786824 - DNA, 100 bp, Homo sapiens
ccctgtcaagaaggtgccggtggtgcgagtcttcggagcgaccccggcaggtgctggagaatctggtaaaagcaccattgtgaagcagatgaggatcctg

SEQ ID NO: 786825 - DNA, 82 bp, Homo sapiens
ttagattcctcaccaactactaccagtcatttgtggatgtcatggaatttcggggaggagtctgctactagtcttatcagct

SEQ ID NO: 786826 - DNA, 100 bp, Homo sapiens
cgttacagttggagaggatggtcgaataaatctcttcagagctgatcacaaggaagctgtaagaaccatagtcaccaggagactaaagtccatcaaaaac

SEQ ID NO: 786827 - DNA, 75 bp, Homo sapiens
gccagatgggtttgtatggacaggcttgtccatctgtaacttcattaagggtgctgacaaccagggtgcaggaga

SEQ ID NO: 786828 - DNA, 75 bp, Homo sapiens
tgccgccgcgagtctgccatcgtccaaggaggtggcaggtcgagtctatgctgtcttgtcaaagagagaaggtcg

SEQ ID NO: 786829 - DNA, 100 bp, Homo sapiens
ggagagatggcaccggcctgaggtcaaggagaaattgaactaaactctcctttgaagactaggctgtgcccaggtgggcgttctcaaggccttggcggag

SEQ ID NO: 786830 - DNA, 90 bp, Homo sapiens
gcagagacgccaatacagacgacaaaaccagcagtcttcatctggcggcttacagggagaacacagttggcctccaccgtttctgcccca

SEQ ID NO: 786831 - DNA, 100 bp, Homo sapiens
ccacaggagacaacgttgaggtacagacaggttggacgtgataagtatgagcctgcagctgtttcagaacaaggtgataaaaagggcaaaaagggcaaaa

SEQ ID NO: 786832 - DNA, 100 bp, Homo sapiens
ctggcagttttgccaggtgtttgttaccttgtgagaaagatcagtctaaagaaaaggagaagaaagtgaaaaaaacaattccttcctgggctaccctttc

SEQ ID NO: 786833 - DNA, 100 bp, Homo sapiens
aggagttgaatattgttttgcctgaatttgagaaaacccacctagagcatcattgtaggacagtcccatctggacagcaacattgagaatcaagagattg

SEQ ID NO: 786834 - DNA, 98 bp, Homo sapiens
ggtggcactggctctcctggtccagctctcaggacaagaacaaagtgtgctgggcttaaaagacaaccttcttgcttctgggacatccagcctgacag

SEQ ID NO: 786835 - DNA, 82 bp, Homo sapiens
ctcaacgacgcggacatggtcatgagctttgtgaacctggctattactataacaagcgcattctgcacaagaccaaggggaa

SEQ ID NO: 786836 - DNA, 87 bp, Homo sapiens
aaacagccaaaggggactatcctctggaggctgtgcgcatgcagcacctgaaaagttgccagacggccagcattgccactgccagtg

SEQ ID NO: 786837 - DNA, 105 bp, Homo sapiens
ctggtggtgttgtcgtggccggagcggcccgcgcctgggctgccggcacttcgcggcagggggatatgagactttctactcggaatatcctgagtgttgcgtgga

SEQ ID NO: 786838 - DNA, 83 bp, Homo sapiens
gaatgacccagaaggactacatcacagcaagtgtattcctaggaaagataaaggatgcatttgatcgaaacccggaacttcag

SEQ ID NO: 786839 - DNA, 51 bp, Homo sapiens
ggtggagaattaatgggttataagtacagttgtgaatttggctccgcgaag

SEQ ID NO: 786840 - DNA, 100 bp, Homo sapiens
taaggagacctgctttgccgaggaggttctgactaataagaagacgaccttctttggtggcaattctatctctatgattgattacctcatctggccctgg

SEQ ID NO: 786841 - DNA, 82 bp, Homo sapiens
gacgttcggccaagggaccaaggtggaaatcaaacgtactaactagggagctctggcagtgaaccttattgacgtggaaagt

SEQ ID NO: 786842 - DNA, 95 bp, Homo sapiens
ctcttcctttttcgacgcctccgccgccgcctgaggaggcgagctagccgggagttacaccgccaccgccaggttttatgctgggggctcagaga

SEQ ID NO: 786843 - DNA, 101 bp, Homo sapiens
gcccagtacatggatgcttgttggatgaattaatgaaccttgacccacaccaagctgcatatctatgtgagactgaattttcctcttagacttcagctaaa

SEQ ID NO: 786844 - DNA, 100 bp, Homo sapiens
agagaagaggaaacctaaccaatgactgtggaataatatggaagaagatggaaaaaacttgtttaatggttataaaccggtggaccataagcttatttgg

SEQ ID NO: 786845 - DNA, 71 bp, Homo sapiens
ctcactgtaaacccttgtatgagggaccagatggcatacttagtgttttctgtaaactgaatttactggca

SEQ ID NO: 786846 - DNA, 100 bp, Homo sapiens
agccgcgcagccgccgcagagtccgcggcgccaccgctcgccctccagcttaaagaaagtggttattgtacaggtcatgaaccagattccctggagttca

SEQ ID NO: 786847 - DNA, 75 bp, Homo sapiens
accttcctgcccttcacgctccaggagctagtctctcatcacttttgtgaacaagcacctgaacaagctgaattt

SEQ ID NO: 786848 - DNA, 100 bp, Homo sapiens
gggtgccaaagtcttcctcatctacgaggccctggccaacgtcaacattgggagcctcatctgcaatgtaggggccggtggacctgctccagcagctggt

SEQ ID NO: 786849 - DNA, 75 bp, Homo sapiens
cgttgttcccgagacgttgttgagtcccctgtgtcctcttctggcctctgcctgtgagtttctggatattgtaga

SEQ ID NO: 786850 - DNA, 75 bp, Homo sapiens
gcacagctgcagtctgacgagagggagacacctatggctgccgatgaaggctcagcagagaaacaggcaggagag

SEQ ID NO: 786851 - DNA, 100 bp, Homo sapiens
tgatgacatgtccatggagaacaagcccctgtatcagatgcggctgctgtcggaggcttttgtcatcaaaggcccactttgtagccccatcacccttggc

SEQ ID NO: 786852 - DNA, 128 bp, Homo sapiens
cagaacatatccgtgttcatgctgtccacgtatcagacagacttcatcctgatggtctcctgatcctggctgataagctccagggccccttttcctttgagctgacggccgagtccattggggtgaag

SEQ ID NO: 786853 - DNA, 75 bp, Homo sapiens
tgtgataaagttggtcagtctcgcactggatcaatgaactgagccatgttcaaatccctgttatgttgatgccag

SEQ ID NO: 786854 - DNA, 75 bp, Homo sapiens
gatgccaaagcagctcattcacatacagcctcagttttcagttcagaaagtcactcctcagtctgatggctccag

SEQ ID NO: 786855 - DNA, 87 bp, Homo sapiens
ggagtggacatcagccccaaacaggacgaaggcgtgctgaagagaggtggagaagagcgagtacttgagaaagaagaggaagaagat

SEQ ID NO: 786856 - DNA, 101 bp, Homo sapiens
cagaaggagctggcggacatcactttagaccctccacctaattgcaggtcaccctgctgattgccttcatctgtgtgcggagctccctgtggaccaactac

SEQ ID NO: 786857 - DNA, 83 bp, Homo sapiens
cggcggaacccgagcggggcctaccgaaaaagatgttgctggtccatttgacgaagaagtccagagcggcttgtgacttcagt

SEQ ID NO: 786858 - DNA, 75 bp, Homo sapiens
tagaatctgggactttcttcgttgccatgaggaaagaattctccgagggggacttgatctcatcttcatgccagg

SEQ ID NO: 786859 - DNA, 83 bp, Homo sapiens
ccatcaaatcgcgcaaaggggatgtcctgcacatgcactacacgatcgtcagtatttaaacagatcacatcatgcgtgagtac

SEQ ID NO: 786860 - DNA, 100 bp, Homo sapiens
tttactacaaagatggacttctctgtacaggcagaactggggctcccttgcatcttccagttacaaattcagtgccttctgcagtttccccagagctcct

SEQ ID NO: 786861 - DNA, 101 bp, Homo sapiens
ggggccccagccgagatcacagcgcgacaggagtgggggtggccgctggaggtgctggagaatctggtaaaagcaccattgtgaagcagatgaggatcctg

SEQ ID NO: 786862 - DNA, 83 bp, Homo sapiens
tgctgacgacctgctacaacagaagctgaccccgcactacatctacccaccagccatcgtgcagcccagcgtggtgatcccag

SEQ ID NO: 786863 - DNA, 100 bp, Homo sapiens
aaactcatcgaacagctggagcaaggcgacgaaccttggagagaggagaacgaacatcttctggacctttgtccagcaaacccgctggttcagaaccaac

SEQ ID NO: 786864 - DNA, 100 bp, Homo sapiens
ataccttcacccagcatttcatccctcgtcgaaaggattggattggcatctttagagttccagccgtcctcacctcaggaggacatagctttgtgccttt

SEQ ID NO: 786865 - DNA, 96 bp, Homo sapiens
cgccccagacctgtcggcgaaaggcttttgcgagaattgaagcaccctaatgtgattgcattgcagaaggtgttcctttctcacagtgacaggaag

SEQ ID NO: 786866 - DNA, 109 bp, Homo sapiens
gaaagcctcagcgagctgcggcagaagggctacgaagaagtgcttcagcgggccaggaagcgcatccaggagtgaatggtagtgtctagaaagggtatgtcccttcaag

SEQ ID NO: 786867 - DNA, 100 bp, Homo sapiens
aatagcctttgccatcactgccattaaggatctgtgccagttcagaagcaggcgagcctcttccctgatgaaaaagaagataacttgctgggtaccacat

SEQ ID NO: 786868 - DNA, 75 bp, Homo sapiens
ccacactggccaacaaccagtgcatggctacagagagcgtggaccatgaaggcggcgactggcggcgcgatggac

SEQ ID NO: 786869 - DNA, 75 bp, Homo sapiens
agggtccctgaagagggaagacacgcggaaacagctccaaatcttaacttggtgtcaagtttcctggctgggaga

SEQ ID NO: 786870 - DNA, 74 bp, Homo sapiens
tgcatctccgtgctggccgatgagtaccaggccataaaattttgagtagaaaaatccagaaatttgaaaatcag

SEQ ID NO: 786871 - DNA, 50 bp, Homo sapiens
tgggcatgaaggcctcggaggcaaacatccatgatagcagtcttctgtaa

SEQ ID NO: 786872 - DNA, 97 bp, Homo sapiens
cagacgcagtggtggccctggagcagtatgccagcaaggctaaccggcctcctgcaaagctcaacctgctaacctgccaggtgaagaccaaccctga

SEQ ID NO: 786873 - DNA, 76 bp, Homo sapiens
cgcattcgccatccaggctctgcttgagataccccagaatcttccatgctccgtcacactgcagccaggcccagag

SEQ ID NO: 786874 - DNA, 100 bp, Homo sapiens
caaaaagaatgaaccgcttgcttcttatttagaattgagtgacagtgtgacattgagctcctcggatagaatgcatgctcttagtctcaagattgttctc

SEQ ID NO: 786875 - DNA, 100 bp, Homo sapiens
agttggtcagtctcgcactggggattccacagttaattcagttgctaaaaagtgacaatgaagaggtacgggaagcagcagctctagccctggcaaacct

SEQ ID NO: 786876 - DNA, 75 bp, Homo sapiens
gcatcttgtggggccatccagtacatcccaactgagctggatcaagtcagaaatgtgaattccaggatgcctatg

SEQ ID NO: 786877 - DNA, 98 bp, Homo sapiens
cttccgagttagaaatcctacaaaggaccttagttggtagaagaatacagactgacagtgaaagaaagctactgcatttttgaagatctggaacctga

SEQ ID NO: 786878 - DNA, 73 bp, Homo sapiens
gggcacatgtacgggaaggacaaagtggatggcccactgcgtgaccttggttcagctgtccatttcctgtgac

SEQ ID NO: 786879 - DNA, 74 bp, Homo sapiens
cggtctctgttccgcaggatgaaatgggcaagttcatgaaacctgggaaggtggtgcttgtcctggctggacgc

SEQ ID NO: 786880 - DNA, 96 bp, Homo sapiens
aaaaattccactcttcatgatcaaacgtaaaattcacgttcacgtccatgttcttcccaggaaggctggagactttcacaggaatgacagcatcta

SEQ ID NO: 786881 - DNA, 90 bp, Homo sapiens
gtcaacataaacaagacaagaatagccagcagccctgttctaggtgctcagatggagttataaaacttgtgcaggatgacagaattcgag

SEQ ID NO: 786882 - DNA, 98 bp, Homo sapiens
ggcggggcccgcgctgcagccggagacccggagaaaggggattcaactaatgaaactactgcccattccgatgctggcagcgagcttgaagaaacaga

SEQ ID NO: 786883 - DNA, 82 bp, Homo sapiens
tcggtgctggagaacttcgtgggccggacctgaaggagaagaaggagaaggtggaggagaaggcaagccggaaagagcgaaa

SEQ ID NO: 786884 - DNA, 82 bp, Homo sapiens
tgcagcatgccatcctgaacgtctctccctgtcctagctctgtaactgtttacaccctggtacctgacagtgtaaagaagga

SEQ ID NO: 786885 - DNA, 83 bp, Homo sapiens
ggagattatagctctgtatgagaaggacaacacctacttagggctctgggcattccagccaccgaatgtgagtttgtagggag

SEQ ID NO: 786886 - DNA, 75 bp, Homo sapiens
tgaagaagggccgtcgaggaaaagatgatgaacaacatgggtggtgatgaggatgtagatttaccagaagtagat

SEQ ID NO: 786887 - DNA, 75 bp, Homo sapiens
aagcgcttcgtacccagccagcactattgacacctcacactcagtgccggttaaaattactgaagttagagagaa

SEQ ID NO: 786888 - DNA, 88 bp, Homo sapiens
tcaatatagtacactatccaaaccagcagcactaacaggtctgtgcagacttttgcagacaaatcaaaacaagaagctctgaagaatg

SEQ ID NO: 786889 - DNA, 71 bp, Homo sapiens
tgatctggataatgtggtcaaaaagttttttgctccactcaagcctgttagaatcaccatggaatacagct

SEQ ID NO: 786890 - DNA, 100 bp, Homo sapiens
agaatagagggtatgcatttatcaccttctgtggaaaggaagctgcacaggaagccgtgaaactggattggatgtggtcttgatcgtctgcaatgggaaa

SEQ ID NO: 786891 - DNA, 96 bp, Homo sapiens
ggaaaatggatgtagaaaatgagcagatactgaatgtaaaccctgcaggtttattcactggatctctgaatacccaggccccctccaccatggcca

SEQ ID NO: 786892 - DNA, 100 bp, Homo sapiens
tgcaggcgcgcctggccgcgaacccggaccctaagaaggcctcttctgaagagctgaaagctgcctaccggaggctctgtatgctctaccatccagacaa

SEQ ID NO: 786893 - DNA, 75 bp, Homo sapiens
cacgcgccaactgtcagtgggtggcggtcacctagacgtcttgctgccctccaaaaaagaagagaacttcgagca

SEQ ID NO: 786894 - DNA, 100 bp, Homo sapiens
gtctttggttataaattatgatctacctaccaatcgtgaaaactatattcacaggcacccaatatttgaaaggagaggagatgatttgtacacaaatgtg

SEQ ID NO: 786895 - DNA, 80 bp, Homo sapiens
gaggaactcagccctgattgcgaatgatatggaacctagcaaagctgttccactgaatgcatctaagcaagatggaccta

SEQ ID NO: 786896 - DNA, 115 bp, Homo sapiens
ctggaatctatgggattttcagctcgatacaatttcacacctgatacgggaatatgaatggattcattcccaaaccaaaagattgaagttcaacgcacttataacaacatatgag

SEQ ID NO: 786897 - DNA, 100 bp, Homo sapiens
gagccgtggccctgatccagacctgggcagacaccattcgcttttcacccaagatgatttgatgtcttataaaactctgatgaaccatgatggctacaca

SEQ ID NO: 786898 - DNA, 74 bp, Homo sapiens
actggttcagcggagaataacatatcttcaggtgtgctgggcatcaaggtgaagatcatgctgccctgggaccc

SEQ ID NO: 786899 - DNA, 83 bp, Homo sapiens
cgagcagcggacgccggtctctgttccgcaggatggcgagcgacggaggcgccggtgccaggtggcattcagctacctgcccc

SEQ ID NO: 786900 - DNA, 74 bp, Homo sapiens
cccgccgtcgtgcaccctgagctcaatggggctgcctatagggaacggcaggagcagctgatgggatatcggaa

SEQ ID NO: 786901 - DNA, 75 bp, Homo sapiens
ggacatcgggcgctgcggccggggacccgctgctgagatagacaggtataattgaaatcctcaaaggaatgcaag

SEQ ID NO: 786902 - DNA, 83 bp, Homo sapiens
gccgcgcttctgctctcagtgtcccggacttcaggtctccagaaatgctttgggttcatctttcattgctgcaaggaacttcc

SEQ ID NO: 786903 - DNA, 82 bp, Homo sapiens
cggggacaagaaactagagcaaataaccgttttgaaattgaacgaagagctctagaaagaagaatatctgaaatggaagaag

SEQ ID NO: 786904 - DNA, 101 bp, Homo sapiens
cttatgaccggctgagcccccatcattgggagaaatccccactcctccaagaaccaacccccaaattggctgggacagtcatctcagcaaaacttaaggaa

SEQ ID NO: 786905 - DNA, 100 bp, Homo sapiens
gcctgaggagccattttgagcaatggggaacgctcacggactgtgtgagctcccccatccaggaatccactgctcccgagctgccttcggagacccagga

SEQ ID NO: 786906 - DNA, 95 bp, Homo sapiens
ggagggctggccaacttctgctacagacgactcagacttggatgttgtgggtgatggtatgcagtgtcctccttcacctttgctttttgatcctt

SEQ ID NO: 786907 - DNA, 101 bp, Homo sapiens
gtgcagaagaacatcctggcggcggccagcccgtacatcagagctctcaatccagcagctcagagtaaaccctcctgatgtgaaaccaaaagtttctccaa

SEQ ID NO: 786908 - DNA, 90 bp, Homo sapiens
ttctccagcctgctgcgcaggataaaaggcaaactcttcacctgtgccggtggtggtgtgcacattgagccccggtatagacagttcccc

SEQ ID NO: 786909 - DNA, 82 bp, Homo sapiens
gagcagcgccagcggccgagcgggcggcttcctggcctgggcgctccggtggcggcggagaatgaaactagtgatcgagaag

SEQ ID NO: 786910 - DNA, 96 bp, Homo sapiens
cttggagctttcgcttaaacataaggaatgattttttctcatcaacactgtgaaagttgtgtagatttactgtttgtgagaggagctggaaactgc

SEQ ID NO: 786911 - DNA, 75 bp, Homo sapiens
tactcggagggcgagcggacctccctggagaagaaccttctgaggaaaggaggccatacagaaattgaacctcag

SEQ ID NO: 786912 - DNA, 100 bp, Homo sapiens
gttagcgtgagtgatcactctcaatcccggctaaatgaatctacctttgatactcaaatcaccaagaagatgggctactataagattctagacgtgatgt

SEQ ID NO: 786913 - DNA, 75 bp, Homo sapiens
ctgcaggctgtcaccaacactcaggaattgcgcagtacctggccacttatggccccatcaccgtgaccatcaaca

SEQ ID NO: 786914 - DNA, 82 bp, Homo sapiens
ctgcgggaaatcgggctgaagcgactgagtccgcgatggagctggccatgggcaagatgatggagcaggggccggtgctgat

SEQ ID NO: 786915 - DNA, 75 bp, Homo sapiens
tccggagccagccaacgagcgatgcactacctgaacactcccctgccaaaacctctgctgtgagcaatacaaaac

SEQ ID NO: 786916 - DNA, 75 bp, Homo sapiens
gccgcggaattccaaaccctcacctgtagacaggtgcaaagaaggctaccaaggagtccgttgtgatcaatttct

SEQ ID NO: 786917 - DNA, 100 bp, Homo sapiens
aaaccttggccagtaccatcgacagagcataagtacctctggcttcccctctcttcaactagtctgagaaacatcttacctattacaacagcaaaggtgc

SEQ ID NO: 786918 - DNA, 100 bp, Homo sapiens
ggctgcacctggagattgacgcagagtgggcggcggtggtgcaaagaacagtctgaacttgatcaagatttggatgatgttgaagaagtagaagaagagg

SEQ ID NO: 786919 - DNA, 97 bp, Homo sapiens
tatcaagaatgggtaataaaacttcaccaagacctaaaaaaccccaacaacagctcccttaggagattttagttcctaaaaatgggaagaacctaca

SEQ ID NO: 786920 - DNA, 100 bp, Homo sapiens
ggacgcgccgcgcgcctcggcggccaagcccccgaccgggaagtggttctgaaagatggaagaattgaaagactaaagttagagcttgaaaggaaagatg

SEQ ID NO: 786921 - DNA, 100 bp, Homo sapiens
aagagatgagacaagaggaatggttacacaggactgagcacggaaggcatctaccgggtcagcgggaacaagtctgagatggagagtctgcagagacagt

SEQ ID NO: 786922 - DNA, 87 bp, Homo sapiens
ctggccgggggcgcgggcggcggcgccggcaggaagatgttcctcctgctgatcaagagaagctttttatccagaagttacgtcagt

SEQ ID NO: 786923 - DNA, 96 bp, Homo sapiens
ttcacagcacagttcctgggaaggtggagccaccagcctctccctgggtccatcttgctgggatgatgttttaattccaaaccggatgagtggtga

SEQ ID NO: 786924 - DNA, 82 bp, Homo sapiens
gttgatgttctggtggattatggatcagatccaaatcagttgctgctcctgctccatgggaaatggtgaattacactgccca

SEQ ID NO: 786925 - DNA, 50 bp, Homo sapiens
aacgggcaatgaggcagacacaggtgttggtgtctgtccagtcccttata

SEQ ID NO: 786926 - DNA, 100 bp, Homo sapiens
tggaacaaagactgttgagtatgctccatgtagatcacaaccgccaagacccattgctcctcctcagcttcttggtgttgggcctacatatttgctgatc

SEQ ID NO: 786927 - DNA, 75 bp, Homo sapiens
tgtgtctgaactgaagaagcttgggctcacttccacaaatgaaatctactttcttcaatgtgttaaccaatagtc

SEQ ID NO: 786928 - DNA, 83 bp, Homo sapiens
gcggcttcctggcctgggcgctccggtggcggcggaggaagcaggtcctggggaccaaggtggacgcggagcgtgacggcgtg

SEQ ID NO: 786929 - DNA, 100 bp, Homo sapiens
gacggtaccagtgtgtggcccggatgcctgcgggggctgtggccagcgtgccagccactgtgacactagccatgagaaagatcagtctaaagaaaaggag

SEQ ID NO: 786930 - DNA, 50 bp, Homo sapiens
gaaagtgcgattgtggaagctgctcgggtatggaacccttcagatcaaag

SEQ ID NO: 786931 - DNA, 100 bp, Homo sapiens
gcgaccgtggtgacatgattaccatcaggagtctgagggatttggagacaggctgttccttaagcagagaatgagcttactctctcagatgacttcgtct

SEQ ID NO: 786932 - DNA, 82 bp, Homo sapiens
tttgcaacatttcaggaaaacagagaaagaagtgataggagggctctgtaggcttgggcactgtttaaaggaaagttccgag

SEQ ID NO: 786933 - DNA, 83 bp, Homo sapiens
gagcaccagcgctgccacttgtacccgcagacattatgaaagcttcgagagctgtgcccaggagtgaacaaccagccctacct

SEQ ID NO: 786934 - DNA, 50 bp, Homo sapiens
agcagctagcccttttcctcaaggtcattacacctactctgagaatcgtg

SEQ ID NO: 786935 - DNA, 75 bp, Homo sapiens
agctaagagatatctgcaatgatgtactggatatggtggtaccaggagacgataaagtagaaagttggagtcaaa

SEQ ID NO: 786936 - DNA, 100 bp, Homo sapiens
gagagcccggagccagcgtgggaggccgctgccgtcgcgcgccttgacatgggaaagcggaaccaccaaaaggagtgatgatcaacgatctcatgataaa

SEQ ID NO: 786937 - DNA, 90 bp, Homo sapiens
cttctcaacttgaaggtcatttaaccaacctcagctttacaaaccctgaatttataactgaatggccgccctgctcccccaatgaaaggc

SEQ ID NO: 786938 - DNA, 110 bp, Homo sapiens
gctgtaaagccacccacaaacaaactacccattttcttttttggaactcatgagacatattgtactccaagatacttggattacgaagatttggagcgcaagtactggaa

SEQ ID NO: 786939 - DNA, 75 bp, Homo sapiens
tatggcagatgtatgggtgaagatccaagatgttctacaggaggaggcaaaacagattcagaatctgcagaaagc

SEQ ID NO: 786940 - DNA, 100 bp, Homo sapiens
gcggatcccacacctccggaccgagggacgcggtattgctgacagacagaacgccttggaggctgagtggaggacggtgcaggcctctcgcagagatctg

SEQ ID NO: 786941 - DNA, 80 bp, Homo sapiens
agcgatgaaggtggcaaagtgctgcttccaaagctcattgacttttctgctcagcatccctaggccaacacccccaggat

SEQ ID NO: 786942 - DNA, 80 bp, Homo sapiens
gctgaggactcagaccagtctctgcaagagtgaaaggtgtagcagtcactcggcctacacccacagcatcgaccttgtga

SEQ ID NO: 786943 - DNA, 98 bp, Homo sapiens
gtgcccgagaatagctccgtccagcaggtttaaggagttcatgagtaaacatgttcacttaatgtgttaccggatctgcgtgcgagcgctgacagcca

SEQ ID NO: 786944 - DNA, 51 bp, Homo sapiens
ctggactgtgggctggtgtgtggaactggttgtacatcctggagacctgaa

SEQ ID NO: 786945 - DNA, 100 bp, Homo sapiens
aggctggacaccagcaatgagaggacccgcgtgggcaccctgcaggtggtcagacatgtcatcaactcagctggcaaggggatcaggcgagtgaagccga

SEQ ID NO: 786946 - DNA, 90 bp, Homo sapiens
gcaactcttcagtgttggctgataaaattgccctgaaactggttggtgaagaaggatttgtagcggtttccaacctagatgaggaaagcc

SEQ ID NO: 786947 - DNA, 100 bp, Homo sapiens
tgcaagtttacgacaaggaggttcagtggacccttggagccatcctctacaggacccgctttctaccattaaggaggtgataacctttatgatggtattg

SEQ ID NO: 786948 - DNA, 87 bp, Homo sapiens
agcatgtggtcacattacttcagctacgagacaatgtgattacacctcgagacacaacaatgaccttcacatgctttgtgttttttg

SEQ ID NO: 786949 - DNA, 100 bp, Homo sapiens
gactggcaatggaggaaacattcctgaagccatttcagtctgaagatgatgagaaactgaaaaagaggaaggagcgatttgggattgtcacaagttcagc

SEQ ID NO: 786950 - DNA, 130 bp, Homo sapiens
atcccagatttgttgccataatcatagaggcaagtgggggaggagcgttccttgtcctccctctgcacaaggtactaggttttgacaagcttgcatcatgcgtgagtataagctagtcgttcttggctca

SEQ ID NO: 786951 - DNA, 101 bp, Homo sapiens
tcagacttgggctcagagcaaggatgcgtgaaattgtccatattcagattggccagtgtggcaaccagatcggagccaagaccgaccaagaccatcactat

SEQ ID NO: 786952 - DNA, 74 bp, Homo sapiens
gacgaggaggaggaggaggaggaaaaagctcatttagaggcgagttttgaggaggtagagaacaacctgctgca

SEQ ID NO: 786953 - DNA, 100 bp, Homo sapiens
tttgtcatgaagaaactcaatgatcgtgtcatgagaatgtctttggtggacttgggaaagaggttgctagaagcagcaagaaaaggccaagatgatgaag

SEQ ID NO: 786954 - DNA, 98 bp, Homo sapiens
tgtgagaatgacacaaccatttcctacacagtttgcaccccaggtgctggagaatctggtaaaagcaccattgtgaagcagatgaggatcctgcatgt

SEQ ID NO: 786955 - DNA, 100 bp, Homo sapiens
gcagcatggaaacacggatttgagctcattactccaattttcacgctgagtttggaagggtcctagaggttacggctagatgaggctcaagaagcagaat

SEQ ID NO: 786956 - DNA, 100 bp, Homo sapiens
ggaagtgtctgtagcgtccctccctctcaaccacaataacaggcggagggtcggcgtaggtgcctcgagcaaaggccttatgcaactacagagggcagaa

SEQ ID NO: 786957 - DNA, 122 bp, Homo sapiens
aggcgatgcggaagaagctaatcttgtacttcaagaggaggaatcacgctcggaaacaatggcaaattgtggctactaatttgccccctgaagatcaagatggctctggggatgactctgac

SEQ ID NO: 786958 - DNA, 93 bp, Homo sapiens
gtgaggccacccgtgggactgatgaattacatagcccaagtagtcccagagactttagaagacagctttccatcgacactaggccctttagac

SEQ ID NO: 786959 - DNA, 80 bp, Homo sapiens
ccaggcctcattggacagcattcgaggcttgggcactgtttaaaggaaagttccgagaaggcatcgacaagccggaccct

SEQ ID NO: 786960 - DNA, 75 bp, Homo sapiens
cacatattcaaacctgtatctgtgcaggcaatgtgggaggacatgtatgcccaggactctatagagctactaaca

SEQ ID NO: 786961 - DNA, 97 bp, Homo sapiens
ttcaatgctacatatgtacagcctagaagaaaacagagagatgagcagcttctgaaaatggagaagaagctcttggaggaaagaactttaaaacaga

SEQ ID NO: 786962 - DNA, 75 bp, Homo sapiens
gtgctgggacttcccgtccgcggcgtggaggggacttgccatgaggtgttgaagccttgtttcactgagttggag

SEQ ID NO: 786963 - DNA, 96 bp, Homo sapiens
ccgggcccgagaggaggaggccggggctctccgggcctcccgccgcttagcctgatgctggaaggacgaaggcgtgaggaccaacagagctttacg

SEQ ID NO: 786964 - DNA, 90 bp, Homo sapiens
agaatcaggggaggcatgcttcagggaaaacaaagtgcatgatgaagtcttcagactgtgtcataaagcatgctggtgtatacagtactg

SEQ ID NO: 786965 - DNA, 75 bp, Homo sapiens
ctggcagcgaagaagatcgaaaattaaacctcaggaaacctcgacctgtctcccagttggttgcacagcaggtta

SEQ ID NO: 786966 - DNA, 89 bp, Homo sapiens
gccatggccagcgacggggccaggaagcaattctggaagcgcagcaacagcaagctcccgggcaggatggcccaatggaatcagctaca

SEQ ID NO: 786967 - DNA, 100 bp, Homo sapiens
gatcgcgaacatgaggtcctcgccggggctctgcagcccgagtatctgcggggactgtgtccaggggcagagggcccacccagggtacctcgtggagaag

SEQ ID NO: 786968 - DNA, 75 bp, Homo sapiens
aaatcgggctgaagcgactgagtccgcgatggaggactggaagcaaccccaaaattagacgcaacaaaatctggg

SEQ ID NO: 786969 - DNA, 88 bp, Homo sapiens
aaaattgggaacaatcaatgagaggccggagtataatattgagcccagcctatattgcccgtttttctctcttggagcatgcatggaa

SEQ ID NO: 786970 - DNA, 74 bp, Homo sapiens
gaacgaagaaacagacattcaacatgattgcatttgaacctcttcagaagaaacttgactccttcccagctcag

SEQ ID NO: 786971 - DNA, 104 bp, Homo sapiens
tagatttttccctctaccttaaggatgtgcaggatcttgatggtggcaaggagttgcactgctgtgatccatcctcatctcctaaagatgcatcctgacttatc

SEQ ID NO: 786972 - DNA, 75 bp, Homo sapiens
agatggtgctgatcaaggaatttgacaccacagccaaagccctatgggaagctttactgaacactaagcacaaag

SEQ ID NO: 786973 - DNA, 100 bp, Homo sapiens
ccccggacggcccctgtccccgctggcgggcttccctgtcgccgttcgctgcgctgccgggtaaagtcagtgataaatcttttgtttgctgcatatactg

SEQ ID NO: 786974 - DNA, 75 bp, Homo sapiens
cttgggagtactcattcctgtaatagctgtggagctcgcccgtcagcgaggagtcctggagcgcacagagaagat

SEQ ID NO: 786975 - DNA, 132 bp, Homo sapiens
gcttcttcgggcggaggaggaagtaggggtgcacctcagcactatcccaagactgctggcaacaggcagcctggcatcctcgctacaacctcattgttgtgggccgatacccagatcctaatttcaaaagtt

SEQ ID NO: 786976 - DNA, 100 bp, Homo sapiens
tcccattcacaaggcagctcgctctgggagcctagaatgcatcagtgcccttgtggcgaatggggctcacgtcgagaacctgaagggccgagaagtcctg

SEQ ID NO: 786977 - DNA, 100 bp, Homo sapiens
agaaaatgccgaaggcactcagacagcaacagaagaaccttgaaggctatgtgggatttgccaatctcccaaatcaagtatacagaaaatcggtgaagag

SEQ ID NO: 786978 - DNA, 100 bp, Homo sapiens
taccagaagatagaattcttagagaagagcttcagaaacagagactggactttttttatgaagacatggagtccttgacgcagatgcttagggccttggc

SEQ ID NO: 786979 - DNA, 100 bp, Homo sapiens
tccctcatcatcaataccttctattccaacaaggagattttccttcgggagttgatctctaatgcttctgataagatgggtgtgaacctgacacgcagca

SEQ ID NO: 786980 - DNA, 97 bp, Homo sapiens
cagaatgttcccgcgtttctggtcctcatcagtcaggggtcgggccccggctcagtggtcccaggcagctcgggtgtcggaacccccagacagttca

SEQ ID NO: 786981 - DNA, 100 bp, Homo sapiens
caggatgtgcatctgtcacttaccttgtcgaccagtgaaaccaaacattattggagaacagaaacctctgtagaggagcaggatgcaaccgacaggctgt

SEQ ID NO: 786982 - DNA, 87 bp, Homo sapiens
tgtggtggaatatgccaaggaaaaactggagagcttcatcaaaaatagtgatagctttgataaatgaagaaactgaggttcagagag

SEQ ID NO: 786983 - DNA, 101 bp, Homo sapiens
cttttgaaaggtgtactgcaaggaacaaaatgtttgtaaattctccttttaccaaggaacagatgttgttattgtaaagaatggaagaagaatatgtggaa

SEQ ID NO: 786984 - DNA, 74 bp, Homo sapiens
ctggagacggcctcctgttccaccttcagttcagcagactgtacaggatctttttggcagagccccaagtaaag

SEQ ID NO: 786985 - DNA, 98 bp, Homo sapiens
atgagcgaaagctacacgctggagtgtggggtgatcagccccagatttgacgtgcaactcaaagacctggaaaaatggcagaataatctgcttccatc

SEQ ID NO: 786986 - DNA, 90 bp, Homo sapiens
caggtctatggggagcagccgcccaagaagctggagccagcatcggagggcaaggtgttcacagagcacccactgctgccgttctacccc

SEQ ID NO: 786987 - DNA, 100 bp, Homo sapiens
aagcaatatcagaaacatcaggaatttgataaccatatcaactcctatgatcatgcacacaagcaggtgacagagctgaatgaacctctctccaatgaag

SEQ ID NO: 786988 - DNA, 50 bp, Homo sapiens
aggaaaacaacttcgagggcagagtgaggaattttaaattggaacaagag

SEQ ID NO: 786989 - DNA, 90 bp, Homo sapiens
cccaaggcagacattcaacacctttacatttagcagattggttcgagtgagtaaaaactaccgatcagtcatcagagcatgtatggagga

SEQ ID NO: 786990 - DNA, 100 bp, Homo sapiens
cacaggcaaactgtcagaaaagagtagcctgggctgtctggaaatctgagattgctcgctgtaagcagctcatctgtgaccccagctacgtaaaagatcg

SEQ ID NO: 786991 - DNA, 74 bp, Homo sapiens
gttgaagatctctatgagcttttgaaacttgttaaggcctactctgtgtatgatgaagacattgggtactgtca

SEQ ID NO: 786992 - DNA, 75 bp, Homo sapiens
ttcgcccgcgaggcgctgcgggcgctgcacgccgccagttgcagtatccagtttattgggaccatctcgagttct

SEQ ID NO: 786993 - DNA, 100 bp, Homo sapiens
aacttatgctgtagacatttctttgtggtttatctaaaaaccaaagtttttcagtgaatatgagaagttacttcattcagaaaattatgtgacaaaaaga

SEQ ID NO: 786994 - DNA, 82 bp, Homo sapiens
taccggcggcggcgcgcagcgtgtcaggcggagagacccgccgccagaagtgtatgctgacttgtaaagtgaagaagccagt

SEQ ID NO: 786995 - DNA, 100 bp, Homo sapiens
cctgcagctaccacctctttaataaccatgcttaatgcaaaagaccttctacaggacctgaaacacgttggtcgtcattgcctccgagcccactttagcc

SEQ ID NO: 786996 - DNA, 75 bp, Homo sapiens
tggggagcctcagcggtctgcgcctggcagcagattttaggtgatgggcaagtcagaaagtcagatggatataac

SEQ ID NO: 786997 - DNA, 123 bp, Homo sapiens
gccgtcgcccaggatgggctgggaatgaagcgatgtagccttttaagactgaaactcagactacaggtgcagaaaacaaagctaaaaagcttacattgcctctatttggtgccatgaaaggag

SEQ ID NO: 786998 - DNA, 133 bp, Homo sapiens
gccggggctgaggaggccgccaagatgccgcagtccaagtcccggaagatcgcgatcctgggctaccggtctgtggggccctccagaatttccacagcatacacctggacctgttcccaacagtttcagccag

SEQ ID NO: 786999 - DNA, 101 bp, Homo sapiens
actgtgggaactctttccagcttgtgtctgactctcagcgttctcatctctcttccttcaccatgaagctgatggacaaattccactcacccaaaatcaag

SEQ ID NO: 787000 - DNA, 98 bp, Homo sapiens
cgacccgcgccctgctccctctcagcacctgggcggacggaatttgctgcactgacaaaagaattaaatgcctgcagggaacaacttctagaaaagga

SEQ ID NO: 787001 - DNA, 98 bp, Homo sapiens
aggcaccgaacccagcattttcggcaaccgctgctggcagttttgccaggtgtttgttaccttgatataattggtgattacaactttcctctataaat

SEQ ID NO: 787002 - DNA, 100 bp, Homo sapiens
tactatgtccagcctatttgcacaccatccaggagtcagtttattactggaaaggcctgcggcctcaccatggacccagaatgcgcccagctgctcccgg

SEQ ID NO: 787003 - DNA, 101 bp, Homo sapiens
cctcaagaagacaggcaaggaggtggtgctggagggcattcccatcaagagcaccatggacaaccccaccaccacccagtatgccagcctcatgcacagct

SEQ ID NO: 787004 - DNA, 100 bp, Homo sapiens
ttttcttctttccaaaactgtgcacccctggatgaaagagcccagcagccggggccgccctattacaccgacccaggaggaccggggatgaaccctgtcg

SEQ ID NO: 787005 - DNA, 51 bp, Homo sapiens
cagccatactgtcggtggagaagagggcggcgactggcggcgcgatggacc

SEQ ID NO: 787006 - DNA, 100 bp, Homo sapiens
cttgactccatcgggcgcttctttggcggtgacaggggtgcgcccaagcggggctctggcaaggtatcagcagatgttgcacacaaacttggtatacctt

SEQ ID NO: 787007 - DNA, 100 bp, Homo sapiens
acaaaagagtctttggaggatgcggctttgatggtactatactggcaattgctggagaagattttgcaattgttgcttctgatactcgattgagtgaagg

SEQ ID NO: 787008 - DNA, 100 bp, Homo sapiens
ctaaggccgcgttggggtgagaccctcacttcatccgatacactctgtgcagttttagagagagacacactcagtattcgagaaagtcgactttttggag

SEQ ID NO: 787009 - DNA, 100 bp, Homo sapiens
gcaggccggagcggcacctacgtcctgatcgacatggttctcaacaagatggccaaagggatcgcttacacctgagacgaactacagaacagcacgtacc

SEQ ID NO: 787010 - DNA, 108 bp, Homo sapiens
agaggagagttctccaaacatgatcgtttactgcaaagttccatcaggcttgttcatccccagcatggccattggagcgatcgcaggaaggattgtggggattgcggt

SEQ ID NO: 787011 - DNA, 74 bp, Homo sapiens
tttcaatgacaccaagttggacgctatgctggaagaatttaagaaagtcaagctacaacttcaagcagaagaga

SEQ ID NO: 787012 - DNA, 97 bp, Homo sapiens
acaaattctggtgggagaacaaagctgaggtccagatgaaagagaagtttctggtcactccccaggattatgcgcgctggtgccgacaagaaagccg

SEQ ID NO: 787013 - DNA, 83 bp, Homo sapiens
gtgaaaacgcactccagccacagggtccccaactaccggcggctggagacgcagagaggaattgaatgatctggcacgggacc

SEQ ID NO: 787014 - DNA, 100 bp, Homo sapiens
acctggatgagacatttgctacagcatcccacattaagtcaacgggtttggaatcacttgctaggagtcttgtctctctgccacccaggacatcatggca

SEQ ID NO: 787015 - DNA, 100 bp, Homo sapiens
ctgtacttgccgccgtcccggctcacctggcggtgcccgaggagtagtcgctggagtccgcgcctccctggaggcgtgcaaagactccagaattggaggc

SEQ ID NO: 787016 - DNA, 90 bp, Homo sapiens
gtcaatttcatacagaaccttgtgttttacattgaagctgcatataaaactgctgactataagacctacttggactttgtccttgcatta

SEQ ID NO: 787017 - DNA, 82 bp, Homo sapiens
aaagggacgcttctacacagacagcaatggccgggagatcctggagaggagagcccacaggcggttttgtgagctgcttccc

SEQ ID NO: 787018 - DNA, 101 bp, Homo sapiens
caacacttctccgagccagcgagccagcgagccgccgacccgccgagcaaaatgaactgtcaagtaatccacctctggctaccatccttattcctcctcat

SEQ ID NO: 787019 - DNA, 100 bp, Homo sapiens
accacagggttgatatgaaggcaattgaaccctataaaaaagttatcagccatgggggtttagatcctgataagcatcttgggaaaaccctggatcaaat

SEQ ID NO: 787020 - DNA, 100 bp, Homo sapiens
cgcgatacccaaggcagacattcaacacctttacatttagcaggacaaattgatggccaggagatcactgccaccgccgtgctggccccctggcctaggc

SEQ ID NO: 787021 - DNA, 100 bp, Homo sapiens
attacatactgttagagaccactggattggcagacccagccgggggccatcaagtataagaccacaggaccacgtgattcataaagaactactgtcaaaa

SEQ ID NO: 787022 - DNA, 89 bp, Homo sapiens
gccacgtgcagacatctacaaccttcgatctcctgacgacacttgcacctcctgcgccgccgccccccatccaaggatatgccttcaag

SEQ ID NO: 787023 - DNA, 96 bp, Homo sapiens
gcccctccccgcacggatgccgaaggtgaaggcgctgcagtgcgccctggcgctggagatcagctcaggtgacgagaacaagtcagtgcgcgaccg

SEQ ID NO: 787024 - DNA, 100 bp, Homo sapiens
tggaaattgaagctagccactcagagaaacttgaattgctaaagaaggcctatgaagcctccctttcagcttccatttttgcctggaccagagggttagc

SEQ ID NO: 787025 - DNA, 100 bp, Homo sapiens
gttcctgggacgtccggttgaccgcggtcgtcctctcagcatgggggtcccgcggcctcagccctgggcgctggggctcctgctctttctccttcctggg

SEQ ID NO: 787026 - DNA, 83 bp, Homo sapiens
ggaaccaagaatccagaactctcctaccagggccccagaaacctcctcctgcatatgcccaagaggattgggagtggaatgga

SEQ ID NO: 787027 - DNA, 100 bp, Homo sapiens
cagcaggagcctggagcgcgagtacagctgcaccgtgcggctgctggacgacagcgagtacacctgcaccatccaggataactgggatgacgatgatgat

SEQ ID NO: 787028 - DNA, 75 bp, Homo sapiens
cattcccaccacaacactcattatcacccatatgaggaaagaccacagcaagattctttcattcgtctcctccta

SEQ ID NO: 787029 - DNA, 97 bp, Homo sapiens
atagttggacttcaggccttccaagaaagaatcttgggactgttttacttaattggtcattgatagcttaacaaacatggagataagattagaaatc

SEQ ID NO: 787030 - DNA, 90 bp, Homo sapiens
gctatgcccccgtggccaccgcctccagcttgccaccaaagacctgcgactttgctcagctcctgtccaaatatgacccccagaaggagg

SEQ ID NO: 787031 - DNA, 96 bp, Homo sapiens
gagtcctggtacgaccagcaggacctggagcaggggtgaagaaggtgaatacagtgaagaggaaaactccaaagtggagctgaaatcagaagctaa

SEQ ID NO: 787032 - DNA, 83 bp, Homo sapiens
cgaaaagagcctgtacaaccagcgcctgcgcctacagaacgagcatcgaggagcagctgatgagccagatccgggagacgcag

SEQ ID NO: 787033 - DNA, 90 bp, Homo sapiens
cagaggcgggcgacgcggtagtggcgaagccgggagtgtgggcgcggctggcacttttcaggattagaagaggctgtgtatagaaacata

SEQ ID NO: 787034 - DNA, 75 bp, Homo sapiens
ttaaagatcaccagtggcatatccaggcatgctgtgctctaactggcgaggggcgactgataacgttcaatgaag

SEQ ID NO: 787035 - DNA, 100 bp, Homo sapiens
cccgcgcaccacagcccatccccagaagatcctggtcccctgctttaaccatcgaaaatgagctcttccgccctctctggatgagggaacagaagtggag

SEQ ID NO: 787036 - DNA, 75 bp, Homo sapiens
tagtggatatagcacaccatccccagccaggacatcttcatcaccagcgtggacgccgccacgaccttcgaggag

SEQ ID NO: 787037 - DNA, 85 bp, Homo sapiens
ccttggaaaggaaagcagctgagatccagaggagtggaaggctcccccttgactaaagctgacctgaaggagaagaaggagaagg

SEQ ID NO: 787038 - DNA, 80 bp, Homo sapiens
gacggcgagcgcgagcggcgcgagaaatcttgctatgttgctcaggctggtcttgaacccctgagctcaagtgatccacc

SEQ ID NO: 787039 - DNA, 83 bp, Homo sapiens
tatctcagattttgtcttcagtgaagcctccttttagaggactcagaagaagaagaaggtgacttatgtagaatttgtcaaat

SEQ ID NO: 787040 - DNA, 100 bp, Homo sapiens
ccagggctggaagatgtggcagccggccacggagcgcctgcaggtgtcatggagaaactccagctgggcccagagattctgcagcgggaaaatccaaggc

SEQ ID NO: 787041 - DNA, 100 bp, Homo sapiens
gttaagtcggctccaaggtgttgggagccacagtagcagaaattaaaaaacaatatcgtttgctgtcacttaaatatcatccagataaaggaggtgatga

SEQ ID NO: 787042 - DNA, 89 bp, Homo sapiens
agaggacaaaggacatcaaggaaggcattcctctgcctaccaagattttagtgaagcctgacaggagcaatggccaccagcaggtgaag

SEQ ID NO: 787043 - DNA, 83 bp, Homo sapiens
cctcggagcgcggtccctgtattggtctcctgctcctagaggtgagaagccctaccactgcaactgggacggctgcggctgga

SEQ ID NO: 787044 - DNA, 83 bp, Homo sapiens
cgcagcaccgcagccttgggcctcgcgccggctatggccgtgccctggggctgagccctcagcttactcaacttgaagatgag

SEQ ID NO: 787045 - DNA, 50 bp, Homo sapiens
acaggagccggagcagaagcaaagaggcaaatgaagatgtgacacagatt

SEQ ID NO: 787046 - DNA, 75 bp, Homo sapiens
ccgagcagcccgggggcggcggccgcgaggcgagcggcgatggccaccaaaatgaatggctgtgaagaatattgt

SEQ ID NO: 787047 - DNA, 109 bp, Homo sapiens
gagagagcgagctgagtggttgtgtggtcgcgtctcggaaaccggtagcgcttgcagcatgacaaatttacatgtattggagaccagaccagaagcccttctgaattaa

SEQ ID NO: 787048 - DNA, 75 bp, Homo sapiens
gaggtgggcaagatcctgtgcactgactgcgaacattctagtatgccagtagaaaaaaatatcactttagaaagg

SEQ ID NO: 787049 - DNA, 101 bp, Homo sapiens
tcttccctccgtgagcgctggcctgggggaaccaaggccccctgatgttgaggggtatagaacaggctatgcttacaggcatcctctcattcgagagaagc

SEQ ID NO: 787050 - DNA, 97 bp, Homo sapiens
gccggagggcgggaggaacatgacatcgcggaggcttttgatgaggccattgctgaacttgatacactgaatgaagactcatacaaagacagcaccc

SEQ ID NO: 787051 - DNA, 88 bp, Homo sapiens
gtttgacccctttgacctcttcgatgtgcgagactttggaaaggtcaccgaggaggagcccagctccaaccacacggtcatgatccag

SEQ ID NO: 787052 - DNA, 88 bp, Homo sapiens
tcctcggagcgcggtccctgtattggtctcctgctcctagagggttcatagtggcgtcatgcacgcagactcctgcaagttcccctaa

SEQ ID NO: 787053 - DNA, 83 bp, Homo sapiens
agaaactgaggcctggaatttgattaactcattcaaggttacccagttgtatttagcatttacgtgtggcttaatcagaggtg

SEQ ID NO: 787054 - DNA, 100 bp, Homo sapiens
attgagatgatccttacggaaaaggaacagattgttcctaaaccagaagaggaggttgcccagaagaaaaagaattgtgagaagctggagaataattttg

SEQ ID NO: 787055 - DNA, 83 bp, Homo sapiens
ccgaggaggcagccaagctcgtggcctgcctctgcgtgcaagctggcagggcggagatgctggaccacgccgtcctgcttcag

SEQ ID NO: 787056 - DNA, 100 bp, Homo sapiens
tgagactcaggagacctggtttctagccccagctgtacctctaattgtaaccttgggttgccatttcatgccaatacagaatagcaacaaaagacagaaa

SEQ ID NO: 787057 - DNA, 98 bp, Homo sapiens
ccccgtcctccttcgccgccgcgcacaaccgcacgtgcaggtcagaatggcggcagcggagcatcgtcattcttcaggattgccctgctggccctacc

SEQ ID NO: 787058 - DNA, 100 bp, Homo sapiens
atgtttgaacaaactcgaagaacagctgtggaaagaagttgcaaaacactggattaagcctgatcaagatgacaacctcccaaaagcaccgagacttcgt

SEQ ID NO: 787059 - DNA, 82 bp, Homo sapiens
ccgtgccctcccgctcggccccgccagcagcactgtggaggccgtcctcgacttcccaagtaagaagcggaagaggagccgc

SEQ ID NO: 787060 - DNA, 100 bp, Homo sapiens
gaagatttaactacgtggtccgggcgaaggcatgcaatccacagtagtgactcgacttcatcttcctcctctgaagatgaacagcactttgagaggcgga

SEQ ID NO: 787061 - DNA, 101 bp, Homo sapiens
tcaaaagagcttctctccagagtagaaaggccacagagatgctggttcacaatgcccagaacctcatgcagtctgtgaaggagactgtgcgggaagctgaa

SEQ ID NO: 787062 - DNA, 90 bp, Homo sapiens
ggaaacggaagagattaaggaccttgaagaacagcttactgaaggggagagaatgtagaagatgccttccttgaggctgccaagaaaatc

SEQ ID NO: 787063 - DNA, 83 bp, Homo sapiens
ctgatcgcctgggtggttgttggcgtgtccctgcagcgaaggatcctgcatgtagagcgcatgaagtacaggacaataaagct

SEQ ID NO: 787064 - DNA, 75 bp, Homo sapiens
agctggccaagtatgccaagcagcatgtgcccgagcagcaccccaaggctcaccattttccaggaccattattgg

SEQ ID NO: 787065 - DNA, 50 bp, Homo sapiens
tgcagcctcatcctacagccccctaggtaaaaaagagtgtcaagtggaca

SEQ ID NO: 787066 - DNA, 50 bp, Homo sapiens
cttagatccggattcaccattgttcaggttataaacaacttgtgaaatga

SEQ ID NO: 787067 - DNA, 99 bp, Homo sapiens
ttctcttccacagcacctgaaagaggtcaaaatgcagatcttcgtgaaaacccttaccggcaagaccatcacccttgaggtggagcccagtgacaccat

SEQ ID NO: 787068 - DNA, 100 bp, Homo sapiens
tgaagtgggcaagaaaatctgtttgagcatctcaggccatcatcctgaaacttggcagccttcgtggagtaggtgttcaaaaagaggaaagagagaagta

SEQ ID NO: 787069 - DNA, 129 bp, Homo sapiens
ggcggtggactcggcgatggagctgttatttttagatacttttaaacacccgagcgctgagttggtagcaagaccttccagtataaactatatggtggctcctgtaactggtaatgatgttggaattcg

SEQ ID NO: 787070 - DNA, 100 bp, Homo sapiens
cctgcagctcagcagccgccgccagagcaggacgaaccgccaatcgcaaggcacctctgagaacttcaggccagtacacaacaggccggggctcctcagg

SEQ ID NO: 787071 - DNA, 82 bp, Homo sapiens
gaatttgaccatcttggtgagaaacattaagacctactaccagccctgggcgctgcctatggcacagccaagagcggtaccg

SEQ ID NO: 787072 - DNA, 75 bp, Homo sapiens
gggaagtgaaaagagatctgttttcagaatctgaccacagagacgaactcagtgattggtcattagctccaacag

SEQ ID NO: 787073 - DNA, 100 bp, Homo sapiens
ttctgcctaagaagaccgagagtcaccacaaggccaagggcaagtgatttgacagtgttctggacttggtgcctctttctgttatatgctttcctattta

SEQ ID NO: 787074 - DNA, 100 bp, Homo sapiens
ataaaaaatggcagtaaccctgagacaaccacttctggtggttgccactcacctgaggatgagatgcagaaactaccagaggccgttcagctaattgaga

SEQ ID NO: 787075 - DNA, 75 bp, Homo sapiens
gaagacatgacacttacaagatggacagggatgataattgggcctccaagagagcatctttccttgaagaagtac

SEQ ID NO: 787076 - DNA, 51 bp, Homo sapiens
gtagatgtcgttctgaaacgcagaaactgaaggctcagaagaggatgataa

SEQ ID NO: 787077 - DNA, 100 bp, Homo sapiens
tgcagaagtaccacaacagggacacctggttccagctgcagcacgtggacgctgactcggaagtgcagggatcgcttacacctgagacgaactacagaac

SEQ ID NO: 787078 - DNA, 100 bp, Homo sapiens
cggaagtgcagctgcctcagttcttagcgcaggtttctggcacagccctgagtgtgaatttgtccgccactgcatcgccaagtcccaggagcgagtggaa

SEQ ID NO: 787079 - DNA, 102 bp, Homo sapiens
tcagacgcagccgtagacaccagctccgaaatcaccaccaaggctgaccccgcactacatctacccaccagccatcgtgcagcccagcgtggtgatcccagc

SEQ ID NO: 787080 - DNA, 130 bp, Homo sapiens
ggcgatgtgtgattaccatggcgaggagtctctgtccgggggcctggctaaggaaaccctattacctccagctcggtgctgattatcacaactgtttggtgacctacttcactgacctgtgaggattcct

SEQ ID NO: 787081 - DNA, 100 bp, Homo sapiens
gctactctttaaagacaggcattttacttgcagcaaaatggtgataaaagaaaatgtggctgaagttacccgaagttcagcttgcagtgtaattcagaag

SEQ ID NO: 787082 - DNA, 75 bp, Homo sapiens
ggacacgtcccagctctctctgggcatctggaaagcatgcagccagtaaagatcccagagaagttcgagaagcta

SEQ ID NO: 787083 - DNA, 51 bp, Homo sapiens
agtgaggaaaggaggtactgtaggctcaccccgaggtggctgaggctggaa

SEQ ID NO: 787084 - DNA, 98 bp, Homo sapiens
agggtcccgcgctgctcttccctgagagtgaactttccatccggataggtagagctgggcttctttcagtctcactctgccacccaggctagagtgca

SEQ ID NO: 787085 - DNA, 82 bp, Homo sapiens
gtcttctgcggctctcggtgccctctccttttcgtttccggaaacatggatggatagaatgacagaagatgctcttcgcttg

SEQ ID NO: 787086 - DNA, 58 bp, Homo sapiens
gatgcagcactggaaggagcagcgggccgcgcaggaaatgggtcctgatgaatatgaa

SEQ ID NO: 787087 - DNA, 82 bp, Homo sapiens
atagaaccccagtttcaacgagacttcatttcattgctccctaaagagaactgaaggcagaagctagtctaatggaccagat

SEQ ID NO: 787088 - DNA, 75 bp, Homo sapiens
cgtgaaacatgtgaacactcaagtgaagcaaaagccttccatgattacactatctgttatagtccctgggtcaag

SEQ ID NO: 787089 - DNA, 75 bp, Homo sapiens
caagatttaccagagcaaccagagttccttaacctccaggatgaaaatcagcagttgaaaaaaatatatcatgaa

SEQ ID NO: 787090 - DNA, 80 bp, Homo sapiens
cactagcagcatgttgagccgggcagtgtgcggggctgaaggcctttcggcagcagctgaggaagaccacgcggaccaaa

SEQ ID NO: 787091 - DNA, 100 bp, Homo sapiens
agtcaatttcatacagaaccttgtgttttacattgaagctgcatataaaactgctgttggaaaagagactgttcaaaccactgaggatcagattttgaag

SEQ ID NO: 787092 - DNA, 102 bp, Homo sapiens
aagaaactgaggcctggaatttgattaactcattcaaggttacccagttggaaagaaccggaggctgaagcaggccaaagaagaagctcaggctgaaattga

SEQ ID NO: 787093 - DNA, 95 bp, Homo sapiens
caccgcgcctgctgccgggttgcgctccgtgcacctcttgcggtgtccaagacaaagattttggccacaggaggagcatctcacaatagagaaat

SEQ ID NO: 787094 - DNA, 83 bp, Homo sapiens
ccttgaggttggtgaaggtgaacaggtgaccataactctgccaaatatagaaaatttgcaccatcctgggattgtaaacctgg

SEQ ID NO: 787095 - DNA, 122 bp, Homo sapiens
catgacgtccatccatttcgtggttcacccgctgccgggcaccgaggaccagctcaatgacaggtttattcagaaaacatgtccactgcaattagggaggtaggagtttggagacagaccag

SEQ ID NO: 787096 - DNA, 74 bp, Homo sapiens
cgcgagccatccagaacgagatcagctccctcaaaggaagcttgctgtcttcgatacgtggagctccttggcgg

SEQ ID NO: 787097 - DNA, 100 bp, Homo sapiens
tgatgccttatcaggacatacttccaacaatatttacgaggcagtcaagtaaaatgtcggttccaggaccttaccaggcggccactgggccttcctcagc

SEQ ID NO: 787098 - DNA, 75 bp, Homo sapiens
gggcgcggattcgccgaggcaccgaggcactcagaggaggaggcaggtggaagtcatcataaagtttctgtttca

SEQ ID NO: 787099 - DNA, 97 bp, Homo sapiens
ctggaagatggacgtactttgtctgactacaatattcaaaagagctccttaataagcatttatagtcagtttttggcagcaatagaatcactaaagg

SEQ ID NO: 787100 - DNA, 82 bp, Homo sapiens
cccgcgcagccgcctgcgcctgcgggagccgtgccttagctggaccaattattgtggagccacatgtcacagcagtatgggg

SEQ ID NO: 787101 - DNA, 140 bp, Homo sapiens
ggctggtgtcctggccccagtccacctctgggagcgcctgcgccgctccgcggagagtccgtggatctcacatgcctcaaattcctgcctttcctcaagagaagagcccccaggagaaaagccagtattgcttgtgctcc

SEQ ID NO: 787102 - DNA, 101 bp, Homo sapiens
tattaaggctctccgtacagacggtccaccaaaatatactaaatctgttctgaaaaagggagataaaaccaactttcccaaaaagggagatgttgttcact

SEQ ID NO: 787103 - DNA, 100 bp, Homo sapiens
atccttctggagtccgtgtgccagcaacagagctgggtccgggtgtacggaactgtggaaggtgcatcagtgaagaaatggaccaatgtgtataatcatg

SEQ ID NO: 787104 - DNA, 75 bp, Homo sapiens
tcctctcctgggcggcggggatgggagtccatggggctctagaagttgttgatgatgccctggaaagacagagcc

SEQ ID NO: 787105 - DNA, 50 bp, Homo sapiens
taggaggaggtgatgtacttatggacacttaccgaagaaggcagatgcag

SEQ ID NO: 787106 - DNA, 100 bp, Homo sapiens
agacttcttgctcatttctgagtattgtctttatatcctgacactatgaatgctacttggatgcctcttaagtactttaggaagaatcatcaaagtaact

SEQ ID NO: 787107 - DNA, 73 bp, Homo sapiens
gcagattaagtctcagaactttgatcttgtcatctgttacaagtttgggacccactctggaacctgaggaagt

SEQ ID NO: 787108 - DNA, 90 bp, Homo sapiens
cacggtcttgctgaaagccagggaaggtggattctccacagttttcctcgtgcgtactcacggtggaatccgatgtgcattgaagcgaat

SEQ ID NO: 787109 - DNA, 82 bp, Homo sapiens
ttttgcttcaggttatagatggagagacctataaagggtcggctcgtgctcatcatcctgtgctccgtggtcttctctgccg

SEQ ID NO: 787110 - DNA, 83 bp, Homo sapiens
gagagggagaacacagttggagaaaatcggcagctgagacggccttggccggattcttactacagatttaatgaccttaacta

SEQ ID NO: 787111 - DNA, 101 bp, Homo sapiens
gaaaacctagttgcatatgctcggaaagttgaaggggacatgtatgaatctgcaaacaatcgagacttgattattcttagaaatgcacttgacctgctttt

SEQ ID NO: 787112 - DNA, 100 bp, Homo sapiens
ccagcaccacagtccttctgcagtccctcgtccagccacccccagggtggtggttggagccccccaaaagataacagctgccaaccaaacgggtggcctc

SEQ ID NO: 787113 - DNA, 83 bp, Homo sapiens
ctggggctctggctggcgttgctgcgctccgtggccggggagcaagcgccaggtttttcacgactgaaaacaacatagcaaaa

SEQ ID NO: 787114 - DNA, 135 bp, Homo sapiens
aactaacacatcctggagctgcccggagttccgctcctgcgggcttagcaggaaagggtgcctaagccctgggcgctgcctatggcacagccaagagcggtaccggcattgcggccatgtctgtcatgcggccgg

SEQ ID NO: 787115 - DNA, 99 bp, Homo sapiens
gcactgctgtaaaaactcagttactcaaactgaaacgtctcctgcatcagaattttcctgcatggagtgctacatcctcttgttccagtctcagctggc

SEQ ID NO: 787116 - DNA, 138 bp, Homo sapiens
ccgagttctcggtactcttcagggatgagtcatgtggcagtggaaaatgcgctcgggctggaccagcaggtctccttgaagaaaatgatattttcaggaatgctcaagcaggtgttctcatcagcactaatagtcatc

SEQ ID NO: 787117 - DNA, 74 bp, Homo sapiens
tgactggcacagtggagaaaccgcctcgaaaacggagaagcaggaaaagtacccagatgccgtgtacctctcgg

SEQ ID NO: 787118 - DNA, 83 bp, Homo sapiens
ccggggtccccggccggccaagcagtttcagcatcaggcaagtggctggatggtattcgaaaatggtattacaatgctgcagg

SEQ ID NO: 787119 - DNA, 100 bp, Homo sapiens
catgattgtttatcctaatcccaatgctgaagtaagattgtcttggaaatactaagttgggaagccagcagacctgcagaacttggctcccgggacccac

SEQ ID NO: 787120 - DNA, 50 bp, Homo sapiens
aggaccaagagtccaggacccagtaatctcaggggcgatataatcaatga

SEQ ID NO: 787121 - DNA, 100 bp, Homo sapiens
tccttaccagctcacctctcaccgcgcatgtttggaggattatcttatggcattatctctacaacaagaacagcagagccaagagatcaattgggaacaa

SEQ ID NO: 787122 - DNA, 90 bp, Homo sapiens
gtggaagcaggactgcgccgcgtcttcctcaagaggctccaccggttagagagatgaccctccgtgacctcccgagcccaggactggagt

SEQ ID NO: 787123 - DNA, 96 bp, Homo sapiens
gaggtggtgaagcacccctccgtggagtccgtggtccagtgtgagatcgacgaggaggatttgacagctaaggatattgaagaaattattgatgag

SEQ ID NO: 787124 - DNA, 74 bp, Homo sapiens
tgcagacaataatgaagtggtagtaggagctgaaagattacgagttttaggaggtacagttcgaaccagagctt

SEQ ID NO: 787125 - DNA, 90 bp, Homo sapiens
aagaaattctgagaagttctatggcaggaaaagctgttgctataacacaggtattcctccacctcgtcctggcatgatgcgcccaccttt

SEQ ID NO: 787126 - DNA, 74 bp, Homo sapiens
cactcccgccgcgcaggagtcgggcaccatcccaaagaagcgaatgaatatcagccactgttacttgctgtgag

SEQ ID NO: 787127 - DNA, 98 bp, Homo sapiens
ccagtgcttctgtctcgactgcactttgagaagccctgactataatgtggaatttttccgacagtttatactggttatgaatgctttagataacagag

SEQ ID NO: 787128 - DNA, 75 bp, Homo sapiens
aaaagaaggggaagaagatcaaaacccaccatgccccagccgcttacaaacacgcagatggcaagaagattgatg

SEQ ID NO: 787129 - DNA, 76 bp, Homo sapiens
aagtacgagagtggccctgacggaggggaggaaaacctaaaggcagacccagaagagctttttacaaaactagaga

SEQ ID NO: 787130 - DNA, 83 bp, Homo sapiens
gaccagacctgcaagctctttgacacacagcagttcttgtcagatgaggaaggtgtgagatatgtcccagtgcgtccaagacc

SEQ ID NO: 787131 - DNA, 75 bp, Homo sapiens
ccgccacccaaaccagtcaaaccaggccgcagccgtatcggacactcagggagtcagacagcgcggaaggcgacg

SEQ ID NO: 787132 - DNA, 75 bp, Homo sapiens
ttcaccctgccgtcatgtctaagtcagagggaccaagacaaagcatgggacatgaaattaagagtgaacttctta

SEQ ID NO: 787133 - DNA, 50 bp, Homo sapiens
aagttccatgcccatccagagaggccatcagcatcagcaaagccatcaac

SEQ ID NO: 787134 - DNA, 75 bp, Homo sapiens
gcggcctgatggagtaagaggggttggctgtgaatgtgggtcctacgtgtatgaactcagcgcagtcctcataca

SEQ ID NO: 787135 - DNA, 75 bp, Homo sapiens
tgcgggactcagtcccatcactccaaggagagaagagaccccgcagatgtgtcttcagagagtgacagtgccatg

SEQ ID NO: 787136 - DNA, 100 bp, Homo sapiens
gctggaaggaaccgctctcgcttcgtcctacacttgcgcaaatgtctccggcattatattgtacttctagcaagtgcaccaacagaaaaacaacgcctgg

SEQ ID NO: 787137 - DNA, 100 bp, Homo sapiens
tggtgaattttattcaagcaaattttaagaaacgagaatgtgtcttctttaccaaagattccaaggccacgaattgtgggaacgtattctgctccagttg

SEQ ID NO: 787138 - DNA, 106 bp, Homo sapiens
cccttccagacctcactagatttacctcctcatctggctcttcatttgtggtacttttaatgcaccagtaatgctgtgattgggttattatacccctgcattgaca

SEQ ID NO: 787139 - DNA, 100 bp, Homo sapiens
ggttatggagcctctctcctctgcaacctgataggatttggctacccagcctacatctcgtcaagagcaatctgaatccaaatgcaaaggagtttgttcc

SEQ ID NO: 787140 - DNA, 150 bp, Homo sapiens
ctactcgttcaggaggaaccccaggcccttccagcggtggccacacgtcacacagtggggacaacagcagtgagcaagttgttgacctcctgtactggagagacattaagaagactggagtggtgtttggtgccagcctattcctgctgc

SEQ ID NO: 787141 - DNA, 80 bp, Homo sapiens
ggaccatgcagcggaggtgggtcttcgtgctgctcgacgtgctgtgcttactggtcgcaaccatgtccaagggacctgca

SEQ ID NO: 787142 - DNA, 58 bp, Homo sapiens
ggaaaacaacttcgagggcagactaaattctgtccaacgtttaataaatcaatggagg

SEQ ID NO: 787143 - DNA, 50 bp, Homo sapiens
ccgccaaagaccccgtccggtagccgcttacaaacacgcagatggcaaga

SEQ ID NO: 787144 - DNA, 122 bp, Homo sapiens
acacggtgggcgccgacatcatccagctgcctcaaatcgtcgtagtgggaacgcagttcctctgtgacgagggtgcaggtatctctggggactacatcgatcgcgtggacgagcccttgtcc

SEQ ID NO: 787145 - DNA, 76 bp, Homo sapiens
ttcttcttccaaaatcctcggattctctacttctgcttattgaatttgaccgggattgtgactattttgcgattgc

SEQ ID NO: 787146 - DNA, 100 bp, Homo sapiens
aattcactggggaacttttgccttagcaaatgagttatcatttaacatggaagaagatgagttcattggagaaaaaacattccaacgttattgtgcagaa

SEQ ID NO: 787147 - DNA, 75 bp, Homo sapiens
caaaggacaggaaggaccccaggaagccctgtgattgctgcacagttctcagacaatctgattcggccgttcctc

SEQ ID NO: 787148 - DNA, 50 bp, Homo sapiens
ccgcggtggagcgggacacgaacgtgctcactgaaaactgaagctaattt

SEQ ID NO: 787149 - DNA, 82 bp, Homo sapiens
caccctgagcttcctgcggagcgtcgtcgaggcgcagtgcctccggagccagcgtggtggccatagacaacaagatcgaaca

SEQ ID NO: 787150 - DNA, 80 bp, Homo sapiens
gagcttggtttcgggatctcggtgctgcagacggcgagacctcctgcacaggtaaagagaaatgtgtatgaccttacaag

SEQ ID NO: 787151 - DNA, 100 bp, Homo sapiens
tttggagtgtgcgtgcgcgccgagcggagggtgaggacaaaatcttcttaatcaacaagcttcactccatctacgagaggaaggagagggaggagaggag

SEQ ID NO: 787152 - DNA, 75 bp, Homo sapiens
atgaactcggacctcaaggctcagctcagggagctgaatattacggcagctaagttcaaggaggccttccagctg

SEQ ID NO: 787153 - DNA, 125 bp, Homo sapiens
ggcggccgcgccatgtggctgctggggccgctgtgcctgctgctgagcagcgccgcggaacctaaaggcagacccagaagagctttttacaaaactagagaaaattgggaagggctcctttggag

SEQ ID NO: 787154 - DNA, 83 bp, Homo sapiens
ctgaacttctgaagataatcgagaaataccagctaagactcaatgctttagccacagtagaagacttccagattcgtccacat

SEQ ID NO: 787155 - DNA, 100 bp, Homo sapiens
acagattctcctctgcgctatgtggacattgccatcccatgcaacaacaaggccctctttggattccagtacgatgcatcagaccataccatggcgtggc

SEQ ID NO: 787156 - DNA, 75 bp, Homo sapiens
gtctgggccagccacctggtgtccgtgcccgtccgtgatgatgggaacatgcccgacgtgcccagccacccccag

SEQ ID NO: 787157 - DNA, 98 bp, Homo sapiens
tgaacttctgaagataatcgagaaataccagctaagactcaatgacaatcactcagctggaatgtctgctctctattggtgccttgcatttcaaaaac

SEQ ID NO: 787158 - DNA, 100 bp, Homo sapiens
cctaattcagagaatattgctgcaatctctcagtcttcagtgggttcagactgtatctggaccttcgtcgatttggatctgtgccacatggaggttttgg

SEQ ID NO: 787159 - DNA, 100 bp, Homo sapiens
ccaggagctacaccgttgggatgagtgtatcgctgtggctgaagccaaggatgtccccgttgaggccctcaccacggtgaagccatactgcaatgagatc

SEQ ID NO: 787160 - DNA, 98 bp, Homo sapiens
ctgagggagtcgctgacgggcacgctgactggaggctggcggacaggcgacagcgacctgcggcagaatgtttctccatcccagagagatgaagtaat

SEQ ID NO: 787161 - DNA, 100 bp, Homo sapiens
cctcctcgaagtcatcccagtggatcatagacggtatttctatgtaaacgaacagtcgggcgagtctcagtgggagtttccagatggtgaagaggaagaa

SEQ ID NO: 787162 - DNA, 133 bp, Homo sapiens
tcaccaagggtgtgcagtacctcaacgagatcaaggacagtgtggtggccggcttccagtgggccaccaaggagggcgctgatggacgagaccatgaaggagttgaaggcctacaaatcggaactggaggaac

SEQ ID NO: 787163 - DNA, 74 bp, Homo sapiens
ggatgcaaaggcagacccaaaggggcaaagcgaaggctggagctaggagaaagcggtcatcagtacctctcaga

SEQ ID NO: 787164 - DNA, 49 bp, Homo sapiens
tggacgactccgaggaacattgagctcctcacagccagtgaccttgcag

SEQ ID NO: 787165 - DNA, 90 bp, Homo sapiens
cgccgctctcccctcccagccccagcacccccaaccacagaaatgagccgtcagactgctacagcattacctaccggtacctcgaagtgt

SEQ ID NO: 787166 - DNA, 83 bp, Homo sapiens
aacagcttgattttagtgtcagtatttgtcagactttgatgcaagaccagcaggtcctctcaaactgtgagtaactaagtggt

SEQ ID NO: 787167 - DNA, 75 bp, Homo sapiens
actggcgacttcgctcttccagttggccttgtctctgaaggagtctgagaagatggcgctgtcagagaagttgat

SEQ ID NO: 787168 - DNA, 75 bp, Homo sapiens
gtggagaacaaatccaagattagcacaggctgtgaggatatcattgctgagagcatctcattagataccttaatt

SEQ ID NO: 787169 - DNA, 100 bp, Homo sapiens
gtgaggaggttgggggccctcgcggaggccgagaggcttaaggagcaaaagctggcaggctgacagaggcggcctcaggacggaccttctggctactgac

SEQ ID NO: 787170 - DNA, 101 bp, Homo sapiens
agtgggaaacattgaaatcaagaatccaagaaaacaggggcccgaaacccaaggcagtacagcagaattaattacagggctcgtccaactggtccctcagt

SEQ ID NO: 787171 - DNA, 83 bp, Homo sapiens
cgaaaactccaccgtagcccttgccaaagacaatgcagatcttcgtgaagactctgactggtaagaccatcaccctcgaggtt

SEQ ID NO: 787172 - DNA, 83 bp, Homo sapiens
gccctcccgccccggctgccgggctacggggcagatggactcggagcgccccgccggtgctacctttttacccacacttaagt

SEQ ID NO: 787173 - DNA, 80 bp, Homo sapiens
cgacgcgctgggtcgggaggaggagacccgaggcgccgttgatattcactgatggactccaaagaatcattaactcctgg

SEQ ID NO: 787174 - DNA, 75 bp, Homo sapiens
tttggatattagagagttcaagaataacaagcctttgtattcatttgaagataatgcagactatgtttatgatgt

SEQ ID NO: 787175 - DNA, 100 bp, Homo sapiens
aactggattttttaactgaagatagtgcctttcagccctaccaggttcagcctggagaaggaaataaagctgctttcaatgacatgagagccttgtctgg

SEQ ID NO: 787176 - DNA, 82 bp, Homo sapiens
gagaagccctacgagtgcaacatctgcaaggtccgcttcaccagactcggtgaaatacctggagtgctcagctctcacccag

SEQ ID NO: 787177 - DNA, 82 bp, Homo sapiens
agagatggaacccgaagaagaaaggattcgttacagccagagattggttcttcattttggaaaatatagagatgtagcagag

SEQ ID NO: 787178 - DNA, 75 bp, Homo sapiens
ttccatgtcaacatagtcctgaatcatctcccctgccccacaaacatgaaagaaaagacaagagaagcaccccag

SEQ ID NO: 787179 - DNA, 50 bp, Homo sapiens
ccgaaacccaagcggcttctgctgcagatggagtctcactctgtcgccca

SEQ ID NO: 787180 - DNA, 121 bp, Homo sapiens
gaaggtctcacctgaggtgaaccttcgaccttggacttctcagcctccagaatggacgccaagagtgccgaggatgaggctccttccagacacttgggaaagcaccagccccgctcagcac

SEQ ID NO: 787181 - DNA, 150 bp, Homo sapiens
attccagagtcgaaagaggccttatgaagaaaaccggggacgggggtactttgagcaccgagaggataggagcacagtagacgacaaccccgacttcgacaacctcgacatcgtggcacgggatgaggaggagaggtactttgatgagga

SEQ ID NO: 787182 - DNA, 101 bp, Homo sapiens
gatttgctatttactctgctcgagatgatgaggaattggtccatacaaagaaacagccttggtataatagcacgttagcatcaagacgaaaacgacttact

SEQ ID NO: 787183 - DNA, 98 bp, Homo sapiens
cgagccccgtggatccgctggagcggagccggccgtacgcggtgctgcgagggcagaacctgggaatagccaggccagaagaaggaaggcctgtggtg

SEQ ID NO: 787184 - DNA, 88 bp, Homo sapiens
gaaaaatctctcgggaagaatctgagcaaattgtcctgataggatcaaagacaaatggaaagttcctttcttcagtgccctactccac

SEQ ID NO: 787185 - DNA, 95 bp, Homo sapiens
cctgctgcacttgacttaattacctcaggcaaaagatgtgattgaagagcatggtccttcagaaaaggcaataaacggcccaactagtgcttctg

SEQ ID NO: 787186 - DNA, 97 bp, Homo sapiens
gaacaaacagacgaatggaaaggctggatgcaacttgtgattttgatttatcacatttctggagcaagtacatatgaatctgatgaacaagaaaaga

SEQ ID NO: 787187 - DNA, 82 bp, Homo sapiens
cgggcccccaccagaaggtggacttaggctttcactttcagaagaacagaatgaagtaatgaaaaatggctgtgaatctaaa

SEQ ID NO: 787188 - DNA, 98 bp, Homo sapiens
ttcatattttggaaagcagtttttaagacaagtccaaactaaatgacatgatagatgctattccaaaaagtaagaagaataagagatgtcagttgcac

SEQ ID NO: 787189 - DNA, 142 bp, Homo sapiens
agaggacgcggccaggcgattcggtgaagcgattcctgcaggcgttggttcccctctttgacctggagtttgctataaaatgggagttctggttgtactcactgttctgtggctgttctcctcagtaaaggccgactcaaaa

SEQ ID NO: 787190 - DNA, 88 bp, Homo sapiens
cggcagtggtggcagcgggagacaaatggaaacctccacaggccaaacgtaccaagaaagtcgggatcgtcggtaaatacgggacccg

SEQ ID NO: 787191 - DNA, 75 bp, Homo sapiens
gacagcctcaagggcttcagcaccgcgcccatggcagagccagaccgtgctgttggcagcagcggtctgcacaaa

SEQ ID NO: 787192 - DNA, 82 bp, Homo sapiens
cctggcttaaggtcatggagaaagcccacatcaacctggtgaggttacgggcaggacttgagtggcttcggacagggcttct

SEQ ID NO: 787193 - DNA, 100 bp, Homo sapiens
aataccccattgaacacggcatcatcaccaactgggatgacatggagaaggctgaagggtatgtgattggcagctgtattaaacacattccaatcgcagg

SEQ ID NO: 787194 - DNA, 100 bp, Homo sapiens
cctatcgattacacagttctggatgatgtgggccatggtgtcaagctcctctctgctatatgaaatatgggagacgacagaccgtttgtgtgcaatgccc

SEQ ID NO: 787195 - DNA, 82 bp, Homo sapiens
cgccggctatggccgtgccctggggctgagccctcaggttaaagatcgaggtccggaagccactaggagattttttaattgg

SEQ ID NO: 787196 - DNA, 100 bp, Homo sapiens
gaccccaacagcgaggagaacagcaacgatattgccctggtccacctctccagtcccctgcccctcacaggaaccttggcaaagtgtatacagactgagg

SEQ ID NO: 787197 - DNA, 100 bp, Homo sapiens
ttagccttgcgactggcccagtatccaggtcgaggttctgcagaaggttgtgactttagtatacagctatggagttactagtagagaaagcaatcagcag

SEQ ID NO: 787198 - DNA, 82 bp, Homo sapiens
ccagacctgctgctgcttcaatgtccgcatcgcaaccaccgccctggccatctaccatgtgaatatatacagccctgctctg

SEQ ID NO: 787199 - DNA, 100 bp, Homo sapiens
taagcaaaatctctttgtggctgggatgtctgataagaagattgtgcaaataattggattaaagcctgaaggagtgccaaggatagattgtgtttcaaag

SEQ ID NO: 787200 - DNA, 145 bp, Homo sapiens
ttccataaagaatggcccttgtggataagcacaaagtcaagagacagcgattggacagaatttgtgaaggaatagctattcagtcagacagaaccacttatcacgttttgcagtatctcctgaggaagtcagaattctgagccag

SEQ ID NO: 787201 - DNA, 74 bp, Homo sapiens
gacgtagttaaagcccactagcctaaagccgggcggactgcgagccccagtttgagggacagcgggatatccac

SEQ ID NO: 787202 - DNA, 100 bp, Homo sapiens
gatgacctcgttttgatggacaggagctatgaagacatgattggtgaggaggtgccatcggatcaatactactgggctcctttggcccagcatgagcgag

SEQ ID NO: 787203 - DNA, 100 bp, Homo sapiens
gtcccgaagccccctgcaggaactctacaacccaatccagtgggtaattccagaattgattggccataccattgtcactgtattactgctcatgtcattg

SEQ ID NO: 787204 - DNA, 100 bp, Homo sapiens
gtcaaaggatcatggcagtgtgcccattattgtacctttaattccaccacctttcataaagccaccagcagggggcttgtacatgacagctggaatagcc

SEQ ID NO: 787205 - DNA, 96 bp, Homo sapiens
gatccccacctttgcctcagaaagacctatttcaggactccctggaggaaaagcggaagcggcagcggtctgaacgcctggaacggattttccaac

SEQ ID NO: 787206 - DNA, 90 bp, Homo sapiens
gttcgagaggaagattcttacctctttgatctcgacaataagcagggtttccaggcctgaggtgcccgccctggccccaggagaatgaac

SEQ ID NO: 787207 - DNA, 50 bp, Homo sapiens
aagaagtacaatagcattcgcggatggtgatgggaatctttgcaaattgt

SEQ ID NO: 787208 - DNA, 46 bp, Homo sapiens
tatattagcagagttacttctaaggagcaattgtatgatggctatg

SEQ ID NO: 787209 - DNA, 82 bp, Homo sapiens
ccgggcccgggcatggtggtctggggcaacgcggaagttcattagaactaccatatactccccctttggaaagtaagcaacg

SEQ ID NO: 787210 - DNA, 100 bp, Homo sapiens
gagaaagcagaaagcctgcaagtgacgagaggagacttccttgcttctttggagaatgatatcaaaccaagctcttccagtgttagtggattcagatgag

SEQ ID NO: 787211 - DNA, 97 bp, Homo sapiens
tcagcaaagtgagccagcttatccaccatttacttaacagattacagcaatctgaagaggatgtaagtcagtttgattccaagtttacacgtcagac

SEQ ID NO: 787212 - DNA, 83 bp, Homo sapiens
gagtgctttgtgatcgaaaccctgaccggatcccataaacactgtcgctgctctgttaaaagcgaaaatgaaacaattgcctg

SEQ ID NO: 787213 - DNA, 82 bp, Homo sapiens
cagcttacccccagccccacctacctattttaactgttgggggatatgagactttctactcggaatatcctgagtgttgcgt

SEQ ID NO: 787214 - DNA, 90 bp, Homo sapiens
atcctctccgtgggagccagcgagcctctctccctgatcttacgtgctcaaggtagctacagcaagctgggtagcaggcagatccaaagg

SEQ ID NO: 787215 - DNA, 80 bp, Homo sapiens
ggatgatgtaaaccttattctggccaacagtgttaagtataatgacagggtctcactgagtgcagcggcacgatcttggc

SEQ ID NO: 787216 - DNA, 75 bp, Homo sapiens
gcacagcacggtactggagaacacggatggaggagcttgccatccaacagggtcaactggagacaactctgaagg

SEQ ID NO: 787217 - DNA, 75 bp, Homo sapiens
aggcatgtcagctgatccagataatgaggatgcaacagatcatatactcctatgaaaggaggaatctccaatgta

SEQ ID NO: 787218 - DNA, 74 bp, Homo sapiens
cacacctccaatcgctggtagaagcaccacaccaacatctagtcccttccggaagagagaagggcacagttacc

SEQ ID NO: 787219 - DNA, 82 bp, Homo sapiens
aaaagaacagagccatcattcaagaagtttgcttcatgagcgacgagctggggctgcagaagaagctacgcacagaggtcat

SEQ ID NO: 787220 - DNA, 50 bp, Homo sapiens
ctcagatggctttctcactgaaaatgtggaagatgtgaaatttgtcatca

SEQ ID NO: 787221 - DNA, 88 bp, Homo sapiens
ttgtacacgttgggggtgtagttagtgcacgttctgtgaagcttttggatcgtatccacaatcctgctgtcaataccagcaaatatgc

SEQ ID NO: 787222 - DNA, 100 bp, Homo sapiens
ccagcatgaaggacatgcgcaaagttctgagaacattacagcagatcaagaaatccagctcaaccctgccaaggtaaccctgctggggtcagttatcttc

SEQ ID NO: 787223 - DNA, 75 bp, Homo sapiens
tcaagtatggacatttaagagtgaatcagaccttcaactggaatacaaagccatccaaaactctgtttgtcaaag

SEQ ID NO: 787224 - DNA, 83 bp, Homo sapiens
gacctttaaagacttccctcagatgggtcgtttcaccttaagagatgaggattacctaggaacagtacgatttggggttatca

SEQ ID NO: 787225 - DNA, 100 bp, Homo sapiens
cttctccactctgcagtggctcttccgcttggacatcagtgtgattcttggagcaaatacccggccagacttggatctccgagaccccatctgtgatgac

SEQ ID NO: 787226 - DNA, 98 bp, Homo sapiens
aagctttagagcctggctactcacagttgaagcctgattgcaggaatgtatcctgtcaggtataatgtcagtgaatggcaagaaagttcttcatatgg

SEQ ID NO: 787227 - DNA, 76 bp, Homo sapiens
agccagcacactcctcgcgagcaaggatagaatttttgcggcatttgaagagctttttccagattatgtttaaaat

SEQ ID NO: 787228 - DNA, 100 bp, Homo sapiens
gccttcaaatccatcaagctcatcaaaagtcaccttcaggccattcagaggaggaaagagaggggaatatgaagtcagccaagccccaagtgaaccacag

SEQ ID NO: 787229 - DNA, 82 bp, Homo sapiens
gggccattgaagacatcatcacagcctggtccgacccccagtggcactaacgtgggatcctcagggcgctctcccagcaaag

SEQ ID NO: 787230 - DNA, 97 bp, Homo sapiens
tggatctctggcggggtgcagaactgagcccaggccacagtaccctattcacgctctgtgcttgtgccaaggttgccgaggagcccaagtagaagaa

SEQ ID NO: 787231 - DNA, 82 bp, Homo sapiens
tttgatcttgttgactatgaggaagttctagcgacgagtagaacagcccctctatggtttagatggcagtgctgcaaaggag

SEQ ID NO: 787232 - DNA, 82 bp, Homo sapiens
ctgaagtggaccccaagctcgtgtctaatctgatgccctttcagagagctggagtcaaaccaagatgaagagacgagctgtg

SEQ ID NO: 787233 - DNA, 75 bp, Homo sapiens
gtcgtacatgtgcaacaaaaggatgatgcttttctgggagaagaggctacaaggacttagtgcatcagatgtaac

SEQ ID NO: 787234 - DNA, 105 bp, Homo sapiens
cggcgccgagaggccgtgcgggacgcgggcgccaggaccggccgaacgcagaggtggagccccctgagctgcccgctgatctgcagcactggatctcctacaacg

SEQ ID NO: 787235 - DNA, 75 bp, Homo sapiens
ccctcatcctggttctggaatcctcagttcaaggagcggaaagaatgtcggagcgggccgcggatgacgtcaggg

SEQ ID NO: 787236 - DNA, 100 bp, Homo sapiens
tcggagccggcggagcaggttactcgcacgcggatttggctggcgtcccgcgaggaagaaccctttgagagctccagtgaagaagagtttggtggtgagg

SEQ ID NO: 787237 - DNA, 80 bp, Homo sapiens
cgccaccacccactccggacacaggtgaacttcacggtagaccagatccgcgccatcatggacaagaaggccaacatccg

SEQ ID NO: 787238 - DNA, 75 bp, Homo sapiens
aggcgctgcgtcagtaccagcaggtggaccccaagttcctgaggaacatgcgctttgccaagaagcacaacaaaa

SEQ ID NO: 787239 - DNA, 100 bp, Homo sapiens
acactgaactgctagtactgaaggctcatcatgatattgtacgatttctggtacagttagatgactacaggaatggcggcgctagatagtaaggcatcag

SEQ ID NO: 787240 - DNA, 101 bp, Homo sapiens
ctactgcacggtgaacctggaccaggaggaggttttcaggaccaaaattgtggaaaagtcactctgatgcagatgaatgcctactttttggacaagaaatc

SEQ ID NO: 787241 - DNA, 87 bp, Homo sapiens
gattgcatgaggatgctgaggctgtcctgtcctcgtccgtctcatcaaagaaaataatgttgagtttccatgaagaacaggaagtac

SEQ ID NO: 787242 - DNA, 50 bp, Homo sapiens
gaagtttctaggaaaggccggacaccagcatcaaagctggacgactcctc

SEQ ID NO: 787243 - DNA, 100 bp, Homo sapiens
agaatagctccgtgttatcaagatgtggaagagctgataccagcattggatttactttgctcggcaattagagaaagttattctgaaccccaaagcaaac

SEQ ID NO: 787244 - DNA, 80 bp, Homo sapiens
ccctcctgatgatgaagactgaaggtgtagactcagcctcactctgtacaaaacatgcaaggaggcactaaactccatgg

SEQ ID NO: 787245 - DNA, 83 bp, Homo sapiens
cgatagggatgcagaggatcagaaccggtacctggatggcatgattgtccagaacatcgtgggcacagctctgatgattttag

SEQ ID NO: 787246 - DNA, 100 bp, Homo sapiens
cagcgcgcacttcacccgcagttggttgacatcatggacatatgtgagtccatcctggagaggaagcggcatgacagcgaaaggtctacttgcagcatct

SEQ ID NO: 787247 - DNA, 82 bp, Homo sapiens
ccagtgtctccgtctgagggtttgtcctgttaatgcgggatgagcgttcaaatctgaacatcaatgatgtactagggaacta

SEQ ID NO: 787248 - DNA, 75 bp, Homo sapiens
ttcgaaaagctaaagaggcaccattcgtacccgttgtcggggtctaatggaggaagatgctgagcccatctttga

SEQ ID NO: 787249 - DNA, 98 bp, Homo sapiens
cggcggcggagactgcgggcccgtagctgggctctgcgagacgaagttatacggaagcgtctcctcattgatggagatggtgctggagatgatcggag

SEQ ID NO: 787250 - DNA, 126 bp, Homo sapiens
taatgttgatggccgccatcctcatgacatcatcgatgacatcaacagtggtgctgtggaatgcccagccctggacccacaaaccgtggagaccaagaactggcacacggacgtgattgagatgaa

SEQ ID NO: 787251 - DNA, 101 bp, Homo sapiens
aaattgcgctggaccgtcgccttgctcctcgccgcggcggggactgcagataaccaattcaggagaatttgtgttcccattagattctccacacaaaaagc

SEQ ID NO: 787252 - DNA, 74 bp, Homo sapiens
tatttcaagtggaaagtcaagtggggaaagatcaagtgcagactgagctgtggccaacgtttgcagaccaggaa

SEQ ID NO: 787253 - DNA, 100 bp, Homo sapiens
tcctgctcatcgtctgtttcatcaagaggagtcgcggcggcaagtacccagttttaccaacagactgcagtttcttcactaccaaaatgacatcattttc

SEQ ID NO: 787254 - DNA, 76 bp, Homo sapiens
gaggccaacgccgtgttcgacatcctggccgtgctgcagaacaccttccaccatgaccacctcagcaagttcccac

SEQ ID NO: 787255 - DNA, 75 bp, Homo sapiens
aggtggtggtccaccccctggtgctgctcagtgtggtggatcatttcaaccggagcttctaagtaggacatcctt

SEQ ID NO: 787256 - DNA, 82 bp, Homo sapiens
ccggggacaagaaactagagcaaataaccgttttgaaattgtgtggacactgccagcggctgcagccgacttggaatgacct

SEQ ID NO: 787257 - DNA, 83 bp, Homo sapiens
atcctgttccaggctattctgttccagcagcagaacacagttccaggcgaaccctgactatcaaatgagtggagatgacaccc

SEQ ID NO: 787258 - DNA, 90 bp, Homo sapiens
cgtctcggaaaccccgcctcttacagtcacgagggcaagtgtccagagaatggctgggatgaaagtacacttgaactctttttacatgaa

SEQ ID NO: 787259 - DNA, 50 bp, Homo sapiens
ctgtggaaaatgagcatcctcaaggggacaagatgccaactggcaagcag

SEQ ID NO: 787260 - DNA, 100 bp, Homo sapiens
aaagaagtaaactgaagttgcaaagcaacagtaatagttgttgatcattatgaaaatcctagaaacgtggggtcccttgacaagacatctaaaaatgttg

SEQ ID NO: 787261 - DNA, 76 bp, Homo sapiens
gtggcgtattccacatagcaaacaggtgaagacccccttgtggacgatcaaaatgaacgagatatcaattcagtcg

SEQ ID NO: 787262 - DNA, 100 bp, Homo sapiens
gtcgctgtgctacacttacttctacatggtttatgaaatctgaaatcaggtagcaattgtggtattaggaaacaaaatcgacctttctgagcagagacaa

SEQ ID NO: 787263 - DNA, 96 bp, Homo sapiens
catggctgccgcgccgccgctacgggaccgcctgagctttctacaccggggcaaggagctgctggcgcagaagctgccgctgtggcaacaggcctg

SEQ ID NO: 787264 - DNA, 50 bp, Homo sapiens
ccttacacatcccctgataaactaaaggtactccaaagattcaggtttac

SEQ ID NO: 787265 - DNA, 90 bp, Homo sapiens
ctcctgcctcagccccctgagtagctgggattacaggcacgcgccaccactcccagactcagattgatggacaacttttcttaattaagc

SEQ ID NO: 787266 - DNA, 50 bp, Homo sapiens
attgataacaccctgtaacagctgagcagcgacagtgcccagggctctga

SEQ ID NO: 787267 - DNA, 96 bp, Homo sapiens
aacaacttgcagctcatctctattgatgggctggtgaattaccatatctccgtcaagtgcagtaaccagttcaagttggaagtgtgtcttttgaaa

SEQ ID NO: 787268 - DNA, 83 bp, Homo sapiens
gctgccgcccgcgtcccggaagacagcctgaccctggattctggccttctcatgacctctgctgatcctcctctcctctcctg

SEQ ID NO: 787269 - DNA, 100 bp, Homo sapiens
ctcacgcccagttgtctggcatctcttcactgaaactattacagttagatctcatctctatgggtggaagatctacgaactgcgtgtgatggagaccaaa

SEQ ID NO: 787270 - DNA, 107 bp, Homo sapiens
cggcggaaaaccgaagttggaagtgtctcttagcagcgcgcggagaagaacggggagccagacaatgcagatcttcgtgaagactctgactggtaagaccatcaccc

SEQ ID NO: 787271 - DNA, 83 bp, Homo sapiens
cggggctgctggtgggccgcgtcgaagacatggaccagggctacggaggtgaccctggcaaagatgagagtgcacatttcgtc

SEQ ID NO: 787272 - DNA, 83 bp, Homo sapiens
gactctcggactgagaaacgcaaggttacaggaggttccagtggcatcgggaagtgcattgctatcgagtgctataaacaagg

SEQ ID NO: 787273 - DNA, 100 bp, Homo sapiens
gccatggaagggctggaggaggcagaggccaactgctccgtggcgttcgctgaggctcagagatgggtggagattcccaaatgctggaaaatcctctttg

SEQ ID NO: 787274 - DNA, 75 bp, Homo sapiens
caggccttcaaccactatctcagtgcaatggaaatcctttgatgctctgaattttgttacaatgttaaaaatggt

SEQ ID NO: 787275 - DNA, 97 bp, Homo sapiens
atcctcaatttaagcctgatctaacccctagaaacagggtgtcagtgtggaggcagttgatccagtgttccaagctaaaatgttggatatgttgaag

SEQ ID NO: 787276 - DNA, 51 bp, Homo sapiens
gctgaagaccactttagaaactcaattaagagcctcacagtctactcagag

SEQ ID NO: 787277 - DNA, 97 bp, Homo sapiens
ccgaggctgagactcaccggaggaagcggcgcgagcgccccgccatcgtcccggcgtcgattagcaaggtaaaagtaacagaaccatggctcagttt

SEQ ID NO: 787278 - DNA, 100 bp, Homo sapiens
ttggagttacctcccagttcatctccaagaaagggctcctcgcacctaccccagcaactcaaattcaccacctcggactcctgcgaccgcatcaaagacg

SEQ ID NO: 787279 - DNA, 83 bp, Homo sapiens
tgggcctcgcgccggctatggccgtgccctggggctgagccctcaggctatgactttgcagccgtcctggagtggttcgcgga

SEQ ID NO: 787280 - DNA, 75 bp, Homo sapiens
aagaaaccaaaagttgttacaggctggagaggaaaaccagctggtgtcctcagataatccccaacccgagatggc

SEQ ID NO: 787281 - DNA, 100 bp, Homo sapiens
ctacaaatgacttaagtcagcccacgggatttttagcccagcccatgaaggtcctggacccaagccagaagcctctgcaaagcttccttccagacctgca

SEQ ID NO: 787282 - DNA, 74 bp, Homo sapiens
ggccatggaggacgagcggaaaaacggagcctacggatgtatcaggaatgccagctctgtgctctccaatttcc

SEQ ID NO: 787283 - DNA, 75 bp, Homo sapiens
gggacaccgagggaccaaagggcgatccgggatcagttgaaggaagaggagatccacatctaccagttccccgaa

SEQ ID NO: 787284 - DNA, 97 bp, Homo sapiens
gaaaatgtcactgtcccattggccatattttaggtcccctcttgctgttggctgcacatcaggaaggctgtgatgggaatgaaggtgaaaacttgga

SEQ ID NO: 787285 - DNA, 50 bp, Homo sapiens
cttcttcgagtatttgtagaagggctggagtgcagtggcgtgatctcggc

SEQ ID NO: 787286 - DNA, 50 bp, Homo sapiens
ctttgaaagcaaggaagtctgttgccttttcgggccttggcttcacgacg

SEQ ID NO: 787287 - DNA, 100 bp, Homo sapiens
gcttcgttaagggactcaggcagtacgggaagaacttcttcagaattagaaaggagctgcttcccaataaggaaacagccatggttgcttgttatccggg

SEQ ID NO: 787288 - DNA, 98 bp, Homo sapiens
caacaagatgatgagggcgcggcagtatccttggggcactgtgcaggtcagcagataagcagagagccctagaagaaaccaaagcctacaccacccaa

SEQ ID NO: 787289 - DNA, 100 bp, Homo sapiens
agatggaatttcgtttccctctcaggactttgagcaggtggtgagccggctgggcctggactccctgtgccccttcagccctaaggagcggatcatcgag

SEQ ID NO: 787290 - DNA, 83 bp, Homo sapiens
ctcgcgggcgcaatgaatccgcggcagcaaaatgatgcttcaacacccaggccaggtctctgcctcggaagtgagtgcttctg

SEQ ID NO: 787291 - DNA, 75 bp, Homo sapiens
ttgtttacaaattggtaccaggcctccaagaagacaccctgtagaccttgaatctgcagaaagcagctccgagcc

SEQ ID NO: 787292 - DNA, 75 bp, Homo sapiens
ctgaggtctaagagcttactcaatgagattgagagtatctatgatgaggtggatattccatctattataaccaag

SEQ ID NO: 787293 - DNA, 100 bp, Homo sapiens
agactctgacagacgctgagatggagaagaagatccgcgaccaggacaggaacacgaggtcgcaatggaagaagagatcgccgcgctggtcattgacaat

SEQ ID NO: 787294 - DNA, 90 bp, Homo sapiens
tggaaattatttgagaacttcttggtggatatggcaaggcggatactctgttttcaaggaagctgaatgggaaatacagacttgagcgac

SEQ ID NO: 787295 - DNA, 99 bp, Homo sapiens
ctggcggacagcatgccttcgctgcgatgcctgtataacccagggactggcgcactcacagctttccagaatcatttgctgtttcaaatagagaactgt

SEQ ID NO: 787296 - DNA, 100 bp, Homo sapiens
gcagacagagctattccagcaccagcagagggagccagcgccggcagccaccatggcgtcacgcatagggttgcgcatgcagctcatgcgggagcaggcg

SEQ ID NO: 787297 - DNA, 122 bp, Homo sapiens
cgcaaccttctcagcgcctatggcgaggtcggacgcgtcttctttcaggctgaggatttaatccagagactgacttcactatagaacccacagttgtatcaatggttggggaaagatagtgg

SEQ ID NO: 787298 - DNA, 75 bp, Homo sapiens
ctagtgcttctcgaaaaaaaccttcaggcggcccatgggatgacgtagctttgccaaagacttagaagctaagca

SEQ ID NO: 787299 - DNA, 150 bp, Homo sapiens
ctttaacctggttttacaaaagctatgggagtgtacgaagatgaaatttggcacatcacatatgatggtcagattgtagaaggcatgaaacaaaaaatgtggagtattgaaaatattgccttcggttctggtggaggtttgctacagaag

SEQ ID NO: 787300 - DNA, 75 bp, Homo sapiens
catgggcttcggaggcctatagcccgcaggatgattgaggaaagtgggaacaagcggaagaccatggcagagaag

SEQ ID NO: 787301 - DNA, 100 bp, Homo sapiens
attgcccctggcggcttccctcatgagctcagagcttgcccgccatagcaagcgagtccgcattgcccccaagactatcaagaaatccaagtggtaatgg

SEQ ID NO: 787302 - DNA, 98 bp, Homo sapiens
tccttcgactgcgccgtgtgccttgaggtgttacaccagcctgtccggacccgctgtggccacgtattgtaaaccatggctgtgtggatacaagctca

SEQ ID NO: 787303 - DNA, 95 bp, Homo sapiens
cacttcgcattttggcattgacatttaattttagggtcctttatatagaagggagagtagatgagcaatggcaggcgctggtgagcgcaaaggca

SEQ ID NO: 787304 - DNA, 90 bp, Homo sapiens
gcaacgtgttggaccttccggagcttctcagaagacagagggttttcttttgagatgttgttattcatgaggaccaatggattggcgaga

SEQ ID NO: 787305 - DNA, 98 bp, Homo sapiens
gtctgccgcaagttcatgcaagatctcattgaggccatccgaagagccagtaatggagaaaccctagaaaagatcaccaacagccgtcctccctgcgt

SEQ ID NO: 787306 - DNA, 96 bp, Homo sapiens
agcaggtcatgatgttcagtgctaccttgagcaaagagatccgtccagtctgccgcaagttcatgcaagattgcgggttgtgggcgaacaggcgtc

SEQ ID NO: 787307 - DNA, 100 bp, Homo sapiens
tgacggtggaggttcgcggctctaacggggctttctacaagaggaatgttacggcatccggagtcatccctcagatttctctgatcatgggcccatgtgc

SEQ ID NO: 787308 - DNA, 129 bp, Homo sapiens
gcctctcttctgtggaaactctgaagccgaccagttgggcaaaatctttgagtctgcctttccaaattggagctgtctctgaacttcagcttcctgaatccaacttcttgcagaacacctcctcttgac

SEQ ID NO: 787309 - DNA, 100 bp, Homo sapiens
cccgctcttccctggctgggctggcggaggccttgctgatgaacctgactgagatcggcgccaatggtgtgccatagccatcctctttgcagtcctgttg

SEQ ID NO: 787310 - DNA, 124 bp, Homo sapiens
cggggacccagaccctggagcctcagttggaagcagccgatccagcctgcggagcctgtggggcagagagacaagagagacacctccaacttcgacaaagagttcaccagacagcctgtggaac

SEQ ID NO: 787311 - DNA, 82 bp, Homo sapiens
cagagctgggcagacacacgggcatccatggctccaccttctccagcaccacactcgatatctcttccaaatgcatgatgaa

SEQ ID NO: 787312 - DNA, 95 bp, Homo sapiens
agccatcttcttcaatcggatcggtggagtgcagcaggacactatcctggccgagggccttcacttcagctttcaccaacaatcaccagtggttt

SEQ ID NO: 787313 - DNA, 98 bp, Homo sapiens
ccctaaacagtggactcaacttcaaagacgttctcaaggagaaggcagacctgggattcactccttctccagttgcacagccacacccttcagctggc

SEQ ID NO: 787314 - DNA, 90 bp, Homo sapiens
ccgggagctgccccagcctctggtgccaccactgctgctgccccatttccgtgctgcccttgggtctggaacagaatctgacagtgatga

SEQ ID NO: 787315 - DNA, 102 bp, Homo sapiens
ggaggagctgtgcagccgcgaggaggcgcgggaggtgttcgagaacgaccccgagacgacctttgggctcttggatgcataatataccagcttgtggcagga

SEQ ID NO: 787316 - DNA, 83 bp, Homo sapiens
ctggtgtcgccatgggccgccgccccgcccgttgcggggatctgacgagcttttctctacttgtgtcactaacggaccgttta

SEQ ID NO: 787317 - DNA, 74 bp, Homo sapiens
cgaggaggaacgcgctaaggcaaagcacctggttggacgtgataagtatgagcctgcagctgtttcagaacaag

SEQ ID NO: 787318 - DNA, 83 bp, Homo sapiens
atgagctcggttttcttatgcttataagagtggaacaggtttttagaacttcagccataaaaatgggcagaattttccttgat

SEQ ID NO: 787319 - DNA, 98 bp, Homo sapiens
gggatccttcacccgtgtctgactgtgccctgtccacggtgcctcctgcatgtcctgctgccctgagctgtcccgagctaggtgacagcgtaccacgc

SEQ ID NO: 787320 - DNA, 100 bp, Homo sapiens
gccagcatgttgggcgccccggacgagagctccgtgcgggtggctgtcaggcatcgttggcttcacagtatgactgatgatcctccaacaacaaaaccac

SEQ ID NO: 787321 - DNA, 85 bp, Homo sapiens
aacttgccctgtctcctcgcagatgagcggacaaggcaaaatctcagcaagttcggacctctagtacaataaggcgaacctcctc

SEQ ID NO: 787322 - DNA, 100 bp, Homo sapiens
acctctacaaacagggctttgccatccccggctccagcttcctggagtcggctgtggagctcctcttcgccgccttcttcaccacggccagtgccagcac

SEQ ID NO: 787323 - DNA, 100 bp, Homo sapiens
tcaggggaaccgcctcaccgttctgcccccagaactaggtggctcaatcccttgtttaaaattggccataaacggagattagaggaagatgatatgtatt

SEQ ID NO: 787324 - DNA, 75 bp, Homo sapiens
cttcgagcagattctcagccttccagagctcaagggtgagcagggcagcatttccttctcccactgctgctgaga

SEQ ID NO: 787325 - DNA, 90 bp, Homo sapiens
gccttccaggtgctcatggagctggaaaaacctgtgctcatatcactgggaaaagggaatcctacggcccctgaatattttggcatcttc

SEQ ID NO: 787326 - DNA, 98 bp, Homo sapiens
gctgcgcgccggagtttgcagaggctgcctccgagcgccgtccgccaggaagactccctgcctcctgagtcccattcaactttgtggggaaacttttg

SEQ ID NO: 787327 - DNA, 90 bp, Homo sapiens
tctatgcacgcagatgctggagaagtccccttatgaccagactggattatggacagaacttggaaatattgagaataatttcttaaagcc

SEQ ID NO: 787328 - DNA, 83 bp, Homo sapiens
ctcgttcaagatggcggagctcgaccagttgcctgacgagaaattcggttccctcaaaattataaaggcaggaaagctcaaga

SEQ ID NO: 787329 - DNA, 50 bp, Homo sapiens
tcggggtgccagaaggaaagcataggtggtcttcgagggatagcacgagg

SEQ ID NO: 787330 - DNA, 98 bp, Homo sapiens
ttctctactcactgtactgctttgaatatcgttggttcaataaagagtgacttgtggtctttgggtatcaccgccattgaaatggcagaaggtgctcc

SEQ ID NO: 787331 - DNA, 100 bp, Homo sapiens
catcttcttcttcatcaagctctgattcttccagcagttcttctgattctgaagatgaggccaatagcttcaccgtctcctctgtcgccgccccttcctg

SEQ ID NO: 787332 - DNA, 82 bp, Homo sapiens
ttctctgtcagctctttccccgtcagcatcccagccgtgctcacggatgatcggctgaatgtaacagaggaactaacgtcca

SEQ ID NO: 787333 - DNA, 120 bp, Homo sapiens
agtggatcgagcagctgaacgagtgcaagcagctgtccgagtcccaggtcaagagcctctgcgagaagaaaatgatgcatcctgttgccagcagtaatccagctttctgtgggcctggca

SEQ ID NO: 787334 - DNA, 98 bp, Homo sapiens
acaatgggaaaaaccaaaagagtggcttgaaaggtcacgagaagagaatgccttctagatgcaaaatcacctccaaaccagaccacttttcttgactt

SEQ ID NO: 787335 - DNA, 100 bp, Homo sapiens
tcctacttccacttcgtgttcttcctagcttccctgtatgtgatgatgaccgtcaccaactggttcaagctttatttcaggctggagaacttaaatgggg

SEQ ID NO: 787336 - DNA, 51 bp, Homo sapiens
tgaaagttcatcctgaacaggaaaaggtacaccaggggttggaaaaaccac

SEQ ID NO: 787337 - DNA, 87 bp, Homo sapiens
caggactacgcccgcagccatggcaaaaagctaccacctgccagtctgaagcaccgagatgacccaacatgagtgaagtttcctgca

SEQ ID NO: 787338 - DNA, 75 bp, Homo sapiens
gatggatcaagctagatcagcattctctaacttggatgagaacaagttgagcagtgccaacggccatgaagaacg

SEQ ID NO: 787339 - DNA, 50 bp, Homo sapiens
agaacatctcgctgtcggtgaagaagggccgcgttcgcaccaaaaccgtg

SEQ ID NO: 787340 - DNA, 82 bp, Homo sapiens
ggctggaaagagcgttcaaacggcagggcagccagcccgcacctgtcaggttgtttgcattcgctccacttggaatgctctc

SEQ ID NO: 787341 - DNA, 50 bp, Homo sapiens
ggagtgcagaggcatcacctgaaaggtatgacttgctcttcatgccaccg

SEQ ID NO: 787342 - DNA, 101 bp, Homo sapiens
cacaaaacctcttacatcatgggcgacttcaggaacagccataggtgtttgaggcagagcagtttggatgcccacagcgtgctcagaggatgaacacagcc

SEQ ID NO: 787343 - DNA, 75 bp, Homo sapiens
taaatccaggacagatctggagcaagtacctaaggagctgtggctaaaggaagtggaggggccgtgggatgcgga

SEQ ID NO: 787344 - DNA, 100 bp, Homo sapiens
ggggcccaggtgagaaaggcccacctgtgtcctggttgagggtctccagggttctttggggcccgaggcaggtaaagtgaggaaacatgcaactgaacag

SEQ ID NO: 787345 - DNA, 82 bp, Homo sapiens
cggatgatgccttcaatactacctttatttccaccatagtttaatggatcgagaagtggcgttgcttgctgaaatggacaaa

SEQ ID NO: 787346 - DNA, 101 bp, Homo sapiens
gcaaaggctcatgcccccattttacaggcacctgaatggacagaagaggacctcagccaactgacaagaagtatggttaagttcccaggagggactccagg

SEQ ID NO: 787347 - DNA, 75 bp, Homo sapiens
tagcagcaatttgggcaactttaattatgcctgccggccctggccctcgccttcccaaagtgtactgcatcatca

SEQ ID NO: 787348 - DNA, 88 bp, Homo sapiens
cccagacaaggctggagacaaacctcatatgcagacttatgaagttgaccttaataagtcttttatcagaaatcaccgatccagagag

SEQ ID NO: 787349 - DNA, 76 bp, Homo sapiens
gctggcgttaactgtgcggaggcaggtactccaaagattcaggtttactcacgtcatccagcagagaatggaaagt

SEQ ID NO: 787350 - DNA, 100 bp, Homo sapiens
acccctctccgtccatggccccagatgacacttcagaaatgttcccactgccaggaggcaggcgccaccttgggctgctacaacaaaggctgctccttcc

SEQ ID NO: 787351 - DNA, 74 bp, Homo sapiens
atggatctcttcaggcacactacagaactaaatatgcatgtggctgaatccacagaggagcctgctggttctaa

SEQ ID NO: 787352 - DNA, 100 bp, Homo sapiens
gacgttcatcgccgtgttatccttgagtaaaggatgtgggggctcaaggttctgctgctacctgtggtgagctttgctctgtaccctgaggagatactgg

SEQ ID NO: 787353 - DNA, 100 bp, Homo sapiens
gccacaggaagtgtcagtatcctttggtgcagctgtgaatggtgcccaggagctgagcgtcttgtagtgcctgaagatgggacgcctatgcctgacagct

SEQ ID NO: 787354 - DNA, 100 bp, Homo sapiens
cgaggacgcgcgcccgagcctagtccccacgccgcggcgcgcccgggctccctgctgatcccagaattaaacaaccaccatgtcgagcaaaaaggcaaag

SEQ ID NO: 787355 - DNA, 83 bp, Homo sapiens
tcacaggaggcacacttgagcttggggagccaacttccatgatggaagaagagggaggtattctctactgccgctgatggtca

SEQ ID NO: 787356 - DNA, 100 bp, Homo sapiens
tcctgaagccggcggacggttttcgtacgggcggccgtgcgcgaggcgagaccatggtgaatccgggcagcagctcgcagccgcccccggtgacggccgg

SEQ ID NO: 787357 - DNA, 98 bp, Homo sapiens
ctgaaatctacagacagcagtagttacccaagtccttgtgctagtccttctcctccatcctcaggaaagatgtccggtctgtgctacgacagcaaaat

SEQ ID NO: 787358 - DNA, 49 bp, Homo sapiens
gaagtttctaggaaaggccggacaccagctccagggcccacaacggcag

SEQ ID NO: 787359 - DNA, 100 bp, Homo sapiens
ttccatgacaccaagttggatgccatgctggaggagttcaagaagggtcctagcagaagatgtgactcagactgcctctgggtggggctggctggcccac

SEQ ID NO: 787360 - DNA, 100 bp, Homo sapiens
ttcgttgacagagctttgatagtcgtaccatatgcagaaggctgaactccagtgcacccagttagacttggagcggaaactcaagttgaatgaaaatgcc

SEQ ID NO: 787361 - DNA, 90 bp, Homo sapiens
caaggcgattccgcagtccccccgttccctggaggtcctgtggaatggctcagcaacagcctcaccaaggactccatgaatatcaaagcc

SEQ ID NO: 787362 - DNA, 75 bp, Homo sapiens
cggaagtgagatgcaaggcggcgattttcccttctgtcaggtgtttcccattaaacactaccaggacaaaatcag

SEQ ID NO: 787363 - DNA, 100 bp, Homo sapiens
gaacaacatatcgtatcagatggcagacatacatcatttaaaggtcctgaatggggagcttacaggaggggccttccgaaatgggcgtcgagcatgcctg

SEQ ID NO: 787364 - DNA, 101 bp, Homo sapiens
aatcacttccgctcccgccagccaatctacatgagtctagcaggttggatggcaagcatgtggtgtttggcaaagtgaaagaaggcatgaatattgtggag

SEQ ID NO: 787365 - DNA, 49 bp, Homo sapiens
tgggacttcccgtccgcggcgtggaggttctggagagtcttggcttctg

SEQ ID NO: 787366 - DNA, 83 bp, Homo sapiens
cgcaaccattgacgccatgtcgggttattcgagtgaccgagaccgcggccgggaccgaggattatacccaacaagcaacccaa

SEQ ID NO: 787367 - DNA, 82 bp, Homo sapiens
gaccgggagcggcggcagcggcggcgcggaggcggctgaggtgcgagccggagtgtggccatctggggccgtgtggtatttg

SEQ ID NO: 787368 - DNA, 75 bp, Homo sapiens
agcctctgattacgacatggctgagatcaccaatatccgacctagctttgggagcatcgagtacagctgtccggc

SEQ ID NO: 787369 - DNA, 100 bp, Homo sapiens
agaccgtgaccgagagcgtgaccgagagcgcgaatatcgtcatcgttagaaggaatttgatccccagcaggagcgggacttttacaaaacgctctccttg

SEQ ID NO: 787370 - DNA, 80 bp, Homo sapiens
ctcagatgctgccagggtccctgaagagggaagacacgcggaaacaggcagcctggcatcctcgctacaacctcattgtt

SEQ ID NO: 787371 - DNA, 89 bp, Homo sapiens
tcaactgtatagctatcctctttttaagggctgggagaactcaggaagcctgctcctctggtgcaagtgtggtagctattgacaacaaa

SEQ ID NO: 787372 - DNA, 96 bp, Homo sapiens
ctttttcttgctgcgaagaagattcctggaatctcatcaactgcctcctctcaagtcctcactgccatctcttccaaacactttctgatgactgcc

SEQ ID NO: 787373 - DNA, 75 bp, Homo sapiens
tgctctcgccccaacccgcgcgccagatcatgcaacagatgagtgaccaccgctacgacaaactcactgtgcctg

SEQ ID NO: 787374 - DNA, 97 bp, Homo sapiens
ggggcggctctgcgctggccgggggcgcgggcggcggcgccggcaggaaggatgaaacaggcgcctatttaatcgacagagaccccacctactttgg

SEQ ID NO: 787375 - DNA, 80 bp, Homo sapiens
gtcccaatcccccactctttccgccctaatggaggtctccagtttcgatattctctaagccgctttcatcatgggagaaa

SEQ ID NO: 787376 - DNA, 82 bp, Homo sapiens
atggccatctgggcttggcttccggctccccccatctggctggaacacacatcagtcacacttttgcagctccagagatcgg

SEQ ID NO: 787377 - DNA, 90 bp, Homo sapiens
aaaatattctagaaggggaaaagctacttcaagatcttcagtgtctattggatttttccaagagaaagtttgtaaaattccttacactgt

SEQ ID NO: 787378 - DNA, 74 bp, Homo sapiens
ttggagttcttacaacatggcagacattgacaaggcccttggaagaaaatcctcgctgtgtccaggctgaggcg

SEQ ID NO: 787379 - DNA, 82 bp, Homo sapiens
aagacagggagacgctgctgcagctccgggacacctggggccgccgaggcaaagaatagcctaacatggcagaccagagaca

SEQ ID NO: 787380 - DNA, 75 bp, Homo sapiens
cagtgagctagcagcagagaagccttcctggaaaagattcgagtgagggttgaaaaggatccagaacttggattt

SEQ ID NO: 787381 - DNA, 88 bp, Homo sapiens
ctgtggccagtgttgtcatggacaaggacaagaaacttgggaaccgtgggtgctgttgccttggactgcaaagggaatgtagcctacg

SEQ ID NO: 787382 - DNA, 78 bp, Homo sapiens
cctcgctggaccagaccatggccgcggccttcgatctggtggctggacccagagctgacctatggctgcgccaagccc

SEQ ID NO: 787383 - DNA, 100 bp, Homo sapiens
aataaatacatcatgcaaccccacgctgcaagctttcttcctggtggcagatgacatcatggattcatcccttacccgccggggacagatctgctggtat

SEQ ID NO: 787384 - DNA, 83 bp, Homo sapiens
tgagtcgcatcttcaacccccatctgaagccacttggaggatgtgctttaccaaaatgagggagtaatctgagaaggcatggg

SEQ ID NO: 787385 - DNA, 50 bp, Homo sapiens
atttaaagcgtttggaaaatccacagggaagtgttcgccagttactacat

SEQ ID NO: 787386 - DNA, 51 bp, Homo sapiens
atgaactcagggccggttgtggccatgtctgtggattctagccttgggggt

SEQ ID NO: 787387 - DNA, 51 bp, Homo sapiens
acctgttaccactttcaaaaccacctaatgatccccatggtatccagagag

SEQ ID NO: 787388 - DNA, 102 bp, Homo sapiens
ttcaagttgagcagatgacaaaacttcaagccaaacatcaagcagaatgtgatttgcttgaagatatgaggaggattctggagccgagaaggagaacacctc

SEQ ID NO: 787389 - DNA, 98 bp, Homo sapiens
tgaattttggaagaagagacgaactgtgaggagagtaaaccaagaagaaatccacagatttagttctcggcaacctttggcactgcatccatgagcat

SEQ ID NO: 787390 - DNA, 96 bp, Homo sapiens
cgacacccttgaagctgagaaatggtagctacagcaagctgggtagcaggcagatccaaaggatatcatgaagtttccagggcctttggaaaacca

SEQ ID NO: 787391 - DNA, 83 bp, Homo sapiens
cccaaaggcccatgaggggatgcagttatgggctctgtcgccgtggtgtcttcattggctgctctggcatggagctgatatca

SEQ ID NO: 787392 - DNA, 88 bp, Homo sapiens
ctgcatcattccttggggcaaaatgtggacaaggaaaatgcatccgatgcagatttatggctcctgaacagttgcactgtaaaaaacc

SEQ ID NO: 787393 - DNA, 75 bp, Homo sapiens
ggctgttgagtggtcgcggacctgggctctgtgcgttgggaaagggaagtggagcgaacacaacctgtgctgaat

SEQ ID NO: 787394 - DNA, 135 bp, Homo sapiens
gcctgcgccgccggccgggcatgagttagtcgcagacatggacaccaaacatttcctgccgctcgtgaagcgtgacattcaggaaaacgatgaagaggcagtgcaagtcaaagagcagagcatcctggaactggg

SEQ ID NO: 787395 - DNA, 100 bp, Homo sapiens
tacgtggggtccaccccacatggcactggggctgtagacctggaccatgtgacagatgagcgggaacggaaggctctggagggcattatcagcaactttg

SEQ ID NO: 787396 - DNA, 50 bp, Homo sapiens
caagatggacaccgcggaggaagatgggtgagtcaagtgaagacatagac

SEQ ID NO: 787397 - DNA, 90 bp, Homo sapiens
caagaaatgatcagtagcaccagtgtttatgcatcaacaacagcaacttgtgattggcggtgaccggatattcagttgcacatccccaca

SEQ ID NO: 787398 - DNA, 88 bp, Homo sapiens
tagattcctctagtattctctatgctagaaagatacttctgacattgtgcacatttggtgtccagaaggaatgaaaaccagtgacatc

SEQ ID NO: 787399 - DNA, 83 bp, Homo sapiens
atcgtacccattcccaagtcccacgaggcgttctgtggcaccatcgtgctcatcttcttcctggagctggctgtggccgtgct

SEQ ID NO: 787400 - DNA, 97 bp, Homo sapiens
aggctttctgctaaggatgtattgtggcttttgtttggattgcagcatgcagaattacagtattgctgacagacagaacgccttggaggctgagtgg

SEQ ID NO: 787401 - DNA, 75 bp, Homo sapiens
tgcccaaagaggagggcgtcatcagcgtctccgaggacaggtggtcattgggactcccacacttaaacaaagaaa

SEQ ID NO: 787402 - DNA, 51 bp, Homo sapiens
gttacctaacggacaagggctgcaatgcttatcctgagtatttaattactt

SEQ ID NO: 787403 - DNA, 100 bp, Homo sapiens
gccatggactgcagcctcgtgcggacgctcgtgcacagatacggagcatgattgagcggatattagtgtcgtgcaacaaccagcaggatctgcaggaatg

SEQ ID NO: 787404 - DNA, 100 bp, Homo sapiens
tcacggattaatatttctccctgtcttactcagttacatagagatagactctctgctagtgacatgctccaagtccgaaaagttatggaacatgtttatg

SEQ ID NO: 787405 - DNA, 100 bp, Homo sapiens
cagcagtcttaaagtttgcagcagaagaagttaaaaatgtgtctgcaggcacacaggacgtgccttcacccccatctgactatgtggaaagagttgacag

SEQ ID NO: 787406 - DNA, 124 bp, Homo sapiens
agcccaggagcctgccccgccctggggacgaagagctgcagctcctcctgtgcgggctattcagcttgaccctgaagaaactcgtcatgctaaaagaaatggacaaagatcttaactcagtggt

SEQ ID NO: 787407 - DNA, 108 bp, Homo sapiens
ctgccgtccttctccactttcgccagcccgtgccgcgagcgcggcctgcaggaggtgtgagatgcacaatgcgaaacctaggccccagcttttacaccatgatgcgca

SEQ ID NO: 787408 - DNA, 98 bp, Homo sapiens
gacagttcaaggaggagaagcttgcagagcagctgaagcaagctgaggagctcagctctggtttgtcaggctggcactactagtgaagttgggccttt

SEQ ID NO: 787409 - DNA, 50 bp, Homo sapiens
agaaggagctcaccattggctcgtattctaccttgtaaatactgttattt

SEQ ID NO: 787410 - DNA, 74 bp, Homo sapiens
ggagacggcctgggtgctggcgaagcggaggccggagtttgacaagtatgcgcccaagctggacagcccctact

SEQ ID NO: 787411 - DNA, 98 bp, Homo sapiens
caggtggcgaaggcagaggaacccaacatgagtgaagtttcctgcaagaaacgggacgactatttggaatggccagagtattttatggctgtggcctt

SEQ ID NO: 787412 - DNA, 75 bp, Homo sapiens
ctccgtcccccgcgggtctgctctgtgtgccatggacgggctttccatctgatggtcccctggtgtgtgccctgg

SEQ ID NO: 787413 - DNA, 90 bp, Homo sapiens
gaggatgtgaaacttaaatttgaagagataccccatcagcctgagtctcttaaaggcctttatacacatatgtctacacatagggatttg

SEQ ID NO: 787414 - DNA, 100 bp, Homo sapiens
ttcctgggaaggtggagccaccagcctctccctgccaccattggttcaggcaatcttcagcggtgatccagaggagatccggatgctcatccataaaact

SEQ ID NO: 787415 - DNA, 100 bp, Homo sapiens
cctcggcccctctgctgagccgctgcgtctccatgccaggggacatctcagttccacaggcgcatgggccacgtttccagtgcttggtggccatgtgggg

SEQ ID NO: 787416 - DNA, 100 bp, Homo sapiens
acagctgggagtaacaacacccgttttggcattgctgctaagtacatgctggattgtagaacttctctctctgcggcttacagggagaacacagttggcc

SEQ ID NO: 787417 - DNA, 100 bp, Homo sapiens
tgtatcaaaaacaaagaatttgaaaaggcttcaaaaattttgaaaaaacatatgtccaaggaccccacaactcagccgaccccttggtgggaagtattgc

SEQ ID NO: 787418 - DNA, 96 bp, Homo sapiens
gttccccttctactacatgctgaaggtatccgttacagcactgatgtgagtgtagatgaagtaaaagctttggcttctctgatgacatacaagtgt

SEQ ID NO: 787419 - DNA, 74 bp, Homo sapiens
cctccatcagggccagctggagaattgaagtttgagccacgcattgaatgccccagaggagcccgaaacctccc

SEQ ID NO: 787420 - DNA, 75 bp, Homo sapiens
ccaggtgtaagcgcagaaagcaggcgaacccgcggcgcaataacggctcaggaggcagcagggacagggcagcca

SEQ ID NO: 787421 - DNA, 98 bp, Homo sapiens
gatctggattctaaggcaacacttccttgaagaaacaagcttacaggttcatgtgaaaatggcggatgaggctgtctgtgttggcccagctcccacca

SEQ ID NO: 787422 - DNA, 75 bp, Homo sapiens
ccccacaggtcttgggaggattaagtgaggggacatgaggtgctggagaatctggtaaaagcaccattgtgaagc

SEQ ID NO: 787423 - DNA, 88 bp, Homo sapiens
ctggatgagtccgagagagatggaggctctgaggaccaagtggaagacccagcactaagtgtgtgcaccggcacagacatgaagctgc

SEQ ID NO: 787424 - DNA, 75 bp, Homo sapiens
atactttggttacctatgtacctgttaccactttcaaaagctcctgggtagaactgcacttcagcaataatggga

SEQ ID NO: 787425 - DNA, 100 bp, Homo sapiens
caagacagagagcgttgctgcagccgcccagtgggtgaaggagtgcgtgagagacaaaggtcagaatggcggcagtggagcatcgtcattcttcaggatt

SEQ ID NO: 787426 - DNA, 82 bp, Homo sapiens
caccgtacttgcaagaaagcagccccagagactcctcgtgaagtggcccagcaggctgtggatgcggatgtgcatgctgtgg

SEQ ID NO: 787427 - DNA, 51 bp, Homo sapiens
actcaagagtggaagttttcacaggcccagttctggtgatgatttcacttt

SEQ ID NO: 787428 - DNA, 90 bp, Homo sapiens
cggacatagaggccaaccaacctttggaggcatttccggagagttcttttgaagtcacttcagaaggatctacatgaggaaatgaactac

SEQ ID NO: 787429 - DNA, 100 bp, Homo sapiens
tacctcagcagatgaaatacatgaaggagacctagtggaagtggttctttcaggtgctgtacttctttgcagtatacaaggactagcagttaatattgac

SEQ ID NO: 787430 - DNA, 100 bp, Homo sapiens
ccggcgaagacgcgaccgcggcgcgagtcaccatgatactggctccaatactacagaatgaatagaaaaaatatgacttttttacaccatcttctgttat

SEQ ID NO: 787431 - DNA, 100 bp, Homo sapiens
aaggaatagaacggtcaaggagattatgtctacgtttacagggaagtcgcggccactgcctgtgtgacggatgtgaccccgctgggcctgaagctgggcc

SEQ ID NO: 787432 - DNA, 98 bp, Homo sapiens
aacatgacatttttgttccagaggatgatgatgatgatgactaacagcaatggccaatgtacatggtggactatgccggcctgaacgtgcagctcccg

SEQ ID NO: 787433 - DNA, 100 bp, Homo sapiens
ttcctgctgaagcagccaatagacaccggccagcacttgcacctcctgcgccgccgccccccatccaaggatatgccttcaagcctccacctagacccga

SEQ ID NO: 787434 - DNA, 100 bp, Homo sapiens
cgtggagatcaagcgcagcgatgctcacgtggaaaatgaagagcagtacacccaggctctggagaagtttggcggcaactgtgtatgcagagatgaccca

SEQ ID NO: 787435 - DNA, 100 bp, Homo sapiens
cctgagcgatacatgatgaacagcgtcctggaaaacttcaccatcctccagaccattcctcaagaattttgtatccaaggcccaaaagtttgttacccaa

SEQ ID NO: 787436 - DNA, 101 bp, Homo sapiens
aaacatcatattactcctcttctgtctgctgtctatgagggtcatgtttcctgtgtgaaattgcttctgtcaaagggaagtcttaagagaagccgacagat

SEQ ID NO: 787437 - DNA, 101 bp, Homo sapiens
gactccccggctcgaagcctggatgaaatagatctctcggctctgaggtacctggagtagaacagaaaaattattatgtctgtgttcccttgggactcatt

SEQ ID NO: 787438 - DNA, 90 bp, Homo sapiens
ggagaccatggagaccctcacggagctgggcgacgagctgaccctgggagacatcgacgcccgagcgggaagaagttccgcagcaagccg

SEQ ID NO: 787439 - DNA, 80 bp, Homo sapiens
acagagtatggctgcagaggatccatctgtcttagcaaggctgtcatcacagaattgaatgatctggcacgggaccctcc

SEQ ID NO: 787440 - DNA, 100 bp, Homo sapiens
ttcagccagcacactcctcgcgagcaagatgtcaagccctccaacatcctagtcaactcccgtggggagatcaagctctgtgactttggggtcagcgggc

SEQ ID NO: 787441 - DNA, 100 bp, Homo sapiens
aataccagtccccagtgagggtgtacaaatacccctttgaattaattatggctattgatgactcttccgcgtctatttctctggcccagcttacaaaggt

SEQ ID NO: 787442 - DNA, 75 bp, Homo sapiens
cgaccggacgggtctaggtgagacagaagccaaacaggaggaggaagtggaggggcacggccgagcagatgagga

SEQ ID NO: 787443 - DNA, 75 bp, Homo sapiens
tatgtttggatgttggatctacactttctcaagcactgtgatcttcaaatatgggaaaactgacaaccatgcctg

SEQ ID NO: 787444 - DNA, 101 bp, Homo sapiens
cctggagagtcgaagcagcagctctcgctccagaagcttcactttggtcctgggaactccaacaagggagcaaatcagagaaatgaacccaaactacacag

SEQ ID NO: 787445 - DNA, 51 bp, Homo sapiens
ccctggaaccgcagacctctgggcttcctgattgttgttataatgagagga

SEQ ID NO: 787446 - DNA, 75 bp, Homo sapiens
actgctggacatgcccaatgttagagagatgcttttacagggttaaatgataccacaagaggcagggcagcgggc

SEQ ID NO: 787447 - DNA, 75 bp, Homo sapiens
gcagaagctggaggaggcagaaaaagctgcagatgagagtgagagtgcttatgaggtgatcaaactcaaaggcta

SEQ ID NO: 787448 - DNA, 100 bp, Homo sapiens
tgtacgtgtacatcatttacggcatgtacttctgcatgaacatctccagccaggattttgcaagaacgaggctcaaggatgtgagggacacagtattgac

SEQ ID NO: 787449 - DNA, 83 bp, Homo sapiens
agctgtgctcgcgctactctctctttctggcctggaggctatccagcaaccaagttgtattgttagacacactggaacaagag

SEQ ID NO: 787450 - DNA, 50 bp, Homo sapiens
gaaagataaagcccttaaggacaagggtctgcctggcccctcaggtcccg

SEQ ID NO: 787451 - DNA, 90 bp, Homo sapiens
ctcctgcctggcctgctcccagccccagctgacaaactgactcccaaggggccgggccagcccctggcgaagcggtgctgcctccagccc

SEQ ID NO: 787452 - DNA, 75 bp, Homo sapiens
agaagacttggcgatagttccctttctagaaaggaaaggttatttgtcaatgaagaaaatgttaatgagtttctt

SEQ ID NO: 787453 - DNA, 100 bp, Homo sapiens
ctcccctggggcgtgcgggttcgcgtctgggaggccaagaccgctgtgtggaggtagccgcagcgccagcaccagacggagtttcactcttgttgcccag

SEQ ID NO: 787454 - DNA, 98 bp, Homo sapiens
agaacggcgacctcaagaagcagctccacgaaaggcagccgcggatcgccgcgctcagcgacaaacaagtttaaacttacacgaatcgctttctggag

SEQ ID NO: 787455 - DNA, 100 bp, Homo sapiens
ttccccccacctgaacagaaaactgcatttgacaaggtagatatagttgtaggtactccgggaagactagatgacttggtgtcaactggaaagctgaact

SEQ ID NO: 787456 - DNA, 96 bp, Homo sapiens
tcacctctgcctcctggtgcctctatgggtttcgactcagagatccctatatcatggaatgtggcctgctgcggaaggggacagtgctactggctg

SEQ ID NO: 787457 - DNA, 101 bp, Homo sapiens
gtccccggcgcgaagaggctggactcggattcgttgcctgaggatgatcacggacgtgcagctcgccatcttcgccaacatgctgggcgtgtcgctcttct

SEQ ID NO: 787458 - DNA, 97 bp, Homo sapiens
gacggattcatttagagctgcggaacaggacgccctctgatgtcatattgaacattccagatacctatcattactcgatgctgttgataacagcaag

SEQ ID NO: 787459 - DNA, 74 bp, Homo sapiens
tcaaggccctgtgcgctaaggccagagcccagcattacatcaacatgcccgtgcagttcaaaccgaagtccgca

SEQ ID NO: 787460 - DNA, 82 bp, Homo sapiens
gccgcccgcttcaaccccaggggaccagaggaactcagccctgattgcggatctctctaggagctgacactcgaaccttcac

SEQ ID NO: 787461 - DNA, 88 bp, Homo sapiens
tcctttatatagaagggagagtaggtcacagtaaggctgttagggatatctgcttcaatactgcaggaacacagttcctcagtgcagc

SEQ ID NO: 787462 - DNA, 100 bp, Homo sapiens
tacccgacacttacatgccatggccttctacgttgtgaaaatgtgctgatgagctccttctaactgagatgatgtttaatggccttttcaatgacctttc

SEQ ID NO: 787463 - DNA, 82 bp, Homo sapiens
ctcggagaccccgcgccgacggctgctcaaacatcaggatttggtcgtattgggcgcctggtcaccagggctgcttttaact

SEQ ID NO: 787464 - DNA, 95 bp, Homo sapiens
ccatcaattcaggaggctccctccgggttacccccactccagagagctttccatccaggtgtcatgcagaattatggggatcacccttgtgagca

SEQ ID NO: 787465 - DNA, 75 bp, Homo sapiens
agaaacatcagttggacactgatctgtttccccatttagaaatatccagagaagttgtattttgagggcctcgcg

SEQ ID NO: 787466 - DNA, 98 bp, Homo sapiens
ccggaactcaaaacagacccatctttggatcttcattcattaagcagtgcagaaacacaggatgtgggctaccagtacgggaaggcggtgtttggagg

SEQ ID NO: 787467 - DNA, 96 bp, Homo sapiens
cagttattgaatatcaagaggaggagttgttggcacggagtgtgaatgtgaagacacaagctctttctggatacagagaccaatttagtttggaga

SEQ ID NO: 787468 - DNA, 99 bp, Homo sapiens
catctttaactgcttggccgtgcttgccctgtcatcccacctgagaaccatgctcaccgaccctgcactgccctgctgtgctactcctgcaaagcccag

SEQ ID NO: 787469 - DNA, 75 bp, Homo sapiens
atggtgtttcaaagggtggtgaagaactaagagtgaagtcaccctgctgagaaatgaagtggcacagctgaaaca

SEQ ID NO: 787470 - DNA, 75 bp, Homo sapiens
gtagagaagaatgaacattgtattgagaacaatatagatttgcagcacgtagacagactatgctcttttctgcca

SEQ ID NO: 787471 - DNA, 75 bp, Homo sapiens
gaacgcgctgctgcagagggtcaccgagctggagcgagaacgatgccaacgggactgcaaagccgccttttctca

SEQ ID NO: 787472 - DNA, 101 bp, Homo sapiens
gcgccgtgtggctgctcagctcgggccacggagaggagcagcccccggagacagcggcacagaggtgcttctgccagtaccacaaagcctgctccacacct

SEQ ID NO: 787473 - DNA, 100 bp, Homo sapiens
gacgttgtggcggagaagggcagtggctgtagctgccctttccgtttccagggttccgaccagataattgtatggaagagatacagtgattttaagaaac

SEQ ID NO: 787474 - DNA, 76 bp, Homo sapiens
tgggtcagtccgccgctcaccccgcggccgcaccttcccgccttctcaggatggtgatgggaatctttgcaaattg

SEQ ID NO: 787475 - DNA, 100 bp, Homo sapiens
tgggtgaggaacctgactctgagaacaccccccagaaggctgacaaggatgccggcctggcccaggaattggcagcaatgaaacagattctcgttaagat

SEQ ID NO: 787476 - DNA, 56 bp, Homo sapiens
aaagtgaagcattatctcatcctgccggcctctttgcacctccacgtgccttcagt

SEQ ID NO: 787477 - DNA, 80 bp, Homo sapiens
caatttttacgtctagatttccatgcccatggaaggtttggtgcacctcgatttggaggaagtagggcagggcccttatc

SEQ ID NO: 787478 - DNA, 100 bp, Homo sapiens
cttgtttcttatatgtgatgccattccagcactggactcatggaggctgagcatttattcaggatgattcaaagccgccttactcctacgcgcagctgat

SEQ ID NO: 787479 - DNA, 82 bp, Homo sapiens
cggagggctcgcccgcggaggagccgcctgcgcatgctccatcgcctgggattgttaaaatgagtcttcggaagcaaacccc

SEQ ID NO: 787480 - DNA, 88 bp, Homo sapiens
tgactacctgctgtacaccctcaacaaacaccagcgctttgggtttattttcttgaaaaggctccaggcttcggcttggaaaatccca

SEQ ID NO: 787481 - DNA, 98 bp, Homo sapiens
tggaatttgattaactcattcaaggttacccagttggtggtattaaagataatcaaacattatcaagaagaaggacaaggaactgaagttgttcaagg

SEQ ID NO: 787482 - DNA, 82 bp, Homo sapiens
tactctcagcctactatctgtctggagaagagatggaacttgctaaggaagaaaagtgtgaatttctgccattcctgtcccc

SEQ ID NO: 787483 - DNA, 115 bp, Homo sapiens
ggaccacattacccagcttcacgagtacaatgacatcaaggatgtggggcagatgctgatgggcaaactagaaaggatctatgtttatgaaaataaaaaggaagcattgcaagct

SEQ ID NO: 787484 - DNA, 90 bp, Homo sapiens
cggaagttcccagggagaaggcagcgcgttgtacccgagggtcttactgaagtaacacaaagcttaaaaatggaaaatgaagagtttaag

SEQ ID NO: 787485 - DNA, 95 bp, Homo sapiens
gcaagccagacagctgggccggagcagccgcgggcgcccgaggggccgagcgagatgccttcaattaagttgcagagttctgatggagagatatt

SEQ ID NO: 787486 - DNA, 80 bp, Homo sapiens
cagacctgcaagctctttgacacacagcagttcttgtcagggaggatcaaccgccaaaggcacagctctgaagactggct

SEQ ID NO: 787487 - DNA, 90 bp, Homo sapiens
ggaaggcgcgggcaggagcctggcgaggatgcaccttcccctgccttggaaaggtataccaagcttggctacgcaggcaacactgagccc

SEQ ID NO: 787488 - DNA, 138 bp, Homo sapiens
gacctaatcacagtggaagcttttaagcctatactttctaccagaagcttgaagggtttggttaagtgtgtagaatttgacagcagtatcaagagctgaggagaaggagaagatggaaaggagtctagcaacttaaaa

SEQ ID NO: 787489 - DNA, 98 bp, Homo sapiens
cttttgagaggacaagcccagattccaaaacttatgtcaagttgcagtgcacgaggggattaactcaggaacagccatgtcaagaggattgtatcaac

SEQ ID NO: 787490 - DNA, 100 bp, Homo sapiens
gtatggtggcatgagaggcatgaagggattggtctatgaaacatcagttcttgatcctgatgaggaaacccgaaccctagcggagattgccaaagtggag

SEQ ID NO: 787491 - DNA, 74 bp, Homo sapiens
agcccctaggcccgggtcccggatccccgcgcacccggccaggctccctttgcagccctgtacctccgttatgc

SEQ ID NO: 787492 - DNA, 75 bp, Homo sapiens
caacgacaaaaggagcttttgccactgactcggccgtgtcctgacacctccaggattgtcagtggcttcgccccg

SEQ ID NO: 787493 - DNA, 100 bp, Homo sapiens
gctactgctcaaaatctggaagtcccgctcgtgcgccggcatgttatttgaaagcaattgagacgcaaccgaactttgcagtagcttggagtaatcttgg

SEQ ID NO: 787494 - DNA, 121 bp, Homo sapiens
ccacatttggaagcagttgtgattgggcgtggcccagagaccaagatcactgataagaaatgttctcgacagcaagggcagacagtttacagaagaatcaagacctggaatttgaaagaaa

SEQ ID NO: 787495 - DNA, 100 bp, Homo sapiens
gaaaaatcggcagatgttacagctgctcatgaaccacttggcaaatgttttacctcaatcatatatccacacaagtgcttctcttgacatttctcgaaaa

SEQ ID NO: 787496 - DNA, 98 bp, Homo sapiens
acctgggccagtattatcaggcatggagatgctactgatgtcaggaaataatagtgtaatccttgctgatgaaatgggcctaggaaagaccatccaga

SEQ ID NO: 787497 - DNA, 75 bp, Homo sapiens
taagggactcccaggaatatcaggccaggcacctcattgagaagtcagtgcgtaagatcgtctccttgctggcag

SEQ ID NO: 787498 - DNA, 76 bp, Homo sapiens
ggctggcaagactgtttgtgttgcgggggccggacttcaagatccacattgtttgaagttattgtgagtgcctcga

SEQ ID NO: 787499 - DNA, 100 bp, Homo sapiens
ctggtgattctgctggaaatcctgatcagctgcttagcttttcagccgcaactttgttagacctcatggcctatgacagaagagggagacctggagaccg

SEQ ID NO: 787500 - DNA, 50 bp, Homo sapiens
caacattttgcggatactcttctgaacactatggctatgcatcctccaac

SEQ ID NO: 787501 - DNA, 100 bp, Homo sapiens
tctgccttctggagagctgaccaaacactaaggcgcctttccttcgaggagctcaaggcatttttcaaaatctgacagtttttctcacaacaaccctgtg

SEQ ID NO: 787502 - DNA, 101 bp, Homo sapiens
cttgggtgaagcgaagttctaaccctcctgctcgatctcagagctcagacacagagcagcagtcccctacaagatatgatggtaattccctgctaagtagc

SEQ ID NO: 787503 - DNA, 75 bp, Homo sapiens
caattttgagagagttttgggaaagaagaaaaagtcagcactttttgaagtgtctgaggttataccagtcatgac

SEQ ID NO: 787504 - DNA, 100 bp, Homo sapiens
ctgagccaccgggtgagctcaccgcccagcccaaaccaggagattgcgagggagcgatgcggtgcagcgcgcaagagtgagccatggagctacgtgtggg

SEQ ID NO: 787505 - DNA, 75 bp, Homo sapiens
aaggaggccctgctgggccgcgtggccgtttccgcagcaagccacccgaggggactgcctggccttccagatgcg

SEQ ID NO: 787506 - DNA, 100 bp, Homo sapiens
gcagctgcgatggccgtggccgtggggagaccgtctgagaaccagcagaaatccaccaatgtagtctatcaggcccaccatgtgagcaggaataagagag

SEQ ID NO: 787507 - DNA, 83 bp, Homo sapiens
tggaacaaaaaaaggagatgcctggcagccccgctctctgcagtgagaaaccttaccactgtgactgggacggctgtggatgg

SEQ ID NO: 787508 - DNA, 75 bp, Homo sapiens
aaagagacaattcaagtacttcaggaaattgattccagtggaaacattaactcctgaaattgctttgtattggtg

SEQ ID NO: 787509 - DNA, 50 bp, Homo sapiens
ctcaatgactgccctctaaaggaagaggagcatctttccttgaagaagta

SEQ ID NO: 787510 - DNA, 101 bp, Homo sapiens
cctccccagccatgcagaactgctcacagaacatttcctgcctgttgctcacactctgttgtccacagcatacccgcaccctagatggctgactcttgtct

SEQ ID NO: 787511 - DNA, 80 bp, Homo sapiens
gtccgtccgccgccaccacccactccggacacaggccaagactaaggggctgcagagcggggtggacattggcgtcaagt

SEQ ID NO: 787512 - DNA, 100 bp, Homo sapiens
gatgacgtggagggctgccgcctccacgtgcgcggcgctcctgattctgctgtgggcgctgacgaccgaaggtcccagtagggatggcacaatcagcgag

SEQ ID NO: 787513 - DNA, 100 bp, Homo sapiens
ggaccccctaagcaagctgccgcagatcgcaggaccgtggagaagacttggaagctcatggacaaagtgagctcagaggacgaatcaaaatgggtagaag

SEQ ID NO: 787514 - DNA, 75 bp, Homo sapiens
taaagctgagctgcgaggaaaatggcggcgggagggaaaagaagatctcccggagcagtgccctgaaagtgctgg

SEQ ID NO: 787515 - DNA, 82 bp, Homo sapiens
cagcggggactccaaggaccagcaactcatgaaagccaaacttggccctgctggcaacaaagtcatcagtccctctgaagac

SEQ ID NO: 787516 - DNA, 51 bp, Homo sapiens
actgctggagtcatctgttctgagacatcagaagagctaacaattgctgga

SEQ ID NO: 787517 - DNA, 83 bp, Homo sapiens
gcttcgtccagatcgggaaggttgtatcacggactgattcaccgagcccaaccgtactcaactcacatatttctaccccaaat

SEQ ID NO: 787518 - DNA, 98 bp, Homo sapiens
gctaatcttcagggggagctgagccacatcatcagacaactacaggcctgctctctggttccagctggggcgaatggagtgagccgctgtggtgtcgc

SEQ ID NO: 787519 - DNA, 98 bp, Homo sapiens
catggccactgactcatgggccctggcggtggacgagcaggaagctgcggctgagtcgagcatcctggccagaacaagccaaggagccaagacgagag

SEQ ID NO: 787520 - DNA, 82 bp, Homo sapiens
gataaactgaagtttaaccgtgctgacgctgctgtgtggactctgagtgacagacaaggtttgcctgaatccatcattgcag

SEQ ID NO: 787521 - DNA, 83 bp, Homo sapiens
acttcacagcctctagaactcgtgagtgcatctccatccacgttggccaggctggtgtccagattggcaatgcctgctgggag

SEQ ID NO: 787522 - DNA, 75 bp, Homo sapiens
cgaccggactggacgcatttttatacataggatttgagttctgtgaacctgcatttgttgttggtaattgcctcc

SEQ ID NO: 787523 - DNA, 82 bp, Homo sapiens
acagcagcaaccttggagcaggcagggcaagtgtccagagaatggctgggatgaaagtacacttgaactctttttacatgaa

SEQ ID NO: 787524 - DNA, 100 bp, Homo sapiens
atgatactgtgcaccttccatttgaagggggaagtctcttgcaaattccagtcaaggccctaaaatataggtggtatggcaggacttcagtcaatgatga

SEQ ID NO: 787525 - DNA, 90 bp, Homo sapiens
acggaaagcaggggtggatcctctggtaccgctgcgaagcttggctattgagggcacctacattgacaagaaatgccccttcactggtaa

SEQ ID NO: 787526 - DNA, 100 bp, Homo sapiens
tctcggttttctctgctctgccaacactagtggaatatgatcacatcccaggtaggaggtgtgcaatctttggggggaacaggtgcacttcgaattggag

SEQ ID NO: 787527 - DNA, 75 bp, Homo sapiens
cgcctcggcccgcacgccaagcacgtggtgggctatggccaccttgaaagatcaactgaaatcggcaaacttctg

SEQ ID NO: 787528 - DNA, 75 bp, Homo sapiens
gtgattcctgcccagcacctgtgaggcctgacgttggccaatccgccatggtatagttgaagattgggacttaat

SEQ ID NO: 787529 - DNA, 83 bp, Homo sapiens
ccgggacccggtgtctgctcctgtcgccttcgcctcctaatccctagccactatggccctccctatcctgaagacattagctg

SEQ ID NO: 787530 - DNA, 87 bp, Homo sapiens
agagtggctggaggaattcagtttcttgggggattttctattgcagcagaccatgctacgagtgaaggatcctaagaagtcactgga

SEQ ID NO: 787531 - DNA, 50 bp, Homo sapiens
ggagactgatggtgaagagctagctggggtggctggcctgcaggtgggga

SEQ ID NO: 787532 - DNA, 90 bp, Homo sapiens
cggcgcagccggagtggggccgtgagaatatcgtatctactccagtgaaaatcaagctgatagacatgctttctgaagcaggactctctg

SEQ ID NO: 787533 - DNA, 75 bp, Homo sapiens
gcggccaggtccctgctgaatcacacgccgccatccgggaggcccagggaagaataatcatgggccagactggga

SEQ ID NO: 787534 - DNA, 90 bp, Homo sapiens
cagacatcaacttttggatccaagctggagtgcctgagagcagagctgacatctgataaagacatgtaccttgacaacagctccattgaa

SEQ ID NO: 787535 - DNA, 75 bp, Homo sapiens
ggtggagcagctggcctgcatcatggaggagagcgaagaggaactttactcctcctgtcgccagctgaggaggcg

SEQ ID NO: 787536 - DNA, 89 bp, Homo sapiens
gcatcgccacacaaggggagctcgtaaggtccctcaaagcgggaaatgcgtcaaagattaaactccttacagaagttaactctgcagac

SEQ ID NO: 787537 - DNA, 74 bp, Homo sapiens
tggactttgctctggaatctggtgtgggagattcttcacagtcaagctcccagttgctcttgatcctggggcca

SEQ ID NO: 787538 - DNA, 78 bp, Homo sapiens
tccccagcccactgggctacgcagtgttagaaattgattttgcggagctcaccttggaagagattattggcatcgggg

SEQ ID NO: 787539 - DNA, 82 bp, Homo sapiens
aaacatctacgtgcccacggaagatggcagtcatggccaaccaaaattgatgtaccccaggaccttgaggatgacctcacgg

SEQ ID NO: 787540 - DNA, 98 bp, Homo sapiens
ctggactcagcggtagcaacctcgccccttgcaacaaaggcagactgagcgccagagaggacgtttccaactcaaagctggagtgcagtggtgtgatc

SEQ ID NO: 787541 - DNA, 100 bp, Homo sapiens
tcagtttgatgcgtcacactacgacagtgagaaaggaggtttttcgttggaatatacgttgcacatttatggcgattctgagtgtgagggcagacttctg

SEQ ID NO: 787542 - DNA, 101 bp, Homo sapiens
aaccgggaccgccagcgcaggaggagctccagggtcagaggtcggatgtctacagcgacctcaacacacagaggccgtattacaaatgagcccgaatcatg

SEQ ID NO: 787543 - DNA, 100 bp, Homo sapiens
ccccacttggtgaatggagatgcagctcagcagacctgtcgcgaaatcgcctttcagaaattcctatagaagcatgtcactttgtttctctggaaaatct

SEQ ID NO: 787544 - DNA, 100 bp, Homo sapiens
cgggatcctccagttcctgcacatctaccacgccgtcaaggaccggcacaaggacgttctcaagtggggcgatgagataaacaggggtcacatgacgaca

SEQ ID NO: 787545 - DNA, 127 bp, Homo sapiens
ggcaattcaccgaattcgaatcaccctaacaagccgcaacgtaaaatccttggaaaagggggtcaccagtcgttggcacaccaagaagctgccccgcaagacccaccgaggcctgcgcaaggtggcc

SEQ ID NO: 787546 - DNA, 50 bp, Homo sapiens
acaccaaggaagatgtatttgtacaccagatgcagaggccaggatgtggg

SEQ ID NO: 787547 - DNA, 100 bp, Homo sapiens
cctttgtttgcagtttatagaagagtgcttcgcatgtatgatgacagaaaccatgtgggaaagaatgatgagaagacagcagctgattacaagattttag

SEQ ID NO: 787548 - DNA, 51 bp, Homo sapiens
ccctactccaccatcatcaacaaagtgcttttttaggaccaaaggatatat

SEQ ID NO: 787549 - DNA, 101 bp, Homo sapiens
agagggacggagggggtctctcagtaatgctggggaccctgagatcgtcaagtctcccagcgaccccaagcaataccggtcacatgtgccaatttaacgaa

SEQ ID NO: 787550 - DNA, 100 bp, Homo sapiens
atatgaccctatggaagcagaagaagctgaggatgaagaagatgatgctgagcaggaattactctcagatgacgcttcatctgtttcacaaattcagtct

SEQ ID NO: 787551 - DNA, 113 bp, Homo sapiens
ccctggatggtgaagaaggagggaacaagaggcccatgccctgaccagcatctcagacatgtcgaaaaagatgttttgatccctaaaataatgagagaaaaggccaaagagag

SEQ ID NO: 787552 - DNA, 85 bp, Homo sapiens
gttagccctcactggagttcctatagtacagtggccaaaaagggataagggctcaagggttcttgttgatgcacgagataagctt

SEQ ID NO: 787553 - DNA, 89 bp, Homo sapiens
cttcagctggcctattacagacttcatggacaattcccaaatgctggaaaatcctctttgctaagttgtgtttctcatgcaaaacctgc

SEQ ID NO: 787554 - DNA, 83 bp, Homo sapiens
ccgcgggcgccaatggggagcagaaggactcggacacaggctctacagattctcccctgcccctggagaaggaggagcaggtc

SEQ ID NO: 787555 - DNA, 90 bp, Homo sapiens
aagacaccgaaagtaaagaagaagaaaacttcagtgaaacaagaatgggataacattactactggatggaaatccattccgagttcctcg

SEQ ID NO: 787556 - DNA, 75 bp, Homo sapiens
tgagactgtggcagaatgtcgtgtgctgcagaagctgggagcagacgctgttggcggaggttgcagtgagccgag

SEQ ID NO: 787557 - DNA, 75 bp, Homo sapiens
acgagggccagctgacggagatggtgcagaagatggaggaggcagttgtgaaaaacttcaggacaaaaatgtttc

SEQ ID NO: 787558 - DNA, 100 bp, Homo sapiens
cggactcgccatggaggaggaggctccagcccccttttggacatcgttggcggccggaaggcgaggccccgccagttcccgttcctggcctccattcaga

SEQ ID NO: 787559 - DNA, 100 bp, Homo sapiens
tttagccttttaacattcaaggattagcttctgtctgctgctaagtttttccagctggaggctttgcagcgacactgtgagattatctgtgcgaaaagca

SEQ ID NO: 787560 - DNA, 75 bp, Homo sapiens
attttggcattgacatttaattttagggtcctttatatagaagggagagtagttcattgactggctattcagcat

SEQ ID NO: 787561 - DNA, 75 bp, Homo sapiens
ttccatgaggatgatctagagaacctcaaaaggtgtccaacacgctctcttgggctctgtatgagctctcccggc

SEQ ID NO: 787562 - DNA, 100 bp, Homo sapiens
ccctaaaccagctcacagaaatagcaaccctgtcattgcctacttggaggagatccagtcggtccgtcgccataccaacagcatgctggaaggcaccaag

SEQ ID NO: 787563 - DNA, 75 bp, Homo sapiens
gcagcctggtgcagatcatctacgacgagaaccggaaactaaagttacagagtggagaggtaacaaaagaagaga

SEQ ID NO: 787564 - DNA, 75 bp, Homo sapiens
ctacagcagagaccttgagggatatctttcttcactcctcttcacttcttcagcaatggcagcagataaaagtga

SEQ ID NO: 787565 - DNA, 74 bp, Homo sapiens
taaatagtaccatcacagtaaccatgaaggtaagaagcgcaattccacactctacataaccatgttactcattg

SEQ ID NO: 787566 - DNA, 95 bp, Homo sapiens
actgcacttcttttttgagaaaggaaggaatatatcctgactgattctgcatatctatgtgagactgaattttcctcttagacttcagctaaaac

SEQ ID NO: 787567 - DNA, 50 bp, Homo sapiens
gggagagttgctaggaaaatgatagactgggagctccatgaggtccgaga

SEQ ID NO: 787568 - DNA, 76 bp, Homo sapiens
cggggctccaatggcgctttctacaagattagtgatgatgaaccaggttatgaccttgatttattttgcataccta

SEQ ID NO: 787569 - DNA, 90 bp, Homo sapiens
ggatttgttaaggattccaagtaactcttatttggttgcatctggaggtggtggggttggagatggtgttcaagaaccaaccacaggcaa

SEQ ID NO: 787570 - DNA, 50 bp, Homo sapiens
caacagcctctaatatggagtatatgggtttggaaatcccttgtctccag

SEQ ID NO: 787571 - DNA, 90 bp, Homo sapiens
cgtctgcttcggagaccgtaagggttaaacccatccagagtaatggctgcggccttacccaggaccctgggggagttgcagctgtataga

SEQ ID NO: 787572 - DNA, 101 bp, Homo sapiens
aagacccacatcatgaagtcggcggatgtggagaaacctaatctgggagcctgcaagtgacaacagcctttgcggtccttagacagcttggcctggaggag

SEQ ID NO: 787573 - DNA, 50 bp, Homo sapiens
gaatactccatgtcaactgtcttgcccccacagaacctttattgtgtaag

SEQ ID NO: 787574 - DNA, 98 bp, Homo sapiens
tctcgctccgtggccttagctgtgctcgcgctactctctctttctggcctggaggctatccagcatcaggatcctcatgaccagccaaagagaagaag

SEQ ID NO: 787575 - DNA, 102 bp, Homo sapiens
ctgttcgaggccaacgacctgtttgagagtgggaacatgacgcaggtgcaggtgtctcttctcgccctggcggggaagtttaagtgctgtggggctgctaac

SEQ ID NO: 787576 - DNA, 88 bp, Homo sapiens
ggcaccagctcactgccaccaaggctggtgcagacatctccatgattgggcagtttggtgttggcttttattctgcctacttggtggc

SEQ ID NO: 787577 - DNA, 90 bp, Homo sapiens
caggaactggtaatgtttctaagaggatgaagtttttgctgctgcagcagaagtacctagaatacctggaggatggcaaggtcctggagg

SEQ ID NO: 787578 - DNA, 75 bp, Homo sapiens
ggaagatggtagctgtaaacctggccactggaaaacgaagaatctccggcctgtgaaactgtgaggggattcggc

SEQ ID NO: 787579 - DNA, 75 bp, Homo sapiens
ctcggccggagtgcacgggccgagtctgcgcgactacccacgcgtgacagagttgtctgctggttctcagcttga

SEQ ID NO: 787580 - DNA, 100 bp, Homo sapiens
tgaagttccaattcaaaagatgtttgaaaagctggctgtacccaagaattaaaccaagacaaaggagcttggcctgaaacttccacacagaattttagtc

SEQ ID NO: 787581 - DNA, 101 bp, Homo sapiens
gcacagtggaaggcactttccatgaatactgagaatgccaaagtaaccagatctaacatgagtgtggcccagagttgctcagaattggagcagagcctgag

SEQ ID NO: 787582 - DNA, 100 bp, Homo sapiens
ggggtgccggccgggattcgcggcccggagctcgggaccgagtatcctggctttaaatcctcgaacacaaactcatgcaactctgcgttccacttcggcc

SEQ ID NO: 787583 - DNA, 100 bp, Homo sapiens
tcaaggacatggagaagatgttcaagcagtactccaaagattcaggtttactcacgtcatccagcagagaatggaaagtcaaatttcctgaattgctatg

SEQ ID NO: 787584 - DNA, 104 bp, Homo sapiens
ttattaacaaaaagttacccaaagaacttctgttaagtgatgtcttggcattgcccattttcaagcaggaagattccagccttccattggatggtgaaacagag

SEQ ID NO: 787585 - DNA, 50 bp, Homo sapiens
ctggaggaggtgttgaaagggagccatgtccattggagcccgttcccaat

SEQ ID NO: 787586 - DNA, 76 bp, Homo sapiens
ttcctctagtttctggataatgagcaggcacacagataacaacgaacttgatgcaagtgataggtttgccaaggtc

SEQ ID NO: 787587 - DNA, 100 bp, Homo sapiens
ttggcagagaatccaagtactggcttggtttagaaagaggggaaacagctaaagaagccttagatgtcattgtctccttgttggaagaacatggacaagg

SEQ ID NO: 787588 - DNA, 82 bp, Homo sapiens
ggacaggatcccagtttcctacaagcgaacaggattctttggaaaaaaaatggctacaaacttcctagcacatgagaagatc

SEQ ID NO: 787589 - DNA, 75 bp, Homo sapiens
tggcagacccggtttgctgatcgccccagggatcaggaggattttgaatgtggaaatgacgtggaactgtctttt

SEQ ID NO: 787590 - DNA, 83 bp, Homo sapiens
aagagacttttttctaaagaatggcggactactggaagtcacagccaaagaaattctgtgattactgcaagtgctggatagca

SEQ ID NO: 787591 - DNA, 97 bp, Homo sapiens
ccgcgaacccctctgggatccccgccgctctgtctacaacccgaggtgtggacactgccagcggctgcagccgacttggaatgacctgggagacaaa

SEQ ID NO: 787592 - DNA, 75 bp, Homo sapiens
gaaaatcgtcatctttctgaaatggtgatgaaattggaattgggtttacatgagatcgtctggggaatatttttc

SEQ ID NO: 787593 - DNA, 90 bp, Homo sapiens
ccgcgcctggtgatcggctccttaccagctcacctctcaccgcgcatgtttggaggaatgccaagaagaattggcaacgcattcaggagc

SEQ ID NO: 787594 - DNA, 74 bp, Homo sapiens
cggaaaatagcctttgccatcactgccattaagggctccgctgatcctctaaatagtgctttccatttgaccta

SEQ ID NO: 787595 - DNA, 90 bp, Homo sapiens
ctagccatcaatgtttccaaggcccgcaagaagtacaaagtggaggttatccaggtacctcaagggaagtacaaagttttgccaacagag

SEQ ID NO: 787596 - DNA, 100 bp, Homo sapiens
tgctctgttctgcccggaggagccgcccgtaagtgacaagagacccgctgagggggcctcccctgcaccgcccagatacagatccacgggttttagaaaa

SEQ ID NO: 787597 - DNA, 82 bp, Homo sapiens
ttaccggaagcctgttgatggtgataactatgttcgtcggagtaaccaaaggatggctggctgtggtgaaattgatcattca

SEQ ID NO: 787598 - DNA, 88 bp, Homo sapiens
tcattgctttcttcattttgactacgataaaagcagtgagcccaaagagatagttgaaaagtccaaaatcccaggccgaagaaactcc

SEQ ID NO: 787599 - DNA, 125 bp, Homo sapiens
agggtgcgaggtcgagtaccttccctgtcccatcgcaaacccaaagatccccgttcctggagattctgattgagggccaattcctgtccccccagcagcatggcatcgtgtgctgaaccctctga

SEQ ID NO: 787600 - DNA, 97 bp, Homo sapiens
cttgcccctcggccgggcggacggttggacgtgataagtatgagcctgcagctgtttcagaacaaggtgataaaaagggcaaaaagggcaaaaaaga

SEQ ID NO: 787601 - DNA, 80 bp, Homo sapiens
attctgtctgtccacgatagtgccaggcctatgttggagagctgcctgagaactggacagacacgcgggagacgctgctg

SEQ ID NO: 787602 - DNA, 82 bp, Homo sapiens
tggacctgggaactccaacatatgatgaaaaccccatgaaggcctcattgccagttcataaccaggtgctgccttccatcga

SEQ ID NO: 787603 - DNA, 83 bp, Homo sapiens
ggaagtggagcaccgatgatgtgcagatcaatgacatttccctgcaggacactgcccatctctaagataagaacctggaaagg

SEQ ID NO: 787604 - DNA, 100 bp, Homo sapiens
agagcatctggagctaattgtgaaaaatagtgcaacctacaatggaaatatattcttccctctctcctgcctttatgaggaaactgatcatcaaaagttc

SEQ ID NO: 787605 - DNA, 75 bp, Homo sapiens
ctttctttaacttttttgcccctcctgaagtgttggctgcaccaattctagaagtaagctctccaagttcagact

SEQ ID NO: 787606 - DNA, 98 bp, Homo sapiens
tctactctttggatagagaccaaaatcatactttgaaaacactggaactattttggggctgatgagaatcttggtccagtggctgtgagcattcgaag

SEQ ID NO: 787607 - DNA, 82 bp, Homo sapiens
ccaggagttcgtctcttacgtctgcggaagtgcagctgcctcagttcttagcgcagctatttgaactgctgggacctgaagg

SEQ ID NO: 787608 - DNA, 75 bp, Homo sapiens
gcagcatggcacaaacatggctgggaggaattggtatattacacaggtttaagaattgtttaagctgcatcaatg

SEQ ID NO: 787609 - DNA, 98 bp, Homo sapiens
cacaataacttgttatctatactccgagcccacgaagcccaagatgcagggtgtcattccacacatccacaaatctctgattgggaagaaaggacaac

SEQ ID NO: 787610 - DNA, 75 bp, Homo sapiens
cagccttcagcttttggcagcatgaaagttagcaacagtacctgtaatgagaaacagtaaagaaaacagactaag

SEQ ID NO: 787611 - DNA, 74 bp, Homo sapiens
gttgtgtggtcgcgtctcggaaaccggtagcgcttgcagcatgattttgagaagagggggaaaaaggaagtttg

SEQ ID NO: 787612 - DNA, 90 bp, Homo sapiens
atcctctccggctgcttggtctacggcacagagttttgccgaattgacaagcccctgtgtcacagtgaggatgagaaactcagcttcgag

SEQ ID NO: 787613 - DNA, 90 bp, Homo sapiens
gagatgggagatggtgctatacggtctttagggttacgtgaagtcaagtaaaatcgcacactgacggagtctcgctctgtcacccaggct

SEQ ID NO: 787614 - DNA, 100 bp, Homo sapiens
acattgactacgaggaatggcggcggctgccgcaggacctgcagcatcccagaggatatgacagcgcgtgatctgctacagcagagatacacccttccaa

SEQ ID NO: 787615 - DNA, 74 bp, Homo sapiens
acacccttccagatgatttttgaggcagaagctcctcctggggtagagacagatcttattgatgttggattcac

SEQ ID NO: 787616 - DNA, 82 bp, Homo sapiens
cccgctggcagtggctacagtggagccacggagaccgcccagcagttgaagcggagcgccggggtgcccttccacgccaagg

SEQ ID NO: 787617 - DNA, 50 bp, Homo sapiens
gattctcagggcaacccagatctgaagaccctgttcccaatggcctccgg

SEQ ID NO: 787618 - DNA, 82 bp, Homo sapiens
ttctcattccttctccagggagagtcgctgcaggaactcctcctcccacatctgatggagctaccaatcatcagatctcctc

SEQ ID NO: 787619 - DNA, 82 bp, Homo sapiens
ccccagggcccacgggccagccccgccgccctcgcaacctggcagccgccgccgtggaagataaggagggttcctgccccca

SEQ ID NO: 787620 - DNA, 100 bp, Homo sapiens
tttggccctgcgcctcgtccagcctaggttccacccttttctgggaacatttgctcccattcatgctgaggctccagagttcatggaaatgagtgttgag

SEQ ID NO: 787621 - DNA, 75 bp, Homo sapiens
tgggagactgaaccatctccacatctagttgccccagcctcgtctcctaagcccctccctcctcctggctcctct

SEQ ID NO: 787622 - DNA, 98 bp, Homo sapiens
agggctgagcagtcaactcaaatgcaagtccaagaggaggaggaggcggaggtccaagcggaaaggagtatgctgctgctgttccgctttgcgtcctc

SEQ ID NO: 787623 - DNA, 82 bp, Homo sapiens
aggcctgccagcacccctggagaagcgcgttaaggagctggctcaggttcgagaacttgtcttggacaattgcaaatcaaat

SEQ ID NO: 787624 - DNA, 83 bp, Homo sapiens
cgcgaggatgcgtgttcgcgggtgtgtgctgcgttcacaggtgtttctgcggcagaacaccaccgatagccacaccgaagagt

SEQ ID NO: 787625 - DNA, 87 bp, Homo sapiens
cgcagtgggataaatctcaaagatctcgtacaagatccttctttgttatacattggctcttcaaagacgttcacctcatcagagaaa

SEQ ID NO: 787626 - DNA, 80 bp, Homo sapiens
aacgctgcctggaaaggaagtaccaggacttgcacaggtatcgatatcctgaagcttgtagcagcccaagtgggaagcca

SEQ ID NO: 787627 - DNA, 100 bp, Homo sapiens
ggaggggccgcccacgtagccccgcagctgcagccgcctgaccacggcgactggacttacgaggagcagtttaagcaggcccagggccccggccagtgcc

SEQ ID NO: 787628 - DNA, 74 bp, Homo sapiens
ggaagaacggtgaatttcccccgcaggtacccattcctggcccagtgggtaacaagagaatggttcatttttcc

SEQ ID NO: 787629 - DNA, 96 bp, Homo sapiens
acccaggagtttcctgtgtccagcgctgccggagccgcctgaggctgcaagaagtgaaagtcatggctgaccgcatcattggcatgcggactcaac

SEQ ID NO: 787630 - DNA, 91 bp, Homo sapiens
tattagtaaaccaatctccgaacacaaaatcttattccttggagcaggagaggctttctcggtatcagcagtttaaagattttcaacgacg

SEQ ID NO: 787631 - DNA, 100 bp, Homo sapiens
cagccccccgcgggacgcctgcgtctacagcagctgctactgattctgaagactactttgaggtcaacattccaacagacctacgagcaaaacattctgg

SEQ ID NO: 787632 - DNA, 100 bp, Homo sapiens
agaagatcatcattaaggacggaggcacggagtccaaaactacttacctggaagaccttccaccaccccctgagtatgaattggccccgtccaagttaga

SEQ ID NO: 787633 - DNA, 100 bp, Homo sapiens
ctggaatgtgtctgtgaataaagactagccgaaggtgatcccattaagatactaatgccatcactgtctcctacaatggaagaaggaaacattgtgaaat

SEQ ID NO: 787634 - DNA, 87 bp, Homo sapiens
agccatgaggccaaaggcagttgtattggctgggctgcctggcttttatgacccgtgtgtgggggaagagaagaacctgaaagtgct

SEQ ID NO: 787635 - DNA, 90 bp, Homo sapiens
agctggtgtggggcaccaagagcagccccggtctctcggacaccattttctgccgctggacgcaaggcacctgaatggacagaagaggac

SEQ ID NO: 787636 - DNA, 75 bp, Homo sapiens
cagcaaccccccagccatgattaaccctgctaattcagatacatccaaaattgaagacattagagcagaacaaga

SEQ ID NO: 787637 - DNA, 75 bp, Homo sapiens
gcccctgaaggcctcgctggagatcgagtaccaattgtcgacaacagtagcaactgggcagtgtgtgggaaaagc

SEQ ID NO: 787638 - DNA, 89 bp, Homo sapiens
aagaaacagcttcatgaactccaagccaaaatcacagctttgagtgagaaacaggactttctgcagggcgactgcaccaaagcgaaaca

SEQ ID NO: 787639 - DNA, 98 bp, Homo sapiens
ttcgggagaggatatgtagcgaggaggaacgcgctaaggcaaagcacctgccaatgatggagcatgtgcgaattcatccggaattagtgactggatcc

SEQ ID NO: 787640 - DNA, 100 bp, Homo sapiens
tggggccgtgcgccactatgaggaggaactgaggctgcgcagcggcaacgtgctggaggagaacatgatcgtgtatgtggaaaagaaagtgctagaagac

SEQ ID NO: 787641 - DNA, 100 bp, Homo sapiens
ctcagtagaatgtggtgccaaaattctagcagctaatccagaagccaaggtggagaaggaacgtgataaagaagtaagcgatgatgaggctgaagaaaag

SEQ ID NO: 787642 - DNA, 75 bp, Homo sapiens
gacgcagccgtagacaccagctccgaaatcaccaccaagaaaccaaagccgcctttggcctctgcagagggccca

SEQ ID NO: 787643 - DNA, 76 bp, Homo sapiens
gtggttctgctgaacaaaggcaaaatgagccgtcagactgctacagcattacctaccggtacctcgaagtgtccac

SEQ ID NO: 787644 - DNA, 96 bp, Homo sapiens
tgcacgataaaggaactcaggcgcctcttcttagttgatgatttagttgattctctgaagactcagattgatggacaacttttcttaattaagcac

SEQ ID NO: 787645 - DNA, 98 bp, Homo sapiens
ttcggccgtgccctccgacagccaggcccgcgagaaggtgagaactctgtctcagtcgacgggaagtgcagtgactccacgctactgagcaacttgtt

SEQ ID NO: 787646 - DNA, 75 bp, Homo sapiens
gacctctgcaggagagaaactcacggaagacagaaagaagctccgagagtgcaacagatgggattggaaaagcct

SEQ ID NO: 787647 - DNA, 101 bp, Homo sapiens
ggaaaatatcccaaggactaatctgatcgggtcttccttcatgcagcactgagaagtgaaggaatatttgggaggatcagaagcttggtcctgattttgcc

SEQ ID NO: 787648 - DNA, 82 bp, Homo sapiens
cggcggcctgcctccgggcacacccggctccccggacgcctcgatcctcgttcctagctgcctgccagcgtcctcggcccgg

SEQ ID NO: 787649 - DNA, 127 bp, Homo sapiens
gatggtcgtcactccccgcctatggtcaaaaatgctactgtgcacccaggcctggagttgccatgcccggaggctgtttgatgtcctgcacgagcccttcttgaaagtaccctgatgaccccagctg

SEQ ID NO: 787650 - DNA, 98 bp, Homo sapiens
gggagagattatcaagcgttttgagcagaaaggattccgccttgttggtctgaaattcatgcaaaagactcactccatagttcatggccccgtgatcc

SEQ ID NO: 787651 - DNA, 75 bp, Homo sapiens
acttgaaatgaaaggagattccaacctacttcagttgatattcactgatggactccaaagaatcattaactcctg

SEQ ID NO: 787652 - DNA, 101 bp, Homo sapiens
ccctgcgccagagaccagataaacagaatggggaaatggagagagaacctgaaagagccccaaactcgaggacctattgctccccaagaataacatcttcc

SEQ ID NO: 787653 - DNA, 82 bp, Homo sapiens
gctgctcttcctccagaatgcgctcggacggaacgttaggaaggccctgaagtccattggaatattaagcccaggagttgct

SEQ ID NO: 787654 - DNA, 124 bp, Homo sapiens
gaacagctgcttcagtctgcaagtatggagctcaagttcttaattattcagaatgctgcggttttccaagaatgtgtctgtgaaaactacaagctggccgtaaactgctttgtgaataataatc

SEQ ID NO: 787655 - DNA, 99 bp, Homo sapiens
caactcttcaaggaaaattcgtatttgcagtgggaagaataagtaacattgatcccataaaaactgcccaaggatctctctcactaaaggcatacagac

SEQ ID NO: 787656 - DNA, 100 bp, Homo sapiens
agttgcatttcctcgtcgagcgcaacccaaggttgctccttgagggcaggacagttcttatggctttatccgttgcgtaagcacagagaggtctgcgagg

SEQ ID NO: 787657 - DNA, 90 bp, Homo sapiens
tgcaaagaagcatttgcagacgttgtctcatgggtaccgcttgccaactttggagcagcagtggacgtcagctcagcgaggtcttcatcc

SEQ ID NO: 787658 - DNA, 90 bp, Homo sapiens
gcaagctgaagacatcaagaagatcttcgagttcaaagagaccctcggaacaacttgggaatcagtgaaacgtacaaccaggaaagagca

SEQ ID NO: 787659 - DNA, 80 bp, Homo sapiens
ttacctgcttcccaatcccactgatgaggatcagcccatggtatctttcagatgaaggcattgaagcttgcacaagctct

SEQ ID NO: 787660 - DNA, 75 bp, Homo sapiens
ttcgcagtggtcgcttcttctccttgtattctaccttgtaaatactgttatttgtatatactgtaaatgatgaca

SEQ ID NO: 787661 - DNA, 100 bp, Homo sapiens
tggactggggctactgcgactgcagacacggtgctggagaatctggtaaaagcaccattgtgaagcagatgaggatcctgcatgttaatgggtttaatgg

SEQ ID NO: 787662 - DNA, 100 bp, Homo sapiens
cgccaggtacgagggcgggtaccagaggagctgcgggagcgagagtgcgtgtggcggccgccgggtcctgggacttgaaaatactggaaatctgtccgga

SEQ ID NO: 787663 - DNA, 98 bp, Homo sapiens
cttggtggagcaggagcggctgggcatcctcctgagactccggggtcagacgcccactccagtccgggaccatgtctggagaactaccaccaaacatt

SEQ ID NO: 787664 - DNA, 100 bp, Homo sapiens
aaagccacagtcttcaagagcccacggacaccacctcaacggtctaaagacattgccctcacagagtgaaatgatggcagaaatatctaaagctcaagag

SEQ ID NO: 787665 - DNA, 75 bp, Homo sapiens
actctttgggaaagccactcgaaaaggatagaatttttgcggcatttgaagagctttttccagattatgtttaaa

SEQ ID NO: 787666 - DNA, 100 bp, Homo sapiens
aaactctccgacagcagatgattgaagtggaaatatccaaacaggccctccagaatgagctggagagactgaaagaggttgaaggtcgaggagctggaag

SEQ ID NO: 787667 - DNA, 76 bp, Homo sapiens
gcaggattggtggtgattttcatagccaaaacccagtgacttgattgtaaaaatttacagagcggaatcatatgct

SEQ ID NO: 787668 - DNA, 99 bp, Homo sapiens
cctccctgcaactaactccattcttaattgatggactcaccctgtcacccaggttggactgcactggcctcaacctcctgagttcaagtgatcgtccca

SEQ ID NO: 787669 - DNA, 100 bp, Homo sapiens
ccaactcggcaggcacacgttactcagcccctgcgaacctgtatgtgcgagctacgagagtacaaggtagtgggtcgctgcctgcccacccccaaatgcc

SEQ ID NO: 787670 - DNA, 74 bp, Homo sapiens
agtcaagaagacaggtgggccataagacttaattcagtgcacaaatgagatgaatgtgaacatcccacagttgg

SEQ ID NO: 787671 - DNA, 100 bp, Homo sapiens
tgagagtccctaacagcggcagcggcggccacggcggcggctggggccgagatggtggctgcaggaatctgtcgttcagatgagcatgtggttagtggca

SEQ ID NO: 787672 - DNA, 75 bp, Homo sapiens
agagatccagcccccttataagccaaaagctcagttctcagccctgacagaggtgcttttccacttcctaactga

SEQ ID NO: 787673 - DNA, 97 bp, Homo sapiens
aaagtcggcacgacgcgctcgacacgcgggtgcggggcgacctcggtggcccgcaggtggttagctcaaccaatggagagctgaatgttgatgatcc

SEQ ID NO: 787674 - DNA, 50 bp, Homo sapiens
cagatgattccctcaccaaaaaggacagttttagaagacgacagaaagaa

SEQ ID NO: 787675 - DNA, 114 bp, Homo sapiens
ggagtgtggtccaggcacgcaagttcaagaggttgtgtgcatcaacagtgatggtcctagagacaggaggcatgccatacatggcaacatggggaagaccagagtggtcaggag

SEQ ID NO: 787676 - DNA, 50 bp, Homo sapiens
ccgccctctggccgttgcctcaccgggaatactgtatgtctgagtatttg

SEQ ID NO: 787677 - DNA, 97 bp, Homo sapiens
gccatggcgaagcacgagcagatcctggtcctcgatccgcccacagacctcaaattcaaagttccctgtgtctctggtggtttgcctaaacctgcaa

SEQ ID NO: 787678 - DNA, 100 bp, Homo sapiens
gaaaaaaaaggctgttctggatgagatattgttaatcctgccagtctttctcttcaagccagggtgcatcctcagaaacctactcaacacagcactctag

SEQ ID NO: 787679 - DNA, 143 bp, Homo sapiens
gggtagggaggccgactgagcaggagtcgtccgcttatagtggaggctgctaggagccggtcagagggactctgtctactagtgacgatgtcgaagacagggaaaatgaaaagggtcgccttgaagaagcctacgagaaatgt

SEQ ID NO: 787680 - DNA, 98 bp, Homo sapiens
tgaagaactgcattggaaaagaactctctaagatccccatgccggcaactttttcctgtacctgtgaggagcagtacgtgggtactttctgtgaagaa

SEQ ID NO: 787681 - DNA, 76 bp, Homo sapiens
ggctttgttaacctgcatagtaccgaaacccaaacggctgcaggttcaggagaagtggcacctggtggaggacctg

SEQ ID NO: 787682 - DNA, 100 bp, Homo sapiens
atgatgaatacttttactactgtgacaacattaacggtagtgggcagcagtcagtgacaggtgtaacctctgtggatgacagcaacagttactggaggat

SEQ ID NO: 787683 - DNA, 75 bp, Homo sapiens
gactgcctcactgagcaaccaagagttccatgcctctgcagcggtgcctcatgtttgctgtgtagttgctgtcct

SEQ ID NO: 787684 - DNA, 101 bp, Homo sapiens
ccagggtccctgaagagggaagacacgcggaaacaggaactgatttcatctgaaattgaagagacaatcagagaaaaactatagaccactcatgatggttg

SEQ ID NO: 787685 - DNA, 100 bp, Homo sapiens
gaaccctggtcaccgtctcctcagggccatgaagcccccaggaggagaatcgagcaatctttttggaagtccagaagaagctactccttccagcaggcct

SEQ ID NO: 787686 - DNA, 80 bp, Homo sapiens
tggaggaacagtaccttggcttggctcttgacgtggacattctgaaagtgtgaagcaaaggaatgatgtgttttaccttc

SEQ ID NO: 787687 - DNA, 100 bp, Homo sapiens
cttttccttagaacaccaaagattgtctctggcaaagataagaaggctgactgcacaatcacaatggctgactcagacttcctggctttaatgactggta

SEQ ID NO: 787688 - DNA, 100 bp, Homo sapiens
tgctgtacggggaaagctgacgacagcacccaagaaaacctcatttggctcgctgaaggatgaagaccggattttcaccaacctgtacggccgccatgac

SEQ ID NO: 787689 - DNA, 99 bp, Homo sapiens
tgggcgccagcgcggctgcaggccaagctttggacatcagacagtgcaggagaagaatgtgatgcggcagaaggggctgaaaactaaatccatacaggg

SEQ ID NO: 787690 - DNA, 73 bp, Homo sapiens
tgattcttatcagaagctcatcctacagttaattcattgtgctggaattgatgttcgtctgtgtgatgttggt

SEQ ID NO: 787691 - DNA, 83 bp, Homo sapiens
ctactgtagagcccacacctgggaaaggacctaaagatgcagacagacatgctgaactatctggaagtccactgaaaagcaaa

SEQ ID NO: 787692 - DNA, 75 bp, Homo sapiens
ctgccgttaaggaccgttacgtttcccggcatcatggataccgacttatatgatgagtttgggaattatattgga

SEQ ID NO: 787693 - DNA, 83 bp, Homo sapiens
atcggatcacggtgagggaaagatgagcgaggagacggcgacttctgacaacgaacaatgcagatcttcgtgaagactctgac

SEQ ID NO: 787694 - DNA, 75 bp, Homo sapiens
tccagcaggcgctggctcctgctcagggaacctcagaacctgttctggatccacagcaaatccaagcatttgatc

SEQ ID NO: 787695 - DNA, 100 bp, Homo sapiens
ggagaacaaatccaagattagcacaggaccagctgaagcagtgtttctcccggcagcccactgaacccaaggacactgacaccctcgtgcacgaagccgg

SEQ ID NO: 787696 - DNA, 82 bp, Homo sapiens
gcctatggtcggcctccgacagcgctccggagggaccgggggagctcccaggcgcccggacgatcgccccgtgagagcaagc

SEQ ID NO: 787697 - DNA, 104 bp, Homo sapiens
catggcttggaactggccaaaacaaaatccagcaagatctctttgaagggaggtaccttcttccaaacccggtggcgggacaggcctggccggcctctgcagag

SEQ ID NO: 787698 - DNA, 108 bp, Homo sapiens
acactatcccagggagtgcaagcttagagcgtctggccaagaatcagaggaagtgggagagccttatagatgcaagtgaagacagccagctagaagctgccatcagag

SEQ ID NO: 787699 - DNA, 50 bp, Homo sapiens
cttcagtcgcagcctcactctagatgaaggatttgggggcagagcacttg

SEQ ID NO: 787700 - DNA, 75 bp, Homo sapiens
gaggaagcaggcggagaagagacaagcaaaagatacagatattgtggatgaagccatctattacttcaaggccaa

SEQ ID NO: 787701 - DNA, 101 bp, Homo sapiens
cggacctctatgccatgaacttcaatcccatcatttccagaaaggacatcacagatgatgataattccgaagaaggcttccacactattcattcaggaagg

SEQ ID NO: 787702 - DNA, 125 bp, Homo sapiens
ccgggacccggtgtctgctcctgtcgccttcgcctcctaatccctagccactatggtttggtgcacctcgatttggaggaagtagggcagggcccttatctggaaagaagtttggaaaccctggg

SEQ ID NO: 787703 - DNA, 101 bp, Homo sapiens
atctttctagaccatatctcttctttggattattttacaaaaccagactaccaggacatggatttgattgacatactttggaggcaagatatagatcttgg

SEQ ID NO: 787704 - DNA, 90 bp, Homo sapiens
cgaggagtgaccaatgatcaggttgacccttcaccgtgtaggagactcaccaatacctggagctggagcctatgctgacgatactgcagg

SEQ ID NO: 787705 - DNA, 100 bp, Homo sapiens
cggtgaagcagtgcttcgtggtgactgaaaaagtctgatcccccaggaaagcagctggaaaacaagagcatgtgaaggaagcgcagcagctcctcgccag

SEQ ID NO: 787706 - DNA, 82 bp, Homo sapiens
gtcaggacctcaacaaaaccagccgacagcagataattcagaaggagctggcggacatcactttagaccctccacctaattg

SEQ ID NO: 787707 - DNA, 88 bp, Homo sapiens
tggtggtgcaggaggtctccagcgtgctcaggtcggcggaggagaaggcggacctggtgaatgacctggggaacaaaggctacctggt

SEQ ID NO: 787708 - DNA, 96 bp, Homo sapiens
ccgagatgtctcgctccgtggccttagctgtgctcgcgctactctctctttctggcctggaggctatccagcaggtcctgctgtactagccaccaa

SEQ ID NO: 787709 - DNA, 101 bp, Homo sapiens
ccagaataaagccaagctcatctctgagacccggaggaggttcgaagctgagtatgtgacagaatagcattgaagaacttgatggtgtccttacatccata

SEQ ID NO: 787710 - DNA, 98 bp, Homo sapiens
ggttgtatgatgacgttttacaggtgccacatcatctcacagttcaaccaaggcttctacgactgtgtcatagcaactgatgctgaagtcctgggggc

SEQ ID NO: 787711 - DNA, 100 bp, Homo sapiens
taccccgagagagccactcatggcggactggggctcagaatggagctgctgggctgtgaagtggaaggacctgaaggagaagaaggagaaggtggaggag

SEQ ID NO: 787712 - DNA, 117 bp, Homo sapiens
cggcggctgaggaaagcaggaggaggtggcggcggcgggaagatgttttgtagtgcatccctgagcatgagcacagaatgaagcggcgtttggatgaccaggagtcaccggtgtatg

SEQ ID NO: 787713 - DNA, 100 bp, Homo sapiens
aaaggaactcctcaagaaccacgctgtgcaccagtggcagttcgcagcctccaggacttggctcgcatcgccatccggggcaccattaaaaagattattc

SEQ ID NO: 787714 - DNA, 90 bp, Homo sapiens
ccgggacacccgcgaggccggaaaatgggatcgcttacacctgagacgaactacagaacagcacgtaccagaggtggaagtccaagtcaa

SEQ ID NO: 787715 - DNA, 100 bp, Homo sapiens
ctcaaagtaggattcaagaactggaggaaaaggtcgcctctttgctgcaccaggtgtcctggagacaggctttaccgccagcacctgttcagaatcacac

SEQ ID NO: 787716 - DNA, 98 bp, Homo sapiens
ctctagaatatacaaagacaaaaggagattctgatgaagaagttattcaagatgattataagcgccatggctatggctagtgttaaattgcttgccgg

SEQ ID NO: 787717 - DNA, 100 bp, Homo sapiens
tagacccgggcagcgcttccattccgcggagctgtgtactaatggtcacttgatgtgcgctggctgttttatccacctactagcagatgcccggctgaag

SEQ ID NO: 787718 - DNA, 98 bp, Homo sapiens
agcattaccgggttcgctaggctcacaggtgtcatggagaaactccagctgggcccagagattctgcagcgggaaaatccaaggcttatttatgccag

SEQ ID NO: 787719 - DNA, 73 bp, Homo sapiens
tcgcagtggtcgcttcttctccttggtacatcaagagagtgtacacatgattgaagtcacaagtaatttgatt

SEQ ID NO: 787720 - DNA, 96 bp, Homo sapiens
tgagcccggccgccatcgatgaccccggtcgcggacttgcttcaggctggccaccccccgcccagcagcaaagaaacctggataacatcgtcttgc

SEQ ID NO: 787721 - DNA, 100 bp, Homo sapiens
cggagcggacggattcgattcaacggggttccggaccgcgctgcgctatggagcaggttgtgggtctgtcttgaacacaaatggtgaggttgaaatggat

SEQ ID NO: 787722 - DNA, 100 bp, Homo sapiens
gcctgagtaaggacttctgcgcgcgggagttcgaggccctgcggagctgcttcgccgctgcgacaaatttacatgtattggagaccagaccagaagccct

SEQ ID NO: 787723 - DNA, 82 bp, Homo sapiens
ggattctcccacttggaggcactgctggatgacagcaaggagttgcagcgccaccacgcagctggcttgcagctgatgctta

SEQ ID NO: 787724 - DNA, 99 bp, Homo sapiens
agctgggtcacccgcactgagtcaacagactgagcgcgtccaggcctgacagctctgcggctcgggccctgaggcagaatccagagaccacatttgaag

SEQ ID NO: 787725 - DNA, 75 bp, Homo sapiens
cgaagaagcatcgttaaagtctctcttcaccctgccgtcatgtctaagtcagagacgaagtcttgctctgtcacc

SEQ ID NO: 787726 - DNA, 100 bp, Homo sapiens
ttctcctatgactacgtctttgactggaacatgctgaaattcgccttcctggatgctctgcagaaccaggctgaggccagcagcaagatcatcggccagt

SEQ ID NO: 787727 - DNA, 83 bp, Homo sapiens
gggtggccgccctgttccccgcgctgcggcctggcggcttccaggcgcactaccgcgaacccagcgggtgccgcttctccacc

SEQ ID NO: 787728 - DNA, 101 bp, Homo sapiens
cgattgagagcatttaaagatatccagacatttaatgtggatgcaccatgccagaccgtggaagatttaacgaatggggttgtgatggcccaggttcttca

SEQ ID NO: 787729 - DNA, 100 bp, Homo sapiens
gagaactcggcgccgccaaacagcccagctcgcgcttcagcgtcccggcgccgtcgcgccactcctccgagtcagtactcctgcatttgtaccaacgaaa

SEQ ID NO: 787730 - DNA, 98 bp, Homo sapiens
tccagtccccggatggagtgaagcggatcacagcaacaaagagagaaacagcagcaacatttttgaaaaaggacctgaaggagaagaaggagaaggtg

SEQ ID NO: 787731 - DNA, 83 bp, Homo sapiens
aagacattcaggatcaacttgaacgaatatttctggagtccttcaataatgttaaacagtggctgcaggaaatagatcgttat

SEQ ID NO: 787732 - DNA, 100 bp, Homo sapiens
cggacgaggaggctggaggtactgagaggatggaaatcagcgcggagttaccccagacccctcagcgtctggcatcttagagacgggggttcaccatgtt

SEQ ID NO: 787733 - DNA, 83 bp, Homo sapiens
ggctacttcatattttggaaagcagtttttaagacaagttgaatctccagtgatctgtaaaatcttagatacagcagatgaaa

SEQ ID NO: 787734 - DNA, 75 bp, Homo sapiens
tttgactactggggccagggaaccctggtcaccgtctcctcagaatcttccacaatctgtaattgaaaatgttgg

SEQ ID NO: 787735 - DNA, 73 bp, Homo sapiens
cagtcaggccgatccgctccgctcacgacaagttggatggcttgaggactggtactaaaaggaaacgtgactg

SEQ ID NO: 787736 - DNA, 50 bp, Homo sapiens
cgtacttcgagaagaaccatggcactcgcgtgagtgcatctccatccacg

SEQ ID NO: 787737 - DNA, 83 bp, Homo sapiens
gcctccgcgagggcaccatggaggtgaatgcagattggcggcagtaagcacacaatgaatgatcacctgcatgtcggcagcca

SEQ ID NO: 787738 - DNA, 75 bp, Homo sapiens
atggaaggaaggagcgcagcggtggtataagttgaaatccaaaccaggaaagaaggacaaggagcgaggagaaat

SEQ ID NO: 787739 - DNA, 51 bp, Homo sapiens
cccggtgacagcgtgagaggttcgcagattcctctgtgacgagggtgcagg

SEQ ID NO: 787740 - DNA, 100 bp, Homo sapiens
tggttccccttctactacatgctgaagatccgtacaggtttacagcaccaaataatctggccctgtcagcccagctgtgttcctctggatgaaaaactcc

SEQ ID NO: 787741 - DNA, 80 bp, Homo sapiens
accctggagcctcagttggaagcagccgatccagcctgcggagcctgtggggcagtctcccgagcggcgcccgcctcccg

SEQ ID NO: 787742 - DNA, 97 bp, Homo sapiens
aagcgctctcatgaagcaaccgcccattcagtctacggctggggccgtcccagttcgcaatgagaaaggttttgtagtgcatccctgagcatgagca

SEQ ID NO: 787743 - DNA, 100 bp, Homo sapiens
gccatttatgacattattcttgatatgaagtggtgttggttttagaagctcttgatgaaatgggtgatctcttgcaactgaaatattcccggcacaagaa

SEQ ID NO: 787744 - DNA, 90 bp, Homo sapiens
gtcatgctttccttcccattgtttaaggatgacctgtgtaaagatgattttaagcatcgtcatcagacagtgaggaggacccagaagcct

SEQ ID NO: 787745 - DNA, 82 bp, Homo sapiens
gcccggcgctttccccgcaagatggacggtttcgccggcagtctcgtttaggtagaagcttaggctattgatttgaacccac

SEQ ID NO: 787746 - DNA, 100 bp, Homo sapiens
attgcagttctggaagcaagaatttatcaaaggaaagatggatccagacaaggcacagttggtggatctgaaatctgaactgacagaaacccaagcagag

SEQ ID NO: 787747 - DNA, 82 bp, Homo sapiens
gtcgggaagaatcgtttggtctcctgccgtgcccggtgttggagagcacaatggctgaacaagtccttcctcaggctttgta

SEQ ID NO: 787748 - DNA, 75 bp, Homo sapiens
tattctctgaagcctggaaacgaggcactcagttggaagagtccagcaagagatgtggtcttgctatgttgccca

SEQ ID NO: 787749 - DNA, 75 bp, Homo sapiens
cgaatcttccttcaggatatcaaggcagaggtggaggagacactgaagcgactgcagagccagaagggagtgcag

SEQ ID NO: 787750 - DNA, 100 bp, Homo sapiens
tcaactcaaatgcaagtccaagaggaggaggaggcggaggtccaagcggaaaggaagcttacaggttcgctatcacctaaacaaggaagaaacccatgta

SEQ ID NO: 787751 - DNA, 83 bp, Homo sapiens
attttgagcaatggggaacgctcacggactgtgtggacataagcagctctatgaccaatagcacagctgccagtagacccccg

SEQ ID NO: 787752 - DNA, 100 bp, Homo sapiens
gggcacccagtggggctgtgctggactacgaggtcaaataccatgagaagatgataccacgagtcaacccaaaagttgctggggagaagttgctctttaa

SEQ ID NO: 787753 - DNA, 90 bp, Homo sapiens
ctcagcctcccgagtggctgggactatagcatacagaaaggctgtacctggaggaaggaagtgcggagccagcctgagttgggagaagag

SEQ ID NO: 787754 - DNA, 90 bp, Homo sapiens
gcagatgttgtcaaggtggcctaccaggaggccaggggtgtcgccatgatggaccaatcttacaaaccagatgaaaatgaagttcgaact

SEQ ID NO: 787755 - DNA, 100 bp, Homo sapiens
gctgaagcggatcctggaggagcgccatagtatccacttcatcattaagaggacagagcgggatgccaccagcttgtccaaagggaagttccaggagctc

SEQ ID NO: 787756 - DNA, 96 bp, Homo sapiens
gctggccaaagcctgcccagacggctcacctgtgcgggatggaacaaaaggaagatcagcccatctacttggcagtgaagggagtggtgtttgatg

SEQ ID NO: 787757 - DNA, 85 bp, Homo sapiens
tcccagccttcagaaattgccggtctgggagttgggggcaaggagaagatcctgagcccccctccatgcgcctgaaggcccgacc

SEQ ID NO: 787758 - DNA, 82 bp, Homo sapiens
ccgggagcgacttccaggatatagccctggaggtcaaaatgcagatcttcgtgaaaacccttaccggcaagaccatcaccct

SEQ ID NO: 787759 - DNA, 74 bp, Homo sapiens
gatcattggtttatgcaggaattaaatcaattgtaaagtcatcgttggaaactgtacactgtgtgtgatgttgc

SEQ ID NO: 787760 - DNA, 98 bp, Homo sapiens
ctacctgcacctgcacaagattatccacagggatctcaagtcacccaaagtgcccaagacaggagcaggacattgtgttcctgatcgatggctcaggc

SEQ ID NO: 787761 - DNA, 51 bp, Homo sapiens
cggagtgaatcctggtcctattgtgggaggtggccaggtggaagtaaaatc

SEQ ID NO: 787762 - DNA, 75 bp, Homo sapiens
ggagcaactgctggttctatcaccaagatggaattggggaggaggtgctcaagatgtccacggaggagatcatcc

SEQ ID NO: 787763 - DNA, 74 bp, Homo sapiens
gcgttcggtgtgccgtgggtccgcgctgcttccacccaacttcctgttagtactaaggctcgtacgtctgcatc

SEQ ID NO: 787764 - DNA, 75 bp, Homo sapiens
gtgatcttgtttaatccacataacaaccctattagacagagggagaaccgaagattacaggaggccagcatgagg

SEQ ID NO: 787765 - DNA, 82 bp, Homo sapiens
aggacttggtccgcggcatccgtaaccacaaggaggacgaggaacttgctactaccagcaccatgccctaccaatatccagc

SEQ ID NO: 787766 - DNA, 87 bp, Homo sapiens
cgtggcagtgcttccatggtccagaagtgcaagctgtgtgcaagagaaaattccatcggtacaggtttgcagattccgccagcagca

SEQ ID NO: 787767 - DNA, 75 bp, Homo sapiens
agccaaccaggacactaatacagctcagagaaaatccgtctcttgctcaagtgaaaattgaagaagcaaagcgag

SEQ ID NO: 787768 - DNA, 100 bp, Homo sapiens
cagcagatggcggatgccctgcagtacctgcagaaggtctctggagacatcttcagcaggcgttttaaggatgaacagattgacatcctcgtggccactg

SEQ ID NO: 787769 - DNA, 113 bp, Homo sapiens
gggaccctgccagcctggacttcgcgcagtgcctggggtactacggctacagcaaggactcacaccacccggcaagaactgctcactacggctccctgccccagaagtcacac

SEQ ID NO: 787770 - DNA, 100 bp, Homo sapiens
caatgggcctgtggccagtgcacaggaggcacggaaggcccagctagaaaaccacgaaccggaggaggaagaggaagaggagatggagacagaagagaaa

SEQ ID NO: 787771 - DNA, 82 bp, Homo sapiens
ctgttacaatcaaggtctatgaaggggtcgctgtgatgaaattcaagaaccccccagtgaacagcctgagcctggagtttct

SEQ ID NO: 787772 - DNA, 100 bp, Homo sapiens
aaggaattctcaaaatccagcccttgagtggaatatggccagcagctgccttcctatttcaaggaaagacgccaaggtaattttgacccagaggagcaat

SEQ ID NO: 787773 - DNA, 127 bp, Homo sapiens
ctgggttacacattctgtggctggattgtcttaggaccataccatgacaagggaactgtccaggtttattgctgccgggagactacactgcaaaatagataaagtgaatgaaatagtagaaaccaac

SEQ ID NO: 787774 - DNA, 90 bp, Homo sapiens
ctacatggacgtctggggcaaagggaccacggtcaccgtctcctcagacgcaaacatgcagatctttgtgaagaccctcactggcaaaac

SEQ ID NO: 787775 - DNA, 90 bp, Homo sapiens
gatgatgcagatgtacagacacaagcgggccaacaaataggtgagaaaccttaccactgtgactgggacggctgtggatggaaattcgcc

SEQ ID NO: 787776 - DNA, 100 bp, Homo sapiens
gtgacggacagtgcagggaagcaactgcagagcagcagtgttgtactgctacttctataaacggacagccgtaagactaggcgatcctcacttctaccag

SEQ ID NO: 787777 - DNA, 50 bp, Homo sapiens
tcaagaaacccaagctgctgagatgtgtatatctcatgattgatatggag

SEQ ID NO: 787778 - DNA, 82 bp, Homo sapiens
ctccgcgttcccagcccgggtccccgcgttcacagccccagcgcaggacaggctgcgggaggagctgcaggactgaggtaca

SEQ ID NO: 787779 - DNA, 100 bp, Homo sapiens
ttcacccagcatttcatccctcgtcgaaaggattggattggcatctttagactctggtagctgaagaacatctcacagtggacgccagggtctattccta

SEQ ID NO: 787780 - DNA, 100 bp, Homo sapiens
cgagatgtaaaagtgtcactgtggtaaccaggagccgacaacaactcctgacgcaatggttcagccttttactaccatcccatttccaccacctccgcag

SEQ ID NO: 787781 - DNA, 100 bp, Homo sapiens
ggacttctgaggctttctatcctccatgctgctcactagaaaaggggctgtgaactgttattctccatcccaccccgaacagccccaaacagtcagagtg

SEQ ID NO: 787782 - DNA, 98 bp, Homo sapiens
atggataaagttgtcgaaattttggtgaggattcatcaacctccagtatgatgtctgtgaactttgatgttcaatcaaatcagagtgatatcaatgat

SEQ ID NO: 787783 - DNA, 74 bp, Homo sapiens
agccgagttcaacatcctcctggccaccgactcctacaagcccaactatggaaaccagcaatatggaccaaaca

SEQ ID NO: 787784 - DNA, 73 bp, Homo sapiens
ccgatttaaagctgagctgcgaggaaaatggcggcgggaggaaaaccaattctgtgtcctcggaggaccacag

SEQ ID NO: 787785 - DNA, 100 bp, Homo sapiens
cagaatttcaacaagcagctgtgctgctcacggccgtgaactgctacagcgtgaaggccgccacccgggtccaggatgcctttgccgccgccaagctcct

SEQ ID NO: 787786 - DNA, 82 bp, Homo sapiens
cacatggagcaaaaggccacggcacctgaagccccgagccctcccagcgcagggactttgaacatgtcggggatcgccctca

SEQ ID NO: 787787 - DNA, 100 bp, Homo sapiens
tcctgctgctgtgcttccaggtacagctgtggaggaagatgcagagtcagaagatgaagaggaggaggatgtgaaactcttaagtatatctggaaagcgg

SEQ ID NO: 787788 - DNA, 75 bp, Homo sapiens
agagaagtgacagttaccaccgaggcagaagttataatcggcggtccagattgggaaaatgaggtacgttagtgt

SEQ ID NO: 787789 - DNA, 100 bp, Homo sapiens
aagcgaagccttgaaaaagctgccctgagacggtgtcccgccgaaagttgatcatggccttgccaggttggtgacagtatattgtgagcatggtcataaa

SEQ ID NO: 787790 - DNA, 83 bp, Homo sapiens
aagaaaccagccgaacttcagggtttccaccgttcgttcaaggtgtctgcttttggggcagagttttcatcggaggcatgcag

SEQ ID NO: 787791 - DNA, 100 bp, Homo sapiens
tagaatgcatcagtgcccttgtggcgaatggggctcacgtcgattacctagaaaagtacgagaaagttcatcattttggggaggatgatgatgaggtacc

SEQ ID NO: 787792 - DNA, 75 bp, Homo sapiens
cgccggcggaggaagcagcgccttcggcaggcggaccgggcgggcacccatgtgcgggatgatgcagtggccaac

SEQ ID NO: 787793 - DNA, 100 bp, Homo sapiens
agaatgctaatggagcccctgccatcacactgctaatacgagaaaaggcccgccaagctgccccctgtgtgctattctttgatgagctggattcgattgc

SEQ ID NO: 787794 - DNA, 100 bp, Homo sapiens
cgctgcctggacgacgtgaaggagaaattcgactatggcaacaagtacaagcggcgggtgccccgggtgcatggctgcctcctaatcccatagtccagag

SEQ ID NO: 787795 - DNA, 95 bp, Homo sapiens
agctgggattacaggcacgcgccaccactcccagataatgctctaccacaagaaaatggcctctcacctggggccattgctggcattgtgattgg

SEQ ID NO: 787796 - DNA, 74 bp, Homo sapiens
gcagagcgcgggaggcggcggcggcgcggagcccaggcgggtgccacgtctatgtgggcttcgtgctgtgggct

SEQ ID NO: 787797 - DNA, 75 bp, Homo sapiens
attcatcaccctggagccttccctcctcttcccagcaggccaggaccgggcaggcagcattgtcttgaaggtgct

SEQ ID NO: 787798 - DNA, 90 bp, Homo sapiens
gtacgacagcctcaaacaggagctggagcagctcaaagaggccctcttctgggaatacagagctaaaggatacagccccagccttaggag

SEQ ID NO: 787799 - DNA, 100 bp, Homo sapiens
catccctgtacgggtgcctggcctcgcttctgtcccagcaaccccgtgaaaatcctttccagaatctgaaggtactcttggtatcagaccaacagcagaa

SEQ ID NO: 787800 - DNA, 51 bp, Homo sapiens
agaagacccagaggacactaaccaaggctctgccaaggctgagaatgacaa

SEQ ID NO: 787801 - DNA, 100 bp, Homo sapiens
gctgtctattcttcgctatggtgccttatgcaatgtgttcaaactggatccaaacaataaagaaggccctgtattaatcctgggaaggagcatgcaacca

SEQ ID NO: 787802 - DNA, 82 bp, Homo sapiens
gtttgcaacatccttcttctggataacactgtacaagctttcaaagtcaatgaacgtatcaatgagtgtgatgagatatgcc

SEQ ID NO: 787803 - DNA, 94 bp, Homo sapiens
ggagcgggagcgggtaccgggcgcgggcagagcgcggcggcgcggggaagatccttgtccttcaaaaccttcctcatctgggttttaataagta

SEQ ID NO: 787804 - DNA, 51 bp, Homo sapiens
gtacttcaaacatgcaagttggaatgctgatgaacttattagtcctaaaga

SEQ ID NO: 787805 - DNA, 100 bp, Homo sapiens
ggaggacgaggagagacagaagaagctggaggccggcaaagccaagacagatacattgataactccatttgtgggtttaatagaccacaacttccaggcc

SEQ ID NO: 787806 - DNA, 123 bp, Homo sapiens
gtgaggacgcggcagcccgtggagtcggctgagggaaaagcgaggcaaggcaggcggctctggcagaattcacagaggcagatgaagcaatggcagaactcgcaattgctgacaacgttttcc

SEQ ID NO: 787807 - DNA, 50 bp, Homo sapiens
ctgactatgagggctggtgctggccaggctggagtgtggtgacactacct

SEQ ID NO: 787808 - DNA, 100 bp, Homo sapiens
gggtactacacaaccgtctccagccttggtctgagtggactgtcctgcagtgtaaacaggaacatcgataagtagtgtaaaaacttgcacaatgaaatcc

SEQ ID NO: 787809 - DNA, 50 bp, Homo sapiens
ccaaaagtgaaattttcaagtcaacaggaggaggagggggccagtggggg

SEQ ID NO: 787810 - DNA, 84 bp, Homo sapiens
agctgtgctcgcgctactctctctttctggcctggaggctatccagcgaagcggggagaggtggtgagagatgacccctgttga

SEQ ID NO: 787811 - DNA, 75 bp, Homo sapiens
caagcaagctgaatggaggccagatagtaccatgatagctgtatcaatcaggatcctcatgaccagccaaagaga

SEQ ID NO: 787812 - DNA, 97 bp, Homo sapiens
ccacctcacagattccagcttcggaacaagagaccctggatgccaaagaagaccatgaaagaacacatcaaatggtcttactgagaaagctttgtct

SEQ ID NO: 787813 - DNA, 100 bp, Homo sapiens
gaaaagcaggtgccggtgcctgtccccgggggcgccatggcgaccggagcgaacgccacgccgttgggggttcggtccgagcccggtgggaggctcccgg

SEQ ID NO: 787814 - DNA, 90 bp, Homo sapiens
ctggggttccctatgcaaatgccaaaggaattggttatccagcacactgggatgagaaattccaccacaagatggtggacaaccgtggct

SEQ ID NO: 787815 - DNA, 100 bp, Homo sapiens
gggaacttgtgagcctgcggtgaaagtaagactttgaccccgacgcaggcttcagtgattgccgcggatcagaagcctgagcactttggctcgagacaat

SEQ ID NO: 787816 - DNA, 75 bp, Homo sapiens
cagcgagcgtcgcggccatggcttatcactcgggctacggagcccacggtcaaaatgcagatcttcgtgaaaacc

SEQ ID NO: 787817 - DNA, 107 bp, Homo sapiens
tggactttgaaaatcaagataaggagaaagacagtaatagttcttctgggtctttcaatggcaacagcaccaataataacagagtctcactctgtcacccaggctgg

SEQ ID NO: 787818 - DNA, 100 bp, Homo sapiens
cctttcgtgctggcgccgcgacctccggatgacccgggcttcggcccccaccagagactcgggagatgcagttaaagacttgatgcttcgctttctgggt

SEQ ID NO: 787819 - DNA, 74 bp, Homo sapiens
cgtgaggccgcggagcgccagctcaatgaacagtcctgcgttaactgcggccgggaggctatgagcgagtgcac

SEQ ID NO: 787820 - DNA, 83 bp, Homo sapiens
gccttggactacttgcaggtcagcttgtctcacataacagctccgccgcatgcaagagatgattgcaaggatgcaggcgcaga

SEQ ID NO: 787821 - DNA, 85 bp, Homo sapiens
cgccgcgggacctctccgggccatggatgatatcatcaagttgaatcgaaaggaagggaagaagcagaattttccaagactaaat

SEQ ID NO: 787822 - DNA, 82 bp, Homo sapiens
ggtcagtccgccgctcaccccgcggccgcaccttcccgccttctcaggtgcgcgcggagccatggttatcatgtcggagttc

SEQ ID NO: 787823 - DNA, 100 bp, Homo sapiens
acatggggttgttctcataataattcagatggagaatatatggctggacagctagctgcttatggctataaaattacagattactcttgtctctgctgct

SEQ ID NO: 787824 - DNA, 90 bp, Homo sapiens
gtcctttataccaaccgggcagcagcacagtactatctgggtgtaaagcaggccctctggctcaccaagaccaagttaatagaaggcctt

SEQ ID NO: 787825 - DNA, 75 bp, Homo sapiens
ccgcagtgccacttcgacatcgagatcaaccgggagccggagtatggtgtttgcgaaaacttgcggaagctggag

SEQ ID NO: 787826 - DNA, 75 bp, Homo sapiens
gcagcagctcaccgaggacggggactctcggtcctgaccgccagcctgtcgtacatggtggggatgatcgccagc

SEQ ID NO: 787827 - DNA, 100 bp, Homo sapiens
gtgaaagtcgtgatatcatcgttgaactgtatcagtcagagccggatctctcattggctgttgcagcagggatcagacctgagtgaacagaagaaaagag

SEQ ID NO: 787828 - DNA, 83 bp, Homo sapiens
tgtggggcggacccaggagatgaaatgacaacgtcaaccctccagaaatacccgcagcccaaagggcagaagaagaagaagat

SEQ ID NO: 787829 - DNA, 83 bp, Homo sapiens
agcacctttcggcttctgagacggcggcagcagcggcattcagttgcacctggacttgatatgaaagtaaccatcagaaaatc

SEQ ID NO: 787830 - DNA, 76 bp, Homo sapiens
agcaaatcgagtgcacctgggatgacaaaaagtcatagtggtgtgacaagtagttgtgtcaactaacatagcagag

SEQ ID NO: 787831 - DNA, 97 bp, Homo sapiens
ctcccaagtagctgggactgcaggttcctgggtggagctacccatgaacagcagcaatggcaatgataatggcaatgggaaaaatggggggctggaa

SEQ ID NO: 787832 - DNA, 83 bp, Homo sapiens
atagcagtaaatcattgatatgtgaaggttcccagcaggaggagaagaaataccacttgcaggagagggttgacaaagtaaag

SEQ ID NO: 787833 - DNA, 100 bp, Homo sapiens
agattctgaaacttcttgacaatttgcttgcgcttataaggtggtgatctttgtgaagtctgtgcagcggtgcattgccttggcccagctactagtggag

SEQ ID NO: 787834 - DNA, 88 bp, Homo sapiens
tgttcaagataaagtgattttttgcctttgttgattaactggacaaattcagaacagcatgatcctctctgctgccatcttcatcacc

SEQ ID NO: 787835 - DNA, 94 bp, Homo sapiens
gagatagaaaccgagggagggagagagacagcgatcgagagagaccggagaggtggagaggaggactggaatgaaattgaccccattaaaaaga

SEQ ID NO: 787836 - DNA, 75 bp, Homo sapiens
ttgtatgaacaaaaccagtctgatgtgccgactgaaccaagctaactcctccggaagagagtccaaggtgcctgg

SEQ ID NO: 787837 - DNA, 75 bp, Homo sapiens
ccacttacgttcagggttatcattcatagcctcagtgtcctcgtaggggaaatgggaatgctaataatggcctac

SEQ ID NO: 787838 - DNA, 100 bp, Homo sapiens
gtagcttggatccttgtgggcatgatccataatcggtttcaagcagcgcctccggcccctcctgtgacgcacagcactcctgtaactgtctcagaaccac

SEQ ID NO: 787839 - DNA, 83 bp, Homo sapiens
atgactgcaagcacctattatgttgatccacctgaagaattaggagctagtatttctgtcacaacagatgagctagagaaatt

SEQ ID NO: 787840 - DNA, 82 bp, Homo sapiens
ccgcgccttcggaagcccgttcggcctggaggagccgcagtgggtcccggacaaggagggacccaagtctgaaaagaagaaa

SEQ ID NO: 787841 - DNA, 75 bp, Homo sapiens
gtacaagtggaccaactatctgagcggagaatggggtactaagagaaaagcacgaagctgtggatcatagttccc

SEQ ID NO: 787842 - DNA, 74 bp, Homo sapiens
ccagagtggaaataaaccgcaaggatgaagaaataagtaatcttcaccaaagtgcacactggtttttggctgtt

SEQ ID NO: 787843 - DNA, 90 bp, Homo sapiens
caagagcaagcccgcacgtgtgaaggcatccactgctcaaagcttggattctgccgtgccactcacgaatggcgacacagaagacgatgc

SEQ ID NO: 787844 - DNA, 74 bp, Homo sapiens
gcgccgtccacgccgctcttgacagatgtaaggctacgaaaacttgctggagagaaggaagaactactgtcaca

SEQ ID NO: 787845 - DNA, 90 bp, Homo sapiens
ggtgaagctggagatatttcgggttcaccagggcatcaagggaatggtgcttgatgagaattacaataatctcgccaatgctgtcatttc

SEQ ID NO: 787846 - DNA, 50 bp, Homo sapiens
ccactgccaccacggtcgcctgccacagggaagatcagttttcctgccat

SEQ ID NO: 787847 - DNA, 50 bp, Homo sapiens
acctatacgtgcaagaaaggaacagagcttagatgtcatacagaattgag

SEQ ID NO: 787848 - DNA, 100 bp, Homo sapiens
ccgccagaaaggagtcggaagaggtctcacgaggctgtcatcaccgccatgcccaagaataaagagacaaataccgatactttgcttgtttgatgagagc

SEQ ID NO: 787849 - DNA, 74 bp, Homo sapiens
cggctctccagcaagaaggtggcaagatgacacctttgaggccctgtgcatcgagccgttttccagcccgccag

SEQ ID NO: 787850 - DNA, 100 bp, Homo sapiens
gctccggccgcgtttcccgggtaaaggggttatgatgtgattgctcaagcccaatctgggactgggaaaacggccacatttgccatatcgattctgcagc

SEQ ID NO: 787851 - DNA, 116 bp, Homo sapiens
agtctttgaggacacagcctcgctggaggcagtttctgtaagactttgaccccgacgcaggcttcagtgattgccgcggatcagaagcctgagcactttggctcgagacaattaag

SEQ ID NO: 787852 - DNA, 110 bp, Homo sapiens
ctgtgtgagggtccatcttcttctgatcacagatggagtggaatggcttgaagatgatcactggggtgatcctgctggctgttggagtctggggcaaacttactctgggc

SEQ ID NO: 787853 - DNA, 75 bp, Homo sapiens
ctgggttctggactttgggcgtcccattgccatgcaacagcttgcacaactacagaaagaaaaatcagagattct

SEQ ID NO: 787854 - DNA, 76 bp, Homo sapiens
agtttaatgaccttgttatcagtgatggctcttctctggaagatcttgtggactcagaattcatgattgaagaaat

SEQ ID NO: 787855 - DNA, 50 bp, Homo sapiens
ctcccaaagtgctgggactacagattccaacaatgtctcacccatcttgg

SEQ ID NO: 787856 - DNA, 75 bp, Homo sapiens
aacaccacagtactatcgtctatcattggatgaagtggctccggagatgactcctcctatttatggagcaggcac

SEQ ID NO: 787857 - DNA, 100 bp, Homo sapiens
ttttagagcaggtgtatgatcttttggaggaggaggatgaatttgatagagaggaaagaccacagcaagattctttcattcgtctcctcctagcctgggg

SEQ ID NO: 787858 - DNA, 80 bp, Homo sapiens
aagatcatccgcaaggaaataccagccaaaatcatttttgaggatgaccgggtactccaaagattcaggtttactcacgt

SEQ ID NO: 787859 - DNA, 75 bp, Homo sapiens
caactacaccagccagcccgaccaggtaaatcgggtccttcctcgctccaacatggtctacaatctctatgagta

SEQ ID NO: 787860 - DNA, 80 bp, Homo sapiens
aaaattggccttctcccagttcctgctacctgcaggtgaaagtgggagatacattggatcttctcattggagaggataaa

SEQ ID NO: 787861 - DNA, 100 bp, Homo sapiens
ccttgtggacgtggagaggggccgaaccgtgaagggctggaggccccggcggctaggaaaaatcgcagccctcagagagtcgctggctgaagtatctaga

SEQ ID NO: 787862 - DNA, 75 bp, Homo sapiens
agagactttacttcagagccccggcttattgcaactccgatccaatatccgagaaattgagaaactttgtttgaa

SEQ ID NO: 787863 - DNA, 98 bp, Homo sapiens
tgaggtgggccggacctgggagtggcagaaccagtggctctgaatatcagcgtcggaaccaacgggaccaccatgtattggccagcccgggctcagag

SEQ ID NO: 787864 - DNA, 90 bp, Homo sapiens
gcgaccagctcactaagaacatgatacttgcttctggttctgatggatgctgaaagagcctggagctacgccatgcagctgaaacaggaa

SEQ ID NO: 787865 - DNA, 76 bp, Homo sapiens
gaaaaatggaagccagagtgtactgccttcctatttcaaggaaagacgccaaggtaattttgacccagaggagcaa

SEQ ID NO: 787866 - DNA, 83 bp, Homo sapiens
taagaaagaagatgttaactttcagggctgaaaacacagttaaatcactttcaaagttaaaagactattaagaacacaagatg

SEQ ID NO: 787867 - DNA, 90 bp, Homo sapiens
gcttcagttctcccggtgtggccacgagtcgggcagctgctcccaaccccagaacctttgctgtcttgggacggatcaccgctgcaagag

SEQ ID NO: 787868 - DNA, 98 bp, Homo sapiens
caggacccactggaagcctagaaatgccaggccatctgtgagctgcaagaagaggtgtcccggcttcgtctgcggctggaagacagcctgcaccagcc

SEQ ID NO: 787869 - DNA, 100 bp, Homo sapiens
tcaggacattctgaaggtgctggtgtccgaccttaaccgttccaatggggtagcgctccccccattggacaagtggaagctggtgcccctgggtgaactg

SEQ ID NO: 787870 - DNA, 100 bp, Homo sapiens
gttaaggattccaagtaactcttatttgagcttagaaaccaagatagccaagtggaacctgcaatcaagaatgaataagaatgaggctatagtgatgaaa

SEQ ID NO: 787871 - DNA, 76 bp, Homo sapiens
gctaaatatatccgtaggaatggagagggaccggatctcagaaatcatgaccaccccaggaaaagagaactttcgc

SEQ ID NO: 787872 - DNA, 83 bp, Homo sapiens
cttcgacctgcgctccgcgctctggcgctacggtctggccgtcggctgcggcgccatcggtgaaccagaacagcacctcctcc

SEQ ID NO: 787873 - DNA, 101 bp, Homo sapiens
cagccctgcctctccctgggctctggttaccctacctgtaaagaaaaaattaagagaaggcctggcggccggtctgaagtcatctataattatgtacaacg

SEQ ID NO: 787874 - DNA, 100 bp, Homo sapiens
gaaacagtgtgtaccattccgacgttacaatggtggagttggcaggtgtgcgcagcgtaactggcggaaacccagaggcattgacaacagggttcgtaga

SEQ ID NO: 787875 - DNA, 50 bp, Homo sapiens
tacgcatgcaggccatgcacagcacccagtcagcttgaagagtttcaaat

SEQ ID NO: 787876 - DNA, 76 bp, Homo sapiens
ccggaagggtgatgtggctgcggcatcgccggcctcgctatgagtcattcaggagagcaggaaagaaaaggccatc

SEQ ID NO: 787877 - DNA, 100 bp, Homo sapiens
tgagatagaaggggaggggttacagactgtggtgcctacccccatcactgcttccctcagccataacagagtccgaatgtcattcagaatttgaaaatac

SEQ ID NO: 787878 - DNA, 100 bp, Homo sapiens
gcccacctcaccaagaagctactggacctcgttcagcagtcatgtaactataagcagcttcggaaaggagccaatgaggacccccccaagacacatatga

SEQ ID NO: 787879 - DNA, 125 bp, Homo sapiens
aaggaaaaagatctaaagtcacccggcggccaaaggccagtgactaccaacgtttggaccagaagcctctacggcagacacatgcaggccaacccagaaccaccgaagaagaataatgacaaatc

SEQ ID NO: 787880 - DNA, 83 bp, Homo sapiens
accacaccagccagcagctccattgacaaggttaaacccatccagagtaatggctgcggccttacccaggaccctgggggagt

SEQ ID NO: 787881 - DNA, 85 bp, Homo sapiens
attacaagccagcctctgggaccgagtgccgcagaatggaattcggcattgttcctacacagcttctcggcaacatctctatgtt

SEQ ID NO: 787882 - DNA, 88 bp, Homo sapiens
tgcaggtccggagagacgcacagctaagatgtcaggacatcctggaagctgggaaagggtatatgccctcattttgcttaagacctct

SEQ ID NO: 787883 - DNA, 88 bp, Homo sapiens
cgagtcggcgcgcgggacgaaggaagagaggatggtgatgcaccggttacaaaagatgagaccacctgcatttcacaagacacaagag

SEQ ID NO: 787884 - DNA, 96 bp, Homo sapiens
gtaattatgacttttggacagtccaagctatatcgaagctagccacagtgcagcctggccagaatttccacatgttcacaaaggaagaacttgaag

SEQ ID NO: 787885 - DNA, 101 bp, Homo sapiens
gccggggctgcatccacaggcggtgccgcagcccgacgtggcgctgcacgcacggccggccaccagcaccgtcacaggaaagaccacagcaagattctttc

SEQ ID NO: 787886 - DNA, 100 bp, Homo sapiens
gcggcgccagcccttccgccacggccgtctctggagagcagcagttctcgcacagtgaggacaggaaaagtgtttaatctgatacaggacgttcaagggg

SEQ ID NO: 787887 - DNA, 100 bp, Homo sapiens
actttcagtgagtcatcgctgacagctgaggaagtctgcatccacattgcacataaagttgctccttgctcggattgaacgtatggaaaggcggatgcag

SEQ ID NO: 787888 - DNA, 96 bp, Homo sapiens
gggtgttccacgctatgttgggagtgttcgctttcgaggacttatcaaactggtttcaaagcacagagctcaagtaatttacaccagaaataccaa

SEQ ID NO: 787889 - DNA, 50 bp, Homo sapiens
aacattcagacccatttccagtcatgaagcatgcaagcggcaagatgtcc

SEQ ID NO: 787890 - DNA, 101 bp, Homo sapiens
cgcctagggctccggcgcgtcacgggcctcagctgggattcccgcgcccctcggacggccacgagactcggatctacaatgcagtgagaagagaagaaaca

SEQ ID NO: 787891 - DNA, 100 bp, Homo sapiens
tttatcttggactggcaatagaggcttcatctctgttgcaggatttagcagtggctagtattcagaagcttcctgcagcctctgttctaacagacatcaa

SEQ ID NO: 787892 - DNA, 75 bp, Homo sapiens
tgagtgggaagcggagccgggggcctgggacccgtcgcgtcagagccagggacccagacatggagctgcgggaag

SEQ ID NO: 787893 - DNA, 100 bp, Homo sapiens
tccttcgcccccaagactgcgactctaaacggactcatgtactttgtcagggcttttttccagacttcaagctcccattccaacagtaagagcttcttcc

SEQ ID NO: 787894 - DNA, 106 bp, Homo sapiens
caaagctgaaactcaagtcgccacggaagaaaagcactattatcatatcagggatctccaaggtgtcagagatggctgaagatgggagcgaagagatcatgttcat

SEQ ID NO: 787895 - DNA, 96 bp, Homo sapiens
agaatacagagagaaaattgagacggagctaagagatatctgcaatgatgtactgactcaaatccagtacctcaagcaagtccagcagccgagcgt

SEQ ID NO: 787896 - DNA, 106 bp, Homo sapiens
cgcagcaccgcagccttgggcctcgcgccggctatggccgtgccctggggctgagccctcagtgagacggtttaagcggaagcatcttactgccattgactgccag

SEQ ID NO: 787897 - DNA, 74 bp, Homo sapiens
agactcggatgatgagaggcccagctttggaggcaaacgggatgatgcagtgtgtgattgcagtcgcggacaaa

SEQ ID NO: 787898 - DNA, 100 bp, Homo sapiens
tctgagacccggaggaggttcgaagctgagtatgtgacaggaacatagctacagtgtaatggacagtccaaagaaacttaagcataaattagatcatgtg

SEQ ID NO: 787899 - DNA, 75 bp, Homo sapiens
aatactctactggacaaacatttcctccaaggtgaaaggtgtagcagtcactcggcctacacccacagcatcgac

SEQ ID NO: 787900 - DNA, 100 bp, Homo sapiens
gaaaatggcatcatcccaagaaggtcctttttcatgatgatggtagtgtaaaaggaattgccactaacgatgtagggatacaaaaggatggtgcaccaaa

SEQ ID NO: 787901 - DNA, 75 bp, Homo sapiens
ctccggagccgctgcacatttcgacctgcaggctgggacaatgaaaagaaaatagctattttacatgaaaatttt

SEQ ID NO: 787902 - DNA, 100 bp, Homo sapiens
gtgcaagagtccacaaagggacctgatgaagcgaagatcaaggtattagaaaactactcggatgctccaatgacaccaaaacagattctgcaggtcatag

SEQ ID NO: 787903 - DNA, 74 bp, Homo sapiens
gacggaaatgtgtcatcgaaagccagggccaattcctgtccccccagcagcatggcatcgtgtgctgaaccctc

SEQ ID NO: 787904 - DNA, 83 bp, Homo sapiens
atggcccacaagcagatctactactcggacaagtacttcgacgaacactacgagtaccgctccctgtgctgtcaggaatctac

SEQ ID NO: 787905 - DNA, 97 bp, Homo sapiens
aacccttaccacccagcagcagggcatcaagctcccagcagtaggaggacagttgacatttaccatatcatatgaccttgaagaagaggaagaagat

SEQ ID NO: 787906 - DNA, 95 bp, Homo sapiens
accagctgaagagcgacaagccgctggcagccgcggatctcaccgccgctcaggcaaaagctggcaggctgacagaggcggcctcaggacggacc

SEQ ID NO: 787907 - DNA, 80 bp, Homo sapiens
gctgtcctgaccaagaggaccagactttgttaatgaagacctgcctagagctggaacgttacctccagagcgagccctgc

SEQ ID NO: 787908 - DNA, 100 bp, Homo sapiens
cctccgagacccagtccaaaagggttcagcggattcctacacaagcaggccgtctgactccgatgtctctttggaagaggaccgggaagcaattcgacag

SEQ ID NO: 787909 - DNA, 82 bp, Homo sapiens
cgccgcccgtccacacccgccgccaggtggtctggagaaagctgggagatgcagccagctccaagccctccatacggcagca

SEQ ID NO: 787910 - DNA, 100 bp, Homo sapiens
gcgacctgcgagactcacaagaggggaagctgacagagatacctacagacggagtgctgtgccacagcccccctccatgcgcctgaaggcccgacccagc

SEQ ID NO: 787911 - DNA, 75 bp, Homo sapiens
tgcagatgcagtgtggctctggatagcaccttatggacaggaattggcagcaatgaaacagattctcgttaagat

SEQ ID NO: 787912 - DNA, 101 bp, Homo sapiens
ggccggtcaggctcgccgccgagctgcaccacaccccactctggccggagcacgccaagcagctccccatcgctccggaaacggctgcagctcctgccccc

SEQ ID NO: 787913 - DNA, 88 bp, Homo sapiens
ccccacctgcccggtgcccgaggaggcagccaagctcgtggcctgcctctgcgtgcgtcgcccggctcatggagatgggattttccag

SEQ ID NO: 787914 - DNA, 50 bp, Homo sapiens
tccagggagaggactgtggccaaggcccagggctcctcagagcaggaact

SEQ ID NO: 787915 - DNA, 100 bp, Homo sapiens
ccgccgcagagtcccaccgccacagaattggctgtgaaaggactgaggcagccatctgggggtagcgggcactcttatcagagcggctggagccggacca

SEQ ID NO: 787916 - DNA, 100 bp, Homo sapiens
cggcgatgacgtggagggctgccgcctccacgtgcgcggcgctcctgattctgctgtgggcgctgacgaccgaaggaatcagagatcattgatttcttcc

SEQ ID NO: 787917 - DNA, 126 bp, Homo sapiens
gctaggacgccgagcggtgactccccgccgctcccgggggccgtgacggtctaacataagaccagactatgcagactccaatttccacgacttcaagatgcataccttcactcgagtcacatcctg

SEQ ID NO: 787918 - DNA, 87 bp, Homo sapiens
actgaagcaaataaagagaaaaatctggagcagtataatgtgaaagtcaatataataggagaagtggttgaccagggaagtaccaat

SEQ ID NO: 787919 - DNA, 100 bp, Homo sapiens
gggacctcgaatgtgggaccccagcccctctccagctcgaaatcggccaattcctgtccccccagcagcatggcatcgtgtgctgaaccctctgagccct

SEQ ID NO: 787920 - DNA, 75 bp, Homo sapiens
gttggtgggagccgtgctctacctctatccggtactaaatcagaagtactgaatatagataacccagacttggct

SEQ ID NO: 787921 - DNA, 71 bp, Homo sapiens
gagagcttgggagactgagacaacagaacaccaatcagggtcttcaggcctggaagattgaagacattcca

SEQ ID NO: 787922 - DNA, 83 bp, Homo sapiens
tcttcaatgagtaaacatattcctgtggctattatcatggaaaactaatttttcccagagaatttcctttcaaacctcccagt

SEQ ID NO: 787923 - DNA, 99 bp, Homo sapiens
tggctgcaacaggaccacagtcaagacgatcatagtcactggtatcgtgatttccgatacccacctggacacccccaggagtataaacacaacatctac

SEQ ID NO: 787924 - DNA, 75 bp, Homo sapiens
cttgccctcgcgtcttcagaaaacagcagtagtactccagaggagtgtgaggtcttggcagcacctgtctccttt

SEQ ID NO: 787925 - DNA, 74 bp, Homo sapiens
ggggtatgagccacacatccccgaccacttgcggcctgagtatggaaggtgctcgggtcttcggggcactgggt

SEQ ID NO: 787926 - DNA, 101 bp, Homo sapiens
gaggagtttcatgaagagcccaaaacctattacgaactcaaaagtcaaccgctgaagagcagtaacagatcaactcctagcaatcatgatcggatacagcg

SEQ ID NO: 787927 - DNA, 101 bp, Homo sapiens
tttatagttgtggtgaacatgaaccactagaaagacttcttcactcaacacacatcaggcacacaagccatgccccctcttttctctttgggataccacca

SEQ ID NO: 787928 - DNA, 100 bp, Homo sapiens
gagaaaatagcaaacgatccagacggcagggagtgcatcaaaggtgtgaacacaggctacagcaactggacgaggagaacagtgaactccggtcctgcac

SEQ ID NO: 787929 - DNA, 98 bp, Homo sapiens
agacattgcagttctggaagcaagaatttatcaaaggaaagatggatccagacaagggttatgatgatggctacgggggtgaatatgatgaccagacc

SEQ ID NO: 787930 - DNA, 88 bp, Homo sapiens
cagcatgggagagtacatgagacgatgaagcaaagattctctcgggcctagccgtccttggaacccgatattcgggctgggcggttcc

SEQ ID NO: 787931 - DNA, 100 bp, Homo sapiens
gtaccgcggcgagaagccccagctgcactacgcggctgaagccgacgtagcttctctgaacagacgcatccagctggttgaggaagagttggatcgtgcc

SEQ ID NO: 787932 - DNA, 80 bp, Homo sapiens
tgtcggcttcaaagagaaaaggcaacatcctgtcacaggccatgctctggcaaaaaccagcccctgtcaaagggaacagg

SEQ ID NO: 787933 - DNA, 98 bp, Homo sapiens
ctagagcagggatcagcaaacttgctgtaaagagccaggatgatgcacgccaactctttgtgctagctggagctgctgaagaaggctttatgactgca

SEQ ID NO: 787934 - DNA, 100 bp, Homo sapiens
ccgccatcaaccgccagatcaacctggagctctacgcctcctacgtttacctgtccatgacggtggaaaaatgctgcatctccctgaatggccggagcag

SEQ ID NO: 787935 - DNA, 97 bp, Homo sapiens
ccactcggagctaatccacaatctccgcagtgggagacctacctgatgcagatattaaacctccagaaaatgtactgtttgtgtgtaaattgaaccc

SEQ ID NO: 787936 - DNA, 100 bp, Homo sapiens
tttgattacatactgttagagaccactggattagcagaccctggtcagagatcagatctcgctgtcatggtctgcggcaagtaggaatgacttcacccta

SEQ ID NO: 787937 - DNA, 98 bp, Homo sapiens
aagaagctgcgccagtacatcagcgtgaagacgcagagggagacagtctgcagaactactgaattccaagctgcctcggtggcaggagacctgtgttg

SEQ ID NO: 787938 - DNA, 74 bp, Homo sapiens
ccaaatatcctcggaagagcgctcccaggagaaacaatgtgagccactgccccatgttgtgttgatgccaatct

SEQ ID NO: 787939 - DNA, 82 bp, Homo sapiens
cccagtgacgggtctggagtgcgtgggggaccggctgttggcggggacccagacatggagctgcgggaagaagcctggtctc

SEQ ID NO: 787940 - DNA, 98 bp, Homo sapiens
agctgaatgtgttactccattgctgaggagtggtgcttacactccagagcccctcagcagtttccggtgggctcttctctcaactggcctcatgttct

SEQ ID NO: 787941 - DNA, 50 bp, Homo sapiens
gagaactggaaggctatgataaggagatctctttgctgccactttcctca

SEQ ID NO: 787942 - DNA, 74 bp, Homo sapiens
ctagaaggaaaatcacagaggtaaagcatcatttcatcacatcctgtcaaggaatctccgggggcatcaaacct

SEQ ID NO: 787943 - DNA, 50 bp, Homo sapiens
cttcccattgtgacagtgacaagggtgttggataacagggcaagattcag

SEQ ID NO: 787944 - DNA, 100 bp, Homo sapiens
gtcgcctccaacacccgctgctgcccgcccgctgcctgcctgcctggcatctctctctcccgtgattttggctactaccgtccagaaaatgactccaagt

SEQ ID NO: 787945 - DNA, 100 bp, Homo sapiens
gtctgcggaagtgcagctgcctcagttcttagcgcaggatgaagatgcatcagggggcgatcaagatcaggaagaaagaagatggaacaaaaggactcag

SEQ ID NO: 787946 - DNA, 100 bp, Homo sapiens
ttctcgaagttcttgctgagctggtattggcggaaggcggtttggatggtgcaagcggcgcgccgggacaccagatatgagaacggccgaggcagctccc

SEQ ID NO: 787947 - DNA, 117 bp, Homo sapiens
ttcaccaaataagctatatactttggttacctatgtacctgttaccactttcaaaagagatatgtcagtattgaattctcccagacatcagagctgtataatgcatgttgatatgga

SEQ ID NO: 787948 - DNA, 73 bp, Homo sapiens
caggctggaaggaagacgaacctacgaagcagagctcctgcctgaagagtcactaagtgtcttttctcaagaa

SEQ ID NO: 787949 - DNA, 90 bp, Homo sapiens
ggataatgcacgagaagccatgcagcaggcagatgactggctgggtgtcccacagttttatcttcaagacactaaaagtagtaatggtac

SEQ ID NO: 787950 - DNA, 73 bp, Homo sapiens
tcctttcaagtctctaggactggactcttcctaagcaagtccgactgcttttggcttctggatgccctcctcc

SEQ ID NO: 787951 - DNA, 50 bp, Homo sapiens
cttttccctctccctttccctaaggtcatttcatgggcaacaacacagtg

SEQ ID NO: 787952 - DNA, 80 bp, Homo sapiens
gcagagtctgcatgtggctgcaggacctctgtcagagaatgaaacactcatcgcatgcccaagaagatgaaaggattgtt

SEQ ID NO: 787953 - DNA, 82 bp, Homo sapiens
gccctgttaaggatgctactgctagtgagaagaatgaaccagaagttcaatgatacccagaaataatcgcttaatgtatatt

SEQ ID NO: 787954 - DNA, 75 bp, Homo sapiens
gcactccaactggaccgtcaccaacacccgcttctctgtggatgaaggtggttccacgagtgtttgggcgcatgg

SEQ ID NO: 787955 - DNA, 50 bp, Homo sapiens
aacgagaccaacttcttcggggtcacgttgatggacagtggcaagagtgg

SEQ ID NO: 787956 - DNA, 95 bp, Homo sapiens
taacatattcccgaagcacaggggaaaacgaacaagttagtcgcagccagcaacgaggccctgccctgggagaagccctgccacacgtcgtgccc

SEQ ID NO: 787957 - DNA, 98 bp, Homo sapiens
agcaacattgactacgaggaatggcggcggctgccgcaggacctgcagcatcccagagggcagtgccaaggagctgtcccctgccgccttggagaaaa

SEQ ID NO: 787958 - DNA, 100 bp, Homo sapiens
aagtcggagctcccttctatcaggatggccaactgcaagttaaagtctactggaagaagacagaaggtttctaagcatgaattgaggaacagaagaagca

SEQ ID NO: 787959 - DNA, 129 bp, Homo sapiens
gccagatgaagcaaggtcctgacttccttcagagcctcatcaagttcttccacgcccagcacaacacctcctccgagtagcctatcaggatcccagcagtggctgcacctccaagaccctggccgtgcc

SEQ ID NO: 787960 - DNA, 55 bp, Homo sapiens
tgcggcgacctcatccacgccatgccagatatgaggccccaggattcctggcgag

SEQ ID NO: 787961 - DNA, 98 bp, Homo sapiens
tgcacccacgaatctgcccacccctcctgtaacccagcctgtttcacttcttggcttctccagggaaagtgaccgaggcagtgaaagaggccattgac

SEQ ID NO: 787962 - DNA, 121 bp, Homo sapiens
gttgctgctaacactccaagtatgtactctcaggaactattccagctttctcagtatctacagatttgtcaaagatgaaagtgaccttatcagctttggatacttctgagagttctttcac

SEQ ID NO: 787963 - DNA, 126 bp, Homo sapiens
ctctgtgttctcagaagacgttctgtatttcagcttcctgctatgtgccctctttgttcctaaagaacatccagtcatggataaaaatgagctggttcagaaggccaaactggccgagcaggctga

SEQ ID NO: 787964 - DNA, 73 bp, Homo sapiens
aatagtcaccttaatcatcaaaaagccatttccccaaaggaatgtcttgcatattactgacatttggtatgtt

SEQ ID NO: 787965 - DNA, 100 bp, Homo sapiens
gcggccgcgaccgagtcatggctgagacctacgcaatgtaacacacacccgtttgacaatgaggtaaaagataaggaatacaagccccacagcatccccc

SEQ ID NO: 787966 - DNA, 100 bp, Homo sapiens
gaggggtgcttgcaggagcattgtgtaattctaatccagagctggtgagagcggtgactttggagccatttgcaggaggtggctaccgccttggggcagc

SEQ ID NO: 787967 - DNA, 82 bp, Homo sapiens
ccctcatctatatcctttggcagctcacaggtttgtccagaggggttgcgtttatccggtttgacaaacggtcggaggcaga

SEQ ID NO: 787968 - DNA, 100 bp, Homo sapiens
tggaggcggcggagcgcgagagcttcgagcggactcagagagaactcgatgccaccgcaacggtattggcgaaccggcaggatgaaagtgagcagtccag

SEQ ID NO: 787969 - DNA, 75 bp, Homo sapiens
cagccaagaagcagtgcctgctgcggctgggggtgctgcgccaggactcagaattcatgattgaagaaatgcagg

SEQ ID NO: 787970 - DNA, 76 bp, Homo sapiens
ttcagtgtataatggactctcagaataaaggaaagacctcagagtgttctcagtgtcttcagtgccctgggtttgc

SEQ ID NO: 787971 - DNA, 119 bp, Homo sapiens
atccagagagaaatcgccctggccaagaagcacggcacgcagaataagcgaggtaggagcaacggtgggaatgccctctgaggaatgcagtgatgtccatcagtcacctctcacccaga

SEQ ID NO: 787972 - DNA, 100 bp, Homo sapiens
cgagagtacctgcttcagtacaacgatcccaaccgccgagggctcatcaaagatgaggtctatcttaatctggtgctggactatgttccggaaacagtat

SEQ ID NO: 787973 - DNA, 90 bp, Homo sapiens
aaagcagcagccttctcgacagccttttactgtgaacagggaagcaggaattgaggaacagattctccagccatggattgtggtgaatct

SEQ ID NO: 787974 - DNA, 98 bp, Homo sapiens
atacaactatactgtttgtaaaaggagaaggtgcttatgggcaacgttccagaccgggggggccgcccaaatgagctggagcctcccatgcccacctg

SEQ ID NO: 787975 - DNA, 75 bp, Homo sapiens
gtggcatgggccccgattacaggttccaatttattgtgcctaaagaatggaacagcaaatatagacctgtatgca

SEQ ID NO: 787976 - DNA, 82 bp, Homo sapiens
ctgaagaggagcgccagatggtggaggaatacacttatttatgaagtgagaagccctaccactgcaactgggacggctgcgg

SEQ ID NO: 787977 - DNA, 50 bp, Homo sapiens
tgacgaagaggtggtttttgagcaggggaacaggaacctgataaagaatc

SEQ ID NO: 787978 - DNA, 100 bp, Homo sapiens
ggctttctcgcttgtctctcagaatggttttagggaagactgttgccggatgacaaggctgtcactattgttctgtactacctgacattatgggaccagg

SEQ ID NO: 787979 - DNA, 131 bp, Homo sapiens
ctggtggcaagtattgctgtgggtgctgggacttcccgtccgcggcgtggagggtactccaaagattcaggtttactcacgtcatccagcagagaatggaaagtcaaatttcctgaattgctatgtgtctg

SEQ ID NO: 787980 - DNA, 83 bp, Homo sapiens
cgagtctccgccgctgcgggcccgctccgacgcggaaggccccttcccagctgcctgcctgccctagccagctcccaggtgaa

SEQ ID NO: 787981 - DNA, 74 bp, Homo sapiens
ctggcgctacggtctggccgtcggctgcggcgccatcggatgcagtgaccagcctttgctttggccggtacggg

SEQ ID NO: 787982 - DNA, 75 bp, Homo sapiens
cctgccaggagcaccggacaggcaccgtgggccggccaagctcgctgaggccttcaagtacttcgtgcagggcat

SEQ ID NO: 787983 - DNA, 100 bp, Homo sapiens
atccagaagtccagagctgaggactgcctgtttgcagtgttctcaggcgctgtggtctcaccttccactggggcaacaatgggccatttccagcagggac

SEQ ID NO: 787984 - DNA, 82 bp, Homo sapiens
ctcttcctcacttccctgtactctcatcgctctcggcctccgacacgttttcggctttgtgagaaaccttaccatcaaacac

SEQ ID NO: 787985 - DNA, 83 bp, Homo sapiens
aggaaatggccgaggagccggagccgcaggcttgggcactgtttaaaggaaagttccgagaaggcatcgacaagccggaccct

SEQ ID NO: 787986 - DNA, 87 bp, Homo sapiens
tgcttttcgcaagaacaagactctcggctatggagtccccatgttgcatttgacattgtgcagcaaagaaatggttatggagaagcc

SEQ ID NO: 787987 - DNA, 98 bp, Homo sapiens
gccgagcctcggtcccggcccccatcctccccgccccatcggttgttgtctgggcgggcctgcactgcccaaagtcttggaaacttgctggatatgat

SEQ ID NO: 787988 - DNA, 101 bp, Homo sapiens
cgcgcagccgagaagatgtctccgacgccgccgctcttcagtttgcccgaagcgcggacgcggtttacgttactgtaaaatggggaaaggagaaatttgaa

SEQ ID NO: 787989 - DNA, 100 bp, Homo sapiens
agcctgggctcagggactgcgtccctgcggagcaaccccaaaaggggtttctacatcagtgattacagtggcgagatcttgaacaactgctgcgtcatgg

SEQ ID NO: 787990 - DNA, 100 bp, Homo sapiens
tatggcgactttgacttcctgccaaaatcctgttaccctagcaacaggaagcctggaagcacgcaatccagaaggccaagcacatgcccgacccctgggc

SEQ ID NO: 787991 - DNA, 56 bp, Homo sapiens
ggctggagccgcagcgggagcccccgcatcttatacaaaaccaagctgcctttcat

SEQ ID NO: 787992 - DNA, 75 bp, Homo sapiens
taaagaaattcagaaggagatggatcaaagagttgatctctctaatgtattagatcttcatgcctttgatagtct

SEQ ID NO: 787993 - DNA, 103 bp, Homo sapiens
gggtccccaaccgacgatggagggagacgtgctggacacactggaggcgctgggggggatatgagactttctactcggaatatcctgagtgttgcgtggatgt

SEQ ID NO: 787994 - DNA, 75 bp, Homo sapiens
cacgcctgatggctccacgcatttcccttcgtggaactgtggctgcaccatctgtcttcatcttcccgccatctg

SEQ ID NO: 787995 - DNA, 75 bp, Homo sapiens
gcacaacgtgctcttctcaatcctgcagtgtcaccctaaggttcaaaccttgtactactcagctgatcacaagct

SEQ ID NO: 787996 - DNA, 78 bp, Homo sapiens
tactcgccctccccgacccatcctccagcggcaggatgacatcgttcaagatgccccttggtgtggccactgcaaggc

SEQ ID NO: 787997 - DNA, 75 bp, Homo sapiens
tgccaaaagggaagcaaagcatctcaaagatcaatgtccgagttaccaccatggatgcagagctggagtttgcaa

SEQ ID NO: 787998 - DNA, 98 bp, Homo sapiens
cagcacagccagcaccgcacgccctgcaagggaggttccgtggggaccccactgcctggagtacaggtgcgcattgtctcagaaaacccacagaggga

SEQ ID NO: 787999 - DNA, 76 bp, Homo sapiens
gggaacaagatcggcaagccccacactgtcccttgcaaggtgccaatgatcagcggacgtggtctggggcacacag

SEQ ID NO: 788000 - DNA, 75 bp, Homo sapiens
aagaagcagttctacaaggcgagccagatcatggaagggaagtggttgctgtgtatgttactggtgcttggaact

SEQ ID NO: 788001 - DNA, 90 bp, Homo sapiens
ggccaccggctggagcggatcccacacctccggaccgagggacgcggagtcgacttcaatgttcctatgaagaacaaccagataacaaac

SEQ ID NO: 788002 - DNA, 100 bp, Homo sapiens
cagccacagcagcctcccaaggagtctgcaagttgttttaggaactcggggagaggatgtggatcagctcgtagcctgcatagaaagcaaactgccagtg

SEQ ID NO: 788003 - DNA, 98 bp, Homo sapiens
cgggtgtgagagtccgtaaggagcagcttccaggatcctgagatccggagcagccggggtcggagcggatttaaattccaggttgtcatcaatggccg

SEQ ID NO: 788004 - DNA, 75 bp, Homo sapiens
gcagaaagcaggcgaacccgcggcgcaataacgatgtgtcttgctgaatcagggctctcttatccctgccatcga

SEQ ID NO: 788005 - DNA, 75 bp, Homo sapiens
tgcttcaggaggacctgcaggaggacgcagacggatggttcagcaccacccccttctccaacacctaacaaagag

SEQ ID NO: 788006 - DNA, 82 bp, Homo sapiens
tgaaaaatctcaagaggtcttaaagttgctggagagtaaaggactcctactgaaaacaatacagaaccaagttgtattgtta

SEQ ID NO: 788007 - DNA, 100 bp, Homo sapiens
ctgctgcagctccgcctcctccgccgcgcaggattctgagtaacaataagatatccgagctgaagaatggctcattttctgggttaagtctccttgaaag

SEQ ID NO: 788008 - DNA, 82 bp, Homo sapiens
tggcctcacgccgctgcagctggccgccaagatgggcaaggcggagagggtgagcccctcagcggagatggtaatgatcgac

SEQ ID NO: 788009 - DNA, 100 bp, Homo sapiens
ctctaccttgcgagccgtcttccccaggcctgcgtccgagtctccgccgctgcgggcccgctccgacgcggaagctcaccatctgctacctggatatgct

SEQ ID NO: 788010 - DNA, 104 bp, Homo sapiens
cagaaggaagccagcagccaagccggggcagtttcagtctccaccccaaatgcaggtacaggtttgcagattccgccagcagcacagcaagctctacagatgag

SEQ ID NO: 788011 - DNA, 88 bp, Homo sapiens
tgtgagaagacgtctgtgtcgtgcgtaataaaagactagtggccttagtgcccatgcccagtgaccctccattcaatacccgaagagc

SEQ ID NO: 788012 - DNA, 90 bp, Homo sapiens
ggaagatgctgaggccccaggcatcagagatcatgagagagccccccaagatgaacccagtggtggagccactgtcctggatgctgggca

SEQ ID NO: 788013 - DNA, 98 bp, Homo sapiens
cactccaccggctccagccgcctgcacgacctctactggcaggccatgaaaaccctgggagtccaccaaccacctatcccctcaagccctcaagtggc

SEQ ID NO: 788014 - DNA, 74 bp, Homo sapiens
ctggaccttgcagccgcaatggacatgtattcctctgagaaaccttggacagcagattttggtttaatatctga

SEQ ID NO: 788015 - DNA, 89 bp, Homo sapiens
ctctccacgacctcggtcgagcatgttcaccagggcccaggagcctcctcaacaagcccaagagtgagatgaccccagaggagctgcag

SEQ ID NO: 788016 - DNA, 75 bp, Homo sapiens
cgctctggcgctacggtctggccgtcggctgcggcgccatcggctccccactgcacaaacagtcatctggaccct

SEQ ID NO: 788017 - DNA, 82 bp, Homo sapiens
aaggagatgcctggcagccccgctctctgcagttctgtggacaatcacaatgggaatccaaggagggtctgtcctgttcggg

SEQ ID NO: 788018 - DNA, 51 bp, Homo sapiens
gcaaaataaaggaatctttacccatgttggaagtgtatcctcccttcttat

SEQ ID NO: 788019 - DNA, 125 bp, Homo sapiens
agaccattcagatgggatctttccggatcaatccagatggcagccagtcagtggtggaggctattcaagatctctggcagtggaggaagtctctttaagaaaatagtttaaacaatttgttaaaa

SEQ ID NO: 788020 - DNA, 74 bp, Homo sapiens
tgtggtccatggtaaagttttacagattgctcgctgtaagcagctcatctgtgaccccagctacgtaaaagatc

SEQ ID NO: 788021 - DNA, 100 bp, Homo sapiens
tttaatcagaaaggagtagaggacgccttggtcagcctgaaaacgggtatcggcagtggctgaaggaagaatatggagagagccctttgcaggatgcaga

SEQ ID NO: 788022 - DNA, 90 bp, Homo sapiens
gttgctgtgttggacacttgctcccatctattttcttctctagaatccactgaacagccctcatgcttgctgtgcactatgactcaccgg

SEQ ID NO: 788023 - DNA, 75 bp, Homo sapiens
agaaaggccttagtaggcctttctaagtctcctaaaggatgtggtcccaggtgtgacaccttcagcaggtctcag

SEQ ID NO: 788024 - DNA, 83 bp, Homo sapiens
ctgcactgaaaggaaatgacggattttcaaaagagcagtggctcaggcagcagtgtagcagatgagagagtggattatgttgt

SEQ ID NO: 788025 - DNA, 80 bp, Homo sapiens
ccacctacagaaacaaaatgtcaacaaattgatgggggccagtgtcattcaaagatgtggctgtggatttcacccaggag

SEQ ID NO: 788026 - DNA, 100 bp, Homo sapiens
gtaccatgatgtgatgctggagaccttgacacttatatcctccctgggctctacagattctcccctgcccctggagaaggaggagcaggtccgacttcag

SEQ ID NO: 788027 - DNA, 83 bp, Homo sapiens
gtgaccagtaccgcagcatcctggcggagacggcgttcccacagctgtgcagaacttagcgccacgcgctgctgttgctgctg

SEQ ID NO: 788028 - DNA, 100 bp, Homo sapiens
aagttgttctaacgctgcctttgctttaaaacagtattacttgcgacatcacttagtgctcttacccagctgatgaaaaagatgccccatttccgaaaac

SEQ ID NO: 788029 - DNA, 101 bp, Homo sapiens
cttttcctctgttataagagagggagagataaaccaccgcttacagatattggatctttaatctcatgaagtacgacagctacagccgcttcttaaagtct

SEQ ID NO: 788030 - DNA, 100 bp, Homo sapiens
tttgtttctcattctcatatttcaccaataaaggcaagcaatggacagtggtaccagatgaatgattccttggtccattccagcaacgtcaaggtggttc

SEQ ID NO: 788031 - DNA, 101 bp, Homo sapiens
caatttttctgcagtggctctgggtccagccccttacttaaagattaaggatgctcaactgcaaaatgctcggtgtgtcctgcaaattgataatgctaaac

SEQ ID NO: 788032 - DNA, 90 bp, Homo sapiens
gacagtccatatgtaaccaaatattatggatcctatctgaaggtcctcagccctcgctctcgctggcggagcagcacctggagtcgcccg

SEQ ID NO: 788033 - DNA, 90 bp, Homo sapiens
gaatgaggagtacgacgtgatcgtgctgggcaccggcctgacgggtatttgaagtataccatacaactgttttgaaaatccagcgtggac

SEQ ID NO: 788034 - DNA, 82 bp, Homo sapiens
gtgacatgcagttggatggcggtgactgcgtgtttgcagaaaaaacttcagcatgtgccaggaacacaacctcaccttgatc

SEQ ID NO: 788035 - DNA, 90 bp, Homo sapiens
agggactgtgaggtaaacagctgagggggaggagacggtgggtcatccatgcctggcttattatatcatctctattgttgctgttctttt

SEQ ID NO: 788036 - DNA, 102 bp, Homo sapiens
gctgtgtgagggctgccccctgcaaagcctgcacaagctctgtgagaggatagagggtttattcttcagtccaaggaagcaattcacagtcagctgttagag

SEQ ID NO: 788037 - DNA, 134 bp, Homo sapiens
cccccaccacccggaggagcagctcctgcccctgtccgggggatgactgattctcctccgccagctgtcgcctggttgggcccggaaatgggacgtcgcgctttctcagggagcgtagaagcagccagggcctc

SEQ ID NO: 788038 - DNA, 100 bp, Homo sapiens
gactttcactttgagacttggttgcatttacaggaattcttcgcccagtaaacctctctttcggttattaaggatcctccaccaccacccgcccctgcac

SEQ ID NO: 788039 - DNA, 81 bp, Homo sapiens
cccggccggtccctcgcctcccggccgagctgacgatttctccacccaggtgaactcctccctcacctccccgacggggcg

SEQ ID NO: 788040 - DNA, 100 bp, Homo sapiens
taatgattcttccatatgtggcaattgtccaagaaaaggacgggaactactttgaacacaagcataatattcggcccaaacctttcgtgatcccgggccg

SEQ ID NO: 788041 - DNA, 75 bp, Homo sapiens
cttccacgtcatccgcatcaacaagatgttgtcctgtgctggggctgacagctttgtgtccctggtgatgttgga

SEQ ID NO: 788042 - DNA, 100 bp, Homo sapiens
tcagattcgtttctgagatttccttcgtccctgacatcatctctgtgcactgataataaccctgcagggaagaccactgggatccccatccatgtctttg

SEQ ID NO: 788043 - DNA, 100 bp, Homo sapiens
tagcgttgcaaatccttaaaagagtcttaacgatggagtccactttctcatccaggctggagtgcagcagcgcaatctctgtgtgatcattgcaaccttc

SEQ ID NO: 788044 - DNA, 51 bp, Homo sapiens
cccaagactgaatttcaattggaaatggaatctagttcatcagactactat

SEQ ID NO: 788045 - DNA, 74 bp, Homo sapiens
ggttcttccaaagtgcccggacccaaaacaggaactccctcgtgaaagatgcttctgttcctctgattgatgtt

SEQ ID NO: 788046 - DNA, 100 bp, Homo sapiens
tcttcggggcttgccgttcgttcgtttccagcctcaggaatttatggtcgcctttttgaatgaggaccgtgtgtatgtacaacaaaataatgtggagaac

SEQ ID NO: 788047 - DNA, 100 bp, Homo sapiens
cggcggcggcgcagctcggaacccgccagggtccagggtccaggttccagcgcccggcggcccaggtcgggaaagaggttaaagaagacacgcaagtatg

SEQ ID NO: 788048 - DNA, 101 bp, Homo sapiens
cggagagactccttgggggtcgagcacataacggggttcgggtgtctcgtgtgtgaacatcacagtcagagcaccataacatggtgtgggaagtgaagaca

SEQ ID NO: 788049 - DNA, 100 bp, Homo sapiens
ctgatttcgagctatcaacattactgaagatggagctgggaagagaaatcctatgaacatatggctaaaataagaatcgcaagagaagcaccttcagaat

SEQ ID NO: 788050 - DNA, 101 bp, Homo sapiens
ctctgagacccggaggaggttcgaagctgagtatgtgacagctgttcctcctcccactgacctgcgattcaccaacattggtccagacaccatgcgtgtca

SEQ ID NO: 788051 - DNA, 75 bp, Homo sapiens
gttcaagagaatggccgaatttgggcctgactccggcgggagagtaaagattagtgatgatgaaccaggttatga

SEQ ID NO: 788052 - DNA, 100 bp, Homo sapiens
atcccagacgaagacagtccctggatcaccgacagcacagacagaatccctgctaccattgtcacaggtagtactgatggaattggaaaatcatatgcag

SEQ ID NO: 788053 - DNA, 98 bp, Homo sapiens
cagagttcgaggtggtgggactcaccgctctggccagggtgcttttggaaacttttatgaaggatacggacagacagagtgcactgccgggtgctgcc

SEQ ID NO: 788054 - DNA, 100 bp, Homo sapiens
gggctctggaaagaccgggtccaggtggccattaaggtgatttctcgagagacgagttgtactgctgtcacaggaaatggacgctggattacaagcatgg

SEQ ID NO: 788055 - DNA, 49 bp, Homo sapiens
gaaagagtcaacagcagtggcaacagctacaagcaggggggtgtcgcct

SEQ ID NO: 788056 - DNA, 50 bp, Homo sapiens
ccggcgtcactctggatgaggccaggatttagctttggagtcaaaccctt

SEQ ID NO: 788057 - DNA, 75 bp, Homo sapiens
attcaactcaatcagtcaaaatcgtcttttcctgctggtaaataacactgaaatcctctcaacattgcctacagc

SEQ ID NO: 788058 - DNA, 100 bp, Homo sapiens
gcttgtatggtctccatatcacagtatcccagatgccaaatggtctcttcaggaaaaagaggtgctggagagagtcgagaaagagaaaatggaacgtgag

SEQ ID NO: 788059 - DNA, 50 bp, Homo sapiens
catcatccagaagctagagccgcaaatacaagccagctgccatgttgtga

SEQ ID NO: 788060 - DNA, 100 bp, Homo sapiens
tgaaagatcgagcagaggcctatttgatagaggaaatgtatgatgaaggaagaattttaaatcgtttctccaaagacattggacacttggatgatttgct

SEQ ID NO: 788061 - DNA, 128 bp, Homo sapiens
aatcaagatttaacattccaacacataaaaattatttatccaacagctcctcccaggaatatgatgaagaatgggctaagaaaattcagagtgaaaagtttcgctggcataactctcagtggctggag

SEQ ID NO: 788062 - DNA, 100 bp, Homo sapiens
cgagcggcgacggcggcggcggcgggcacaggaatttacaagctcaggctcagccaacactgagaccaccaaagtgacgggcagtctggaaaccaagtac

SEQ ID NO: 788063 - DNA, 103 bp, Homo sapiens
tcgcgcggcgctggagagagacaagatgtccgccagagctgcggccgccaagacaatgcagatcttcgtgaagactctgactggtaagaccatcaccctcgag

SEQ ID NO: 788064 - DNA, 96 bp, Homo sapiens
gcgaggaagctgtggctctggttgaggatgtacagagagctcctggacaacaggataggatttttgggccttggtctcatgggaagtggaatcgtc

SEQ ID NO: 788065 - DNA, 97 bp, Homo sapiens
tgcgcagcctcttcgagcgccgcggacgcgtcatcgagtgtgacgtggtgaaaggcagaatccagagaccacatttgaagtatatgttgaagtggcc

SEQ ID NO: 788066 - DNA, 80 bp, Homo sapiens
ctggagcctcagttggaagcagccgatccagcctgcggagcctgtggggcagcaaagtacccacgtttgttcgaatgctg

SEQ ID NO: 788067 - DNA, 113 bp, Homo sapiens
gcggcagcgggacccgtttccggaaggctgattgcatcaggtgctggagaatctggtaaaagcaccattgtgaagcagatgaggatcctgcatgttaatgggtttaatggaga

SEQ ID NO: 788068 - DNA, 100 bp, Homo sapiens
tggagcttcggcaccctggcctttgagtgcatcacgggcttccggcccttcctccccaactggcagcccgtgcagtgtgcacagccagagaacaacacat

SEQ ID NO: 788069 - DNA, 105 bp, Homo sapiens
tgggatcctgctgacggaaattgtcacccacggccgcatcccttacccaggggatgttggaaattactattatggacaaggccacccaatgaagcctcaccgaat

SEQ ID NO: 788070 - DNA, 100 bp, Homo sapiens
ctcttccgcagtgattgaagctttgataaatgaaatcttcctaagtataggcacggatgggcagaagcctttgcaggtatcagaagttcacatatcaaat

SEQ ID NO: 788071 - DNA, 95 bp, Homo sapiens
cgggctaggacgccgagcggtgactccccgccgctcccgggggccgtgacgcaaatccagtttgctgatgacatgcaggagttcaccaaattccc

SEQ ID NO: 788072 - DNA, 82 bp, Homo sapiens
ttttgtgggatgcctcacggctgctgaggggctgcagcggttacagaatgtctgaaggggacagtgtgggagaatccgtcca

SEQ ID NO: 788073 - DNA, 100 bp, Homo sapiens
ctgaaggctgcgcaggaggagtatgtcaagcgagccctgtattggtaaaggttttcaaggtgtcatgaaaagatggggatttaaaggccagcctgctacg

SEQ ID NO: 788074 - DNA, 100 bp, Homo sapiens
agctgaagggtccccagaagttccagtttgatggtgataagaaatcattcctggaggacattcggaaggtgcagacatggccaagtccaagaaccacacc

SEQ ID NO: 788075 - DNA, 90 bp, Homo sapiens
cgcacactgaagagtacgtcttcgggtctacccctaatcacgtctcgatctagaagacggtcacgaagtaggagtcgcaggagcagccgc

SEQ ID NO: 788076 - DNA, 98 bp, Homo sapiens
aaaatatggaaattgaggaaagagagagagcagaaaagaagaaacgggcaactaaaactccaatgataaatcaagggagagatctcagtgtggtgtga

SEQ ID NO: 788077 - DNA, 75 bp, Homo sapiens
ctgctttcctttccctcagcacacagaggatgatgctgactttgatgaagcttttcgctgtggcctgcagttttt

SEQ ID NO: 788078 - DNA, 100 bp, Homo sapiens
accatccctaaccggctggctgcagacccgagcaaggtccgtggtcctgtcagtggaagcccggatagcatgaatgcctctcgacttagccagcctgggc

SEQ ID NO: 788079 - DNA, 100 bp, Homo sapiens
ggacctcttcggggacctgccggagcccgagcgctcgccgcgcccggctgccggaaggatttgatgccctggatccctttattcccatcctggtttccaa

SEQ ID NO: 788080 - DNA, 50 bp, Homo sapiens
acttgagtccatgagattttagagtgttgcatccaagaattgatgcccgg

SEQ ID NO: 788081 - DNA, 75 bp, Homo sapiens
acggaaaagagcaaatgcagcatttttgataggtgcctatgcagtgccatgtttcagaacagagtaagacccctg

SEQ ID NO: 788082 - DNA, 75 bp, Homo sapiens
aatgaggaatgtctttcctaccatctaaaatacgaaggtttctggctgggttttgcagccactcttgatgatgac

SEQ ID NO: 788083 - DNA, 100 bp, Homo sapiens
atttggtgcaaccatctccttctcatgtaacacaggaggcatttcatccttcatgaagccattcaggattttgaattgcatatgagtgcttggctcttcc

SEQ ID NO: 788084 - DNA, 90 bp, Homo sapiens
aaacctggccctcttcaatttctgacaaaaggctaagtgctatttatggaggtacctatatgctgaataaacccattgaagaaatcattg

SEQ ID NO: 788085 - DNA, 101 bp, Homo sapiens
caggatggctctcttcgctggtggcaaactggactcgtacctgcttgactatttcctctttctgaaccgctacttcgaggtgggggccccggtgtactttg

SEQ ID NO: 788086 - DNA, 74 bp, Homo sapiens
aaatggcagaataatctgcttccatcccgccagtttggggaaatgtttcaacgtgcgcaagcgttgcggcggcg

SEQ ID NO: 788087 - DNA, 98 bp, Homo sapiens
gcagcggagtgactgggacctgggaacctactgtggggccgcggccggaccgagcgcctcgacctcggtctgaggattaaaagtaagttggatcaagg

SEQ ID NO: 788088 - DNA, 51 bp, Homo sapiens
gaactgcttcagcagcggaacataagagttgatctctctaatgtattagat

SEQ ID NO: 788089 - DNA, 100 bp, Homo sapiens
gaaaaagaacagcaacatgacctacgagaagctgagccgggccatgagcgcgggcaccggccgcacaggttgctatatcgtcctggatgtgatgctggac

SEQ ID NO: 788090 - DNA, 75 bp, Homo sapiens
ctcagattggaggctggtgtcccggagcagtgcaaggatgacatagtgctggatcttggttttatagatgggtcc

SEQ ID NO: 788091 - DNA, 75 bp, Homo sapiens
aaaggaacagattgttcctaaaccagaagaggaggttgcccagaagaaaaaggcaaagaacagagcagttcacca

SEQ ID NO: 788092 - DNA, 100 bp, Homo sapiens
ctccttcccagccttcagaaattgccggtctgggagttgggggcaaggagaagatcctgccaatggagatcttcgtggatgatgagacgaagttgacgct

SEQ ID NO: 788093 - DNA, 82 bp, Homo sapiens
aggaagcccagaaagggaaaaactaccagaacggagatgtgtttggcgtatgtccgtggttcagaccctgtattaaagcttt

SEQ ID NO: 788094 - DNA, 100 bp, Homo sapiens
gtggaggcagaggtggcatgggtcacccttctagacttcagaccacagacaacctgctccccatgtctcctgaggagtttgacgaggtgtctcggatagt

SEQ ID NO: 788095 - DNA, 90 bp, Homo sapiens
agggcagctagggcctgggccgcggttcggccgcgccggccgatcacaaaggagaacttcctcgaggctggaactgggttgatgttgtga

SEQ ID NO: 788096 - DNA, 51 bp, Homo sapiens
catttttctgcaatggaattaaatggccaaattcctgttgccatcaccctg

SEQ ID NO: 788097 - DNA, 90 bp, Homo sapiens
ttcgcggccagcatttctacgccgtggagaggagggcatattgcgagggctgctacgtgctgcagctgataaattctaatgaacccggag

SEQ ID NO: 788098 - DNA, 75 bp, Homo sapiens
acttgtacagagatgtgatgttggagaactatagcaatctggttttcttggggagtctgaagatacagtattgct

SEQ ID NO: 788099 - DNA, 75 bp, Homo sapiens
ggcggcggctccagcgtcctaagaggtgaagctttgttctaagaatatttgtttcatctagtttatgagtccaaa

SEQ ID NO: 788100 - DNA, 75 bp, Homo sapiens
gacagcaagctgagcttccgggaggaacttgctactaccagcaccatgccctaccaatatccagcactgaccccg

SEQ ID NO: 788101 - DNA, 128 bp, Homo sapiens
gccagaggccacgaagtgacgttggtctcccgaaagcccgggcccggccggatcacgtggatcgacgtaattaacacattccagacgggagcctcttttaagggagtcctaaggcgacagaacatggg

SEQ ID NO: 788102 - DNA, 100 bp, Homo sapiens
ttggtggggtgaagaccccagttttgctgaccttattcaccatgacttatcagttgtggaagctgatcgaggaagcctaagcaggctctgtgaagtggga

SEQ ID NO: 788103 - DNA, 87 bp, Homo sapiens
acaccaagaagccctgcacccggtctttgacatgcaagcatttaaatcaaacggtattgagatggattgggttatgaaacataatgg

SEQ ID NO: 788104 - DNA, 83 bp, Homo sapiens
cctaaatgcagcatgccatcctgaacgtctctccctgtcctagctctgtaactgtttacaaatccacattcatctcaatggaa

SEQ ID NO: 788105 - DNA, 95 bp, Homo sapiens
cagctctttcctttccgtctggcggcagccatcagacgcaaacatgcagatctttgtgaagaccctcactggcaaaaccatcacccttgaggtcg

SEQ ID NO: 788106 - DNA, 85 bp, Homo sapiens
agagggctccgagatctccgacaggttacgccaaggaggccctgaatctggcgcagatgcaggagcagacgctgcagttggagca

SEQ ID NO: 788107 - DNA, 82 bp, Homo sapiens
ccgcagaaggggagacacattttatgttgtgtcatttcgaagggtataatgggtctctcccaaatggcgatagaggaaggag

SEQ ID NO: 788108 - DNA, 75 bp, Homo sapiens
tgtttggatttcttacaagaagtcacaaataaccttaagtaattcctggattgctttttgccagaaaaatctttc

SEQ ID NO: 788109 - DNA, 83 bp, Homo sapiens
aggcactggtggcatccagtggtggccagtagaggaggaggtgaacaaggaggaggggaatccgtaccagagtaccagatggc

SEQ ID NO: 788110 - DNA, 82 bp, Homo sapiens
ttcccaaaggacggtagcactcagcgccccgccaacaggagctggaggatcttcagaagaagcctcccccatacctgcggaa

SEQ ID NO: 788111 - DNA, 51 bp, Homo sapiens
caagtcaattaccatcctttaccaggatcctgctcacactaaaatatgaac

SEQ ID NO: 788112 - DNA, 100 bp, Homo sapiens
gtgctcagcgccgcggggatgggggcctcgggcgccccgcagccccccaacatcctgctcctgctcatggacgacccaaaacagagtggagtacgagaaa

SEQ ID NO: 788113 - DNA, 100 bp, Homo sapiens
gccgcagatcgccgtggtgggcggccagagcgccggcaagagctcggtgctcgagaacttcgtgggcaggaacttggcattagaattcctcgaccactag

SEQ ID NO: 788114 - DNA, 117 bp, Homo sapiens
cttgtctgatgtggcatctagactttggtttacatacaggaaaaactttccagccattgacaatgcagatcttcgtgaagactctgactggtaagaccatcaccctcgaggttgagc

SEQ ID NO: 788115 - DNA, 89 bp, Homo sapiens
gggccagggaaccctggtcaccgtctcctcaggtgaaatgacaatggatgctctgttggctcgattgaaacttctgaatccagatgacc

SEQ ID NO: 788116 - DNA, 50 bp, Homo sapiens
gacgaagaggaggatattgataagattcgccaaagtgaggacaaaaggaa

SEQ ID NO: 788117 - DNA, 100 bp, Homo sapiens
taactgcagatggttgctgtactttgccaacaaggtatgagttaatacagaaaggagtgactgaacttagaactgttgggaatgttccagatgtctacac

SEQ ID NO: 788118 - DNA, 108 bp, Homo sapiens
gacatgcagagcatcctctatcacgggcttatccgtgaccagaaacttgaggagaggctggagttctggatggagaaatacgataaggacacagaaatgaaacagaat

SEQ ID NO: 788119 - DNA, 100 bp, Homo sapiens
acttaaagttatgctggcagattcgccaagagaagaatctaacaaacggcaaagaacttactgattcttgaggtcatgagtatgcagaggagaacctggg

SEQ ID NO: 788120 - DNA, 75 bp, Homo sapiens
gggcacccggtgtaccgcggcgagaagccccagctgcactacgcggtcctctcctggaagcttgtgcctgacaat

SEQ ID NO: 788121 - DNA, 100 bp, Homo sapiens
agtgcattgcctttggaaacgaggtccagctcttctatgaactaactgatatcatgaataaggtctggaacaagattcagaagagaggcaatctcaacct

SEQ ID NO: 788122 - DNA, 80 bp, Homo sapiens
ctgaaaaagggagtcaaaggggacttgccggagcagccttacttgcagcctccactcagcatcttggtgattgagcgccg

SEQ ID NO: 788123 - DNA, 106 bp, Homo sapiens
cacgaaggcaccgacgtcatcatgctgaccaccaatcagatccgtaagcttcggaaccaaaaagaagcttcccagagccggggccaggagccccaagcgccctcta

SEQ ID NO: 788124 - DNA, 100 bp, Homo sapiens
agagatccaagtgcgcgccctggcgggtccggaccaagaaaaggatgcgcctccacttagcaaggctgggcaggatgtggttctgcatctgcccacagac

SEQ ID NO: 788125 - DNA, 75 bp, Homo sapiens
gtggaagcgaagccgaaaaaggcagcagcgaaggcgggagtcatggatgtagatgctgaaagagagaagataaca

SEQ ID NO: 788126 - DNA, 75 bp, Homo sapiens
cgcagcctggcatggcttctggggacctttacgagggcgtctctggccgagcctctttttgtggaaaacgacagc

SEQ ID NO: 788127 - DNA, 100 bp, Homo sapiens
cggggccgccggggccgccatggagcccgactcggtgattgaggacaagaccatcgagctcatggtcacatgcatcggacgttacggattactcttaccc

SEQ ID NO: 788128 - DNA, 98 bp, Homo sapiens
gaatcttcaatggatgaggaacagtcaaagaatagctgcaatctccatggcctctaagataacagacatgcagcttggaggttcagtggagatcagca

SEQ ID NO: 788129 - DNA, 50 bp, Homo sapiens
cccctggctggcatggccattgtcaagtttgactttggggacaccatggt

SEQ ID NO: 788130 - DNA, 90 bp, Homo sapiens
cccgcagcaaccctgagaacaacgtgggccttatcacactggctaagaatggaagttggatacactttgtgacttgtacgagacactgac

SEQ ID NO: 788131 - DNA, 88 bp, Homo sapiens
agtcctgcgcttggggatcctctgtacgcccgttcactgaaaatatttacaccagcagctccagttcataccaataaagaagatcctg

SEQ ID NO: 788132 - DNA, 75 bp, Homo sapiens
ctgccagggtccctgaagagggaagacacgcggaaacaggggttgtgtccactgtggtccccgactctgcccaca

SEQ ID NO: 788133 - DNA, 74 bp, Homo sapiens
cttgtggatattgggcttgacagctgcaaggagttactgaaggaagcagaatctggtaatataagtcaaaagtc

SEQ ID NO: 788134 - DNA, 82 bp, Homo sapiens
gccgtgggcaccttcacctgggtctgcacgccctttctggatcaggtctcctgggcatggctaacattgacctggaaaagag

SEQ ID NO: 788135 - DNA, 82 bp, Homo sapiens
atgctgcagacactgaacgaggagccagtgttgaaccaagactctgaggctgatatgcaatgtcacttacaacattaatcag

SEQ ID NO: 788136 - DNA, 100 bp, Homo sapiens
atttgaaggacgtgtctgcttccactcctgccgtgattgtcagcttcctgaggtctcctcagccatgctgaactttgaaaacgaggcccactgcgacttt

SEQ ID NO: 788137 - DNA, 90 bp, Homo sapiens
cccctttatccggcggctgggcctggaagcagagctgcaggtcacgagaagagaatgccttctagatgcaaaatcacctccaaaccagac

SEQ ID NO: 788138 - DNA, 80 bp, Homo sapiens
ttaaaaatcaccagttactttaatgaaaccatgtttatgcagtaggtggcaatgatggaatggcttctttatctagcgtg

SEQ ID NO: 788139 - DNA, 85 bp, Homo sapiens
tggctgaagacaccaaagatgggggaggggaagttactgcagccagatgcttagtaaagaagtggatgcttgtgttaccgaccta

SEQ ID NO: 788140 - DNA, 100 bp, Homo sapiens
tgtacatcagccatttcctctccattgacaaaatccatctcattaatgacaatcagccatcctggattggacagccctcgggaccaaggatcacgtcatg

SEQ ID NO: 788141 - DNA, 50 bp, Homo sapiens
cgggagactggagtcgaaggccgtgagtattgttgtccagacatgataaa

SEQ ID NO: 788142 - DNA, 90 bp, Homo sapiens
cgacgcctttcagctctgcagcagctttgcctccagggtcatacgcatccttagtcggatgtcatggatcagaatttgttaaatttcctc

SEQ ID NO: 788143 - DNA, 99 bp, Homo sapiens
gagagccgggaggtggtgtgtacccactgccccccgggccagagaggtacggcttcaggtccagagcgtggagaagcctcagtaccgcgggacgttgca

SEQ ID NO: 788144 - DNA, 100 bp, Homo sapiens
tgaagagaaaatagcaaacgatccagacggcagggagtgcatcaaaggtgtgaacacaggcgcaacgtgctgagcttgtcccctggaatcgaccacccag

SEQ ID NO: 788145 - DNA, 85 bp, Homo sapiens
ctttgtctagacaagaaatgcaggaagttcagagttctaggagtggaagaggagatcttcgggccagtgatgcagatcctgaagt

SEQ ID NO: 788146 - DNA, 100 bp, Homo sapiens
tggacgtcttcaccgccccacactggcggatgaagcagctggtggggctctactgcgacaagagcccacccacctttgggttcctgttggacatcgatgg

SEQ ID NO: 788147 - DNA, 82 bp, Homo sapiens
ctgcgcagctccggccgcctggctccccatactagtcgccgttcccgatgggtcccggctcggacggtccgatgggcggcat

SEQ ID NO: 788148 - DNA, 75 bp, Homo sapiens
ttagaatctgggactttcttcgttgccatgaggaaagaattctccgaggcaaaagaatgcatgtgcagttgtcca

SEQ ID NO: 788149 - DNA, 100 bp, Homo sapiens
atttcgatctggacctggcctggcggctcctgtcttcgttcctggctagaacaagacacctcctgtccaacatgcagaatgtctcttaatattgccgaca

SEQ ID NO: 788150 - DNA, 75 bp, Homo sapiens
atttaatgaaggaaagtagcaaatttgatgatccatgttgacggggctccaccctcccacttctggaaccatcat

SEQ ID NO: 788151 - DNA, 80 bp, Homo sapiens
tcctcagcatggccaactccgggcccaacagcaacaggtctcaattcaattctgtggtgttcttggtcacacatttatgg

SEQ ID NO: 788152 - DNA, 74 bp, Homo sapiens
aggaagctcagaagaagctcatctcacaattctcagtagtcttcagtctcctgttgaccggaactcccatccag

SEQ ID NO: 788153 - DNA, 100 bp, Homo sapiens
attttcagcatcaaacctcttcaattccatatttttgctgaagatcagctacatcatagctttaaaggcagacatcagaggctccttgaaatgctagata

SEQ ID NO: 788154 - DNA, 100 bp, Homo sapiens
ctggaatcgtatcctcctgtgttttttcagactccttggaaattaaggaatgcaattctgccaccatgatggaaggaggttcagcaacatcagatgacca

SEQ ID NO: 788155 - DNA, 50 bp, Homo sapiens
ctgccgtcatgtctaagtcagagaagaacatgtgatcatccaggccgagt

SEQ ID NO: 788156 - DNA, 75 bp, Homo sapiens
ttgcgcctggcctacagcgaggctgaagcggccagcttgatgtccgggagctgatctctctctaccccttcctgt

SEQ ID NO: 788157 - DNA, 96 bp, Homo sapiens
gccggccgtggacatcggggcagctgacctcgcccacgcccagcagcagcagcaacaggaatcccgttctgcttccagaagtggaagtgctcacgg

SEQ ID NO: 788158 - DNA, 80 bp, Homo sapiens
ctgggcacccacggagcctccggggctggcccctgtgtccgtctgggatgaggaggaggatggtgccgtgtttaccgtca

SEQ ID NO: 788159 - DNA, 100 bp, Homo sapiens
ccaccctcatagatgtcctcttctactcgcacaggtctggtccttgcactcctgtttccaagcatggcgagcatggcggctataggcagctgctcgaaag

SEQ ID NO: 788160 - DNA, 100 bp, Homo sapiens
ccctggtccccctggccctgctggcgagaaaggatcccctggtgctgatggtcctgctggtgctccaggtcctgatggaaacaatggtgctcagggacct

SEQ ID NO: 788161 - DNA, 82 bp, Homo sapiens
aactataccaatttccagtttggtggcctatcctagagaatgttttctgagctcttgggaagagtgtgtctcctgctgtgtt

SEQ ID NO: 788162 - DNA, 80 bp, Homo sapiens
tgcctgcgccgcgctgcagaagagcaggcacctcctggaccaggtgtttcccattaaacactaccaggacaaaatcaggc

SEQ ID NO: 788163 - DNA, 100 bp, Homo sapiens
gaaaccctcgcagagggatcttgccctcattctttgggtctgaaacactggcagtcgttggaaacaggactcaggacttgtttacactgggcatgtaaac

SEQ ID NO: 788164 - DNA, 100 bp, Homo sapiens
ttggagtgtgcgtgcgcgccgagcggtgtggaaacaggaagagaactagaactggaagtaaagcattgaagatgtgactgaattgctgcaatctcatgat

SEQ ID NO: 788165 - DNA, 73 bp, Homo sapiens
caccggcgtggtcaacatccctgccgcagaggagggtgcatctgcccggaagactcagactcctgcagcccag

SEQ ID NO: 788166 - DNA, 90 bp, Homo sapiens
catcttcacagaatacacctctggctcaagtgtttgtccctttggagtctgttaagcccagtacaggtttgcagattccgccagcagcac

SEQ ID NO: 788167 - DNA, 88 bp, Homo sapiens
ccttgctggtgcatgcgtcgtcggcctctgggcagcaggtttccacttgagcggcacagtgacagaacctgcaatacaatcggagcca

SEQ ID NO: 788168 - DNA, 80 bp, Homo sapiens
gctgtggaatgtcaccgtggagaatgtcaagctgaaggcgtcctcttcttccaaggagctgccaaggccatgtctgttcc

SEQ ID NO: 788169 - DNA, 100 bp, Homo sapiens
ccaagccactcactctgctctgggatatctctgaaagtgtgaacttcgatgaggagactgatggaatatcccagtcagcatgtttagaaagacccaattc

SEQ ID NO: 788170 - DNA, 82 bp, Homo sapiens
ggagcgcggccgggcgcgcggcgccgccacaagttgcgctgctcgcgacgagacttcccaagtaagaagcggaagaggagcc

SEQ ID NO: 788171 - DNA, 96 bp, Homo sapiens
attcatcaacctagagctgccaagaagcattcttcatctaaagataaggaattacatgaacgacagccttcgcaccgacgtcttcgtgcggttcca

SEQ ID NO: 788172 - DNA, 75 bp, Homo sapiens
gccatggagcgctctgggcccagcgaaggcagaagctcctcctggggtagagacagatcttattgatgttggatt

SEQ ID NO: 788173 - DNA, 80 bp, Homo sapiens
cgccattggagacttggtaaagagcaccttgggacccaaaggcatggatactccaaggaaatcggatccgttctattact

SEQ ID NO: 788174 - DNA, 99 bp, Homo sapiens
gcagctggaaaaggggtgattgttgcaaagagcaaagaagaggcctgcaaagctgtacaagagatcatgcagatgttgatgttagtgaagattcacctc

SEQ ID NO: 788175 - DNA, 101 bp, Homo sapiens
atggaacccaagcagtggcgaagggaatcgcaaggctcttccctgaccattttctactgtccctgcgcgaggacacattcagctaacgtattttagcaggt

SEQ ID NO: 788176 - DNA, 75 bp, Homo sapiens
ggacgggtgattatggtggcccacttttcctcctgccaggtagatgacattaatgctgataagaatatctcttct

SEQ ID NO: 788177 - DNA, 75 bp, Homo sapiens
gctgcgggaaatcgggctgaagcgactgagtccgcgatggaggtggtgctgtgggtcggcctgggcgtcctggtg

SEQ ID NO: 788178 - DNA, 51 bp, Homo sapiens
aaggattccaagtaactcttatttggattacaagggccagaagctagctga

SEQ ID NO: 788179 - DNA, 101 bp, Homo sapiens
ggggcctgattgtctatcagctagagaatcaaccttctgaattcaggaggatagaatctccactgaaacatcaggtcagcccaaggccaaccccactgtca

SEQ ID NO: 788180 - DNA, 75 bp, Homo sapiens
gccagactacggcttccccgaacgcaaggagcgcgaacctagaagtcggaatccggaagaagatcgaacatgacg

SEQ ID NO: 788181 - DNA, 100 bp, Homo sapiens
cctgaacctgcggcctgacccagagccacttctcaccgagatgattcatgaaggaccgcagatgttcatggactgcagcccacaggccctgcccatcgca

SEQ ID NO: 788182 - DNA, 75 bp, Homo sapiens
acacaggatggcttgcagaagacgctatttggtgcagcatgtgcaagaggatgatgccgcatttccagaaggctg

SEQ ID NO: 788183 - DNA, 80 bp, Homo sapiens
gcctgaaaagtcgcagcgagctggagccgccggagttgccaaaacaaaggggatttggtgatggaggctttgttagaagg

SEQ ID NO: 788184 - DNA, 90 bp, Homo sapiens
tcgagctggcgggtcccgcgggccaggccgtggagattgcagcaaaaattggaggtgatgcagggacatcactgaattcaaatgactatg

SEQ ID NO: 788185 - DNA, 92 bp, Homo sapiens
gtaagaagaggtcccaatcccccactctttccgccctaatggaggtctccagtttcgtgtactaatggtcacttgatgtgcgctggctgttt

SEQ ID NO: 788186 - DNA, 123 bp, Homo sapiens
gggctagtaaggatgccacctatacttctgcccggaccctgctggctatcctgcgcctttccactgctctgaacattaaccaggtggtatttgttggaaatttcttgagaattaatacgatcg

SEQ ID NO: 788187 - DNA, 100 bp, Homo sapiens
cttcaccgcgtacccgggacccgcccgcccgcgggagagtgatcagcagctggactgtgccttggacctaatgaggcgcctgcctccccagcaaatcgag

SEQ ID NO: 788188 - DNA, 90 bp, Homo sapiens
actttcacccatgtgaggatcggcccaagcacaaaacaagaccaagtcattcagaagctgttccatttcctccaagtcaccggcttacag

SEQ ID NO: 788189 - DNA, 98 bp, Homo sapiens
caacaggaaaatcatattatagatggagtaaagctccgccgcatgcaagagatgattgcaaggatgcaggcgcagatgcagatgcagatgcagggcgg

SEQ ID NO: 788190 - DNA, 90 bp, Homo sapiens
ctggcaaggatggtgcagattttggcagattatggctttgtccccacccagcactgatgatattataaaagatttaccgcattgtttctc

SEQ ID NO: 788191 - DNA, 100 bp, Homo sapiens
ccgccgcccagagactgctgagcccgtccgtccgccgccaccacccactccggacacaggttagctttatacgtctacgaatatttactgcacgtaggag

SEQ ID NO: 788192 - DNA, 98 bp, Homo sapiens
gtggcaccgcgagctccgcaaagggaaactactcctagaattggagacatccttcagaaattggcaccattccttaagatgtatggagaatatgtgaa

SEQ ID NO: 788193 - DNA, 82 bp, Homo sapiens
gaagacaaaaatccagaagtacaagcagtctgacccgtgaccaaggtgtagactaagaagtggagtcatgcttcacacggcc

SEQ ID NO: 788194 - DNA, 83 bp, Homo sapiens
caagggcctagatgacgacacgcctttgcacgacgctgccaacaacgggcactacaaggctctacagattctcccctgcccct

SEQ ID NO: 788195 - DNA, 83 bp, Homo sapiens
caagggcctccgtctggatttccaaggaagaatttcctctgaagcaccgatgaatgatttcggaatcaagaatatggaccagg

SEQ ID NO: 788196 - DNA, 82 bp, Homo sapiens
gtcacccacgcagacatcttcagccgctgccagtcaccttcaggccattcagaggaggaaagagaggggaatatgaagtcag

SEQ ID NO: 788197 - DNA, 90 bp, Homo sapiens
aggatctcaagctgtaaaagccatgaaggaagagccaatgttttccacccataatcctttctgccgacccctagttccctctgctcagcc

SEQ ID NO: 788198 - DNA, 75 bp, Homo sapiens
gcaaaatgtgattccagtccaggagcagcatggacctgtcagcaactaaggaacaaaagtaatgaagatttacac

SEQ ID NO: 788199 - DNA, 132 bp, Homo sapiens
gggacactggctggtggaagatcatgttcgaatatgggaagttttaaagacagaggaggaacgggaggatgaaattgctactatggagtgcatcaacaatggcaagtccatctttgaggcccgcttggacat

SEQ ID NO: 788200 - DNA, 90 bp, Homo sapiens
gtgtctttagctgagagacattattataactgtgattttaaaatgtgctacaagcttacttctgtgggccgggctagagcgacatcatgg

SEQ ID NO: 788201 - DNA, 114 bp, Homo sapiens
ttaatcagaggtggcttatcaaacttgggaataaaaagtattgtaacagctgaagtgtcttcaatgcctgcttgaatttgctgattcccttggaattccgtttttggaaaccag

SEQ ID NO: 788202 - DNA, 100 bp, Homo sapiens
gggcgttttcttggatgaattgcttgctttggaggtggtgaggtggagagtgggtggcgatcgcttccagggacccgggcatcaggcagccccgaggacc

SEQ ID NO: 788203 - DNA, 98 bp, Homo sapiens
tcgccgtccccgccatgctgtctctagactttttggacgatgtgcggcggatgaacaagcggcagattcatgttacatgtaaagctgtcctcatttgt

SEQ ID NO: 788204 - DNA, 75 bp, Homo sapiens
cgccgcgtcctcagccaccgctccctcttcccacgacctcaaaggaagaccttctgcaggctgattttgaaggtg

SEQ ID NO: 788205 - DNA, 100 bp, Homo sapiens
ccccctccttagttcggcatctgcacagcactgaagaacctgggaatcagaccctgagaccctgagcaatcaccaggagactaaagtccatcaaaaacat

SEQ ID NO: 788206 - DNA, 96 bp, Homo sapiens
ctgagccggaatccggacaattatgtccgcgaaaccaagttggacttacagagagaaaactgcatcagcagtttgaaatgtataaagagcaggtaa

SEQ ID NO: 788207 - DNA, 50 bp, Homo sapiens
ctggatctgtatgctttgagcaagtttgggcttcctgtagacaccctttt

SEQ ID NO: 788208 - DNA, 87 bp, Homo sapiens
cgaggacgcgtcacacacagcgaggatttgaggagggaagcgccttccagaaaatggacccaagtggggtcaaagtgctggaaacag

SEQ ID NO: 788209 - DNA, 75 bp, Homo sapiens
ccagcagccgtccggagccagccaacgagcgacctgtgaccgcatcaagcagtcagcagctggcaccaagcgtcg

SEQ ID NO: 788210 - DNA, 100 bp, Homo sapiens
atcacatccatcaagggggaaagctctcaaaggtctatggccctgtgttcactctgtattttggcctgaaacccatagtggtgctgcatggatatgaagc

SEQ ID NO: 788211 - DNA, 82 bp, Homo sapiens
acagcccaatctcctttctgggcaaacgttccaaggcccgatgagagaaagggaaagttaaggatgctggagcagaacaatg

SEQ ID NO: 788212 - DNA, 100 bp, Homo sapiens
ccatgaccctaatggtctttttgttcaagataaagtgattttttgcctttgttgattaactggacaaattcaggtgtgtgcagtggcctcagggatccgg

SEQ ID NO: 788213 - DNA, 58 bp, Homo sapiens
tggcgcccgccctgcgcactcaccatggcgagacacctatggctgccgatgaaggctc

SEQ ID NO: 788214 - DNA, 95 bp, Homo sapiens
caaacattcatatcccaacattcctgtgtcaattcgacggagctggatgaactcattcaggaggcggctttccggaaagtagtacaagcaactat

SEQ ID NO: 788215 - DNA, 101 bp, Homo sapiens
agctcaagaccagggccctgcagctggaagaggagctgttccagagacaagaggagcagcagcggcaccgcccctcaccctggagggtcctgtacaatctc

SEQ ID NO: 788216 - DNA, 130 bp, Homo sapiens
gcccctgttgcgatggcgcagaaaccccgttgacaaggcactgctttttcatgacgacaatgcagatcttcgtgaagactctgactggtaagaccatcaccctcgaggttgagcccagtgacaccatcga

SEQ ID NO: 788217 - DNA, 75 bp, Homo sapiens
cctctgaagttgccaggcttcccaacattcttgtctgtggtcagcccaaggccaaccccactgtcactctgttcc

SEQ ID NO: 788218 - DNA, 85 bp, Homo sapiens
agtggcttcgtcctccatgacaacaagcacgactgcaaagaagagcatcattcgttgtgatgaagatgaagctcaccttgcctct

SEQ ID NO: 788219 - DNA, 100 bp, Homo sapiens
ttctggcggccatggtgttgctgctgtactccttctccgctcttttggtacaccagaaggccagaatggaacgacttcaaagagaacttgagattcaaaa

SEQ ID NO: 788220 - DNA, 100 bp, Homo sapiens
cccactttctcggcgccgcggctcttttctaaaagtgctttgatcactcagactcgagccaaacaggcagctaccatgagtgaagtggagtggagaggga

SEQ ID NO: 788221 - DNA, 75 bp, Homo sapiens
cattgccatgaaggaactcaagtgctggagaatctggtaaaagcaccattgtgaagcagatgaggatcctgcatg

SEQ ID NO: 788222 - DNA, 75 bp, Homo sapiens
cttccgctattcagcagagagctattattccctgtattaaaggaactgtggctgcaccatctgtcttcatcttcc

SEQ ID NO: 788223 - DNA, 75 bp, Homo sapiens
caacatcatgacattgctgttccagtgcatgcagggtctccgtctctccaccgggggcttcatccttccagggag

SEQ ID NO: 788224 - DNA, 80 bp, Homo sapiens
tcaccaaggaactggtgctgcagcgagagacgagccaaactcaggctgtaccttgagcagctcaagcaactggtgcccct

SEQ ID NO: 788225 - DNA, 106 bp, Homo sapiens
cacttcggctgtgtcaatgccattgaattctccaacaatggaggccagtggctggtctcaggtgtcatggagaaactccagctgggcccagagattctgcagcggg

SEQ ID NO: 788226 - DNA, 101 bp, Homo sapiens
ccacctccctggtggtgctcatctgctccatcccgctcgtggtaaccatgtgcgaccgaaaggccgtgatcaaaaatgcggacatgtcggaagagatgcaa

SEQ ID NO: 788227 - DNA, 100 bp, Homo sapiens
ggcttccgaggagctgtacgagagatgtggtactggatcttcctctgggctctcttctcttctctgtttgtccatggtgctgcaggagtgttgatgtttg

SEQ ID NO: 788228 - DNA, 83 bp, Homo sapiens
gttttaaactcattgactttggacttagcttcaaagaaggcaatcaggagaaattgacacaagattctctttttgtgcggtgg

SEQ ID NO: 788229 - DNA, 82 bp, Homo sapiens
atttcacagcactctgggcgaaaattggatgtgaaaatgaagccagaccgaggaaaatgtttataggaggccttagctggga

SEQ ID NO: 788230 - DNA, 100 bp, Homo sapiens
cgtcatggagatggaaaaggagttcgagcagatcgacaagtccgggagctgggcggccatttaccaggcagaaacggaattacagagagctgcaatggat

SEQ ID NO: 788231 - DNA, 50 bp, Homo sapiens
cccaggagtcatcggacgccagaatctgctcaggcgctcaggactgccag

SEQ ID NO: 788232 - DNA, 98 bp, Homo sapiens
ctgccctaggcgttcgtgaagagaagcagctgttgctattggaggaggagtcgtaagaaagcagtgggagttgaagtcattgtcaagtgcttgcgatc

SEQ ID NO: 788233 - DNA, 75 bp, Homo sapiens
ctgggtgaaggaagctgaaaccacagacatgactgagtcctccatgaagagtgaaacaccattcaaagtcgtagt

SEQ ID NO: 788234 - DNA, 129 bp, Homo sapiens
gggtcgggtcgcttccccgcagcatggaggacgatgcaccagtgatctacgggctggagttccagaggagaattctgcctaagccaactcgaaaaagccgtacaaaaaataagcaaaagcgtcccagga

SEQ ID NO: 788235 - DNA, 100 bp, Homo sapiens
gactcaagccgtcctcctgcctcagcctcccaagtagctaggaggtgtgtaccaccacacacacgacttgtttaagtatcactgcaatgctgacactggg

SEQ ID NO: 788236 - DNA, 90 bp, Homo sapiens
acacagtggtggggctgcccaggccaatccacgaaagcatcaagactctgaaacaggtggagctggaacgagccaagacgcagctgacat

SEQ ID NO: 788237 - DNA, 50 bp, Homo sapiens
agcgcaaccacgagacggccttccaagcctttcatccgctgtagtttaca

SEQ ID NO: 788238 - DNA, 105 bp, Homo sapiens
cccccgggactcccagggctccagggccctcctccggccccaggcctaccccagtcacggacgtgagagggtccaagcctggtaagaatgtccagcttcaggaga

SEQ ID NO: 788239 - DNA, 76 bp, Homo sapiens
caaaggctttgatgaatacatgaaggagctagggcctgccttaagtgtgaaagtaatgactgatgaaagtggaaaa

SEQ ID NO: 788240 - DNA, 75 bp, Homo sapiens
catgctgctgaaagagtaccggatctgcatgccgctcaccgtagacgaggtgtatgagctcagtggagagcacca

SEQ ID NO: 788241 - DNA, 96 bp, Homo sapiens
aagaaggcaggagagagacacaagctggcaaaggagcggcgagaagagcgggccaagtacctgggaggagatgaccagtgccttggccactatgcg

SEQ ID NO: 788242 - DNA, 83 bp, Homo sapiens
cctgctggacgccgacaccttcagcgccctggtcaagacgctgcagcgggactgcctggtggggtttttcggctacgtcagct

SEQ ID NO: 788243 - DNA, 104 bp, Homo sapiens
aagactgacagcctaagggaaccataagaagttgccctgatcattcagacattttgatgaagaaagttctcctcctgatcacagccatcttggcagtggctgtt

SEQ ID NO: 788244 - DNA, 50 bp, Homo sapiens
aggacattgcggctcatatcaagaagggtcctctcatcgttactgaagag

SEQ ID NO: 788245 - DNA, 50 bp, Homo sapiens
ctctggtgcatgctgatgacgaaaaacgacaaggaagatggggagccaaa

SEQ ID NO: 788246 - DNA, 100 bp, Homo sapiens
cgagactccgtgggcataggaccctccgagccagtctgctcccagttttcgagaggagtctatgctatttttggattttatgacaagaagtctgtaaata

SEQ ID NO: 788247 - DNA, 90 bp, Homo sapiens
gctgcaggctggacagcccccagacctggagaggatccgcacacttctggaggtgctggagaatctggtaaaagcaccattgtgaagcag

SEQ ID NO: 788248 - DNA, 82 bp, Homo sapiens
acaaccaagggcctccgtctggatttccaaggaagaatttcctctgaagcaccggctaaggcagctggataagcacagccag

SEQ ID NO: 788249 - DNA, 100 bp, Homo sapiens
acatttctggctctgaaggcgaacgcttcgctggccatttaggagctctgctcaaagccagacggtagttaaaccagagagcaatgacaaagaaacagaa

SEQ ID NO: 788250 - DNA, 83 bp, Homo sapiens
ccgccgccaccatgcccaagagaaagaagtcccgggcccagagcccggccagcaggagcagttggtcttcggcagcggggatg

SEQ ID NO: 788251 - DNA, 111 bp, Homo sapiens
ctacaatttctagctttgtaggagcatggcttggagcacttcctattccactggattgggaaagaccatggcagctatcagttgagggatttgcagttgataaaatggctg

SEQ ID NO: 788252 - DNA, 82 bp, Homo sapiens
atttgcctttagtgcactcttctccttcacagtaaagtggctggaggcaagtgaggcctatctggttggcctttttgaagac

SEQ ID NO: 788253 - DNA, 95 bp, Homo sapiens
gaggggcgcgcgcctgcccagctttgcagcccccgaacgcggcctcgcacagagacagggcagggcattgttcatgcactgaccgacctcagcag

SEQ ID NO: 788254 - DNA, 100 bp, Homo sapiens
tctgctcatgtgcagactcagactggccaaaattcaatccctgctttagctcagtttcaccagtgatcattaaagaatgggcagcttacaaaggaaagtc

SEQ ID NO: 788255 - DNA, 97 bp, Homo sapiens
agattcttaattaaagcaacaatagaagaaagaatgcaggcaatgctgaaaactgctgagagaagagccagagcccagaggtggagcagttagggag

SEQ ID NO: 788256 - DNA, 97 bp, Homo sapiens
ctctgcttaaaccaagaaacagtatgtttagcaagcactgctatgaagactgagaattgtgtggccaaaaggtggggtttcaccgtgttgcccaggc

SEQ ID NO: 788257 - DNA, 95 bp, Homo sapiens
gtgggagagatgaagaacctgagtcaggacgtaaatggaaccctggtgtcagcttcctctggtgcaaccagcaagtcttccagtatgaatcccac

SEQ ID NO: 788258 - DNA, 90 bp, Homo sapiens
agaactccagcccacctctccaaccccaacctggcctgctgatggtggtctgtttttctggggggccaccaacacctcccgtgaatctac

SEQ ID NO: 788259 - DNA, 74 bp, Homo sapiens
ggaggctttcagccggagaagcgagtttcagctgactgtctcgaggatgcctacggagctggctgcacttcaga

SEQ ID NO: 788260 - DNA, 98 bp, Homo sapiens
aactttctatttgcctaaattcttcattgttggactattgtggttggcttctgttacgctaggaatatggcaaacaacggtttgatcaccactgtccc

SEQ ID NO: 788261 - DNA, 102 bp, Homo sapiens
cttatactcctcccagtgacgggtctggagtgcgtgggggaccggctgttggcgggtgtggacactgccagcggctgcagccgacttggaatgacctgggag

SEQ ID NO: 788262 - DNA, 83 bp, Homo sapiens
cggaccttaaaatacccgcaacagccccttcgtcccaaggacacttgacattcagggacgtggccatagaattctctcaggag

SEQ ID NO: 788263 - DNA, 112 bp, Homo sapiens
gtgaacgacactctgacttccgaagatgccggactccggaacagcaagaactgcaccgaaccagatggcaagtttggggcctacatgcaggtgcacattcagaatgatgggc

SEQ ID NO: 788264 - DNA, 100 bp, Homo sapiens
ccctgctttttctggtgtcctgaacctggaagttgtgctttttaaggtgaaatgtatagatgttgttcaggcttatatcaacagaatcaaggacgtgaac

SEQ ID NO: 788265 - DNA, 99 bp, Homo sapiens
caagttcggggccaggacgtcgggaggacctgatcatggaagggaagtggttgctgtgtatgttactggtgcttggaactgctattgttgaggctcatg

SEQ ID NO: 788266 - DNA, 100 bp, Homo sapiens
taacgtatgccttcttgggaactgccatctcctgcatcgtcataggccccgtcgcagaatttagtctcaaaggaaacttcaaccacagcactgcaggcct

SEQ ID NO: 788267 - DNA, 75 bp, Homo sapiens
gaggaaagaggaggaaaacaaaagctgctacttatggaagatacaaaggataaagtggagaattttcatgaagaa

SEQ ID NO: 788268 - DNA, 75 bp, Homo sapiens
atgagatggtggatgaacccccaggtaacagtgatgatgtcaaatgcttttgctgtgatggtggactcaggtgtt

SEQ ID NO: 788269 - DNA, 98 bp, Homo sapiens
gtgaaagggagaggaatccgaattctctcaattgatggtggaggaacaagtattgaagctgcttctggtggtaaagctgaagttatcacttgtgatgt

SEQ ID NO: 788270 - DNA, 100 bp, Homo sapiens
ttctgctgtctcggcacaagcagctgctgcacagaaaaataaactcaaggagcctgggggaggttcgtttcggcacagtggctcacacctgtaatcccag

SEQ ID NO: 788271 - DNA, 98 bp, Homo sapiens
gcccagagaccctgaccagctttacagcacgctcaagagcatcctccagcaggtgaaggatagtggccaaagcctccaagaacctcatgtccacgcaa

SEQ ID NO: 788272 - DNA, 100 bp, Homo sapiens
ggcagcttctgaggggctatgtagggtccatccagccacacggtgtgttctttcggagttcatgatcaagtgttgcccacaccaaatgcttcatccagag

SEQ ID NO: 788273 - DNA, 50 bp, Homo sapiens
ggacaacatgctgcggggcacaggagtggacagtgcaatgaaggaagaag

SEQ ID NO: 788274 - DNA, 100 bp, Homo sapiens
ggtgcagctgccagatccgctgatctagtgcttctcgaaaaaaaccttcaggcggcccatggaaatgcactcggtgatggaaagagagccactattctga

SEQ ID NO: 788275 - DNA, 90 bp, Homo sapiens
aatttatatagagatgtgatgttggagaactacagaaacctcgtctccctgggtgattttacaacgagatgctgctctccatagggatgc

SEQ ID NO: 788276 - DNA, 71 bp, Homo sapiens
gtggcagactttgctccctggcaaaagtcccttcaccgatgttgtcaccaccaacctaaagcttggcaacc

SEQ ID NO: 788277 - DNA, 51 bp, Homo sapiens
accgaggactccgctcctgcccagggtttaatgaagaaattcattcgatgt

SEQ ID NO: 788278 - DNA, 113 bp, Homo sapiens
cagactcagaatgagctcaccagggagctgaaactcaaagacgagttgtactgctgtcacaggaaatggacgctggattacaagcatggcagctcaggcagcagaagttgcag

SEQ ID NO: 788279 - DNA, 83 bp, Homo sapiens
gcttgtccttgctggtgcatgcgtcgtcggcctctgggcagcagatttaatccagagactgacttcactatagaacccacagt

SEQ ID NO: 788280 - DNA, 82 bp, Homo sapiens
agacgcccagccccacagcctgcacgtgccggaaggacatggtcaagatctccatggacgtgttcgtgcgcatcctgcagcc

SEQ ID NO: 788281 - DNA, 74 bp, Homo sapiens
gttggacgtggggaatttctcctggggctcagagtgtgtgatccctcacatccacaaatctctgattggaaaga

SEQ ID NO: 788282 - DNA, 100 bp, Homo sapiens
ctccggtacaggttgaggctactaagagatctgaaactggacaatgtcctgttggaccacgagggtcactgtaaactggcagacttcggaatgtgcaagg

SEQ ID NO: 788283 - DNA, 82 bp, Homo sapiens
atgaagaggtaattcacttgaacaactttcactgccatcggggacaagcactgctgatggttcttcagaactcaggaatcgt

SEQ ID NO: 788284 - DNA, 101 bp, Homo sapiens
atccagcatctggggacccacagcttcgaggggctgcacaatctggagacactattttaccaaatgttgcaagaactctggagttcttatggtagtaaaat

SEQ ID NO: 788285 - DNA, 75 bp, Homo sapiens
gtgcgtttgaaggcttccacaccctctactccagggtgcgtataatttgctctgcgtcgactcctatatcaagct

SEQ ID NO: 788286 - DNA, 98 bp, Homo sapiens
ggactgtgaacttggagaaatcctgtgtttcagtggaatgggcagaaggaggtgccacaaagggcaaagagacatgggagtcccaccgtattgtccag

SEQ ID NO: 788287 - DNA, 87 bp, Homo sapiens
aagcttatatcccaccattgccacgggcattctccatctccttgcaggttatcttatgatgaggcttttgctatggctaatgatccc

SEQ ID NO: 788288 - DNA, 127 bp, Homo sapiens
gctactatgacaaatccaagtcgttcttcgacaacatctcttctgaactcaagaccagatgctggacgagaaccaccacctgatccagtgcatcctggagtaccagagcaagggcaagacggccgag

SEQ ID NO: 788289 - DNA, 90 bp, Homo sapiens
gttagcatcttagcagtatattccaaagataattacaaacgggtcacaggtactagcagtagaagactcagaaagtggtgtttacatgcg

SEQ ID NO: 788290 - DNA, 96 bp, Homo sapiens
gctttgcatcccgggacgcttccggttatggcgtcattatgcagccagggtgccatcgcctgcaggattctttattcagctctgacagtggcttca

SEQ ID NO: 788291 - DNA, 75 bp, Homo sapiens
ccgggacccggttccccggcccacagtgggggtgtgcaaacccgagagaactggactcaagtaggacgttttgct

SEQ ID NO: 788292 - DNA, 76 bp, Homo sapiens
tactgtcccgtttgattttggagaaaagcaaaaaaatgctcttgggctctcctttgataaagatgcgatggtggcc

SEQ ID NO: 788293 - DNA, 83 bp, Homo sapiens
ggaaccctggtcaccgtctcctcaggccctgggcagtgacggggttcgggtgaccatggagagtgcgctcaccgcccgtgacc

SEQ ID NO: 788294 - DNA, 75 bp, Homo sapiens
ggggccgccggcggcccggcttcagactaatagggatgccaaaggaaaaatatgatcctccagatcctcgcagaa

SEQ ID NO: 788295 - DNA, 89 bp, Homo sapiens
gttgccaaatgcacagccaagcctagcagctcgggcaaggatggtggaggcgagaacactgaggagagctgttgcgcagccattggtac

SEQ ID NO: 788296 - DNA, 93 bp, Homo sapiens
aaggcctggtcgctttgatagagaattcctctttagcctgcctgataaagaggaggatcagctgatttattcggaggatttgctgactttggc

SEQ ID NO: 788297 - DNA, 90 bp, Homo sapiens
agcccagcacctgcggagggagcgctgcttgcctacatgtagcctgtgttgtacagcagaaagatgccaggcaatggtttgctgagcttt

SEQ ID NO: 788298 - DNA, 98 bp, Homo sapiens
atcgactctatggtgtatataaagtacatgggaattatggtcgagttttcaggcttctttggcagaaacagataaaatcactctggaggtagcaaaac

SEQ ID NO: 788299 - DNA, 83 bp, Homo sapiens
acgccgagtcctactccagcggcggcggcggccagcagctgtggaaagtgaagaaggcattgaagatgactattttttggaga

SEQ ID NO: 788300 - DNA, 74 bp, Homo sapiens
gggtggcgaacggggcgagcctggaggattgtcactccaacctcttttcgctggaaaatggctttgtaaagaag

SEQ ID NO: 788301 - DNA, 75 bp, Homo sapiens
gaatcgctctataagatctgcaagccccatctgctttgatatgattgaagaagcatacatgacaaaatgtggcca

SEQ ID NO: 788302 - DNA, 75 bp, Homo sapiens
tggaagaggatcagtatggcatgcccctggccatcttcacaaaggttcaagaacatgaagactcgggtgactcag

SEQ ID NO: 788303 - DNA, 99 bp, Homo sapiens
aaacagaagaggggaaacatgtttcctactgacgacaggtgattacacgtgtgcttctgatggagggatcaggaaaggagtctctaccacccgtccagt

SEQ ID NO: 788304 - DNA, 83 bp, Homo sapiens
tgctgcttgtcaaccacaccgactaccgctggtgggcagaagtgcagcagaccccgaaaacaagttgaaatcatcgcagaagg

SEQ ID NO: 788305 - DNA, 76 bp, Homo sapiens
atctttgaaggattttctatgtttgcacatgcccccctgaccaatgtataggactttcactaaccttggaccatat

SEQ ID NO: 788306 - DNA, 75 bp, Homo sapiens
ggttctgcggcacgggatggcggaggcgcctcctgtctcaggccggtctaattgaagccaacggagaactcaagg

SEQ ID NO: 788307 - DNA, 73 bp, Homo sapiens
tcaaagatgacagattgggccaacatgttccaacactacatccgattggcagatatccctgttacaatctgta

SEQ ID NO: 788308 - DNA, 75 bp, Homo sapiens
gcagcattgcagccgccaagacgctgtcaccactgactaaagaagagaaaactgcggcagagcaattcaaatttc

SEQ ID NO: 788309 - DNA, 51 bp, Homo sapiens
ataatccattctcggattctagaacagatgtgtttcacatggtagttgaag

SEQ ID NO: 788310 - DNA, 100 bp, Homo sapiens
gtgccttgaagactgactttaccagagagaagaagaaggaggttcctgctgtgccagaaacccttaagaaaaagcgaaggaatttcgcagagctgaagat

SEQ ID NO: 788311 - DNA, 100 bp, Homo sapiens
cgcagcgccccgcagggcgatggacggccgaaccccgcgcccgcaggacgccccagccagatggcccactgcgtgaccttggttcagctgtccatttcct

SEQ ID NO: 788312 - DNA, 75 bp, Homo sapiens
ggaggagacggcttggaaaacggagagactggggagaagtgataacgtggtgctggaccagacctacctgtggca

SEQ ID NO: 788313 - DNA, 115 bp, Homo sapiens
gcagaagtcgcgtgtctaggtgagtcgcggtgggtcctcgcttgcagttcagcgaccacggcccagctgagagccagcctggaggttacccagcagcaggccacccaggccgaag

SEQ ID NO: 788314 - DNA, 100 bp, Homo sapiens
gtgtgccagctgctagaaaacagggaagatattagccaatatggaattgccaggttcttcactgaatactcggggagtacagacagtgaggaaagtacag

SEQ ID NO: 788315 - DNA, 82 bp, Homo sapiens
gctcatatgacattaacagacaagacacttttcagaaagacagaaggagaacttatggattgtgatggaaaatcagaatcta

SEQ ID NO: 788316 - DNA, 100 bp, Homo sapiens
ccgcagcccaggcgcgggggcgacgacagcggtgcagaggggcaggatgccgccgacccagccgacccacgggcagttcgcgctgaccaacggggatccc

SEQ ID NO: 788317 - DNA, 90 bp, Homo sapiens
ggtcccacaggctcctgccctggactaccgaggtggcaagtgcaggcagctgtcccggttatgccggaatcgttgcaggtgagtccatca

SEQ ID NO: 788318 - DNA, 100 bp, Homo sapiens
ctctggctggcaccaggaaagatgttgaagtgactaaggctgaatgcaatatccatacatctccttctccgggaattcaagtaaggcatgtctacacccc

SEQ ID NO: 788319 - DNA, 101 bp, Homo sapiens
gaaaaagagaagatgaagaaacccagcttgatacgttgaaacttattggagaagtgtttaatattgtgagccaacagtctactgctcgacctggctgcatt

SEQ ID NO: 788320 - DNA, 117 bp, Homo sapiens
tttgatgagaacactgctctggatgatgcagaagaggagtcctttaggaaggtaaatgaaattgcctttataaatacccttgaagcccagaataaacgtcatgatgttttatcaaaa

SEQ ID NO: 788321 - DNA, 115 bp, Homo sapiens
ctcaagtacacggagtacaacgagccgcatgagagccggacaaactcagacatcgtggagatggacccccatgagaacatcttactgagcactctcgagataaaaaatgaaatgg

SEQ ID NO: 788322 - DNA, 75 bp, Homo sapiens
ggagagcgtctgtagcttccttgctgtggcagaggtaaaacttcgagatgatcaatatacactggaacacatgca

SEQ ID NO: 788323 - DNA, 100 bp, Homo sapiens
aaacagcactgccaaatagcagaagaataccatgaggtcaaaaaggaaatcaccctgcttgagcaaaggaacttagaccatgctcagcctccaagcagcc

SEQ ID NO: 788324 - DNA, 75 bp, Homo sapiens
cagcacagctcaggccagttcgtcggctgccagcaacaatcaccaggatgaatctggttatagatggacaagaga

SEQ ID NO: 788325 - DNA, 100 bp, Homo sapiens
aggtcctgcagcttccagacatcgccctggatgtcttcgcgctctggctggtctcccctctgctggcctttgacgacccctatgccctggtggtgctggc

SEQ ID NO: 788326 - DNA, 100 bp, Homo sapiens
cccgcctcagcttcccaaagtgttgggattataggcgtgagccactgcacctggcacaggctgaccggttccctgatgtgttacctgcttctgctactga

SEQ ID NO: 788327 - DNA, 74 bp, Homo sapiens
cagaatctcactaaaagaatagatagtcttcctttaactgaaaatggtaagcttgatgattaccaggaacgaat

SEQ ID NO: 788328 - DNA, 111 bp, Homo sapiens
cgttacgcggagctctcggaggaggacctgaagcagctggaggttcgtaaagtgaatgaaagcatcaagtataatcacccattgagaaaatgtgttgatacaatacttaaa

SEQ ID NO: 788329 - DNA, 89 bp, Homo sapiens
ccgggacccggtgtctgctcctgtcgccttcgcctcctaatccctagccactatgtaagactttgaccccgacgcaggcttcagtgatt

SEQ ID NO: 788330 - DNA, 100 bp, Homo sapiens
tctggaaatccttgtaatcttgaaggaatggacctcaaaatggggagtaggaggcaatgaggaagtcaagaggaaggggatctgaagtactccatcttgg

SEQ ID NO: 788331 - DNA, 97 bp, Homo sapiens
gaatcctcatgctcctactatccatttcaactacagatactttgaagtagaagaagctgatggccataggaaaaggatacagagtagagtttcatga

SEQ ID NO: 788332 - DNA, 74 bp, Homo sapiens
atctaccacccgagatgccccaagcttgagaatgccagactgtcatcagagatgaatacttctactgtcaacag

SEQ ID NO: 788333 - DNA, 101 bp, Homo sapiens
gcctctgcattgcccgactccgtaggagcgcgggggcggctcctgctcttcctggactcctgagcagaggtaagaatgattgatgttggctgatattggag

SEQ ID NO: 788334 - DNA, 51 bp, Homo sapiens
cttgtattagagccttcagaaatgattgtgaccaaactgcagctggaatac

SEQ ID NO: 788335 - DNA, 50 bp, Homo sapiens
cgcaggagcccggccccggagccaccggttatgaagacagtatggagttt

SEQ ID NO: 788336 - DNA, 100 bp, Homo sapiens
gaatggctgtgatactggacatgcaaaaatcacatgtggctatgaccttcctgcaaaatgattctccttttacaaatgcaggaatgggatctaatctaaa

SEQ ID NO: 788337 - DNA, 138 bp, Homo sapiens
ggaaatggttcgagacctgggatgaggaagtcgtgggcactttttcaaactggggtttcgaggacgacggaacaggagtttcagcagcttttgctgtgaagctctttaaatcatggataaatgaaaaagatatcaatg

SEQ ID NO: 788338 - DNA, 98 bp, Homo sapiens
cgtgtgggagcgggagctgcggaaagtccaagtggtaagaagttcagaagcaagcctcagttggcaaggtacctgggaaatactgttgatctcagcag

SEQ ID NO: 788339 - DNA, 100 bp, Homo sapiens
gttcgctgcccagaagaagggaaggcgcgagtgaggaaaggaggtactgtagtgttctcaggcgctgtggtctcaccttccactggggcaacaatgggcc

SEQ ID NO: 788340 - DNA, 51 bp, Homo sapiens
actatcctttaccgggagatgcaccgacgtgctggagaatctggtaaaagc

SEQ ID NO: 788341 - DNA, 75 bp, Homo sapiens
ctgcagccacatactatccgtttgttcaggaaccaccagtgacagagatgtagagatagacatcgaactagctcc

SEQ ID NO: 788342 - DNA, 50 bp, Homo sapiens
acttcctaggcagaatgcttggaaaggtcccgcggcagtgctggtggcca

SEQ ID NO: 788343 - DNA, 80 bp, Homo sapiens
agaaggtgtccgaggcccgcaaaagtactccaaagattcaggtttactcacgtcatccagcagagaatggaaagtcaaat

SEQ ID NO: 788344 - DNA, 50 bp, Homo sapiens
cctttatatagaagggagagtagcaaacggatgtttcagaagacagcaat

SEQ ID NO: 788345 - DNA, 102 bp, Homo sapiens
gcctctggagtagctgggactacagttctgctaagccaatattctctagaatgagcacaaaacaaatcgaataacagctaaacaaatcgaataacagctaaa

SEQ ID NO: 788346 - DNA, 82 bp, Homo sapiens
aggaactgtgtgtctagatgtaattaatcaaacttggacagctctctatgtgtttgggaaatgggaagtaatgacagctggc

SEQ ID NO: 788347 - DNA, 90 bp, Homo sapiens
atgctgtgcagcaagaacccggatacttttgtggaactctatgggaacaatgcagcagccgagagccgaaagggccaggaacgcttcaac

SEQ ID NO: 788348 - DNA, 90 bp, Homo sapiens
ttctgattagtccacagtcttcctctataggaaattcagttcatgaagataagaagtttcttgacaaatacatgccccagttcatgaaac

SEQ ID NO: 788349 - DNA, 75 bp, Homo sapiens
taagcgcagaaagcaggcgaacccgcggcgcaataacggttgtggcagcactgcctgaaggtatgagaccagatt

SEQ ID NO: 788350 - DNA, 80 bp, Homo sapiens
actgccgcgccaccgagtccggaccggagactttggggcctaactagctcaaactggaggattataaggatcgcctgaaa

SEQ ID NO: 788351 - DNA, 75 bp, Homo sapiens
gccctgggccgggccccaccggacgggggggccctcagcctcttggccttgaacgggctgttcatcttgattcac

SEQ ID NO: 788352 - DNA, 90 bp, Homo sapiens
gaatcccgtttttgctgaggatacaccagatgagaatacgtttgaaagatgacagaagaagcaaatctatagaagaaagagaagaagagt

SEQ ID NO: 788353 - DNA, 100 bp, Homo sapiens
cacggtgacggtgctggagtggagatgctgccctggcttcaccgggagcaactgtgatgaggcctaattttaaagattatcccatatatttgctgaagtt

SEQ ID NO: 788354 - DNA, 50 bp, Homo sapiens
gacaaaggaacaggtatctcaggagggaattgtcgagaatcttttcaaat

SEQ ID NO: 788355 - DNA, 88 bp, Homo sapiens
gcctcgtcgacatgagtgatgtggaggaaaacaacttcgagggcagagtgtggatgaggtcaccattgtcaacattttgaccaaccgc

SEQ ID NO: 788356 - DNA, 100 bp, Homo sapiens
ccctagcgctggccgcgaccccggcgaatgccgggacattctgcttcctgtcatcaccaaagagctgaaggagctgctggagcagaaggatgacatgcaa

SEQ ID NO: 788357 - DNA, 75 bp, Homo sapiens
aatcctaaagcgtttcctcgcttgcattcagctcctctgtgtttgccgcctgggccggagcctcaacagaaagct

SEQ ID NO: 788358 - DNA, 100 bp, Homo sapiens
cgcattttggcattgacatttaattttagggtcctttatatagaagggagagtagcaggtcgagtcccgggcgctcaccatgttccgggacattgcccag

SEQ ID NO: 788359 - DNA, 83 bp, Homo sapiens
cagaatatgacggtggctataccagggactctgttctgattaggccaaagaatgcgaagcaaccagagcgtgaagaaaagcgg

SEQ ID NO: 788360 - DNA, 100 bp, Homo sapiens
gagaatgaaatcactttgtgtcaaaaagaaataactcagctgaagcatcaggaatatgatgaagaatgggctaagaaaattcagagtgaaaagtttcgct

SEQ ID NO: 788361 - DNA, 75 bp, Homo sapiens
atgacccgggcttcggcccccaccagagactcggtccttttggtgtgaaccatggggtggaacttcactcagatg

SEQ ID NO: 788362 - DNA, 80 bp, Homo sapiens
agagccgcgcaccgcggacgagcaggcccaggtactaggttttgacaagcttgcatcatgcgtgagtataagctagtcgt

SEQ ID NO: 788363 - DNA, 101 bp, Homo sapiens
aactacacgttacgctattcgttgtggtccaaaacagtttacctcttatctaacagattgctacgctttacatatggtccttcatttcctgcatttaaagt

SEQ ID NO: 788364 - DNA, 100 bp, Homo sapiens
gacactcgcagccccctcgggaggcccgacgcgactgggcccctcagggcgtctgcctgagcccgcttttctacaagatgtggggatttttgaagcgccc

SEQ ID NO: 788365 - DNA, 100 bp, Homo sapiens
tgctggaccacctggtcggggaggagaccatggctgactacctgctgtacaccctcaacaaacaccagcgctttgggaggcgatcccgcgccctgggtgc

SEQ ID NO: 788366 - DNA, 98 bp, Homo sapiens
cctgcgctactattgggatgaatacaaggcttccaatcctcatgcttccttcagtgagggtgatctgtgaaaatggttcgctattcacttgacccgga

SEQ ID NO: 788367 - DNA, 74 bp, Homo sapiens
cagatcctgcgggcctccgtggagctcctggatgaggctggctgaaggcggtgcaggtcctcatggtgctctcc

SEQ ID NO: 788368 - DNA, 83 bp, Homo sapiens
ctaccactcacccgcagactccttctccagcatgggctcgcctgtcaacgcgcagtttgaaggatgacctctaggaagaaagt

SEQ ID NO: 788369 - DNA, 100 bp, Homo sapiens
tcaccgtggtacagaggaccaacacccagccctttgacctgcaggtgtaccacccctcccgccagcccatggccattgccctgctgaaggacaaggaccc

SEQ ID NO: 788370 - DNA, 90 bp, Homo sapiens
tctggttttacattggttcttcattgaatggtactcggggaaaaagaggttgttttggaaaccgaaataacaaataagtccgctttgaaa

SEQ ID NO: 788371 - DNA, 112 bp, Homo sapiens
cattggtgaggtgctatctcggagacacatgaaggtggcattttttggcagatgatgattctgataccgagacgtcaaatgacttgccaaaatttgcagatggaatcaaggc

SEQ ID NO: 788372 - DNA, 88 bp, Homo sapiens
acgagactttcaaagatggaatcacaaacggcgcacattggtatgatgtggaaggtggtatgcagatcttcgtgaagaccctgaccgg

SEQ ID NO: 788373 - DNA, 100 bp, Homo sapiens
cgtacacctactgaatggattcaagacttcaaaacccattttcttgatgttcagtggttgtggaatcaagatgcttcccgcgatttactgcttgctatcc

SEQ ID NO: 788374 - DNA, 80 bp, Homo sapiens
gggacggagcagcgcgtcgtggggcgagcggcaggcctccaagcctttgggagtagcttctgaagatgaggtaaatagac

SEQ ID NO: 788375 - DNA, 83 bp, Homo sapiens
ccgcgtcttctgcgtcagcgacagccagtgttatagttttgccgctggactcttccctcccttcccccaccccatcaggatga

SEQ ID NO: 788376 - DNA, 157 bp, Homo sapiens
tagcccggggcggctccgcagcccgccgggagctctgaccgaggcgcctcgctggggcggggaccttgccttgcccgggagaccttttaatcaaagtgaagtttggggaaagcattgaggacttgcacacctgccgtctcttaattaaacaggacat

SEQ ID NO: 788377 - DNA, 90 bp, Homo sapiens
gttatttctcccttgtgttagtaataaacgtcttgccacaatgccacctccagttcgtactacagttgtctccgcagtacccgtcatgcc

SEQ ID NO: 788378 - DNA, 100 bp, Homo sapiens
tctttggttgatacacctaagcaggatatgggccctcacattttccaaacctgtccatctgctaactattttgactgcagagccatgtccattggagccc

SEQ ID NO: 788379 - DNA, 96 bp, Homo sapiens
agcggtgcacgctgctggtcagccagttccgctcctgtcagactcagattgatggacaacttttcttaattaagcaccttttgatacttcgtgaac

SEQ ID NO: 788380 - DNA, 98 bp, Homo sapiens
ctcaccatgaaatcacagcttcagatcactgtttcagagtcaagtggtgagatcaaagacttttcaccaaaaaatgtcatttatgatgactcatccca

SEQ ID NO: 788381 - DNA, 100 bp, Homo sapiens
gcaaagtacagcgcttctgggagtccaactcggctgcccacaaggagattatgccaagggctttggtggccagtatggaatccagaaggaccgagtggat

SEQ ID NO: 788382 - DNA, 98 bp, Homo sapiens
cccaagaggtggaagaggacgggctttaggctggaagcgccttagaggagccatttttccaggtgattatgggagtgctattgagacactggtaactg

SEQ ID NO: 788383 - DNA, 80 bp, Homo sapiens
gccttcaagatgaaccgcaaggagagaagttcttatgactcctccatgtctccagttggctggggaacagaccagggaat

SEQ ID NO: 788384 - DNA, 100 bp, Homo sapiens
ctgaactgaatgagtttcttactcgggagctggctgaagatggctactctggagttgaggtctctcaggcagctgcagagcttcaacagtactgtatgca

SEQ ID NO: 788385 - DNA, 87 bp, Homo sapiens
ttttaggatgctagaatgaatgatcttcactatcttaatctggatacatgggagtggaatgaatttatttggcatgatcattactat

SEQ ID NO: 788386 - DNA, 50 bp, Homo sapiens
gacaaattgaaacaacagcaagctgcaccaatggagatcttcgtggatga

SEQ ID NO: 788387 - DNA, 96 bp, Homo sapiens
ccaaatccggaagaagatgatggaaatcatgacccgagaggtgcagaggtggcagggatggctccgaagccagaaatgccttaaactgcaacgtcc

SEQ ID NO: 788388 - DNA, 82 bp, Homo sapiens
cggcagtccacccaccgccgccgcctcccaggtcttgccccagaagctgcgggcacatccacgcctgaaatgcggcgctcag

SEQ ID NO: 788389 - DNA, 87 bp, Homo sapiens
ctggcgtcaggactattttcacgttttaatgccgagaggtctctgtgacgattttgctttgcccgaagtttttacatacaaattcta

SEQ ID NO: 788390 - DNA, 101 bp, Homo sapiens
ggaataagactgcatctgttcatatgagggtggatgctgatatactgcttgacttactgcgtatttgaagattatcctgtttgattttccatctaaactga

SEQ ID NO: 788391 - DNA, 100 bp, Homo sapiens
cacgggatcccagcctcaggcctgcacggacggtgttggttgggtattgcctaagtgtaatcttgaacatgggcggtgctgtgagtgctggtgaagacaa

SEQ ID NO: 788392 - DNA, 82 bp, Homo sapiens
tggtcccggctgccggtcgacgaccgccccgcgtcatgcggctcctcggctggtggtgagaagccctaccactgcaactggg

SEQ ID NO: 788393 - DNA, 88 bp, Homo sapiens
gcgggcggggtggagcagccagctgggtccggggagcgccgccgccgcctcgatgggcccgacttaaatctctgcaatggctaacgaa

SEQ ID NO: 788394 - DNA, 100 bp, Homo sapiens
actgtgaaaatatgggatgtagagacaaaaacagttgtgacagaacatgcactccatcaggccatccgggatggtgtcattgaggccagcatcaaccacg

SEQ ID NO: 788395 - DNA, 82 bp, Homo sapiens
gagcccacccgcgccaggaggccgaacgcggactcgccacccggagcagtcattatggcgaaccttggctgctggatgctgg

SEQ ID NO: 788396 - DNA, 100 bp, Homo sapiens
aacagccccaatcaccgtccttacacggcctctgatttcatagaagatgcttttactgactctgctatcagtgctaaagtgaatggcgaacacaaagaga

SEQ ID NO: 788397 - DNA, 82 bp, Homo sapiens
agccgatccagcctgcggagcctgtggggcagaaatcatgagtggaggatctcaagtccacattttttggggtgctccaatt

SEQ ID NO: 788398 - DNA, 96 bp, Homo sapiens
aaacaacatcatgcagtggaatgcagttatatttgggaattgaatgatctggcacgggaccctccagcacagtgttcagcaggtcctgttggagat

SEQ ID NO: 788399 - DNA, 74 bp, Homo sapiens
agaagcgcgatgacggctacgaggccggaagttggagctgccacctgtgtctggacctgttgaaagagaaagct

SEQ ID NO: 788400 - DNA, 100 bp, Homo sapiens
gcgctcgcggcgcctgggattttctctgcgttctgctcctactgcttcgcgtccagacagttcgttactatcttggaaggagtgctggcaaaattatcca

SEQ ID NO: 788401 - DNA, 74 bp, Homo sapiens
gcggcgggccggcgggcggggcgcagagccaggcagcgcagccctataagcagtacaacatgctgaacgcggac

SEQ ID NO: 788402 - DNA, 100 bp, Homo sapiens
taacggcgcccgccgctcccggcagtgctttccccgcgtactcgggatggcggcggccgcgctgaggctcccggctcagagtgcagtatctcctcctgtc

SEQ ID NO: 788403 - DNA, 75 bp, Homo sapiens
gaaaaacagatgtttcatgtgcagaaagaaagttggtcttacaggatttctctgcctcttccaaacttttcctcc

SEQ ID NO: 788404 - DNA, 74 bp, Homo sapiens
gttcactgtaaacttcataatgggataaacagagacagcagcatgactggtcggatcatgctaaaaggagataa

SEQ ID NO: 788405 - DNA, 75 bp, Homo sapiens
gatcctcatgttcactacccttcatgcatgaaagacaaagctactcagataactgtgtccagaggacccccaggc

SEQ ID NO: 788406 - DNA, 130 bp, Homo sapiens
gtaagcctttggtcataatcgctgaagatgttgatggagaagctctaagtacactcgtcttgaataggagaataaacttaacacccttaaagacggacactccaccaagttctgtaccaaccagtgtgat

SEQ ID NO: 788407 - DNA, 104 bp, Homo sapiens
cgcgggccgcggctccggcatggccgggatcattaagaagcagatcctgaaacacctgtcccgaatgctcttgagatcaaagaactcaaaaagtacggcccctt

SEQ ID NO: 788408 - DNA, 96 bp, Homo sapiens
agaaaacagcgagtcttatgctaaaggaagctgtttcctatattgaaaggtgccaaaccagtgtgtggagcctccagtatatcccacccccacagt

SEQ ID NO: 788409 - DNA, 50 bp, Homo sapiens
ttgaaagagaagctcttcctgtgaggttgtcttcaaccaccttactcctc

SEQ ID NO: 788410 - DNA, 75 bp, Homo sapiens
cagcatggtttacggcatggagattttcagaggtacagctgggacagaaagaacaacccggagccctggaaccgc

SEQ ID NO: 788411 - DNA, 100 bp, Homo sapiens
ctaaggccgccaagactccattgaagattcaccctctggtgcggctgcccctggcaactatcgtcaaagatctggtcatcccagatcccgaagaggaacc

SEQ ID NO: 788412 - DNA, 96 bp, Homo sapiens
gccacacgctgatggtgcagcaccgcatgatggtacccaaagtcaggattgaaagaaggtggcaagaggaagaagcagaagcagagagaggagtcg

SEQ ID NO: 788413 - DNA, 100 bp, Homo sapiens
gacccagacaaagagaagaaaggcctggagagtcgtgcggacagcattgggagcggccgagccatcccaattaaacaggaaatgtggctttagataatct

SEQ ID NO: 788414 - DNA, 75 bp, Homo sapiens
tccagttgcagatacaaacttggattttttccagtctgatccttttgttggcaggacgcactctctgagatattt

SEQ ID NO: 788415 - DNA, 82 bp, Homo sapiens
aaagtcatcacctcctgggatcagatgtgcattgagagcctgctcatttttaaggatctcaaacttcgaggcttttggttgt

SEQ ID NO: 788416 - DNA, 87 bp, Homo sapiens
ggacacctccacatcgccttttgccacctttccctttatttccggaggtgttgactttaaggtgaaaacaatttcagtggatggaaa

SEQ ID NO: 788417 - DNA, 98 bp, Homo sapiens
caggatctcgggctcggaacgagactgcacggcccgatgagagaaagggaaagttaaggatgctggagcagaacaatggatttctctttctctttcat

SEQ ID NO: 788418 - DNA, 75 bp, Homo sapiens
accagatggagaattttttgccactgctgggaagatttctcgcatggaatatgtccattcaaagaacttgatata

SEQ ID NO: 788419 - DNA, 83 bp, Homo sapiens
ctaactggaacgcctggctcttggacaagatgtgggcgctatctccaactgtctttgcacttctgagtaagaatctgatgatt

SEQ ID NO: 788420 - DNA, 75 bp, Homo sapiens
ggttttgatcctgtcactgtgacagccgctcaggaagcaatcttgcatgcgtctggaaatggcacaaccaaggac

SEQ ID NO: 788421 - DNA, 82 bp, Homo sapiens
cgcaatgagccccaccgaatccaacaaatcctcaactacatcaaaggctcgtggtcccaagaagcatctgaagcgggtggca

SEQ ID NO: 788422 - DNA, 98 bp, Homo sapiens
accagtcccttgtgtatggcaaagtggatagcttctggaagggagagacaaaggcagcgctgccctcgggggagtattggccctggcggaacgcagca

SEQ ID NO: 788423 - DNA, 80 bp, Homo sapiens
caaaatcctaggagaaacctaaggtttttcacgactgaaaacaacatagcaaaataagccaagatgtctgtggatccaat

SEQ ID NO: 788424 - DNA, 82 bp, Homo sapiens
tccgcgtcggcaagaagatcggctgcggcaacttcggggagctccgcctagcaaacggggattcagcgtccgatcctttgga

SEQ ID NO: 788425 - DNA, 98 bp, Homo sapiens
cagccgggacccaggaccatgtctctgtctcgctcagaggagatgcaccggctcacggaaaatgtctataagtattctaccttgtaaatactgttatt

SEQ ID NO: 788426 - DNA, 48 bp, Homo sapiens
cggagcaaagaacttaccaccaagcagaacaccaatcagggtcttcag

SEQ ID NO: 788427 - DNA, 83 bp, Homo sapiens
cctcgagccagcccgccagcatgccccagtccaaagattttgcaagaacgaggctcaaggatgtgagggacacagtattgaca

SEQ ID NO: 788428 - DNA, 87 bp, Homo sapiens
ccttcggaggtggacagttttccttatttgcgaggattagacggaaatggaacaggaatgtatcctgtcaggtataatgtcagtgaa

SEQ ID NO: 788429 - DNA, 75 bp, Homo sapiens
atcttaggctggccattcagtgcagctcttgggtatgagatgcaagatgctggaattacttcagactcaatgatg

SEQ ID NO: 788430 - DNA, 122 bp, Homo sapiens
atatcactgcctctgtggacaagacacctccaggagcccagctcacagccaccggtaccttcttccagagtccgaaattgaagttcagaggaagaattgccttccaccgcatcttatcagac

SEQ ID NO: 788431 - DNA, 103 bp, Homo sapiens
ggcggactccagacagcgaccccagatgaagatgcctgaggaagtgcaccatggagaggaggaggtggagacttttgcctttcaggcagaaattgcccaactc

SEQ ID NO: 788432 - DNA, 80 bp, Homo sapiens
gagtgaccgagaccgcggccgggaccgaggataatcctgatgtaaaccattgacatagccagaaaatcaccaggctgtga

SEQ ID NO: 788433 - DNA, 87 bp, Homo sapiens
cttcgcattttggcattgacatttaattttagggtcctttatatagaagggagagtagacagcaactctggaaagtggcttctaact

SEQ ID NO: 788434 - DNA, 76 bp, Homo sapiens
aaagtcgaatgattcagacttgcaagatgcagccgctctctgctccctgccccaatgaacatctgcactaggccca

SEQ ID NO: 788435 - DNA, 99 bp, Homo sapiens
agtgtcctgatggctccgatgagtccgaggccacttgcagtgccacttcggataaaccctttggactcctaactccaatcaggtgtctgctttgttgag

SEQ ID NO: 788436 - DNA, 90 bp, Homo sapiens
acttgagcagccttgcccagaagtatgctgagaaagcaacccagttcatccagcgtgcaagcctggagatttgaaaaagagaattgaatc

SEQ ID NO: 788437 - DNA, 83 bp, Homo sapiens
tactcatcatcagtctatttagaagagatggcgattttgctgacagctgccaagaaaatgcttcactcaacagtcctcatgtg

SEQ ID NO: 788438 - DNA, 75 bp, Homo sapiens
tgccaaaatcagcagtctcctggaggagcagttccagcagggcaagcttcttggaaattttttcatcactgagaa

SEQ ID NO: 788439 - DNA, 98 bp, Homo sapiens
ctgagtcggagtccactccccaggaatttgctcgccctgatacatcgaatgatagagtttgttgtacgtgaagggccaatgtttgaagctatgattat

SEQ ID NO: 788440 - DNA, 83 bp, Homo sapiens
ggcgaagatcgccaagactcacgaagggttagcataaaggaatcatctgtagcgaaactaggatcagtatgccgtaggattta

SEQ ID NO: 788441 - DNA, 100 bp, Homo sapiens
catccctgcaatgaagagaacccagggaagttcctttttgaagtagttccaggaagtgcacggctgtctataacgtgctgccgggtctcaggatggagga

SEQ ID NO: 788442 - DNA, 75 bp, Homo sapiens
caccgtggtgacattgtatcattggtaatgtgaaagatgttgcagaagtgttccagaagtggctgaagatagaag

SEQ ID NO: 788443 - DNA, 98 bp, Homo sapiens
tcacgtgagagggcagtggaactccttaggaaatgtctggaggaggtactggtcttcttggacattaatctttgaatacttgctgactgctaagaaat

SEQ ID NO: 788444 - DNA, 74 bp, Homo sapiens
aggtctctggagacatcttcagcagtccatctgctgcaaggaagtttgtagatgaaggaattaaaacactagaa

SEQ ID NO: 788445 - DNA, 50 bp, Homo sapiens
catggagtacttggcttcccaaaaaggcgggaaaggacgcataggagtgg

SEQ ID NO: 788446 - DNA, 108 bp, Homo sapiens
cttatccaaattcttccctctttatgtttttcaagggacggatacaacgactagagaactgtcagcacaacaccgcgggagagcactgtgaacgctgccaggagggct

SEQ ID NO: 788447 - DNA, 50 bp, Homo sapiens
gcacgtgcacagccagctggaggagatcctacgggacaccttctccgagt

SEQ ID NO: 788448 - DNA, 90 bp, Homo sapiens
ttctaccgctgcggctactgcaagaacgagtcgggcagccgctccaatgttcacctgtggcagatgatatcatccagcccgctgcccccg

SEQ ID NO: 788449 - DNA, 100 bp, Homo sapiens
atgcctgtagaaatgagaatgacagctgtgataaaaaaaaaattcatctgggcggtatctggaacttggtatatacctccggataagagggaagaaaatg

SEQ ID NO: 788450 - DNA, 100 bp, Homo sapiens
taaaagagaaaagagaagtttgctgctaaaatgaatctgagcaatatggaatattttgtgccacacacaaaaaggtgatttggatatctactctggagat

SEQ ID NO: 788451 - DNA, 100 bp, Homo sapiens
tctgaatctttgtgtttggctgcccaggctcgcctcgactccaaatggttgaaaacagatatacagaaactggcgatggaatatgagaggagccctctgg

SEQ ID NO: 788452 - DNA, 74 bp, Homo sapiens
cataggtcactgtgtggccatctaccactttgaaggataaccctattggcaactgggatggaagatttgatgga

SEQ ID NO: 788453 - DNA, 75 bp, Homo sapiens
gagcctcagttggaagcagccgatccagcctgcggagcctgtggggcaggcaggtaaaaatcaaggtgaccccaa

SEQ ID NO: 788454 - DNA, 75 bp, Homo sapiens
ggcctgtgtgctgcagaacccccagaccatcatgtatgatgccgggcgggacggcttcatcgacctgatggagct

SEQ ID NO: 788455 - DNA, 100 bp, Homo sapiens
ccatgtacatgaagacacggcttttccagagtgttgcggagataggaacatgggagagaaacaatctgggtaacatgaaagtgatgctggttgctaaggg

SEQ ID NO: 788456 - DNA, 51 bp, Homo sapiens
gtgacctcctggacttcagcatggctcaggccacagggtcaccacatacat

SEQ ID NO: 788457 - DNA, 74 bp, Homo sapiens
tgtgtgccaggccgggtgctgggcacggtcccgcgaggctggagggcagttgtgcgatcttgattcacttcaac

SEQ ID NO: 788458 - DNA, 90 bp, Homo sapiens
gttttcttatttagccggagtgagaagcaagaaggccctggacacagcaatatctctgggctttcacagaacttgtttcctgtccacgca

SEQ ID NO: 788459 - DNA, 75 bp, Homo sapiens
accaaaggaaagctattttgcgaactatcttctccagcggagatggccaatactttctgctgacccctctgtcac

SEQ ID NO: 788460 - DNA, 100 bp, Homo sapiens
cgccaaacgaagtcgtggaggtggcgaaacgaggaggagataacgcggccttgggctctgggtgactgtgaagatcacgctaaccttctgtgcagccttc

SEQ ID NO: 788461 - DNA, 99 bp, Homo sapiens
cgatattgatattgaagcaatgcttgaggctccttacaagaaggtagaatatgtggcctagaagaagatttaaagaacggcaaaatcttactagcgaaa

SEQ ID NO: 788462 - DNA, 88 bp, Homo sapiens
gcgggtctgtcatcatgtcgcgttacgggcggtacggaggaggagcatcagatccatgctgctgctgactcggagccccacagcttgg

SEQ ID NO: 788463 - DNA, 97 bp, Homo sapiens
ggactgtgggcagtgaatgcgttgggaacaatatggaaaactgggagctgccttggaatctacagggccggcctactcaatttgaagacattgagga

SEQ ID NO: 788464 - DNA, 90 bp, Homo sapiens
ggcgcccggcgaggtagcgccaggcgagggaagaggaagaacgtctgagaaataaaattcgagctgatcatgagaaggccttggaagaag

SEQ ID NO: 788465 - DNA, 75 bp, Homo sapiens
tcaaagagaaaaggcaacatcctgtcacaggccatgctctggcaaaaacgggcatggtctagtggcccagtcagg

SEQ ID NO: 788466 - DNA, 73 bp, Homo sapiens
taaaatcctgctctggccggattccagactcgtgggggaaaggctggtacaggtttgcagattccgccagcag

SEQ ID NO: 788467 - DNA, 98 bp, Homo sapiens
cgacatgacggacaacatcccgctgcagccggtgcgccagaagaagcggatggacagcaggccccgcgccggggaatgaaggatggcagcatgccgtg

SEQ ID NO: 788468 - DNA, 90 bp, Homo sapiens
gaggactgtggattgaatgaactgtatccatccccatcatgatgtacagaaccaagtctcttcactaatggagtctcactttgttgccca

SEQ ID NO: 788469 - DNA, 115 bp, Homo sapiens
gtaggaaggaacttggttccccctccctcagcttccgccccaaaagcctgcctagggtagttaaaagacgagtgaatgctctcaaaaacctgcaagttaaatgtgcacagataga

SEQ ID NO: 788470 - DNA, 75 bp, Homo sapiens
tgtgtcacatctggcagccaacaaggtctttgtaagaccttacacataggaagctcacacctggctccgccaaat

SEQ ID NO: 788471 - DNA, 50 bp, Homo sapiens
ggaagtggtgccttcagcacaggtttggaattcacccagttgcaggccga

SEQ ID NO: 788472 - DNA, 96 bp, Homo sapiens
agagcatcagcttggcggagaacacccaagatgtgcgggacgacgacatctttatcatcacctaccccaagtcagtagggacggggtttcaccgtg

SEQ ID NO: 788473 - DNA, 75 bp, Homo sapiens
gtttgttgatactgaaataagacttggtgcttttccaggacatcagaagtcaccattactttaagtactgcaaaa

SEQ ID NO: 788474 - DNA, 98 bp, Homo sapiens
ttattgatattgcctgcgatgaaattccagagcgctactacaaagaatctgagataaggccttttatgaaagcgcacctaaatcgtgataaagacaaa

SEQ ID NO: 788475 - DNA, 50 bp, Homo sapiens
ataaagaagctcgagcattctttcagccggatcgagctgggagatgtgac

SEQ ID NO: 788476 - DNA, 82 bp, Homo sapiens
cgctggtgagctccctctgtcgcctggttcggtaccttaaagagatgacagtcatgtccctttccagggacctcaaggacga

SEQ ID NO: 788477 - DNA, 88 bp, Homo sapiens
aggtgcccagaggactttcttccagcttctgctgtccttctttgtggagagcaagttcctctgtgacgagggtgcaggtatctctggg

SEQ ID NO: 788478 - DNA, 100 bp, Homo sapiens
gaggaactgagacgtttcgaattccagaggctgaggctgcagtggccacccaggagacatccaccgtcaggctaaaggtcagctccacagccgtaaggac

SEQ ID NO: 788479 - DNA, 96 bp, Homo sapiens
attgaccatgatggaatgcttgacagagatgagtttgcagttgtcagtcattggcaccatgaactggaataaaggtggtcctggcactaagcgagg

SEQ ID NO: 788480 - DNA, 74 bp, Homo sapiens
atttcatgaatttcaagagagtaccattgggggtaaaatctgtaaaaactgggtcagttttttggacaatgtgc

SEQ ID NO: 788481 - DNA, 74 bp, Homo sapiens
ctttgatcttgcccaggaggaggagaatgtcttggatgcagaattcttaaaggacaaggaagatggggagccaa

SEQ ID NO: 788482 - DNA, 51 bp, Homo sapiens
gaccacgcctttgttacctcgaggtgaaagtgggagatacattggatcttc

SEQ ID NO: 788483 - DNA, 75 bp, Homo sapiens
cattgacatttaattttagggtcctttatatagaagggagagtaggtgactcgaaaagccctgtttcctggtgac

SEQ ID NO: 788484 - DNA, 109 bp, Homo sapiens
gtgatgtggaggaaaacaacttcgagggcagagtagacgaagagcggcggagtgcagcgggcagtgagaaagaagaagagcctgaggacgaagaggaggaggaagagga

SEQ ID NO: 788485 - DNA, 90 bp, Homo sapiens
atggctactctggagttgaggtgcgagttacaccaaccaggacagaaatcattatcttagccaccagggcagctgcaatgactctccgca

SEQ ID NO: 788486 - DNA, 100 bp, Homo sapiens
cagcgcgccagcaggatggcccacaagcagatctactactcggacaagtacttcgacgaacactacgagtaccgtggagatggggtttcaccatgttggc

SEQ ID NO: 788487 - DNA, 89 bp, Homo sapiens
catgcgctttgcaatgaaatctcgaaggggacctcatgtccctgtgggacacaatgcccccaagatacatgtcctgaaactgaacaaaa

SEQ ID NO: 788488 - DNA, 74 bp, Homo sapiens
gtcgcccaggatgggctgggaatgaagcgatgtagccttttaattttcggctttgtgagaaaccttaccatcaa

SEQ ID NO: 788489 - DNA, 112 bp, Homo sapiens
cccggatgagtacgataccgaagcgggctgtgtgccccttctccacccagagatgtgtatatctcatgattgatatggagaaactagtcatgggccaaaggtcaagatactt

SEQ ID NO: 788490 - DNA, 75 bp, Homo sapiens
cccgaacaccctatgggatgccatatcttgggtctttagtggccttgtcattaatactgtccatgcttctcttca

SEQ ID NO: 788491 - DNA, 100 bp, Homo sapiens
ttgacacttatatcctccctgggtaagattcccagaaaatctaagctggcagttcataggaatatcagagacgacgaaggcttcattatcaggcattttg

SEQ ID NO: 788492 - DNA, 82 bp, Homo sapiens
aaagaaccacatccgtttccccaaattcaacttctccaaatgtgaagttcatttccaatccgccctccatggtggcagcggg

SEQ ID NO: 788493 - DNA, 90 bp, Homo sapiens
ctagctattgccttattttttctcatggatgttcttcttcgagtatttgtagaaggattgggggcaccaacttcgtggcacctccaacag

SEQ ID NO: 788494 - DNA, 100 bp, Homo sapiens
cagacatcttaggaaacaggagcaccggtctgggaaactgctggcctggcctaacacctggcgctgtggtgcaggcaaaaaccaggaagcaaccactttc

SEQ ID NO: 788495 - DNA, 90 bp, Homo sapiens
ctccatctgggccatggatgggtcttgtggatgagcagcagaaagttcggaccatcagtgctttggccattgctgccttggctgaagcag

SEQ ID NO: 788496 - DNA, 50 bp, Homo sapiens
gccgcgcagccctcggagcacggtttaagaattgtttaagctgcatcaat

SEQ ID NO: 788497 - DNA, 75 bp, Homo sapiens
cctcatacggctgcttctggagaagctgtgtcagcgtgttatgatgccgtcccgtaccaacctggctactggaat

SEQ ID NO: 788498 - DNA, 75 bp, Homo sapiens
caaatcacacgcataatggatgaaaggaaccgacaggaaaaattgatgggacacttgggtgttgtattgtatgag

SEQ ID NO: 788499 - DNA, 74 bp, Homo sapiens
caaagatgagatttacctgtgagatgtttcatcccaacaggctgacaggacaactggatcagtttcattaaaaa

SEQ ID NO: 788500 - DNA, 90 bp, Homo sapiens
cccactctaggagccccaatagcccaggagcttgggtgtgctgacgagcagggtggaccatcagcacgtgcccatcgacatccagaccag

SEQ ID NO: 788501 - DNA, 74 bp, Homo sapiens
agcaggagccgctgggcagcgactccgaaggcatccgtgtcattctggaccttactcccaactaccggggtgag

SEQ ID NO: 788502 - DNA, 50 bp, Homo sapiens
aggcaagggccgctcctgtaaaaattaggaaaaccagcattggaatcagc

SEQ ID NO: 788503 - DNA, 75 bp, Homo sapiens
tgctgtctatgagggtcatgtttcctgtgtgaaattgcttctgtcaaagccgattccacgactcttctttgcggg

SEQ ID NO: 788504 - DNA, 102 bp, Homo sapiens
tgggacgcacagagaccgtgaagattccaagttcaggagaactcgaccgatgccagtatggacagaatagcttatgatgcttatccccacccaccacttccg

SEQ ID NO: 788505 - DNA, 83 bp, Homo sapiens
ttggactcatagtcactgccagaaaggccggaccatgggaaccccaaagccacggatcctgccctggctggtgtcgcagctgg

SEQ ID NO: 788506 - DNA, 75 bp, Homo sapiens
taggattttattactggcagcatgtatatcttttaatgatgccaaggtcttggagcagcccgtggtggtgcagag

SEQ ID NO: 788507 - DNA, 82 bp, Homo sapiens
caagggattgctggctacagcttcagaagaccgaagcgttcgtatctggaaggagcaggccgggctctcgccatgggtcact

SEQ ID NO: 788508 - DNA, 100 bp, Homo sapiens
aatcaattgtgctgacaacacaggtctcagcattagagaggcagatctttgacttccttggtttccagtgggcgcctattcttggaaattttctacacat

SEQ ID NO: 788509 - DNA, 100 bp, Homo sapiens
cccttatccctcgtgagaaaaagatctcgatacttgaggaaccttcaaaggcacttcgtggggtcacagtgttcaagaatactttgttcgcaaatccaat

SEQ ID NO: 788510 - DNA, 82 bp, Homo sapiens
ttctcttctctgcttggaggggatgtggtttccgttaagctggacaacagggaaatcctcattgacgattcaatttgttgaa

SEQ ID NO: 788511 - DNA, 75 bp, Homo sapiens
caagaatcattcttgcagcatttcgtagcctggcccaactagagaatctgtgcaaacagctgtatgaaaccacag

SEQ ID NO: 788512 - DNA, 71 bp, Homo sapiens
ggtttgtaggtcgtcagaaagagttgtattccctgaatgactataaaccacccatttcgaaagcgaaaatg

SEQ ID NO: 788513 - DNA, 87 bp, Homo sapiens
atctgacaaacactgtattcgttgacagagctttgatagtcgtaccatatgcagaaggtttcaaagagcagatttacgatgtataca

SEQ ID NO: 788514 - DNA, 75 bp, Homo sapiens
gctgggctcgccagtcttggggacagtgtcagcgccgccccatgaacattcagcttgtcacgtcacagattgacg

SEQ ID NO: 788515 - DNA, 115 bp, Homo sapiens
cgggttatctgcgaacacagtagtggaagatgtaaagcaatatttcgagcagtttggcaagtacaaaattggacagctgtacatgatcagcaaacacagccatgaacagagtgac

SEQ ID NO: 788516 - DNA, 75 bp, Homo sapiens
tgcagcgggatcaagctgtgtgcattagtacaaatgacccgtgtcacaacgggggctcctgcacagacggcatca

SEQ ID NO: 788517 - DNA, 75 bp, Homo sapiens
ttgcaacacagcgccatttccgctggcacccaggtgcccatgaactgcaagcacatgttgaccagataactgaaa

SEQ ID NO: 788518 - DNA, 82 bp, Homo sapiens
ctctacagcgtggtcaacacggccgagccggacgctgatgacccctttgctgatgcaagtaagggtgatgacctgcttcctg

SEQ ID NO: 788519 - DNA, 100 bp, Homo sapiens
agaagcaaaagagacccacagatttggatgtagatacgttagccagtttacttaggtccaacagatacaattgctaggacgagatatgaagggacctgct

SEQ ID NO: 788520 - DNA, 99 bp, Homo sapiens
ctaaacatttgtgggaagttgtattcatcaataatgaaatgctgactaaggaacaaggtgaccaagaatatggcccaggtgaccaaagccctggacaag

SEQ ID NO: 788521 - DNA, 82 bp, Homo sapiens
gggaggaaggaacgaggcaaggagctaaagcagcgtgcgttcagccctggggtctggccctcggcgatgtccccaaccggca

SEQ ID NO: 788522 - DNA, 75 bp, Homo sapiens
gtttgtaaatgtgagtggaagccatgaggccaaaggcagttgtattgtataactttgaaaatgcatctcagacat

SEQ ID NO: 788523 - DNA, 100 bp, Homo sapiens
tccaccttcagagcgtcacggcgtacgccctcatggggaaaatctccccggtgactttcagatgatgattattccccaccttctaagagacaaagaccaa

SEQ ID NO: 788524 - DNA, 87 bp, Homo sapiens
agagtaaagttgtgctcaacggcatttgggcagtccttctccatccaccggaaggttgctgaagatggagagactcgggaggaaacg

SEQ ID NO: 788525 - DNA, 51 bp, Homo sapiens
gtaccaggaggcgttggccaaggaggaattcagaaaagcagctcagcaaca

SEQ ID NO: 788526 - DNA, 88 bp, Homo sapiens
gcatatatgcatgggtttttcatggatataagactctatcacaaggatttaccacttcagcagaaaaagaggcaaaattagtttatag

SEQ ID NO: 788527 - DNA, 82 bp, Homo sapiens
acagagttgcgaccgcgcggcagctatttgtcgtagatgtccagacaagccagatcaccaagatccccattctgaaagaccg

SEQ ID NO: 788528 - DNA, 75 bp, Homo sapiens
tgggggttatggtgggaggagccgatactgagcttcttcctatttgccatggccctggcttgaaaaacagtccaa

SEQ ID NO: 788529 - DNA, 100 bp, Homo sapiens
gtcaaggagatcggcctcttgaagtctgaccagtgcacaggacttcagggcttcctggtgttccacagctttggtgggggcactggctctggcttcacct

SEQ ID NO: 788530 - DNA, 100 bp, Homo sapiens
tgacatcaacatccgagacaacatgcttgctctgtcaaggcacagcctattgtctcctttgctcagtgtgacatcattcagacgcttctacagaggtgac

SEQ ID NO: 788531 - DNA, 82 bp, Homo sapiens
cgtggagctccgccgccccgaaactttcaccgcgagcggaattcagaaggagctggcggacatcactttagaccctccacct

SEQ ID NO: 788532 - DNA, 82 bp, Homo sapiens
accacaggcgcccgaaggccggaacagagaaagcgtcgtggtggagcaataaattctagacaagctcagaagcgaactcggg

SEQ ID NO: 788533 - DNA, 49 bp, Homo sapiens
tcaactccacttttatctccaccatagagtgcctggtgaagaatgtgat

SEQ ID NO: 788534 - DNA, 100 bp, Homo sapiens
gagagaaccatgatggtcaattgccatgcacacttctggggagctcactcagtgggtttgatgtggtggatgctggctcgggaagttctgcgcatgcgtg

SEQ ID NO: 788535 - DNA, 101 bp, Homo sapiens
gccggacgagtaaccagcttcgctcctttcaagagacctttgagaaagtgcagccacctcccaccacacaatgagggccccaaggctgttgcagctcctcg

SEQ ID NO: 788536 - DNA, 97 bp, Homo sapiens
gaggggttacagactgtggtgcctacccccatcactgcttccctcagccataacagggtacatccgtccccagtatcaagggtccggggcaatcgaa

SEQ ID NO: 788537 - DNA, 51 bp, Homo sapiens
gatgaccgtccaccgcatcatcaaccacagaacccagcaagcgtagtcgag

SEQ ID NO: 788538 - DNA, 75 bp, Homo sapiens
gaaattccaagttcagattctccagtaacaacatgctgtaccccaaggaagacaaggagaaccgcattctgctct

SEQ ID NO: 788539 - DNA, 75 bp, Homo sapiens
atatttctccagagaaccacatttctttagtttactcctggcttgggggcattaggaagcactggaggctcttcg

SEQ ID NO: 788540 - DNA, 112 bp, Homo sapiens
cctgatctctctcgctgtgagacatgtctgagactcctgctcagtgtagcattaagacaatgcagatcttcgtgaagactctgactggtaagaccatcaccctcgaggttga

SEQ ID NO: 788541 - DNA, 74 bp, Homo sapiens
cgtccgagacgccaaacacaccaactttgtggaggtctgtttctgtcgactgtggaccacttatgtgcgatccg

SEQ ID NO: 788542 - DNA, 75 bp, Homo sapiens
gccagcagccgtccggagccagccaacgagcggctccatggtccccttctcgatgcgcatcttgcacgcggagct

SEQ ID NO: 788543 - DNA, 50 bp, Homo sapiens
tttcccttattccagttgatccccagggaatgaaggatggcagcatgccg

SEQ ID NO: 788544 - DNA, 90 bp, Homo sapiens
gggagacacgccaaagctcccaagggatggtgccttgagtgaatgacccccttggagaacattcttccgcatccctcgcctcaagccagc

SEQ ID NO: 788545 - DNA, 88 bp, Homo sapiens
ccaaagcctcttacagcctggggagtgcgagagaaacccagccgaagcatttaaaagaaacttgagttcggctctaggttccatgtcc

SEQ ID NO: 788546 - DNA, 100 bp, Homo sapiens
ggcacagggcgtcggacctgcacgagctgtctggatgcagcagtctcggccctggctgctctatgcagtgaatattacatgaaggagccgggggaggcag

SEQ ID NO: 788547 - DNA, 90 bp, Homo sapiens
tgcagtcttcttcgtggctgaacaggagccaggtgagaatttcaaggattatcgacttcatattgcacattaaagttacaaattaaagtg

SEQ ID NO: 788548 - DNA, 90 bp, Homo sapiens
gagtccctctaaagcagctcaaaagctgttaggagactccaggagcaaggtaccagtcctttaacttttgttttacaactttatttctcc

SEQ ID NO: 788549 - DNA, 100 bp, Homo sapiens
agcagttgcaccctgttttgcaaaaaccatcagtgtttgggaatgattctgatgatgatgatgaggtgctcaatgtcctaatgaaatgctgtctaaaaaa

SEQ ID NO: 788550 - DNA, 75 bp, Homo sapiens
ggcgccggcgacctgaggggagagggaacgcagctgaaagcgtgaactgtgaccctctttgcaagttcagtgctt

SEQ ID NO: 788551 - DNA, 87 bp, Homo sapiens
gagacttttggggggaaactaggtcgatggtcggcggcgcccggatgggcagctgaggtatacaaaactaggatatgctggaaatac

SEQ ID NO: 788552 - DNA, 75 bp, Homo sapiens
ccacaaatactttttagtcgccataagcataatcaagaaatcattttgcaaatgctactgatctacttcttgcct

SEQ ID NO: 788553 - DNA, 100 bp, Homo sapiens
tttgttactcactgtgttcggtccaatggatgggaccccaatgaaatgttcaagttcaatgaggagaactacggtgtgaagactacctatgatagcagtc

SEQ ID NO: 788554 - DNA, 78 bp, Homo sapiens
agaactgggaccttgttacttataggcggcttacagggagaacacagttggcctccaccgtttctgccccacagaaaa

SEQ ID NO: 788555 - DNA, 100 bp, Homo sapiens
gtggttctgcaacggacgtggaaatacttctggcagagatggagtttcactgtgtcagccaggatggtctcgatctcctgacctcgtgatccgcccgcct

SEQ ID NO: 788556 - DNA, 74 bp, Homo sapiens
ccatctcctgggccgcctggcggccatcgtggctaaacaggtaccgctattaccagaatgtgtgcacgcaaagc

SEQ ID NO: 788557 - DNA, 49 bp, Homo sapiens
gagaaaccatttaaaacaggtctaaagaccatgctcgacagctgaccaa

SEQ ID NO: 788558 - DNA, 99 bp, Homo sapiens
aaggaataactttgcagtgggctacaggactggggacttccagctacacactaatgtgaatactcccccagttgcaagaggcgcaggaccgtggaagac

SEQ ID NO: 788559 - DNA, 100 bp, Homo sapiens
ctttctgactcctgctctaggattctcaccacgtactggctagacttatacttctcaaatcttaatttcctaaagctgcagaaccttggcctgaaaatgc

SEQ ID NO: 788560 - DNA, 83 bp, Homo sapiens
tgacactatgggaacctaccatggtatgacactgaaatctgtaacggtttactcctggcttgggggcattaggaagcactgga

SEQ ID NO: 788561 - DNA, 73 bp, Homo sapiens
gggaagccggtggggccttcggaaagagagagcaggcttccgaggaggcagaggaggaggaggtgaccacaag

SEQ ID NO: 788562 - DNA, 100 bp, Homo sapiens
gccaaggaaaaactggagagcttcatcaaaaatagtgatagctttgataaaaagggagtttcgtgctccaactttggcatccctagaaaactgcatgaag

SEQ ID NO: 788563 - DNA, 100 bp, Homo sapiens
gcggggacgggagcctcaccggggccaacctcttccggaaggagtggagtgggctgctggaggagctggccaggaacggcgtgagtgacgccgaggcgcg

SEQ ID NO: 788564 - DNA, 83 bp, Homo sapiens
gccggcagcgcgacaggaacccctccgagacccagtccaaaaggactgaagcttcaagatggctgaccaggaccctgcgggca

SEQ ID NO: 788565 - DNA, 97 bp, Homo sapiens
gggcgtgctcagcaaatacaccaacctcctccagggctggcagaacagggtcagatgacttgtctgcaaagctgtgggatgtgagcacagggcagtg

SEQ ID NO: 788566 - DNA, 90 bp, Homo sapiens
gtccacggacacttcaggctatggccagagcagctattcttcttatggccagagccagaacagtgtcagttgtacccgaggcgttctcag

SEQ ID NO: 788567 - DNA, 100 bp, Homo sapiens
aggacttccaggtcacggaggaggtgaaaggtgctttcttctgcgacctggtactcatctacctcatcaaaaagagagagttttaccgtgacaagaagta

SEQ ID NO: 788568 - DNA, 80 bp, Homo sapiens
gaattttcatagagctggactattggaaggcatgttttccacaaatcctgcgtggatccctggcttagtgaacattgtac

SEQ ID NO: 788569 - DNA, 100 bp, Homo sapiens
ctgacatcagcggctctttgtatgatgacgcacgggcgagagcgggaagagcacgttcatcaagcagatgcgcatcatccacggcgccggctactcggag

SEQ ID NO: 788570 - DNA, 51 bp, Homo sapiens
ggaggagccttctcaagaacagaggtggaaaacgaagctcattcccaacgt

SEQ ID NO: 788571 - DNA, 100 bp, Homo sapiens
taccagcgtgcacccaggaatatccaccgccatgtgatcctctctgagatcaaggaagccgtcgctgccctgcccccgtcactccttgccaagcaaccag

SEQ ID NO: 788572 - DNA, 75 bp, Homo sapiens
tgccctcagctccgagtccagggcgagatcatggaagggaagtggttgctgtgtatgttactggtgcttggaact

SEQ ID NO: 788573 - DNA, 75 bp, Homo sapiens
ccggaaaacacacgttcctccgaaaccggtttgcaagtccttgtagaggtttttcgttggaatatacgttgcaca

SEQ ID NO: 788574 - DNA, 90 bp, Homo sapiens
aattctgtggattttcgtctaaaaataacaagaatgggaggagaaggtctccagagaatacagagggcaaagatggatccaaagtaacta

SEQ ID NO: 788575 - DNA, 84 bp, Homo sapiens
ggaaaacaattccctgtcactcgaggccaggatgtggggcgttatcaggtgccagatgtgacatccagatgacccagtctccat

SEQ ID NO: 788576 - DNA, 87 bp, Homo sapiens
agtagtcaggacatcatgtgggccctgcacgagctcaaaggacactatgcaatcacccgaaaggagtacttcttgcaagcagagctg

SEQ ID NO: 788577 - DNA, 98 bp, Homo sapiens
gaaccagcacttctgggacgcacagagaccgtgaagattccaagttcaggagaactcgaccggaaaactgtggtatgtctgtgtgtaatggtaaaata

SEQ ID NO: 788578 - DNA, 82 bp, Homo sapiens
ggaaagaaaagaatacattcctgattacctgccacccattgtgtcttctcaagaaggtctctcaggcagctgcagagcttca

SEQ ID NO: 788579 - DNA, 117 bp, Homo sapiens
gtgaaagctttctgcccagagctcctggaccaatgcatcttcccaccaccttaaaccactggggttggtgtgtgctggattggctgatatggccagacctgcagaaaaacttagcac

SEQ ID NO: 788580 - DNA, 75 bp, Homo sapiens
tcttcaacaaccacgggaagccgcggctctccaagttctaccagccctacaagatggctgtgccacccacgtatg

SEQ ID NO: 788581 - DNA, 50 bp, Homo sapiens
gagctcaccagggagctgaaactcaacctaccgtatgtgaacgggagctg

SEQ ID NO: 788582 - DNA, 96 bp, Homo sapiens
ttcaggcaaccggggcctccagggggagaaaggcgagaagggagaaaccagcagaaactgagaggagaagatgactacaacatggatgaaaatgaa

SEQ ID NO: 788583 - DNA, 100 bp, Homo sapiens
caatgagctcggcctcggggctccgcagggggcacccggcagttgcttttgaaatcagaaagtcagtgcagggttgtagtgttgatgggctctacttctg

SEQ ID NO: 788584 - DNA, 75 bp, Homo sapiens
caagaaatgaagaacgagattcagacacaggatgctataaaatcaccacggtctttagccatgcacaaacggtag

SEQ ID NO: 788585 - DNA, 75 bp, Homo sapiens
agcagagaatggagaagaaggttgattccagtgccggtggtggtgtgcacattgagccccggtatagacagttcc

SEQ ID NO: 788586 - DNA, 74 bp, Homo sapiens
tggattacaggagatgagagtattgtaggccttatgaaggacattgtagagattgccctcagtcccaataatca

SEQ ID NO: 788587 - DNA, 100 bp, Homo sapiens
cacgcttcttctggaagaccagccaacaggcatgattgaacatggtctcagtgactgttctcagtatagaccccggaaaagtatgtctgaagatggtggg

SEQ ID NO: 788588 - DNA, 100 bp, Homo sapiens
cttactggatttcttcatggtgtccattttatttagcaagatacgatgaatggattaaagcagataaaatagtaagacctgctgataaaaatgtgccaaa

SEQ ID NO: 788589 - DNA, 90 bp, Homo sapiens
gcgcttgttggcggcgctgcgaggccagagcctagggctagcggccatggttgcaatccttgtgtggccctgcctggaagccttctctca

SEQ ID NO: 788590 - DNA, 100 bp, Homo sapiens
gggaggaaccaattattacattgaatctctgctctggaaagttcttgtcaataccaaggccttcatgccccgaggactagcagacaaacaaggacctgag

SEQ ID NO: 788591 - DNA, 75 bp, Homo sapiens
ttgctttgcgtcttggttcctggatgaacaaaattatgagctattcaaggatactcatatttatgatgcaaggcg

SEQ ID NO: 788592 - DNA, 74 bp, Homo sapiens
aaaaaaacgggctatgctgctgttgcgtgtcctccagcagcctgacctgagtgggttagtgatccagagaaacc

SEQ ID NO: 788593 - DNA, 75 bp, Homo sapiens
ggccccgagggcacctgtgacgcggagctccctgggtcctcagcagtgaggctggcctccctgcgtgacctgccc

SEQ ID NO: 788594 - DNA, 100 bp, Homo sapiens
tcagcaacagctgttactgatggtggctcgcaggacccagtcggaaaccccacgggctaaatttggccgaagatggaccaaaatttcaaagctaattgga

SEQ ID NO: 788595 - DNA, 82 bp, Homo sapiens
gggcttacgcagaaggacctggccacggagccttcacgtaaatgggtccagtcatgcctcccagtaagaagccagaaagctc

SEQ ID NO: 788596 - DNA, 90 bp, Homo sapiens
aataatgcccagcggcccgccaggtcccgagcccagaacgcttcctccagcttggcgccaaggtcccaaagggcgcactgctgctcggcc

SEQ ID NO: 788597 - DNA, 96 bp, Homo sapiens
gcagtcctaccatgtcagccttcccagtagctgggaccacagtgggactcaactaggaggtcttattacagtactgtgctgctttttcaaccatgg

SEQ ID NO: 788598 - DNA, 100 bp, Homo sapiens
gaagaattaacaagctagtttgtactggtcagatgtaccaacagtaccagcaacaggccggctatggtgcacagcagccgcaggctccacctcagcagcc

SEQ ID NO: 788599 - DNA, 100 bp, Homo sapiens
tcacctttcagcagccgcccaatacctcccagcctgacaagaaggcagatgggacctgtaacaccaacttcaagaagacgcaggcactggagcaggtgac

SEQ ID NO: 788600 - DNA, 75 bp, Homo sapiens
cagaattaacattaaataaagtggatgaagaatttgtgaccatggcaaaagttataaccaccgtactgaagttcc

SEQ ID NO: 788601 - DNA, 90 bp, Homo sapiens
accacttccctgcagctcccaacccagtgacttgattgtaaaaatttacagagcggaatcatatgctggtctccaagagtttaaagcagc

SEQ ID NO: 788602 - DNA, 114 bp, Homo sapiens
tcagtttggccacatggatggaaatgactacataaataccttgctgatggaggaccacagtggagggaaccgtgacctcagccggcggcaccgggactgtcgggtgtacgggag

SEQ ID NO: 788603 - DNA, 74 bp, Homo sapiens
tcattggatcaaacatgtcacaagagtcggacaagttccagcaacagatagaaatgctttaagttcactctggg

SEQ ID NO: 788604 - DNA, 90 bp, Homo sapiens
cgcgaatatcgtcatcgttagaaggattcctagatgaggttatgaagaagtatggcagtttggttccactcagtgaaaaagaagtccttg

SEQ ID NO: 788605 - DNA, 100 bp, Homo sapiens
tgaccaggggcttgagagctgggttctattttccctcctcaaactgactttgcagccacggagaggtgctcctgacctctgataaagctgcagccaattt

SEQ ID NO: 788606 - DNA, 100 bp, Homo sapiens
gacggcgactgcgggaggccaggtgtcatggagaaactccagctgggcccagagattctgcagcgggaaaatccaaggcttatttatgccaggctgagtg

SEQ ID NO: 788607 - DNA, 100 bp, Homo sapiens
ctaaaaatgagcaagttaaaggcaagatcgacaccatgaaggggctttgttatgcacctaaagccatattggaagctccagaagaaagagcaccccccgg

SEQ ID NO: 788608 - DNA, 80 bp, Homo sapiens
ctggagcctcagttggaagcagccgatccagcctgcggagcctgtggggcaggctcctctgctgaacagcccctgggcgg

SEQ ID NO: 788609 - DNA, 75 bp, Homo sapiens
ctactaagcaccgttggtatcctcatggacgttacccagaaggatttggattggagcccaagcctagaatgtcta

SEQ ID NO: 788610 - DNA, 82 bp, Homo sapiens
tgtttcgggagcggagcaaaggccgcatccagcgccagctggagataagaatgggacgcgagagataaagattctatccgac

SEQ ID NO: 788611 - DNA, 73 bp, Homo sapiens
aaggccctggacacagcaatatctctgggctttcacaggtaccaggatttctatgcattcgacctgtcaggag

SEQ ID NO: 788612 - DNA, 75 bp, Homo sapiens
gataaacgccctggaagcgtatcagaaaacaggccagcctactcatgaaggttacttctcttgtttggatatctg

SEQ ID NO: 788613 - DNA, 100 bp, Homo sapiens
atacagaactgccccatcgatgtgcggcgcccgctgtataaggtgcgtatagcagcaaaattcatcattcatgcccctcctggagaatttaatgaggttt

SEQ ID NO: 788614 - DNA, 82 bp, Homo sapiens
tcatcgcaactgggcccgcgcgcagactccatcaagaatgctggaggaagggtgtttgtccactgccaggcaggcatttccc

SEQ ID NO: 788615 - DNA, 100 bp, Homo sapiens
aggctctgaggggcaaccacagtgccctgctgcgggtcgctgactactgcgaggacaactatgtgcaggtggtgatggcacttctcaaatactggccaaa

SEQ ID NO: 788616 - DNA, 50 bp, Homo sapiens
ggcgggtgttgtgagcgggaaggatgacactcctgtccaggacactaaaa

SEQ ID NO: 788617 - DNA, 100 bp, Homo sapiens
cgaaaggagcaagagcaagatcaccgtgacatccgaggtgcctttctccaaaagcatattggagaattgggagaagtctctttggtttggaaaaaaaaaa

SEQ ID NO: 788618 - DNA, 100 bp, Homo sapiens
gcaagatggcactcaacatgaacaactacaaaggctatgaaaagaagccctattgtaatgcgtattctttaggtgatgctagaaggcctcttcatgaaac

SEQ ID NO: 788619 - DNA, 97 bp, Homo sapiens
tggccagcctctgcttggcatccccttgctggacagtggctgtggatggcgtcgtgcgggcagggcagtgtgcggctctggcggctgcgtggcgggg

SEQ ID NO: 788620 - DNA, 100 bp, Homo sapiens
cttcagagacctaagctttttccagagaagagaagctttactggtgttccagccctaaggatgagctttctgatgttagccaaggcggatctaaagctac

SEQ ID NO: 788621 - DNA, 75 bp, Homo sapiens
tcctgccgttgcctgtcatgggagggcagatgtgcttttccagactgatccaactgcagagatggcagctgagtc

SEQ ID NO: 788622 - DNA, 50 bp, Homo sapiens
tctgcacctcttcctttagagaatgttttgtaccaatggctagaagcaga

SEQ ID NO: 788623 - DNA, 100 bp, Homo sapiens
ccctgtgcacctctcagcaggcctttgctggacagatgaagagtgacttgtttctggatgattctaagagagcattaaagatgaccctgacagagagaag

SEQ ID NO: 788624 - DNA, 100 bp, Homo sapiens
tgactgcacttcttttttgagaaaggaaggaatatatcctgactgattatgctacatttatgtgtgacaagcggtgtaacaagaaacggttgtgtggacg

SEQ ID NO: 788625 - DNA, 100 bp, Homo sapiens
cttgggtgcccgcccttagcggcccggcgttgaattccgggaagtgggagcttcaggctcgctccgtgcggactatctgttatagtccctgggtcaagac

SEQ ID NO: 788626 - DNA, 100 bp, Homo sapiens
ctggagcaacaacctggcggtgctcgagtgcctgcaggatgtgagggagaatgacctggatgaccctgaaagaggaatgatttttgtctgctctgcaacc

SEQ ID NO: 788627 - DNA, 100 bp, Homo sapiens
gccgctggcggggccttcctggtgtcagggttaccggtcactcctggaagcaaggcggctctagctaatttatgtattggagatgtaatcacagccattg

SEQ ID NO: 788628 - DNA, 75 bp, Homo sapiens
agtgacatgttgataaaaaatgatgctggtgctcaagaccgaatcggctgggcttttggcctaggattagaaagg

SEQ ID NO: 788629 - DNA, 100 bp, Homo sapiens
agaagcacagagttcagaagactttaacatgggctcttcctctagcagccagtatactttctgtcagccagaaactgagatgaggtctcactgtgttgcc

SEQ ID NO: 788630 - DNA, 100 bp, Homo sapiens
aagttaatccaggtgagactttcacaataagagcagaggatggaacacttcagtgcattcaaggttggtttgttggaccttgaactcaatcggctgacga

SEQ ID NO: 788631 - DNA, 75 bp, Homo sapiens
cgagaagaaccggaagctctttgaccttctggatgtccttgagttcaaccagctgccaatttgtggtgtctgaag

SEQ ID NO: 788632 - DNA, 100 bp, Homo sapiens
gagagagcgagctgagtggttgtgtggtcgcgtctcggaaaccggtagcgcttgcagcatgagcaatggtggaacaaagcggcaaaagatatcccatcaa

SEQ ID NO: 788633 - DNA, 100 bp, Homo sapiens
gcccacagcttggaggagggtcactatgtcattgggccaaagatagagattccggtacattatgcaggagccaccagaaatggaactattgaaatttttc

SEQ ID NO: 788634 - DNA, 100 bp, Homo sapiens
caccagtgagagcattttggaagaggaaccacaagaaaatcaaaagaaacttttgcccttatcagtaacacctgagtcaagctacaacttcaagcagaag

SEQ ID NO: 788635 - DNA, 80 bp, Homo sapiens
tgccgtcttctttgcctgcactaatgacaatgcagatcttcgtgaagactctgactggtaagaccatcaccctcgaggtt

SEQ ID NO: 788636 - DNA, 100 bp, Homo sapiens
tgctgttcggatttaacttcatcttctgggaatactcccccagttgcaagaggcgcaggaccgtggaagacttcaacaaattctgcacctttgtcttggc

SEQ ID NO: 788637 - DNA, 75 bp, Homo sapiens
aagaccagtccatttggggaaatccttcggatggtgaactcattagaaccaactgggtacatggaaaactcagtc

SEQ ID NO: 788638 - DNA, 74 bp, Homo sapiens
tgagatcaagaaagagaatggagaagtaaagattttgctgaaaagagaataaaggcagccccgttgatgactga

SEQ ID NO: 788639 - DNA, 82 bp, Homo sapiens
agatcagccgcccggccaagctatcttctcgctagcaggtcatgtccatcctgttgcatggggatgctgcatttgctggcca

SEQ ID NO: 788640 - DNA, 100 bp, Homo sapiens
aaaaatcctacctaggtaatgtgtagttctcaatgcatcatgtcaggcagcttatgatgccaatttgtcccatgttgttgacctcctgtactggagagac

SEQ ID NO: 788641 - DNA, 100 bp, Homo sapiens
ggcctgtgtgtcaacgacctggcggtggggctgcggcgcctgggactgcaccgcaccgagggcgagctccaggtctggtcttctctcgtctgagccctga

SEQ ID NO: 788642 - DNA, 98 bp, Homo sapiens
cgggtctattatgtgcaagaagtgtatggagctcatcagccttcccttggcaagaagctgcacaagccttaatttatgctgagatggcaggatcaagc

SEQ ID NO: 788643 - DNA, 98 bp, Homo sapiens
agcctgcacggatggtcttgaaacacaaatggtttttggctactgaaagcattaaaatgctggtgacattgtgtcaatctgatactgaagaaatcaga

SEQ ID NO: 788644 - DNA, 81 bp, Homo sapiens
accaacgaagcaactgctgagcaggtgccaatgggtcatgtttggttagaaggtgacaatctacagaattctacagattcc

SEQ ID NO: 788645 - DNA, 112 bp, Homo sapiens
ctttcacgaaggcaccgacgtcatcatgctgaccaccaatcagatccgtaagatgtgaagttcatttccaatccgccctccatggtggcagcggggagcgtggtggccgcag

SEQ ID NO: 788646 - DNA, 74 bp, Homo sapiens
cctgcggccaattcggtggaacgaggacgcggactgcgaaggcaggctactgcagcactggggtgtcagttgtt

SEQ ID NO: 788647 - DNA, 100 bp, Homo sapiens
agtctggagaagaatggaggaccatccataattcctatctttaaaagagcctttggagactcgacttatttcagagaccacatctgtgtgcaaaccagaa

SEQ ID NO: 788648 - DNA, 51 bp, Homo sapiens
ggaaaaacctgtatgtggaaccacctgtttccaatacttatctacaggaat

SEQ ID NO: 788649 - DNA, 101 bp, Homo sapiens
ggagacgggcgaggagcacggcagcagccagatttcattcactttcaagtaatctgtacgaagaagttgagaataataaaaaatggacagaaaaccaattt

SEQ ID NO: 788650 - DNA, 51 bp, Homo sapiens
gttcagccctttgatgaccgcagcaggtccttatgtcgtcagaagatcgag

SEQ ID NO: 788651 - DNA, 99 bp, Homo sapiens
tcgtcgcctccttgcccgtgaccgtcgctagaactcagttgtgcgttgcggccagtcgccactgctacttcgacccccaccacttctggcagtggagca

SEQ ID NO: 788652 - DNA, 101 bp, Homo sapiens
tccagtgcctcgagcgctcaggatggaggaagactcgatccgcctgcctgcgcacctgcgtactccaaagattcaggtttactcacgtcatccagcagaga

SEQ ID NO: 788653 - DNA, 97 bp, Homo sapiens
gcacaagcagcagaagctgtggcacctcttccagaactcggccaccgccgtggcccagctctacaaagaaattctccagaatttcagaaacttctgg

SEQ ID NO: 788654 - DNA, 74 bp, Homo sapiens
gtgacaatgccttggtttcaacactatcggaatggtctctcaggcagctgcagagcttcaacagtactgtatgc

SEQ ID NO: 788655 - DNA, 75 bp, Homo sapiens
agcaacagcgacgactatgacctcgagtctgacatggacaagatccagaagctttatgaacgaaagataaaggag

SEQ ID NO: 788656 - DNA, 75 bp, Homo sapiens
tgcgtcaaggactccccgcgcttcaggtacaagaagtatgtcttcctggaccccctggctggtgctgtaacaaag

SEQ ID NO: 788657 - DNA, 75 bp, Homo sapiens
aagtggcggggactactggtgcctgcgctgaaaaagaatcctggtaattgatgtccacccgagaaatccctgcag

SEQ ID NO: 788658 - DNA, 75 bp, Homo sapiens
tggaattttggcatcaaggacaaacccaccttcatcaaaggggtacaggtttgcagattccgccagcagcacagc

SEQ ID NO: 788659 - DNA, 98 bp, Homo sapiens
gtaattgcctgcctcgcgctagcaggaaggttatacattggctcttcaaagacgttcacctcatcagagaaatccctgactcctttgcagtggtgtag

SEQ ID NO: 788660 - DNA, 74 bp, Homo sapiens
acagtcctcgtcagcactgactttcagctatggaatcgctgaactcgtttgagcagctgtgcatcaattacacc

SEQ ID NO: 788661 - DNA, 75 bp, Homo sapiens
aacgggcttttaggaagaaggaatggaggctttgaagttgaaatcacaaagattagacacctttttagataggtg

SEQ ID NO: 788662 - DNA, 50 bp, Homo sapiens
aaaacgtccgggtccaaagagagaatgtggacgagtgctcactagcagaa

SEQ ID NO: 788663 - DNA, 88 bp, Homo sapiens
aacaagcgaaaggcttactcggagcgtagaatcatgggctaaacaagcattgaggaagcagcaaacaaaggcatggaagaaactacaa

SEQ ID NO: 788664 - DNA, 75 bp, Homo sapiens
ccctagagctccgggacaatgataagactcgctatatggggaaggcactgccctgggaagaactaggatgaggta

SEQ ID NO: 788665 - DNA, 100 bp, Homo sapiens
gcgagactgcggccgaagcgtggggcgcgcgtgcggaggaccaggcgcggcgcggctgcggctgagaattaacactgaatcctccggaaggaattgtagc

SEQ ID NO: 788666 - DNA, 105 bp, Homo sapiens
cggatgccctgcagtacctgcagaaggtctctggagacatcttcagcagcaaccatgtccaagggacctgcagttggtattgatcttggcaccacctactcttgt

SEQ ID NO: 788667 - DNA, 102 bp, Homo sapiens
atctgtgagtcttctggcaaacagtgtttgcctctggttcagctcatacaacagcttcttaggatgaagatttgataaagtggaaggcactgtttgaggaag

SEQ ID NO: 788668 - DNA, 80 bp, Homo sapiens
aacccactgaagacgtctgcgtgagaatagagaccaccgaggtgttgacttcaaaatcaaaactgtagagctaagaggaa

SEQ ID NO: 788669 - DNA, 75 bp, Homo sapiens
atttcctgctcggaaccttgtttactaattgacaagcatgactttcaggactctgtgagaataacgttggacttt

SEQ ID NO: 788670 - DNA, 100 bp, Homo sapiens
ggatcccacacctccggaccgagggacgcggggagtaccctgacttctaccggaagctctacggcctcttggacccctctgtctttcacgtcaagtaccg

SEQ ID NO: 788671 - DNA, 52 bp, Homo sapiens
cggggtcccaggaagggcggcccagcgagggcggcactgctcacaggacggc

SEQ ID NO: 788672 - DNA, 89 bp, Homo sapiens
gttgtatttgtgacatctgtgggtttaatccaacagaagaagttgcaagaatgtagtaactctgatcagctacaaggaaaggaggaaag

SEQ ID NO: 788673 - DNA, 82 bp, Homo sapiens
gcaggcccacatcaaagaggtggtgcggaagatgatcagccaggcacagaagatcagtcgcatcgaatacattcattcaaag

SEQ ID NO: 788674 - DNA, 75 bp, Homo sapiens
ctgctgatgtcagtgttatatcctccaggaatactggccagaattatatccagatcgagagacagaagattctga

SEQ ID NO: 788675 - DNA, 100 bp, Homo sapiens
ttgtgagtctctttcctgtttacctccagtgtcccttcttccacatgaaaaggataaggttttacagaaggcgacacatgttgttcagagtgaagtggac

SEQ ID NO: 788676 - DNA, 98 bp, Homo sapiens
gggacgtcagcctcagcccccatggctgcaggcatcattgcgctggccctggaagccaagtatgaggatacatgggctgcacttcacagaagagccaa

SEQ ID NO: 788677 - DNA, 100 bp, Homo sapiens
tggaatgtctttgactttgtcactgtgttgggaagtattactgatattttagtaacagagattgcgaggaggagtatgatgaagatgctcaggtagtgga

SEQ ID NO: 788678 - DNA, 107 bp, Homo sapiens
agctgggtcagtccgccgctcaccccgcggccgcaccttcccgccttctcagcggagctggagtttgttcagatcatcatcatcgtggtggtgatgatggtgatggt

SEQ ID NO: 788679 - DNA, 75 bp, Homo sapiens
tatagcactctggctggcaccaggaaagatgttgaagtgactaaggggatcgtgggactttaccagatcggtttg

SEQ ID NO: 788680 - DNA, 82 bp, Homo sapiens
gtgccgcgagcgcggcctgcaggaggcccagctgatccacgacaggaacaccgcgtcccacaccgcggcggcagccaggacc

SEQ ID NO: 788681 - DNA, 100 bp, Homo sapiens
taacatcaacacactgttcaaaatcatgcgagtggggacagcttcttcctaggtgaccaagaatatggcccaggtgaccaaagccctggacaaggccctg

SEQ ID NO: 788682 - DNA, 98 bp, Homo sapiens
gacagcaacccgaagacagggaaatttaggcgcattctacattctaaaggggagctcagtgaagatagacataaacagtatgaggaatttgctatgtc

SEQ ID NO: 788683 - DNA, 80 bp, Homo sapiens
cgcgcactggtcggtgccggctcaggagccggggtatagtggaggattacaagccaccgttctacgatgtggttcccaat

SEQ ID NO: 788684 - DNA, 99 bp, Homo sapiens
ggcattttggggcagaatacagagatatggaatcaggggcaagattcttgccaagagaattaatgtgcgtattgagcacattaagcactctaagagccg

SEQ ID NO: 788685 - DNA, 50 bp, Homo sapiens
ctttccaacacagatgtccaagctgccaacagaaaaagtcctacctggag

SEQ ID NO: 788686 - DNA, 74 bp, Homo sapiens
agggctttttggctgccgagcaggacatccgagagctaagaaacctttccagcttggacctacgtcatatcact

SEQ ID NO: 788687 - DNA, 75 bp, Homo sapiens
agaagctaccgagttaccctaagaaaggttcctgggtggagctacccatgaacagcagcaatggcaatgataatg

SEQ ID NO: 788688 - DNA, 80 bp, Homo sapiens
gcggtcatctcgcagaacgccatcaaccagctcttcagtatcagacacagcacagcagccatctgaagagcaaagcaagt

SEQ ID NO: 788689 - DNA, 100 bp, Homo sapiens
gaattgaagctatcacaagctcaggacagatgggctccttcatacgcctcaagcagttcttggagttccatgccattgcagtgtcaactaggcctcagtt

SEQ ID NO: 788690 - DNA, 75 bp, Homo sapiens
catcaccaagatgacactccacgccacccggggggctgcactcctctcttggcttttcttagtgcctaaagtgtc

SEQ ID NO: 788691 - DNA, 97 bp, Homo sapiens
tctatgaggcgggaaaggagcacggcctgaagccggtggtgggcgaagtgtacgatcaaggtggtcaagaagaatacgtcttatcttatgaaccagt

SEQ ID NO: 788692 - DNA, 96 bp, Homo sapiens
aagaaacccccccttcttgagctatttacagcttttaacaattgagtaaagtacgctccgactcggtgaaatacctggagtgctcagctctcaccc

SEQ ID NO: 788693 - DNA, 82 bp, Homo sapiens
tggaatttcagctccatgaaccatttcttctgtatagaaatgcaagctgcaagacatctgtatagattctgcttcatccgtg

SEQ ID NO: 788694 - DNA, 90 bp, Homo sapiens
cagcgaccactgcagcctgcggacgaggccgggacttggccgagcggatcctaataaggggaaaatggaaagaccacagcaagattcttt

SEQ ID NO: 788695 - DNA, 100 bp, Homo sapiens
ctgctgccccaggctctgcagcccctgctgctggttctgcccctgctgcaggtgtcatggagaaactccagctgggcccagagattctgcagcgggaaaa

SEQ ID NO: 788696 - DNA, 100 bp, Homo sapiens
ggatttgttaaggattccaagtaactcttatttgatgggcctttgggtccccgaggattagctgaagctacagagatgtgcactcaagagtgcttggttt

SEQ ID NO: 788697 - DNA, 83 bp, Homo sapiens
tttcttgtcagcaccagggggcacagaacaccgtctggcgaactttctgaccaagtatacaactacccagagggcctaggaga

SEQ ID NO: 788698 - DNA, 98 bp, Homo sapiens
acaagacagtgactccaggatttctgaagactattgtggaagaagcatccattaaggtcctaggcctacttacaagcctccagtctcaaattatccag

SEQ ID NO: 788699 - DNA, 90 bp, Homo sapiens
tcaccagtcacatctcttactactgctagtcgctgcaacactcctctacagtttgagcataaagatagggaggtggtgatggagcacccc

SEQ ID NO: 788700 - DNA, 83 bp, Homo sapiens
ccagcctgaggaacatggtgcaggcggagcaggagaacgacacctcgggagatcccaggcccacaaatcaacgcatcaataag

SEQ ID NO: 788701 - DNA, 100 bp, Homo sapiens
ctgatctctctcgctgtgagacatgtctgagactcctgctcagtgtagcattaagactatctgttatagtccctgggtcaagacaacaatttttatacct

SEQ ID NO: 788702 - DNA, 75 bp, Homo sapiens
gagaagggacaaatgtaacacgattatcaggaagtgaatggcttattcagaagagcataaaggtatgccctgtgg

SEQ ID NO: 788703 - DNA, 75 bp, Homo sapiens
gacaggactacatggatgccatggctgagaaggacagagcgggatgccaccagcttgtccaaagggaagttccag

SEQ ID NO: 788704 - DNA, 49 bp, Homo sapiens
ggaagctcggccgacatttcctgttggtagctggcagtgttgtgatggc

SEQ ID NO: 788705 - DNA, 82 bp, Homo sapiens
gacagcgcgaggtccgcgcagcccagcgcagccatatctggtggctggacccagagctgacctatggctgcgccaagccctt

SEQ ID NO: 788706 - DNA, 76 bp, Homo sapiens
cgaagaaacagacattcaacatgattgcatttgaaggaactctaatgatccaggacaaagaagttaccctggagta

SEQ ID NO: 788707 - DNA, 102 bp, Homo sapiens
ttctacatctcaagctcatattttgaagtgtttacggtactaaggctcgtacgtctgcatcgattatcttacgtggggcaaatgatttcatgtgtgatgaga

SEQ ID NO: 788708 - DNA, 100 bp, Homo sapiens
ctttggttacctatgtacctgttaccactttcaaaatgaccaggctgaggcccgcaggtctaagaccaaggaagcacgcaagcgccgtgaagagcgcctc

SEQ ID NO: 788709 - DNA, 82 bp, Homo sapiens
gcaggctgagaaaagcgagaccgcgtgcgaggaccggttgattcttcaccacactgaaaccattaggaaaaatccttgtggt

SEQ ID NO: 788710 - DNA, 100 bp, Homo sapiens
gggaccctgccagcctggacttcgcgcagtgcctggggtactacggctacagcaaggtgattgtagagaaggctccaaaagccagggtgcctgatctgga

SEQ ID NO: 788711 - DNA, 51 bp, Homo sapiens
caaggaattgccccatagccttcacaggtacaccaggggttggaaaaacca

SEQ ID NO: 788712 - DNA, 100 bp, Homo sapiens
tgatagtcggtgccctcagtgacggccaggtgccctgcaatgcgatacctgagctacatgtcaccaagccaggtacctggactatgccagagtccccaat

SEQ ID NO: 788713 - DNA, 82 bp, Homo sapiens
agagctttcacgaaggcaccgacgtcatcatgctgaccaccaatcagatccgtaagctggtaggtgagtgctgtcctcggct

SEQ ID NO: 788714 - DNA, 100 bp, Homo sapiens
agcgctgccgccgcgtcctcagccaccgctccctcttcccacgatagtcatttttacttgaaggaagctgcttctacttgggagtggcaggagaagtgag

SEQ ID NO: 788715 - DNA, 100 bp, Homo sapiens
gggcggcggcgtgagggctccgggtcgctggcggcgtggacacctgagtcccggggtaggggtctcccgcgagactgtggaagcaatgaagaccatattg

SEQ ID NO: 788716 - DNA, 73 bp, Homo sapiens
tgcaaaagtatctcatatgaccagtgaggctggaagtcatccacaacaaacacaaaaattggaagaaattaaa

SEQ ID NO: 788717 - DNA, 100 bp, Homo sapiens
ctggagacgcggcctcggaccagccatttcggtgtagaagtggcagcacggcagctctgggaaaccaaggttttgcagtctaaagcaacagaagacttct

SEQ ID NO: 788718 - DNA, 75 bp, Homo sapiens
tttaattataacaagtgatactctactcatagacaggtagtgggcagcagtcagtgacaggtgtaacctctgtgg

SEQ ID NO: 788719 - DNA, 75 bp, Homo sapiens
caccaatcagatgtctgtctgccgggtcccctgacaagcccaccaggccccctgctgagatggctgtgaccctgg

SEQ ID NO: 788720 - DNA, 98 bp, Homo sapiens
agatttggagcccattttagaggcatctgttctatcttcccatcataaaaaagcagactgccagattcacttacagccccagctaattccaccaaaca

SEQ ID NO: 788721 - DNA, 51 bp, Homo sapiens
ctggaagagtcgctggccgaaggacactgatgaaattcaagttaactatcc

SEQ ID NO: 788722 - DNA, 73 bp, Homo sapiens
aaaacaggcgtattctggtaatttcgaggaggagaactacgatgacccgcacaaaacccctgcctccccagtt

SEQ ID NO: 788723 - DNA, 100 bp, Homo sapiens
gcggttaaaaaaccctaatgctcctatgttaccgccacctaaaaacaaagaggattttgagaagggcgaaatgaccctgaatgtgacctgtgtggtggag

SEQ ID NO: 788724 - DNA, 90 bp, Homo sapiens
gttggacgcagacggcgtcacttgcttggggtctggaacagaatctgacagtgatgaatcagtaccagagcttgaagaacaggattccac

SEQ ID NO: 788725 - DNA, 83 bp, Homo sapiens
ttattgcctatgctgtattccataatatacagaaatctccagaggagtggaagctggacacactatgtgacttgtatgaaacc

SEQ ID NO: 788726 - DNA, 109 bp, Homo sapiens
gcaaccattgacgccatgtcgggttattcgagtgaccgagaccgcggccgggaccgaggtgcagagcagagcgggcggaggaccccgggcgcgggcgcggacggcacgc

SEQ ID NO: 788727 - DNA, 75 bp, Homo sapiens
ccagttggaagcccgggaccgtttaaaaaactggcagaggtggaggagacactgaagcgactgcagagccagaag

SEQ ID NO: 788728 - DNA, 80 bp, Homo sapiens
gaggcgttggcaagtcagccctgacgcttcagttcatgtatgacgagggaaatcctcattgacgattcaatttgttgaag

SEQ ID NO: 788729 - DNA, 100 bp, Homo sapiens
agatacagaagcttgtattccaaatgaaaatttcctacatctgaggcatctgtgtaaaagaagctaaaccagccccagaaatatttgaaaatgaagtcat

SEQ ID NO: 788730 - DNA, 75 bp, Homo sapiens
atgcaacgctgggcatgaggagcggagcggagaatgccaagtggacgtgactctggacccagacacggcctaccc

SEQ ID NO: 788731 - DNA, 75 bp, Homo sapiens
catgggtggtgatgaggatgtagatttaccagaagtagatggagcagatgattacggagccccagatgcaggtgg

SEQ ID NO: 788732 - DNA, 114 bp, Homo sapiens
ctcagttggaagcagccgatccagcctgcggagcctgtggggcaggttcttcacacacccccattcggcgtagtacccagagagctcaagatgtgtggcagttttcggatggaa

SEQ ID NO: 788733 - DNA, 75 bp, Homo sapiens
attttgatcaagataagctgccttaagttctcttcattacaccttgacaaaagtaagctgaagccaggaacaaga

SEQ ID NO: 788734 - DNA, 75 bp, Homo sapiens
ctatcatttttgttactcttcagtacaatgtcaccctcccagcaacagatcaaagccatcggccagacagagttg

SEQ ID NO: 788735 - DNA, 97 bp, Homo sapiens
gtccgccagctcggggccagcgcatggggctgctgagaccgctccggacgtgcgaagcgttcgcggtgcggtagggaacggttatcatcattgcaaa

SEQ ID NO: 788736 - DNA, 75 bp, Homo sapiens
attgaagacgtcattgcccaggggaaggaagccatgctgaagcaccgggactacgagacggccacactatcggac

SEQ ID NO: 788737 - DNA, 100 bp, Homo sapiens
cgaaaacgctacgtgagctgggccctgggccagaggcagaaaacggacggaagaaaaggtctggccgggcagcttttggcaaggagtctgaagttcttat

SEQ ID NO: 788738 - DNA, 75 bp, Homo sapiens
atggcatctaagaaatttgctgttaaatttgaagaaaacaggtctgaaacaaggtcttacccccagctgcttctg

SEQ ID NO: 788739 - DNA, 83 bp, Homo sapiens
cgtgacttcccggacgctgggaaatggttttaaaatcaaagatgggaaaatcggagaaaattgcccttccccatggccagctt

SEQ ID NO: 788740 - DNA, 75 bp, Homo sapiens
gacgcggaggccgcctggggtagcggcggcgggagtcctggcgctctgcaggaatgtgggtgccggcaggacagg

SEQ ID NO: 788741 - DNA, 100 bp, Homo sapiens
aggagcccaagaagctgcgaccaccccctgccagggtctatgttaacaatgaatgggcaaccagtgttggggaaggagggagctttggagaacttgcttt

SEQ ID NO: 788742 - DNA, 103 bp, Homo sapiens
aagggtcctgaagtcagttgttgcatcaaatacttcatatttggcttcaatgtcatattttggggccaattcctgtccccccagcagcatggcatcgtgtgct

SEQ ID NO: 788743 - DNA, 82 bp, Homo sapiens
ccagagtcacacacggtcctaagagctgggcaccaggaagcgaaggctggtgaatgaaaactttgccattgatttgatagca

SEQ ID NO: 788744 - DNA, 96 bp, Homo sapiens
cgccgccgccgccccctccctccggtgggcccgggaggtagagaaagctagcttgtcactttctgcaaaggtttccctcagggagcctcctgctgc

SEQ ID NO: 788745 - DNA, 100 bp, Homo sapiens
gatgacaaactctggagtaattggagccaagaaatgagtatagatagcagcattttaatcatctcttccattaaaccaagattacacaaaagcgtttgag

SEQ ID NO: 788746 - DNA, 75 bp, Homo sapiens
tacatgtcggaggagaagctgcaggagaaagggaaatgtttcaacgtgcgcaagcgttgcggcggcgggcagagg

SEQ ID NO: 788747 - DNA, 100 bp, Homo sapiens
cttctgccgcaccaggctcatcctgtccatcgtgtgcctgatgatcacgcagctggctggcttcagtggaccagatagatcactgcgaccagaggaaatt

SEQ ID NO: 788748 - DNA, 83 bp, Homo sapiens
aaaagtctggcctcggcgccaagatcccagtcacaattatcaccgggtatttagacacatgcctggacatacaagtcgagaag

SEQ ID NO: 788749 - DNA, 82 bp, Homo sapiens
aagaggcactggaaaaatatggcaaagacttcaatgacatacggcaagattttttcctccgtgtcacaaagcagtacctgcc

SEQ ID NO: 788750 - DNA, 100 bp, Homo sapiens
cacaatcaggttgctttgatctggattcttcattactacatctgaaaagcttctcatctagaagcacaacagctccagctggcagcatcacttcccgcca

SEQ ID NO: 788751 - DNA, 75 bp, Homo sapiens
cggagaagaagctggtgagaaagagacaggagccagatgctgaatgacgctggagatggagctgaagatgctgaa

SEQ ID NO: 788752 - DNA, 82 bp, Homo sapiens
ctgcctcggcggagcagaggaaccacacgctgatcatgggactttgaacatgtcggggatcgccctcagcagactcgcccag

SEQ ID NO: 788753 - DNA, 82 bp, Homo sapiens
aaatatgctgtgtgccggatacaagaatgagagctatgatgcctgcaagagtattgttacaatcacatttgacgtaccagga

SEQ ID NO: 788754 - DNA, 75 bp, Homo sapiens
ataaagaccaagaagtgggattactggattatatggtgcattggatcgttgtgtgatggggataacagcagttga

SEQ ID NO: 788755 - DNA, 98 bp, Homo sapiens
cattccaacacataaaaattatttatccaacagctcctcccaggctcttctcaaccatctgtgagtccaggggaaccgtctccaccatccatccatcc

SEQ ID NO: 788756 - DNA, 83 bp, Homo sapiens
tctgaagatctcaagatctggactactgttgaaaaaatttccagtgaggagctagagttaatgccaaagacagcaaatggttg

SEQ ID NO: 788757 - DNA, 75 bp, Homo sapiens
acaggtctccccgctggacaatgtgttggggatgtcctttgcactgaccctgaactgccagattgacaaaaccag

SEQ ID NO: 788758 - DNA, 82 bp, Homo sapiens
cgattcatcaaccatagctgtgacccaaattgtgaaatgcagaaatgcaaattgtggctactaatttgccccctgaagatca

SEQ ID NO: 788759 - DNA, 83 bp, Homo sapiens
tcttgacaaccaagggcctccgtctggatttccaaggaagaatttcctctgaagcaccgtgtccacaggatgaaatgtccgag

SEQ ID NO: 788760 - DNA, 90 bp, Homo sapiens
cttctatagaaatggctgaaggaaaacctccttatgctgatatacatccaatgagggtatgtctgattgacccgggctgcttccgagaaa

SEQ ID NO: 788761 - DNA, 75 bp, Homo sapiens
gcggcgggggagcaccgcggggggctgccgaaactacccagtggctggatctctgctctggtggtgccgaagggc

SEQ ID NO: 788762 - DNA, 90 bp, Homo sapiens
gggcccttctcggtggaggccgacccatccagccaggagcccatctcgctggccagctgcgccatggctgatctggttccagacttgcag

SEQ ID NO: 788763 - DNA, 98 bp, Homo sapiens
agttacgtgaaaaaccatggtatcctcagtggacgggacctgcagttccttcttcgagaaaccaaggaatcggtgacatttaaggatgtggctataga

SEQ ID NO: 788764 - DNA, 74 bp, Homo sapiens
tgtcacgaatgggaagccaagtgccatcttcaaaatttcaggtcttaaatctgatggagtctcgctttgtcacc

SEQ ID NO: 788765 - DNA, 97 bp, Homo sapiens
aaggacaagctggtgcaactggtcccaaaggattaccaattatcaagaatgatctgtgggttaaccctctacgctactacctgagagaaaggggctc

SEQ ID NO: 788766 - DNA, 83 bp, Homo sapiens
ggacaacggctgcggcgacaattttgagcatcagatccatgctgctgctgactcggagccccacagcttggcacaggctctct

SEQ ID NO: 788767 - DNA, 98 bp, Homo sapiens
gtgaatttccaggaaggacaactgaattcaggcaaaaaacaaatagaaaaactggaacaggaacttaaaagcacccttcacaatagcaaacgtaaacg

SEQ ID NO: 788768 - DNA, 100 bp, Homo sapiens
aataaatcttcctgccaattcaacaatcaaaaagaaagctgctgttatcatcatggctgtagaggaacgactgagacggctaaaccacagtgttgccaag

SEQ ID NO: 788769 - DNA, 75 bp, Homo sapiens
gaaccccaatgttcccgtggtggtgaggggctggctgcacaagcaggtgtaagctgttcagatgaagatgaaaaa

SEQ ID NO: 788770 - DNA, 50 bp, Homo sapiens
gaaaatttcagagctgcaaaattatcagtcggagagcgaggagaaggttg

SEQ ID NO: 788771 - DNA, 75 bp, Homo sapiens
tcttctttccaaaactgtgcacccctggatgaaatattgaatttgaccgggattgtgactattttgcgattgctg

SEQ ID NO: 788772 - DNA, 100 bp, Homo sapiens
aaaaggtgtcaagaagctcagaatgacaagttggatggcttgaggactggtactaaaaggaaacgtgactgggaggccattgccagcagaatggaggatt

SEQ ID NO: 788773 - DNA, 102 bp, Homo sapiens
atattaatgagacaagaagcaacagttaactacctcaaagaattagagagcagagaggagccttcaggggaagtagaggtggccgaggttggggcacacgag

SEQ ID NO: 788774 - DNA, 100 bp, Homo sapiens
tatggtgctgggtgcagatgcagtgtggctctggatagcaccttatggacagcagaagatggctgtgccacccacgtatgccgatcttggcaaatctgcc

SEQ ID NO: 788775 - DNA, 73 bp, Homo sapiens
acagatacaactatgaatagttctttgagtgcccatcatcattctcctctgctgacaacctctgccgcaaact

SEQ ID NO: 788776 - DNA, 83 bp, Homo sapiens
aaatggctgagtgtcttgtcatgctagcactgcattaagtgatgcatacagcgctggataaaacaagccttagaagaagggat

SEQ ID NO: 788777 - DNA, 82 bp, Homo sapiens
tgcgttcattccttttggagacatcacagatattcagattcctctggattatgaaacaggtcttgcaagagcaaaatccgtc

SEQ ID NO: 788778 - DNA, 82 bp, Homo sapiens
agaagtccagagctgaggactgcctgtttgcagatcaggatcctcatgaccagccaaagagaagaagaattaggaagcataa

SEQ ID NO: 788779 - DNA, 134 bp, Homo sapiens
ctcagaggaggtgtcctggatttcctggttctgtgggctccgtggcaatgaattcttctgtgaagtctcagacttgatccgcagtggaaaacccatcaagcctgtcaaggatttgctaaagaagaaccaaatgg

SEQ ID NO: 788780 - DNA, 109 bp, Homo sapiens
cttctggaaacccttgcagagattgacttcaggtggataatattaatgcagctgtgatggatttgaaaaaaaagaagatccgcagtctaagtgaagaggtcaaaatagg

SEQ ID NO: 788781 - DNA, 100 bp, Homo sapiens
atctggagaagtggctgttctgaagagagatgggcgatatatatattacttgaatgtgacagtgatgataacatgggtgccaaaaatacttcaataggag

SEQ ID NO: 788782 - DNA, 100 bp, Homo sapiens
gacgtgagttcaagtacagatcacacgcccactaaagcccagaagaatgtggctaccagcgaagaatgctgagatgtataaactgtcttcagagcaattc

SEQ ID NO: 788783 - DNA, 98 bp, Homo sapiens
tggatattgggcttgacagctgcaaggagttactgaaggtagaacaagtcagccagttggctgtgttcatagaggcagcattagactatcacagacag

SEQ ID NO: 788784 - DNA, 100 bp, Homo sapiens
aaggagactcaatttgaactcagagtactgggaaaagatggccggtgcataaacttctcccgagttccatctcagtaaaagggaagcaggaagaccaaga

SEQ ID NO: 788785 - DNA, 90 bp, Homo sapiens
ggaagatggcgcctgttgtgacagggccagtcttcagagacctgagattaaacttgaatcactgaaagaagatattaaggaattctttaa

SEQ ID NO: 788786 - DNA, 98 bp, Homo sapiens
aggaccctgtgcaggagcagctccgggtgacacgaggggactgaagatactcccacaggggctcagcaggtcttgggtggtgcctatgatgagttcat

SEQ ID NO: 788787 - DNA, 100 bp, Homo sapiens
ggctgcccaggctcgcctcgactccaaatggttgaaaacagatatacagaatcccctactttgaaactagtgctgccaatgggacaaacataagccaagc

SEQ ID NO: 788788 - DNA, 90 bp, Homo sapiens
gccgcccagatgatgcggtggtgggggacctgccggcacgcgactccccccgggcccaaaatgaaggtcaccgtgtccaaagggggcgac

SEQ ID NO: 788789 - DNA, 50 bp, Homo sapiens
caaacttgacactcaccctgaccggtaaactcgggggccaggactctttt

SEQ ID NO: 788790 - DNA, 90 bp, Homo sapiens
tcctgacatcgaaaacccggacctcgcttacctgcatgctgtgtgctggagaagagaaacgagttggcacacgcacagtgtttgttggca

SEQ ID NO: 788791 - DNA, 90 bp, Homo sapiens
cgaacaagttagtcgcagccagcaacgaggcaagaaactatattcagtctttgactcagatgccgaagatgaactttgcgaatgtattta

SEQ ID NO: 788792 - DNA, 100 bp, Homo sapiens
aggacattcagtcagaagaaggctgctattgaaagagagtatgcacagaaatcgaaacgagttggctgagactcttgcactcctgaaagcacaaattgat

SEQ ID NO: 788793 - DNA, 75 bp, Homo sapiens
ttgtgacatatcgttggacccagaattgaggtggctattatcatggaaaactaatttttcccagagaatttcctt

SEQ ID NO: 788794 - DNA, 75 bp, Homo sapiens
gcctaccaggaggccaggggtgtcgccatgggtaagaaggtggatggctctgtaaatgcctatgccataaatgtc

SEQ ID NO: 788795 - DNA, 82 bp, Homo sapiens
gagaccgcggccgggaccgaggagtgcctggtgaagaatgtgatgggatcactagcatgtctgcggagagcggccctgggac

SEQ ID NO: 788796 - DNA, 82 bp, Homo sapiens
ttcataccagctgaagagcgacaagccgctggcagccgcggatctcaccgccgctcaggggcttttgttgtaacaccctgac

SEQ ID NO: 788797 - DNA, 100 bp, Homo sapiens
gccgctgcgcaccccagcggagccaagccccacgctggccggacagggccgcctgtcgccggatatgcaatatgatgaggatgatgatgaaatcaccccg

SEQ ID NO: 788798 - DNA, 100 bp, Homo sapiens
ctaccaaggatacccacagtacggctggcagggtggacctcaggagcctcctaaaaccacagcccttgccctgttggatgaataggcacctctggaagag

SEQ ID NO: 788799 - DNA, 73 bp, Homo sapiens
ggagccggagggcgggaggaacatgacatcgcggagatggagtggtttaataattataaaagatctcttgcta

SEQ ID NO: 788800 - DNA, 75 bp, Homo sapiens
cacgggatccagagcgccgcgcacttcgtcatgttcttcgcgccctgatatggctcgtggacagcagaaaattca

SEQ ID NO: 788801 - DNA, 100 bp, Homo sapiens
actctgacctggccaattctgacgccctcaaggtcgccaaggaggtggacccccagggtgctggagaatctggtaaaagcaccattgtgaagcagatgag

SEQ ID NO: 788802 - DNA, 82 bp, Homo sapiens
gaaccggtgccagtactgccgctaccagaagtgcctggccatgggcatgaagcgggaaggcacaaatcctgaagagcccgtg

SEQ ID NO: 788803 - DNA, 101 bp, Homo sapiens
cgctggccatcctgctgctgcagggcctggtagtgtggagcttcagcggcctggaggaggacgaggcgggcgaggtgctggagaatctggtaaaagcacca

SEQ ID NO: 788804 - DNA, 126 bp, Homo sapiens
actgccccctgcccccggcgcgtcccccaggagccatcctgcccgcggggatcccgtcagccgggaaactctgccccttccgacatgaccgaggggagaagatggtggtatgcaagcactggctcc

SEQ ID NO: 788805 - DNA, 82 bp, Homo sapiens
ctctgttggtgtagaagccaaaatcagggagccagttgataatctgagtcctgaggagcgtgatgcccgcacagttttctgt

SEQ ID NO: 788806 - DNA, 101 bp, Homo sapiens
gtgcccacgtcctggatgacgtggctcctggacccgcaataaaggcatttgttgctatcggggactacaatggccacgtcggtctgggtgttaagtgctcc

SEQ ID NO: 788807 - DNA, 83 bp, Homo sapiens
gcccgagctgctggggctcgaggctggcagccggcgccaagcccgcaggagggtgtgaagacagagaatgaccacatcaacct

SEQ ID NO: 788808 - DNA, 98 bp, Homo sapiens
caccacctgctccggcctccttctgagtaccactatgagtacacggcgtgtgacagcacgggttccaggtggagggtcgccgtgccgcataccccggg

SEQ ID NO: 788809 - DNA, 75 bp, Homo sapiens
gagatgaacctctaacacagtggaaaggaaccgttctggatcaggtcacttggtacatatgaccgtggtctccgg

SEQ ID NO: 788810 - DNA, 100 bp, Homo sapiens
tccgaggcagatggaccacccgctgagcgtcagaaatggggtgcttctggcctccgtgctctgcttcacctcttctgtggacacaagataccaagtccag

SEQ ID NO: 788811 - DNA, 90 bp, Homo sapiens
aacattggacttttttactagggaataggcagagatcctacaagaatccaggatgatgatcccagattgccagcgcaggttggaagccgc

SEQ ID NO: 788812 - DNA, 90 bp, Homo sapiens
atttctgccatggttctcactaaaatgaaagaaaccgctgaggcttatttgggaaagaagtgtgagcgccttgtgagtcttctcctgaac

SEQ ID NO: 788813 - DNA, 82 bp, Homo sapiens
cccacttgttcgcggcctataggctcttgtcaggatggtgaagctgttcatcggaaacctgccccgggaggctacagagcag

SEQ ID NO: 788814 - DNA, 100 bp, Homo sapiens
gcaaattaaagcaattatgaaagaagtcattccttttttgaaggttggcgtgcagtggtgtgatctcagctcattgcaacctctgcctcccggactcaag

SEQ ID NO: 788815 - DNA, 100 bp, Homo sapiens
gttcagactgacaccccacatcgacaatttggaggtggcaaacagcttcgcagtcactaatgcttggtgttttgaatgctgtatcaaatgcctggggggc

SEQ ID NO: 788816 - DNA, 90 bp, Homo sapiens
cccgcggtgaccgaggcctgggccccgggtgttccaaaattgcagctgtattcaaacatcaggaaattcatctgcagttcttgggctgtg

SEQ ID NO: 788817 - DNA, 50 bp, Homo sapiens
gagacagagccctccggccagcggggagaatttcgctaaggagtttgtga

SEQ ID NO: 788818 - DNA, 50 bp, Homo sapiens
tgcttaaaatggtctatggtctgtctctcgctcctggttgcagccagaat

SEQ ID NO: 788819 - DNA, 101 bp, Homo sapiens
ccagaggagagttctccaaacatgatcgtttactgcaaagttagcactctacgtatatgaatatctgctccatgtaggagctcagaaatcagctcaaacat

SEQ ID NO: 788820 - DNA, 75 bp, Homo sapiens
ctgcagtgccaaatgtgtgacccagcaggttcaggagaagtggcacctggtggaggacctgtcgcgactgctgcc

SEQ ID NO: 788821 - DNA, 82 bp, Homo sapiens
ttattattctctgtgtcccttgttgcaagaagaaaacatcagcggcagagggtccagttcccagtgacctgacagcagagga

SEQ ID NO: 788822 - DNA, 82 bp, Homo sapiens
caagggtgtccgacggctggagcgtttggtgccctggttgtcagatgttggaaagcagtaggacggaacatactcttcgtgg

SEQ ID NO: 788823 - DNA, 100 bp, Homo sapiens
cctcgctccctctgctcttcctcccttcgctcgcaccatggtgtagaatgagccaaggagactcaaacccagcagctattccgcatgcagcagaagatat

SEQ ID NO: 788824 - DNA, 75 bp, Homo sapiens
cttcgatgtgcgagactttggaaaggcgagaaccgaagtttggaggtagacgagcaggcgagcggtttgcccggg

SEQ ID NO: 788825 - DNA, 100 bp, Homo sapiens
ccagaccattgatgaggaatatgatagcatcaaaaacaacattgaagaggaggaaaaagaggttggctcagggcctattccactagaagcaagatggctg

SEQ ID NO: 788826 - DNA, 101 bp, Homo sapiens
tcaattgaagtagaaaatgactttctgccggtagaaaagaagatggctgtgccacccacgtatgccgatcttggcaaatctgccagggatgtcttcaccaa

SEQ ID NO: 788827 - DNA, 100 bp, Homo sapiens
tgttaaggattccaagtaactcttatttgggtgaagttgaacaaattgctatgatgaaaccaaaaggccagactgaacacgatgagggtatgcttgaata

SEQ ID NO: 788828 - DNA, 121 bp, Homo sapiens
acggagtcctgttccaccttcagagcgtcacggcgtacgccctcatggggaaaatctccccggtgactttcaggaccgtataatagacgctggccccaaaggaaactactctcgatttatg

SEQ ID NO: 788829 - DNA, 71 bp, Homo sapiens
ggtgctcctaagggaccacaaatacgtgatttggagagaggtatgttgagcagagtaacctgatgatggag

SEQ ID NO: 788830 - DNA, 100 bp, Homo sapiens
ccggctctggtgctcccagaagaggtaccccaagaagctagtgcagacttattcagtgtttccctaccaggacgagatgagcgacgtagtggttcagccc

SEQ ID NO: 788831 - DNA, 80 bp, Homo sapiens
acccaggctaactgcctcctctggtatatggacaacccccaggtatctactgtgcgtttcagtcaacaatacagcttgtg

SEQ ID NO: 788832 - DNA, 82 bp, Homo sapiens
cagctgttcgcgcgtcttctcctccaggtggtaccccagctggtacacatcctccggactctggtgacaatgggatactcca

SEQ ID NO: 788833 - DNA, 90 bp, Homo sapiens
gcggaagaatggcagtgctcaaactcaccgaccagcatgacgtatcccagactttactcaaggcaacactggacagtgttgtagaagaat

SEQ ID NO: 788834 - DNA, 74 bp, Homo sapiens
cttgtccatctgtaacttcattaagaagccctgcagtccatttgatgtagacaagccatctagtatgcaaaagc

SEQ ID NO: 788835 - DNA, 100 bp, Homo sapiens
gccggagaagagagctctggggtcgacacggtacggagaccacaagcagtagctccttcgaattggagatggcacaggagggcttcagcgctgtgttcac

SEQ ID NO: 788836 - DNA, 99 bp, Homo sapiens
ggaggagctccccagctggtggctggagcgaccccttgttctttggtggcgctgagattgagatggacgtgctggtgtaatcctttcttcttggccgct

SEQ ID NO: 788837 - DNA, 100 bp, Homo sapiens
ggcgggaggctccgcggagccgaggcgtggagactaaaatgttgatgggcgaagtgatgagagaagctgccttttcactagctgaagccaagttcacagc

SEQ ID NO: 788838 - DNA, 87 bp, Homo sapiens
ggtgcagacagctgtgactatgaaggggagacccttccaggcctgcaagcgatttgacagccatccctcagtgccaactaaacctcc

SEQ ID NO: 788839 - DNA, 75 bp, Homo sapiens
ctctgcggctggtccaggccttccagtacacagacgagcatggggaaggtgtgggtcctgtggtagctggagtgt

SEQ ID NO: 788840 - DNA, 90 bp, Homo sapiens
caggaagaaaacgagccagtgatttacaatagagcaagtgctctggtctggggtctctctgtgaaacacaatcctcagaaagtgggtaaa

SEQ ID NO: 788841 - DNA, 90 bp, Homo sapiens
gttttccttcagagcactggcctccaattactcagattgatggacaacttttcttaattaagcaccttttgatacttcgtgaacaaattg

SEQ ID NO: 788842 - DNA, 50 bp, Homo sapiens
ctcactgcaacctccacctcccggtttcaagcgattctcctgcctcagcc

SEQ ID NO: 788843 - DNA, 75 bp, Homo sapiens
gccatggaacccgggttacagcagtgagggggccacggctcaagtggtctcagaaggacgtccaccttgggctgt

SEQ ID NO: 788844 - DNA, 50 bp, Homo sapiens
cgcgggcgcccgaggggccgagcgagcccaggatccggttgtggccgtgg

SEQ ID NO: 788845 - DNA, 82 bp, Homo sapiens
attgtgtcaggcctgaaatacgttcagcacacctacaggactggggtgaaagattcagaatggacagtttagaagaacctca

SEQ ID NO: 788846 - DNA, 75 bp, Homo sapiens
atcttccctttgactgtgtcctgctgctgctgctgctactacttacaagtggattttgcaaatcgggaaagtcag

SEQ ID NO: 788847 - DNA, 75 bp, Homo sapiens
actccaagccctactgggaggcacggagggtggcgaggcagtgatatcagtatcaagataaaagtttggaatggg

SEQ ID NO: 788848 - DNA, 75 bp, Homo sapiens
gctgctggttgactgttacaaacccacagaggtgtgttccagagaacaagccttcagacatttgctatattgacg

SEQ ID NO: 788849 - DNA, 73 bp, Homo sapiens
acctagaagtctactaatggacagttagtcacccacctacatgttgagtgcaaaatggcaactcttaaggaaa

SEQ ID NO: 788850 - DNA, 89 bp, Homo sapiens
ttgtaactcggccctagttacctggccagggtacgcgacaattggcggaggttttcccatcatatgattcccggtcctcctggtcccca

SEQ ID NO: 788851 - DNA, 98 bp, Homo sapiens
gcatcaacaagatgttgtcctgtgctggggctgacagtgagaaagatcagtctaaagaaaaggagaagaaagtgaaaaaaacaattccttcctgggct

SEQ ID NO: 788852 - DNA, 90 bp, Homo sapiens
ctgcctctggacggaggagtgaggggggcgaggaaacgcaagattaaccaaagtgctgataatttgcacatatttcttctgatatgtgga

SEQ ID NO: 788853 - DNA, 90 bp, Homo sapiens
ccccgaccgcgtgctggagctcttcgacccacccaagtaccaaatatgccccaacagcggcaagaccagcatcatcagagtgccatgatg

SEQ ID NO: 788854 - DNA, 75 bp, Homo sapiens
caaagacccagtgaacaaatccgggggcaaggccaaaaagaagcttcttccagaccagctggtcttgcttctgga

SEQ ID NO: 788855 - DNA, 90 bp, Homo sapiens
aagcaccatcccagtgatgttctggcaggatttgctcaaggagccctggtggcctgctgcataacttgtgcaccatggacaattttgctg

SEQ ID NO: 788856 - DNA, 100 bp, Homo sapiens
aacagaaacacttcttttattttcctgtaatatatctgtatcatcggaggtaagaccattgcaattggaaaagttctgaaactggttccagagaaagact

SEQ ID NO: 788857 - DNA, 76 bp, Homo sapiens
ccagcgtcaacttcctcaagtcgcccaaaggaactcgagttccaggacctgagggctgtcctgcactgcatccact

SEQ ID NO: 788858 - DNA, 90 bp, Homo sapiens
aagtttttgtgttcctggcctttggaaccccttcatcatattccgcagatatttgtcaggatacgaatcaggttctcttcaagtgctgcc

SEQ ID NO: 788859 - DNA, 75 bp, Homo sapiens
acacaaatccagtgggctacacagttttttgctccactcaagcctgttagaatcaccatggaatacagctccagt

SEQ ID NO: 788860 - DNA, 95 bp, Homo sapiens
agggtcctttatatagaagggagagtaggctggagtgcagtaacaccactgaagctcactgtaactttgaactgctggacttggaatcctcctgc

SEQ ID NO: 788861 - DNA, 101 bp, Homo sapiens
cgcgctcactgttcaagggaaacttttggatagttttgaggcagctgtgccatcaaatagccacattgtttcggaacctggaaagaatgtcacactcactt

SEQ ID NO: 788862 - DNA, 76 bp, Homo sapiens
aaagaatccaggacaaaaaggattaggtcccttaatatggactttgaaaatcaagataaggagaaagacagtaata

SEQ ID NO: 788863 - DNA, 97 bp, Homo sapiens
catgcttgaaaacatggggattggaattcggtgttacctcattttgaaagtcttgggaaacaggaaaaaattcctaacaaaatgtcagcttttcgaa

SEQ ID NO: 788864 - DNA, 75 bp, Homo sapiens
ctaattccgtgtaccgctacccgcccaagtccgacacgttggtcgtcattgcctccgagcccactttagccctca

SEQ ID NO: 788865 - DNA, 98 bp, Homo sapiens
cctgggcgcgggggcggcgtgtcaggtggttgcggagctggtaaggacactcatgaggaccatgatacttccactgagaatacagacgagtccaacca

SEQ ID NO: 788866 - DNA, 82 bp, Homo sapiens
attcaagtgcctgcctctgccccttggtgggctgaagcttcatggaggtcagaggcctggcttcaagtactggtatgacaag

SEQ ID NO: 788867 - DNA, 98 bp, Homo sapiens
tgcgaaggccgggacccggttccccggcccacagtgggggtgtgcaaacccgagagaactgggacaaccctccatatgataagggagccttcagaatc

SEQ ID NO: 788868 - DNA, 110 bp, Homo sapiens
agtagcctctcactgaatgagcctgaagacaaggatgtgactttccatgccattgcagtgtcaactaggcctcagttacttttcagtttgcccaaattgagcccatctca

SEQ ID NO: 788869 - DNA, 101 bp, Homo sapiens
atcaccgaccggcagacgggcaagtcccggggctatggatttgtggagtttgaggacgggtcccagctgacggtgaagcgtggggacatcttcaccctgga

SEQ ID NO: 788870 - DNA, 100 bp, Homo sapiens
agagaagcagaaggcacagtgcctctgaccagcatcgtctgtaaagctccttcgagaactcatagaacggaagaccagctccttggatcccaacgatcag

SEQ ID NO: 788871 - DNA, 100 bp, Homo sapiens
gagccaggagaccactacctccaccattatcaccaccacggtcatcaccaccgagcaggcaccaggtctgaaaactccaaatggctgtgagctggtggtg

SEQ ID NO: 788872 - DNA, 75 bp, Homo sapiens
gcggaatgacagcggcgaggagaacgtcccgctggatctgacccgaggtgaactactgagttcttcattatgtct

SEQ ID NO: 788873 - DNA, 75 bp, Homo sapiens
aagaataggaggaaatgaagggatagataattggcagagggggtcgatttgggaggaaaggtgtggctataaact

SEQ ID NO: 788874 - DNA, 87 bp, Homo sapiens
gccggccccatgaggagggacgtgaacggagtgaccaagagcaggtttgagatgaaggatttgggggcagagcacttggcaggtcat

SEQ ID NO: 788875 - DNA, 100 bp, Homo sapiens
gaaaactctagaagtctggatgtcggtgggcctctgagatatgccgtttacggagtccgatgggtggtccttttattcctgctgctcctgtcaaaactgc

SEQ ID NO: 788876 - DNA, 75 bp, Homo sapiens
agttcgctacacagcaatgcatcgaggtgtacctgaaggaaatcttaaaagaaattggtgttcagaatgtaaaag

SEQ ID NO: 788877 - DNA, 87 bp, Homo sapiens
tcacgagaagaaaattggcaagagtggagacaaagagatgagcaggatcatggggttgacagcagcattttccagaatcctaaaaag

SEQ ID NO: 788878 - DNA, 100 bp, Homo sapiens
agttggagcagggagaggagctgtggataacgggaggtgaatttccatgtcaacatagtcctggtgcatggctgcctcctaatcccatagtccagaggag

SEQ ID NO: 788879 - DNA, 71 bp, Homo sapiens
gaaaggagcaaatcatactctttccatcagtctcaacatagaaggaaagtacggtggccagactttaacca

SEQ ID NO: 788880 - DNA, 100 bp, Homo sapiens
ttctccatacccgtgacctggggatcgctacggaccttaaaatacccgcaacagccccttcgtcccaagaagtactcccactaccccaacctcctctcaa

SEQ ID NO: 788881 - DNA, 100 bp, Homo sapiens
aggagactggagacaaggcgcaaaggtcacagagatgcggcggaccctgacgcctgccagctccccagtgtcctcgcccagcaagcacggagaccgcttc

SEQ ID NO: 788882 - DNA, 110 bp, Homo sapiens
gtggactcaacagtttgtggcaagacaagctcagaactgagaagctgtcaccacaggcatagaatgtcaagctaaccaggcgtccgctacttcagaagagtgtactgtcg

SEQ ID NO: 788883 - DNA, 124 bp, Homo sapiens
gaggaagaccactacggcatggaggacgtcaagaaacgcatcctggcctccatgaagaagtggactattctgagaaactgaagttcagtgatgatgaagaggaggaagaagttgtgaaggacgg

SEQ ID NO: 788884 - DNA, 95 bp, Homo sapiens
tcaacttctaccagttcctcggggtgcagcaggtactgggaacagcttttgatcctttcttaggaggaaaaaacttcgatgaaaagttagtggaa

SEQ ID NO: 788885 - DNA, 75 bp, Homo sapiens
ctgcggcgcatggaggaggaggagaagctagatgtggaagagccagacagcgccaactcatcgttctacagcacg

SEQ ID NO: 788886 - DNA, 83 bp, Homo sapiens
cgatcgggagccatgagcgtggacaaagctgagctatgcgggtctctgctcacctgggtgcagcagtaccgcgtcgccatgac

SEQ ID NO: 788887 - DNA, 75 bp, Homo sapiens
gtgattagcttcgcagtctggaaagctttaggagttcacagtgttcatacgttttatgaagctgtggggtacatg

SEQ ID NO: 788888 - DNA, 75 bp, Homo sapiens
tcggtccgccggagcctgctggggcgagcgggtgaatcctggttctttcgttggctacctggaaagaaaaagaca

SEQ ID NO: 788889 - DNA, 75 bp, Homo sapiens
atcacacggtggggcgagtattggtgtgaggtgacgcctttgaagaagatggtggagagaattcgcaagttccag

SEQ ID NO: 788890 - DNA, 50 bp, Homo sapiens
gggacggagagagcacgagcccatcaggtcaagtttacccatgggggaac

SEQ ID NO: 788891 - DNA, 100 bp, Homo sapiens
gctgccagccgcctgctggctgctgcctgcatttgccttgtgaaaaagggtaaagaacaaaacacacagcgaagcttttttctcagaatgaagtgtaccc

SEQ ID NO: 788892 - DNA, 90 bp, Homo sapiens
ggagccgttattggctgccgttaaggaccgttacgtttcccggctgaagaagcatctgtagggaatccagaaggagcgttcatgaagatg

SEQ ID NO: 788893 - DNA, 136 bp, Homo sapiens
aggagtttcatggcctggtgaacagcagcggccgctgatcggacgctccccctctgtctctcacactcagggtatgacgctgggcgggatggcttcatcgacctgatggagctgaagctgatgatggagaagctgg

SEQ ID NO: 788894 - DNA, 100 bp, Homo sapiens
aggcaagcgcagggggacggggaccagcagctgtcgccgccgctctcaggtttatcttgcagattatggactttcctacagatattgtcccaatgggaac

SEQ ID NO: 788895 - DNA, 90 bp, Homo sapiens
cctcgccttcaggatgaaagctcagggggaaaccgaggcaaaagcgaaagcttcggatctacatttccaatacgttcagtcccagcaagg

SEQ ID NO: 788896 - DNA, 80 bp, Homo sapiens
tccccatcctgcacttccgagccgcccggccacccttcgtcatctgcgtgaagctggcatgttatttgaaagcaattgag

SEQ ID NO: 788897 - DNA, 75 bp, Homo sapiens
caaactgcgcaggagtaaggcaggaaaccgacgagaggacctcagctccaagagaaagcgtcgtggtggagcaat

SEQ ID NO: 788898 - DNA, 100 bp, Homo sapiens
acctcagccaccgagaaggctacggcaccatgtacatgaagacacggcttttccaggtggtgatgatgtccagcaactctgtgaagcaggagaagaggag

SEQ ID NO: 788899 - DNA, 75 bp, Homo sapiens
agggaaggagacggagactgagtacttcgctgctctggtctcattcaggaacgtcgcctgataacactgcaccac

SEQ ID NO: 788900 - DNA, 51 bp, Homo sapiens
atattctcaggcacagagaaagatacgtgcttttcaacatgccttcagcac

SEQ ID NO: 788901 - DNA, 100 bp, Homo sapiens
ccacaatgaagcagtcggacgcgtctccccaagaaagatgggcaccaacaaatgcgccagccagtcgggcatgactgcctacggcacgagaaggcatctc

SEQ ID NO: 788902 - DNA, 98 bp, Homo sapiens
acaatggggaaagcttacagactgtgtggtaatggcacaattgacttccctgaatttctgacaatgatggcaagaaaaatgaaagacacagacagtga

SEQ ID NO: 788903 - DNA, 100 bp, Homo sapiens
catggcccagcagggccagcaggggcagatggcaagtggagacagcaatctcaacttcaggaaataatgaagatgtttcattttcaagaccagcagatct

SEQ ID NO: 788904 - DNA, 87 bp, Homo sapiens
ggactttacagctttgatcgatttctgggataaggtactcgtcctcacaagtgcccagactgcgacatggcctttgtgaccagtgga

SEQ ID NO: 788905 - DNA, 82 bp, Homo sapiens
cacctccattggatttaaaagacagtcctcgtcagcactgactttcagctatggaatcggtcttccccagggaggtcctgaa

SEQ ID NO: 788906 - DNA, 50 bp, Homo sapiens
gaggacctggccaaggggcctgacttgatggggaagggatccttcaagta

SEQ ID NO: 788907 - DNA, 100 bp, Homo sapiens
cagccttggtctgagtggactgtcctgcaggtgtattgtacgagcattgaaagatccaaatgcatttctttttgaccaccttcttactttaaaaccagtc

SEQ ID NO: 788908 - DNA, 83 bp, Homo sapiens
tgaaatcgacacacaaagaatagagttgagcctgtgggacacttcggatcaatgtccgagttaccaccatggatgcagagctg

SEQ ID NO: 788909 - DNA, 100 bp, Homo sapiens
acacatggttaaggaacaggaggaaaccattcagaggcaaaccagccttcgggaacgggtggcaggctcggccgggatggccgctctgactcaggacatt

SEQ ID NO: 788910 - DNA, 78 bp, Homo sapiens
ggagatgctattgcccggctcaaggagatgccgcatcctcgaaggtaccactcctcagagcgaggcagccgggggagt

SEQ ID NO: 788911 - DNA, 100 bp, Homo sapiens
agttccgccatgagctggggcacggagctgtgggctcagtagatgaaggcgtttctgagggcttgcctacacttcaaagcacgtctagcactaatgctcc

SEQ ID NO: 788912 - DNA, 51 bp, Homo sapiens
cagaaacaggttcattcattgtaggtaaccagttaggggccttggtacatc

SEQ ID NO: 788913 - DNA, 100 bp, Homo sapiens
gacgccggcggagacgcgggcgaggtgatgctactaggaggtggagcctttgggaggtgattagttcatgaaagtggagccctcatgattgggattagtg

SEQ ID NO: 788914 - DNA, 83 bp, Homo sapiens
ctactacctgagcagcattgccaagacaatgcagatcttcgtgaagactctgactggtaagaccatcaccctcgaggttgagc

SEQ ID NO: 788915 - DNA, 98 bp, Homo sapiens
gggtcgctggctctgctgctgccgccggcgaaggaggaggcgttgccgggggatggtttagacaacagtgtagcttcacctggtacaggtgacgatga

SEQ ID NO: 788916 - DNA, 87 bp, Homo sapiens
catcaactcggcgccttgggaaccgctcgagcctaccagggtatcactgggatacatcagattggatgccaagcgttcctctgccgg

SEQ ID NO: 788917 - DNA, 83 bp, Homo sapiens
gtcagccagccgcggatggggagcgtgagtggcgaggctgaaggtgatgtggccgccctcaaccgacgcatccagctcgttga

SEQ ID NO: 788918 - DNA, 80 bp, Homo sapiens
tccagcatgaatcccgaataggtatgttagagcccaccaaggaaccactgaaaccactttctgctgcagaaaaaatagct

SEQ ID NO: 788919 - DNA, 99 bp, Homo sapiens
ggtttgtactatcctcggtgctgtggtgcagagctagttcctctccagctcagccgcgtaggaagccatgaatcacccaggccatcttaaactatttgt

SEQ ID NO: 788920 - DNA, 100 bp, Homo sapiens
ctccccgccaggcgctctgaccactctccagcaccagcttccagttagtggatatagcacaccatccccagccaaatgaggacttgggcccagccagtcc

SEQ ID NO: 788921 - DNA, 74 bp, Homo sapiens
tgtccctgctcatccattctcctgccacccccagacctcctcagctccaggtcggagctcttaggcctgctgaa

SEQ ID NO: 788922 - DNA, 98 bp, Homo sapiens
atgctgtaattgctgaacttaaaaagcagtctaaacctgtgaccacccctgaagaaattgcacaggcatttgcaagtaaaatcactggcatgttgttg

SEQ ID NO: 788923 - DNA, 51 bp, Homo sapiens
gtcccagaggcctggaggagcggactggtcctgtccaaaatgcattgctgt

SEQ ID NO: 788924 - DNA, 97 bp, Homo sapiens
aaaagctcaataacttgcatgtccagagagcagacatgaaccgcctcatcatgaactacctggtcacagtggctccggaagcctggttggcattgac

SEQ ID NO: 788925 - DNA, 75 bp, Homo sapiens
ctgcaggcacaagtgcgcattggtgggaaaaacattcctgatgtagatgaagaaggctacagtattaaaccagaa

SEQ ID NO: 788926 - DNA, 76 bp, Homo sapiens
ggaggtgttcgagaacgaccccgagacggatacagacgtccctcaccagtgccagcttggggtctgcagatgagaa

SEQ ID NO: 788927 - DNA, 134 bp, Homo sapiens
agccttcccctcctccaaccaagtttattgtaatgtcatcgtcctccagcgccccatccacccagcagttacagcagatgaatggaacagcaaccatacgatagaaatagagataaatcagactctggaaatac

SEQ ID NO: 788928 - DNA, 75 bp, Homo sapiens
atggcgggcaactgaatcgcacacctcaatctatggctgctgatactttggctgtgaggcaaaaaaggagaattt

SEQ ID NO: 788929 - DNA, 101 bp, Homo sapiens
ggtgtacatcgtgcatggcgtccagaagcttttgagattgctctgccacgagaaagcaacattacagttctcataaagctggggaccccgactctgctggc

SEQ ID NO: 788930 - DNA, 90 bp, Homo sapiens
gttcctttggccacatatatgcgaatctataagaaaggtgatattgtagacatcaagcaggactgatggccgaggggataatgtccccag

SEQ ID NO: 788931 - DNA, 75 bp, Homo sapiens
aaagcactgtatgatacattttctgcttttggtaacatcctttcatgtaaggtggcttcgtcctgttcatcgcca

SEQ ID NO: 788932 - DNA, 48 bp, Homo sapiens
caagaaggatatattgggagctagctgagatgagtgaactgagtgtgg

SEQ ID NO: 788933 - DNA, 96 bp, Homo sapiens
aaatccatgcccgattcagaagaggagccagatcttaccaaggatgaatctcctccgaaacaacagctgcctctccaaaatgaagaattccatggc

SEQ ID NO: 788934 - DNA, 74 bp, Homo sapiens
ggaggagcggcgggcttcagacagttccctgacatcgtggagttctgcgaggccatggccaacgccgggaagac

SEQ ID NO: 788935 - DNA, 100 bp, Homo sapiens
gaataagactgattttatgggaaaattaagcagatgctccagtttgagaaacctggatctgcgatctgtttgtgcttgtactcccagagtacctcatcca

SEQ ID NO: 788936 - DNA, 75 bp, Homo sapiens
accggtttctcccacatcgacctgggagtggacatccgccataacaaggaccgaaaggttcggcgcaaggagccc

SEQ ID NO: 788937 - DNA, 100 bp, Homo sapiens
gggcgcagctggcggagctggagctggagctctcggaggatgcagagcaaagcggcagtccccggacagggatgggctctgaccaggaggacagcaagcc

SEQ ID NO: 788938 - DNA, 98 bp, Homo sapiens
ccgagggtctcagcgggatctggagtcagggagtgtgaacatggctacgcctcttcattcccgtccatgccgagcccccgactgcagcattcaaagcc

SEQ ID NO: 788939 - DNA, 100 bp, Homo sapiens
tagagattatggagcgagccaaactgaagaggagggaggtgctgggaaggctgttggatggggtggccgaggacacggagttgcagaggaagctagacca

SEQ ID NO: 788940 - DNA, 75 bp, Homo sapiens
cgtgcagtattttctgaatcacgaagaaggagagacgaccatcttgcaactagaaaaagatttgcgcacccaagt

SEQ ID NO: 788941 - DNA, 75 bp, Homo sapiens
gtcccggggccgacccggcccgtagtgtggaagcagcttcaggatgcctaaatcaaaggaacttgtttcttcaag

SEQ ID NO: 788942 - DNA, 98 bp, Homo sapiens
ctgagacccggaggaggttcgaagctgagtatgtgacaggctgcctttaatattggttgggaacaaatctgatctggtggaatatagtagtatggaga

SEQ ID NO: 788943 - DNA, 76 bp, Homo sapiens
ggaggaagtctgtatgctagacaaggagggctgtgtggagaagattgggggctggctgaggaaaaatgtgctggtg

SEQ ID NO: 788944 - DNA, 75 bp, Homo sapiens
tcatcattagagaaattagatctgggtgactgtgatctgggacggaagaagtctatagtggctgtggagcccagg

SEQ ID NO: 788945 - DNA, 97 bp, Homo sapiens
ctcgtttggaacaattgttagcagagaagcaaagcttcagtttgcttgcacaacagcaacgccatgaaagagacttggccctcttgaaactaaaggc

SEQ ID NO: 788946 - DNA, 100 bp, Homo sapiens
tgggggcgcatctatgatcatggctgacaaggaagttggtgaaccatctaaagaagagaaggctgtggccaagtatcttcgattcaactgtccaacaaag

SEQ ID NO: 788947 - DNA, 83 bp, Homo sapiens
ggcagaagccgagttcaacatcctcctggccaccgactcctacaagaactgcatgaacttgcccccagacaaggtccagctgc

SEQ ID NO: 788948 - DNA, 82 bp, Homo sapiens
cggaaaaggacgcaaagttctccggcgagaacccagtgacttgattgtaaaaatttacagagcggaatcatatgctggtctc

SEQ ID NO: 788949 - DNA, 97 bp, Homo sapiens
ttatgcccaaaacagagcaagggcaaaagaattccataagattccagctacatatctgacaggtgataagactgactcagaagctacaaatatttac

SEQ ID NO: 788950 - DNA, 98 bp, Homo sapiens
ttttcggttgaagtgatgcacaccaccaacattcttggcattacgcaggccagcaactcccagctcaatgcaatggtcctccacttcttccaccttgg

SEQ ID NO: 788951 - DNA, 100 bp, Homo sapiens
aggatgaaagctcagggggaaaccgagggtcttggtcttgatgccaagtttgggaaaggagctaagaagacatcccactaggaagagagagactacctcc

SEQ ID NO: 788952 - DNA, 101 bp, Homo sapiens
ggcaacgcattcaagaaagccgacccccaagcaaacggggattcagcgtccgatcctttggaacagggactcacgtgaagcttccaggaccagctcccgac

SEQ ID NO: 788953 - DNA, 83 bp, Homo sapiens
ggagaagtttttatcaacaaaggcaaaggattcggatttattaagcttacttaggagaaaactctggtattggaaaacttttc

SEQ ID NO: 788954 - DNA, 80 bp, Homo sapiens
agtaatttagtgggcgtgactataaatattcatactggagattgggtacgaaaagctgtttgtgatatagggtctgcctc

SEQ ID NO: 788955 - DNA, 76 bp, Homo sapiens
gaaggcttttggacaagtgggtggagctgagggcaggggagttcctgcgcctctgggagcagttcagtgacatggg

SEQ ID NO: 788956 - DNA, 74 bp, Homo sapiens
gtcgtcaacaagatggtgagcatgatggagggtgtcatccaggtgttggggatgtcctttgcactgaccctgaa

SEQ ID NO: 788957 - DNA, 74 bp, Homo sapiens
tttgtgcccatcaccagctctacagcctcagtccaaggagttcctctagaatcatcaaataatgatattttcct

SEQ ID NO: 788958 - DNA, 50 bp, Homo sapiens
cgtgtgtccaggcgtttgccgctcaccatggatgatgatatcgccgcgct

SEQ ID NO: 788959 - DNA, 101 bp, Homo sapiens
gaaatagtaaccctgccaaatacatcagcttgtaggagacagaggaactttatattgctgttggaatatctggagccatccaacatttagctgggatgaaa

SEQ ID NO: 788960 - DNA, 100 bp, Homo sapiens
gtcctagaattgatactcagcagctggaccggcaaattaaagcaattatgaaagaagtcattccttttttgaaggatgacgtcatgatgccccagcgggt

SEQ ID NO: 788961 - DNA, 100 bp, Homo sapiens
cagtgttctagaagagtgtgaacagaggaagtacacatcggtttcccttccagccattggaacaggcagttatacttaagcatgaacattgacgacaaac

SEQ ID NO: 788962 - DNA, 75 bp, Homo sapiens
gtcagtccctaggtatccgcactgctcaggggcagtgctcggaatgtgaccaggcagggagcagtgacatggaag

SEQ ID NO: 788963 - DNA, 100 bp, Homo sapiens
acacttatctacaagtctttttacatttaagacaagtggatgtcatagatgctgctaactgttcctcggctgatcgttttgtgacccttctgctgcctac

SEQ ID NO: 788964 - DNA, 100 bp, Homo sapiens
gtgaaaatgatatcgtccatctccctagagggcatccgcttcgatcctgaaattccgcaaacactacgactagagtttgctaaggcaaacacgaagatgg

SEQ ID NO: 788965 - DNA, 71 bp, Homo sapiens
agtcttcagaattcattaaatggatcttctgctggcaggaggaatgccagctcctgagcaggcctcattgg

SEQ ID NO: 788966 - DNA, 104 bp, Homo sapiens
gacaggacgttggggcggcctggctccctcagattgtcctaaagcagttggatgggaaaagaaccagaaaggaggcatgggaccaaggatggtgaacctcagtg

SEQ ID NO: 788967 - DNA, 100 bp, Homo sapiens
accaagagaaaaaggtctctgtttatttagaagacacagactaacaattttagatgactggcatcagtactatgacatagtttatatgaagcctcatggg

SEQ ID NO: 788968 - DNA, 74 bp, Homo sapiens
gccacaagagcgaggagaagcgagaaaagatgaaacggaccctaaggccaatgatgaggccaatcagagtgata

SEQ ID NO: 788969 - DNA, 105 bp, Homo sapiens
gagagacgcacagctaagatgtcaggacatcctggaagctgggaaaggtcctcaaccactgaagaagaagcttgatgcttggctgtcagaagacatgaattacgc

SEQ ID NO: 788970 - DNA, 100 bp, Homo sapiens
atgtaaccctagccaggtgaatggctcaagagcctggcccaactagagaatctgtgcaaacagctgtatgaaaccacagacacaaccactcgactccagg

SEQ ID NO: 788971 - DNA, 74 bp, Homo sapiens
ccaggcgttgcagaggcgcttcgccaagggggtgcagtacaacatgatgaacggcagcagccactcaccaacag

SEQ ID NO: 788972 - DNA, 75 bp, Homo sapiens
gtttactagatttgttcctaaatttaagatcgtctatgcggaaagacctctcacagacaaccacagatcattggc

SEQ ID NO: 788973 - DNA, 111 bp, Homo sapiens
ctacggaccttaaaatacccgcaacagccccttcgtcccaagaaagaccacagcaagattctttcattcgtctcctcctagcctgggggaccaggctcgaactgaccctgg

SEQ ID NO: 788974 - DNA, 75 bp, Homo sapiens
ggcatcactgcagctagtaatttgccttctggattccttggagtagaaccagtggataaagatgtcattcgtaaa

SEQ ID NO: 788975 - DNA, 116 bp, Homo sapiens
aaggccacaactctgcagtggaccacagcattcctgaaatacatccaggaaagacatggagattctcttaaaaagaaactggcgatggaatatgagaggagccctctggaaagaaa

SEQ ID NO: 788976 - DNA, 100 bp, Homo sapiens
ctggacatctgtagctgtcgtttggtttgatcttgttgactatgaggaagttctagactccgccaactgtgaattgcctttgttaaccccgtgcagcaag

SEQ ID NO: 788977 - DNA, 99 bp, Homo sapiens
cctgtgtcattttttaccaatcttcttttctgtgatgacagaaaaaactggcactgttgaagcatattcctcactggaatgtgaagtaacttggcagca

SEQ ID NO: 788978 - DNA, 100 bp, Homo sapiens
tagtggtacaaaccattacagcacctcttcctgtacgcctcctgccaacgggacagacagtataatggcttgctgtgcaccccatgcctgggtccctgtc

SEQ ID NO: 788979 - DNA, 100 bp, Homo sapiens
aaacttcagaatgctgtttatagtgaactgagtgtggaagctatgcgaaattatttaaaagagcgaggggatcaaacagtacttattcttcatgcaaaag

SEQ ID NO: 788980 - DNA, 82 bp, Homo sapiens
ccgacccgcgaacccctctgggatccccgccgctctgtctacaacccgagatggagaaggaggagacaacccgggagctgct

SEQ ID NO: 788981 - DNA, 98 bp, Homo sapiens
gagtacgataccgaagcgggctgtgtgccccttctccacccagagtgatgctattgctgagattagagccatttgtattgaagaaattggagtatgga

SEQ ID NO: 788982 - DNA, 83 bp, Homo sapiens
ctggtgctgctggtggccaacattttgcggatactcttctgctgtttttggaaggaagaaagatggaaagcggtgcagttctg

SEQ ID NO: 788983 - DNA, 89 bp, Homo sapiens
ttcacactgggtgaaggaagctgaaaccacagacatgactgagtcctccatgaagagtgccatcgcctgcaggattctttattcagctc

SEQ ID NO: 788984 - DNA, 82 bp, Homo sapiens
gcgggtgtggacgccactacagttcatcaacatcaactacgtccctctgaagtgcacagccagagaacaacacatcacacac

SEQ ID NO: 788985 - DNA, 100 bp, Homo sapiens
tactccaagcaagatctcagtcagagtaggaaataattttcacaaccttcaagaaattcggacagaacaatggcagcccgagtacttataattggcagtg

SEQ ID NO: 788986 - DNA, 100 bp, Homo sapiens
gatgtctcgctccgtggccttagctgtgctcgcgctactctctctttctggcctggaggctatccagcgtaactaaatgaccatggaatctggagccgag

SEQ ID NO: 788987 - DNA, 75 bp, Homo sapiens
cgctgctcttgctgacgtgcctgacgtatgctgcaccaccaccgcctgtgctgatgcaccatggagagtcctccc

SEQ ID NO: 788988 - DNA, 100 bp, Homo sapiens
cgaacttgcgacaagttgccggagccgcggggcgcgggcggcggacagattgaccttcagagcgagattcttcgctgctgctgccttaccgccgagaacc

SEQ ID NO: 788989 - DNA, 100 bp, Homo sapiens
gcatcgaggcaccatgggcgcgtgtggacgaaatgaggggctacgcggagaaggaccgcaagtacactctaaccatggaggacttgacccctgccctcag

SEQ ID NO: 788990 - DNA, 100 bp, Homo sapiens
gtctgcggaagtgcagctgcctcagttcttagcgcagagggtgatgagacaggagtgatggataatctgctggaggccttgcagtccggggctgccttcc

SEQ ID NO: 788991 - DNA, 100 bp, Homo sapiens
ggaggcgacagcgccggagcagcatgcttgagagttcaaaccggcttgatgaagaacacaggctaattgccaggtatgcggcaaggctggcagcagagtc

SEQ ID NO: 788992 - DNA, 82 bp, Homo sapiens
acccagaggagcaatgatgtagccacctcctaaccttcccttcttgaacccccaggagctctttgttcaatgcctagccacc

SEQ ID NO: 788993 - DNA, 50 bp, Homo sapiens
gcacttgggtcccacagtctggtcctcatcaccgggggcatcgtggccac

SEQ ID NO: 788994 - DNA, 75 bp, Homo sapiens
ctgggagggcaacgagcacaacaggagctacgaggagttgatgccggtggccgtgggtccctacggacagtccca

SEQ ID NO: 788995 - DNA, 122 bp, Homo sapiens
agaaagtgaaccagtagtttggagaggccttatggtaatgtcggccattgagaaattgttgaggcaggagcccctcaatagtgaagatgatgtgagtgatgaggaaggacaggaactctttg

SEQ ID NO: 788996 - DNA, 100 bp, Homo sapiens
cggcagtcgcgaagcagcaaccatggtgaggaagcaggcagtgggcgagaagatggattcctttttggacagacaagaccagagagtgaagcgggaataa

SEQ ID NO: 788997 - DNA, 100 bp, Homo sapiens
ctggagtctgcgaaggccgggacccggttccccggcccacagtgggggtgtgcaaacccgagagaactgggtctggtccgagagcaggaggctgggctgc

SEQ ID NO: 788998 - DNA, 75 bp, Homo sapiens
agaagtcattttaaactatggacgactccgaggaacattgaggcagctccagcaagtatcaatcccattgctgga

SEQ ID NO: 788999 - DNA, 100 bp, Homo sapiens
tcgaagcgggaagatggctgcagacaagcctgcagcttttggaaagaacaaacagtggatttgaagaatcagattctggtgctactaagagtccactcca

SEQ ID NO: 789000 - DNA, 82 bp, Homo sapiens
tgtcctggacccagctgagcgggcggtcattcgcatcgcagctctacgaactcgacggggaccccaagaggaaggaattcct

SEQ ID NO: 789001 - DNA, 130 bp, Homo sapiens
cggagaagcgcacagacaagatcttcaggcagatggacaccaacaatgacggaagcgccgcggagccatcaacagcaagcagctcacctacctggagaaataccggcccaaacagaggctgcggttcaaa

SEQ ID NO: 789002 - DNA, 74 bp, Homo sapiens
cagtactaccaaggacagcttttttcctgcaaggtgacaaacagcatgtttggtgcttcaagaaagaagtttgt

SEQ ID NO: 789003 - DNA, 82 bp, Homo sapiens
gcaatatttcgagcagtttggcaaggctgctgagcttcgtgcttatctgaaatctaaaggagctgagatttcagaagagaac

SEQ ID NO: 789004 - DNA, 100 bp, Homo sapiens
tctctggaaacctggaaggagaaggcttcatccttgggggagttttcgtggtgggatcaggaaagcagcactatggagatgaccgccatggccacggagg

SEQ ID NO: 789005 - DNA, 100 bp, Homo sapiens
cgagtccctcttcactttcctcggcaagaaatgtgtgatcacagattctgctggccatattctctactccaaagaggatgcaaccaaggggaaatttgcc

SEQ ID NO: 789006 - DNA, 100 bp, Homo sapiens
aaaagatctcgatacttgaggaaccttcaaaggcacttcgtggggtcacagtggacaagcgcaaccaagcctaaaggcaagtgctgttgcgaggtcgaca

SEQ ID NO: 789007 - DNA, 100 bp, Homo sapiens
ctcggatgtctggtggggcggagcagacacagactatgcagatgggaggaagtgtttggattgtgagctatttcagaactgttctcaggactcattattt

SEQ ID NO: 789008 - DNA, 83 bp, Homo sapiens
ctttaagaaaatcagataacttgtactggagagaaatcctacaagtgtgatcttcctcagaactgtgatcctaacattcccct

SEQ ID NO: 789009 - DNA, 101 bp, Homo sapiens
agagagtgggagagagagaggcagagagggagagagggagagtgacagcagcgctcggtactccaaagattcaggtttactcacgtcatccagcagagaat

SEQ ID NO: 789010 - DNA, 75 bp, Homo sapiens
cccccccgcgcctgcacttagccccgcgcccgagatttggagcaagaggtggtggtggccttcccccgaagaaat

SEQ ID NO: 789011 - DNA, 158 bp, Homo sapiens
agtggacaagaagagagacaagattgaaaggaagatccttgacagccaagagagagcgttctgggacgtgcacaggcccgtggatgatgaagtggttctgcagtgcaccgcaaccatccacaaagaacaacagaagctatgcttggcagcagaaggat

SEQ ID NO: 789012 - DNA, 120 bp, Homo sapiens
tggtctgctggtgggactcaatgttctcgatgccaatctctgcttgaaaggagaagacttggattctcagaaatggtggagtcaatgaagaaagtagcagggatggatgtggagctgaca

SEQ ID NO: 789013 - DNA, 100 bp, Homo sapiens
tcccagaactggagattgacgtggatgagctcctggacatggagagtgacgatgcccgggctgccagggtcaaggtcttaaccatgaacttctctggagg

SEQ ID NO: 789014 - DNA, 51 bp, Homo sapiens
acagcaccgataaccctgacctgtgacaaagatcattccactcagcctggg

SEQ ID NO: 789015 - DNA, 51 bp, Homo sapiens
cccccgccacgcgaggctgcggcgcacggaattactctgcttaatgtaagc

SEQ ID NO: 789016 - DNA, 142 bp, Homo sapiens
ccgcaaggagatccagctcctgcagatggccaatgagaaagccctgaagcagaagggcatcaccgtgaagcagaagagcttatgttcctgaggaagaattgaaggcagcagaaatagatgaagagcacgtggaggatgacgg

SEQ ID NO: 789017 - DNA, 100 bp, Homo sapiens
ctgaactcaacttctgaaatttacagaaacaaactacatctcagggtcagaaagcaacattgaatgcagaagaaatggcggacttctacaaggaattttt

SEQ ID NO: 789018 - DNA, 97 bp, Homo sapiens
gtatcttatacttgtgccttggaattcaacaggagcagtttttgcaagaaaggatcaaagtgaacggaaaagctgggaaccttggtggaggggtggt

SEQ ID NO: 789019 - DNA, 89 bp, Homo sapiens
gatccagaagtccagagctgaggactgcctgtttgcagcaggggaacaggaacctgataaagaatcaggagcctcagtggatgaagtag

SEQ ID NO: 789020 - DNA, 75 bp, Homo sapiens
cgcccgtccccctgccccgttcacaatgagcgcctggaccatgctgctgagcgcctactggcacggcctccaccc

SEQ ID NO: 789021 - DNA, 74 bp, Homo sapiens
ttagctccagttcgctctagcagacaagatcagatccacaggcccgggtcctttttgtgctgattgtgctgagc

SEQ ID NO: 789022 - DNA, 154 bp, Homo sapiens
tggaggcagggaccagcacgatagacctttggtggaggcagaaagcacattaccccaaaaccggtatacacaggtttccacgctttgagaaggactgaatgagatcatgcgcatggcagcttctctaggatagcaccctgcgtgaacacagtag

SEQ ID NO: 789023 - DNA, 51 bp, Homo sapiens
gacagaacgaaaagaagccctccgagcaccaatgttgttatgaattattca

SEQ ID NO: 789024 - DNA, 75 bp, Homo sapiens
ccaaccacgccgtggcagaggaacccgcgggcacgccataaagaatgctgatgggagaaccattttcctaatttt

SEQ ID NO: 789025 - DNA, 95 bp, Homo sapiens
cactggccctcatgctaggcaccagcctcatctattggaccctctttacactgggcctggatctttcttgggagaaggctctggccctcacaggg

SEQ ID NO: 789026 - DNA, 134 bp, Homo sapiens
ctggaagacacaacaggggagcagttcctcacttatcgctatgatgaccagcatacagagctaagctaggaatgctgaacactgtgtcgaagatccgagggcaggtgaagaccacaggatacccgcagacggaa

SEQ ID NO: 789027 - DNA, 96 bp, Homo sapiens
agctcaaggagcaggagctggccagtgaggtggtggtgaagaacctgcggctggtattaataggggaccctattaccacatgtctttctccctcag

SEQ ID NO: 789028 - DNA, 82 bp, Homo sapiens
gaagagtggattatttggtcactgaggaagagatcaatcttaccagagggccctcaggtcagcccaaggccaaccccactgt

SEQ ID NO: 789029 - DNA, 83 bp, Homo sapiens
aatcgggctgaagcgactgagtccgcgatggagcacttgcacctcctgcgccgccgccccccatccaaggatatgccttcaag

SEQ ID NO: 789030 - DNA, 50 bp, Homo sapiens
gctgaaccttcaagaatacaatgaggacggggacttggttgccttttcca

SEQ ID NO: 789031 - DNA, 87 bp, Homo sapiens
gaaacgcatgaccgaaaatcagaagacaaacttgccaaagctacaagagacaggctgctctttggcgtaaattgcaatcgattaggg

SEQ ID NO: 789032 - DNA, 101 bp, Homo sapiens
tggagctgttgggcatgtggatgaactcccagatggacgtatcatcaaagttgggggagagagatttgaagcaccagaagctttatttcagcctcacttga

SEQ ID NO: 789033 - DNA, 100 bp, Homo sapiens
cccggagcagccgccgccgcagcgcgaacatggacgccgtcaacgccttcaaccaggagggggctagagagctgaaggagagccagtttccccaaaattg

SEQ ID NO: 789034 - DNA, 83 bp, Homo sapiens
ctgaaaatcaccagttccgtgctccattatgtcgtgtgcttccccgccaagaaggatcaagaaggtggagaagaaaagaaatc

SEQ ID NO: 789035 - DNA, 100 bp, Homo sapiens
accactgtgacatatggtttagacagttcaagaaaatattggcaggttgaaatcacaaagattagacacctttttagataggtgttcttcagcaccactg

SEQ ID NO: 789036 - DNA, 100 bp, Homo sapiens
caatatgaacgagaaaaagtgttgttaactgaagaaaataaaaagctgacgagtgaacttgataaggttgtttcacgaagaaatccagaggatgtccagg

SEQ ID NO: 789037 - DNA, 133 bp, Homo sapiens
gctggctcagtacatattcaccttgaagaggaagacggggcggaagaccaagatcatcgagatgttactggggcttccggatgcagatgacgatgcgtttgaagagtacagtgctgacgtggaagaagaggag

SEQ ID NO: 789038 - DNA, 82 bp, Homo sapiens
ctccgtggccttagctgtgctcgcgctactctctctttctggcctggaggctatccagccggggatctgacgagcttttctc

SEQ ID NO: 789039 - DNA, 51 bp, Homo sapiens
agaactgccaaaggccctgcaaggacaagataacaacgaacttgatgcaag

SEQ ID NO: 789040 - DNA, 98 bp, Homo sapiens
gtgtctcttctaagctgaataaagctgttttggaactgtcaggtacctcaaagccatgtggagagggccaaatgtgaactgtgttgacagcactggct

SEQ ID NO: 789041 - DNA, 80 bp, Homo sapiens
ttgagaaagaatttgagcctctgctgaattggatgaaagataaagcccttaaggacaagaaaatgatgcatcctgttgcc

SEQ ID NO: 789042 - DNA, 98 bp, Homo sapiens
aacagagatggcggggagagacggccaagcagcaccagcgtgcctttgggtgataagggcggttgctgatgctattagaacaagccttggaccaaaag

SEQ ID NO: 789043 - DNA, 101 bp, Homo sapiens
ctttcggggcatgtacaatcagaggtgaagctcgtgtgtggagtgccacggtacaatcagacgacagatggacagtgtgacaaaagtgtcagaaaggattg

SEQ ID NO: 789044 - DNA, 82 bp, Homo sapiens
tgcgggctgagcggcgagtttccgatttaaagctgagctgcgaggaaaatggcggcgggagcagcgtccgtctccaagagag

SEQ ID NO: 789045 - DNA, 75 bp, Homo sapiens
cgccgccccctccggcgtgttcatgcccccggggtgatgctgggaggttcctggttacagacactggaggctagt

SEQ ID NO: 789046 - DNA, 72 bp, Homo sapiens
gcgaaggaggcagaggcacttatgcttgtcagctctgaacagcaacatggggtgcaaagtcctgctcaacat

SEQ ID NO: 789047 - DNA, 82 bp, Homo sapiens
tctcatctcgctcggctgcgggaaatcgggctgaagcgactgagtccgcgatggaggtgacgcggcgcacggcgcggatggt

SEQ ID NO: 789048 - DNA, 100 bp, Homo sapiens
aggagaagatgcaattaaaaacttcagagcaaaacatcactgtaattcttgctgtagaaagcttaaacttccagaaatgcactcggtgatggaaagagag

SEQ ID NO: 789049 - DNA, 109 bp, Homo sapiens
ctgccctcctgtcaagcgagaaagaacatcctctttaacccagttcccaccctcacagtcagtaacctttggaaacatcagaagctactctccattgacctggacaagg

SEQ ID NO: 789050 - DNA, 75 bp, Homo sapiens
tctgggtcctcggtcggtacagtctctgcacctcgcgccccagcagattcttattgccaagtcccctctggctcc

SEQ ID NO: 789051 - DNA, 74 bp, Homo sapiens
accaccctcgtgtctgccaccatcttcgacttgagcgaagttttatgcaaggtgctggagaatctggtaaaagc

SEQ ID NO: 789052 - DNA, 75 bp, Homo sapiens
tggaaacatgagcattcagtttcttggtacagtgtatgcagatctcaatcgccacgtggatgccttgaatgcgtg

SEQ ID NO: 789053 - DNA, 82 bp, Homo sapiens
cagggaggctgtcgtggcagtccatcaaggggacccacctcaccatcacccagggttggttcctgtataccttgggccagag

SEQ ID NO: 789054 - DNA, 100 bp, Homo sapiens
cgacgaggagcagggcctgactgcgcaggttccttgtggagaagcactggtataagcagtgggaggcatacgtgcagggaggggaccaggactccagcac

SEQ ID NO: 789055 - DNA, 75 bp, Homo sapiens
tccagcagctgtgaaattgacttaccaagatgcagtaaacttacagcctcggaatgctgctcgaataagtgaaaa

SEQ ID NO: 789056 - DNA, 99 bp, Homo sapiens
ctcgcttcgccttgctgctgggaaactgaacgaggccgagagagaaggaaccagggaaaatgtgtagagggcatggtggagatcttcgacatgctgctg

SEQ ID NO: 789057 - DNA, 100 bp, Homo sapiens
ctggtacggaagatcgggtctggctccttcggggacatctatttggcgatcaacatcaccaacggcgaggccacggatcctggagatggacaaggaagag

SEQ ID NO: 789058 - DNA, 90 bp, Homo sapiens
cctttttatagccagaatccaggatgattatgtacttgaagtgaggcactttcagtgtcctaaatggccaaatccagatagccccattag

SEQ ID NO: 789059 - DNA, 80 bp, Homo sapiens
atttcatactccctctggaataccttgggcattgctgaatatgaaaagcgcaaatctgtccaaggctgcctggggagcat

SEQ ID NO: 789060 - DNA, 82 bp, Homo sapiens
gagaaacaggcgccgcgggctccgcgcccggccggacccgggcccgagcgagcagctgatgcagctgtacagtgcgcgccag

SEQ ID NO: 789061 - DNA, 100 bp, Homo sapiens
ggcggggagtttgtcaccaccatcgcatacagcatccggggacagctgagctggcatcagaagacctacgccttcagtgtgattctggagagtgaccccc

SEQ ID NO: 789062 - DNA, 82 bp, Homo sapiens
tcccggaccgggccgcgcacgccgcctcagagacgtctcccacaacctgctccgggcgctggacgttgggctcctggcgaac

SEQ ID NO: 789063 - DNA, 75 bp, Homo sapiens
gcgagcaccgggaaggggagcgtggggccgctgcaatggctgccatccggaagaaactggtgattgttggtgatg

SEQ ID NO: 789064 - DNA, 100 bp, Homo sapiens
gaagcggagaaaccgctcccgtgaccgaaagaagaagcctgatgaagtcctccgatattgatcaggatttattcacagacagttactgcaaggtgtgcag

SEQ ID NO: 789065 - DNA, 82 bp, Homo sapiens
ctccgcgtcccgctcgctgggagagagatgaggacggggacttggttgccttttccagtgacgaggaattgacaatggccat

SEQ ID NO: 789066 - DNA, 111 bp, Homo sapiens
gtcgcgtgtctaggtgagtcgcggtgggtcctcgcttgcagttcagcgaccacgtgtactaatggtcacttgatgtgcgctggctgttttatccacctactagcagatgcc

SEQ ID NO: 789067 - DNA, 75 bp, Homo sapiens
ccgatgaggacatgtgggatgagacggaattggggctgtacaaggaatgatgagaagacagcagctgattacaag

SEQ ID NO: 789068 - DNA, 75 bp, Homo sapiens
ggcgaacccgcggcgcaataacgtgaggatgaggatgatgaccttcagtatgccgatcatgattatgaagtacca

SEQ ID NO: 789069 - DNA, 50 bp, Homo sapiens
gagtggatggggacctgcctgctgtacaaaattggacagctgtacatgat

SEQ ID NO: 789070 - DNA, 100 bp, Homo sapiens
gttgtgtttgtgaaacagagaaagataggcggccatggtccaaccttgaaggcattattggagaccatgtttggtgtaaaagtgattataactggggatg

SEQ ID NO: 789071 - DNA, 90 bp, Homo sapiens
gaagtccttatacttcagttgttcagtcagattggaccctgtaaaagctgtaaaatgataacagagccttatgtttacacaacaccgccc

SEQ ID NO: 789072 - DNA, 127 bp, Homo sapiens
ccgggaagagaaagcagtttttggacaacagttccttcacctcagcatttttcatggatttcaaataagtggtgtcatggagaaactccagctgggcccagagattctgcagcgggaaaatccaagg

SEQ ID NO: 789073 - DNA, 74 bp, Homo sapiens
ccggcccacagtgggggtgtgcaaacccgagagaactggtgtgatcttgtggctgggggacctcaactacagga

SEQ ID NO: 789074 - DNA, 75 bp, Homo sapiens
ctccgccgccgcctgaggaggcgagctagccgggagttacaccgccaccgccagaattatatccagatcgagaga

SEQ ID NO: 789075 - DNA, 115 bp, Homo sapiens
gagactaccagaaggcttatgaggatggctgcaagactgtcgacctaaagcctgactggggcaaggatcctggtgaacatggacgacaacattgtgaagcattactccaatgagg

SEQ ID NO: 789076 - DNA, 96 bp, Homo sapiens
atgactgggaagaccacttggcagtcaagattctgagatttatttcagacttccttgcttttttggttctctacaatttcatcattccaatttcat

SEQ ID NO: 789077 - DNA, 51 bp, Homo sapiens
ttgccctgtctcctcgcagatgaggtcaaaatgcagatcttcgtgaaaacc

SEQ ID NO: 789078 - DNA, 100 bp, Homo sapiens
ggtctgaggcagagtgtggttcaatctgaattctacaaacacattgtgctttctggagggtctactatgtatcctggcctgccatcacggttggaacgag

SEQ ID NO: 789079 - DNA, 145 bp, Homo sapiens
gcctgttccgctgcaggttggccccggcggcgggagcgcccccgatccggacaaagaaacgagcgctcgtgctgccgtggtcaacgccattggcctgtacatgcgccaccttggggtgcggaccaagagtggagacaagaagtcg

SEQ ID NO: 789080 - DNA, 83 bp, Homo sapiens
gttcctgcagtaccccactctacgatcaggcagaagagctgtccatcaagctggacccctacatccgcacacagaggagagat

SEQ ID NO: 789081 - DNA, 87 bp, Homo sapiens
ctgtttggaaagacccaggagaagccgcccaaagaactggtccaaccgtgactgccagatcgaccagcaccaccggaaccagtgcca

SEQ ID NO: 789082 - DNA, 90 bp, Homo sapiens
gttttcttatgcttataagagtggaacagattttatttggagagaagcaagcatctttgcctctttggagtaggaaattcagacttgaaa

SEQ ID NO: 789083 - DNA, 83 bp, Homo sapiens
cctgaggagcagaattcaccagagagcagcagccatgccaatgcgatggtcaaaatgcagatcttcgtgaaaacccttaccgg

SEQ ID NO: 789084 - DNA, 98 bp, Homo sapiens
cagtgccaacacggaggataaaatggaggtggacctgagtgaacgaatagcgggttttgcagcaattgttgcatatggattatataaactgaagagca

SEQ ID NO: 789085 - DNA, 75 bp, Homo sapiens
ccggcagcatcctgaatcttaacctgggtgccgtgagcgatgtggagatgcaggaacactatgatgagttttttg

SEQ ID NO: 789086 - DNA, 75 bp, Homo sapiens
ttggaattccattcttttccttattcttctgatgtggatccagctttgtgtccctggtgatgttggaacattaat

SEQ ID NO: 789087 - DNA, 88 bp, Homo sapiens
ggcgccctccgccacgcagccggccaccgccgagacccagcacatcgccgaccaggacggaaagacggcagaagatcttgctagatcg

SEQ ID NO: 789088 - DNA, 75 bp, Homo sapiens
cctcggggtccggaaccagacgatgagacagagttgcgaccgcgcggcagattttaccaaatgttgcaagaactc

SEQ ID NO: 789089 - DNA, 75 bp, Homo sapiens
cagggaggagcagtgaaagagaagggaatgctaagaactgctgggaggatgacaaccagaggaagagtcttcatc

SEQ ID NO: 789090 - DNA, 100 bp, Homo sapiens
tcccagaaggagtgtgggcaacctgcagggtgctgttggcagcagcggtctgcacaaaagcaggaaaggctattgtttctcgacagtttgtggaaatgac

SEQ ID NO: 789091 - DNA, 85 bp, Homo sapiens
caggaggccaggggtgtcgccatgggcaagtgtccagagaatggctgggatgaaagtacacttgaactctttttacatgaacttg

SEQ ID NO: 789092 - DNA, 75 bp, Homo sapiens
ataagatgctcatcccgcagctgaaggagagtctacaggaacaggagtacagctgtgtagtaaagatgccttctg

SEQ ID NO: 789093 - DNA, 100 bp, Homo sapiens
aacacaatcacagcaacagactctcctgcagaccttcccaggaagccagagccacacacaccatcatggtcctggttgttggcatggagccaaggatgag

SEQ ID NO: 789094 - DNA, 82 bp, Homo sapiens
tagaattaggcctctctggaagcattacttccagaatacccaggttgatggaaatcacaatcttctgacaaagctttctctg

SEQ ID NO: 789095 - DNA, 100 bp, Homo sapiens
aaagcatggacaccattaaccacgcaagtcagctggtagagcaagcccatgatatgagggataaaatccaaggcatggatagagtccagtgttctggtga

SEQ ID NO: 789096 - DNA, 144 bp, Homo sapiens
ggatctggtctcctgccagcctgaatgagaaaacaccgaagggacattctgtcttcatggacatttttgaacttgtgcctctactcaatagtccccccagctttgtgtgctggtctcggggcttcatggagatgaatgggcggg

SEQ ID NO: 789097 - DNA, 90 bp, Homo sapiens
ctcatccggaggcaggaccagctgcagctgctgccctcttggactcagaggaagagaatgacagagcttgggatggtcgtcttggggatc

SEQ ID NO: 789098 - DNA, 100 bp, Homo sapiens
atcccaatgctgaagtaagattgtcttggaaatactaagttggatatgattctataacagactcttccagaaatgatatgaagaggaaatttgccctgac

SEQ ID NO: 789099 - DNA, 75 bp, Homo sapiens
caggaagccgtcttcgaactcaggagaagagtaaccagagagcacagagaaatgctggtgaaactggccaaacag

SEQ ID NO: 789100 - DNA, 71 bp, Homo sapiens
aggacctcctggaactggcaaggagcctcacagtctactcagagaaaaataaaagaaggcaaaatgagtcc

SEQ ID NO: 789101 - DNA, 101 bp, Homo sapiens
ggctgatggacaggtgtcccagaccgacgagatgcttgctctgtcaaggcacagcctattgtctcctttgctcagtgtgacatcattcagacgcttctaca

SEQ ID NO: 789102 - DNA, 98 bp, Homo sapiens
cccgtcctggacagcatcagcatcatcgacacccccgggatcctgtctggagagaagcagcggatcagcagagggagaagtctgttggaacttggagg

SEQ ID NO: 789103 - DNA, 100 bp, Homo sapiens
aaatcgcttggttaaaacctgacacttttaacaggtactgtgagaatagagatgtttcgaaatatgcagaatgcagaaatcatcagaaaaatgactgaag

SEQ ID NO: 789104 - DNA, 75 bp, Homo sapiens
ccagaacaaagcattgccagaaaacgttaagccacttccggctcctgcgtcgctccggaagcctgcgagttccgg

SEQ ID NO: 789105 - DNA, 90 bp, Homo sapiens
accagtcttccctggcaagattcttctgaattgtgctgccttggccaaaagagaaaagactgtatcttcaccattgacccatcaaccgcc

SEQ ID NO: 789106 - DNA, 98 bp, Homo sapiens
ctctaccgccgcctcaactgccgcctcgcctactcactctggagccagtgatcagcagctggactgtgccttggacctaatgaggcgcctgcctcccc

SEQ ID NO: 789107 - DNA, 98 bp, Homo sapiens
tgggcctctgagatatgccgtttacgggtgcaagaattgtttatccgtgattatggagagatttttaatgtccagttaccggataaagaagaacggac

SEQ ID NO: 789108 - DNA, 80 bp, Homo sapiens
cagacgcagccgtagacaccagctccgaaatcaccaccaaggagagagcaagccacatcagtgctcctggcagatccctg

SEQ ID NO: 789109 - DNA, 132 bp, Homo sapiens
ctgcctgcctccccccacatccttctctggcaaggggaatgaggctgagaatgacctccatccgcaggacgagatcccaagcactgcaagtccagatgcaacgggagcctggctcaagggacgacaagatcc

SEQ ID NO: 789110 - DNA, 80 bp, Homo sapiens
ggaagttcccgccccggagagcggcgaggcggcagccacaggaagctcttcgtgggcggtcttgactggagcacgaccca

SEQ ID NO: 789111 - DNA, 75 bp, Homo sapiens
gcgattctcccgcctcagcctcccgagtagccgggattatagattgggatcaaagccactcacattaagttacca

SEQ ID NO: 789112 - DNA, 100 bp, Homo sapiens
ctttgttattggagaaacatgcagattatatcgcatcctatggctcaaagaaagatgattatgctcttcgtcagattgggcagaggacgataagcactgc

SEQ ID NO: 789113 - DNA, 74 bp, Homo sapiens
atcgctctcggcctcggcctcggcctccgacacggtctttagtggccttgtcattaatactgtccatgcttctc

SEQ ID NO: 789114 - DNA, 50 bp, Homo sapiens
ccccgtcgtcctggtgctgcagcgaaactggcgatggaatatgagaggag

SEQ ID NO: 789115 - DNA, 98 bp, Homo sapiens
caatgatagatacatcagtgtgggaagccaagcagatacaaatggatctgagaacgctgtctgggcttggtaccaagagctggtatttcacagcagcg

SEQ ID NO: 789116 - DNA, 50 bp, Homo sapiens
cttgccaaaaggatagagattgcagagactaaatgtgttaaatgggcttg

SEQ ID NO: 789117 - DNA, 96 bp, Homo sapiens
ttggaacctggagacaagcccaggaaagcaacatgtgaacagcagagaatttcaaaggaccttgctaatatctgtaagacggcagctacagcaggc

SEQ ID NO: 789118 - DNA, 100 bp, Homo sapiens
ggaatggatcgtggagcagctgggtcagctctacggctgcgaggtcaacagggcctggatgaaggggaagctggagctgctggacacgtggaccagggcc

SEQ ID NO: 789119 - DNA, 100 bp, Homo sapiens
ccgacccgagttatgcccaccctccaactttgcgacggaaatgtgtcatcgaaagccagcacttttccagccattaactccaggctctcgagaatttgaa

SEQ ID NO: 789120 - DNA, 88 bp, Homo sapiens
aggccatggaagaaatgatgatggaaatgaagtataataccaagaaagccccacttggtacaggtttgcagattccgccagcagcaca

SEQ ID NO: 789121 - DNA, 100 bp, Homo sapiens
agatgggcccagtggataagcggaagattttctccctgggccactgccctaaccaggactggctggcggtcggaatggagagtagcaacgtggagatcct

SEQ ID NO: 789122 - DNA, 90 bp, Homo sapiens
gtcttcatccacagatgaacttgctagccttggagaatacagagatacccccgtgagaccaaggaccaggtagctaactcagcctttgtg

SEQ ID NO: 789123 - DNA, 82 bp, Homo sapiens
ggagcgtcatgcctctggaagactggatgaatattctccaggagcctgacgaaggcgttctgactcagaagatcttttggaa

SEQ ID NO: 789124 - DNA, 124 bp, Homo sapiens
caacatttcatgagagaagaaatacaggatgcctctcagctgccacctgcctttgacctttttgaagcctttgcaaaaggctttgaagactgcttggtatttgatgagttaatggataaattca

SEQ ID NO: 789125 - DNA, 75 bp, Homo sapiens
tcttcaattaaaaaatttattaaaggaagcacacctaagtcccagaaatcctggatagaaagcactttgaccaag

SEQ ID NO: 789126 - DNA, 90 bp, Homo sapiens
gcgcgggatcccagcctcaggcgtgcgcggacggtgtgcggacttaattcagtgcacaaatgagatgaatgtgaacatcccacagttggc

SEQ ID NO: 789127 - DNA, 101 bp, Homo sapiens
atattcagattggccagtgtggcaaccagatcggagccaagattctgcctgatcaatgcaggagtcctgtacctctacttcagcaattacctacagattga

SEQ ID NO: 789128 - DNA, 75 bp, Homo sapiens
agcttgacgccttagataacagccatcctattgaagtcaaaatgtgggtacagctcctgattcccaggatagaag

SEQ ID NO: 789129 - DNA, 75 bp, Homo sapiens
gcagcctcaagtcagttgccttttctaagtttgagaaaggtgaagctgtacttcacaaaaacagtagaggagccg

SEQ ID NO: 789130 - DNA, 74 bp, Homo sapiens
gacagccctgtgtgacaccaagataagtaacgagtgctacctggagggtgaccagacgagcctgtaccacgcag

SEQ ID NO: 789131 - DNA, 100 bp, Homo sapiens
agcgactgagtccgcgatggagggaagtgttcgccagttactacatgaaaagataagagatgcttatactcacccacaatttgtgaccgatgtaatgaag

SEQ ID NO: 789132 - DNA, 97 bp, Homo sapiens
aatttaatgaggttttcaatggcatgtcaacatcgctctaattcagagataatctgttgtaccactccttccctgcaacagctgaatctgcaactcc

SEQ ID NO: 789133 - DNA, 100 bp, Homo sapiens
ttctcggatatgccatcctgctccagatcagcaaggattgagtctctggggagcccctcaaaagcctggttatgatgtgattgctcaagcccaatctggg

SEQ ID NO: 789134 - DNA, 98 bp, Homo sapiens
tcagagcgtcacggcgtacgccctcatggggaaaatctccccggtgactttcagatggagtcatcagaacccactgtgaggaagtgacttctccttga

SEQ ID NO: 789135 - DNA, 82 bp, Homo sapiens
tgctgctcggggtccgcgcggcctccgcggagccaggtgtcgtgaaaactacccctaaaagccaaaatgggaaaggaaaaga

SEQ ID NO: 789136 - DNA, 75 bp, Homo sapiens
gagcggatgaggatacagaaggctggaggaaacgtcagcagaagaagatctttacaatccaaggctgctacccgg

SEQ ID NO: 789137 - DNA, 90 bp, Homo sapiens
tgggcgtcctctcaggaggcaagcagactatcgagacaggaccccccaaaccccccaccgagctggagcctgagccggagatagaggggc

SEQ ID NO: 789138 - DNA, 75 bp, Homo sapiens
aaacaatggcatttacagaaagagtcaacagcagtggcaacaggttgaaatcacaaagattagacacctttttag

SEQ ID NO: 789139 - DNA, 100 bp, Homo sapiens
aggtcacagtaaggccaaaaatgtgcatactcacagagttagagagagggatggtgagccctaatttgtttagaactgtaatatgcacagttaaaacaac

SEQ ID NO: 789140 - DNA, 75 bp, Homo sapiens
agctctgcaaagacctacgctccttcatctaatccatggaaaggtctctaattaacagaagatggcaaagcccag

SEQ ID NO: 789141 - DNA, 98 bp, Homo sapiens
ggtgaagcagtgcttcgtggtgactgaaaaagaggctaagaatattgtacacaaagattcttgatgttcttgaggaaatccctaaaaatgcagcatat

SEQ ID NO: 789142 - DNA, 75 bp, Homo sapiens
caagagggatccttcacccgtgtctgattgggaaaatgaggtacgttagtgttcgcgattttaaaggcaaagtgc

SEQ ID NO: 789143 - DNA, 50 bp, Homo sapiens
atcaaagtcaggccttgtgaaaccagtgaggatgaggatgatgaccttca

SEQ ID NO: 789144 - DNA, 75 bp, Homo sapiens
gagcaagcggaggacctacgccggcctggttggaatcgaagcctcttaaaatggcagatgacttggacttcgaga

SEQ ID NO: 789145 - DNA, 100 bp, Homo sapiens
cttgatagcacgtaaaacgctttcaggtcggcgtctcgtttcatcctcacaacagccagccacagtcagacttgttggggcttattcaggtcatgattgt

SEQ ID NO: 789146 - DNA, 80 bp, Homo sapiens
gaagtcacaaaacagcagatttcccaagagcagcggaaaatgatccagtcacaggtgtgatgaatgcagactctgctacc

SEQ ID NO: 789147 - DNA, 100 bp, Homo sapiens
agccatgggacgggcagtcaagcttcttggacacttaatgattgttggcaagaaatgtgctgctgatctgggcctgaataagggttatcgaatggtggtg

SEQ ID NO: 789148 - DNA, 51 bp, Homo sapiens
tggacagagtgcgctgtcagcacgggtacgcagcccgggacaagagcaagc

SEQ ID NO: 789149 - DNA, 100 bp, Homo sapiens
ggtggcagcgatccgcgggctggcgacgtagaggaggacgcctcacagctcatctttcctaaagacgcatcttctctccagactgccgatcccagaaagc

SEQ ID NO: 789150 - DNA, 72 bp, Homo sapiens
gacagaactacagcggttactccagttatggacaaagttaattccaccatccccatcacagcagaagttttc

SEQ ID NO: 789151 - DNA, 100 bp, Homo sapiens
atgccattccagcactggactcatggaggctgagcatttattcaggccatggaggaattgcaagaccaagagggctgggaatatgcttctctaattggct

SEQ ID NO: 789152 - DNA, 95 bp, Homo sapiens
gtgacttcactgtttaacaaagatgatgagcagcatctcctggaaagatgtaaatctcccaagtccaaagggagtcctaagcagacttaaagcca

SEQ ID NO: 789153 - DNA, 75 bp, Homo sapiens
atagctcaagttcttaaaagttgcgttgtaataaacctgaggattctcaaagttggattggtggaaacaatgaac

SEQ ID NO: 789154 - DNA, 90 bp, Homo sapiens
cattcctttaaatccggagggggaaaaaatcccaaggtctgcaaagaaatgcactcggtgatggaaagagagccactattctgaagaaca

SEQ ID NO: 789155 - DNA, 108 bp, Homo sapiens
accccaagaagaccattcagatgggatctttccggatcaatccagatggcagccagtcagtggtggagtctgaagatgatgagaaactgaaaaagaggaaggagcgat

SEQ ID NO: 789156 - DNA, 89 bp, Homo sapiens
gcaatgggaaagaactatgtgaatgggaagactttccttgagaaaagcggaaagtgaccagaagaggtgtgcagtttccaggcctggcc

SEQ ID NO: 789157 - DNA, 83 bp, Homo sapiens
caaactcgagttctccttcaaggtcaaaatgcagatcttcgtgaaaacccttaccggcaagaccatcacccttgaggtggagc

SEQ ID NO: 789158 - DNA, 96 bp, Homo sapiens
gaggagccgggcgcaatggagcggaagagtgcaccgtccaggtgaggttagagctggggcatcgcgcccaactgcgcaagaagcccaccacggagg

SEQ ID NO: 789159 - DNA, 73 bp, Homo sapiens
gccgctgctcgagctgctgctggattgaactcagagaagccggggtgagcgaagcaggtgttcacagacccca

SEQ ID NO: 789160 - DNA, 82 bp, Homo sapiens
ctttgccgtacccaccggagcctggcgcagcctccctctattaccagtgcctccggagccagcgtggtggccatagacaaca

SEQ ID NO: 789161 - DNA, 100 bp, Homo sapiens
caaaaattacttggagcaaagggcagtcggcggagcttcgccaaggctggcgcagtcgggattttatattggaagacatggatcttgctgccaacgagat

SEQ ID NO: 789162 - DNA, 100 bp, Homo sapiens
gggggcggcggccgaacgatgtgcgagaactgcgcagacctggtggaggtgttaaatgaaaatcttagcaaagcaatgtctcaagatggtgcttctcagt

SEQ ID NO: 789163 - DNA, 100 bp, Homo sapiens
gattgtgatgaattgtgctgatattgatattattacagcttcatatgcaccagaaggagatgaagatccacagaccagcatggctgccactgctgctgtg

SEQ ID NO: 789164 - DNA, 100 bp, Homo sapiens
atccgaggacatgttgacgtcgtccgagagtcttaaaatcctgctctggccggattccagactcgtgggggaaaggctgatggagactcgctctgttgcc

SEQ ID NO: 789165 - DNA, 99 bp, Homo sapiens
gccacatcaacagggatgcccccggccgggagcagaagtacatgctggggaccaatcaccaactcacgtacaagttgtgcaaagtgaggaagattactg

SEQ ID NO: 789166 - DNA, 74 bp, Homo sapiens
ttgtctgcttcaagccctggctcaaaatagcaagacatctgtatagattctgcttcatccgtgagagagaataa

SEQ ID NO: 789167 - DNA, 75 bp, Homo sapiens
ttcaactggcggaagacctcaaaatgaccgctccttcatctgtcctgcagaaggttgtgggaaaagcttctatgt

SEQ ID NO: 789168 - DNA, 100 bp, Homo sapiens
ggacgtgtctgcttccactcctgccgtgattgtcagcttcctgaggtctcctcagccatgctgaactatatggagattaatcaccaacttcttatttttt

SEQ ID NO: 789169 - DNA, 75 bp, Homo sapiens
gcctgggtttgaattgtgcggtttcaggaaaatgctgtccagtggggtgtgtacatcaactgttcagcttcctgg

SEQ ID NO: 789170 - DNA, 100 bp, Homo sapiens
ccttggcctcctcctgctgctactgtgtccagcgcaggacggcccacctccatggagacggcccacggcctcgccaccaccagccccacctggcctccac

SEQ ID NO: 789171 - DNA, 100 bp, Homo sapiens
tcatggatgttcttcttcgagtatttgtagaagggtgctgatattcgtggcttcagtgctcctaggacatttggccttacactgggacatgtagtagatg

SEQ ID NO: 789172 - DNA, 74 bp, Homo sapiens
tggagtgccagtgaatgataaagacgatattcaccaggacacgagactcacccaacatgtgcctctgctcaaaa

SEQ ID NO: 789173 - DNA, 96 bp, Homo sapiens
gggaacagaggtgtttaccatgacgataagcaaccagcatttagagctgtttatgaagcactgagaaatgtaaatgggcaatgtgctggccacaca

SEQ ID NO: 789174 - DNA, 75 bp, Homo sapiens
gaaacctttccaacacagatgtccaagctgccaattctctctttccagacgtagtgaactgtatgcagactgaca

SEQ ID NO: 789175 - DNA, 100 bp, Homo sapiens
tcagcctcccaggtagctgggattacaggtgattgcccacagtgagtatcaaaagtccaaaagaatttccatctttctgagcatgcaagatgaaattgag

SEQ ID NO: 789176 - DNA, 90 bp, Homo sapiens
tcagatcttcatgtgtctcttctaagctgaataaagctgttttggaactgtcaggtacctcaaagcgttcttggaacaccaaatgaggac

SEQ ID NO: 789177 - DNA, 80 bp, Homo sapiens
ctcggccccgccagcagcactgtggaggccgtcctcgaccagagtctcactgtcgcccaggctgcagtgcagtggtgcca

SEQ ID NO: 789178 - DNA, 100 bp, Homo sapiens
tcacccaggcccctgtcaagaaggtgccggtggtgcgagtcttcggagcgaccccggcagtttggaccagaaaatccctttaggacacagcaaatggctg

SEQ ID NO: 789179 - DNA, 75 bp, Homo sapiens
tcaactacctgcactttggggagcctaagtcctgctgctgatgcaaggaatcccctgggctcccgtccactccac

SEQ ID NO: 789180 - DNA, 83 bp, Homo sapiens
gcccaaatcccggaaactccagcgtgtctccagccgtggggagcttttggaagagtcccagatggaagcgaccaggctccggc

SEQ ID NO: 789181 - DNA, 99 bp, Homo sapiens
aagttcaggaaacatccaagaaaaatgtccttaaagcaattgagcaggctgatctactgcaggaggcgacagagctgctgacaattagatctgccccaa

SEQ ID NO: 789182 - DNA, 100 bp, Homo sapiens
ttggtaactccagtctctaacgttttagaaaatcataacaagcggttctctaccctgtaaagggataagagttggtgtccttgttcttttttctttcctg

SEQ ID NO: 789183 - DNA, 100 bp, Homo sapiens
ccagcagcccccgaaggccctatcaggacatggagtatgaaagacggaatttttggaatttcgtaaggcaagaagtgacatgcttctctccaggaagaat

SEQ ID NO: 789184 - DNA, 113 bp, Homo sapiens
cttcaagctcatctacaacgagtactgtgggcctggagccaagcccctcttcaggagtaaggagcagatcaatatcaccctggaccaccgctgccgtatcttccagaacctgg

SEQ ID NO: 789185 - DNA, 83 bp, Homo sapiens
cactcatcctgcacgccggcgagtgccagcgggtgaaggttgccgaactgtccccctggctggacatgtggggtttgacagct

SEQ ID NO: 789186 - DNA, 90 bp, Homo sapiens
ggctttgaccaccacgtggtccgtgtaccccacacacaggctgttgtcctcaactccaaggacaaggccagaagccttttaaaaggtccc

SEQ ID NO: 789187 - DNA, 100 bp, Homo sapiens
cagcagttgagcgagcccgaggacatggagatggaaggtatctgtaccacgttttgaccaaaaacaccacagtcacagaacagaaccggaacctgctagt

SEQ ID NO: 789188 - DNA, 101 bp, Homo sapiens
ctgcctcacagcaagagaccagctctagaggacaaaatcccagtccttggcacaaactcaggaaatggaagccggagtctgttttttgtggggctgctaat

SEQ ID NO: 789189 - DNA, 83 bp, Homo sapiens
agagatgtgatgttggagaactacagaaacctcgtctccctggtacttggaccatgagactgtttcagccactttcatcgaca

SEQ ID NO: 789190 - DNA, 82 bp, Homo sapiens
ggctcatcgtgatcccggcgacatactacctctggccccgagatcagaatgccgagcaattctgcaagagagcttcagcaaa

SEQ ID NO: 789191 - DNA, 76 bp, Homo sapiens
tgtgatgtccactgcctgtggaactccaggctatgtcgacacgaatgcagagtttgagtccagatcccaaagccca

SEQ ID NO: 789192 - DNA, 95 bp, Homo sapiens
ctctgcgtgagtgtggtctacgagctgtttctcatctttatactcttccaggtaaaaaagagtgtcaagtggacatgcaaagcttgtggagagaa

SEQ ID NO: 789193 - DNA, 100 bp, Homo sapiens
ggaggaatacctggcattgacctctcagatcccaaacaactggcagaatttgctaggaaatgatccgactagatgaagtccccaatctgagttccttagt

SEQ ID NO: 789194 - DNA, 97 bp, Homo sapiens
gcgaagctggccaaagcctgcccagacggctcacctgtgcgggatggaacaaaaggtggcccgggagagtggcccaccccacatgaagaactttgtg

SEQ ID NO: 789195 - DNA, 100 bp, Homo sapiens
aactcatcgaacagctggagcaaggcgacgaaccttggagagaggagaacgaacatcttctggacctttgtccaggtgacatacaaatggctgagctata

SEQ ID NO: 789196 - DNA, 99 bp, Homo sapiens
gcaccaacggcaccaactattcgcggagctggaatgactggcaacccagacaatgcagatcttcgtgaagactctgactggtaagaccatcaccctcga

SEQ ID NO: 789197 - DNA, 87 bp, Homo sapiens
aaaagactgggcttgtccttgctggtgcatgcgtcgtcggcctctgggcagcaggcttcagggatgacttcttagggggcaggggag

SEQ ID NO: 789198 - DNA, 75 bp, Homo sapiens
gagagagacaaaagactggcggccaaacagagcactgccccagagcacatcagctatgtgccccagctctcaaac

SEQ ID NO: 789199 - DNA, 100 bp, Homo sapiens
aatgtcctaccttctttaccagatgctttgtggtattaaacatctgcattcagctggtataattcatagacatgtgcagtctttgccaacaaaaaaaatt

SEQ ID NO: 789200 - DNA, 90 bp, Homo sapiens
acaatgcccacctccgcggcccaccaccaaagctcatccctgtctctggaaagctggagaaggatgcacctctctctgactgtacggaaa

SEQ ID NO: 789201 - DNA, 90 bp, Homo sapiens
gtccggagccagccaacgagcgggcttggattttgaggccaagcagcagtacattctacacgtagcagtgacgaatgtggtaccttttga

SEQ ID NO: 789202 - DNA, 74 bp, Homo sapiens
cacgagcagatcctggtcctcgatccgcccacagacctcaaattcaaagatgatgaacaacatgggtggtgatg

SEQ ID NO: 789203 - DNA, 100 bp, Homo sapiens
agaccgatgtcaacatgctgcagaaattattacagaccttcttcgaagtgttcagtcttgccacttgcctagtgaggcttttccgaacctggaaggagac

SEQ ID NO: 789204 - DNA, 90 bp, Homo sapiens
ccttacttcagcccctcaagggacacaaagacactgtgtactgtgtggcatatgcgaaggatgttggaaaagtaccagcaaggagacttt

SEQ ID NO: 789205 - DNA, 74 bp, Homo sapiens
ttttcttatgcttataagagtggaacaggaatccgagcggctggaactcatgaacgcagagctgaagacccaga

SEQ ID NO: 789206 - DNA, 82 bp, Homo sapiens
ttcgagtgaccgagaccgcggccgggaccgagggtctctaattaacagaagatggcaaagcccagccacagcagctatgtcc

SEQ ID NO: 789207 - DNA, 96 bp, Homo sapiens
tgcccagagctcctggaccaatgcatcttcccaccaccttaaaccactggtagatcgttggccggagacaggatatgtgaagaaacttcagagaag

SEQ ID NO: 789208 - DNA, 97 bp, Homo sapiens
ccagagataagaacaccaaccaaattgtcgccattaagaaaggcggcgactggcggcgcgatggacctgaccgggctcctgctggacgaagaaggca

SEQ ID NO: 789209 - DNA, 82 bp, Homo sapiens
tcggaggtctcatctttgaactactgccggagcttctgccagcttgctcacttccgacagagaaaaacaaaaggtgacagtt

SEQ ID NO: 789210 - DNA, 100 bp, Homo sapiens
atcagaacagaaattctattgagaacatagccaatgagactgtgaacgtgctgtggaatatatgggcatcttctctgcattcagtttcatccaagtcatt

SEQ ID NO: 789211 - DNA, 74 bp, Homo sapiens
ccatctttacggctctggggatcgtgatgggacaggtggtcggactcaggtatcatgatattagctggtttgac

SEQ ID NO: 789212 - DNA, 82 bp, Homo sapiens
agaagttcaaatgcttctttggaggtgctctcaacagaaccaggatccttcaagtagaacttcatggaggaacacggagtga

SEQ ID NO: 789213 - DNA, 88 bp, Homo sapiens
aggctctcagcatggcccaggaggtggaccccgagggagacaggaccatcggatacaagaccctcctgaaaggaatttccgggaagtt

SEQ ID NO: 789214 - DNA, 90 bp, Homo sapiens
gatggaacacggctccatcatcacccaggcgcggagggaagacgccctggtgctcaccaagcaagctttggcgctgaccacaatgctgag

SEQ ID NO: 789215 - DNA, 87 bp, Homo sapiens
ggaatgagacccaagatgctcttcatactgtagaaaaatattcctttgaagagagaatggatcttggagaatgtctgaaagtccatg

SEQ ID NO: 789216 - DNA, 100 bp, Homo sapiens
acagaagccaaaaagcattgctggtatttcgaaggactctatccaacctattatatctagctgacgtggtggacagtgaggcgctgcaggtatacatgaa

SEQ ID NO: 789217 - DNA, 83 bp, Homo sapiens
ccgtcctctgaggcgacggccgcggctgcacaggtcaagctgggctccgcgctagggggcccctacctgggagtccacctgag

SEQ ID NO: 789218 - DNA, 98 bp, Homo sapiens
gcaaaagatttgatgaaagtacttcagggagtcaacggtgagccaagggaagagatggtgttgagtggaaaatacaaatctggggaacaaattcttcg

SEQ ID NO: 789219 - DNA, 83 bp, Homo sapiens
cgggaagtcgcgaccagagccattggagggcgcggggactgcaaccctaatcagtgagaaggcaaccaaagtgcaggacatca

SEQ ID NO: 789220 - DNA, 100 bp, Homo sapiens
caagcagtggcgaagggaatcgcaaggctcttccctgaccattttctactgtccctgcgcgagggtgaaaagatcttctacctgatccgcccaacaaatg

SEQ ID NO: 789221 - DNA, 88 bp, Homo sapiens
gaaatcaaaataaaggaaacacatttcatatactgcagtgagaactatctaattcgttggggcagtaacgggatgcccaaggaaatag

SEQ ID NO: 789222 - DNA, 75 bp, Homo sapiens
acaaatccaagtcgttcttcgacaacatctcttctgaactcaagaccagatttctgcgccaggagatgaggggcg

SEQ ID NO: 789223 - DNA, 75 bp, Homo sapiens
gccacagcccggactccatcgactcccccggctcttagactagatgcaatgcagtatgcttctgaatctaaagat

SEQ ID NO: 789224 - DNA, 100 bp, Homo sapiens
cacagtttatcatcccttcctggtgaagaaggggaccaggccatcgccgaggcccttgctgcccctagccggtttgtgctaaagccccagagagagggtg

SEQ ID NO: 789225 - DNA, 100 bp, Homo sapiens
actcaggaagagtgatgtggttttggataaggatcccactttgcgcaccaaacagcctatcccagctgcctataacagatacgatcaggaaagattcaaa

SEQ ID NO: 789226 - DNA, 101 bp, Homo sapiens
gtggatgcccttaaaggaaccactctgtttgctggctacacggacaacctggtgcgagtgtggcaggtgaccattggcacacgctagaagtttatggcaga

SEQ ID NO: 789227 - DNA, 96 bp, Homo sapiens
gatgcgcctacgcctgcctagaagctgtgccgcccccgccaggtcagactatgatgactggagaccgtctctggccagtttgcttcaacccattcc

SEQ ID NO: 789228 - DNA, 100 bp, Homo sapiens
gagactataattaaatgcgatatggtacccaaactggattatgaagaaacacctcttacagtcatctgcaggggattctccaaggacatgggaagataga

SEQ ID NO: 789229 - DNA, 95 bp, Homo sapiens
tggatgataatgcaggactatcaagaagtgaaactggatcaacgatatcaatgagttctttagaggacatgaaagatcagatgtcaacttcatct

SEQ ID NO: 789230 - DNA, 100 bp, Homo sapiens
aaatttgaagatgaaaatttccattacaaggcgagcccacaccttaaccgtgctcttcatcctcacctgtacgcttggctatgtgacgctgctggaggaa

SEQ ID NO: 789231 - DNA, 51 bp, Homo sapiens
gcgctgaggacccggacagccgcatttcttccttctgatggggcaagactc

SEQ ID NO: 789232 - DNA, 100 bp, Homo sapiens
cgaccctcccagaccggccgctctcccctcctctcacggcacctcccaccatgaaggcagtggctctgccaatgatcctgtgagtattcaggaatcactg

SEQ ID NO: 789233 - DNA, 74 bp, Homo sapiens
cccatcttcacctatggcgaactccagaggatgcagttctgtcaggccaagcagaaggcagccttgctggagct

SEQ ID NO: 789234 - DNA, 85 bp, Homo sapiens
tgcttctgtagaccagctccaacaggattccatggtagctgggatgttagggctcaggtgtgaagatgccttaagaaaaaataag

SEQ ID NO: 789235 - DNA, 90 bp, Homo sapiens
tattcagccagttcttgaagcaagcacccagtcagcttgaagagtttcaaatggaccctaccactgagaaatcaagatggcagtctacta

SEQ ID NO: 789236 - DNA, 100 bp, Homo sapiens
caaagtgtggaaacagcagatgtaccctcagtacgccacctactattacccccagtatctgcaagccaaggaatggtttgcagtgtatgtggaacttaat

SEQ ID NO: 789237 - DNA, 75 bp, Homo sapiens
acgagatggactgggacgactctgccctgaccatcaccgtcaaccccatggagggcggcaccttcctacttctgc

SEQ ID NO: 789238 - DNA, 86 bp, Homo sapiens
ccatcaggggccttgacaacacagagtttcaaggagtctatactttgctcacaactcatctcaatgccatccttgtggagagccac

SEQ ID NO: 789239 - DNA, 80 bp, Homo sapiens
tgaaatttggctttcattcatgaatgagatctgactgcagccatgagcagcaatgagtgcttcaagtgtggacgatctgg

SEQ ID NO: 789240 - DNA, 75 bp, Homo sapiens
gccgcgagcgcggcctgcaggagcccacagcccccatcccgtagcccttcctggatctggagagagcagctgctg

SEQ ID NO: 789241 - DNA, 90 bp, Homo sapiens
ggaataatgcccagcggcccgccaggtcccggacaaatatggtcttggaaccaggcttcagcgaccacgagctggtgcatccatcagtac

SEQ ID NO: 789242 - DNA, 90 bp, Homo sapiens
cacagctcccttgatgccacttggcaagacactgccttgtgggctcaccaagacttacacattcagattctgaaaaagagttccacgtcc

SEQ ID NO: 789243 - DNA, 98 bp, Homo sapiens
tcactttagaccctccacctaattgcagagatggagtttcaccatgttggccagactggttccgaactcctgacctcaagtgatccacccacctcggc

SEQ ID NO: 789244 - DNA, 51 bp, Homo sapiens
tccacttccacttgatgaatattccaattgctaatccagcatttgtggata

SEQ ID NO: 789245 - DNA, 90 bp, Homo sapiens
gcctccgaagatgggggatttctacgacccggagcacccgacccctgatttctgtgtttgaagaacatacgcaccttcctgaaagtctgc

SEQ ID NO: 789246 - DNA, 74 bp, Homo sapiens
caggaatcctcaacagatgccactgtaagtggggagagaagctgctcaggtgtgagcagctgtgcccggccaag

SEQ ID NO: 789247 - DNA, 83 bp, Homo sapiens
cggcgccaagatcccagtcacaattatcaccgggtatttaggccaagaagcttgagagaagaaaaatttcagaaaaattgtct

SEQ ID NO: 789248 - DNA, 82 bp, Homo sapiens
ctgaagccacccaggtgtaccccaagctgtacttgtcacctcgaattgagcaagacagcctggagctgttgcccaaagaatt

SEQ ID NO: 789249 - DNA, 75 bp, Homo sapiens
agtttttttgaagaagcaggatgctgatctaaacgtggaaaaagttaattatagaaaatgccaagtaggaaattt

SEQ ID NO: 789250 - DNA, 75 bp, Homo sapiens
accccaacgaagagtggagaacggcaacccatccagatcaccatgccgctgtgtcagcgtgttatgatgccgtcc

SEQ ID NO: 789251 - DNA, 98 bp, Homo sapiens
atgatgcatgtagtgtgtgtgtactgcagctggagtgggccccagaccaggcttataccagccagtttgtatcccttgtgatgtttgcccttatgatg

SEQ ID NO: 789252 - DNA, 83 bp, Homo sapiens
aggctggaccctgagccctgggacctctgaagtgaacactgcagggccatttgccgatcaaagtccagatctccatctccaaa

SEQ ID NO: 789253 - DNA, 100 bp, Homo sapiens
tggagtctacgctgtcttgtgaagcctgtaaaaatggcatgcctaccatctcccggctcttacagatgccgtttctgagtcccttcaacatgatcctggg

SEQ ID NO: 789254 - DNA, 96 bp, Homo sapiens
tacgacaagaaacagcagcaagaaatcctggcggcgaagccctggactaaggagttcctcgtctatggccgctactgcagccaggtggagtcagcc

SEQ ID NO: 789255 - DNA, 100 bp, Homo sapiens
aacattaatgatgtggacactgcattgagtttttaccatatggctggagcatctcttgataaagagctcagccatcagccctactccggaaatttcttca

SEQ ID NO: 789256 - DNA, 74 bp, Homo sapiens
aagcagatgacttcctccaggactatactttattgatcaacatccttcatagtgcacagccagagaacaacaca

SEQ ID NO: 789257 - DNA, 74 bp, Homo sapiens
agatcaagaaggctgaagagattgctaatgagatgattgaggcagccaaggccaaccgcgagaagatgacccag

SEQ ID NO: 789258 - DNA, 50 bp, Homo sapiens
ggattccaagtaactcttatttgttgggtctggtaagttgacattttatt

SEQ ID NO: 789259 - DNA, 90 bp, Homo sapiens
gaaggtctctggagacatcttcagcaggatattgaggcaacaatgaactcggccctgaatgagctacgggaactagaacggcagagcagt

SEQ ID NO: 789260 - DNA, 97 bp, Homo sapiens
gctcttcctgtctctctgctgctacctgcgtctggtcagcgccgagtgacgggtcagtcttacgagaatatggtaactgagatcatgtcaatgggct

SEQ ID NO: 789261 - DNA, 100 bp, Homo sapiens
cagcgagtacacctgcaccatccagcaatttcatcacgaaaacctggtcaatctgattgaagtttttagacagaaaaagaaaattcatttggtatttgaa

SEQ ID NO: 789262 - DNA, 75 bp, Homo sapiens
ttcattggccacctacagaaacaaaatgtcaacaaattgatgggatgaattacaaaggctgctggggttgctaag

SEQ ID NO: 789263 - DNA, 51 bp, Homo sapiens
cctccaaggaacttaagcaaaggaagctgagctgaacacattacgatggat

SEQ ID NO: 789264 - DNA, 87 bp, Homo sapiens
gccctctcgctgttgctggtctctggctccctcctcccagggccaggcgccgctcagaacggagtcattgcagttttcagtagaggt

SEQ ID NO: 789265 - DNA, 137 bp, Homo sapiens
agctgtttaccatgtcaccctcaaaagagtccagattcaacaggctgccaataaaggagcaagatggctaggggaagtttatctcgacaatgctagttgcagtctgtgtgaccctgaccaagttattttaatgtctg

SEQ ID NO: 789266 - DNA, 100 bp, Homo sapiens
ataagggacccgacactgatagaatggatcttggagaatgtctgaaagtccatgacctggctttaagagcggattatgaaattgcatccaaagaacaaga

SEQ ID NO: 789267 - DNA, 82 bp, Homo sapiens
ctggcgtggacacacaagcaccccaataacctcaagctacccgtacagtgaggacgcccgccagggtgagcagtacatgaac

SEQ ID NO: 789268 - DNA, 50 bp, Homo sapiens
gtgcgggcggctccgtgagaaaggcgggagattacctggggcaattgatg

SEQ ID NO: 789269 - DNA, 75 bp, Homo sapiens
agccaagtgccatcttcaaaatttcaggtcttaaatctggaagaaggtagataatgactataatgcccttcgaga

SEQ ID NO: 789270 - DNA, 80 bp, Homo sapiens
agcgacctgctttcagccatccgtcaagacaatgcagatcttcgtgaagactctgactggtaagaccatcaccctcgagg

SEQ ID NO: 789271 - DNA, 50 bp, Homo sapiens
gactgcctcactgagcaaccaagaaggagaggagacgccgtgagcgggac

SEQ ID NO: 789272 - DNA, 98 bp, Homo sapiens
caccacctccgggactaagatacacgaatccgggtgagaaggactggcagaaatacgagactgctcggcggctgaaaaaatgtgtggacaagatccgg

SEQ ID NO: 789273 - DNA, 90 bp, Homo sapiens
aacagtgtgtccagcatgggagagtacatgagacgatgaagcaaagggaggaaataatgctggccatacagttgttgtggattctgtgga

SEQ ID NO: 789274 - DNA, 75 bp, Homo sapiens
ttggttggacaccttttaaaaggctatgagatcaccttcagtttactcaacccagaccccaagtcccatgatgtc

SEQ ID NO: 789275 - DNA, 98 bp, Homo sapiens
ctgctgggcgaagcacgctactacctggtgcagggcctgattgaggactgccagctggcgctgcaggaaacatgccctgaactgtcacagaatgaaac

SEQ ID NO: 789276 - DNA, 100 bp, Homo sapiens
ctgggctggaggacagagaagccttttccgttgccggtgccggcctagcgtcctggaattacttcaatcaagaccctgatgctcccataagacagaaaat

SEQ ID NO: 789277 - DNA, 103 bp, Homo sapiens
agtaattggaggaagaatgatagcacagaaaatctctgtcagaactggcccatggacagaccttcacgttcccagatctgtttcccgagaaagacgagagccc

SEQ ID NO: 789278 - DNA, 83 bp, Homo sapiens
acctacgtcccgctgccgtcgccgccgccaccatgcccaagagaaagtgtcaacagcatctccaccctggagcctgtgagccg

SEQ ID NO: 789279 - DNA, 100 bp, Homo sapiens
aggagagacacttgtgaacattcaagtgaagcaaaagcctttcatgattatacaatgcagatcttcgtgaagactctgactggtaagaccatcaccctcg

SEQ ID NO: 789280 - DNA, 75 bp, Homo sapiens
cagacacgggacccgcttcgaggccgctttggcgccaaatcctgaggatgccaaccctgtggtaattgagccatc

SEQ ID NO: 789281 - DNA, 100 bp, Homo sapiens
cctggagcagcgccaggctgatgtcgagtatgagctccggtgcctcctcaataagccagttgatcatggccttgccaggttggtgacagtatattgtgag

SEQ ID NO: 789282 - DNA, 100 bp, Homo sapiens
tctaaatcagatgactgaaatgagttaaagttcctcgtaattttcgcttgttggaagaacttgaagaaggacaaaaaggagtaggcgacggtacagttag

SEQ ID NO: 789283 - DNA, 75 bp, Homo sapiens
cccgccgccgccgttggctggagccttcctaacaggctccggcaggcgttagggccttcctaagtgctacccgaa

SEQ ID NO: 789284 - DNA, 100 bp, Homo sapiens
cttcacagagcatctcccaacatgacggcctgcttcagcagagtgagcaggtgaattatgtaacctcattacgctggatgtagctcacaatcaacttgaa

SEQ ID NO: 789285 - DNA, 82 bp, Homo sapiens
ggaagaaaatacaaatcacacgcataatggatgaaaggaaccgacagaatggagatgtatgcatttcgattcttcatccgcc

SEQ ID NO: 789286 - DNA, 78 bp, Homo sapiens
acaccgcatattctcactcataggtaaaagtgctgtttgtacgcaaccttgccaatactgtaacagaagagattttag

SEQ ID NO: 789287 - DNA, 80 bp, Homo sapiens
gatcggcgctctggctgtttcgtgaaggagagagagcaaaatgatgcttcaacacccaggccaggtctctgcctcggaag

SEQ ID NO: 789288 - DNA, 75 bp, Homo sapiens
ggcttgtagaattctatgctccatgtacttccagcggcaatgtaagcaacagaaaggatgagacaaatgctcgag

SEQ ID NO: 789289 - DNA, 90 bp, Homo sapiens
caaaagggaaattcctccagggctgagtcacagggaagaaagcgatttcctccgcctcttccaaagcggaatgaatctgaagtctgctgc

SEQ ID NO: 789290 - DNA, 74 bp, Homo sapiens
ggagacctgatttctaactgacgctaccgtcgcggccgccggtccactggtgtgtcctccccttccgagtgctg

SEQ ID NO: 789291 - DNA, 75 bp, Homo sapiens
ctcaagtgaagcaaaagccttccatgattacttctaggcctgattcttcactacctgagacgtctaaaaaggagc

SEQ ID NO: 789292 - DNA, 82 bp, Homo sapiens
gctatccagaacctccactctttcggctatggtgaactaaacggtaatgctggagaaagagaaatatctttaaagaacctga

SEQ ID NO: 789293 - DNA, 97 bp, Homo sapiens
taccgcgtgaggctgagtgtcctagggccagctggagaagggccctctgcagaggtgactgcgcgcactggaagctgtctcgtgcagacttgaccga

SEQ ID NO: 789294 - DNA, 100 bp, Homo sapiens
gggcagccgccgctcctccgggtaagactttgaccccgacgcaggcttcagtgattgccgcggatcagaagcctgagcactttggctcgagacaattaag

SEQ ID NO: 789295 - DNA, 100 bp, Homo sapiens
aagatagtgtcagcagaatgaagccatgttcacctttcttggatcacatgcaaaggatgtttaggtctgtgaagaaaagaatttctaggccgggtgctgt

SEQ ID NO: 789296 - DNA, 75 bp, Homo sapiens
cgctaccggcctgagcctcgcgttgcagcaagagagatgaaggatgaccgagtgggagacagcagcaccagcggt

SEQ ID NO: 789297 - DNA, 100 bp, Homo sapiens
ctacggctggggccgtcccagttcgcaatgagaaaggacagaagttaatcgcatcccttatacccatgacatccagagacagaattaaagccatcaggaa

SEQ ID NO: 789298 - DNA, 100 bp, Homo sapiens
gctacacagtatataaggtcaccgcccggtctgtggattctagccttgggggtctttcacgatccagcactgtggccagcctcgacacagattccaccaa

SEQ ID NO: 789299 - DNA, 75 bp, Homo sapiens
ttcttccctgggctggtgaagtacatgaactcagggccggttgtggccatgggaaatgtttcaacgtgcgcaagc

SEQ ID NO: 789300 - DNA, 80 bp, Homo sapiens
tcagcggctctttgtatgatgacatcatggaagggaagtggttgctgtgtatgttactggtgcttggaactgctattgtt

SEQ ID NO: 789301 - DNA, 100 bp, Homo sapiens
caaacagcacttcctggcaatgatagatacatcagtgtgggaagccaagcagatacaaagccatgcaaggcagaccattttcaatgtaaaaatggagagt

SEQ ID NO: 789302 - DNA, 83 bp, Homo sapiens
ggctgattcatctcttgggtgagaagatcctgggcagcctccagcagggacctgtgacagggctgaaatctctttaatgatgg

SEQ ID NO: 789303 - DNA, 98 bp, Homo sapiens
gtttgaaaaccagctgcttcaaattggacttaagtctgaatttcggcagaatttagctatcatggtgaacttacttcagattgtgcgggaccactggg

SEQ ID NO: 789304 - DNA, 50 bp, Homo sapiens
cgacatgttgcttttcgtggaggtgtgctaaagaggcagtacaccagttt

SEQ ID NO: 789305 - DNA, 75 bp, Homo sapiens
tggaaaatgcagtgggattggagataacccaggcagtccctggccaaagatttatttctcttgacaaccaagggc

SEQ ID NO: 789306 - DNA, 75 bp, Homo sapiens
cgctggcttcatcatgcccatcgaggtgcacttcaaaaacaaggtgtgcttcccgcacagctgcagccatggggt

SEQ ID NO: 789307 - DNA, 100 bp, Homo sapiens
tgaggagccagcgtctagggcagcagccgcttcctagaagaccaggacttaaccaccaccatgtcgagcaaaagaacaaagaccaagaccaagaagcgcc

SEQ ID NO: 789308 - DNA, 83 bp, Homo sapiens
caaatgcctgcaatggactagctctgctacagaacaccaagggaataccttggcaagcagctccagtccgagcagccccagac

SEQ ID NO: 789309 - DNA, 100 bp, Homo sapiens
tctgattccctgtgttctgcttttttcattgttccactggacgctcatcagagggaagatctttttcctcaattggatctcacacgttcacccatgccgg

SEQ ID NO: 789310 - DNA, 83 bp, Homo sapiens
acccctttgacctcttcgatgtgcgagactttggaaaggtgacttaagagattaaaattaatttggttgctgttggttctgaa

SEQ ID NO: 789311 - DNA, 90 bp, Homo sapiens
ggccaatgtgggatcgatgtttcaatattggaagcgctttgatttacagcagctgcaggttttcaaatggaacattttgatgcatcactt

SEQ ID NO: 789312 - DNA, 96 bp, Homo sapiens
ccaaaatgcagattttcgtgaaaacccttacggggaagaccatcaccctcgaggtccaatgaagcgtcaagtggcagtaaaatcaacccgaggctt

SEQ ID NO: 789313 - DNA, 100 bp, Homo sapiens
gcgcctgaggaccggcaacatggtgcggtcggggaataaggtgattgcccacagtgagtatcaaaagtccaaaagaatttccatctttctgagcatgcaa

SEQ ID NO: 789314 - DNA, 50 bp, Homo sapiens
caagaagatgatcttcaacagctgcagacgatcctcctccaagacaaaca

SEQ ID NO: 789315 - DNA, 78 bp, Homo sapiens
gctcttgccctcatcctggttctggaatcctcagttcaaggagtggaagctggacacactatgtgacttgtatgaaac

SEQ ID NO: 789316 - DNA, 75 bp, Homo sapiens
ggaaggagaactaaatgggagaagaggaatgttccctgacaatttcgttaagggaacgggtatggcaatccccga

SEQ ID NO: 789317 - DNA, 100 bp, Homo sapiens
tccttgaagaaacaagcttacagccatacactgcttcccttatgtgaagaagcgcatccctgtcatgtaccagcaccacactgacctgaaccccatcgag

SEQ ID NO: 789318 - DNA, 50 bp, Homo sapiens
cttgtgtatctggagaaaatagaggcaccatcatgactccaagcggagga

SEQ ID NO: 789319 - DNA, 87 bp, Homo sapiens
agcatacagatctgggaccgaaatttgactaatagcctaacatggcagaccagagacagcgctcactgtctacctctggggagtcat

SEQ ID NO: 789320 - DNA, 100 bp, Homo sapiens
gaattctgttcgacataatctgtccctgaataaatgttttcagaaagtggaaagaagccatggcaaggaccgccgggagagcctgcccacctccccaccc

SEQ ID NO: 789321 - DNA, 75 bp, Homo sapiens
tgtttgcaaatgcagaggaagaatttttctatgaggactcgctgattcttgagaagagtcaaaactggagctctc

SEQ ID NO: 789322 - DNA, 96 bp, Homo sapiens
gagatccgcctgcagctgaagggaagagcagcatcattgtggccgccgatgagagcaccatcagctggggtccgtcaccgacctttggggaactgg

SEQ ID NO: 789323 - DNA, 75 bp, Homo sapiens
cagaacctcaagcttttcaggcatcctcatataattaaactgtggatgcccggagcataccagtgttagcaaaat

SEQ ID NO: 789324 - DNA, 51 bp, Homo sapiens
tgatgtgtaggaggaagagctcagatagaaaaggagggagttacactcagg

SEQ ID NO: 789325 - DNA, 83 bp, Homo sapiens
cttatagacccaatcaaaaaagaaactagcaaactttttaatgaggaagactttgtgttttatgccccacgtctgagaatcaa

SEQ ID NO: 789326 - DNA, 83 bp, Homo sapiens
cctgagtcactgcctgcgcagctccggccgcctggctccccatactagtcgccggtgaggtttatacatggggcgacaatgat

SEQ ID NO: 789327 - DNA, 75 bp, Homo sapiens
aagaattacagcagccaacctatgttgccctgagttacataaatagttcatgaccaagaaccccaccatgcgctt

SEQ ID NO: 789328 - DNA, 75 bp, Homo sapiens
tcctggtcggcgcgtggctcaagctaggcccctgagcctctgagctccttgaagtccatggcggaacgggcagcc

SEQ ID NO: 789329 - DNA, 75 bp, Homo sapiens
ttgactactgccacaattccgtcacagcaaactgtacaatggcagttgagtgggttttgaaaaacgtctgaattg

SEQ ID NO: 789330 - DNA, 82 bp, Homo sapiens
aaactaggtcgatggtcggcggcgcccggatgggcagctgaggttctgcggggagtgtctccagccctgcctgcaggtgcca

SEQ ID NO: 789331 - DNA, 75 bp, Homo sapiens
cgagaccgcggccgggaccgagggtcaatgagctgaaggagaaaggcaacaaggccctgagcgtgggtaacatcg

SEQ ID NO: 789332 - DNA, 88 bp, Homo sapiens
aatcccttcgatcaggatgttgcttgtactcccagagtacctcatccacgctttcttctgtgtcatgtttctttgtgcagcagagtgg

SEQ ID NO: 789333 - DNA, 78 bp, Homo sapiens
aagaagtgatgctggaaaatctcaggaatctggtctcattggtcaaaccggcacgatgtccaggcaccagaaccagaa

SEQ ID NO: 789334 - DNA, 51 bp, Homo sapiens
cgtctgccccgcccacatctagaacgctgccactgcagagccccgccatgg

SEQ ID NO: 789335 - DNA, 82 bp, Homo sapiens
ccggagttccgctcctgcgggcttagcaggaaagggtgcctaagctgaagaaacacttaaattctggaaatagcgactcagt

SEQ ID NO: 789336 - DNA, 83 bp, Homo sapiens
ggaaagctgaaatccttcgcccggaaattcatcaagttccgagcctcactctatccctgtcctgagacaccacaggagaggaa

SEQ ID NO: 789337 - DNA, 82 bp, Homo sapiens
tggttgtgtggtcgcgtctcggaaaccggtagcgcttgcagcatggtcactatcatatgacaaaggctttgccgcagttcat

SEQ ID NO: 789338 - DNA, 75 bp, Homo sapiens
ctgccgacgatcatcgaggaaggcactgcgtttcggattctgagaacaataactccacaatggcgtcggcctcgg

SEQ ID NO: 789339 - DNA, 82 bp, Homo sapiens
caacaacaagctcatcagcaagaagctggagcgctacctgaagggcgtgatggtgggcatgggtcagaaggattcctatgtg

SEQ ID NO: 789340 - DNA, 74 bp, Homo sapiens
gcttgaggaaatgactcggactgaacaagagggtatggcccatctcctgtacgcttggagcgacctttggctac

SEQ ID NO: 789341 - DNA, 75 bp, Homo sapiens
atgattcgtgaatccggaatgggtgacagcgtcatcacggcattttattggactcatgcccgttgcacagcagcc

SEQ ID NO: 789342 - DNA, 89 bp, Homo sapiens
tccgggggcctggctaaggaaaccctattacctccagcatgattccacctttccactgatagactcaagttcccagaaccagattagaa

SEQ ID NO: 789343 - DNA, 50 bp, Homo sapiens
aatgggctaagcgaggagcagaggcagagaaaggagttcatgaaggcaga

SEQ ID NO: 789344 - DNA, 74 bp, Homo sapiens
ctcatttgctggccatcggattggggcttgagtttgaagaaacagaagaacctgattttactgcattatgtcag

SEQ ID NO: 789345 - DNA, 82 bp, Homo sapiens
ggagaggtagccatgatgccccacttggtgaatggagatgcagctcagcagttcagtgaattctacagtcttggtgaagaac

SEQ ID NO: 789346 - DNA, 100 bp, Homo sapiens
ggccagtgactaccaacgtttggaccagaaggttatcaatagtctggctgtctatcgtcatcgtgagactgactttggtgtaggagttcgagaccaccct

SEQ ID NO: 789347 - DNA, 75 bp, Homo sapiens
aacagcccgcccgaccccgtcccgaccctggccgccccgagcggagcctggaggagtccaaaactacttacctgg

SEQ ID NO: 789348 - DNA, 100 bp, Homo sapiens
atagctgttatcaaaggaatgtaccaggctggccagctaaactatgtggatccagctactggctatgtggtgctcacacagattgcccacttgcaaagag

SEQ ID NO: 789349 - DNA, 83 bp, Homo sapiens
cgagaagatcgagatcatgccagagtctttactcctcctgtgaagaagggagaggaccccttccgaacagacaaccttcctga

SEQ ID NO: 789350 - DNA, 50 bp, Homo sapiens
caaaattctgaactcaggacttggcaaaaacctccacagctgttgagaaa

SEQ ID NO: 789351 - DNA, 80 bp, Homo sapiens
gttcaacaagggcccctcgtacgggctgtcggccgaggtcaagaaccggacatatctgaagagatggattaagaatgctt

SEQ ID NO: 789352 - DNA, 75 bp, Homo sapiens
aaaattgccctgaaactggttggtgaagaaggatttgtagggaatccctgtgctgatcgtggggcatcatatcct

SEQ ID NO: 789353 - DNA, 95 bp, Homo sapiens
ccgagcccactacgagacggagggcagccggggggccgtgaaggcgtcggccggaggacaccccatcgtgcagcatcaagatggtgctcatgtgg

SEQ ID NO: 789354 - DNA, 83 bp, Homo sapiens
gtgagctggaaggtcttggagcgaagagctcggaccaagcgctcagacatgatcccagagaacgctctagaggagatcaccaa

SEQ ID NO: 789355 - DNA, 87 bp, Homo sapiens
gacttctgcagtacgagaacgtggatgaagactcttcggctccaaagacaacaggccctccctctgccctcccgtctgtgagctccc

SEQ ID NO: 789356 - DNA, 82 bp, Homo sapiens
gccagggctgctgccttccagcaccttctgctcctcgtgggcatccacctcctcaagtgcaaaatggcaactcttaaggaaa

SEQ ID NO: 789357 - DNA, 100 bp, Homo sapiens
tgaaaaacctaaaggataccttagatcattgagactgaaaatatgatggaccgaattgtgactggcttgtctgagtctagtgtcaaggtgcggttagctg

SEQ ID NO: 789358 - DNA, 75 bp, Homo sapiens
ggaggagccgatactgagcttcttcctatttgccatgggttgctacaagatcaccacggttttcagccatgctca

SEQ ID NO: 789359 - DNA, 74 bp, Homo sapiens
gacgggcgggtggtactggtcaccggcgcgggggcagggctccaggtggacactgcaggcaacaactatgtccg

SEQ ID NO: 789360 - DNA, 90 bp, Homo sapiens
agcaagcatgcagcttactgcttgaaagtgatatggagaatgcagaaaacattctcacagtgatgagagatgccggaattgagcctggtc

SEQ ID NO: 789361 - DNA, 101 bp, Homo sapiens
cacagacatgactgagtcctccatgaagaatccagacatttaatgtggatgcaccatgccagaccgtggaagatttaacgaatggggttgtgatggcccag

SEQ ID NO: 789362 - DNA, 90 bp, Homo sapiens
caagaaggagattttgaagatgcagatacccaggaagaggctctgcgtcgccagcgggagcaagaaattgcattaaggcgacagcgagaa

SEQ ID NO: 789363 - DNA, 100 bp, Homo sapiens
tcacctgaatgacatctacctccatcaggaccccagatgtctgacagccctgtgtgacaccaagataagtaacgagaatgtactactcatcacctcccac

SEQ ID NO: 789364 - DNA, 100 bp, Homo sapiens
gacaaagggaaaaatgctgaagtgctgtactcgatcgagtcaggtctggagcccggcactgtggtcataacagagcaggcagtggatacctgcttcaagg

SEQ ID NO: 789365 - DNA, 90 bp, Homo sapiens
gtgaggtgccgccatttcatctgtcctcattctctgcgcctttcgcagagcttccagcagcggtggcgggacaggcttcattgggacagc

SEQ ID NO: 789366 - DNA, 100 bp, Homo sapiens
ccactggacctccaaggaagccacgtgcagacatctacaaccttcgatctcctgacgagtctcctctgagcctccggcctccataagacccaaaacagat

SEQ ID NO: 789367 - DNA, 53 bp, Homo sapiens
agagaaaaagaacattactgtcttggtgctggagaatctggtaaaagcaccat

SEQ ID NO: 789368 - DNA, 100 bp, Homo sapiens
acctgaccattggggtcacggtgtttgccgtggggaagcattctgaaggcaaatcctgtttagacccaggcaaaggttcctggtgacccaggctctcatg

SEQ ID NO: 789369 - DNA, 107 bp, Homo sapiens
cttatactcctcccagtgacgggtctggagtgcgtgggggaccggctgttggcggatgaggacggggacttggttgccttttccagtgacgaggaattgacaatggc

SEQ ID NO: 789370 - DNA, 100 bp, Homo sapiens
cggtcccgcccaacgcccgactctgcagagatcctacaagaatccaggatgatgatcccagattgccagcgcaggttggaagccgcatatttggatcttc

SEQ ID NO: 789371 - DNA, 100 bp, Homo sapiens
cgcgccaccatcttcggctgaagagataattgacgaccttgccaacctagtggagaacacagatgaaaaacttcgcaatgaaaccaggcgggtaaacatg

SEQ ID NO: 789372 - DNA, 100 bp, Homo sapiens
cccgggccatggccgccgccgatgccgaggatcaggggggtttgggtattgctatcagcgaagaagatacactcagtggagtcatcataaagagcttaac

SEQ ID NO: 789373 - DNA, 98 bp, Homo sapiens
ttgttgactaagctgaaggaaactgctgaaaacagcctcaagaaaccagtaacagattgtgttatttcatgcttagaagaaatgaaacgggaagccag

SEQ ID NO: 789374 - DNA, 100 bp, Homo sapiens
gctggtgcatctgtttgccggaggttatttacctcatactctaccatgccatctttgtgttctttacctggacctactggaagtctatctttacactccc

SEQ ID NO: 789375 - DNA, 100 bp, Homo sapiens
cacgagtgaattgttctcagtttctcggtttatgtgctcttccagtgatgagtctcaagcaacaaaagaaattttggcacaaaaatgtaaaacttactct

SEQ ID NO: 789376 - DNA, 83 bp, Homo sapiens
ggggcaaagggaccacggtcaccgtctcctcagcaattctgtggtgttcttggtcacacatttatggagtttctgaagggcag

SEQ ID NO: 789377 - DNA, 90 bp, Homo sapiens
ttattggagcgcagactgatggcgcaaaggggccaattcctgtccccccagcagcatggcatcgtgtgctgaaccctctgagccctctgc

SEQ ID NO: 789378 - DNA, 98 bp, Homo sapiens
ctcgtgaccaaacgccagatgaaaatgaggaagtgatcgtcagaattatcgggcacttctttgctagccagagtctagaaggaagctcataccggggg

SEQ ID NO: 789379 - DNA, 80 bp, Homo sapiens
aagtttgcagatcgggagcgcaaggtcgccctcaaggccatgatcaaaacgaactcctggaagcaggacatggagcgggg

SEQ ID NO: 789380 - DNA, 75 bp, Homo sapiens
acgactacggccctcatttccagggcatcctggaggccagcctggaaggaacctatgtcagatgcaggaagacaa

SEQ ID NO: 789381 - DNA, 122 bp, Homo sapiens
tgcttctttagttccatcaaacacagaggaatgaccaccatggcagatggcaacagaggatgtcaacaattttttggaggtcatggaaaatggaagatttgcaaaatacaaatattttaccc

SEQ ID NO: 789382 - DNA, 100 bp, Homo sapiens
aatggattggagtgaaccggagaccccgaaaacggaagcgcagggagaaggaagaggtgtttgaaaagctgtgttggggtggaagaggaggaggcgcccg

SEQ ID NO: 789383 - DNA, 100 bp, Homo sapiens
cctgtaaggggctagacaggattgaggagagactgcctattctgaatcagccatcaactcagatgagcagcagctgctcagggctgagcagggtcctggt

SEQ ID NO: 789384 - DNA, 100 bp, Homo sapiens
tctcaaaatgtgctttgctgctagaaacctaagcatgccggatctggaaaacagaatttatccagttggcgaaggactttgaggatttccgtaaaaagtg

SEQ ID NO: 789385 - DNA, 100 bp, Homo sapiens
ggaaggggaaggaaacctctctgaaatctgacacctgctctcccggcaaggaaacttcgcaggctggtattgggagagttgctgctacatctttaggaaa

SEQ ID NO: 789386 - DNA, 80 bp, Homo sapiens
cccctgcaggaactctacaacccaatccaggaagggaaaaggccgaggcatcagcgtgtgaagaccgcaaagacgatccc

SEQ ID NO: 789387 - DNA, 74 bp, Homo sapiens
cttagctcagcaattcttaccttgaggaggtgcgccagtctgtaactcctgccgagccagtccagtactatttc

SEQ ID NO: 789388 - DNA, 100 bp, Homo sapiens
cgctcctccctttcctcctcctctttctcctcctccttatccgaaccccagtcagaccgatctgctctgctctcgggaagagcatggaggaaatcaagaa

SEQ ID NO: 789389 - DNA, 75 bp, Homo sapiens
acgggatgcggggcctggcggtcttcatctcggatatccgcaactgattgtcagtggcttcgccccgaggagagc

SEQ ID NO: 789390 - DNA, 100 bp, Homo sapiens
ctggtgtatgttgtcaactatccaaaagcaatgtaacacacacccgtttgacaatgaggtaaaagataaggaatacaagccccacagcatcccccttaga

SEQ ID NO: 789391 - DNA, 133 bp, Homo sapiens
ccggttttatggtgcagagattgtctcggctcttgagtacttgcactcgcgggacgtggtataccgcgacatcaagtgtgtgataacttggaaaacttcacctcaggcagtcctttcctgtgcatggatctca

SEQ ID NO: 789392 - DNA, 96 bp, Homo sapiens
gatcctgcaccacaaggtgtacgatttgaccaaatttctggaagagtctgcgggccaggcatcgacatccgcaacgactatcagcagctgaagcgc

SEQ ID NO: 789393 - DNA, 100 bp, Homo sapiens
cgcacctggtagctttgggcttcaccatctttctgacagcgctgtcccggccaggaaccagactggcctccctgatctctctcctcatggcagcgaccca

SEQ ID NO: 789394 - DNA, 82 bp, Homo sapiens
agcagaaaattacctaaatgcactctttcgaaagaaagtcttctcattcacaggttaaggctacctttccagataatccaac

SEQ ID NO: 789395 - DNA, 83 bp, Homo sapiens
gatgagagcattcgaagtgacctcagcagggcatccagcaatggctgccatccggaagaaactggtgattgttggtgatggag

SEQ ID NO: 789396 - DNA, 98 bp, Homo sapiens
gaggaaagacacacctaccaagaagccagtcaagcggccagtgctgcagttcggcttcgtcaccatcttcgtggccgcctgtccgctcgcgccgctct

SEQ ID NO: 789397 - DNA, 100 bp, Homo sapiens
ccccgacgccacctccgctgctgctgctgctcttcccgctgctgctcttctccaggctctgtgctgactcaggtgttgacaccttggcagtgtttatggc

SEQ ID NO: 789398 - DNA, 90 bp, Homo sapiens
ctaatccagtggaaatcaggagagtgagttgggaacagcttacgtttctgcaacaactggtgccgtagcaacagctctaggactcaatgc

SEQ ID NO: 789399 - DNA, 90 bp, Homo sapiens
ccgagcacccaggcgactgcctcatcttcaagaacccagcgggtgccgcttctccacccgaggcttccacctccaacgagccatgttcca

SEQ ID NO: 789400 - DNA, 100 bp, Homo sapiens
cggactgcgagatggaggaggggcggcgctgcggccacccggcagaggtgctgatactcaaagaaggtttaagttgtctgatctctctataaattccact

SEQ ID NO: 789401 - DNA, 83 bp, Homo sapiens
cacaaagcatccatattgcactgcttgggcagagtgctgagtctgttcgaggaatcagagatcattgatttcttcctgggggc

SEQ ID NO: 789402 - DNA, 100 bp, Homo sapiens
ggcggatctggacacccagcggtctgacatcgcgacgctgctcaaaacctcgctccggaaaggggacacctggtctataacttgacccaggagttcttcc

SEQ ID NO: 789403 - DNA, 83 bp, Homo sapiens
gggcaacctccagatccatcacgtggggcaggacggtcagggtttgccttcccggattgggcctacaagccagagtcgtcccc

SEQ ID NO: 789404 - DNA, 76 bp, Homo sapiens
tgtaaatgttgagcctttttggcctggcttgtttgcaaaggctccacataaacacggtttccttgaaggccgccat

SEQ ID NO: 789405 - DNA, 74 bp, Homo sapiens
gcagctggccaagaaggagcagtccaaggagctgcagatatccagagacaatggccccgatgggatggagcccg

SEQ ID NO: 789406 - DNA, 99 bp, Homo sapiens
tggaccccgcggcgcccctcggcctcggagcaacgagcgcagcgccgaagacttgcactatctgccagatgctgcttcctaaccagtgcagttatgcat

SEQ ID NO: 789407 - DNA, 82 bp, Homo sapiens
gccaaagccaagctcaccaaactgaagatgccttctcagtcagttgaggggatggagtgttagatctctctacaaagaaaac

SEQ ID NO: 789408 - DNA, 75 bp, Homo sapiens
ggtactgctacaatggcagcatctgtgagatccaggatgagaagactgataaaagaagaagctagctgaacagct

SEQ ID NO: 789409 - DNA, 55 bp, Homo sapiens
ggcatctgtaaggtgcggccgccgccggtatggtctggctctatcgcccaggctg

SEQ ID NO: 789410 - DNA, 97 bp, Homo sapiens
tatttgaagaggcactggaaaaatatggcaaagacttcaatgacatacggcaagattttatgctgcacttaaaaggatgcttgttttgatgtcctgc

SEQ ID NO: 789411 - DNA, 75 bp, Homo sapiens
cgcagttatgcccagaatgtgactgtctggatcaaacccagcggcctgcagacagccccgaagatttttggaggt

SEQ ID NO: 789412 - DNA, 75 bp, Homo sapiens
tgatgaagacgttatttaccatatccagtatgatgaaactgataaatttcaaacggaagagagtggcagcattta

SEQ ID NO: 789413 - DNA, 100 bp, Homo sapiens
tcaacgaggaactcaaagtggatgaggaaactggaagacctgaacttccctgagatcaaacgaaggaagatggctgacaggaaggatgaggacaggaagc

SEQ ID NO: 789414 - DNA, 100 bp, Homo sapiens
ctgactatgaccccaccattgaagactcctacctgaaacatacggagattgacaatcaatgggccatcttggacgacatagggcctgattacattccaac

SEQ ID NO: 789415 - DNA, 100 bp, Homo sapiens
ttcgcgctggacaagagggtcctgattcgagtgacctactgctgctggagccagttctgcttctcggcaaggagcgatttgctggtgtagacatccgtgt

SEQ ID NO: 789416 - DNA, 97 bp, Homo sapiens
actgcaggaaggggaccaagttctagctgtgaatgatgtggatttccaagatattgagcacagcaaggccctggccaacgtcaacattgggagcctc

SEQ ID NO: 789417 - DNA, 98 bp, Homo sapiens
tcctgccgtcttcctatccttacccgacctcagatgctcccttctgctcctgggctgatggagttatgagaacaatgaacacagaaaaactcctaaaa

SEQ ID NO: 789418 - DNA, 75 bp, Homo sapiens
gtgtgtgtgtcccgggcccagacgaattgaggtgattgtggccttggctgtatgtggctccatcctcttcctcct

SEQ ID NO: 789419 - DNA, 100 bp, Homo sapiens
tctacctgcccgacgcgttcgtggagaggagcagcggttgctgttggaggaggcttgttagagtgctgtgcaagatgtctggtaggggccccctttgctt

SEQ ID NO: 789420 - DNA, 100 bp, Homo sapiens
cctggtggaacagttgttgcagcaagcgattcaggaaagtccatcagcttgataatggaggagaacaatgactccacggagaacccccaacaaggccaag

SEQ ID NO: 789421 - DNA, 100 bp, Homo sapiens
ggggcatcatgaagcgggctggcggcgctgccgctcccgggcggccgcgggcgggtgtgaatgacagaggtggtgccatccagcgcgctcagcgaggtca

SEQ ID NO: 789422 - DNA, 83 bp, Homo sapiens
aggaatcggcaaactccctggtctctgttggtgtagaagccaaaatcaggtgaggaagaggatggagatgaagatgaggaagc

SEQ ID NO: 789423 - DNA, 100 bp, Homo sapiens
actcctgacctagatgggtggtttcatgcacctccagtacaactgtggctcctagcagctgtggcacagcagcgtccgtctccaagagagtatgaagaga

SEQ ID NO: 789424 - DNA, 99 bp, Homo sapiens
gagatccgctcgcgcgccgaagttttgattacgaagatgcaggctaccagactgcagaacttgtaaaaatggatattctactgaatggaaatactgtag

SEQ ID NO: 789425 - DNA, 75 bp, Homo sapiens
agctgggctgcagagctggtgattatgtttgagaccttcaacaccccggccatgtacgtggccatccaggccgtg

SEQ ID NO: 789426 - DNA, 75 bp, Homo sapiens
gctcctttaatttttgaacgagtgaatgaagaatggctggaaggggagtgcaaagggaaggtgggcattttcccc

SEQ ID NO: 789427 - DNA, 74 bp, Homo sapiens
gcacgagctgtgaggggattcacttgtgtgcggaactcctcggaaccatggtttgtgtctggagaaaagagtct

SEQ ID NO: 789428 - DNA, 50 bp, Homo sapiens
gtgatcctcccacctttgggattacaggttgaaaggattgttgacaaaag

SEQ ID NO: 789429 - DNA, 98 bp, Homo sapiens
aagaggttgtggtgctcttccggatgagaagtgcttagattctggatacattttgaagacggaatcagtccccaatgcctggaaattcctcattggat

SEQ ID NO: 789430 - DNA, 98 bp, Homo sapiens
tccaagatggtgacttctacgaaaaagccctggtggagctgaaggttgcagttcagagggctgtgtacaaggacctggtgctcttgctccagaaagac

SEQ ID NO: 789431 - DNA, 100 bp, Homo sapiens
gggccttttgacaactccaatgttgactgttgaatgcctttgagaacttgatgcataaaatttgcatgactcctcactcctttctggatctctcattgga

SEQ ID NO: 789432 - DNA, 100 bp, Homo sapiens
catttaattttagggtcctttatatagaagggagagtagggcaagcaggaggacttcaagacgacagttctggagggtatggagacggccaagcatcagg

SEQ ID NO: 789433 - DNA, 75 bp, Homo sapiens
tggagcaggaagaggagttgagggcagggcggagagcagttctccaagctcatctttgggtgaaaaattgtcggg

SEQ ID NO: 789434 - DNA, 50 bp, Homo sapiens
aggatcagctgaacagatcaagaattactcaaggtgatgaggacaattga

SEQ ID NO: 789435 - DNA, 98 bp, Homo sapiens
attatctcgagcaaattaagcactatacagtttatgtaacttgatggaagaaaatggaattactccaaaaagacaagtgctcaagcagcaaaatcctt

SEQ ID NO: 789436 - DNA, 96 bp, Homo sapiens
cggccttcctcatgttgttcttcctcatcatgaactttctggaggagtctactcttcatcttgtgttgagacttcgtggtggtgctaagaaaagga

SEQ ID NO: 789437 - DNA, 100 bp, Homo sapiens
caaagaaacaagccgtggaataggtgtatcaagtaatggtgcaaagcctgaaggaaagccagagagctgtgcagttactcctcgatttcccaaatcaaaa

SEQ ID NO: 789438 - DNA, 82 bp, Homo sapiens
agtacatcataatcggcgacacaggtcttccgaccccgaactccaccggaggcaattgcactgtgtagccgtctgctggagt

SEQ ID NO: 789439 - DNA, 82 bp, Homo sapiens
agccgctggcagccgcggatctcaccgccgctcaggcatcccggagttccttcccgtcctcccacatgcatcccctgtgcag

SEQ ID NO: 789440 - DNA, 83 bp, Homo sapiens
ggcagcggcacctacggggacgtctataagagtaatcaagtcagaggattatatgacttttatctgcctagagaagaactatg

SEQ ID NO: 789441 - DNA, 88 bp, Homo sapiens
gaccttgcagcaggaattctccctgatcaatgtgcaaatccggaatgtcaatgtggagggatcagtttcattcacggatgtgactgtg

SEQ ID NO: 789442 - DNA, 73 bp, Homo sapiens
agtgggggtgtgcaaacccgagagaactggatgacctgagaattaatttatggcacttagaaatcacagatag

SEQ ID NO: 789443 - DNA, 100 bp, Homo sapiens
ttttcacgttcggtttggaaagctgggagtcctgagatccaaagagaaagtgtttgaggtggtatcaacatcctacagaagaagaattaagaattcttgc

SEQ ID NO: 789444 - DNA, 88 bp, Homo sapiens
tttaaaaagaaataataaaatgggagagaatgaagcaagtttacctaacacgtctttgcaaggtccgtctcacccgtgaaataaaaca

SEQ ID NO: 789445 - DNA, 83 bp, Homo sapiens
cgctgagcttggcgcacgggccgaccagctgtgagccgtgagctttgaggcggtgggatgtgtcagcagaatgtctcctgccc

SEQ ID NO: 789446 - DNA, 75 bp, Homo sapiens
aatttgctaaaagagcggccagagttgttcatccagggagacagcgtcaagagtgagccatggagctacgtgtgg

SEQ ID NO: 789447 - DNA, 83 bp, Homo sapiens
cgcgactcggcgcccgcccgcgatctaaccatgagctaccctggctatcccccgcccccaggtggctacccaccagctgcacc

SEQ ID NO: 789448 - DNA, 83 bp, Homo sapiens
acacggtctacaccgacttcgacggtgaccctggcaaagatgagagtgcacatttcgtcctgcctgaaggtccaggagcagat

SEQ ID NO: 789449 - DNA, 98 bp, Homo sapiens
gcgatcttccttccggagccatgtcagaaggagtggacttgattgatatatatgctgacgaggagttcaaccaggcagatgacctcagcaaccccttt

SEQ ID NO: 789450 - DNA, 75 bp, Homo sapiens
ggattcatttagagctgcggaacaggacgccctctgatattttgcaagaacgaggctcaaggatgtgagggacac

SEQ ID NO: 789451 - DNA, 98 bp, Homo sapiens
gccttagctgtgctcgcgctactctctctttctggcctggaggctatccagcgctcctctgctgaacagcccctgggcgggagactcaggaagctgag

SEQ ID NO: 789452 - DNA, 98 bp, Homo sapiens
ctttccctcagcacacagaggatgatgctgactttgatgaaggatctaagcctttcccacgttatggttataaaccctccccaccgaatggatgtggc

SEQ ID NO: 789453 - DNA, 90 bp, Homo sapiens
gacccgcttcactgctggagtcatctgttctgagactgataccccaatgtccttctttgactttgtggttgatcctcattctttcccccg

SEQ ID NO: 789454 - DNA, 75 bp, Homo sapiens
gcatgtcctcaacgcacttgtccagggtcgacaagtgcccccaatgatttatggtacaacttcattgaactgccc

SEQ ID NO: 789455 - DNA, 75 bp, Homo sapiens
tgatgacctatggcgagcggccctactgggagttgtccaaccacgagttaagtgggcagaccaacatccacctca

SEQ ID NO: 789456 - DNA, 82 bp, Homo sapiens
tctgaagactttagtcctctctcacctgatgtgcctatgattgagaggatccagaatccagatctctggaatagctaccagg

SEQ ID NO: 789457 - DNA, 133 bp, Homo sapiens
ggatattaaaccatttcttccctttcctcttgacactgcagctgcagtcaacctcttccccaatttcaatgcgtcaggtcaattcagtgaagatatgatacccacagtgggcttcaacatgaggaaggtaact

SEQ ID NO: 789458 - DNA, 75 bp, Homo sapiens
ggggccttcggaaagagagagcaggctgaagaggaacgatatttccggtaactttcgaccgactttccccaagag

SEQ ID NO: 789459 - DNA, 74 bp, Homo sapiens
ggcccggcgtctcggcccttgcctgcgcgcctaccaggctcgaccccagcaacatctgaatgaattgatgacga

SEQ ID NO: 789460 - DNA, 100 bp, Homo sapiens
cacctacttggaactgctcagctagatggcccactgcgtgaccttggttcagctgtccatttcctgtgaccatctcattgacaaggacatcggctccaag

SEQ ID NO: 789461 - DNA, 76 bp, Homo sapiens
ggccgcggcggtcgctgggggccacggagcctgaggacattcagtcagaagaaggctgctattgaaagagagtatg

SEQ ID NO: 789462 - DNA, 111 bp, Homo sapiens
gcgcacctcagccgcctcctagcggcgcggcgctcgctcctacgtgccggtggtggtgtgcacattgagccccggtatagacagttcccccagctgaccagatcccaggtg

SEQ ID NO: 789463 - DNA, 80 bp, Homo sapiens
tgtccccgggggcgccatggcgaccggagcgaacgccacgccgttggaattcagaaggagctggcggacatcactttaga

SEQ ID NO: 789464 - DNA, 100 bp, Homo sapiens
acgacaagctggtccagctctatgcagtggtgtctgaggagcccatctacatcgtcaccgagtatatgaacaaaggaccttcctgcagacggtgagcagt

SEQ ID NO: 789465 - DNA, 99 bp, Homo sapiens
cggttgtctcggttactcatgagagaaagcctctatttgaggtaggttgaccgactgtccagggtcagccgggaatgagaattgctgcaggacttccag

SEQ ID NO: 789466 - DNA, 100 bp, Homo sapiens
tgtgggaaaggctcggctcatgttctgggacttaggagggcaggaagagctgcagtctttgtgggacaaggacttgggaccctggaggactgacgctgct

SEQ ID NO: 789467 - DNA, 100 bp, Homo sapiens
tctgcctcgagactgaagaccgatccttatgtgaagattcatctgatgcagaatggtaagaggctgaagaagaaaaagacaacaattaaaaagaacacac

SEQ ID NO: 789468 - DNA, 101 bp, Homo sapiens
tacctcactgcagaggtgctggagctggcagagtccaactccccagattaaacctgaatatttagccttgaggtctgttggcatcagaagagagaaaaaaa

SEQ ID NO: 789469 - DNA, 89 bp, Homo sapiens
cggaggactccccagccagtcaccatcaagccccctccacctgagacaacaaaggaggctttgaaaatgttttagaagaaattgctgaa

SEQ ID NO: 789470 - DNA, 82 bp, Homo sapiens
aggatgtgccaccagaacccaagaagattccgataagaaacacggagggggttcctgaggagactgatgactttggggagtt

SEQ ID NO: 789471 - DNA, 100 bp, Homo sapiens
ggtgtctgagcacagcatcatcaaggacttcaccaagcaggaaggagactctaattttggattccttggtggaggaaaataaaacactctggtcttgccg

SEQ ID NO: 789472 - DNA, 82 bp, Homo sapiens
tgctatcagtgcccgctttgttcagctgcagcatggagagatagataaacggaaaatggtgtgaatggaacattaacttcaa

SEQ ID NO: 789473 - DNA, 74 bp, Homo sapiens
cagaaataccaagggtggagatgctccagctgctggtgaagatgcatgaatagtgaatgagttcacggtgatca

SEQ ID NO: 789474 - DNA, 75 bp, Homo sapiens
aatgatgaaaatgagcaccagttatctttaagaacgccctcaaggacgttttgttctgaagactctcatattcag

SEQ ID NO: 789475 - DNA, 99 bp, Homo sapiens
ggaggttcttttggtcttcgtgagttttctcaaatccgatatgatgctgtgaagagtaaagaaaatgctgtccagtggggtgtgtacatcaactgttca

SEQ ID NO: 789476 - DNA, 122 bp, Homo sapiens
caaggtattttgatcttcatgacccaccacaagatgttgtttgcattgacttggatacgaacatgttatatgtaagcctccccagctttctgaggatgatatctggctaaaaagcgagggag

SEQ ID NO: 789477 - DNA, 78 bp, Homo sapiens
cgccgacatgaagaaagacgtgcggatcctgctggtgggagaacaaaccactcaagaaggttattattgaagaaactg

SEQ ID NO: 789478 - DNA, 90 bp, Homo sapiens
cgttgctggtgcgagtccttcgaggatctggatgagctgcactaccaggacacagattcagatgtgccggagcagagggatagcaagtgc

SEQ ID NO: 789479 - DNA, 100 bp, Homo sapiens
acgtgttggaccttccggagcttctcagaagacagagggttttcttttgaggaaagtccatcagcttgataatggaggagaacaatgactccacggagaa

SEQ ID NO: 789480 - DNA, 133 bp, Homo sapiens
gatgccctttccaaaccagacccctgtgtcatcctcaagatgcagtctcatgggcagtggtttgaggttgcacgttttcaaaaaatacctaatggtgaaaatgagacaatgattcctgtattgacatcaaaaa

SEQ ID NO: 789481 - DNA, 100 bp, Homo sapiens
gtgcgtgcgggcggaggccggcccccgagagccgccgacatgaagaaagacgtgcggatcctgctggtgggagaactctccagtgttccggcaccggacc

SEQ ID NO: 789482 - DNA, 82 bp, Homo sapiens
cacccacgcggccctgctgaaagtggcgcaaatgtagtttatgccaacgtgacttcattcatacagatgaaccaaggatcgg

SEQ ID NO: 789483 - DNA, 89 bp, Homo sapiens
ctctggctctggctgtgcgcgctggcgctgagcctgcagccggccctgccggtgagaagccctaccactgcaactgggacggctgcggc

SEQ ID NO: 789484 - DNA, 76 bp, Homo sapiens
gcggctgatttagaaggaggttcaggctacggtgagccgaaggacttaaccaccaccatgtcgagcaaaagaacaa

SEQ ID NO: 789485 - DNA, 101 bp, Homo sapiens
gggaagatggcggcgccgctcatccccctctcccagcaggtactaggttttgacaagcttgcatcatgcgtgagtataagctagtcgttcttggctcagga

SEQ ID NO: 789486 - DNA, 100 bp, Homo sapiens
gtgtctccttccgcagacgggctatgtgcacccagatgagttcttccagtcccctgaggtgatggcagatgaccactcccgggtcctgctgaaggcggag

SEQ ID NO: 789487 - DNA, 85 bp, Homo sapiens
ggcttggaagtgcctgaagccagtgggctggggactcacggccgggacactcagggcaggaatggtcctcgtccgaagtgagaat

SEQ ID NO: 789488 - DNA, 100 bp, Homo sapiens
aatatgcagctattgaacgtttgacatgtggcaagtttgaattgagatgtgctctcactggacagccagtgctcattggtggcaccatgggaacctgtag

SEQ ID NO: 789489 - DNA, 90 bp, Homo sapiens
cggaaggcgagcatgaccctgtgacggagtttataggactatggctatgtacagaccacatccacggagatgctgaggaatttcatccag

SEQ ID NO: 789490 - DNA, 75 bp, Homo sapiens
cgctgtcccgcatcaagcgtcacctcctcacacagagagccttcaaagaggagaacgtcagctgcctcaacacca

SEQ ID NO: 789491 - DNA, 75 bp, Homo sapiens
cctcaatttaagcctgatctaacccctagaaacagtgaagagtgaatctaccaagaacgttggcaatgaaaattg

SEQ ID NO: 789492 - DNA, 80 bp, Homo sapiens
aagggcaggatgtacccctgaaaccggatgctgagtaccctgaatgggagtgcatccgccccaacccttttccccctcgt

SEQ ID NO: 789493 - DNA, 75 bp, Homo sapiens
atcagttcttgatcctgatgagaacaccaatcagggtcttcaggcctggaagattgaagacattccagccaacaa

SEQ ID NO: 789494 - DNA, 74 bp, Homo sapiens
ctgatctccatgtcctgttgtggggcttttacagcctttggaactctcagaaattgagcccaatgtattccttc

SEQ ID NO: 789495 - DNA, 100 bp, Homo sapiens
accggcacatggaccccgtcaatgacactaaagattttgagaagagggggaaaaaggaagtttgtcctgtcctggatcagtttctttgtcatgtagccaa

SEQ ID NO: 789496 - DNA, 100 bp, Homo sapiens
atagcctgcacaaggagaggaccggcagcaatcgatttgccaaggatggatagaatgacagaagatgctcttcgcttgaatctgttgaagcggagcttgg

SEQ ID NO: 789497 - DNA, 100 bp, Homo sapiens
tatgatgcacctatatctgaagcaggggaccccacacctaagctttttgctcttcgagatgtcatcagcaagggtttttaatgaccacaacaagcaagca

SEQ ID NO: 789498 - DNA, 78 bp, Homo sapiens
ggaacatgtgatggaaaattatactcagtggctgcaaaaaatatgagtaaaattagcctaatcagaatgttagttcct

SEQ ID NO: 789499 - DNA, 74 bp, Homo sapiens
gagcgggagtgttcgttgtgccagcgactaaaaagagggctcagaaacacttatgggattttctaagcacggag

SEQ ID NO: 789500 - DNA, 100 bp, Homo sapiens
actctgtggacatttatggagcagtgcacgacctaagacttcacagggttcacatggtccagactgaggcatcattcttaacaaagaagttaaatattgg

SEQ ID NO: 789501 - DNA, 100 bp, Homo sapiens
gtcttggtctcaatgtccacaacatgaccccagctacctccccaataggtgcatcagggcaagcaggaggacttcaagacgacagttctggagggtatgg

SEQ ID NO: 789502 - DNA, 75 bp, Homo sapiens
gggtactctacacttgcttccaatccatacaggcccaaaagagttcagattccagctttacatgtggtttggctg

SEQ ID NO: 789503 - DNA, 100 bp, Homo sapiens
cactgacttcaagaatgaagccacggacccttgcggtctcctctgagcctccggcctccataagacccaaaacagatgacacctcttcccagtcccccgc

SEQ ID NO: 789504 - DNA, 51 bp, Homo sapiens
aaggattccaagtaactcttatttgaatacagctacctacccaggcaatat

SEQ ID NO: 789505 - DNA, 75 bp, Homo sapiens
acgagcgctccctcaacactgacgtgctctttgggctgctccgggaggtaaatgccatctgctatggggccaaga

SEQ ID NO: 789506 - DNA, 113 bp, Homo sapiens
ccgcaccatgccgctcctaagcctgcacagccgcggcggcagcagcagtgagagatgaggacggggacttggttgccttttccagtgacgaggaattgacaatggccatgtcc

SEQ ID NO: 789507 - DNA, 101 bp, Homo sapiens
agcctcacaagtagctgggactacagtttcttcagatggaggtactgagccctctgccttagtggatgacaacggtagtgaggaggacttcagctatgaag

SEQ ID NO: 789508 - DNA, 100 bp, Homo sapiens
actgcgtggtgcccgggcagtcccatgcccaggtcacgtggcacaagcgtgggggcagcctccctgtccggcaccagagcaaaatatgctgtgaattcca

SEQ ID NO: 789509 - DNA, 100 bp, Homo sapiens
accgccaccggcccgacctcatggtgaaaatgtttgccattaaactcacatgaagtaggaaatatttatatggatacaaaaggcacctgcatgggataat

SEQ ID NO: 789510 - DNA, 75 bp, Homo sapiens
ggagaggagtgggacaactcctaaaggatgctggaggtcagcagattggcttcttgctaggaagctgtggtattg

SEQ ID NO: 789511 - DNA, 91 bp, Homo sapiens
tgtcttcggtggactccttcggcagtccacccaccgccgccgcctcccagtaatagctcttcaagtctgcaataaaaaatggcctccaaca

SEQ ID NO: 789512 - DNA, 100 bp, Homo sapiens
cgcacagccaggacatcctggaacctgggaaaggggttattttggagctgttggagcactccttgagctgttgaagatcccgtgatcattacctggggag

SEQ ID NO: 789513 - DNA, 87 bp, Homo sapiens
cccagcagatggagaatagaccctctgtccaggcagcattaaaacttaagcaggactggacctacagagacatctgggattttctgc

SEQ ID NO: 789514 - DNA, 90 bp, Homo sapiens
agctgagctgcgaggaaaatggcggcgggagtgctcaaagatccagacagcaatccatacagcttacttgataatacagaatcagatcag

SEQ ID NO: 789515 - DNA, 100 bp, Homo sapiens
cgccagaaggaagatggcggatctggaggagcagttgtctgatgaagagaaggtcaatgagctgaaggagaaaggcaacaaggccctgagcgtgggtaac

SEQ ID NO: 789516 - DNA, 100 bp, Homo sapiens
ccgaagaagaaaggattcgttacagccagagattgttccctgtattgaacactgatatacaaggaatgaatagaagtcaagaaaaacagacctggtggga

SEQ ID NO: 789517 - DNA, 83 bp, Homo sapiens
gccgcacccggccggcccggccccagccccatggacctccgagcagacaatgcagatcttcgtgaagactctgactggtaaga

SEQ ID NO: 789518 - DNA, 87 bp, Homo sapiens
aagctgccaagttgaaaatggacgagtaatcgcctgctttgattcattgaaagttcaaaatggaaagtatttattgaccaaattaac

SEQ ID NO: 789519 - DNA, 50 bp, Homo sapiens
ggaaaaggcccctgtgacctgttcgtgctggccgtgggcagcgccgtctt

SEQ ID NO: 789520 - DNA, 100 bp, Homo sapiens
cagatgacaaaacttcaagccaaacatcaagcagaatgtgatttgcttgaagatatgaggggatggcctttacccttgaagaaaggctgcagcttggaat

SEQ ID NO: 789521 - DNA, 82 bp, Homo sapiens
aaggagctaaagcagcgtgcgttcagccctggggctcgggacgtgtacgaggaggccatccggacagtgatgaccgtgcggg

SEQ ID NO: 789522 - DNA, 90 bp, Homo sapiens
ctggaagcgccttagaggagccatttttccagctgtcttgtcgacggtctcactgatgcctcttctgcattcaaagttcctcgacccggg

SEQ ID NO: 789523 - DNA, 75 bp, Homo sapiens
gtcaccatctcgttggcctattcggtgaaggtggaaaaacctagtgttcagagttccaaaccaaaaaagacctca

SEQ ID NO: 789524 - DNA, 50 bp, Homo sapiens
cttcatcagaatcagattcatgcaatagagtgttttctgcctacattaaa

SEQ ID NO: 789525 - DNA, 90 bp, Homo sapiens
tgatgaggaaagctgtgaaagttctcaagtatggtttgaagtggtgaacatggatttttctcggcttcacatgtacagtcctccccagtg

SEQ ID NO: 789526 - DNA, 75 bp, Homo sapiens
gtgggcaacgtacgtcagacggcagtggtggaaaagatccatgccaaggtggtttgtgatgaaaatggttccaag

SEQ ID NO: 789527 - DNA, 51 bp, Homo sapiens
tcttatccttgcatgtctcttcatggagaatagcctaacatggcagaccag

SEQ ID NO: 789528 - DNA, 100 bp, Homo sapiens
atgcgcagtcatgagtcgcttcaagtttatcggacgaaaaggaggttgtgctaaagggaaaggaggatcgatgcacatgtatgccaagaacttctacggg

SEQ ID NO: 789529 - DNA, 75 bp, Homo sapiens
ataaaagcccggattcaggattcagatgaaccagggcatatcaagagaggagatttctttcacaactcatccaga

SEQ ID NO: 789530 - DNA, 75 bp, Homo sapiens
cgctgctgcaaccccaagatgtcggagacacggtggaaacgcttatgatgaaggatttgggggcagagcacttgg

SEQ ID NO: 789531 - DNA, 83 bp, Homo sapiens
cggaggcgggcgtttcgaccactgcccgatcatgcgcttactcaatggcatttctgttaacatccaggacttggccccgtcct

SEQ ID NO: 789532 - DNA, 100 bp, Homo sapiens
gagaagccgcccaaagaactgatttattgctaaacatgggtgcatttttggataaacccaaaactgaaaaacataatgctcatggtgctgggaatggttt

SEQ ID NO: 789533 - DNA, 99 bp, Homo sapiens
atcacactgagtggaggtcaacgagcaagaatttctttagcaagaggaagccagatcgctgagggtccggtctccagtttgcctcctgctatatccatt

SEQ ID NO: 789534 - DNA, 75 bp, Homo sapiens
tccttatcctgctaggggggatctacctcctcgtgggccaggcatgactccacagtttctgcaacaacagagccg

SEQ ID NO: 789535 - DNA, 82 bp, Homo sapiens
ggatatcgggtggcggctcgggacggaggacgcgctagtccctgggcgctgcctatggcacagccaagagcggtaccggcat

SEQ ID NO: 789536 - DNA, 90 bp, Homo sapiens
gtagttattactgtcccgtttgattttggagaaaagcaaaaaaatgctcttggtgactgtcatgtggcatgggtctctgcccaagctcgt

SEQ ID NO: 789537 - DNA, 96 bp, Homo sapiens
ggcaggctcagcaaatggttcagccccagtccccggtggctgtcagtcaaagcaagcattatgcggatcaaacctcaccaaggccagcacatagga

SEQ ID NO: 789538 - DNA, 127 bp, Homo sapiens
tcttcataaggttgtagtagcaggagccctctatcttttgttctctggcatggaaggggtcctcagagttactgggatcattgtcacagtcgtactgggactggttataggtgccatttactttggg

SEQ ID NO: 789539 - DNA, 100 bp, Homo sapiens
ggaattctaatttgaaccatgtttggattgaagccgcctctgtattacttaccaggggccttcctgctgtgctggacgcccttcttcgtggtgcacatca

SEQ ID NO: 789540 - DNA, 100 bp, Homo sapiens
cattacagcagctgacatatggaaatgtcagtccaatacagacctcagcttccccattatttcgaggaaggaaatgctatctgtgagcagcagttgataa

SEQ ID NO: 789541 - DNA, 80 bp, Homo sapiens
gatttcctgcttctccttttcatgagtgttcctgtggtctctgcacctcctttcttttcacaataaggtgacctgcttca

SEQ ID NO: 789542 - DNA, 88 bp, Homo sapiens
gaggatgatgaggaagatgaccctgatgccctgaaggatcctctctatcagattgatctgcagggctgcacttggggcgtggcatacc

SEQ ID NO: 789543 - DNA, 82 bp, Homo sapiens
cagttttgaaatcgacacacaaagaatagagttgagcctgtgggacacttcggggctcttccgtgggcggcggcttcgcggg

SEQ ID NO: 789544 - DNA, 96 bp, Homo sapiens
atgggtgcccttgtggccagtaggcaatcacctgaaggatctgacttccagaagctcgccctcccctacctgcggaagagtcaagggaatgtcatc

SEQ ID NO: 789545 - DNA, 97 bp, Homo sapiens
ccccgagtggagggcaaacctgtgaacccacccgagagcaacaaagcaggcgactacagccacgtgaaggtcagcgccaacggcaatgtcctgcgca

SEQ ID NO: 789546 - DNA, 75 bp, Homo sapiens
gacaagtggccacactccctcagtgtaccacatgaaggaagatggttgggtgaaagtagaaagtacagatgtcag

SEQ ID NO: 789547 - DNA, 100 bp, Homo sapiens
atgggagcagttttcatggatgcccctgtttctggtggtaaaaagaacgtattctcatggtacttacagagctggcccaatgagacaaataagcttggtg

SEQ ID NO: 789548 - DNA, 75 bp, Homo sapiens
agagaaggaaacacttagaggaagttctggagatgaagaacaggagtacagctgtgtagtaaagatgccttctgg

SEQ ID NO: 789549 - DNA, 100 bp, Homo sapiens
cggccgcgagttcgaccagaaggcgctgctggagttccgcgacaccatcttcgacaacatcctcaaggtcagcccaaggccaaccccactgtcactctgt

SEQ ID NO: 789550 - DNA, 75 bp, Homo sapiens
tttggacctgtgtacccacccaaggctaaaggcagagccaggagccttttgtggcagatgaatatattgaacgtc

SEQ ID NO: 789551 - DNA, 87 bp, Homo sapiens
gttttcccctcggcactaggcagcggaggagcccgaccgacccgggactggtgattgcagctggaagtgcccatgaccgagctggcg

SEQ ID NO: 789552 - DNA, 51 bp, Homo sapiens
gcaccctcacctcccagcccaacaacagatggagtttcgcccttgttgccc

SEQ ID NO: 789553 - DNA, 96 bp, Homo sapiens
tgttgccaagtctacctgtgccatcaacaacaccctcattgctttcttcattttgactacgataaaaggaggaaacaccaattggaagcctccgct

SEQ ID NO: 789554 - DNA, 89 bp, Homo sapiens
cagaggaatcgttactctttcagtttggaagaactgaagtaattgataatactttaaatcctgattttgtaagaaagtttattctggac

SEQ ID NO: 789555 - DNA, 100 bp, Homo sapiens
gtggaggtggccgtggaggcagaggtggcatgggtggagtgatgcttcggggctcaggcatccagtgggacctgcggaagacccagccctatgatgttta

SEQ ID NO: 789556 - DNA, 75 bp, Homo sapiens
ctaagcaaggtggtctttggtcaactgccgcctggaccaaggcaacaggaagttcatggtgaagctggctgaaga

SEQ ID NO: 789557 - DNA, 100 bp, Homo sapiens
gttgctttcttaggaaatgtagttgctttcttaacctcatcaaattcatgaagatttagccgaggcccatggcaacagcattattgagaaaagcccttac

SEQ ID NO: 789558 - DNA, 95 bp, Homo sapiens
cagaccaccttcataattggagaaacaccaaaaggaatccgcagcatgatgccttcttctgtagagtgggcgctttgcagaatacgtgttgaatg

SEQ ID NO: 789559 - DNA, 76 bp, Homo sapiens
cgccggctactgccgcttcagttctcccggtgtggccacgagtcgggttgagagcaccattggatgcttactttca

SEQ ID NO: 789560 - DNA, 97 bp, Homo sapiens
acagccgacacagatacagcagaccaagtcatggcttccttcaagatcctggctggggacaaggaaagaccacagcaagattctttcattcgtctcc

SEQ ID NO: 789561 - DNA, 75 bp, Homo sapiens
aggtggcctcggcagtcctgtttccctgtaagccaatgttttcagttgcaccaagcttagccaccaatgcatcag

SEQ ID NO: 789562 - DNA, 90 bp, Homo sapiens
cgcgggtcctcgtggatcagactacaggtggccgtctgcccggcccagcaccatgcacacgcttgtgttcttgagcacacggcaggtgct

SEQ ID NO: 789563 - DNA, 74 bp, Homo sapiens
aaaccgccccagcgatggaagaggatcaggagctggagagctatatgttctcctttcagccaagacctttcacc

SEQ ID NO: 789564 - DNA, 83 bp, Homo sapiens
ggaattctaatttgaaccatgtttggattgaagccgcctctgtattacttaccaggctggacaaatcaggacgcaaaccctcg

SEQ ID NO: 789565 - DNA, 75 bp, Homo sapiens
aaacatggcggcggcgggtgttgtgagcgggaaggagatcatgaatcagacagataaaaatcaacaagaaatccc

SEQ ID NO: 789566 - DNA, 99 bp, Homo sapiens
aggagcgcgccctctacatcgtccgggccggcgaagcaggggctatcgagcgggtcctgagggattacagcgacaagtctgttcgagaagtcacaggct

SEQ ID NO: 789567 - DNA, 100 bp, Homo sapiens
cactgtccccccggcttccagggaccccgctgtcagtatggtcgaaatgagaaggggcagctgggacatggtgacaccaagagagtagaagcccctagac

SEQ ID NO: 789568 - DNA, 82 bp, Homo sapiens
tgccctgtgtgctcatctcgggcctggtgctgctcgcctacttcctgccggcgcaggggttgtgagtcccggcccagcccct

SEQ ID NO: 789569 - DNA, 123 bp, Homo sapiens
atgaccttaacacagtagcagctggaaccatgacaggcatgttgtataaatgtacagcggaccatgtgtcaacttatgccgcgtttgtacagacgcatagaccaacaggggagtttatgtttg

SEQ ID NO: 789570 - DNA, 98 bp, Homo sapiens
cacggacgtgctgcagcgctatctgcagcagctgggccggggctgccatcggtactctgagctctgtacatgtcccagagcaagcacacggaggcccg

SEQ ID NO: 789571 - DNA, 75 bp, Homo sapiens
gctgctccccggtgcacccgcaacaggcgttttgcaatgcagatgtagggggatatgagactttctactcggaat

SEQ ID NO: 789572 - DNA, 82 bp, Homo sapiens
ccacatcaaagcagaagaagaccgaagggaagacttccagtagctccaaggaggttaagagtcatttgaaagcttctgaaca

SEQ ID NO: 789573 - DNA, 50 bp, Homo sapiens
cttggatgtaggacaatggaagagttagtcccttaagctcctaggatttt

SEQ ID NO: 789574 - DNA, 82 bp, Homo sapiens
ggctgggctcggtattccccttcctgctagtcctggtggatctgcagtacgaagataggaaccaaggctttagccttctcaa

SEQ ID NO: 789575 - DNA, 97 bp, Homo sapiens
tttgggagagacgctctgaactgactgccccgcatcaccggagcgtcccagctgcgaggaggtgccgctacctggctgttcagctgtctcctgccat

SEQ ID NO: 789576 - DNA, 74 bp, Homo sapiens
tgcagaccttgaacatcctctttgagaacatcagtcacgagacctcactttgtgaagctcgtgtgtggagtgcc

SEQ ID NO: 789577 - DNA, 101 bp, Homo sapiens
gtgctcgcgctactctctctttctggcctggaggctatccagcacctgcctgaccagtgcacgcccaacccctgcgataggaaggggacccaagcctgcca

SEQ ID NO: 789578 - DNA, 100 bp, Homo sapiens
cagaaaccaaaaactccattttgctttgggaccagaagcgcaggcccgctcaggaggaattacaacttcatcgccgcggtggtggagaaggtggcgccat

SEQ ID NO: 789579 - DNA, 100 bp, Homo sapiens
gttccgcttcggggagaagctcttctccggggtcctcatggatctgtccaaaagggatcatagacggtatttctatgtaaacgaacagtcgggcgagtct

SEQ ID NO: 789580 - DNA, 100 bp, Homo sapiens
ggacaagtcctgcgcttggggatcctctgtacgcccgttcactggcagcaagaattattgccaagttagcagcttggggaaaagaactgatggaaggcag

SEQ ID NO: 789581 - DNA, 98 bp, Homo sapiens
cgcccatcaggtggtggtggccaagtatgcgcccagcggattctacattgcctccggaggctcttgtcaggatggtgaagctgttcatcggaaacctg

SEQ ID NO: 789582 - DNA, 75 bp, Homo sapiens
atgggatctttccggatcaatccagatggcagccagtcagtggtggagtgaagtaagaactctgctagagaggaa

SEQ ID NO: 789583 - DNA, 75 bp, Homo sapiens
gggtccctgaagagggaagacacgcggaaacaggtttgggagttgagtgatattgaccatgatggaatgcttgac

SEQ ID NO: 789584 - DNA, 83 bp, Homo sapiens
ggccgaggccaagatggcggtgctgtcagggggggccctcagcctcttggccttgaacgggctgttcatcttgattcacaaac

SEQ ID NO: 789585 - DNA, 75 bp, Homo sapiens
attcgcagtggtcgcttcttctccttggattgtcaccagacctgcaatctatggagcagattcggagaattatga

SEQ ID NO: 789586 - DNA, 75 bp, Homo sapiens
agaatttaacccgtctcttatacagccttcaggttcaaaccttgtactactcagctgatcacaagctgcttgatg

SEQ ID NO: 789587 - DNA, 50 bp, Homo sapiens
caggagaacctggcagatcttttgaggttttagctaaagaagatactgag

SEQ ID NO: 789588 - DNA, 50 bp, Homo sapiens
cgcgaggcgggcagccggggcgtccaggagaagatggtataaactggtcc

SEQ ID NO: 789589 - DNA, 75 bp, Homo sapiens
agactttagaagcggaagaggccaagaggcggttgaaggagcagtctatctttgggacaggggaggcctcctcag

SEQ ID NO: 789590 - DNA, 82 bp, Homo sapiens
ctcagtctctgtcagaggaagatcccttgaccattgccctcttgaacatttaccgtaaccctcaaaactcttcccagtctgc

SEQ ID NO: 789591 - DNA, 75 bp, Homo sapiens
tcctcagccctggctccagaggatcatggcagctcctatgagaacatacatatgatagttgagaaagacacatat

SEQ ID NO: 789592 - DNA, 100 bp, Homo sapiens
ccgacaggattcgttggctgccgtccccgctgctgtgcattgggtgctggagaatctggtaaaagcaccattgtgaagcagatgaggatcctgcatgtta

SEQ ID NO: 789593 - DNA, 75 bp, Homo sapiens
cctcagcctcccgagtggctgggattacagtcttgctggaggtttgttaaatttatttatcttttcaaaaaccag

SEQ ID NO: 789594 - DNA, 101 bp, Homo sapiens
ccgtgacatcctgggatattctttgttgagagaatctccctggaaaaggagacatgaatgtctgcaatgatacttcctgacaagaagttgatacaagaaaa

SEQ ID NO: 789595 - DNA, 82 bp, Homo sapiens
cgggtcggtgcaccgtccgggattttatccaccggcactgccaagatcagtttgacaagtatgcgcccaagctggacagccc

SEQ ID NO: 789596 - DNA, 101 bp, Homo sapiens
taattgagcctcaaaatgaagatggcacatggcccaggcagaccttgcagtcaaagtttgttgaatgtacagagtgcggaagaaagatgcatcagatctgt

SEQ ID NO: 789597 - DNA, 100 bp, Homo sapiens
aatgctggcaaagtggaaaaatgtgcgaatcttgcctcctggaatccttcaaatcctgaatgtctcttacttgtggtgaaggaacttgtgcaacaatatc

SEQ ID NO: 789598 - DNA, 90 bp, Homo sapiens
cttttgattaacaccttaataaccagcggagctgacacagccaaagtccctgtgaagcaggaagagtgagggcaggttcactgcagctca

SEQ ID NO: 789599 - DNA, 100 bp, Homo sapiens
agcaagtgaatcaatagcagaagacctggaagaaccatcctataaacgggaaagattgactagtttcacagagaaacttgcccaggccaaagaagagaac

SEQ ID NO: 789600 - DNA, 116 bp, Homo sapiens
gaacactgccggggcccaaccacaagacgactcaataggaggaaggctacagaagaagtttccaaaaatctggttgccatgaaagaaattctgtatggcacaaatgaaaaagagcc

SEQ ID NO: 789601 - DNA, 75 bp, Homo sapiens
cgaaatccagggcatcccgggcgcggccagtggtgtcttcctggtgctcatcatcactgtaggggacctttgaaa

SEQ ID NO: 789602 - DNA, 100 bp, Homo sapiens
gaaactctttgggaaagccactcgaaaagctggagaccatggccaaaatggaggtgaaaacctcacttctggacaatatgattggagttggggatatggt

SEQ ID NO: 789603 - DNA, 101 bp, Homo sapiens
agcgttttgagaaacagaaagaggtgatcgagggctaccgcaaggaaaatcctgccttgcttcgttgggcctatgcaagaacaataaatgtctatcctaat

SEQ ID NO: 789604 - DNA, 100 bp, Homo sapiens
atctaaaggaggttttaaacagtataacaggccctgtgcaccaaggtgccggaactgatcagaaccatcatgggctggacattggacttcctccgggagc

SEQ ID NO: 789605 - DNA, 74 bp, Homo sapiens
ccggatcaatccagatggcagccagtcagtggtggaggtgaacacacagtgttcatcccctcaggaggacacag

SEQ ID NO: 789606 - DNA, 75 bp, Homo sapiens
cttggaaaatactcagtttcctgcttactgcttcattatggattatacaggtcccagcacacctggaaagttctg

SEQ ID NO: 789607 - DNA, 50 bp, Homo sapiens
agctcaagctgctgctgctcgtttcaccagtgatcattaaagaatgggca

SEQ ID NO: 789608 - DNA, 100 bp, Homo sapiens
ctgctctattaccagaccaactacctggtggtggctgccatgatgatttccattgtgggcaacacagtcactcctggcggcaaaccaaacaaaaccagag

SEQ ID NO: 789609 - DNA, 100 bp, Homo sapiens
ctgcggtcgttccctcggctgtggaccgggcggcacgcacgcggtgcagggtaacatggcggatgcggaaggatgaagaccctgagaccagttggattct

SEQ ID NO: 789610 - DNA, 101 bp, Homo sapiens
tctcaacaacattggcgatgcctcctcgctcatccgagccaccattgatatgagggaaggcaccattggagatatggctatcctgggtataacagaaagtt

SEQ ID NO: 789611 - DNA, 100 bp, Homo sapiens
agggactgtgccagaaaaacagaaaggcagccggtcgcaggcctcgggagagcactattcctgatcagagaactccagttgcttcaacacacagtatcag

SEQ ID NO: 789612 - DNA, 100 bp, Homo sapiens
gtccctgaccatggctccctgcagtaccctttaacggtatgaaaatgaaagtcttcagaatggaaggaagtcaactgaatttccaagaaaaatacgtgaa

SEQ ID NO: 789613 - DNA, 50 bp, Homo sapiens
gacaaagttgaaaacaaagtgctgaagcaaaacggacaagtcggttttta

SEQ ID NO: 789614 - DNA, 50 bp, Homo sapiens
gatcatgtctgcgagccaggattcccgaatgttgtaccatctttgggtag

SEQ ID NO: 789615 - DNA, 101 bp, Homo sapiens
cctgcctctgtcagatcagaaagaggcctccctcgtgagttgggcttggtaccgtgctgcccagaatgcccttcgggagatcatggaagggaagtggttgc

SEQ ID NO: 789616 - DNA, 112 bp, Homo sapiens
tcgcgcccgggaggaaggaacgaggcaaggagctaaagcagcgtgcgttcagccctggggtgctgccttcacctgcctggagactgccttccgcctggacgccctgcaccgg

SEQ ID NO: 789617 - DNA, 100 bp, Homo sapiens
acccagagctccatcctggccctgctggcaattgctgtggaccgctacctccgggtcaagatccctctccggtctggttgggttgaatgctggactgtcc

SEQ ID NO: 789618 - DNA, 100 bp, Homo sapiens
ttgatttgccaggagaacgagggggaaaacgaccctgtattgcagaggattgtagacattctgtatgccacagatctatcagttgagggatttgcagttg

SEQ ID NO: 789619 - DNA, 125 bp, Homo sapiens
gttagagaaaagggctatgaacgattaaaagaagaactcgcaaaagctcagagggtattgaaaaccttccctttgaattacagagaaactttcagctcatgagggacctagaccaaagaacagag

SEQ ID NO: 789620 - DNA, 83 bp, Homo sapiens
gttgtcaaggtggcctaccaggaggccaggggtgtcgccatggtcctctcagggtgcgccatcattgtccgaggtcagcctcg

SEQ ID NO: 789621 - DNA, 100 bp, Homo sapiens
ctcaggctgctgtggttcatgccacagccaaaggactgtacaagaaatctggaaaacttgtattcttaggtttggataatgcaggcaaaaccactcttct

SEQ ID NO: 789622 - DNA, 83 bp, Homo sapiens
cgggctgaagcgactgagtccgcgatggagcgaccagctacatttaccaaagcctgggtgatgtggagtggtacatagagatg

SEQ ID NO: 789623 - DNA, 51 bp, Homo sapiens
gattttggacttctcgccactagaactgctggagtgcaatggcgtgatctc

SEQ ID NO: 789624 - DNA, 75 bp, Homo sapiens
acatctgcaacaaccagcagcatcagaggtgcggtggctactaaagttcgaaggcacgatatgcgtgtccatcct

SEQ ID NO: 789625 - DNA, 75 bp, Homo sapiens
gtgcttgggacaacatggttaaaagggaagatgagaatgtgcctactgctcctgatcctccaagtcaacatttac

SEQ ID NO: 789626 - DNA, 100 bp, Homo sapiens
aaacatttgaaattaatcccagacacccgctgatcagagacatgcttcgacgaattaaggaggatgaaggagaagatgactaaatagaacactgatggat

SEQ ID NO: 789627 - DNA, 83 bp, Homo sapiens
attatttgcaacagctcacgggagcaagaacggtagccaatctgaattctaaggacctctcatataccttaaaggattatgtt

SEQ ID NO: 789628 - DNA, 82 bp, Homo sapiens
ttctgccactgctgctccgtggagatcgtcccgcgcctgccggctgaaggtgatgtggccgccctcaaccgacgcatccagc

SEQ ID NO: 789629 - DNA, 90 bp, Homo sapiens
gatgtaccctcagtacgccacctactattacccccagtatctgcaagccaaggaaggaagcagccaccctcgccatggcctccccgcccg

SEQ ID NO: 789630 - DNA, 75 bp, Homo sapiens
ctggaatttgagtctttggaggcactcaagcagcagcatccaccagctgaggaacaaagtatcagaggagcatga

SEQ ID NO: 789631 - DNA, 100 bp, Homo sapiens
atggaacttagtgctggggctgcaaattttacggatcagaaggaattcagtctccaggacattgaggaccgtgtttcttcgcctcgcctccctggtggtc

SEQ ID NO: 789632 - DNA, 100 bp, Homo sapiens
tgagaatgcagccgtgtgacagtaactgaacattggtctaaagtctttccaaaaggtcaaggttcacaaggtgaggaattttaaattggaacaagagcaa

SEQ ID NO: 789633 - DNA, 75 bp, Homo sapiens
gaacacagactctcagcaactcagcagaccagatgacgtgtactactgtggaataaagtacatcaaagatgatgt

SEQ ID NO: 789634 - DNA, 100 bp, Homo sapiens
tgttgcgggggccggacttcaagacagatgcaccatcaggaatggaattacagtcatggtatcctgttataaagcaggaaggtgaccatgtttctcagac

SEQ ID NO: 789635 - DNA, 101 bp, Homo sapiens
ggctctgcatcgcgtcgccatgatgggccatcgtccagtgctcgtgctcaagatggagtcttgctacattgcccaggctggccttgaactcctggcctgaa

SEQ ID NO: 789636 - DNA, 75 bp, Homo sapiens
aatgctaagaactgctgggaggatgacatcaccaggagactaaagtccatcaaaaacatccagaaaattaccaag

SEQ ID NO: 789637 - DNA, 96 bp, Homo sapiens
cttcgccttcgttgagttcgaggacccgcggtagcctttccagtaaatatatgactcagggaaaagcctcagcgaagaggacccagcaggaatcat

SEQ ID NO: 789638 - DNA, 98 bp, Homo sapiens
cacgttccatccggcgctcagctgggcttgagagtatccggtctaaagtggagttgtcagtctgggatcagcctgaggatcttaatctcttctttact

SEQ ID NO: 789639 - DNA, 74 bp, Homo sapiens
ggaagagaagatcatcgagcatttcaaacgttgattatggaagattcccacaagagtaccacgtcagagacagc

SEQ ID NO: 789640 - DNA, 74 bp, Homo sapiens
aggcgccgcggcgaggagcgagcgctgcgaggtggcggcctgaggttcttcccaggagactctgccggcctttt

SEQ ID NO: 789641 - DNA, 100 bp, Homo sapiens
gttggagaactacagaaacctggtctccctagattttgtggaagtataatactttgtcattatgagatgtcgtctctcggtgcctcctttgtgcaaatta

SEQ ID NO: 789642 - DNA, 97 bp, Homo sapiens
ctggcgttcctcacactccccctgaagttcatctaagatcttcattcttcaaagaaggacagaataacgggctcccagattcacaagccccaccaag

SEQ ID NO: 789643 - DNA, 75 bp, Homo sapiens
cacatgatcagcttcctcctaggggccagtcggcaaaacaatcagtcttccgtgtgtgctaagatcgtgcagctc

SEQ ID NO: 789644 - DNA, 100 bp, Homo sapiens
tgtcgcaggagcacatcgagaccgcttaccgcatctggctggagccctgcattcgcggcgtgtgcaggctggcagtgatggtgaaagcataggaaactgc

SEQ ID NO: 789645 - DNA, 100 bp, Homo sapiens
ccaggttcccatggttgccggctcccctctcaggacaacccagatgtgcaacaaagtgcgatgacctgatggccaaaagaaaggaagaaaatttttcctc

SEQ ID NO: 789646 - DNA, 75 bp, Homo sapiens
atccctcagaaagtcttgacacagatagtcttcttattgctgctccttgcccgacttgaaggtagaagttccttg

SEQ ID NO: 789647 - DNA, 95 bp, Homo sapiens
aaacttgacactcaccctgaccgaaaaagcttgtggtgaaggggggcaaaaaaaagaagcaagttctgaagttcactcttgattgcacccaccct

SEQ ID NO: 789648 - DNA, 88 bp, Homo sapiens
gagatcagctggttctggaagaagattatgatgagacctacattcctagtgagcaaggaccctgatgctcccataagacagaaaatgc

SEQ ID NO: 789649 - DNA, 100 bp, Homo sapiens
agggctcccgcaccgcccggtgctccccatctgcctggcgttgtgcgcagagctggaaagcatggctgttggagttctgggaaatcgttcattcatttac

SEQ ID NO: 789650 - DNA, 74 bp, Homo sapiens
gggagccagcgagccacgggagcgagccaggggaacgcccttttgcttgtgactggcagggctgcgacaagaag

SEQ ID NO: 789651 - DNA, 100 bp, Homo sapiens
agaagactacgaagagcagccagggttgcaaccccacataaacatttcagcaggaacttgatgcaaggcatgacaaatatgagagacttgtgaaacttag

SEQ ID NO: 789652 - DNA, 50 bp, Homo sapiens
ctcccatgttgctcaaagaaccatataaaaaagcttgtggtgaagggggg

SEQ ID NO: 789653 - DNA, 75 bp, Homo sapiens
ggacgccttcacccgcttcaccaaccagacccagggccgggaccgactcttcagaactggttagtactgcagaaa

SEQ ID NO: 789654 - DNA, 82 bp, Homo sapiens
tcacccatctgaagggaggaaatagtggcaggtgacagtctgcatgtgcagttttcaggacgcacaagaccagccactgcta

SEQ ID NO: 789655 - DNA, 100 bp, Homo sapiens
ttctacgtgtcccccgaggatctggaggcacagctgcagtctgacgagagggacagacctcggctgcccgacaactacacgcaggacacgtggcggaagc

SEQ ID NO: 789656 - DNA, 75 bp, Homo sapiens
cgaggagcgggaagagttgctggggtgtagtcgccgccgccagccgccatgggcaaacagaacagcaagctgcgg

SEQ ID NO: 789657 - DNA, 50 bp, Homo sapiens
cggtccccaagacccagcaaactgcatgttggagacttgggcaatgtgac

SEQ ID NO: 789658 - DNA, 145 bp, Homo sapiens
ctgggcaggcggagcagggccttggaccccgcggcgcccctcggcctcggagcaacgagcgcagcgccgggaggttcccctgaaggatgctaaggaatacgctgaatccataggtgccatcgtggttgagacaagtgcaaaaaat

SEQ ID NO: 789659 - DNA, 80 bp, Homo sapiens
gagaatgatccctttgttagaccaaatttaccacaactatggaggagatgtataagaaagctcatgctgctatacgagag

SEQ ID NO: 789660 - DNA, 74 bp, Homo sapiens
cctcgcctcgggacccgcggtccccgctcttgctggaaacagaaactggccatggtataatggaagaaccagaa

SEQ ID NO: 789661 - DNA, 90 bp, Homo sapiens
gacaagcagcagcggcagcacctaagggaacgacaccgtaactatccgcactagaaagttcatgaccaaccgactacttcagaggaaaca

SEQ ID NO: 789662 - DNA, 100 bp, Homo sapiens
cgccagtagtgacaggggcgaacgccgccgggagactccagccggcgggcgagcagggtgctggagaatctggtaaaagcaccattgtgaagcagatgag

SEQ ID NO: 789663 - DNA, 49 bp, Homo sapiens
acagtctaccatgaattggaagggtgtggatgaatggaacatagctcgc

SEQ ID NO: 789664 - DNA, 100 bp, Homo sapiens
tttagtctctttactagagcaagagaaggagccctggatggtgaagcgagagctgacaggaagcctgttctcaggaaagaccacagcaagattctttcat

SEQ ID NO: 789665 - DNA, 50 bp, Homo sapiens
gccatctgaataactttactaagcttttcatgcaacacccaacacttata

SEQ ID NO: 789666 - DNA, 75 bp, Homo sapiens
cacctctgcagtgtcttccacaacctgggttgatgataattagaagcatgctttccactgaacttcccgacaaca

SEQ ID NO: 789667 - DNA, 75 bp, Homo sapiens
aaaatctcccaagaggaatgacaaacaaccagctcttcaggatccagtttatggaaaaggaaaacttggagaaat

SEQ ID NO: 789668 - DNA, 124 bp, Homo sapiens
gagctgctggaggacgagggccagctgacggagatggtgcagaagatggaggaggatgctggcacgtgtgtcctggtcctcaacaaccttctgtgagcctagggacccatttctcctcctttga

SEQ ID NO: 789669 - DNA, 75 bp, Homo sapiens
ccacatgcagccactgcaagagtcaggttccgatgatcgcgctgcaggatccacctctgatgttcagtgaagact

SEQ ID NO: 789670 - DNA, 121 bp, Homo sapiens
agagaggcaccgggatcgtgaccgagaccgtgaccgagagcgtgaccgagagcgcgaatatcgtcatcgttagaagcataacatggcttgaagtaaaaggcagtatccaagtccttcacct

SEQ ID NO: 789671 - DNA, 75 bp, Homo sapiens
gcctggagaggttaaagagacccgttcagagtcctacagtggcagggcggcgactggcggcgcgatggacctgac

SEQ ID NO: 789672 - DNA, 82 bp, Homo sapiens
tttaaagctgagctgcgaggaaaatggcggcgggaggcccgatgagagaaagggaaagttaaggatgctggagcagaacaat

SEQ ID NO: 789673 - DNA, 101 bp, Homo sapiens
tgaaaaccaagtcttgtagtggagtggacgggctctacgagtgcattctctgtgcctgctgtagcaccagctgccccagctactggtggaacggagacaaa

SEQ ID NO: 789674 - DNA, 100 bp, Homo sapiens
cgaaaacgtagggaccacatcaaagacagctttcacagtttgcgggactcagtcccatcactccaaggagagaaggagtatgctgctgctgttccgcttt

SEQ ID NO: 789675 - DNA, 82 bp, Homo sapiens
cgacgtcttgcctgtgtcccacttgttcgcggcctatagttggaatcgaagcctcttaaaatggcagatgacttggacttcg

SEQ ID NO: 789676 - DNA, 73 bp, Homo sapiens
gaggcggcgacggaggaaacagaagatgaccaccgccagtcctcccaccacatccatcacccactgtccaccc

SEQ ID NO: 789677 - DNA, 50 bp, Homo sapiens
cgaacatgcgcttttgacacattggaggagcgcagctcagctgggctgga

SEQ ID NO: 789678 - DNA, 90 bp, Homo sapiens
caaagagagggcggcgctggaacagttgcagggtcacagaaacatcggtattaatgctccctggaaatgctttctacgtcgatagctcag

SEQ ID NO: 789679 - DNA, 88 bp, Homo sapiens
tgaaaaacagtaaagatggaaaaccagttattgaatatcaagaggaggagttgttgttacaacattaaagcctgaacttggaaagata

SEQ ID NO: 789680 - DNA, 95 bp, Homo sapiens
tgacagaagcagtggtcgaatccagtagaaaactggtcaaggaagctgaacgcctttttacccaagtcagccggtgtatcagtcagcacctatca

SEQ ID NO: 789681 - DNA, 119 bp, Homo sapiens
gttcgtcgcctccttgcccgtgaccgtcgctagaactcagttgtgcgttgcggccagtcgccactgctgtgtcatggagaaactccagctgggcccagagattctgcagcgggaaaatc

SEQ ID NO: 789682 - DNA, 50 bp, Homo sapiens
gcttgcagttaggtcaagtggaggtttgtctacagattttgagcgttcga

SEQ ID NO: 789683 - DNA, 95 bp, Homo sapiens
ctatcgcctgacagggtatctgaagtaaaaggggaaatggtggagtcaatgaagaaagtagcagggatggatgtggagctgacagttgaagaaag

SEQ ID NO: 789684 - DNA, 83 bp, Homo sapiens
ctgttcctggaggaatccgagaagagcagagcggagggagccccagacacgggacagagcagaatgggctgatatagatccgg

SEQ ID NO: 789685 - DNA, 100 bp, Homo sapiens
atatcagacaccgagcttcagcaagctctctccaacgattccaacaatgtctcacccatcttggctgccacccaaaagcactggtgagcccctcggccat

SEQ ID NO: 789686 - DNA, 100 bp, Homo sapiens
ctcaccatgccgacagtagaggagctttaccgcaattatggcatcctggccgatgccacggagcaagtgggccaggcgcagcagcttactgatctggaac

SEQ ID NO: 789687 - DNA, 95 bp, Homo sapiens
tgagccgccccgaactaagcagggcggtcggggacaatgcagatcttcgtgaagactctgactggtaagaccatcaccctcgaggttgagcccag

SEQ ID NO: 789688 - DNA, 76 bp, Homo sapiens
gaagctgtgacaaccagaaaggatgcctcataaagagaatgtaactggtcactacatttccccctttcatgatatt

SEQ ID NO: 789689 - DNA, 75 bp, Homo sapiens
ctttttctaactatttcaagatgatatttattcaccaaacaagtccttcaaagaaaagaatgcagaatgttacca

SEQ ID NO: 789690 - DNA, 75 bp, Homo sapiens
ccggagctgggcgcggattcgccgaggcaccgaggcactcagaggaggcccgcgatgctcccagcccggtgagac

SEQ ID NO: 789691 - DNA, 105 bp, Homo sapiens
gacagattcgcagtggtcgcttcttctccttgaatgtttggaatggttttggaaaaaattattattcctgaaattcagaaggtatctggaaatgtagagaaaaag

SEQ ID NO: 789692 - DNA, 100 bp, Homo sapiens
ggccacgtgcttcaacgctctgctgcccgctgtgagggaaaaggggaaactgactctactctgtgatgccaagacagatgggagtttccttgtacaccac

SEQ ID NO: 789693 - DNA, 100 bp, Homo sapiens
aaggccacctcaagaggaacatcgtggtgaagaccgtggagatgcgggatggagagtctggccttaccaaggcagtgaaggagagtacaattacattgca

SEQ ID NO: 789694 - DNA, 100 bp, Homo sapiens
agtcgtagatacaaatttttggatgatgatggatccatttctcctattgaggagtcaacgtactgcataagccgaccacagtataagacttcttgtggca

SEQ ID NO: 789695 - DNA, 90 bp, Homo sapiens
ccgtccccggcaggggacaatgagattgagctctggtagctgaagaacatctcacagtggacgccagggtctattcctacgctctagcac

SEQ ID NO: 789696 - DNA, 83 bp, Homo sapiens
ctggcatcagcacagacaccgctttgccgataggatattagaaatggctactccccagtcaattttcatctttgcaatctgca

SEQ ID NO: 789697 - DNA, 82 bp, Homo sapiens
agaaagaagtaaactgaagttgcaaagcaacagtaataggtacccagtgtgttgaacaaattcaagagttggttctacgctt

SEQ ID NO: 789698 - DNA, 100 bp, Homo sapiens
agctgacggagcttgatgaagaaatggagaatgaaatttgcagagtatgggatatgtcaatggatgaggcagaagtcaattcatctggaaagactatctc

SEQ ID NO: 789699 - DNA, 75 bp, Homo sapiens
cggcgtagaatctgagctgcagaattatatccagatcgagagacagaagattctgaaagggttcaatgaaatgag

SEQ ID NO: 789700 - DNA, 75 bp, Homo sapiens
gccgtcctggggcttctggtcatccttcagaggctgaggggatctggcggtggagcgctaggatcagacgccccc

SEQ ID NO: 789701 - DNA, 109 bp, Homo sapiens
cacagtggcggagaaggtggaccggctgcgctcctggcagaaggctgtcttctactgcgggtgaccaagaatatggcccaggtgaccaaagccctggacaaggccctga

SEQ ID NO: 789702 - DNA, 100 bp, Homo sapiens
agcagcctggcctgttcaccagagatctcccacctcagtgtgggttccatcttacttgtcacagatttaccgcattgtttctcagaagcaaatgtcagac

SEQ ID NO: 789703 - DNA, 90 bp, Homo sapiens
ccaagctggccgtggctctcttggcagccttcctgatttctgcagctctgtgtgaaggttttacacatccataagtagacctttttggag

SEQ ID NO: 789704 - DNA, 100 bp, Homo sapiens
gaatatcaagcaagtgcctcaaaagctggaacagtgcatggccagcaagcactatctcagtgccactgacatgttgagtcctgtgaagataaatcagatt

SEQ ID NO: 789705 - DNA, 75 bp, Homo sapiens
ttttatgaatggagcgtcaaactaaactggacagctgataggaagatgtcttcaggaaatgctaaaattgggcac

SEQ ID NO: 789706 - DNA, 100 bp, Homo sapiens
gtcatcagcgtctccgaggacaggccgctttgtagttcagaatgtttctgcacagaaagatggagaaaaatctagagtaaaagtcaaagtgcgagtcaac

SEQ ID NO: 789707 - DNA, 99 bp, Homo sapiens
gcctctgcattgggcagcttttctagacttcacagagaatgcagttgtcttgacttcaggtctgtctgttctgttggcaagtaaatgcagtactgttct

SEQ ID NO: 789708 - DNA, 74 bp, Homo sapiens
cagatgcagtggtgaagcatgtactagagggtgagtggaagccccggcagatcgacaacccagattacaagggc

SEQ ID NO: 789709 - DNA, 50 bp, Homo sapiens
atcactttagaccctccacctaattgcagtttcagctcctggcatcagct

SEQ ID NO: 789710 - DNA, 97 bp, Homo sapiens
gcagagatacagcaaaagagtctacataggaaagtgtgctgtgttgtcattcaaggacttcctctcctgcaggccaactgaaataccagaaaatgac

SEQ ID NO: 789711 - DNA, 100 bp, Homo sapiens
gaactcagaccgtaccttgcaacaaggctttgggggaccagatactatttgtaaatcgtcccgataagaagaaaatacttttcttcaatgataagagctg

SEQ ID NO: 789712 - DNA, 100 bp, Homo sapiens
gacgagggggccaaggcttcctccggggtcctggctataagtcaccatggcacagcaagctgccgataagtatctctatgtggataaaaacttcatcaac

SEQ ID NO: 789713 - DNA, 100 bp, Homo sapiens
agaacatccgcgtggttcgttgtggcggcagcgagttgaactttaggagagctgtgttctctgcagattctaaaattaaggaagttcactggagtaaaat

SEQ ID NO: 789714 - DNA, 82 bp, Homo sapiens
cgaggtctccgcggcccgaggtctccgcccgcaccatgcggctgggcagatcatggaagggaagtggttgctgtgtatgtta

SEQ ID NO: 789715 - DNA, 83 bp, Homo sapiens
actctgggcgaaaattggatgtgaaaatgaagccagaccgagaaatcttcccaaggctgcagacaccgacggatttgctttgg

SEQ ID NO: 789716 - DNA, 75 bp, Homo sapiens
cgacacccctggtggatggcgaggatgagaggtccaggtcaagacctcgtctccgttctcatagtcgtagcagtg

SEQ ID NO: 789717 - DNA, 94 bp, Homo sapiens
ggaaggaacgaggcaaggagctaaagcagcgtgcgttcagccctgggagctcccagctcctccagcagccgacaggaggcccgtcaagatgcag

SEQ ID NO: 789718 - DNA, 76 bp, Homo sapiens
aagatacgaggctctaggagaggtgtttctgggctacgtgaggcaaaaataaaaacagagaaactcaccacagtgt

SEQ ID NO: 789719 - DNA, 101 bp, Homo sapiens
gccaacttcggcaagatccagatcgggatttacgtggagatcaagcgcagcgatggtgtgggccatgtttgaggattgccccagcattcagttctatgagt

SEQ ID NO: 789720 - DNA, 75 bp, Homo sapiens
cacctaaaaattgtataccgcagattcaggaaggaagagggaatggtttaaaatagaagacgccataaaagtgct

SEQ ID NO: 789721 - DNA, 98 bp, Homo sapiens
gagaaattataagagccatcacctccagctacagatccggaccatcgccatcatagctgaaggcatccctgaggccctcacgagaaagctgatcaaga

SEQ ID NO: 789722 - DNA, 101 bp, Homo sapiens
cacgagagccgcacctttgccgtgtacctcaatagcactggctaccggacagcttcaccagcctccaccaagacgggacaagcagggagtttatccggcag

SEQ ID NO: 789723 - DNA, 100 bp, Homo sapiens
agaagctcaaggtcttgtccagcattgtagggcaacagaagttactttgcctaaaagtatacaggttgaaccctcggatacgatagaaaatgtaaaggcc

SEQ ID NO: 789724 - DNA, 75 bp, Homo sapiens
tgccgatagttcaaacttctatatcacagaaaagggtaacaagatgctcaactatagtgctcccagtgcaggggg

SEQ ID NO: 789725 - DNA, 90 bp, Homo sapiens
aaaacatcgtggccaacacggtcttgctgaaagccagggaagctcaaccaaatcccgggagatgagaaccctattttcctcccttcggat

SEQ ID NO: 789726 - DNA, 76 bp, Homo sapiens
gcagtggtcgcttcttctccttgagatggacagagacgtatgtgcgttggtctcctaagggcacctacctggctac

SEQ ID NO: 789727 - DNA, 48 bp, Homo sapiens
cggagcgccagctcaatgaagtgtgacgtttctccagatacttcatgc

SEQ ID NO: 789728 - DNA, 116 bp, Homo sapiens
tacaatagatcgagcctgcagacaagaaacattcgtttatgagatggttcatatccagctttcagagtggcaccgtgcaatttttcttccacaggcctggcttgcatacatgaatc

SEQ ID NO: 789729 - DNA, 74 bp, Homo sapiens
ttccccctccctcagcttccgccccaaaagataccatggagtagtttgaaacaggaacaaaatcttctgaaagc

SEQ ID NO: 789730 - DNA, 100 bp, Homo sapiens
atttatggctttgagattttcgaggtcttcacagggatcttcacagcagaaatgtttctcaagataattgccatggatccatattattactttcaagaag

SEQ ID NO: 789731 - DNA, 100 bp, Homo sapiens
gcctcttctgaggggcagcggggcctggcgggatggtgaccatgcctgctctgggcccagctcttctccaggctctctgggccgggtgggtcctcaccct

SEQ ID NO: 789732 - DNA, 80 bp, Homo sapiens
tttgtgatcgaaaccctgaccggatcccataaacactgtcggcgggagggttcgaggccaatgatgggagaccaccggga

SEQ ID NO: 789733 - DNA, 99 bp, Homo sapiens
catcctgggctctctctttgaaatctgcttgggccagtatgatgatggatagtgacaacctctggtgggacgcctttgccactgaattttttgaagatg

SEQ ID NO: 789734 - DNA, 83 bp, Homo sapiens
ctgtgtatggtggtggcaggggccatcgctgccgtctttcacacactgatagatgctgtctttgcatttcaactacgcaaccc

SEQ ID NO: 789735 - DNA, 74 bp, Homo sapiens
ctgcctcttcgagaaattcatactcctggtgtaaagatttctctctgtgttactggaatccctattggatgctg

SEQ ID NO: 789736 - DNA, 101 bp, Homo sapiens
aaaggccgagtacctctgccggataggtgacaaaggatgaattgtaaaagcaacatcagcttgaccagtataaaattacagtggattgctcatctcagtcc

SEQ ID NO: 789737 - DNA, 48 bp, Homo sapiens
tttataagggtaaatggcacgactataatgtaactgcaaactccaagc

SEQ ID NO: 789738 - DNA, 83 bp, Homo sapiens
gtggatttgattttaggagacagccattcggagctacatccagtgaataagggttattttggagctgttggagcactccttga

SEQ ID NO: 789739 - DNA, 74 bp, Homo sapiens
tgacatctggtctcttggctgtctactatatgaggttcaaaccttgtactactcagctgatcacaagctgcttg

SEQ ID NO: 789740 - DNA, 75 bp, Homo sapiens
atgaggatagcaaaagcttatgctgccaagctgtgtaatgttcttgatcgactaaatgtgattgcagaaagtgtg

SEQ ID NO: 789741 - DNA, 75 bp, Homo sapiens
tgaatataatccattctcggattctagaacaggccaggaaggaatactgggagaatcttcggatagcctcaggcc

SEQ ID NO: 789742 - DNA, 82 bp, Homo sapiens
ggggccaggaagcaattctggaagcgcagcaacagcaagctcccgggcaggaaggaaaatcacctcggcagtgtttgaagga

SEQ ID NO: 789743 - DNA, 98 bp, Homo sapiens
caccttggcccgccggaagggcaggcacatgggcatagcggacaaacataaattgcagagattcctgactgctgacatggccctggtggcgacagtct

SEQ ID NO: 789744 - DNA, 83 bp, Homo sapiens
ttcattccctgttggcagaacccaccacagatggatggagtggaaccctggcttccccttgagcatcgatgccaaatgccaca

SEQ ID NO: 789745 - DNA, 82 bp, Homo sapiens
tggccgtgttgctgatcgcctgggtggttgttggcgtgtccctgcagcgaaggatcctgattcctggtcgggtggcttccag

SEQ ID NO: 789746 - DNA, 88 bp, Homo sapiens
acaacaggaaaatcatattatagatggagtaaagttctttccaaatggcaatgcatttgccactggctcagacgacgccacctgcagg

SEQ ID NO: 789747 - DNA, 75 bp, Homo sapiens
agcggccaccctgccctccaaaggttcattctgacgactgggtttggattcagaagaggattattatacaccaca

SEQ ID NO: 789748 - DNA, 100 bp, Homo sapiens
agaaaagagaaagaaaaaggaaaaaatagaaaaacaaattgctacatccgggcccccaccagaaggtggacttagggctcagtagatgaaggcgtttctg

SEQ ID NO: 789749 - DNA, 75 bp, Homo sapiens
ggaagatgcaagcggtttgggaccttgaacaaggcaaatatggttttgtttctcgtgaactgtaacagcattcag

SEQ ID NO: 789750 - DNA, 51 bp, Homo sapiens
ggttggcgcgctggagtacaaccccagcagatttggagcaagaggtggtgg

SEQ ID NO: 789751 - DNA, 76 bp, Homo sapiens
caataatgaaatgctgactaaggaacaagaataatccagaatggctactctgatctatgttgataaggaaaatgga

SEQ ID NO: 789752 - DNA, 74 bp, Homo sapiens
gagtgtttgcttcggcagaaaacggttacaagacaagtggctcagtgcaaatgtgcaaaaaggtttcaggtgga

SEQ ID NO: 789753 - DNA, 100 bp, Homo sapiens
aaaagcgaagccgttagtcccttaatacaaaggtacactcagaagaagccttgtttttactggcaacctgttattaccgctcaggaaaggcatataaagc

SEQ ID NO: 789754 - DNA, 100 bp, Homo sapiens
aggcagacagacaattgctggaagctgcaaaggctggagatgtcgaaactgtaaaagctattcaagatctctggcagtggaggaagtctctttaagaaaa

SEQ ID NO: 789755 - DNA, 75 bp, Homo sapiens
atcgacgtcgtgatccagaagtccagagctgaggactgcctgtttgcaggccgttgatgctcactgccatcagct

SEQ ID NO: 789756 - DNA, 82 bp, Homo sapiens
gcggattcgccgaggcaccgaggcactcagaggaggtctgggaagatccgaggtatctcctggagaagccatctatgatgtc

SEQ ID NO: 789757 - DNA, 100 bp, Homo sapiens
agaatttattcagcaattcaacaaccaggccttctcagtgggacaacagatggacaatctaaaatatgtaaatcagttgaagaaggaaaatgaacgtgcc

SEQ ID NO: 789758 - DNA, 100 bp, Homo sapiens
gggaatcctatgcttggtaatactggtgatagctgtggtcctgggtaccatggaaatctctctaaacctatagctgttcagtataaagaaaaagaagatc

SEQ ID NO: 789759 - DNA, 97 bp, Homo sapiens
ggatttggctggcgtcccgcgttctctttgtaaagaatccttttctggtcaagtttcttcttcatcactcatgccacttactccattctggaccctc

SEQ ID NO: 789760 - DNA, 75 bp, Homo sapiens
ggaaagcagacattgacctcaccaagagggcgggagaactcactgaggatgagctcccagttgaggataaaatca

SEQ ID NO: 789761 - DNA, 83 bp, Homo sapiens
cagcggcaggaccagcgggcgggggcccacgagctttatcctgtggataaacgcagagtgaacgagtttggggagtcctacga

SEQ ID NO: 789762 - DNA, 95 bp, Homo sapiens
ctggagcgacgacggccgctgcctaagctggaaactgcagcaaaaaattattcctgatcaggaccaactgatggcaatagcactagagtgcatct

SEQ ID NO: 789763 - DNA, 50 bp, Homo sapiens
cccccgggctcgcggcctgcagacaaatgctgtgcttcatgaagttaaaa

SEQ ID NO: 789764 - DNA, 100 bp, Homo sapiens
cagcgtggccctgctggaggcctcgctgaggaacgacgccgaggaaggattttgacacttcatgacatgtcattatttagagcaataatgaatattgacc

SEQ ID NO: 789765 - DNA, 51 bp, Homo sapiens
aatggagttgccggagagacagcccaggtagcagtcaccattatgctcaaa

SEQ ID NO: 789766 - DNA, 82 bp, Homo sapiens
ctgaccgctgcacgtcgactgcctaccaggagcaggattttttatcaagcagaaatgcatcgaacaacgagaatcaagatca

SEQ ID NO: 789767 - DNA, 75 bp, Homo sapiens
cgggctacggggcagatggactcggagcgccccgccgatgccatggacaatattaccaggcagaaccaattctac

SEQ ID NO: 789768 - DNA, 100 bp, Homo sapiens
attcaaaacttgggacaaactgtcagccttggtgtcagttgtacccgaggcgttctcagcagcagcaagtacctgtggtggatttccaggctgaactgag

SEQ ID NO: 789769 - DNA, 83 bp, Homo sapiens
tggccagcctgctcatcgcctactgcacaaacggggattcagcgtccgatcctttggaacagggactcacgtgaagcttccag

SEQ ID NO: 789770 - DNA, 75 bp, Homo sapiens
gaccccatgggcagccagaaccgctggctgattgacaatggaggtaaaaccttgttagccaaagcagtagcaaac

SEQ ID NO: 789771 - DNA, 82 bp, Homo sapiens
ggaagtgcaggatgacaatgcttctgtgcttgacgtctatttagtttatcaggtagaagatgtgtgtgaagaagaaatgcca

SEQ ID NO: 789772 - DNA, 100 bp, Homo sapiens
gctcctccaggcgctgcccagccccttgtcagccagggctgaacccccgcagattcctcctgcatggaaaaactactttcaaaagattggaaggaaaaaa

SEQ ID NO: 789773 - DNA, 105 bp, Homo sapiens
gctccatcatcacccaggcgcggagggaagacgccctggtgctcaccaagcaagacaaaggactggtggacatatgaattctgttatggacgccacatccagcaa

SEQ ID NO: 789774 - DNA, 137 bp, Homo sapiens
ccttgcactccggccgggctctgctggctgcggcgggagctggacgcgggaggaggcggcggcggcggttttgcagacattgggtacagaaacttaccggcctagttctgcctcacagtgtgtggctggtattgctt

SEQ ID NO: 789775 - DNA, 75 bp, Homo sapiens
cctgagaccctccagcgctgcctggaggagaatcaagagctccgagagttgcatgctgagaatttgaaaaatgaa

SEQ ID NO: 789776 - DNA, 100 bp, Homo sapiens
aagatgcggatccgggcctttccgtggagcggaaggagtggatgcaggccctgcagcaggccatggctgagcagcgtgcccgggcccggctctctagcgc

SEQ ID NO: 789777 - DNA, 83 bp, Homo sapiens
tgacgtgtgatctcgagagacctgcgtacattcggggtgccagaaggaaagcatagcttcgagagctgtgcccaggagtgaac

SEQ ID NO: 789778 - DNA, 75 bp, Homo sapiens
ccaacattccagttttttaagaagggacaaaaggtgggagatgccatcccagcagtggaggtgtttgaaggggag

SEQ ID NO: 789779 - DNA, 75 bp, Homo sapiens
atcctgctgccattccggaagccggctctgaagagtgttgtactctatgttatcctggctccttttgacaatgaa

SEQ ID NO: 789780 - DNA, 100 bp, Homo sapiens
agaaggggctggatccgtgggtcagagaacacaggaccagtttgccatcccaaggccgaagccgattcgaagacagtctcttacacctcctcctcagaac

SEQ ID NO: 789781 - DNA, 100 bp, Homo sapiens
ctcgattacaaccgcagttaccagtctctgctggatgaaccgaatcctaacagtccagccaatagccaggcagcacagctttatcaggaaaacaaacgag

SEQ ID NO: 789782 - DNA, 74 bp, Homo sapiens
gattcggaactttggaaaaactgtgagtgccatcagacaagatcagttgatcagaacagaaagctagctcggaa

SEQ ID NO: 789783 - DNA, 123 bp, Homo sapiens
gaataaggagaaggataagtcgaaggggaaggcgcctgaagaggacgaagcgatgtgcattttgtaagcactttggagccactatcaaatgctgtgaagagaaatgtacccagatgtatcatt

SEQ ID NO: 789784 - DNA, 100 bp, Homo sapiens
ctaagacgccaggacccactggaagcctagaaatggtcagatgtcatgtaatccttcctttggtggcatcggaaagggacatttaatgagggaagtagat

SEQ ID NO: 789785 - DNA, 100 bp, Homo sapiens
tggatcgacaccctctacagcattgactggtctgagtgtctccaatggaaaggaccaacttgtagtgttccatacgaaagacaacaaagacctcattgtc

SEQ ID NO: 789786 - DNA, 101 bp, Homo sapiens
ggcaggaggggactagtggcccctcaaaacacgtttctggagaatattgttcggcggtccaatgcgtttgctgccaattgatggggcaaatgatctctttt

SEQ ID NO: 789787 - DNA, 89 bp, Homo sapiens
tcagcctatgtagacagccacaaatgggaagcaagagaaaaagaacattactgtcttgctgtgttggggtggaagaggaggaggcgccc

SEQ ID NO: 789788 - DNA, 100 bp, Homo sapiens
gcaaccggacaatataccagcttttgcagcagcctattttgagagccttctagagaaaagagagaaatggagatgtatgcatttcgattcttcatccgcc

SEQ ID NO: 789789 - DNA, 75 bp, Homo sapiens
acaagagaaggacccattactgagcccatctgctggcaaggctaagattagaacagctcataggagagtcatgat

SEQ ID NO: 789790 - DNA, 74 bp, Homo sapiens
tgcgctccttatattcccccgcagaggtcatcatcagatttgaaatatttaaagtggatacaaaactatttcag

SEQ ID NO: 789791 - DNA, 87 bp, Homo sapiens
atccattacgcacatttaaagataccatctaccttactcaggagtctccccaggacagtgctatcacccgggatattaaccgaacat

SEQ ID NO: 789792 - DNA, 100 bp, Homo sapiens
tgtcaatggaggcacctgtcggcagactggtgacttcacttttgagtgcaactgccttccagagctccactggttcaacagcctctcctccagtttcgac

SEQ ID NO: 789793 - DNA, 90 bp, Homo sapiens
ccatctggagggcctggtatatccagtagtgggaagctttggggtggccggtttgtgggtgcagtggaccccatcatggagaagttcaac

SEQ ID NO: 789794 - DNA, 100 bp, Homo sapiens
ctccatcacgacccattcaggagcctccaggagcccagacaccagccccccaccatgattttctctgtgggcagttctttttgttttgggaagacttctg

SEQ ID NO: 789795 - DNA, 98 bp, Homo sapiens
ttctttaaaagactctgagagataaaaactggatatgcatctaaaacaagatgtaagtcactgaagatttttagaagaccaaggaaactgttcatgca

SEQ ID NO: 789796 - DNA, 98 bp, Homo sapiens
aagcctctcagcttcggagaatggagtcttccatcaatcatatctcacagaggccgggaagttaaacttgtagccaccacctccgctcttcccgtcac

SEQ ID NO: 789797 - DNA, 90 bp, Homo sapiens
gagatcctcagcggcgccttgcggagggaccccagatactcatccagatcatcaggatattctgaaagcaatcgtagcattcaaaactct

SEQ ID NO: 789798 - DNA, 109 bp, Homo sapiens
ctcggcggtgagatcgtcagcgctgactccatgcaggtctgcgcaggcatggcactaagtgtcccatggcacatttggccctcatggaggcctcaaaagggcaggacca

SEQ ID NO: 789799 - DNA, 75 bp, Homo sapiens
atcaggagattattgaagtagatcctgacactaaggaaatgctgaagcttttgcatgttggcagataaattgaac

SEQ ID NO: 789800 - DNA, 73 bp, Homo sapiens
tacttccttaaagaattgtcgggtacaccaggggttggaaaaaccacactaggcaaagaacttgcgtcaaaat

SEQ ID NO: 789801 - DNA, 113 bp, Homo sapiens
gacggtccccactttcccctgagcctcagcacctgcttgtttggaagggtgataaaagaaaatgtggctgaagttacccgaagttcagcttgcagtgtaattcagaagagtta

SEQ ID NO: 789802 - DNA, 100 bp, Homo sapiens
cagcccaaaccatcatttaccctatggagaaaccagcctggacaccaagtctgtgtcagaaggccacctcaagaggaacatcgtggtgaagaccgtggag

SEQ ID NO: 789803 - DNA, 114 bp, Homo sapiens
gaccctggagcctcagttggaagcagccgatccagcctgcggagcctgtggggcaggttctctacttaaaagacaatgactactgatgaaggtgccaagaacaatgaagaaagc

SEQ ID NO: 789804 - DNA, 71 bp, Homo sapiens
cctccttggtcgccgcgtccttggctggcgtgcgtccgacctccgatcatgaacgggcccctgcacccgcg

SEQ ID NO: 789805 - DNA, 90 bp, Homo sapiens
tctcattgaaagccactcaacaactctttatgtgacagtgcaagtggtgacccaggatgaaagagagcagctgtacacacctgcttcctt

SEQ ID NO: 789806 - DNA, 100 bp, Homo sapiens
aaagaaaatctctaaatgcagattccagaaaaattacagcacatctcagtgaatttgcaagtggtaaataccagctgtcccctacagtgaatatgcccca

SEQ ID NO: 789807 - DNA, 82 bp, Homo sapiens
aggaggccatcatcatgaaggacgtgcccgactggaaggctactatgtgggcatgtgccttgcggcttcagaaaagcggctc

SEQ ID NO: 789808 - DNA, 80 bp, Homo sapiens
ggagtggaaaggctctcagtgaaaaaggctttatcctgtggataaacgcagagtgaacgagtttggggagtcctacgagg

SEQ ID NO: 789809 - DNA, 82 bp, Homo sapiens
ataggatttaaccgctctctgcctcccagtattctaccttgtaaatactgttatttgtatatactgtaaatgatgacatcgg

SEQ ID NO: 789810 - DNA, 150 bp, Homo sapiens
aaaaatcttaaccttcaaccatctggggaaaaggcaaaaatcccatctaccgcaactctcagttcgagagtaaaggactcacaccacccggcaagaactgctcactacggctccctgccccagaagtcacacggccggacccaagatgaa

SEQ ID NO: 789811 - DNA, 98 bp, Homo sapiens
gagccggacaaactcagacatcgtggagtactttaggatggagctgatgcatgctgaaaaactgaggaaggagaaggaagaatttgaaaaagccagta

SEQ ID NO: 789812 - DNA, 90 bp, Homo sapiens
gcgcgccctggagctgctagagatccggaagcacagccccgaggtgtgcgaagccaccaaaccattcctcaagaattttgtatccaaggc

SEQ ID NO: 789813 - DNA, 82 bp, Homo sapiens
gacgtgaaggggaagaggcccaccctggagtaaccctcactggagaatccagaggatcccatgacagattctgttgtcacgt

SEQ ID NO: 789814 - DNA, 74 bp, Homo sapiens
tgcagaaggtctctggagacatcttcagcagttcaaatctgaacatcaatgatgtactagggaactactcattg

SEQ ID NO: 789815 - DNA, 100 bp, Homo sapiens
gcggcatcctgcctgtacatctggaacactggctacctcttccaggtggaatttgacgatgccaccgaggcatcagagagttaagaaagacgtggacaag

SEQ ID NO: 789816 - DNA, 100 bp, Homo sapiens
ctcagaggactctatacagggacgtgatgctggagaattataggaacctggtctccctgggagagatgaatggagagtatagaggcagaggatttggacg

SEQ ID NO: 789817 - DNA, 83 bp, Homo sapiens
aaaaggagttcgagcagatcgacaagtccgggagctgggcggccatttaccaggtctcggcgcggaagatggccggcggcgtg

SEQ ID NO: 789818 - DNA, 100 bp, Homo sapiens
catggacctgcaggcggtgctgccgcgcgagctctacccagtcgaggacaagaaggactcctaccagcctgtgtgcaacatccccatcatcacatcccta

SEQ ID NO: 789819 - DNA, 78 bp, Homo sapiens
aatagaaccaaatctgtttgctgatgaagattcacctgtgcatgtaagactttgaccccgacgcaggcttcagtgatt

SEQ ID NO: 789820 - DNA, 100 bp, Homo sapiens
ttggttgaagttggagaagtatccaatagggatattgtagaaactgtctttaacctggccaaaaatgaacctgtgggaaagaaaacctctgacaaaagag

SEQ ID NO: 789821 - DNA, 73 bp, Homo sapiens
atcgaacagagccgggagttcaagaagaacactccagagccccaggatgctcccctgcgcctcctgcctaccc

SEQ ID NO: 789822 - DNA, 82 bp, Homo sapiens
ccgcctttccagcatgcaggggctgctcaggaaccttcagaagtttagtctttttggagacataagtgttctacaacagcaa

SEQ ID NO: 789823 - DNA, 75 bp, Homo sapiens
agagatttttgatgatgaccttgaagatgatgcccttgatgctgatgagaaaggctttcttcgagagtcacccag

SEQ ID NO: 789824 - DNA, 50 bp, Homo sapiens
cacctgcagctggcgcctctgcagtgggaaaaagcttgtggtgaaggggg

SEQ ID NO: 789825 - DNA, 82 bp, Homo sapiens
ctaagctggaaaacatggggtttcgagtgggacaaggattgatagaaagtatgaaaacaaagttgcagtacgtgacagagtg

SEQ ID NO: 789826 - DNA, 90 bp, Homo sapiens
atgaactggaggctgagtacgacagcctcaaacaggagctggagcagctcaaagaggaagcagtgtggttcctttccaacataacagcag

SEQ ID NO: 789827 - DNA, 75 bp, Homo sapiens
ggatgaattaatgaaccttgacccacaccaagggtgcaggagccgtgggcggacagagccagggttctctccctg

SEQ ID NO: 789828 - DNA, 143 bp, Homo sapiens
gtttcaacctgcgcattgggaggccgaagggtccccgggacccgcctgctgagtggacccgggtctgcaattctcattgcaagatcatcgcctccctggtttatagtagacagaccttttctgtttttcatccgacataatcc

SEQ ID NO: 789829 - DNA, 99 bp, Homo sapiens
caggaggaaggctggttccgtggctttttggatgccctagaccatgcagatacccaggtgttctctctgatgtccaggaggagaaaggcattaagtaca

SEQ ID NO: 789830 - DNA, 100 bp, Homo sapiens
ataaagtctaccttacagggtataactttacattagcagatatactattgtactatggacttcatcgctttataaatgatatggaacctagcaaagctgt

SEQ ID NO: 789831 - DNA, 100 bp, Homo sapiens
gccgcaccctcccggctgcggtggctgtcgccccccaccctgcagccaggactcgatggaggcagctatttttgctatgataatcctgctgcccttcaga

SEQ ID NO: 789832 - DNA, 74 bp, Homo sapiens
ccgcgcaatgggcacccgcgacgacgagtacgactacctctttaaaggtcatactactagatattacactggaa

SEQ ID NO: 789833 - DNA, 84 bp, Homo sapiens
taaagaagaaacaaaaaaagctatcaaatatcagagcaaggcaagaaggagcacgaacttccaggagccggtgcagccgctgac

SEQ ID NO: 789834 - DNA, 74 bp, Homo sapiens
cgcctgaccacggcgactggacttacgaggagcagtttaagcaggcgtccgagctgggccacagcctgaacgag

SEQ ID NO: 789835 - DNA, 100 bp, Homo sapiens
atgacgacggcgagaagcccctccatgtttactactgtttgtgcggccagatggtcctagtgctggattaattggcacggcgactgtagccctgaaggac

SEQ ID NO: 789836 - DNA, 100 bp, Homo sapiens
gttaaggattccaagtaactcttatttggtatctgcatgtaaaatcttcagctggtggatggtgacttttgaagaacaaaaggctttggcaacagaaaac

SEQ ID NO: 789837 - DNA, 83 bp, Homo sapiens
ctcgatcttgggacccaccgctgccctcagctccgagtccagggcgaggttctgggccggagaaggggcgacgttcgggcacc

SEQ ID NO: 789838 - DNA, 75 bp, Homo sapiens
tctgcgctcctgcatctgcctccccatatgttagtaggcaggaagaggcggagggagagctcagtgaaggagaac

SEQ ID NO: 789839 - DNA, 98 bp, Homo sapiens
gggattgcctggcaggacgtgaaggggaagaggcccaccctggagtaaccctcactggagaatccagagcaaacttcaaggcttttgagattcttaaa

SEQ ID NO: 789840 - DNA, 117 bp, Homo sapiens
ccggctgtggtttggctgcgggcggcttgggcagcccgcgggcgcctcagggtctgcggaagagggagctgctgaaggagctgctaccagtcatcgggcagaacctccgattccagc

SEQ ID NO: 789841 - DNA, 51 bp, Homo sapiens
tatacgtttcccagcacccaccaccagcagatggagtctccctctgtcacc

SEQ ID NO: 789842 - DNA, 75 bp, Homo sapiens
cctccaggccaagagggatccttcacccgtgtctgtttctccttggaccaagatgactgatggaaaactctccac

SEQ ID NO: 789843 - DNA, 100 bp, Homo sapiens
ggcaggtgtcttcctcgagaggcaggcaggggatcccggacacagcgtggaagatgaactggagatggccaccgtcaggcatcggcctgaagcccttgag

SEQ ID NO: 789844 - DNA, 83 bp, Homo sapiens
gctgggtcagtccgccgctcaccccgcggccgcaccttcccgccttctcagtttccctgaaacctgggctcttgaagacgcat

SEQ ID NO: 789845 - DNA, 51 bp, Homo sapiens
atctggtaacatggcaaaagatcatgcagccagtaaagatcccagagaagt

SEQ ID NO: 789846 - DNA, 100 bp, Homo sapiens
gggacttgggcccagtttatggcttccagtggaggcattttggggcagaatacagagatatggaatcaggaattccatatttaaatcaggaagaagaaag

SEQ ID NO: 789847 - DNA, 73 bp, Homo sapiens
aactgtccacgtaggcattcaccccagcaagtggaaattgcaacactaacaagagagaatggaaagacagtaa

SEQ ID NO: 789848 - DNA, 100 bp, Homo sapiens
agaactactcctttttacctttggttcacaacatcatcaaatgggtgatacaattctggagactggagaagtaattccaccaatgaaagaatttcctgat

SEQ ID NO: 789849 - DNA, 80 bp, Homo sapiens
ctcttctgcctcttgatctccgccaccgtcttcaggccagccttatgccagcctggaccatcttggaggcagtgtaggat

SEQ ID NO: 789850 - DNA, 101 bp, Homo sapiens
accaggccgattatgtccattgttctcttggagcagctggtcatcatggtacattaaagatgaatgggaagttatcagaagagagaacagaagatacagac

SEQ ID NO: 789851 - DNA, 100 bp, Homo sapiens
gacagcactttaatattcctgccatcacaaaagctggacaagcgaaggactcagcccaggagagtgttattactcgagatattcatcgtacatttcccgc

SEQ ID NO: 789852 - DNA, 75 bp, Homo sapiens
aagctgacatttggacaagggaccatcttgactgtccatccaaattcagaatggacagtttagaagaacctcaga

SEQ ID NO: 789853 - DNA, 82 bp, Homo sapiens
ccaacatggcggaacgcaggagacacaagaagcggatccaggtgagaagccctaccactgcaactgggacggctgcggctgg

SEQ ID NO: 789854 - DNA, 100 bp, Homo sapiens
ctggggcgcagaaccgctactgctgcttcggtctctccttgggacatggaaggtctttaatgtaactttaaatggttcaccaaaggatgctctaatggat

SEQ ID NO: 789855 - DNA, 90 bp, Homo sapiens
gtcataaagtaagatgcagctgtggcatgtcaaccagcttgatgccatgaagtacaccattgtggtgtcggctacggcctcggatgctgc

SEQ ID NO: 789856 - DNA, 82 bp, Homo sapiens
ctccttcgctgtggcgggaagatggccggatttgaaggtctggcggcttctctgttgacaactcagctggttccacaccctg

SEQ ID NO: 789857 - DNA, 80 bp, Homo sapiens
ggagccgtgctctacctctatccggggctttgaccacgacctttgaagagcttcattttgagatcaagccccacgatgac

SEQ ID NO: 789858 - DNA, 98 bp, Homo sapiens
atggccaacatcgcggtgcagcgaatcaagcgggagttcaaggaggtgctgaagagcgaggaggaatgttttaaaggaagttgggctactcacaagtt

SEQ ID NO: 789859 - DNA, 82 bp, Homo sapiens
gagattccacccaaacttgctggtcactgggagacctgcctagagctggaacgttacctccagagcgagccctgctatgttt

SEQ ID NO: 789860 - DNA, 95 bp, Homo sapiens
tggctacactctggaccccaatggcaaaacctgcagccatatggctcgtggacagcagaaaattcagtctcagcagaaaaatgccaaaaagcaag

SEQ ID NO: 789861 - DNA, 83 bp, Homo sapiens
cattagttcagtgcagtgtctgacttgtgacagggtgagaagcgccactgctttgatgtcaactataattcaagttacatgta

SEQ ID NO: 789862 - DNA, 87 bp, Homo sapiens
agagacaccaggacagaaaagacagtgttctgctttcatggagttcacagaagagtcgaggaggtggacccaggcccaacgccgatc

SEQ ID NO: 789863 - DNA, 95 bp, Homo sapiens
ctacttgccaacatcactttgacagcccaatcacgatgaagaggaggcggggagaccgaagaaggtagataatgactataatgcccttcgagaaa

SEQ ID NO: 789864 - DNA, 51 bp, Homo sapiens
ctgactgctgctcggcacagtctttctggctggagtgtaatggcatgatct

SEQ ID NO: 789865 - DNA, 100 bp, Homo sapiens
acccaaaatgtgcctggtgctccaaagagaactctctttgctcacaagttaccaaaaaaaaaagagccaacatgttggtattgctggctggtatctttgt

SEQ ID NO: 789866 - DNA, 50 bp, Homo sapiens
ggagtcctaaaacctgcgacaggaagagagatggctaatgaatggcgctt

SEQ ID NO: 789867 - DNA, 89 bp, Homo sapiens
cagcggcagctccgcggcggcgtctgcccagggcagggctcctaaggaaggacccgcctttagaccaagcggagcagccagctggcagt

SEQ ID NO: 789868 - DNA, 75 bp, Homo sapiens
gaagggatctatcacctctgtacaggaatggaagttggatacactttgtgacttgtacgagacactgaccattac

SEQ ID NO: 789869 - DNA, 83 bp, Homo sapiens
ggggtccgggccggagtacgtcgttcccgctgcgctaggggaagcgggcaggctaccggctctctgaccagttccacgacatc

SEQ ID NO: 789870 - DNA, 117 bp, Homo sapiens
caaagacctatcccagatcctgaaaaagatgccgcagtaccagaaggagctgaataaggagaggcaagagaaagctctgggcatcctgacatacctgggccagagtgcagcggaggc

SEQ ID NO: 789871 - DNA, 101 bp, Homo sapiens
ctggaagctgccaatccttggacaggtcagcagacaggctgggtccgatacgccgagcgggtgctgggtcgccccatcactgcccacctctgcaccgccaa

SEQ ID NO: 789872 - DNA, 76 bp, Homo sapiens
gtgaagatcggccgcccgggctacaaagatgcaagtgctgctggaccaggcgggctgctgtatcgtgggtcagagt

SEQ ID NO: 789873 - DNA, 101 bp, Homo sapiens
tctaatttgaaccatgtttggattgaagccgcctctgtattacttaccagattgacgagatgcctgaggctgccgtgaaatcaacagccaacaaataccaa

SEQ ID NO: 789874 - DNA, 75 bp, Homo sapiens
ccgctgccgggcaccgaggaccagctcaatgacagatcatcaatgctgtggtactgttgattttattgagtgccc

SEQ ID NO: 789875 - DNA, 112 bp, Homo sapiens
ggaaagcatgttgtggctgttccaatcgctcctgtttgtcttctgctttggcccaggtctcctctgagcctccggcctccataagacccaaaacagatgacacctcttccca

SEQ ID NO: 789876 - DNA, 145 bp, Homo sapiens
gccctgtgccaaagccacgagttgatcgtccaagaaaagttcctgtgatacaagaggagagggcaatgcctgcccaggctttccttaaagtttcccatgtctcaatggactcctgaatataacgagctctacaccttaaaagtgg

SEQ ID NO: 789877 - DNA, 98 bp, Homo sapiens
gccgcccccaacgtccatgcctgaggtgtcgaagtgcagacagactacgtgcccctgctgaactcgctggcggcctatggctggcagctcacctgtgt

SEQ ID NO: 789878 - DNA, 100 bp, Homo sapiens
tgagggggaagggcctcaaagccagaagtttttcagaagaagtgaagtcaagatgaagaaccatttgcttttctggggagtcctggcggtttttattaag

SEQ ID NO: 789879 - DNA, 90 bp, Homo sapiens
agaatgggtggactcccggagaggattcctaccgagagtggatacagatccagacatttaatgtggatgcaccatgccagaccgtggaag

SEQ ID NO: 789880 - DNA, 89 bp, Homo sapiens
aggagcctcaaggcggcccggcgggcgactggacggccggacagcaaacggggattcagcgtccgatcctttggaacagggactcacgt

SEQ ID NO: 789881 - DNA, 120 bp, Homo sapiens
agctgaccctcaaacagcagtatgatgaactggaggctgagtacgacagcctcaaacaggagctggagcagctcaaagagcttagaccatgctcagcctccaagcagccttgtcatcgac

SEQ ID NO: 789882 - DNA, 98 bp, Homo sapiens
tgggacctgcacaggccggagagagccgtaggcaggaccccgggacaccctggaagccaggaaatgtctgcgggccaggcatcgacatccgcaacgac

SEQ ID NO: 789883 - DNA, 87 bp, Homo sapiens
acagttcagcattagaagggctacccctaataaagcgactcattgagcagggattaatgaaaatcaagttccatcctcagacaagag

SEQ ID NO: 789884 - DNA, 90 bp, Homo sapiens
tcaacagaagagtgagagatggaacccgaagaagaaaggattcgttacagccagagattgaagaagcagactacagtgcctttggtacag

SEQ ID NO: 789885 - DNA, 145 bp, Homo sapiens
gcagcctccgggcccgcccccggcctatgcccccactaacggggacttcacctttgtctcctcagcagacgcggaagcatgacgtatcccagactttactcaaggcaacactggacagtgttgtagaagaatgtgtcagctttgt

SEQ ID NO: 789886 - DNA, 100 bp, Homo sapiens
ggggaatttccttgtgcctccattcccgggaggggggagcggcgttggaggccaccgtttccaggaaatgcacaattttgaggaagagttaacttgtccc

SEQ ID NO: 789887 - DNA, 78 bp, Homo sapiens
ccccattgctgagccagcggagctgcttggcaaatactgtggtctggggttgcaaatgaaccattcaattgaatcaaa

SEQ ID NO: 789888 - DNA, 100 bp, Homo sapiens
cttgaatgtctgccgaaatgttcaagtttaccaaaagagaggcaccgctggaacactaatgaggtgaaaggtgtagcagtcactcggcctacacccacag

SEQ ID NO: 789889 - DNA, 83 bp, Homo sapiens
cctctcgcctcgggtctcgggggccgctctgggatcccggccaccagcaattgtccgggtgctggaaatgtaaacaagaatag

SEQ ID NO: 789890 - DNA, 100 bp, Homo sapiens
ggtagcactcgggccggcggacagtgagggcgcggtggtggacataatgcgagttaacgtggacaaggttctggaaagagaccagaagctctctgagtta

SEQ ID NO: 789891 - DNA, 51 bp, Homo sapiens
tatacagtatgcgatttttgagaactgatagtgcatcagctgacccaggta

SEQ ID NO: 789892 - DNA, 90 bp, Homo sapiens
tctggattaacctcccaggatatcgactgcattgcatacaccaagggccctggccaacgtcaacattgggagcctcatctgcaatgtagg

SEQ ID NO: 789893 - DNA, 100 bp, Homo sapiens
gggagcctttggggcaccacagagatgcggccatcactggtgcaagctatatttaacggagatcctgatgaagttcgagcactaatatttaagaaagaag

SEQ ID NO: 789894 - DNA, 76 bp, Homo sapiens
caaggccaagctctccaagttcagcatccccaagcagggggagtcgtggcattcctggtggctttccatcagaaca

SEQ ID NO: 789895 - DNA, 51 bp, Homo sapiens
ctggtgtactctttttatgaaaaggagcacagggatcagttgtccttgttt

SEQ ID NO: 789896 - DNA, 74 bp, Homo sapiens
acgatcctctcatctcagcctccaaaagtgctggcattacaggtacatccagacactgaaggaccacaggcccc

SEQ ID NO: 789897 - DNA, 82 bp, Homo sapiens
ccttggtgcggcgagccgagcgaggcagctctgagccgcgcgtaatctatgccagcaattatgacaatgttagcagaccatg

SEQ ID NO: 789898 - DNA, 100 bp, Homo sapiens
gggcagtgtgtgcgcacctgctggggctgcggctccgtggcctgtaccctgtgtggcctcgtggagctccaggatgaaaccaacctgaggctggaagccg

SEQ ID NO: 789899 - DNA, 100 bp, Homo sapiens
cagagtcccctcagccaaagggcaagaacaagaaaaataagaagaagaaaggagacagagtcaacaattcaattggaggaacatatgcagcagaaaaaag

SEQ ID NO: 789900 - DNA, 100 bp, Homo sapiens
agagcccaacgcctggtgctcaagactttctccgaggtcttctttgatgtgaggattggagacaaagatgttggcagaattgtgattggcctctttggaa

SEQ ID NO: 789901 - DNA, 83 bp, Homo sapiens
cgcagtgagatggtgacactgaaagttgcagggcggcgactggcggcgcgatggacctgaccgggctcctgctggacgaagaa

SEQ ID NO: 789902 - DNA, 90 bp, Homo sapiens
agtgagggtgtacaaatacccctttgaattaattatggctagacggtaaagaacaggtccaagaaaagctcaaagaaagcaaataccagc

SEQ ID NO: 789903 - DNA, 76 bp, Homo sapiens
gatatttcagcattccaaaccagataaaacacgagatttttctcctatttcagcagttggccacaacttcattgct

SEQ ID NO: 789904 - DNA, 100 bp, Homo sapiens
cttcaatgtgtcctacaccaggcagcccccaaatcccggcccaggtattgcactctcagtctcgccatgttgaagtcagaatggcctgtattcactatct

SEQ ID NO: 789905 - DNA, 83 bp, Homo sapiens
caagtcccccccggagaaaaagttgaagcgttatcttcctgcagatttcacaaaactgcatcttactgacagtctccacccac

SEQ ID NO: 789906 - DNA, 87 bp, Homo sapiens
gtctctgtcctctggagaatgctgagcgaaggtcctggagctggactccatccgcagccaccactggtgcatccagggctgcagcgc

SEQ ID NO: 789907 - DNA, 74 bp, Homo sapiens
cattagcaggtgctcttggaaaactcaagcatagtcaagatccagaccttgccaccatggaagaaagagtacaa

SEQ ID NO: 789908 - DNA, 75 bp, Homo sapiens
cctacacagcttacgtggacctggaaaaggactttgctgctgaggtacggaatgagccctggaacatttctattt

SEQ ID NO: 789909 - DNA, 90 bp, Homo sapiens
gtagactatgaagcaggggatattccaacagaatgggaagtgctcccaaatgtgtcagaagaaacagtgtctcccaccagagcacggaac

SEQ ID NO: 789910 - DNA, 83 bp, Homo sapiens
ctcccaggtgcccccggcctgcgctcccatccacacgctcgatgaggacggggacttggttgccttttccagtgacgaggaat

SEQ ID NO: 789911 - DNA, 75 bp, Homo sapiens
gatcatcgtgggcgacgccacagagaaagcagtcaatggcagtaatcctgaaggtgaagatcctgagagggaacc

SEQ ID NO: 789912 - DNA, 121 bp, Homo sapiens
aagagaagcagaattatacctagaagtctactaatggacagttagtcacccacctacatgttgaggtttttgtcatccattggagggacactgtatgaggttggaaagcctgaaatgcaac

SEQ ID NO: 789913 - DNA, 101 bp, Homo sapiens
gcgcgagtgaggaaaggaggtactgtaggcattgaagttgatatcgatgtggagcacggagggaaaagaagccgcctgacccccgtctctccagagagttc

SEQ ID NO: 789914 - DNA, 75 bp, Homo sapiens
gcacgaaagctttcctaggccaaaaagaggttgactttcttcagcaagctaataaagacctggagaagcgtatac

SEQ ID NO: 789915 - DNA, 50 bp, Homo sapiens
caaagctgtcatttgctgtcgaaatgcttcttactgtgacaaaatgtcca

SEQ ID NO: 789916 - DNA, 75 bp, Homo sapiens
tacagaaacctggccttcctgggccaggagtggtggctcacacctgtaatcccagctctgggaggccaaggccag

SEQ ID NO: 789917 - DNA, 100 bp, Homo sapiens
ctgggagcgagcggaggagcaggcgccggaggcgtcgggtttggagttcaagtcggtagccgacagcgttctgtttttacgtgacaaaagatgggaagag

SEQ ID NO: 789918 - DNA, 83 bp, Homo sapiens
atctgtcttcggtggactccttcggcagtccacccaccgccgccgcctcccaggtgggaggaggagctcgccaagcgcatgaa

SEQ ID NO: 789919 - DNA, 83 bp, Homo sapiens
gcggccaacatggcggaacgcaggagacacaagaagcggatccaggttttaaaatcaaagatgggaaaatcggagaaaattgc

SEQ ID NO: 789920 - DNA, 74 bp, Homo sapiens
aagacaaagagtggacatttgtcatagaaaatgttatgatgtgattgctcaagcccaatctgggactgggaaaa

SEQ ID NO: 789921 - DNA, 75 bp, Homo sapiens
tgaatcccacagacagcgctttgagcagaacgcacggctcaactcatgtgtacaaagataatcaatgctgattcg

SEQ ID NO: 789922 - DNA, 75 bp, Homo sapiens
ccccgggcaacgatcggaactcggacacgaacccgaaaacagtggccaaatgtcaggtaactcccagaagaaatg

SEQ ID NO: 789923 - DNA, 74 bp, Homo sapiens
agcagttgttaaattctcaacagctcacaccagttctttatagagttggaagcaagacatcagaataatatctt

SEQ ID NO: 789924 - DNA, 100 bp, Homo sapiens
gtcgcagaaagaaaataataccaaagggaaacaaaatttcaagaaggaataaagaacagtggaagagtaaatatgaagggtctcgctctgtcgcccaggc

SEQ ID NO: 789925 - DNA, 101 bp, Homo sapiens
gacaggcaaacataaagacaggagaaaaggctcactagacgtcaaagctgttgcctcccgtgcaactgaagtttgagttcctgagatctagttggtgagag

SEQ ID NO: 789926 - DNA, 74 bp, Homo sapiens
attgtctcccaagacaacttcctcaccagcaccttacaggtaaagctttccagtttgaatttagatgatcacgc

SEQ ID NO: 789927 - DNA, 75 bp, Homo sapiens
ccggctcctgctcaagatctcagagaaggaggaggtgaccacgcgcgagacttttcccaggtccctcgtatcaaa

SEQ ID NO: 789928 - DNA, 75 bp, Homo sapiens
gatcgagcaaaccaggagagcaaggatggagatcctaggaaaggaccagctttatccagggactctaccattccc

SEQ ID NO: 789929 - DNA, 74 bp, Homo sapiens
cggtaaccagttctattttgggacagggacaagtttgacggtcattccaactgtcacgggaagtctttttagga

SEQ ID NO: 789930 - DNA, 90 bp, Homo sapiens
tggaaccagttctttgtcattgaggaatatgctggtccagagcctgttctcattggcaagggtggacccgaactccccggtgctcttgga

SEQ ID NO: 789931 - DNA, 100 bp, Homo sapiens
gtcttgggacccttgcatggtgtttcaaagggtggtgaagaactaagggaacgggtatggcaatccccgaaactcaccaggtctgctggtctcacctggt

SEQ ID NO: 789932 - DNA, 100 bp, Homo sapiens
acaaagtagaaccaattaccaagcatataggtttggtgtacagtggcatgggccccgattacaggtcctatcagcagtatcctggtgaataaatatggaa

SEQ ID NO: 789933 - DNA, 102 bp, Homo sapiens
cagacattcaacatgattgcatttgaaacttccaggactctgaagaaacagttacaagcaggatgcttttcccaacctctgcgcaagaatcttcccgtggcc

SEQ ID NO: 789934 - DNA, 83 bp, Homo sapiens
actgcggccccccaaagggagatccttctccagcctggagagttcactggaccggagatatgtgcagcgggggctacagcgag

SEQ ID NO: 789935 - DNA, 100 bp, Homo sapiens
ctcaagtggacttggccatgattggttgtggaagtcattttgacagtccatttgaatttggcttcacattccgtaacccagatgatgtcttcagggaatt

SEQ ID NO: 789936 - DNA, 99 bp, Homo sapiens
gaacttcagaaactttcaaagtttgatgagcagagaactgctactaataatccagaatggctactctgatctatgttgataaggaaaatggagaaccag

SEQ ID NO: 789937 - DNA, 145 bp, Homo sapiens
gaccgtctggaaatgcgaatcctaaagcgtttcctcgcttgcattcagctcctctgtgtttgccgcctggataaacctctcataatgaaggcccccgctgtgcttgcacctggcatcctcgtgctcctgtttaccttggtgcaga

SEQ ID NO: 789938 - DNA, 75 bp, Homo sapiens
gaatgttttcttaaccaaacggatgaaactctgagcaatgttgagccgccttgctccgaaccttcagctttttgg

SEQ ID NO: 789939 - DNA, 100 bp, Homo sapiens
tggaccgtgctagtgacctgactgatgccttcgtggagctgtcacaagatgaaggtagaggcacattatacaaatacagacctgaagaagtagatattga

SEQ ID NO: 789940 - DNA, 83 bp, Homo sapiens
ccgcgcagcccagcgcagccatgtattagaaaactactcggatgctccaatgacaccaaaacagattctgcaggtcatagagg

SEQ ID NO: 789941 - DNA, 80 bp, Homo sapiens
gctactctctctttctggcctggaggctatccagccccgatggcaccagcaaggagtgtgtgttcatcgagaaggttctg

SEQ ID NO: 789942 - DNA, 80 bp, Homo sapiens
tggaacttcgttgcttgcttgcctgtgcgcgcgtgcgcggacatggcctcaaacggtttttagaacttcagccataaaaa

SEQ ID NO: 789943 - DNA, 100 bp, Homo sapiens
aatgagtatgcgtgtcgagtgctggaacttctggggatggggcatcgtctgtttgtgcctcggcttctggcggtggctgtatcgttttaactgcatagag

SEQ ID NO: 789944 - DNA, 83 bp, Homo sapiens
aagaagggctccctcgtgaagaacctgaaggacacactagaagtcaatgaaaggattctattttgcaaagctgtattatgaag

SEQ ID NO: 789945 - DNA, 50 bp, Homo sapiens
aaaatccaggaacatatcaccaaccagttctggaggctgggaagtccaag

SEQ ID NO: 789946 - DNA, 75 bp, Homo sapiens
gaatggagaagtgacagaaaaagtgagagttacagcgaaagttcaagggtgataaaagaaaatgtggctgaagtt

SEQ ID NO: 789947 - DNA, 100 bp, Homo sapiens
caagtcgaatttttgtcttacggttatccggtgttggctcctgctgcttactatgaccaaactggtgcccttgtagtgaatgcaggcgcgagaaatggtc

SEQ ID NO: 789948 - DNA, 100 bp, Homo sapiens
cggcgaaaggaacggctgaaggccctacgggagaaaaccgggcgcaaggttcagattcagaacaagaaagtggacatctctaaggtctcctccaagtgtg

SEQ ID NO: 789949 - DNA, 50 bp, Homo sapiens
cacctggatccaggataacggaggctggatccaaaaagttggcagctctt

SEQ ID NO: 789950 - DNA, 74 bp, Homo sapiens
ccgggagccgggccggcctagccagagcatgacttcggtgctggaacctgtgttggacctcacgtacccagtca

SEQ ID NO: 789951 - DNA, 98 bp, Homo sapiens
gagagatcataatttggggttcaagattccagtccaacatgtttaccgtggctgatgtgttgagtcaagatgaactgcgcaaaaagctataccagacg

SEQ ID NO: 789952 - DNA, 111 bp, Homo sapiens
tcgcgcccgggaggaaggaacgaggcaaggagctaaagcagcgtgcgttcagccctggggctgaccccgcactacatctacccaccagccatcgtgcagcccagcgtggtg

SEQ ID NO: 789953 - DNA, 75 bp, Homo sapiens
cgggcaaagaccgaattgaaatctttccctcgcgaatgagcttcctccagctgggcgccggcctgagcgtgggcc

SEQ ID NO: 789954 - DNA, 100 bp, Homo sapiens
cattggatgaagtggctccggagatgtggaggcctgaattttgatctatgttctacctacatccagctggctgaaagtacttgaggatcacatgaccctg

SEQ ID NO: 789955 - DNA, 100 bp, Homo sapiens
tcctacttcctctgtatagagcaactgttgaactcagctgcctgtaggagaaaatgcagaagtctccatggacgtttccctggcttaccgtgatgacgcg

SEQ ID NO: 789956 - DNA, 50 bp, Homo sapiens
gccgccaccacccactccggacacaggtgtgagatgcacaatgcgaaacc

SEQ ID NO: 789957 - DNA, 97 bp, Homo sapiens
gtgcaagcgaggacacgacacatgcagtggcttctggactgcgcgatgactggacggtcatcatcagatttgaaatatttaaagtggatacaaaact

SEQ ID NO: 789958 - DNA, 58 bp, Homo sapiens
aaacctgaaagaccccagttatggatgggagatacactgcctctaggactgggacaga

SEQ ID NO: 789959 - DNA, 75 bp, Homo sapiens
ccaccgggctgaaaggcccggcagctcccctcaccccaggtgccaaatgtgacatccagatgacccagtctcctt

SEQ ID NO: 789960 - DNA, 82 bp, Homo sapiens
gtcaaggactccccgcgcttcagaggtggggctggtgtccgagcacttctcgcaggccccgcagaggctgtccttctacagc

SEQ ID NO: 789961 - DNA, 100 bp, Homo sapiens
tggagaatagaccctctgtccaggcagcattaaaacttaagcagaccctacagcttggggcctgggctcctctgaccatcctcattgagaaaggaaagtg

SEQ ID NO: 789962 - DNA, 75 bp, Homo sapiens
ctcttcaacagggcttcaccactggaacaagcacaagtgtattcattgccttcaagaaagctggtggctctacag

SEQ ID NO: 789963 - DNA, 80 bp, Homo sapiens
ttacttgaagcatgtctttcagagcccggcaccacccatcttgagtatctgggccgttgttcgagagagaactgcaagta

SEQ ID NO: 789964 - DNA, 74 bp, Homo sapiens
ggtgctggaaggggccagtctggagacagtcaaggcgtctactagaaaaatctcagagggtagaagccatcatt

SEQ ID NO: 789965 - DNA, 95 bp, Homo sapiens
gcaaagttgaccagatccgagccagagtggagcgtaacgcagtgagtgcaaattcacctgcaccagtggtaaatgcttgtatcttggttcgctgg

SEQ ID NO: 789966 - DNA, 75 bp, Homo sapiens
ccgggaccgccgccgccgccgccaccatggttatgaagacagtatggagtttccagaccatagtagacatttgct

SEQ ID NO: 789967 - DNA, 99 bp, Homo sapiens
cctgtcttcagatcttcacagcacagttcctgggaaggtggagccaccagcctctccctggttgctgaaaagccaggagtcaaaatgactgagcgcttt

SEQ ID NO: 789968 - DNA, 71 bp, Homo sapiens
gattcgcagtggtcgcttcttctccttgatatggccagttttatccgagactctaaataagcaccgagctg

SEQ ID NO: 789969 - DNA, 100 bp, Homo sapiens
cggatgtggcggcaaccggaacaactttgacacagaagagtactgcatggccgtgtgtggcagcgccaatgccaggatagaagaatttgtttatgagaaa

SEQ ID NO: 789970 - DNA, 100 bp, Homo sapiens
caaactcgaagaacagctgtggaaagaagttgcaaaacactggtgcacgtggtgattgctacccctgggagaatcctggatcttattaagaaaggagtag

SEQ ID NO: 789971 - DNA, 82 bp, Homo sapiens
tagagaggaccccggtacatctgaaagccgggaaatgacgcagggacagagctcatcgggaaatcaaggatattttctataa

SEQ ID NO: 789972 - DNA, 100 bp, Homo sapiens
ccacccctgaagaaattgcacagtcatagcacacatcggacatttggaaaacagcagtggcaacaactgtatgacacacttaatgcctggaaacaaaatc

SEQ ID NO: 789973 - DNA, 147 bp, Homo sapiens
cgcggccgcggccccggccgctctgggcgactgtgctggcgctgggggcgctggcgggcgttggcgtaggaggttatcccatcatcaggtagcaagttgaaacgaccaacaccaacttttcattctagtcggacatcccttgctggt

SEQ ID NO: 789974 - DNA, 83 bp, Homo sapiens
ttcaagaaaggcatggactttgcaccaaaaggtcagttctacagcaacggagggcattctgggaatgccagtggcggtggcgg

SEQ ID NO: 789975 - DNA, 133 bp, Homo sapiens
gccgctgctgggagatgggcctactcgcccgccaccctgcgctgccgccgctctgaggagttaaagttgtgaaaaaattggctgactttgaactcccttatgttagtcttggaagttctgaggtggaaaactg

SEQ ID NO: 789976 - DNA, 99 bp, Homo sapiens
ttaagaagtacgggaccaaccccagcaatggagagatactatgggggagcagaggtggtggatgaaattgagctgctgtgccagcgccgggccttggaa

SEQ ID NO: 789977 - DNA, 90 bp, Homo sapiens
gatcaaccttgagtagcagaggccctcacaccttcctcagaatggacccccagggaagagtgtatcacagccattgggaactttcttcac

SEQ ID NO: 789978 - DNA, 100 bp, Homo sapiens
gcctggccgcggcggggaagatgttcagcgtagagtcgctggagcgggcggagctgtgcgagagcctcctcacttgggttctggcctataggaacaagac

SEQ ID NO: 789979 - DNA, 75 bp, Homo sapiens
ggtacttctcgcagtccccgcgcgtggtcatccagaggctgggaggcggcagaatgcagccagaggagggcacag

SEQ ID NO: 789980 - DNA, 100 bp, Homo sapiens
agtcagacaagcggtggtgaggcaggctcgcctcctccagctgttgttgctgctggtaaccgtacttttcccaaaatgctatattgcaattggactggag

SEQ ID NO: 789981 - DNA, 90 bp, Homo sapiens
attgagcaagggagtgatgccggttatctctgtgaatctcagaattggggcttgttgatggacaagaactggcggttgctgatgtcacca

SEQ ID NO: 789982 - DNA, 150 bp, Homo sapiens
aatactgtcagtctagaggaagagttaagaaaggccaacgcagcgcgaagtcaacttgaaacctacaagagacaggaggatccaaagtgggaattccctcggaagaacttggttcttggaaaaactctaggagaaggcgaatttggaaaa

SEQ ID NO: 789983 - DNA, 74 bp, Homo sapiens
ccattatgggaataggaccaattccagccataaagcaagctatactaatggaccatactaccaaggaccagtcc

SEQ ID NO: 789984 - DNA, 78 bp, Homo sapiens
ctccacgccacctggtttgctaattaaggaagttcactggagtaaaatggaggcctcagtaatattacccattctgaa

SEQ ID NO: 789985 - DNA, 101 bp, Homo sapiens
cagagtggaggaagtacagccagcagtattgtcttctaagaactctgaagcaatgtcagacattgagggaagctctcattgctgcaggaaaagagattata

SEQ ID NO: 789986 - DNA, 145 bp, Homo sapiens
cttgaggaaggacctatgatagaacaacttagcaaaatgttctttactactaagcaccgttggtatcctcatggacgcctctactcaatagtccccccagctttgtgtgctggtctcggggcttcatggagatgaatgggcgggg

SEQ ID NO: 789987 - DNA, 100 bp, Homo sapiens
ctgtttgcagcacgatgtctgaagaagaggcggctcagatccccagatccagtgtgtgggagcaggaccagcaggcccgcagcccgagtgtcgccgccat

SEQ ID NO: 789988 - DNA, 101 bp, Homo sapiens
gtggcctctcctcctctgcagcccctgcctgcttatccagatccccgaggaatgggatcctttcagatgatcatgggctggccgctgccctctggagaacc

SEQ ID NO: 789989 - DNA, 147 bp, Homo sapiens
cagctggtgtatgaccgagaggttcagtggacgctgggagccattctatataaaacacgattcttaccactcaggctagatgaactgcagaagcaactacaagaagacataaggcaaggccgaggcattaaatccccaatcagaatt

SEQ ID NO: 789990 - DNA, 75 bp, Homo sapiens
aagcaatgataattcccaggacagtcagtctggtactaacaatgcaggcactgctgagaaagatctagaaagtgc

SEQ ID NO: 789991 - DNA, 74 bp, Homo sapiens
tggatcacggatgtaggaagtggtgtaaatgcagacaaagttggaattgaagctgccgaaatgctattagcaaa

SEQ ID NO: 789992 - DNA, 46 bp, Homo sapiens
gcccgcaccaggagcggaacaagaatcttgtcgattggcctggctg

SEQ ID NO: 789993 - DNA, 97 bp, Homo sapiens
ggggaacagcgggggacggcggggaacagcaggggactgcgggtcgcgtcctggccgccgagtggacagaggactgcagaaaatcaacctatcctcc

SEQ ID NO: 789994 - DNA, 100 bp, Homo sapiens
agagactgctgagcccgtccgtccgccgccaccacccactccggacacagggaagagcatggaggaaatcaagaaggtgctgctgctggtgctgggctgt

SEQ ID NO: 789995 - DNA, 82 bp, Homo sapiens
tctcctgatggtgaatattttgctactgctggaaagatgtgttcagagcaacattgttttgttgacacaagcatttagaaga

SEQ ID NO: 789996 - DNA, 90 bp, Homo sapiens
cagcatgacctcacatacaacctccgagaaggtcatgagagtgataagaagctcattcacacagaagacccatttaatgatgaacatcag

SEQ ID NO: 789997 - DNA, 75 bp, Homo sapiens
ccggcccccgcctgcctccgccggctacagcgggaagagcgagacgtctcccacaacctgctccgggcgctggac

SEQ ID NO: 789998 - DNA, 74 bp, Homo sapiens
cttgttggaattggtgacaaaatcagaggcatactttataggaggaagaacgtgcaaaacgtgaggagctagag

SEQ ID NO: 789999 - DNA, 100 bp, Homo sapiens
agagactgaaaaacctgaggctgatgacccaaaggtttttcgttggaatatacgttgcacatttatggcgattctgagtgtgagggcagacttctgccag

SEQ ID NO: 790000 - DNA, 101 bp, Homo sapiens
caataagctgctgttcaggtaccccttccagagaagccaggagcacccggcgtcccagacaagtgttggagcgggccggagagaagtagagtgggctgcga

SEQ ID NO: 790001 - DNA, 100 bp, Homo sapiens
gtttagaagaaggtcagagccctgggcagtgttgggccaggctttagggcaacaggacctgtaccgaatcctgaaggcctacaccatctaccggcctgac

SEQ ID NO: 790002 - DNA, 83 bp, Homo sapiens
gtcgtcggcatcctcctggcctacctggcaggaaaatatatgcagatgatgaacattcttaagccaattgcctttgatgttat

SEQ ID NO: 790003 - DNA, 75 bp, Homo sapiens
taataatgctggcaaagtggaaaaatgtgcggagatggcgtctaccagaaggggatggacttcattttggagaag

SEQ ID NO: 790004 - DNA, 75 bp, Homo sapiens
tggaaacaatggcatttacagaaagagtcaacagcagtggcaacaggagagagaagctcttcagaaacagctgga

SEQ ID NO: 790005 - DNA, 100 bp, Homo sapiens
ggactattttcacgttttaatgccgagagacgcaaacatgcagatctttgtgaagaccctcactggcaaaaccatcacccttgaggtcgagcccagtgac

SEQ ID NO: 790006 - DNA, 104 bp, Homo sapiens
cagccaaagaaacaagccgtggaataggtgtatcaagtaatggtgcaaagcctgaaaattcagatcaggaaggaggtggaaagaaaaagaagaaaaagaaggac

SEQ ID NO: 790007 - DNA, 90 bp, Homo sapiens
ggacctggtccagcttcccttcctcaaataaggaaattgacacctggcgtgacagagaaagagctggacccagatgggctgaagaaggag

SEQ ID NO: 790008 - DNA, 100 bp, Homo sapiens
ttccatgatctccaaagaaaccaaaatacaaacacaatatttaatcttgccaaccgaagacgatgtgactgcatgaagacctgagggcactcgctttgct

SEQ ID NO: 790009 - DNA, 100 bp, Homo sapiens
cttctccgagccagcgagccagcgagccgccgacccgccgagcaaaatggtggggaccaaggcatactgaacacattttttagcagctgggcaacaacag

SEQ ID NO: 790010 - DNA, 83 bp, Homo sapiens
cctgccttctgccgccggccggcgcgtcgtccccacaggatttttagactctgaggagcagttggagctaatccacattatgg

SEQ ID NO: 790011 - DNA, 97 bp, Homo sapiens
cagaaatggactgtgtacagagagcctggtgtggagcaagataagatgtttactgaactgcaacagatgaggcaacagttaccagacatggaatttg

SEQ ID NO: 790012 - DNA, 50 bp, Homo sapiens
gaaagaagttgcaaaacactgggctgatgtccaagtgcagttgatcagca

SEQ ID NO: 790013 - DNA, 100 bp, Homo sapiens
caggctccaccatccaacaggcaaatgggatgtatgtccatccctgtgacgatgagggctattcggaggaaagctgaaaccattcaagccgacaccccag

SEQ ID NO: 790014 - DNA, 80 bp, Homo sapiens
aacgaagcttaagtagctacaggggaaaatattctgaggtgctgcggctgttgaacctgatgtggctgcccaagcctccg

SEQ ID NO: 790015 - DNA, 100 bp, Homo sapiens
aaattaacaatggcgaaatgcaggcgaaatgtggaaaatttcctagaagcttgcagaaaaattggtgtacctcagaaacttgaggagaggctggagttct

SEQ ID NO: 790016 - DNA, 82 bp, Homo sapiens
cagccttgttagggcgtggcctgaggcttggataagtggggtgagaagccctaccactgcaactgggacggctgcggctgga

SEQ ID NO: 790017 - DNA, 100 bp, Homo sapiens
gcctcgcctttgccgatccgccgcccgtccacacccgccgccaggctccttcgagagcagtggatccgggccaagtacgagcgacaggagttcatctacc

SEQ ID NO: 790018 - DNA, 88 bp, Homo sapiens
ccattccccgattccatatggcatgtccaacattcagggtgtctatagcccgattggagtggagtcaacatatcaatggagcaagtca

SEQ ID NO: 790019 - DNA, 82 bp, Homo sapiens
gtcaagtacaccatgcacaaggtcttccagtttctgaacctaggtatcatgatattagctggtttgacatcaagtcatttgt

SEQ ID NO: 790020 - DNA, 100 bp, Homo sapiens
attatttaatctatctgggatttactccggcttatgatttgaggtgtgggaaccgctgagcagaacaccctcccccagcgggaaatccgggacacgcagg

SEQ ID NO: 790021 - DNA, 83 bp, Homo sapiens
gtccacgcaggagatccatgagaaggccctgggaggagcggggacactgaggacctctctccaaattggcctctcaactcaca

SEQ ID NO: 790022 - DNA, 136 bp, Homo sapiens
gggtcccgcgcgagctttcccgggataagtagctttagcgatcgggagacagccgggcgctgcaaggtttctgctttgggacaaccatacatctaattccttaaagtagttttatatgtaaaacttgcaaagaatc

SEQ ID NO: 790023 - DNA, 98 bp, Homo sapiens
gtggaatcagttctttgtgctggaggaatacatgggttcagaccccctctatgtaggaaaggctgatatccccaataggtttgaaatgaaacttcaca

SEQ ID NO: 790024 - DNA, 50 bp, Homo sapiens
cccagatccatttacactttacactgttccatttcctccaagtcaccggc

SEQ ID NO: 790025 - DNA, 100 bp, Homo sapiens
tgcggccgtcctccaccgtttcctccaggacagcacctagtcgtggccggaggagtctcagagctgtcagaaaggcaatgcatgaaccattgcaaacttg

SEQ ID NO: 790026 - DNA, 119 bp, Homo sapiens
tgacaaggcactggatgatgcaatcaaagctcgacttctcaatcccaagtggccaaagacagatgtgctggtgctgagctgtgatctgataacagacgttgccttacatgaggttgtgg

SEQ ID NO: 790027 - DNA, 75 bp, Homo sapiens
gcgtgcgcctgggggcaccgctgccgttccgagggcgcaccctacgacgcgcacaccaccggcatgaccggcgcc

SEQ ID NO: 790028 - DNA, 90 bp, Homo sapiens
agatgctggtcttaccacttatcatctccagtcttgtcacaggtgtttcatgggactcccttccggatgagctgctcttgggaatctttt

SEQ ID NO: 790029 - DNA, 82 bp, Homo sapiens
cgtccgccgccaccacccactccggacacaggctgaagctcagggccctgtctgctctgtggactcaacagtttgtggcaag

SEQ ID NO: 790030 - DNA, 75 bp, Homo sapiens
ctgatagctacagctggtctttcaactgacaatagggagaagagaagtttacctttattgagaaatgtaacaacc

SEQ ID NO: 790031 - DNA, 75 bp, Homo sapiens
atctgtgataaagttggtcagtctcgcactggggaaaagagtgcaaattcggaaagcacctcaagctgtttcaga

SEQ ID NO: 790032 - DNA, 100 bp, Homo sapiens
tttattactggagttcattggaaggaggccccaaccctgagcacaacagcaacctggccaatatcttagaggtgtgtcgcagcaaacatatgcccaagtc

SEQ ID NO: 790033 - DNA, 75 bp, Homo sapiens
caaaagaagtagcagaaaccctgtctttcaggattcctgggacacagagtacttgattctaaagctcgaaaggcc

SEQ ID NO: 790034 - DNA, 83 bp, Homo sapiens
caacgtcctccgggaccggagtcagaaccctccgcagagtaaagattgagatagagagaagcctgtattcagaccacgagctt

SEQ ID NO: 790035 - DNA, 83 bp, Homo sapiens
accttctacagccacttccctcgcacggtccgctggttccatcggctgaggagcattggttccgaggattctgaagacgacgg

SEQ ID NO: 790036 - DNA, 137 bp, Homo sapiens
atttggaacagaagatgatggccactccgaaccagaccgcctgtaatgcagagtcaccagtggccctggaggaggccaagaaaaagaaggggagcgttcaattccaaacagctgctttatttggagaaataccgacc

SEQ ID NO: 790037 - DNA, 98 bp, Homo sapiens
caatgaccgccgccgcctggccctggagaactacatcaccgctctgcaggctgttcctcctcgggcaagaaaattggatgtatattttgaatatgaag

SEQ ID NO: 790038 - DNA, 90 bp, Homo sapiens
ggaggagggcctcagccctggaggcaagcgaaggagaggctgcaactctgaacaggaagcaattttggaggtggtggaagctacaatgat

SEQ ID NO: 790039 - DNA, 74 bp, Homo sapiens
ttcaggccagaccctctgggagcttctcagccattttccacagatcagatggagttttaacattgaatgcggag

SEQ ID NO: 790040 - DNA, 71 bp, Homo sapiens
cgacgctgagggcagccccgtccagggaggagttggcggggagccttgggcccctctggcctcagccggat

SEQ ID NO: 790041 - DNA, 83 bp, Homo sapiens
cagcctgcggagcctgtggggcagatctaagctggaaccagaaccaaatacaaagacaagagaatccacatcttctgagaaag

SEQ ID NO: 790042 - DNA, 89 bp, Homo sapiens
tccaggccaagagggatccttcacccgtgtctggaacagcttgagaactatgacttcaccaaattccactcgctgaagcccaagctgat

SEQ ID NO: 790043 - DNA, 74 bp, Homo sapiens
acagttggagaaaatcggcagctgagacggccttggccgaatggcttcagttctgtgcaggccacgcagttaca

SEQ ID NO: 790044 - DNA, 100 bp, Homo sapiens
ctcagatttgtgttgaaaccagcctcaagtttcacctatcctcactgatccgtggacttctgtatgatcaggacacagcattgttggttttgccatgtac

SEQ ID NO: 790045 - DNA, 88 bp, Homo sapiens
aaccactaagcttcaatctgaaaggcttgttgattggtgctggctgtgccctctaccccttgggctgggacagtgaggaagtccggca

SEQ ID NO: 790046 - DNA, 89 bp, Homo sapiens
tctttcggagttgaatttgcagctgggctccttcactttggtctcggcttttatctgcctccctgagacttggtgaaatgtgaaaataa

SEQ ID NO: 790047 - DNA, 100 bp, Homo sapiens
gcagaaccagctacagcagaacatgcaagaaggactgcagatcacatcagcatcttttcagaacaagttgaaatcatcgcagaaggataaagttcgtcag

SEQ ID NO: 790048 - DNA, 75 bp, Homo sapiens
gcggatcatcaactcgcgggtcctcgtggatcagactacaggacaaggtgctgcggatgctgtacgtgtgggcgc

SEQ ID NO: 790049 - DNA, 87 bp, Homo sapiens
aaagatatacaagaaggagatacattaaatgcaatagcccttcagtactgttgtacggtatgtcgagagtaccaacgtggcaattgc

SEQ ID NO: 790050 - DNA, 100 bp, Homo sapiens
ccgggaaatgagccgtgactccaagtgcatcattcagatgtctggaagcaccaccaggcagctggtggaatttttgaagaaaatggaatctcgaggcccc

SEQ ID NO: 790051 - DNA, 50 bp, Homo sapiens
ttcgcggctctaacggggctttctacaagtgaagtgaagacttacgatcc

SEQ ID NO: 790052 - DNA, 51 bp, Homo sapiens
gtggatgtgaagatttcctctaaaagctgagtcctggatgcactaatcgtg

SEQ ID NO: 790053 - DNA, 93 bp, Homo sapiens
cctgcgcagctccggccgcctggctccccatactagtcgccggcatgtactggcattgaaaacattgacgaagctattacattgcttgaacaa

SEQ ID NO: 790054 - DNA, 100 bp, Homo sapiens
ccagaaccagaaccacagcccttctgaggagctcccaaacaatacgccagacaccttttgaaagctaatttttggtgaagaaatggattcggttacataa

SEQ ID NO: 790055 - DNA, 100 bp, Homo sapiens
ttctcttcactagaatatggagactgttcaatcaccaggcaaagaatggctcaagaagtactgacacatttaaaggagcatcctgatgcttggacaagag

SEQ ID NO: 790056 - DNA, 83 bp, Homo sapiens
gagattcagtatcactcgctcccttgatgatcttgaggtacgtggtcatctcccgggaggagagggagcagaacctgctggcg

SEQ ID NO: 790057 - DNA, 105 bp, Homo sapiens
tgctattccggcgcctccactccgtcccccgcgggtctgctctgtgtgccatggacgggaacaagatcactcaaggtgaaggataatctactaataccagcactt

SEQ ID NO: 790058 - DNA, 82 bp, Homo sapiens
agcccctgcgtcgccgggaccctcgcgcgcgaccgccgaatcgctcctgcagcagagatgatatcatcaagttgaatcgaaa

SEQ ID NO: 790059 - DNA, 50 bp, Homo sapiens
atgggttaccagcgacgcacccttcaccagtgccaactcaaggagcccag

SEQ ID NO: 790060 - DNA, 82 bp, Homo sapiens
cctgtgcccgaggaccttagactgatgggtgcccagctctgcttcgaggccatacctgcagaatacctggcacagtgctagg

SEQ ID NO: 790061 - DNA, 98 bp, Homo sapiens
tttatggtggtggagtctgcccaggctgtggtattgttgcagcatctggcagtgagactgaggatgaggacagcatggacattcccttggacctttct

SEQ ID NO: 790062 - DNA, 83 bp, Homo sapiens
gaatgtgttactccattgctgaggagtgaggaagtccacaaatgaaggggacaccccattttaaggaagaacagtgtgctcca

SEQ ID NO: 790063 - DNA, 82 bp, Homo sapiens
agccggcggagcctctggaatcacccgggtcgctgttcctgaggtcaaaatgcagatcttcgtgaaaacccttaccggcaag

SEQ ID NO: 790064 - DNA, 98 bp, Homo sapiens
tggaggtgctgccggactcggaaatgggttactccacaggatccgctgaacataggatgttgccacaaaatctacctcgtgtatttttctctttcact

SEQ ID NO: 790065 - DNA, 75 bp, Homo sapiens
aaatgagaaagctcttgaagcagtatttggcaaatatggacgaatagtggaaggatttaggtcctgaatatgaag

SEQ ID NO: 790066 - DNA, 90 bp, Homo sapiens
cctgaaaaagaatgaaattcttcatctgaaattacctctcagactttctgtaaaggaaaacaaggtggtgtttggactctagaccatgtg

SEQ ID NO: 790067 - DNA, 100 bp, Homo sapiens
aaaaattgactacatcacaactgaaattagtaaaacagaattctctttcaggcgcggggcgaaggagctgctagaacaatgctgaggcgggtgaggtgag

SEQ ID NO: 790068 - DNA, 75 bp, Homo sapiens
ctgctgctgtgtgcggtgctgctgagcttggcctcggcgtcctcgggccatctcggaaacgcaggtcccttggcg

SEQ ID NO: 790069 - DNA, 51 bp, Homo sapiens
ctttgaaggacaagggcattaaaggagaggagagatgaatggagagtatag

SEQ ID NO: 790070 - DNA, 97 bp, Homo sapiens
ccgccagcttggatggagaatccagccataaaatgaaatcatgcaccaggacatcgtcccgctctgtgctgccgacatccaggaccagctaaagaag

SEQ ID NO: 790071 - DNA, 82 bp, Homo sapiens
gaggtcatcgaaggctaccgggcccagcacagccagcaccgcacgccctgcaagggagaaatttccatgcagtatcggcatg

SEQ ID NO: 790072 - DNA, 100 bp, Homo sapiens
aaggttgtgactttagtatacaagagaagaagaaggaggttcctgctgtgccagaaacccttaagaaaaagcgaaggaatttcgcagagctgaagatcaa

SEQ ID NO: 790073 - DNA, 98 bp, Homo sapiens
cgcaaccgaggagcctggggagagcttttgtgacaaggtcatcctggcccggcagtatggctccgagggcaggttcactttcacttcccatacccctg

SEQ ID NO: 790074 - DNA, 88 bp, Homo sapiens
gatgtgatgttggagaactacagaaacctggtctccctaggagaagggaaaatgttacattgtcaaagtcccaaagcctttcagcctg

SEQ ID NO: 790075 - DNA, 100 bp, Homo sapiens
cgcgcacaatcggggcaccgagctcggtagcacaggcggagtgcagcggaggcccctgccgctgccgtcatgccgttcccgtttgggaagtctcacaaat

SEQ ID NO: 790076 - DNA, 100 bp, Homo sapiens
tccgagtccaagagcggccccgagtatgcttcgtttttcgccgtcatgggcgcctcggccgccatggtcttcagcggaggtgcttcccaaggaccgtaga

SEQ ID NO: 790077 - DNA, 90 bp, Homo sapiens
gaatacttcaagaatagcagaggagcagggcaccatgccggtggaaaggatgcgcatgcgcccgtggctggaggagcagataaactccaa

SEQ ID NO: 790078 - DNA, 98 bp, Homo sapiens
ctggcggcacttctgcgcagcggcgcccgcagccgcagccccctgctccggaggctggtgcagataatccgcaagatgggattatggtgaaactagtt

SEQ ID NO: 790079 - DNA, 75 bp, Homo sapiens
ttcgcgagcgtctgggcgggtggtagggtggttctcttcccaaagtggaagccaaattcatcaattatgtgaaga

SEQ ID NO: 790080 - DNA, 97 bp, Homo sapiens
gccgactccaccctggctggaggaactgggtgctcctgcccgctggcccctcgcgcgtgaggatctatctcaggagccatgtggctagaaatcctcc

SEQ ID NO: 790081 - DNA, 82 bp, Homo sapiens
ttcgagcgctgttctcgctccggagccgctgcacatttcgggaagcccgtcagcctgagctacagatgcccatgccgattct

SEQ ID NO: 790082 - DNA, 75 bp, Homo sapiens
gctaaaaacaaagagttatatgaaatcaatcctccaagtcaccatcatgtctcttctcaccaccctctgaatctg

SEQ ID NO: 790083 - DNA, 75 bp, Homo sapiens
ggcgacgtagaggaggacgcctcacagctcatctttcctaaagcaatggccaatgtacatggtggactatgccgg

SEQ ID NO: 790084 - DNA, 75 bp, Homo sapiens
accaagacagtgcctggataccttcgaataggaccagtgtgcttttcttggagaaagaagaaaagaagaaagaag

SEQ ID NO: 790085 - DNA, 100 bp, Homo sapiens
aagactcaagctaacctacaaaggaaccttgggtaatgtggaacatgggaaccaatgtcagatgaaattgatgtatgaacataatcttcagagaacagcc

SEQ ID NO: 790086 - DNA, 100 bp, Homo sapiens
atgaacacccagcccatggaggagatcggcctcagcccccgcaaggatggcctttcctaccagccttgaaaagatcttttgaggtcgaggaggtcgagac

SEQ ID NO: 790087 - DNA, 75 bp, Homo sapiens
agctctggggccctccgtggggtctgctcctgcgtggaagactggcacagcctccaggttggcgggctcatctgc

SEQ ID NO: 790088 - DNA, 101 bp, Homo sapiens
gggaagacgccctggtgctcaccaagcaaggtagaaacctgtgggttcttgttgtggggcggtttccaaaggaacacagaattgggattccagagttcaaa

SEQ ID NO: 790089 - DNA, 128 bp, Homo sapiens
ctggaggagaacctcaatattgcaattgatgtcatagatgcttaccaaaaacatcctgaatcagaatggccggatttcaaggatttggatttggagatggtggcttccagatgtcttttggaattggg

SEQ ID NO: 790090 - DNA, 83 bp, Homo sapiens
ttacacttcgactctcaaagcaataccaggatagctgttgtttcagagaaaggtcatcatcagatttgaaatatttaaagtgg

SEQ ID NO: 790091 - DNA, 97 bp, Homo sapiens
ttctgctgtccagttatcaacatgttttaagagtccttcagtgaatctacagacctattttctcaggagctcagcctggccttacttcagtgataaa

SEQ ID NO: 790092 - DNA, 82 bp, Homo sapiens
ctaccttctggaagctactactacgtggtgcttggaaaggagcagattggctggagaaatgtgtcccggctgctggtgttca

SEQ ID NO: 790093 - DNA, 99 bp, Homo sapiens
tggacaaggttgtgtctgtcaaatgtctgctgcttggagccggcaccttgggttgcaatgtagctaggacgttgatgacagagtctcactctgtcaccc

SEQ ID NO: 790094 - DNA, 75 bp, Homo sapiens
tgtggcccagtacactggggggattgccaaggtctcggtccagctcgacttccagctcaggctccagcaccagca

SEQ ID NO: 790095 - DNA, 97 bp, Homo sapiens
gaaggcgcgagtgaggaaaggaggtactgtagcttccaattgaagacttgtgcagtttaacatcccagtcactgcccattgaactgacttcagtagt

SEQ ID NO: 790096 - DNA, 75 bp, Homo sapiens
gagagtcagagacttctgtgacaacagaacagctttgctgagccatcaaggtctaatggaagcatggttcggcat

SEQ ID NO: 790097 - DNA, 75 bp, Homo sapiens
ctgcctcagcctcccgagtggctgggattacagcttgctttggaacgtcagaaaactgcagagaaagagcgatta

SEQ ID NO: 790098 - DNA, 82 bp, Homo sapiens
gacagtgccctgagggccttcgagagctaccgcgccagacaggttcgtgctggccgtgggcagcgccgtctttgatgccatg

SEQ ID NO: 790099 - DNA, 83 bp, Homo sapiens
agcagcgccgtcccgtccgacagccaggcccgggagaaggaaccctactctggaaactgtcagtcccagggcactggggaggg

SEQ ID NO: 790100 - DNA, 88 bp, Homo sapiens
ctcggagatcgagaaggagatcgctcggacacagaagaacaagggatgctgaaaacgccattcaacagatgggtggccagtggcttgg

SEQ ID NO: 790101 - DNA, 100 bp, Homo sapiens
gacaatgcggacctctctgggctggctattaagacctcctgccccccgaggtctgcagtctcctgaacccagcagccatctacgccaacaacgagatcag

SEQ ID NO: 790102 - DNA, 100 bp, Homo sapiens
agttattggaagctagatttactggagttgcaagtgggagcactggaagtacgggcagttgcagtgttggagctaaagtacagtagcagagggagctccc

SEQ ID NO: 790103 - DNA, 100 bp, Homo sapiens
cgagaccatcgccaatgagttcagcgaccggtgcacccccaccaaggatgacattgatcttgatgccttggctgcagaaatagaaggagctggtgctgcc

SEQ ID NO: 790104 - DNA, 75 bp, Homo sapiens
ccggcgcccagagctaacgggagtcccaggcagtcgacaagtactttaagcttcctcatgcttccagtaaaccac

SEQ ID NO: 790105 - DNA, 75 bp, Homo sapiens
caatgaatgacagcactgtagaacagctttatgaaacagcttgcttcctacagacagccaccgcactgtgttcct

SEQ ID NO: 790106 - DNA, 51 bp, Homo sapiens
ggaagagctgggtcgactcaagatggaggagatgtataagaaagctcatgc

SEQ ID NO: 790107 - DNA, 98 bp, Homo sapiens
cttgattctcttatacgctacttttactcagagtttgaaggttgtgaccaaaagaggctccgcaataccaagtttccaggcccgaagagcatcccaga

SEQ ID NO: 790108 - DNA, 90 bp, Homo sapiens
ctttaaataccctcaagaggagcaacctcgtcagcagcgaggaaggaaacagcgttactatgcgagtcagaagaaaacatttgaaattaa

SEQ ID NO: 790109 - DNA, 82 bp, Homo sapiens
agtcgtcttccacttgcacgaaagctttcctaggccaaaaagaggtcagcccaaggccaaccccactgtcactctgttcccg

SEQ ID NO: 790110 - DNA, 82 bp, Homo sapiens
cgacatgttcacgcacgggatccagagcgccgcgcacttcgtcatgttcttcgcgccctggaccgtataatagacgctggcc

SEQ ID NO: 790111 - DNA, 90 bp, Homo sapiens
ctgtactggctattggaaggaggagattctgaagataaggaggcccagatggtacaggaagacttggagaagacccgtgctgagctgaag

SEQ ID NO: 790112 - DNA, 75 bp, Homo sapiens
caaaaagcgcctcaatgaccggattgagatgtggagttacgcagcaaagactgcttttcaggaagccttggacgc

SEQ ID NO: 790113 - DNA, 101 bp, Homo sapiens
ctctacttagctcagcaattcttaccttatgtatatgccatgaagccactgtcaccatcaacatgcagaacacttccatcgcccccaaaagattcctcaag

SEQ ID NO: 790114 - DNA, 82 bp, Homo sapiens
cggaaggagctggagacggtcgtagctgcggtcgcgccgagaaaggtcttgggcgtctttggtactggcttttttaggggtc

SEQ ID NO: 790115 - DNA, 100 bp, Homo sapiens
cgcggacacgtgcggagagccgactgacactcgcagccccctcgggaggcccgacgcgactgggcccctcagggttttggccaaattgggcgagggcaca

SEQ ID NO: 790116 - DNA, 50 bp, Homo sapiens
agagcagcggaaaatgatccagtcacaggcaatccttaggtgtcacatgg

SEQ ID NO: 790117 - DNA, 100 bp, Homo sapiens
aggcctcccaccaggcaccactgaccaggacctaatcaagctgtgccaaccattgtctttggctatagagtttttttttttaaagattactaaacataca

SEQ ID NO: 790118 - DNA, 82 bp, Homo sapiens
cgctcaccaccaatcagatgtctgtctgccgggcctaaatgtgcacagcatgctcaagcaccagacgctggtcctgacgctg

SEQ ID NO: 790119 - DNA, 94 bp, Homo sapiens
aggaggcgcgggaggtgttcgagaacgaccccgagacgggaaagcaggcaggatgggagagtcgccgatagaaccacctcttccctgcctcctg

SEQ ID NO: 790120 - DNA, 75 bp, Homo sapiens
tctctttctggcctggaggctatccagcatggtgtcctcagaccgaagccaactttcctttctgcccacagaagc

SEQ ID NO: 790121 - DNA, 95 bp, Homo sapiens
gccctgtaaggtatattcggaaacctatcgattacacagttctggatgatgtgggccatggtgtcaagcttaagagttggacagtggaggacctt

SEQ ID NO: 790122 - DNA, 50 bp, Homo sapiens
cctggcattgccttttgttgaggggtagtaaaaagaatcattcctgcagt

SEQ ID NO: 790123 - DNA, 100 bp, Homo sapiens
ggagcacagagaaagagaatgatgaagagaaaggcccggagactgaagagagaagggcacagttacctaagtatcaacgtaatcttcctcggccaggaca

SEQ ID NO: 790124 - DNA, 100 bp, Homo sapiens
ggagtactcctgtgtgtgtggggaggagaggacctctgccactctcaccgtgaaggggtggcggtggtggcagcagtgatcctctgaacctgcagaggcc

SEQ ID NO: 790125 - DNA, 101 bp, Homo sapiens
gcttcattgacaaggaggacctgcacgacatgctggcctcgctggggcctgaaagaagaagtgtggaaattgataacaaaaacaaaaccatcacagcatat

SEQ ID NO: 790126 - DNA, 97 bp, Homo sapiens
ttggaggagtactactttgaacagcatagagccaatcacattttgcacaagggcagtcaccatgaaaggaaattaaggatgcagacactcagggcgt

SEQ ID NO: 790127 - DNA, 100 bp, Homo sapiens
ccttagtagcagaaaaacgaccgtggccacagtaccacaaagtctctgacagcccacctgaggatattgaccataaggactcatatctcattacaagaag

SEQ ID NO: 790128 - DNA, 75 bp, Homo sapiens
gcctgcccagacggctcacctgtgcgggatggaacaaaagctgggacagaaagaacaacccggagccctggaacc

SEQ ID NO: 790129 - DNA, 96 bp, Homo sapiens
gaaaaataggccactacatgaaagactgccctaaaaggaaaaggtagcaatgaagtgatgaggatactgatctctagaagcctgcttcaggagtag

SEQ ID NO: 790130 - DNA, 100 bp, Homo sapiens
acattaccagtggcaattaatggaaatggacccaccaagttattcaagcggagaaatgttgctacagcagaagaagaaacagaagaagaagttatgtcag

SEQ ID NO: 790131 - DNA, 83 bp, Homo sapiens
ctcaggtcagcggagggaggagacttatagacctatccagtcttcaaggggctttgttatgcacctaaagccatattggaagc

SEQ ID NO: 790132 - DNA, 100 bp, Homo sapiens
gcagtatgagaagtacagggagcgagagctggagaagctgggattggagattccacccaaacttgctggtcactgggagctggtgtatccgaacgacttc

SEQ ID NO: 790133 - DNA, 85 bp, Homo sapiens
ttgcagaaatgtgtgcagactacatggcatctaccataggggggagtttgaagaggaatcaaagcagccaggggtgtctgagcag

SEQ ID NO: 790134 - DNA, 75 bp, Homo sapiens
gatcatcattaaggacggaggcacgtctgcgctcctcagaccaccggcaggtgaacagcctgatgcagaccgagg

SEQ ID NO: 790135 - DNA, 101 bp, Homo sapiens
ccaaggtcaacaaggacaacaatgagatcgtggacaagatcatgggcaaaggacagatccagctccagcagtacccgcggctacgggaggagatggagcgc

SEQ ID NO: 790136 - DNA, 90 bp, Homo sapiens
gttgcaacggagataaattcccggaaccgcgattcggcgtgtcagaagccccatgtgccactcccctgatctgcagcttcggtaggccgg

SEQ ID NO: 790137 - DNA, 83 bp, Homo sapiens
cgcgtggaacggctgcttttggaaggatgtggaatcattgatggaaaagcataatgtcttagaaaaaggctttctaaaagaaa

SEQ ID NO: 790138 - DNA, 83 bp, Homo sapiens
ttcggccaagggaccaaggtggaaatcaaacgggcttcaagaagcgtgcacctcgggcactcaaagagattcggaaatttgcc

SEQ ID NO: 790139 - DNA, 100 bp, Homo sapiens
gagcactacgagttccagacgcgccagctggagctgaaggccaagaactatgccgatcagagtttttctattgggaaagctactgatcggatggatgctt

SEQ ID NO: 790140 - DNA, 75 bp, Homo sapiens
ggcaggagcgaccgtgaggacaggcttttgctctgcgacggctgcgatgcgggcaattctgtggtgttcttggtc

SEQ ID NO: 790141 - DNA, 75 bp, Homo sapiens
cctgtgtcttctgcagtgattttaaccaaggcagttggtggaaatgagttacatcatgctgatgacagcttcctg

SEQ ID NO: 790142 - DNA, 100 bp, Homo sapiens
atcaagttgtcctaactgatttgcggcttcacagtggagaggaaatggctagtgatgagctgaaagagatgcggaaaaacttgaccaaagaagccatcag

SEQ ID NO: 790143 - DNA, 73 bp, Homo sapiens
ctcagataccagcaactcccccatcgtatgaatctgcacctacaaaggcagcacctaagcaaaagattgtgaa

SEQ ID NO: 790144 - DNA, 75 bp, Homo sapiens
gggaacccttgacacagttttcatatagattggcctccagggcagacagcagtactgtaagattgatgttaaagg

SEQ ID NO: 790145 - DNA, 82 bp, Homo sapiens
gtggacatcagcgccatccccgagcagcggtggaagctgatgtgaagttcatttccaatccgccctccatggtggcagcggg

SEQ ID NO: 790146 - DNA, 100 bp, Homo sapiens
gacgacctcttgtgctgcagcttgttacttctaaagcagaatggcctgtccagaagacagccaaatacatccttcaaacagacttcactgcaggagacag

SEQ ID NO: 790147 - DNA, 100 bp, Homo sapiens
gcttgttttgtcccggactcgatcccgggggcataactgctggcagcaccgacgaacccccaatgctgaccaaggaggagcctgttccagaactgctgga

SEQ ID NO: 790148 - DNA, 83 bp, Homo sapiens
gggacattattgcgcgtggaacggctgcttttggaaggtcgagcctcttaggcagagtttaacacatgggagctgcctgcctg

SEQ ID NO: 790149 - DNA, 74 bp, Homo sapiens
aattacactgtgatacgactgactataatatcgtctactgcattatttttggctgcaaaagtggaagaacaggc

SEQ ID NO: 790150 - DNA, 100 bp, Homo sapiens
acaccactcccaagaagaataagcacaagagaaagaaggttaagctggctgtcctgaaatattataaggtggtcctgccgtcctacgaggaagccctgtc

SEQ ID NO: 790151 - DNA, 97 bp, Homo sapiens
gtaatcatacctctagtcatagcataccatttatcgggctcggcgcaggcccgcggggagcgcagcccggcggaggccaatggaagcactgttgtga

SEQ ID NO: 790152 - DNA, 119 bp, Homo sapiens
gaaacaagtaatcttatatggtgtgattctgctgttcagcaggagaaaatttcagagctgcaaaattatcagttaatatgatcctctgttgaagcaagaagacaaactgtatggtggag

SEQ ID NO: 790153 - DNA, 82 bp, Homo sapiens
tcagctccgagtccagggcgagcaaccatgtccaagggacctgcagttggtattgatcttggcaccacctactcttgtgtgg

SEQ ID NO: 790154 - DNA, 106 bp, Homo sapiens
cctgcgcgaagctggccaaagcctgcccagacggctcacctgtgcgggatggaacaaaagagccccccaagatgaacccagtggtggagccactgtcctggatgct

SEQ ID NO: 790155 - DNA, 100 bp, Homo sapiens
attattaatgatccacgatacaggacggtgaactttgacataataaaatacttgtatgatttcttgtgaaaacaagcttcaaagccatatggacactgtg

SEQ ID NO: 790156 - DNA, 100 bp, Homo sapiens
gagtcgtcttagatgttgattcagccataggaaaaggatacagagtagagtttcatgaacctgaaacttggtggaaatttgatcctgaagaattagaaaa

SEQ ID NO: 790157 - DNA, 74 bp, Homo sapiens
tttgtgctgggcgctgccttttccaggcttcctggcaacactagaacaaaaattggcttcataacatttgacag

SEQ ID NO: 790158 - DNA, 97 bp, Homo sapiens
caagaagatgagcagtttctgggagccgttatgccaaggcttggcaatttcctgccatttcgccagtgccgattgccactacattgacgtgaagggc

SEQ ID NO: 790159 - DNA, 82 bp, Homo sapiens
aaaaaaagatggagccctgcatatgattggctctttagctgaaatacttctgaagatctattaatgagatgaagcggttgga

SEQ ID NO: 790160 - DNA, 83 bp, Homo sapiens
ctggccgccccgagcggagcctggaggcttctcacggcattcagcagcagcgttgctgtaaccgacaaagacaccttcgaatt

SEQ ID NO: 790161 - DNA, 100 bp, Homo sapiens
gtcgaagcagcagctctcgctccagaagcttcactttggtagttcaacttatcagcaatgagatactaccttatgccaattttattcctaaggaatttgt

SEQ ID NO: 790162 - DNA, 49 bp, Homo sapiens
gccgctaccaggaggtcaaccccgctctctttaccatcatcaccttccc

SEQ ID NO: 790163 - DNA, 80 bp, Homo sapiens
gtatgagaaggacaacacctacttaggcggatctcctcctcctttccagcagtgagccccatgggctgtgttacatagag

SEQ ID NO: 790164 - DNA, 75 bp, Homo sapiens
tcatggctaatgaaagcctggaagaacattagaaccaccatgaggaggagatcacaaatcaacatctcacttccg

SEQ ID NO: 790165 - DNA, 75 bp, Homo sapiens
cgcggtcagaaaggcgacgggctgtcggagttggaaagggcggcgactggcggcgcgatggacctgaccgggctc

SEQ ID NO: 790166 - DNA, 97 bp, Homo sapiens
caagaactactggatcaacatgcaggattgctggaactgctgcaagaaatgagccgtcagactgctacagcattacctaccggtacctcgaagtgtc

SEQ ID NO: 790167 - DNA, 96 bp, Homo sapiens
tgtgctgcaccagcacctcttgctccacatctccagagagcccaggtatccgttacagcactgatgtgagtgtagatgaagtaaaagctttggctt

SEQ ID NO: 790168 - DNA, 75 bp, Homo sapiens
ggtggaatgagcttatttttatccaaagcagatgaaaggttgtatcaaagttcttaaggaccaacctcctaatag

SEQ ID NO: 790169 - DNA, 100 bp, Homo sapiens
gttaaagagacccgttcagagtcctacagtggcagactcccaagacagctgggctgcgaccaatggaaacaaaggacattccagtagtgcaccagctcct

SEQ ID NO: 790170 - DNA, 80 bp, Homo sapiens
gcaaagttttgcagatcttcaacaagaggacccaggagaaattcgccctcaaagtgggatgtgtgtgggctgaaattccg

SEQ ID NO: 790171 - DNA, 146 bp, Homo sapiens
cttattgaaaagtacattaaagaaggaaagattgtaccagttgagataaccatcagtttattaaagagggtctttgaagaaactggttttgatatcaaagactatatttgtaaggatgattacattgaacttcgaatcaatgacca

SEQ ID NO: 790172 - DNA, 100 bp, Homo sapiens
ccaaaagcgcagaccacagttacatgtatggagaatggctggtctcctactcccagatgcatccgtgtcagaacttgccacatcagactcagattcccca

SEQ ID NO: 790173 - DNA, 100 bp, Homo sapiens
gaaaaacttcagacagaccaggccgaagcctcaaggccacacattacttagagcctccagtgaagctgaatgaagctctagagagatacggacttaacgc

SEQ ID NO: 790174 - DNA, 88 bp, Homo sapiens
caggtttgcaatgaagaagttttatgatgacaaagtttcagctttaatgcagccttcccaaaaacgggctctctttacctatgaaggc

SEQ ID NO: 790175 - DNA, 96 bp, Homo sapiens
cagaaaccccgttgacaaggcactgctttttcatgacgatggactcaccctgtcacccaggttggactgcactggcctcaacctcctgagttcaag

SEQ ID NO: 790176 - DNA, 72 bp, Homo sapiens
gcgtccaggcctgacagctctgcggctcgggccctgagggcttaaaagacaaccttcttgcttctgggacat

SEQ ID NO: 790177 - DNA, 75 bp, Homo sapiens
caggccctgaggtgggccggacctgggagtggcaggtacttcatgaacatcacgtgggataaccgggattactcc

SEQ ID NO: 790178 - DNA, 100 bp, Homo sapiens
gtgaactttctgccaagatgcgctacctctacccagatggaaagacccacaacccagacctgactgagctcggccaggcagaaccccagcagcgcatcca

SEQ ID NO: 790179 - DNA, 76 bp, Homo sapiens
acagcatctcagacttctttcccagatgtttataatgagggcacacagcacccccaaattcagaaggagtcccagt

SEQ ID NO: 790180 - DNA, 100 bp, Homo sapiens
ctgctgctcccgggcagtgctttccccaagtagtccgatggctgcggctgcgccgaggcgccctactcaggtggtttgaagtgtcctgtttgcagctttg

SEQ ID NO: 790181 - DNA, 100 bp, Homo sapiens
aatttggcgccccacgcaggaaggaaactgacccactgaatgagccgggctgtgggacagatgatgtctaccatgttctacccactggtcacctttgtcc

SEQ ID NO: 790182 - DNA, 74 bp, Homo sapiens
gacattgccatcccatgcaacaacaagggaactgtccaggtttattgctgccgggagactacactgcaaaatag

SEQ ID NO: 790183 - DNA, 90 bp, Homo sapiens
caggagccctctatcttttgttctctggcatggaaggggtcctcagagttactgggtctctgctggatgaaccgaatcctaacagtccag

SEQ ID NO: 790184 - DNA, 89 bp, Homo sapiens
gcccttgacacatgtcactgtgcactgctcttctcgctggggaaggttatagagatggaatagatgctggcaaagcagttactcttcaa

SEQ ID NO: 790185 - DNA, 75 bp, Homo sapiens
cttctgtatcttcatggtgcggctcatcttcgagagtgcgacttcatgatagcatatcagaagagggctttcact

SEQ ID NO: 790186 - DNA, 99 bp, Homo sapiens
ttcaacagttcaccaccattaccggctaaagaattacctccaaagccattgtcaagaccacagcagtcatctgcaccagtccagctgaactctggctct

SEQ ID NO: 790187 - DNA, 83 bp, Homo sapiens
agcgggagctggacggcgagcgcgagcggcgcgagaaaacggcgggcgctaacaccaccgacaaggagctagaggttctctcc

SEQ ID NO: 790188 - DNA, 100 bp, Homo sapiens
gccaatcacaggcaggaagatgaaggttctgtgggctgcgttgctggtcacattcctggcagatgtggacgagtgctcactagcagaaaaaacctgtgtg

SEQ ID NO: 790189 - DNA, 100 bp, Homo sapiens
tggtgtgtgggggaagccgcccccggcagcagcaaatcaatatgtgtggatcagaataaaccgctgtttatcacagcaggattggattctttcggtcaaa

SEQ ID NO: 790190 - DNA, 100 bp, Homo sapiens
aactattcagaagacttcagaggaaccaccaaactgttttccacagaggctgcatcaattgacattcccactagcaatggatgagggttccaatttttcc

SEQ ID NO: 790191 - DNA, 99 bp, Homo sapiens
ctacaacttggagaatggaaaagaaccattgaagcttgagagaaaagcccccaaaagcagctattcagcgcaccatcctgggaagtgcatgtctcagac

SEQ ID NO: 790192 - DNA, 90 bp, Homo sapiens
gtaatgctggggaccctgagatcgtcaagtctcccagcgaccccaagcaataccggatccaaggagctggttctgctggttggaccaaac

SEQ ID NO: 790193 - DNA, 74 bp, Homo sapiens
tccttgatacctctcactattctactgctggaagctcaagtgcgattgtaactgcctatgagaatagctctcag

SEQ ID NO: 790194 - DNA, 80 bp, Homo sapiens
ctctgactctcggactgagaaacgcaaggggaggtcatcaaggcttgggacattgccatagccaccatgaaggtggggga

SEQ ID NO: 790195 - DNA, 98 bp, Homo sapiens
atatggcatcctaatattagttccgtcacaggggctatttgtttggatatcctgaaagatcaatggtaaaaatgcatttgcaaagggagaaaatgaag

SEQ ID NO: 790196 - DNA, 96 bp, Homo sapiens
aacgaggcaaggagctaaagcagcgtgcgttcagccctggggtctcctccgggctggggctgagcaagccctcggagtgaccgtgggtgacagcgg

SEQ ID NO: 790197 - DNA, 50 bp, Homo sapiens
gttacgactctactgcaaaggagctgctggacgtaaagaaagaagtgatg

SEQ ID NO: 790198 - DNA, 74 bp, Homo sapiens
accgaaaatcagtgaaaaaaggttttgagttcacactgatggtggtcgaaagggtgcactcgccagcagttttg

SEQ ID NO: 790199 - DNA, 75 bp, Homo sapiens
gcgggtggcagctccaaagcattggatgctggataaattgaccggtgtgtttgccccagctgcccactggaactg

SEQ ID NO: 790200 - DNA, 98 bp, Homo sapiens
aggaatgtgattcttcatcttccaagacctaactaccataatgaatgctgcatattaagagaaaccacaagaaggttatatgtttggttgtctaatat

SEQ ID NO: 790201 - DNA, 100 bp, Homo sapiens
gggggactggcctggcgtgcactccgcacctcggggacattattgcgcgtggaacggctgcttttggaagaaaattcttgctgctgtattgagaacagat

SEQ ID NO: 790202 - DNA, 83 bp, Homo sapiens
gtgacgttgtggagatggggagcgtcctggggctgtgctccatggcgagctggttgactatattgtggagtatgactatgatg

SEQ ID NO: 790203 - DNA, 100 bp, Homo sapiens
gaaagacctcagagtgttctcaattagatgcaattgctcgagatgctgagttagttgataagtcagaaacagaccttagacgactgggagaattggtaca

SEQ ID NO: 790204 - DNA, 83 bp, Homo sapiens
ccagctccgaaatcaccaccaagccccaccattgctctctctgtcttcagttccccaggagggcaatggcatcaaacagcaca

SEQ ID NO: 790205 - DNA, 83 bp, Homo sapiens
cgcgtgtctaggtgagtcgcggtgggtcctcgcttgcagttcagcgaccacggtcccagagggtggaaggagccaggacgcac

SEQ ID NO: 790206 - DNA, 100 bp, Homo sapiens
gggagacgctgggagcgagcgcagcaaagcgcccagcctgccgcctcgctgtccctgcggcttctggggcgtggggtagagcagcggctgccatgctctt

SEQ ID NO: 790207 - DNA, 101 bp, Homo sapiens
ggctgctgtcgcccagcgccgccccgtcgtcgtctgccttcgcttcacggcgccgagccgcggtccgaaatggctattcaagtggacaagttcaactttga

SEQ ID NO: 790208 - DNA, 101 bp, Homo sapiens
ctggggctctggctggcgttgctgcgctccgtggccggggagcaagcgccagcgctcctggttgcagccagaatgcatgacttcaggaggactgtgaagga

SEQ ID NO: 790209 - DNA, 78 bp, Homo sapiens
cctcctgagtagcagagactacagtgtttggtgtataaaacagaccaagctcaagatgtaaagaagattgagaaattc

SEQ ID NO: 790210 - DNA, 83 bp, Homo sapiens
cgacgggaagacacattttatgttgtctctttccgaaggattgaagctgacatctccaagaggtacagcgggcgccctgtgaa

SEQ ID NO: 790211 - DNA, 90 bp, Homo sapiens
gtgatagagaaggcgaaaacatcgggtttgagattatccacgtgtgtaaggctggggaaagctctggcaatttaaatgacccaaataagg

SEQ ID NO: 790212 - DNA, 75 bp, Homo sapiens
ctcccgccggccccaaagacgctaaacgtgccctactctgccccgggggagagattgtctaaagccccaggaaaa

SEQ ID NO: 790213 - DNA, 50 bp, Homo sapiens
ggccaagagggatccttcacccgtgtctgatctgccgacaccccaggcca

SEQ ID NO: 790214 - DNA, 130 bp, Homo sapiens
cgagcagatgcggacgcttttttccttcctaggagaaatcgaggagctgcggctctaccccccggaaaatgagccgtcagactgctacagcattacctaccggtacctcgaagtgtccaccatcccagag

SEQ ID NO: 790215 - DNA, 90 bp, Homo sapiens
gcaagcaacagtagtcgctgttggatcgggttctaaaggaaagccttcatcacggcggcttggattgtcctgtgccaactgtcacaccac

SEQ ID NO: 790216 - DNA, 78 bp, Homo sapiens
ggctgccatgacaaccaggcaatgctggatagataccgaattcttatcacaaaggtaattaataatgcttgtgctact

SEQ ID NO: 790217 - DNA, 100 bp, Homo sapiens
ctcagcctcccgagtagccaggactacagcatttttgaaacgttggggttgttggagtggttggattttccctggaattgagtgagaaattcagaagact

SEQ ID NO: 790218 - DNA, 75 bp, Homo sapiens
cgactactgtcagcagctgtgccaggtccatctgaactgtttactgtttgttcatcgattagcagaagagtccag

SEQ ID NO: 790219 - DNA, 99 bp, Homo sapiens
gagcgtgaccgagagcgcgaatatcgtcatcgttagaaggttggagcaaaacgtcccactcactggaggcacctgaggacgacgggggctggtcaagtg

SEQ ID NO: 790220 - DNA, 96 bp, Homo sapiens
tcagcaagactctcgagcccatctgctactgtttgaacggtcttggatgaacagatggaagtctgctgttctgcatgaaggggaagggaacataag

SEQ ID NO: 790221 - DNA, 75 bp, Homo sapiens
gtcagaagaaggctgctattgaaagagagtatgcacagggattaatgaaaatcaagttccatcctcagacaagag

SEQ ID NO: 790222 - DNA, 100 bp, Homo sapiens
caggcttccttcaccacgtcaagaagtcggacccggaaagaggctttgagagagtgggaaggcacattcaggaccccgcgagccagcggctgacgtggaa

SEQ ID NO: 790223 - DNA, 100 bp, Homo sapiens
caagatgtccttggatcctgcagacctcacccatgacactgagccagcaccgctctttgaccttgccatgcttgccttagatagtccagagagtggctgg

SEQ ID NO: 790224 - DNA, 75 bp, Homo sapiens
gccatgagcatcaaggcaggcacggtggatgaggactcgtcaggctccgaatgcagattgagttcataaaacaag

SEQ ID NO: 790225 - DNA, 74 bp, Homo sapiens
gtgactgtctctccagatggatccctctgtgcttctggaggcaagagctggcagcccatggggacctggtgcag

SEQ ID NO: 790226 - DNA, 75 bp, Homo sapiens
gcgacccgctgctcagcgtcctcatgtggggggtaaaccactcgactgccactctccgcccctacctgagtgccg

SEQ ID NO: 790227 - DNA, 100 bp, Homo sapiens
cagggctgaaagggcttcagggactgccaggcccgaaaggccagcaagaggggtgtgaagcacaaggctccagtccaggccgcacagagcagcgatgggc

SEQ ID NO: 790228 - DNA, 100 bp, Homo sapiens
gttcgcgtctctctgctgcggcgcggggaccgctgtgctctcggccatcaccatcgaggctgagccaagagctgatggcagccgccggaccacccgctat

SEQ ID NO: 790229 - DNA, 90 bp, Homo sapiens
aggtcacaggcaggtttaatggccagtttaaaacttatgctatctgcggggccattcgtaggatgttcatggcctcccacgggaacgacg

SEQ ID NO: 790230 - DNA, 82 bp, Homo sapiens
cacacatgtagagacctttgtatctgataccccaatgtccttctttgactttgtggttgatcctcattctttcccccgtaca

SEQ ID NO: 790231 - DNA, 75 bp, Homo sapiens
tcaagaatgaagccacggacccttgcgcagaaaaagtcctacctggagcgaagcgttaaggaagctgaggacaac

SEQ ID NO: 790232 - DNA, 75 bp, Homo sapiens
ccgtagacaccagctccgaaatcaccaccaaggaagcaggagctggccaacagctcggatgcgaccctcccagac

SEQ ID NO: 790233 - DNA, 50 bp, Homo sapiens
tgaaagaaacttccacgccttctaccaactgtttgcagacaaggtcccaa

SEQ ID NO: 790234 - DNA, 82 bp, Homo sapiens
caagtgtgtgcatctggctgttagaagaattcatgctcatccgggatattagaaatggctactccccagtcaattttcatct

SEQ ID NO: 790235 - DNA, 98 bp, Homo sapiens
cgagggcttggaatctcgagcgggaaaagatgggagacctttaactctgaaggacatatgggaaggagttcatgagtgctataagatgcgactgctac

SEQ ID NO: 790236 - DNA, 82 bp, Homo sapiens
agcagccgcggagcagtagccgccgtgggagggagccatgaagcattacgaggcactgccgccctgcactgtagcagatgcc

SEQ ID NO: 790237 - DNA, 71 bp, Homo sapiens
aggtgccgcccccaaccgtgcccatggactactcctgggccagggtgcagcttcaagcttaggaccaccca

SEQ ID NO: 790238 - DNA, 75 bp, Homo sapiens
acccgggactagtggaccagctggtgaaggcagacagcgagtggcgacgatagcaattggagccaaccctcttta

SEQ ID NO: 790239 - DNA, 128 bp, Homo sapiens
tctgagtgtctgtccccagagcctcagtttgtgcaggacaccgacatggaacagggactcactggggattgtaaaccatggctgtgtggatacaagctcagcagctccaaggagaagcccttcatcag

SEQ ID NO: 790240 - DNA, 100 bp, Homo sapiens
tctctacctacttagatcccgccctggagctgggtcccaggaatgtgctgctgttcctgcaggacaagaggagcacccccagtcccgtgctgcagccccg

SEQ ID NO: 790241 - DNA, 88 bp, Homo sapiens
gtgccactgagcatgtccaaggccacctggggaagaagcaggtgcctccggatctcttccagggccatggaggaagcggagaagacca

SEQ ID NO: 790242 - DNA, 100 bp, Homo sapiens
aggctggaacaaggagaagaaccatggagactggaggaagaattcccaagccagagctttccagggggtgctcaaaggatttaaaggagaactaattcat

SEQ ID NO: 790243 - DNA, 101 bp, Homo sapiens
ctcttccagccaccccctctccagtctgctcaggatgtgatcttcgtggtggaaagctaaattttaaaaccaccccaatggatgcagacagtgatgttgca

SEQ ID NO: 790244 - DNA, 74 bp, Homo sapiens
gagcaagccaagaaagaatccgaagatcagaaacgaatgtgaaagatgttgcagaagtgttccagaagtggctg

SEQ ID NO: 790245 - DNA, 100 bp, Homo sapiens
cccttcacccctcacctcgatgcagccagtagcttggatccttgtgggcatgatccataatcggtttcaagcctgtctcgatatagattgaagtttagcg

SEQ ID NO: 790246 - DNA, 87 bp, Homo sapiens
caaactcattttttgatgcaacaggtaaaagtacacctgtaagccagcttggttccgcagactttcccgaggcccccgatccattcc

SEQ ID NO: 790247 - DNA, 98 bp, Homo sapiens
tcccattcacaaggcagctcgctctgggagcctagaatgcatcagtgcccttgtggcgaatggggctcacgtcgaatagtcgtgcaagcactgcagtg

SEQ ID NO: 790248 - DNA, 50 bp, Homo sapiens
cctcgctgaggaacgacgccgaggaaggttattgcagctgactgcaaaag

SEQ ID NO: 790249 - DNA, 90 bp, Homo sapiens
caaaggccaagtacagcatgggtccccttcccctgagcccatctacaatagcgaggggaagcggcttaacacccgagagttccgcacccg

SEQ ID NO: 790250 - DNA, 82 bp, Homo sapiens
cttccccgcggtgcggtgccggctgccccctgttggccgccttgagagctccacgcaggagatcggtgaggagctgatcaac

SEQ ID NO: 790251 - DNA, 73 bp, Homo sapiens
gatgagagcaagacagagcaaccaagatgcccaagatattggcagtcgatgatgtgaagaaaggttacatcaa

SEQ ID NO: 790252 - DNA, 101 bp, Homo sapiens
tttgacaagatgtcacctgaaagtggtcacagccgcatctttgaaggtaaacactacacgtgaagagtggtgaaagggaacattgattactgaagtgccct

SEQ ID NO: 790253 - DNA, 90 bp, Homo sapiens
cgccaaccgcaaccattgacgccatgtcgggttattcgagtgaccgagaccgcggccgggaccgaggtttcaggaccacgtcaagacttg

SEQ ID NO: 790254 - DNA, 100 bp, Homo sapiens
gttactgccgcgccaccgagtccggaccggagactttggggcctaactaggggcagcctcacctgggcatggcatccaagagaagctccaagtggtggat

SEQ ID NO: 790255 - DNA, 83 bp, Homo sapiens
cttgggcctcgcgccggctatggccgtgccctggggctgagccctcagagcctggagacacaggccccatccttcccaatggg

SEQ ID NO: 790256 - DNA, 103 bp, Homo sapiens
aaagattcttcaagggatatggacggataagagatattgatctgaaaagaggctttggttttgtggacaagagatggccacgtccagttctggacagctccta

SEQ ID NO: 790257 - DNA, 100 bp, Homo sapiens
tggtcatgtgaactgcacgataaaggaactcaggcgcctcttcttagttgatgatttagttgattctctgaaggtaccagcaactaaggtttcagagctg

SEQ ID NO: 790258 - DNA, 73 bp, Homo sapiens
tcagccccaaacaggacgaaggcgtgctgaagggctcttccgtgggcggcggcttcgcgggcttggagttcgc

SEQ ID NO: 790259 - DNA, 82 bp, Homo sapiens
ccgaactaagcagggcggtcggggaggaaaggagcagtggcttccggttgaagccaccaacgctgatccacggccaagcccc

SEQ ID NO: 790260 - DNA, 50 bp, Homo sapiens
ggaaaggccccatcttcccttcacacctgatgaaatctatgggaacagct

SEQ ID NO: 790261 - DNA, 95 bp, Homo sapiens
cctgaactgcggggtctctatcgcactgctaggggttctgctgctgggtgcggcgcgcctgccgcgcggggcagacggagtttcactcttgttgc

SEQ ID NO: 790262 - DNA, 100 bp, Homo sapiens
gaaaacaaaacaaagacgctggggaaacttcaccaagagcctcggcagctccagagcgacgggaaacgaaaggactacgcccaagcaaggtttgatgcct

SEQ ID NO: 790263 - DNA, 83 bp, Homo sapiens
tgcttctccttttcatgagtgttcctgtggtctctgcacctcctttctgttactcactataaacaatatccacccaacacaag

SEQ ID NO: 790264 - DNA, 96 bp, Homo sapiens
cacggcctcttgacactcccaggcagcacagatagacggatccggttttgactctgggaggagggctgccttatttggagcaccttaatctctctg

SEQ ID NO: 790265 - DNA, 97 bp, Homo sapiens
agccgcacgtagaattaagacggagttcctagtgcaaatgcaagggtttcctgaggctcaagctctaggactggaggtgttccatgcaggcactgcc

SEQ ID NO: 790266 - DNA, 100 bp, Homo sapiens
cggggacactcactttgacgatgaggagacctggacttttgggtcaaaagggttgaaaaataccggccacagaccctgaatgatctcatttctcatcagg

SEQ ID NO: 790267 - DNA, 96 bp, Homo sapiens
agaagcccccagagcccccgaaggcctgtgcacagaacaacctccctcctagcatgatgacccgcagaaacacctacgtttgcacagaacgcccgg

SEQ ID NO: 790268 - DNA, 100 bp, Homo sapiens
tggatttttaagtgacctgaacctggcatcctgctatttgaaacaaggaaagttcaagcaagcagaaacactgtacaaagagattctcactcgtgcacat

SEQ ID NO: 790269 - DNA, 96 bp, Homo sapiens
aggacatgaggaaaatgtccttccagcgctgcgcccggacagacaaggcagcgcccggttaccacatggccaagctgatcatcaagttggtcacct

SEQ ID NO: 790270 - DNA, 90 bp, Homo sapiens
ccgagagcgtgaccgagagcgcgaatatcgtcatcgttagaaggagatttcctaggaccttgctcttctgtaagcacagttctacccgcc

SEQ ID NO: 790271 - DNA, 89 bp, Homo sapiens
gccgcgcctcggccccatggacgccctgtgcggttccggggagctcggctccaagttctggattgttgaacagataaatacgaaactgc

SEQ ID NO: 790272 - DNA, 100 bp, Homo sapiens
gcattgtatcacttcatctgcaaatatttcaataagtacccaaaagctacgtggtgaacatgggtctgattgacaaactgtgtgcctgcttcctctcggt

SEQ ID NO: 790273 - DNA, 98 bp, Homo sapiens
aaattcagggctaagcattttgggtgattttaaactaggctcccacatcaggacgagaaggagccctcgagttaccgtgggagctgtgggagctgccc

SEQ ID NO: 790274 - DNA, 75 bp, Homo sapiens
cccctcgtacgggctgtcggccgaggtcaagaaccgggtattgttgcagcatctggcagtgagactgaggatgag

SEQ ID NO: 790275 - DNA, 90 bp, Homo sapiens
tttaccgaagcctaggcattttacctcctctccgcacggcgcagtacaactccaaatggctcaatggtgaggtttatacatggggcgaca

SEQ ID NO: 790276 - DNA, 98 bp, Homo sapiens
tgcgcaccacttttgtgtccaggcataagaaatttgacgtttgatggtgacagtgcctacgtggggatgagtgacggaaacccagagctcctgtcaac

SEQ ID NO: 790277 - DNA, 98 bp, Homo sapiens
atcgcaggctccctgcctactcccccaccggggatttcagactgattcttgctattccaaatcctcttccacgttgacagcccttcagatatttcaac

SEQ ID NO: 790278 - DNA, 100 bp, Homo sapiens
caagctggagagatacatgacctcaaggacatgttggatgtgaaggagcggaaggttaatgttcttcagaagaaggcctatgagagctacaagaagaagg

SEQ ID NO: 790279 - DNA, 87 bp, Homo sapiens
cacagccaattcaaaggaaggagtgggactctgggacattcgaaaacctcagagatcacagattctgctggccatattctctactcc

SEQ ID NO: 790280 - DNA, 98 bp, Homo sapiens
gcttcaccacaaaagcgaaatgggcacaccacagataagtatgctgtgcgcttcatccctcgggagaatggcgtttacctgattgacgtcaagttcaa

SEQ ID NO: 790281 - DNA, 75 bp, Homo sapiens
cgggccccagcatccctactcccaccagcgccagaacacaggtgtcgtgaaaactacccctaaaagccaaaatgg

SEQ ID NO: 790282 - DNA, 90 bp, Homo sapiens
acacaagcaaggctggtgtggccccattgcaggtcaaagtgcaagggcccaaagcaaaccagtccagctacgggggcccagccagccagc

SEQ ID NO: 790283 - DNA, 73 bp, Homo sapiens
gcaccaaattgaaaacatctcccaatgaagattgtcgaagaggaaaccaaaaaagagctggaagagaacaagc

SEQ ID NO: 790284 - DNA, 73 bp, Homo sapiens
ggcactgctcctgctggccgcctggacggctcgggcgctggaggtcacggagctgctggacgtctccatggag

SEQ ID NO: 790285 - DNA, 51 bp, Homo sapiens
tcaacatcaactacgtccctctgaaggtcaccccagctctgatctttgcca

SEQ ID NO: 790286 - DNA, 51 bp, Homo sapiens
cacctcattgtgcaagaaccaaaagacttcattagaggggtggtagactcg

SEQ ID NO: 790287 - DNA, 83 bp, Homo sapiens
tagtctggtggccatcagcaagcccaggtctatggaatctcttcctgagcgctgggactgacgggcatgtccacctgtactcc

SEQ ID NO: 790288 - DNA, 100 bp, Homo sapiens
gagcggcgagccggagcgcggagcccggctcccgcaccatggaggaggacgacagctacgggtgtccgcaatgttgccagtgtctgtctgcagattggct

SEQ ID NO: 790289 - DNA, 100 bp, Homo sapiens
tccaagcgcgaaaaccccggatggtgaggagcagattttgagaagagggggaaaaaggaagtttgtcctgtcctggatcagtttctttgtcatgtagcca

SEQ ID NO: 790290 - DNA, 75 bp, Homo sapiens
gcaccttctgccagctgatcctggaccccatcttcaaggaggaagaggtggtggacaagatggatgatgatgtct

SEQ ID NO: 790291 - DNA, 50 bp, Homo sapiens
ccggctcggcgcacagcccgcccgattgtttgaagaacctgaagatccca

SEQ ID NO: 790292 - DNA, 100 bp, Homo sapiens
aagtggtgcacaggtactaccgaccggacctgggggtgaagccagccagttttgacaaagtagcaattcctgaagtgaaggaaattattgaaggatgcat

SEQ ID NO: 790293 - DNA, 100 bp, Homo sapiens
ccagccactaactacaatcaccatcttgttggtgcttcctcatgtattgaagaattccaatcccagttcatttttcatgctacaagtgaaaactgatgag

SEQ ID NO: 790294 - DNA, 100 bp, Homo sapiens
gctgcgcgacccccgcgcatgtgcctggatcaaagtggaacagctgaagccatatcatgctcataaagaggaaatgataaaaattaacaagggtaaacga

SEQ ID NO: 790295 - DNA, 145 bp, Homo sapiens
tctgcatccctggagccctcttatgtgcttagagcaattggcactgatgaggatttagcgcactcttctatcagagaagaagaagttggatgggataccgagattaaggatgatgtgattgaagaatgtaataaacatggaggag

SEQ ID NO: 790296 - DNA, 89 bp, Homo sapiens
gttctgcccaacatccaggctgtactgctccccaagaagactgagagtcaccacaaggccaagggcgtgcagtatggtgaatatgttaa

SEQ ID NO: 790297 - DNA, 90 bp, Homo sapiens
cggaacgcaggagacacaagaagcggatccagcctcgtcacgtgttcaatatgctaaagaagtatgtccgcgcagaacagaaggacagac

SEQ ID NO: 790298 - DNA, 83 bp, Homo sapiens
aggaaaaacaggcggagagccggcgggcggtctcggcctgtcaggagatccagaaatgagccgtcagactgctacagcattac

SEQ ID NO: 790299 - DNA, 100 bp, Homo sapiens
gcaaccagagcagagaccatatagctgccctcagctgcactgtggcaaggcttttgcttccaaatacaagctgtatagagggagaaccgaagattacagg

SEQ ID NO: 790300 - DNA, 100 bp, Homo sapiens
acaaagatgcatgttttgcatgtcctttcttgtgtgatcgaaagagtcaacatgcaggaaaatatgcccaggttaccaacaatcctgaaaatgatggatg

SEQ ID NO: 790301 - DNA, 83 bp, Homo sapiens
ctgcagccagtgcggagagaggctgcctcctgcagcccccatagcaggatgctgaaatttctggaaaagacaatggaaatcag

SEQ ID NO: 790302 - DNA, 100 bp, Homo sapiens
acgtggtcaagtacgagagtggccctgacggaggggaggaagtgagtatgagcgtagagtggaacgggatttggagtccaggaatgagactaagcattta

SEQ ID NO: 790303 - DNA, 89 bp, Homo sapiens
ggagtggacattgctagcaatgagctcccaaagccatccagaccatcatcaaagaggggatgctgaccaaacagaacaattcattccag

SEQ ID NO: 790304 - DNA, 90 bp, Homo sapiens
cgagggttcccgggattggaccgacgcagccatggatcatggcggggcgctggggcccgaggagttcaaggcctgcctcatcagcctggg

SEQ ID NO: 790305 - DNA, 90 bp, Homo sapiens
aacatgcaatgaacccaaaaggacacattccttaacccagcgcagggctgtccagggtagaagaaaacgatttgatgtgttattagccga

SEQ ID NO: 790306 - DNA, 75 bp, Homo sapiens
caagctcctacttccagaaaaagtgctcctgggactccaggataccagagaatgcagcttcatgagggaagaccc

SEQ ID NO: 790307 - DNA, 75 bp, Homo sapiens
ttattcattgtgggatactgggcaggtaaaaatcaaggtgaccccaagaaaatggctcctcctccaaaggaggta

SEQ ID NO: 790308 - DNA, 96 bp, Homo sapiens
gcccggcagacggctcagggaatggagcatccgtgtcattctggaccttactcccaactaccggggtgagaactcgtggttctccactcaggttga

SEQ ID NO: 790309 - DNA, 75 bp, Homo sapiens
aaactctcagccttggattataagagtcattcaggagagcaggaaagaaaaggccatccctgtggatgtcgcgct

SEQ ID NO: 790310 - DNA, 100 bp, Homo sapiens
gactacatggagccatgctccctgggctcttccgcgggcgcccgcgcgctgcccttcgcttgagatggagaacatcattgcaacagtaagagattccaac

SEQ ID NO: 790311 - DNA, 73 bp, Homo sapiens
acaaatttaagacttcaaaacatgaaaagtgatacttttcaagagaagtggtccaaaggcaaagttcgggaca

SEQ ID NO: 790312 - DNA, 80 bp, Homo sapiens
tatggtgggaggagccgatactgagcttcttcctatttgccatgggggaaggtcatggcctccatgttctatgaagtgag

SEQ ID NO: 790313 - DNA, 83 bp, Homo sapiens
cttgccggccggcttcgctgcgggtttgcactgcccgggcatggctaatgtaaaagcagccccaaagataattgacacaggag

SEQ ID NO: 790314 - DNA, 74 bp, Homo sapiens
caaagggcagtcggcggagcttcgccaaggctggcgcagtcgacatgggaaagcggaaccaccaaaaggagtga

SEQ ID NO: 790315 - DNA, 100 bp, Homo sapiens
tagaaggtgtgttttacatacataacatgggaattgtgcaccgagatctgaagggcgactttgtgaagaatgtcccgatgaaccacggcgtgtacacgtg

SEQ ID NO: 790316 - DNA, 97 bp, Homo sapiens
agggagccgccccccgaaaccccagacatcaaccagctgccgccgtccatcctgctcaaggaggctgaaccgtctgagcccagaagtgctgaggtga

SEQ ID NO: 790317 - DNA, 99 bp, Homo sapiens
gaatattgaatgcagcatccaacgagatgaagatagctatgtaattaacggcaaaaaatggtggagcagtgcctcctgacagtgggcctccaccattgc

SEQ ID NO: 790318 - DNA, 100 bp, Homo sapiens
gcgggggctgctgcaatgacgagggcctggagtgtgtgcccactgaggagtccaacatcaccatgcagggaactctaatgatccaggacaaagaagttac

SEQ ID NO: 790319 - DNA, 99 bp, Homo sapiens
ctatgctggaagaatttaagaaagataaaccgagaaaactggtgtacaatagagccatgccctgatgcagcatctcttctggcttccaagcagagccca

SEQ ID NO: 790320 - DNA, 83 bp, Homo sapiens
cgggcggcttcctggcctgggcgctccggtggcggcggagcaggtgagaggctgggaggcctcaggtgggaacatacctttgg

SEQ ID NO: 790321 - DNA, 100 bp, Homo sapiens
gccggccatggcgttgtcgatgccgctgaatgggctgaaggaggaggacaaagagcccctcatcgagctcttcgtcaagactctggctcctcctcctcct

SEQ ID NO: 790322 - DNA, 128 bp, Homo sapiens
gaccccaaacattcttctgtagacagaagcaaactgcacattttactacagaatggcaaaaggagttccaggatctctggcctcagttgtccttggttattgatgggggacaaattggggatggccag

SEQ ID NO: 790323 - DNA, 100 bp, Homo sapiens
cccaccgcacgttcagaagtcgggttataatcaccaacagatgagtgaaggacacaggcagaaatctgaattttataaccgcacagcatctgaatcaaat

SEQ ID NO: 790324 - DNA, 100 bp, Homo sapiens
attccatttggggaccagagatggacggtcactcagcctatggaggttgtttacattcagagctctatcaataagaggaatacatattacagtgaattcg

SEQ ID NO: 790325 - DNA, 74 bp, Homo sapiens
ggaaagtggaatatttcctgaagtggaagggatttacagaggtgaaatagtggtgaaaaataacccaaatgaat

SEQ ID NO: 790326 - DNA, 101 bp, Homo sapiens
tgaggcagctgcaaggagggcggcgggactgcactcgagtgtccagacctgctcgatgatgcagcctcatttccaccttttgttgagaaaagccaggtatt

SEQ ID NO: 790327 - DNA, 75 bp, Homo sapiens
ccgcggcagaggctggacacgtggacatctgccacatgctggttcagatctacgcagaccccaccaagaggctgg

SEQ ID NO: 790328 - DNA, 51 bp, Homo sapiens
gtcggggatcggtcgcctgagagatttaaggaccatagtacagctatggat

SEQ ID NO: 790329 - DNA, 90 bp, Homo sapiens
gtcaactcctgttctcctcagagcctgaacttaaagcagcagtattacacaggatacacagagaatgaagtattggaagtcatgcagcac

SEQ ID NO: 790330 - DNA, 117 bp, Homo sapiens
ccgcggtcctcgctctcgggcggggcggcggcgacgcggacctgcggactagcgaacccggaggtcaaaatgcagatcttcgtgaaaacccttaccggcaagaccatcacccttgag

SEQ ID NO: 790331 - DNA, 100 bp, Homo sapiens
gtttcatcaacgtctaagaaacttggagaactccaggatggagtctcactctgttacccaggccggagtgcagtggcgcagtctcggctcactgcaacct

SEQ ID NO: 790332 - DNA, 75 bp, Homo sapiens
gacagccgcccctggtgcacacaccctcgtattctcctgcccttccccaggtcatcatcagatttgaaatattta

SEQ ID NO: 790333 - DNA, 90 bp, Homo sapiens
ctcggcaagcgcgcagtgtcgactccccggtctatgccaggcgcatctcagggaacaacctatcttcagcactcgagctcatgtcttcca

SEQ ID NO: 790334 - DNA, 100 bp, Homo sapiens
agacccccgagaagtacttaaaaaaacattggaattctgcttatctaggacatgaggattctcaacctgataaaaatgagctttcctaataactcaagac

SEQ ID NO: 790335 - DNA, 75 bp, Homo sapiens
gctaagatgccaggaccacctggaagcctagaaatgacggtctggaaaatcccgaagcagaagcccgtattcatc

SEQ ID NO: 790336 - DNA, 75 bp, Homo sapiens
tacaagatgatgcagggaggaggtgagggagattctgggccgctgcacctgccctgaccagtttcccatgatcaa

SEQ ID NO: 790337 - DNA, 78 bp, Homo sapiens
ggcgttggtcagaggagtcttcatgaaggtggtgaagcccaagaatgagagactacaggcattgcttggagataatga

SEQ ID NO: 790338 - DNA, 97 bp, Homo sapiens
gcgataatggatagcttatttgacaagctgttatctaagtgccgcagaatggaattcggcattgttcctacacagcttctcggcaacatctctatgt

SEQ ID NO: 790339 - DNA, 100 bp, Homo sapiens
aaaaaatagactaatggattaacgtccctgtcgtgtgacattttctggttctggcctataggaacaagacattttcagtaatggaagaaggagcttccag

SEQ ID NO: 790340 - DNA, 76 bp, Homo sapiens
cccaatggagatggctctaatgaattcgtacagatgatgactgcaaaatgaagacctactttcaactcctttttcc

SEQ ID NO: 790341 - DNA, 89 bp, Homo sapiens
agtcgtgagagataagattactgagctccgtgtccagaaacggcaagaagactatgaccggctgcggcccctgtcctaccagaacaccc

SEQ ID NO: 790342 - DNA, 96 bp, Homo sapiens
ctgtgagacatgcacttgctacgaaacagaaatttcatgttgcaccctcatgttggcagataaattgaacatgactccagaagaagctgaaaggtg

SEQ ID NO: 790343 - DNA, 100 bp, Homo sapiens
ccggccggagctgggtctggagacgccgtggcagcctgaacggagtgtgcgacggattgggaggaattgaatgatctggcacgggaccctccagcacagt

SEQ ID NO: 790344 - DNA, 74 bp, Homo sapiens
cgcagacctttctccaagaggagatccgggctcgaaatccagcatttcagccacaaactttgatggactttggc

SEQ ID NO: 790345 - DNA, 100 bp, Homo sapiens
ctttgagcccccaaagactctgcagcaagcacatgccccagctacacaggaatatgcactttctggttggaatttgaataacatgcctgtcctggaacag

SEQ ID NO: 790346 - DNA, 98 bp, Homo sapiens
tactgactccattgacagaaggttttgttttgacatagaagctgctgatcgaaatgcactcggtgatggaaagagagccactattctgaagaacactt

SEQ ID NO: 790347 - DNA, 83 bp, Homo sapiens
gttcgtcatggggctgtttggaaagacccaggagaagccgcccaaagaactgactggtcaaacaaatggattttacagaggct

SEQ ID NO: 790348 - DNA, 98 bp, Homo sapiens
catcattgacttactgctttgtgagctttaatgaagcaccagttgagattcccagtccttctgaaaccccagctaaaccttctgaacctgaaagtacc

SEQ ID NO: 790349 - DNA, 102 bp, Homo sapiens
ggtggcatggcggagaaggatgacaccggagtttgacgaagaggtggtttttgaggtactaggttttgacaagcttgcatcatgcgtgagtataagctagtc

SEQ ID NO: 790350 - DNA, 99 bp, Homo sapiens
caactgttgaactcagctgcctgtagagagacggccacagagttagctgggagtctaccaaggtgagcacgctggctttgcttattctatgcccgattt

SEQ ID NO: 790351 - DNA, 74 bp, Homo sapiens
cagctgagacggccttggccgctactacccacagatggcatgatccgaaaacactctcatgtcaagatagggcg

SEQ ID NO: 790352 - DNA, 100 bp, Homo sapiens
atgacccctgtcttttaccagaggtactccacatcagcattctcaagactggagaagttaggcctcagacatcccaagccttctcctttcattggaaact

SEQ ID NO: 790353 - DNA, 76 bp, Homo sapiens
gggcctgggagcttgctgcagcttcaggacaagatcgcagaggaaggtgggcggcgggagtgcccagccgtgtgac

SEQ ID NO: 790354 - DNA, 117 bp, Homo sapiens
agcaagcaagaattttcttcccaggaagctcctctcgctccccggccgcccacccccagcctggagatctcagggaacacagaggatatccctttggtgcgctggaggcagcagtgg

SEQ ID NO: 790355 - DNA, 95 bp, Homo sapiens
cgaatccagtagaaaactggtcaaggaagctgtactggctcctgtatcacccagctctggagttgaaagagctcttcattcctgagtctcctgta

SEQ ID NO: 790356 - DNA, 76 bp, Homo sapiens
cctgacccatgctggagcccatcttgacctctctgcattctcctcctgggagctagcatatttggcagcttattgc

SEQ ID NO: 790357 - DNA, 75 bp, Homo sapiens
tgtatgagctctcagcaagcaactttgagctgcacgttgcacaagatatgtgtcacaaagatgtctacacggaac

SEQ ID NO: 790358 - DNA, 131 bp, Homo sapiens
attcaccaaataagctatatactttggttacctatgtacctgttaccactttcaaaagtggaaccgtcccaaaatgtcccttgctcagaagaaggatcgggtagctcaaaagaaggcaagcttcctcagag

SEQ ID NO: 790359 - DNA, 100 bp, Homo sapiens
accgagggaatgatccttactaaccacgaccatcaaatccgtgtcggagtccttacaggtgtttgtaaaatgtatgaagaacatctgaaaagaatgaatc

SEQ ID NO: 790360 - DNA, 80 bp, Homo sapiens
gaaccatgacaggcatgttgtataaatgtacagtggttgaaggcctttcactgttggacttgggagtatctccgtattct

SEQ ID NO: 790361 - DNA, 100 bp, Homo sapiens
ggggatggcgtcccccgggggcccgtactgcacatcgtggtggtcggatttcaccacaagaagggctgccagctgcagaagcagaaccacagactatgac

SEQ ID NO: 790362 - DNA, 50 bp, Homo sapiens
tgttgctgatgatcagaaacttatgattggttgaaggcctttcactgttg

SEQ ID NO: 790363 - DNA, 90 bp, Homo sapiens
catgtcatcgtcaccgtgcccttaggctggtgggcttaaactggatggccggcagctcaaggttgacttggcggtgacccgtgatgaggc

SEQ ID NO: 790364 - DNA, 50 bp, Homo sapiens
gcgcgagtccacgcagctccccaggcttccaaaagccaggatcgcaaatc

SEQ ID NO: 790365 - DNA, 98 bp, Homo sapiens
gtccttctctgaatgatgaatacttttactactgtgacaacattaacgcttctctgcgctttgacggggccctcaatgtggacctgacagagttccag

SEQ ID NO: 790366 - DNA, 51 bp, Homo sapiens
gatgggaccaccagagtgctgtcctcgatgggcttcctggaatattggtgt

SEQ ID NO: 790367 - DNA, 90 bp, Homo sapiens
atgagttgcagcaagtcatacgggagggaaatgatgtcactctgaaactcaggctggaatacactggcatggtcatacctcactgcggcc

SEQ ID NO: 790368 - DNA, 80 bp, Homo sapiens
aagctggggcccgcgctgcagcgtggatgagcctcggggacactgtgccgaatgaagttttgaacgaagaatgtgatcag

SEQ ID NO: 790369 - DNA, 98 bp, Homo sapiens
acgccgacgtcgaccagcagagactggaatgagtgcagagcacaggtggaccggtttcctgctgccagatttaagaagtttgccacagaggatgaggc

SEQ ID NO: 790370 - DNA, 80 bp, Homo sapiens
aaaaggaagaggagaaggaaattgtcccgaatccctgcaggtaagaacaagagagttggaaagcagttagcctcacagaa

SEQ ID NO: 790371 - DNA, 100 bp, Homo sapiens
aaacctgtgataacctgtctcaaaaccctcctcatcatctactccttcgtcttctggaatggacagcaaattatggatgaacctatgggagaggaggaga

SEQ ID NO: 790372 - DNA, 98 bp, Homo sapiens
tgccctgcagtacctgcagaaggtctctggagacatcttcagcaggcgaggattaaatccaccacacagggtgaaatctatctccatgacaacattca

SEQ ID NO: 790373 - DNA, 100 bp, Homo sapiens
gtgattttcaaagctaattatgaaaacatttatcattggaatcagtgggacctaagaaaagctggattgctgatttttgctaataaacaagatgttaaag

SEQ ID NO: 790374 - DNA, 75 bp, Homo sapiens
ccacatttccaatttgctggaaaaaatgacatccagcgacaaggactttagtggccacagatgtctttaattcca

SEQ ID NO: 790375 - DNA, 100 bp, Homo sapiens
tgtctgaacgtgctgaacaagagcaacgaggattccctcccaggctgtccctcgccgccttgctacagcccccaagactgaaaaacctcccgcacggaag

SEQ ID NO: 790376 - DNA, 100 bp, Homo sapiens
cttctctcgcgttagtgagaaccagagtgctcagctatcctactctgtggaggcggaaggtgctctaccagcgtgcacccaggaatatccaccgccatgt

SEQ ID NO: 790377 - DNA, 51 bp, Homo sapiens
accccctagaagcctagaaatgatgcctgtcttagatgtcaagctgaaaac

SEQ ID NO: 790378 - DNA, 83 bp, Homo sapiens
cggagcagagctgagctgaagcgggacccggagcccgagcagccgccgccatggcaaacaatgcagatcttcgtgaagactct

SEQ ID NO: 790379 - DNA, 98 bp, Homo sapiens
gggaaccgggcacctgcacccgcctctgggagattgagtttgtgacgggcaccaaaaaaggcaccacgaccaacgccacgtccaccaccactaccact

SEQ ID NO: 790380 - DNA, 134 bp, Homo sapiens
gcggcgtggtcagagcgagtctcggagaagatgtggtggcttccgtttgttggtggaggaggtggcaggcctcggcgtgccggtggtggtgtgcacattgagccccggtatagacagttcccccagctgaccag

SEQ ID NO: 790381 - DNA, 83 bp, Homo sapiens
ccacgctggccggacagggccgcctgtcgccggcggcttctacgctccggcactctgagttcatcagcaaacgccctggcgtc

SEQ ID NO: 790382 - DNA, 88 bp, Homo sapiens
cggtttggaagactttgccggcctgcagagatcgagatggtgatcatggagcgtagcaagctctcagagctggccgccagcacctccg

SEQ ID NO: 790383 - DNA, 101 bp, Homo sapiens
gacggcggcctacgagcagctgaagctgtgattttacaacgagatgctgctctccatagggatgctcatgctgtcagccacacaagtctacaccatcttga

SEQ ID NO: 790384 - DNA, 100 bp, Homo sapiens
cctcccaagtagctgggactacaggatttgtacacacagatatgacgaaagacttgaaagaagaacatttaaagaaaaatattcctcttgggaggtttgg

SEQ ID NO: 790385 - DNA, 75 bp, Homo sapiens
cgagaagtccgcatcatgaagggcctaaaccaccccaacatcgccaagacaatgcaaactccagtgaacattccc

SEQ ID NO: 790386 - DNA, 75 bp, Homo sapiens
ggggacccgcgacccgtcaaacccagagcagcccgacggccatggaggctgaagagacgatggaatgccttcagg

SEQ ID NO: 790387 - DNA, 98 bp, Homo sapiens
tcggctacagcttcggcggcgaaggtcagcgccgacggcagccggcacctgacggcgtgaccgacccgagccggcagggcaagaatcctttcgttcca

SEQ ID NO: 790388 - DNA, 90 bp, Homo sapiens
gactgacaaagctgtggttaccttagatgcaagtgatgatggaatcttggccaaaatcgtgggtttagcgctggtggatagacactcgag

SEQ ID NO: 790389 - DNA, 75 bp, Homo sapiens
agcgaccgagggactgggagtcgttagtgaggtttgttgataagccggggcccttcgtgggaccctgcggtcact

SEQ ID NO: 790390 - DNA, 100 bp, Homo sapiens
cttcatcatccgggccagccagagctccccaggggacttctccatctctgtcaggtgaaagtcaatataataggagaagtggttgaccagggaagtacca

SEQ ID NO: 790391 - DNA, 75 bp, Homo sapiens
actctgaggggcttagaaattaacaggaataagaaagccttgagttttgtgaaaaaccggagaagagaaactaaa

SEQ ID NO: 790392 - DNA, 80 bp, Homo sapiens
cgggagagctcggggcgcctggttatgaagacagtatggagtttccagaccatagtagacatttgctacagtgtctgagc

SEQ ID NO: 790393 - DNA, 75 bp, Homo sapiens
acagtgatgaaatgcaggggacctgtgcctccggagccagcgtggtggccatagacaacaagatcgaacaggcca

SEQ ID NO: 790394 - DNA, 75 bp, Homo sapiens
aagatggaggcgctgattttggatctccaacttgaggaattaaggcagcaggtttctacattaaaatgtcaaaat

SEQ ID NO: 790395 - DNA, 51 bp, Homo sapiens
aagctgtgtggtgcgagtaactgtacagtcaagagtgagccatggagctac

SEQ ID NO: 790396 - DNA, 56 bp, Homo sapiens
gaatctcagagttcctcaaagttgcagagtctcccccagatatgtccttcccagca

SEQ ID NO: 790397 - DNA, 100 bp, Homo sapiens
gccgtcccggccatctcgctgcccgacgatgtccgcaggcggttcgtgctggccgtgggcagcgccgtctttgatgccatgttcaacgggggaatggcca

SEQ ID NO: 790398 - DNA, 100 bp, Homo sapiens
tgctgcaaaacgtgactccccacaataagacccagacagttactcttggaggcatcttccagttgggaaactggagtgaactaaacaatatccaggacca

SEQ ID NO: 790399 - DNA, 82 bp, Homo sapiens
cagacagcatatttgagtcatttccttcgtacccacagtgcttcatgagagctggatgctgacaaatatgagaatgatccag

SEQ ID NO: 790400 - DNA, 74 bp, Homo sapiens
tgcaatagcccttcagtactgttgtacgtttctcaactcattggatgctaaagaaatatatttggaagtaatac

SEQ ID NO: 790401 - DNA, 74 bp, Homo sapiens
ggagaactgctcagattggccatgtctatcctgcagatacctacctggtttatattctaaatgaattggctgga

SEQ ID NO: 790402 - DNA, 100 bp, Homo sapiens
acaacccgttcttgcctcaggccagtcgcctccaggccaagagggatccttcacccgtgtctgggttgtgagtcccggcccagcccctccacccccctgc

SEQ ID NO: 790403 - DNA, 100 bp, Homo sapiens
ctgtggtggttcccgcagagtggataaagaactgggagaaatcagggagaggcgaattcaatttccagtttatgtactaccaaaagtagagtatcaagct

SEQ ID NO: 790404 - DNA, 100 bp, Homo sapiens
aagcactgtgaccgaaagcagcccaagtactggccggtcatccccctgaagttctgagctcagggcacagggcatggaagttgtaaaggttggaggtccc

SEQ ID NO: 790405 - DNA, 114 bp, Homo sapiens
ctacccgggcgaagcgggcgagcggtggtttggacgccggcggagacgcgggcgagatatggccgcgtggaaagtgtcaaaattcttcccaagaggggatctgaaggaggagtg

SEQ ID NO: 790406 - DNA, 83 bp, Homo sapiens
cagaatctgaaactttctgaggagagcatttgagcttcagatttctaacaggtgctggagaatctggtaaaagcaccattgtg

SEQ ID NO: 790407 - DNA, 75 bp, Homo sapiens
ggaatctgtcttggaggacatcagaaggaagaagaggagtcggagccataataaaagcagggatagaaagcgcag

SEQ ID NO: 790408 - DNA, 75 bp, Homo sapiens
aggcagattggtatggccgaggctgagagctccttaataagcatttatagtcagtttttggcagcaatagaatca

SEQ ID NO: 790409 - DNA, 88 bp, Homo sapiens
gctgcgaagacgcggtgggccgcccctccggttggtgatttggatatcagctatattaatatagagggaatcactgccactaccagcc

SEQ ID NO: 790410 - DNA, 96 bp, Homo sapiens
ctggtgactttgaacatgctggtgccgctagccaagctgtcctgcctggggtctaaaattcccaggactccacagctttgcaccagataagcctgg

SEQ ID NO: 790411 - DNA, 75 bp, Homo sapiens
gtccggacccgcatgcaggcacaagctctgagtctcttccaaacatcccacacacttcacctgagccacctgaac

SEQ ID NO: 790412 - DNA, 98 bp, Homo sapiens
gccgattcctcctccttggtcgccgcgtccttggctggcgtcgagcagctgatgcagctgtacagtgcgcgccagcggcggcggctgaaccggggcct

SEQ ID NO: 790413 - DNA, 82 bp, Homo sapiens
atgaatccaaaatccttcatttacaggtgaaatgacaatggatgctctgttggctcgattgaaacttctgaatccagatgac

SEQ ID NO: 790414 - DNA, 100 bp, Homo sapiens
gaaaacatgaccgctgagcccatgagctcatgttttttggctagacctatgaccattttcgctagacttcactgcacgttttctcaagtatcttctttgt

SEQ ID NO: 790415 - DNA, 75 bp, Homo sapiens
tcttttcccttaataccgttgcaagtgctggtaaaaatgcatttgcaaagggagaaaatgaaggccaaacagaag

SEQ ID NO: 790416 - DNA, 100 bp, Homo sapiens
gtacgacacgtcctcgctgctccagttctgcaacgacttgtgcaccatggacaattttgctgagggagatttcactgtggcggattatgccttgttagaa

SEQ ID NO: 790417 - DNA, 96 bp, Homo sapiens
aactaaagctgatgagaactcaggacgtcaaatatatagaaatgaagagggttgcagaagctaagaacccagcaagcgtagtcgaggagccctggg

SEQ ID NO: 790418 - DNA, 51 bp, Homo sapiens
ctgttggagcctcttgttacacaggagtcagtggatcggtggggaaaatgc

SEQ ID NO: 790419 - DNA, 100 bp, Homo sapiens
tcttgccgcgtgctggtgttggaggaccctccctgcttcaggtcttgctcagtgtgcagaactctgctggcagctgagaggggaagccggaaagaggcaa

SEQ ID NO: 790420 - DNA, 100 bp, Homo sapiens
ctcacgcagcttcaggacgctgtgaattcggggcaagctctgtgtgattgattggaagacatcagagaaaccaaagccttttattcaaagtacatttgac

SEQ ID NO: 790421 - DNA, 100 bp, Homo sapiens
cggctccggggccccgataacgggccgcccccacagcaccccgggctggcgtgaggtgcagctggacctagctgagacagacctttcccagggtgtagcc

SEQ ID NO: 790422 - DNA, 75 bp, Homo sapiens
aagagattggactgggagggcaacgagcacaacaggagctacgaggagttggatgtaaccattactaacgatggt

SEQ ID NO: 790423 - DNA, 82 bp, Homo sapiens
ggaggactctggagctgacagcgcgcacttcacccgcagttggctccctggggaagggaatgcagggttgctggggctgggc

SEQ ID NO: 790424 - DNA, 98 bp, Homo sapiens
aagcggaggcggccgctgctcgagatacagacatggtcatcatttacctgtcagctggcattacatcaaaggactcttcggaagaagataaaaaagcg

SEQ ID NO: 790425 - DNA, 98 bp, Homo sapiens
cgcaccatgccgctcctaagcctgcacagccgcggcggcagcagcagtgagagagctccacgcaggagatcggtgaggagctgatcaacggagtcatc

SEQ ID NO: 790426 - DNA, 87 bp, Homo sapiens
aggccttggcagcccccatcctgtgcctcttctggctctacttcttttccttcctgcgcctggaggagaaggcagagcccccccagg

SEQ ID NO: 790427 - DNA, 90 bp, Homo sapiens
ctcctcggcgggagccctcgcgacgcgcccggcccggagcccccagcgcagcggccgcggtgccttagctggaccaattattgtggagcc

SEQ ID NO: 790428 - DNA, 75 bp, Homo sapiens
ggaatgaaggagagcagagaggagaggcttggaggtgaatcaaacatcccttctggaacaatacagagtaggaaa

SEQ ID NO: 790429 - DNA, 75 bp, Homo sapiens
agcaagatgcggaggctgcctcggcggagcagaggaaccacacgctgatcatgctgtgtcagcgtgttatgatgc

SEQ ID NO: 790430 - DNA, 82 bp, Homo sapiens
cccaccgctgccctcagctccgagtccagggcgagggggcttcgccaccttctcctcctgcttccccggcctctgcgagggc

SEQ ID NO: 790431 - DNA, 101 bp, Homo sapiens
tggagtcggacctctatgccatgaacttcaatcccatcatttccagaaaggacatcacagaagctgtctgaggatccctatggcatcttctgcctcgtcct

SEQ ID NO: 790432 - DNA, 100 bp, Homo sapiens
caccccttcctagtcatcctccctgaaacgcgaccatgctgttaaggggcgtcctcctggcgttgcaagatcacaaaatttgtccaggatagacatagag

SEQ ID NO: 790433 - DNA, 100 bp, Homo sapiens
gaccctcaaacagcagtatgatgaactggaggctgagtacgacagcctcaaacaggagctggagcagctcaaagaggcgaaaattttgaccagagtcctt

SEQ ID NO: 790434 - DNA, 99 bp, Homo sapiens
tcatctcctcccaggggctcatgcagatcggctggtgcaccatcagctgccgcttcaaccaggaggcatttgaccaagccgtgaccaaggacacctgca

SEQ ID NO: 790435 - DNA, 73 bp, Homo sapiens
cggcccacagtgggggtgtgcaaacccgagagaactggtacaagccagctgccatgttgtgagcacataccac

SEQ ID NO: 790436 - DNA, 74 bp, Homo sapiens
tctctgtctcgctcagaggagatgcaccggctcacggaaaatgtctataagcgccgtgccgtccctgcagtgac

SEQ ID NO: 790437 - DNA, 74 bp, Homo sapiens
acacttatggctgctgttccgctctgggtgaaccaggaggatgaggtggaggaggggcccagcgatgtgcagaa

SEQ ID NO: 790438 - DNA, 100 bp, Homo sapiens
tgaacatgaacacaaaagcaaacaggaagaagttggtacgggcactcttcatagttcctagacaaaggcacgtgtggttctcaaatataggcattctgat

SEQ ID NO: 790439 - DNA, 74 bp, Homo sapiens
gcagtggtcgcttcttctccttggcgtcgacattccagatggctatcctgcttcagtacaacacggaagatgcc

SEQ ID NO: 790440 - DNA, 82 bp, Homo sapiens
gtggtggacctgctggcgcaggacgccgacatcgtgtgccgctgccagctacgagttccagggagctctgtcctggtgaccg

SEQ ID NO: 790441 - DNA, 82 bp, Homo sapiens
ctcttctttgacaagagagacaactctgactttggtaatgtgaggctacaggagatgatggcaacaatgtgccaggaacgtg

SEQ ID NO: 790442 - DNA, 76 bp, Homo sapiens
ccaggtcagcaagggcacctgcgagcaagtgtccgagctgcaggaggagggaatgaacgccatcaacctgcccctc

SEQ ID NO: 790443 - DNA, 109 bp, Homo sapiens
tgtgaagcggagacggcatccagtggggggcgagcctctcagccggccgggatggctaccacggccgagctcttcgaggggaactgatcacagccgcacatgagcttgg

SEQ ID NO: 790444 - DNA, 100 bp, Homo sapiens
gaccattcagatgggatctttccggatcaatccagatggcagccagtcagtggtggaggatgaaagcgtgactcagcttggtcaggagctggcccagaaa

SEQ ID NO: 790445 - DNA, 100 bp, Homo sapiens
ccgccgcggcctcggacgactcgccttcagaaggttgctccttgagggcaggacagttcttatggctttatccgttgcgtaagcacagagaggtctgcga

SEQ ID NO: 790446 - DNA, 88 bp, Homo sapiens
aaaatgctttttctcagactcatttaaaagaacttgggttacccagaccaaactttggccatttaacggatccatttgacacaccagc

SEQ ID NO: 790447 - DNA, 100 bp, Homo sapiens
gtcgtgatccagaagtccagagctgaggactgcctgtttgcagaaattgcaggtgctgcagtgtctgaaatttccgggcctttctcaacagaggatgtag

SEQ ID NO: 790448 - DNA, 118 bp, Homo sapiens
tgaagccggcgctgctctgtggggctctggccgcgcctggcctggccgggaccatggtgagaagccctaccactgcaactgggacggctgcggctggaagtttgcgcgctcagacgag

SEQ ID NO: 790449 - DNA, 100 bp, Homo sapiens
gtcagcctcccgccggccgtctccttaacaccgaacaccgtgttgacttcaaaatcaaaactgtagagctaagaggaaagaaaattagattacagatctg

SEQ ID NO: 790450 - DNA, 100 bp, Homo sapiens
cgaacaaacctcacagccagagccagaggtttacccagggttgatgataaccgctggccttattcattggattttaaatacattgaacataactgttcac

SEQ ID NO: 790451 - DNA, 98 bp, Homo sapiens
gagaaggcggcggctctctggtccgcagcggcaacagtaacgaaaaacagggctggtgaggtggctttgaccccgggttgcccggccagcacgaccga

SEQ ID NO: 790452 - DNA, 75 bp, Homo sapiens
agaaactagagcaaataaccgttttgaaattatttgtcccatcagatgaaaagaagaaacaaggttgtcaacgag

SEQ ID NO: 790453 - DNA, 74 bp, Homo sapiens
gagtttattctgaagagcatccaggcaaagtgtttcatggatttcaaagctggaggcgccttatgtcacattct

SEQ ID NO: 790454 - DNA, 86 bp, Homo sapiens
cagcgtttcagttttggtcatcggaagtggtgccttcagcacaggaccatagctgtctgcagtgcaggaagccaactattaagggg

SEQ ID NO: 790455 - DNA, 75 bp, Homo sapiens
ctaagtaacttgggaaatacgtgtttcatgaactcagctattcagatcagccaaatggccgatgacacagtggca

SEQ ID NO: 790456 - DNA, 75 bp, Homo sapiens
ggaagatggcggatctggaggagcagttgtctgatgaagagaaggtaaaaagaacgtattctcatggtacttaca

SEQ ID NO: 790457 - DNA, 74 bp, Homo sapiens
cagtccaggcccagcctctcgaatgggcacacctgtgtaggattcactccttctccagttgcacagccacaccc

SEQ ID NO: 790458 - DNA, 74 bp, Homo sapiens
agaggttccaagaccaattccccggtctaaaattcccaggactccacagctttgcaccagataagcctggagga

SEQ ID NO: 790459 - DNA, 80 bp, Homo sapiens
aattgctgcacgaaacactgaaattttggcaggttacttgaatttccactagaggagcagaaatgccaccaatgccaagt

SEQ ID NO: 790460 - DNA, 82 bp, Homo sapiens
tgaagttgcctcttctggtgtcaaagcttttggacattcctggggtgcccaccagctgacctctcctccttctcagtcagag

SEQ ID NO: 790461 - DNA, 75 bp, Homo sapiens
atctctgctgtagtggacaaagatttccttgataacaatgtgtattcctccatcatatgctgaccttggcaaagc

SEQ ID NO: 790462 - DNA, 75 bp, Homo sapiens
gcggccagcaggaggctgatgaagacctagaggatcaagacataatgggagcatttttagacaagccaaagatgg

SEQ ID NO: 790463 - DNA, 105 bp, Homo sapiens
ttctctgatggcgagaggctgcggctgtaccaggtggctattatcatggaaaactaatttttcccagagaatttcctttcaaacctcccagtatctatatgatca

SEQ ID NO: 790464 - DNA, 96 bp, Homo sapiens
catcaccatcgggcccccgctgccctgacaccccctgagcccccatctgctgaaccctgactgagagctcagaaatatgctcagcaagtcttgcag

SEQ ID NO: 790465 - DNA, 89 bp, Homo sapiens
ctggtgccaaagtggttgcgctcgaaagtgacaaaacttttattccacatttggagtatcggttttatggagaacctgtaataaaagca

SEQ ID NO: 790466 - DNA, 75 bp, Homo sapiens
ccggtgtaaatgttgagcctttttggcctggcttgtttgcaaaggcatcaactgtgaaatctgtgttagaattga

SEQ ID NO: 790467 - DNA, 101 bp, Homo sapiens
ccaggaggcggcggcgccgccggctttggcagtcgatgatgtgaagaaaggttacatcaaagcagaagaaaagtcctatcaattacagaagctatacgaac

SEQ ID NO: 790468 - DNA, 82 bp, Homo sapiens
cccgggcgggtcccggggtgcgagcagcgcacttccggcaccatgactcctgtgaggatgcagcactccctggcaggtcaga

SEQ ID NO: 790469 - DNA, 100 bp, Homo sapiens
caaaatcagtgattctacatctcaagctcatattttgaagtgtttacggattgtgaataagtggaatacagctctcattggccttatgacatactttcgg

SEQ ID NO: 790470 - DNA, 75 bp, Homo sapiens
agttgttctaacgctgcctttgctttaaaacagtattacttgcggcaatccactgtatgacagcctaggttcttt

SEQ ID NO: 790471 - DNA, 74 bp, Homo sapiens
caaggatctgcaaattgaagtgcagcttagcctgcgacgcttatgattagagccaacaatttgaaatggcctgc

SEQ ID NO: 790472 - DNA, 100 bp, Homo sapiens
gtgatctatcaggcaccagacttgggatcagttataaactctagagtggagatctattgggaaactgattataaccactcgggcaccatcgatgcccacg

SEQ ID NO: 790473 - DNA, 100 bp, Homo sapiens
gagtcttcttaatgaggctcagggatgcctgtaccatgatgtgatgctggagaccttgacacttatatcctccctggggatccatctgtctctaagtctg

SEQ ID NO: 790474 - DNA, 90 bp, Homo sapiens
tactggacaaacatttcctccaagggatgatcagaattccagtttttcaaaggtaaagaatgttcatactgatggattccaaaaacccac

SEQ ID NO: 790475 - DNA, 71 bp, Homo sapiens
tgaatggagcaaaatggcggatcatgtgcagggcagagcggcttgggtaaatccaccttaatcaacaccct

SEQ ID NO: 790476 - DNA, 100 bp, Homo sapiens
atcttagaacatcagattcaagtaagaccattcaacgcattgaagactaagaatatgagaaacctgaatccagaaggaagaatgtggccattagccttcg

SEQ ID NO: 790477 - DNA, 75 bp, Homo sapiens
tgatctgcggggccaggtggccaagcttcatgtactggactgactggggaactcccgccaagatcaagaaagggg

SEQ ID NO: 790478 - DNA, 98 bp, Homo sapiens
gcgccgtccacgccgctcttgacaggtgcaagtgaaagtgtaggaaaacatatgcttgaagcgtgcaacaataatctggaaatggcagtcactatgtt

SEQ ID NO: 790479 - DNA, 100 bp, Homo sapiens
gtgatggaataacttcagttaagaattcctggtttaagattttacaggaatacgttgaacatcaggttgatctttgctgggaaacagctggaagatggac

SEQ ID NO: 790480 - DNA, 51 bp, Homo sapiens
cttctgcactgtttacaggcacaggccttttaaaggaccatgggctgtttg

SEQ ID NO: 790481 - DNA, 73 bp, Homo sapiens
ccgacttctgcagtacgagaacgtggatgaagactcttcggatgttttactgtgcctggctaactatagtcga

SEQ ID NO: 790482 - DNA, 75 bp, Homo sapiens
tattttcctatgtatttcttcatcagagatgtttctgtagaaaatgtttcctgactgcaatgagggaaagcggag

SEQ ID NO: 790483 - DNA, 100 bp, Homo sapiens
tgccagccgagctgcagcagcccgtctcgtgggcgccgcagcctcccggggccctacggccgcccgccaccagatcaatgagctgagcaatgttcctgtt

SEQ ID NO: 790484 - DNA, 74 bp, Homo sapiens
aatgcccttctaaatgttgtcctaaaaagaagatggctgtgccacccacgtatgccgatcttggcaaatctgcc

SEQ ID NO: 790485 - DNA, 74 bp, Homo sapiens
ttgctctgggtgctggctggaggggcagaaagcgttttgtaagcgaaggagatggaggtcgtcttaaaccagag

SEQ ID NO: 790486 - DNA, 82 bp, Homo sapiens
tatgagtacttttattgatgttgaagatgagtacaacaagttcaaatgccggatattgaatgaaaaggtgaatactccaact

SEQ ID NO: 790487 - DNA, 50 bp, Homo sapiens
atggaggagctgagcgctgatgaggcttcaacggaccacaccaaaatgcc

SEQ ID NO: 790488 - DNA, 100 bp, Homo sapiens
gggtgttcaggctcttccaacgccgactgcttcaactccgagcaggtggagtttgtccatatgctcaatgctaccatgtgcgccactacccgtaccatct

SEQ ID NO: 790489 - DNA, 102 bp, Homo sapiens
ctttcctaaccctgaagcgacttttgtcaaggaaatgatgtacagttacccagcacgtgtacctcctcctcctcctattgctcgggctgtagtgccctcgaa

SEQ ID NO: 790490 - DNA, 82 bp, Homo sapiens
gggggtgcgcgcctgcgacctgcccgcctgggtacatgtcccagagcaagcacacggaggcccgggagctcatgtactcggg

SEQ ID NO: 790491 - DNA, 100 bp, Homo sapiens
gtttccgcagcgagagcgaggaggagacccgtccaagaagcagggaccatggctggaggaagaagaagaagcctatggatggatggacttcggccgccgc

SEQ ID NO: 790492 - DNA, 80 bp, Homo sapiens
ccacagtgggcttcaacatgaggaaggtaactaaagaataatccagaatggctactctgatctatgttgataaggaaaat

SEQ ID NO: 790493 - DNA, 100 bp, Homo sapiens
ctcctgagaacatctgtcacggtgaaggttgtcatcattcccccgcatgatgactgcaccccgcggaggtatgctatacctccggagcatggaaaacgac

SEQ ID NO: 790494 - DNA, 98 bp, Homo sapiens
actattctccgggagccgtccgtgtcaccgccggaacctggcgcaggtgtccctggccagtgtccttccacctgtccacaagcatggggaacatcttc

SEQ ID NO: 790495 - DNA, 100 bp, Homo sapiens
cctggagcactcggtcatgtacccggtggactcggtgaagacgccgaagtcgcgggcgctcatggcgggcctggaggtactgttcgcatcggcagcgccg

SEQ ID NO: 790496 - DNA, 95 bp, Homo sapiens
ctcctgagtagctgggagccatcacgcccagctagccatcttctaattttcattccttcaaaggcagaagagcactgatcgtactggctcactca

SEQ ID NO: 790497 - DNA, 87 bp, Homo sapiens
gtcaaagaccagtttgcaacccatgaagctgcccaagcgccagaggtgacctatgaggcagaagagggctccttgtggacgttgcta

SEQ ID NO: 790498 - DNA, 100 bp, Homo sapiens
tcgctcccagagcagctgcggccaggttgtaggaagtgtcctgtattttactaatttttgccttgataaattggggcaaccgcttctaaatgaaaaccct

SEQ ID NO: 790499 - DNA, 90 bp, Homo sapiens
aaccacaatagcgggattgatctccttaggacctgatacttcggatctgcttgtgaagaaaaggtggacccctgcgcctcgtctccgtgc

SEQ ID NO: 790500 - DNA, 100 bp, Homo sapiens
gatggaaacaccattccagaaaatgggattgcccaccacgataatgcagttcttattactagatgcctttgagtaatggacagatgggccagcctctcag

SEQ ID NO: 790501 - DNA, 82 bp, Homo sapiens
tggggccagggaaccctggtcaccgtctcctcaggagtgtttggctgccccacaactgtggccaacgtggagacagtggcag

SEQ ID NO: 790502 - DNA, 105 bp, Homo sapiens
gaggactggaagatgtggctggggggacttatgaatgatgatgtggggaatgaaggtgaagacattcagtgaagcttgcctgatggtaaggaaaccagccctaga

SEQ ID NO: 790503 - DNA, 83 bp, Homo sapiens
caacctttggcagtcatcatcttccaaataggttaaaaggactactgactcaaactctgcctcttgagttcatggttcaccac

SEQ ID NO: 790504 - DNA, 100 bp, Homo sapiens
ccggcggacccaggcgctcgctgcttaccaagagggtcgccgcaccccaggatggatcccccagagtcctgcatgaccccttgttcactatcaaactgac

SEQ ID NO: 790505 - DNA, 74 bp, Homo sapiens
acagccaagcacccgccgccggcagcttcgctggaaggtcattcccaaaagcaagttcgtcttggtgaagttcg

SEQ ID NO: 790506 - DNA, 74 bp, Homo sapiens
ctcaagagtggaagttttcacaggatttagaaataccagcagtgcccatactccatagcatggtgcaaaaattc

SEQ ID NO: 790507 - DNA, 75 bp, Homo sapiens
gtgtactgtgtaacttttgatcgaactggcagacggatatttactaatggtagataacgcagatcatctctggaa

SEQ ID NO: 790508 - DNA, 100 bp, Homo sapiens
ccccggctcaccgctgcccttcctgctgctgagctacccgagcggcggcggcggcagcagcggcagcggcaagcaccatggtcagtaggacagaaggtaa

SEQ ID NO: 790509 - DNA, 100 bp, Homo sapiens
ccgcgcagttaggcagcagcagccgcggagcagtagccgccgtgggagggagccatgaagcattacgagccctctgcctttgaagagaaggccattgaga

SEQ ID NO: 790510 - DNA, 76 bp, Homo sapiens
gtcaaactgcttaacaaagccatcaaaaagcgaggggctggggcggaaggtcgagagggcgaggcctgtggcacgg

SEQ ID NO: 790511 - DNA, 83 bp, Homo sapiens
agaagtagttcttgcattggatgcaatccattccatgggttttattcacaggttcgatacaagaggctgttttcctagcgtgg

SEQ ID NO: 790512 - DNA, 74 bp, Homo sapiens
cccgcggccgcaccttcccgccttctcagggcgtgatggtgggcatgggtcagaaggattcctatgtgggcgac

SEQ ID NO: 790513 - DNA, 100 bp, Homo sapiens
cggccgcctagagtggttcagccacaaggagtgtttcagctgaaccatccgttcatcttcaagccatcatgagctgtaagaagcagaggtcacggaagca

SEQ ID NO: 790514 - DNA, 100 bp, Homo sapiens
gcggggccttcctggtgtcagggttaccgcttcctgcctgacacagctcacttcaagaagtgcacaatgtcagaacgtggaattaagtgggcttgtgaat

SEQ ID NO: 790515 - DNA, 80 bp, Homo sapiens
gactgctgcagagactcttcagtcgccaagcgtccgagctgggccacagcctgaacgagaacgtcctcaagcctgcgcag

SEQ ID NO: 790516 - DNA, 100 bp, Homo sapiens
aaagcctgcccagacggctcacctgtgcgggatggaacaaaagagtaaatattatcagtgtcactaacaagggactactgcactccttcgacctcctgaa

SEQ ID NO: 790517 - DNA, 90 bp, Homo sapiens
agcggacacgggaatatatccgaagcctgaagatggttccaagtattccctatctagcttcagctttagctgcagctgcctctgttcagc

SEQ ID NO: 790518 - DNA, 83 bp, Homo sapiens
caagactctcttcgctctttgcatcttaactgcaggattttttatcaagcagaaatgcatcgaacaacgagaatcaagatcac

SEQ ID NO: 790519 - DNA, 82 bp, Homo sapiens
tgagttcaagttcatgccaccaccgacttatactgaggatattgaggcaacaatgaactcggccctgaatgagctacgggaa

SEQ ID NO: 790520 - DNA, 72 bp, Homo sapiens
tttcttctgacttgagcctgcagtgtgctgtgagagatctaccactaggaaatggaccctcaggaatatgcc

SEQ ID NO: 790521 - DNA, 88 bp, Homo sapiens
cttgtttttcagcagctttgaggaaaagtatagaacctaaaggcagacccagaagagctttttacaaaactagagaaaattgggaagg

SEQ ID NO: 790522 - DNA, 97 bp, Homo sapiens
ccaagtgatttcttccaaagcacaggaatctcactctgttaaagctggtctgttctaactgaggaagcagttcaggtacttttgaagcattctgcag

SEQ ID NO: 790523 - DNA, 90 bp, Homo sapiens
tgtgctcgttgtcgccgcggtcctgctgttggaattgaatgatctggcacgggaccctccagcacagtgttcagcaggtcctgttggaga

SEQ ID NO: 790524 - DNA, 74 bp, Homo sapiens
gcctcgcacattcagttggacagttggttgaaagactggaaaagaagagctgaattggaagaaaggcagaatct

SEQ ID NO: 790525 - DNA, 101 bp, Homo sapiens
ttcgacttgccaggaaaggctctatgagagcagggtgctgcgagtatacagtatacagaagaagcgtgtggctttcaatgtttcgaagatgctgtctggaa

SEQ ID NO: 790526 - DNA, 130 bp, Homo sapiens
caacgagcagctcatcacccagtacgagcgggagaaggcgctgcgcaagcacgctgaggagggtacaggcatccttcacctgctattgttgcaagaacagtcagaattttacatacactactaactctgg

SEQ ID NO: 790527 - DNA, 100 bp, Homo sapiens
tgtcaccgctggaagaggctggtggacgaccggtggctgtggcgacatgtcgacctgacgctctacacggtacaaactcttaatgagcaggattgggaac

SEQ ID NO: 790528 - DNA, 98 bp, Homo sapiens
tttgatggccttcacaatccaagttccacaatatattgactactgccacaattccgggcgaacgctgttggagaagctgttcagccagcaggagaacg

SEQ ID NO: 790529 - DNA, 123 bp, Homo sapiens
tccaatccagacagtttcccttggccagtccctgttcttccatttccccccactgctcagagacggcgaggttgttgaagattggaaattcatagcccaggttcttgatcggatgtttctgtg

SEQ ID NO: 790530 - DNA, 74 bp, Homo sapiens
aaaacctagaaatttcctttagggaattacatgaatgacagtcttcgaaccaatgtgtttgttcgatttcaacc

SEQ ID NO: 790531 - DNA, 98 bp, Homo sapiens
tacgtgtggcctctcctcctctgcagcccctgcctgcttatccagatccccgaggaatatgaggacggggacttggttgccttttccagtgacgagga

SEQ ID NO: 790532 - DNA, 76 bp, Homo sapiens
gttgcagagcctgcggggcaagatctgatgatcagaagtgtgtggagactgtggagctgggcagctatgagaagtg

SEQ ID NO: 790533 - DNA, 80 bp, Homo sapiens
aagaacaagagaagacctcagatgtgaagtccattaaaggtggtgtttggactctagaccatgtgcctaggtagaagttt

SEQ ID NO: 790534 - DNA, 75 bp, Homo sapiens
acctgcgcggctactacaaccagagcgaggccggtggacgtattggtgaccacagctggcggcgtggaggaagac

SEQ ID NO: 790535 - DNA, 82 bp, Homo sapiens
agctaaagcagcgtgcgttcagccctggggtgtgggctaagctggtggccccggctttagactggaccccacaatgtttgca

SEQ ID NO: 790536 - DNA, 83 bp, Homo sapiens
tgtcctcggagcgcggtccctgtattggtctcctgctcctagaggtggagccccctgagctgcccgctgatctgcagcactgg

SEQ ID NO: 790537 - DNA, 99 bp, Homo sapiens
gcatgctggtgacggacagtgcagggaagcaactgcagagggagtacctgacaggcttccacaagcggaaggtcgagcgaaagaaggcagccattgagg

SEQ ID NO: 790538 - DNA, 82 bp, Homo sapiens
cgccagcggccgagcgggcggcttcctggcctgggcgctccggtggcggcggagctgcctgtggaggaaccgattgtgtcca

SEQ ID NO: 790539 - DNA, 73 bp, Homo sapiens
ttcaaaaggggggacatcctcaaggtgatttgatgaaggctgctgcaggagagttcgcagatgatccctgctc

SEQ ID NO: 790540 - DNA, 90 bp, Homo sapiens
gcggtctcggggctgctgggctgcaagcagtgcggcgggggccgcgaccaggacgaggtacaacaaataacactgtgactccaacctcac

SEQ ID NO: 790541 - DNA, 80 bp, Homo sapiens
tcctgtgtccagcgctgccggagccgcctgagaatgtgacagtgatgataacatgggtgccaaaaatacttcaataggag

SEQ ID NO: 790542 - DNA, 96 bp, Homo sapiens
cctcagtcaagtcagccaaaaacacgcgggtcatccccaagccccagagagatctgatcatagagaggtggacatatgattgaagtcaggttgaac

SEQ ID NO: 790543 - DNA, 100 bp, Homo sapiens
gctccaacaagattggacgttttgtggtgccagctgctgcccgtgctggtgccattgccccatgtgaagtcactgtgccagcccagaacactggtctcgg

SEQ ID NO: 790544 - DNA, 97 bp, Homo sapiens
ccattgtgaggtctgcaagatggcactcaacatgaacaactacaaaggctatgaaaagaagccctattgtaatgccatgaacaggctgaacactttg

SEQ ID NO: 790545 - DNA, 75 bp, Homo sapiens
agcctggtcctgcattacggtctctataagaagatgatcgttctgtacagagtaatgagatgtgtgacggctgca

SEQ ID NO: 790546 - DNA, 100 bp, Homo sapiens
gcgctattggcctttgtatggagaagaccccataacgtttgcaccatttaaaatttcttgtagctcagagttctacagagtcaccactgaacaatatcag

SEQ ID NO: 790547 - DNA, 100 bp, Homo sapiens
gagacggaggcgctgcagcgcttcttcgaagtgcagggctcgcggcctggcaagaatgtacagctgacagagaacgagatccgcggtctgtgcctgaaat

SEQ ID NO: 790548 - DNA, 88 bp, Homo sapiens
ggggtcaaaaggtgtcatcccaatgaatgccaaaactgataatgctatcaagaaccactggaattctacaatgcgtcggaaggtcgaa

SEQ ID NO: 790549 - DNA, 75 bp, Homo sapiens
gggaacctgatttgagatcaattcttggagaacacaaagaagtgtgatgaagttccagggaccaaatctcaaaac

SEQ ID NO: 790550 - DNA, 100 bp, Homo sapiens
cccaaggaggcttcaagacaaagggccccttacacaccagacagtggatgaggatcgcagtacggaacctgaccgattgcaggtgtttcacaagagagcc

SEQ ID NO: 790551 - DNA, 83 bp, Homo sapiens
cagccatagcaaactccagtggccagccctaccagccacttcgggagcagccattgtttgatgtcctgtgactgagaaaccag

SEQ ID NO: 790552 - DNA, 100 bp, Homo sapiens
ggaaaaacagtgatcgctaagaactttgccgataccttaggatacaacatagaacctattatgctctatcaggaaaggcagactacaagttactgagcac

SEQ ID NO: 790553 - DNA, 97 bp, Homo sapiens
cagccatcacctggatttacctgttttctgggagcttcgaagatgatggagcagtggtatcacctgaccttggggacatgtctcctgaagggccgca

SEQ ID NO: 790554 - DNA, 100 bp, Homo sapiens
ggcaaagtgctgacgcccacccagccgtttccctggggagatggtaaccatactctattccataaccctcatgtgaatccacttccaactggctacgaag

SEQ ID NO: 790555 - DNA, 82 bp, Homo sapiens
ctggggatcgctacggaccttaaaatacccgcaacagccccttcgtcccaagtccgcgggagagctgtggggcttggtgagt

SEQ ID NO: 790556 - DNA, 75 bp, Homo sapiens
cttgaccatctcacaactgctcgcgtgacgaccgcattcgtggcagattgaacacatatctagtctcatcaaact

SEQ ID NO: 790557 - DNA, 74 bp, Homo sapiens
cttccttgctttcagaatttcacccaggttctgacagcccgaggcctgacagacgcgggcagtgatgagccctg

SEQ ID NO: 790558 - DNA, 98 bp, Homo sapiens
cagaaaggaagttctggagaccaggaaatgacagctacacttctcacagcagggttccaggtaaaaagatggcctatcagaaggtccatgcagatcaa

SEQ ID NO: 790559 - DNA, 109 bp, Homo sapiens
gaaatggcggggactgttggtctcggccctgcggaaggtcgaacaagtaaaattacttgaccgattcagtaccagcaacaagtcattaacaggaacactgtatcttacg

SEQ ID NO: 790560 - DNA, 101 bp, Homo sapiens
ccgggatcgtgaccgagaccgtgaccgagagcgtgaccgagagcgcgaatatcgtcatcgttagaaggcctgcaggacaagctgaacaagagggacaaaga

SEQ ID NO: 790561 - DNA, 80 bp, Homo sapiens
tgcgtcagcgccagctgccggcacgaatacccgctaagctggatgaaaggttacttcttgctgcagattctgcgcaggat

SEQ ID NO: 790562 - DNA, 98 bp, Homo sapiens
aggcgtctgttgagcctttctctcagtcgtgagggaggcgtcgacggcgtgcgaccgcgctgagcacgttcttccaagaaaccaacattcccaacagc

SEQ ID NO: 790563 - DNA, 100 bp, Homo sapiens
caccctacatttagcgcatcatgtgatccggatcatatactcctatgaaaggaggaatctccaatgtatggtttgacagatttaaaataaccaatgactg

SEQ ID NO: 790564 - DNA, 88 bp, Homo sapiens
caagatttttaaagaaatgtttggagaccagaatgatgatactctggaaatctgaaatagagtactatgctatgttggctaaaactgg

SEQ ID NO: 790565 - DNA, 83 bp, Homo sapiens
gagtatctggtgaagtggaaaggatggcccccaaacatcaagatggtgctcatgtggaccagtggtgacgccttcaagacggc

SEQ ID NO: 790566 - DNA, 98 bp, Homo sapiens
gccagaccagatgggccgcccagctctctcgggactaggcaggaacctctttcaggagctataaaagaaagggaggaatcatgtccacaattgcagct

SEQ ID NO: 790567 - DNA, 100 bp, Homo sapiens
gtgtgcattgacccgaagctaaagtggattcaggagtacctggagaaagctttaaacaaggtctgcgcttcgcagccgggatgaagctggtttccgtcgc

SEQ ID NO: 790568 - DNA, 90 bp, Homo sapiens
gtaacatccacaaactgatggacgatgatgccaatggtgatgtggatgtggaagaaagtgatgagcttggacagcttttagcagctacat

SEQ ID NO: 790569 - DNA, 50 bp, Homo sapiens
gcggaacatctggaggctgggaaatgtgggagaactgaagtccaatcagt

SEQ ID NO: 790570 - DNA, 87 bp, Homo sapiens
cgagaggaggtggaccagaacttttggaactagtgccggcggctctccaccccccaggctgagctccaagtggcacaacaggagaac

SEQ ID NO: 790571 - DNA, 50 bp, Homo sapiens
cgagcggctgctgagatgagtgcagcaatggaagagttaatagttgaact

SEQ ID NO: 790572 - DNA, 83 bp, Homo sapiens
attagcccaacctgttcttgcaaacaagcagatatttgtgtgatgctacatttatgtgtgacaagcggtgtaacaagaaacgg

SEQ ID NO: 790573 - DNA, 98 bp, Homo sapiens
aagaaaacaatttctcctgctctgcagcttctgttcaggaatcctttgtgcattgaagactttagattcctctctgcggtagacgtgcacttataagt

SEQ ID NO: 790574 - DNA, 96 bp, Homo sapiens
ggagacccagctcttccaggactttgagccagtccagaccctgctgctgtcttcaaagaagagctcaggccccggggcctccagcggcaccagcgg

SEQ ID NO: 790575 - DNA, 74 bp, Homo sapiens
tgtttagcatcttctgtcatgagaagtggcgatcaaaattgattcatgttacatgtaaagctgtcctcatttgt

SEQ ID NO: 790576 - DNA, 100 bp, Homo sapiens
gggaaagcgtcttggatgattcctcctccgcctcctcctctctgcatgcgcgtcagagcccgtgccaagaacaagcagcagtcctgaactcgaggtccat

SEQ ID NO: 790577 - DNA, 99 bp, Homo sapiens
tgttatgatgcccttcgaaaaatgatcaactattgaccatatagcgcaaatccagaaaaaccctgtgcatcatcattcttatccttgtcattggagttg

SEQ ID NO: 790578 - DNA, 75 bp, Homo sapiens
atgagaaatgagcccattgaaggcaaactctcactgtataggcaacagctgatcgtcgtgtgttgccacccattc

SEQ ID NO: 790579 - DNA, 98 bp, Homo sapiens
aattgaccacaaactgcagcaagtgatcagagataatctctacttgagaaccattccatggtctctggccctgttcttgccccagcatgacttttatc

SEQ ID NO: 790580 - DNA, 102 bp, Homo sapiens
gaagccaggtgctagacagagcggcgctcagcatccagaaagtccttcggggctacagatacagtcatgttggaagcctctgcagagaacattttacagcag

SEQ ID NO: 790581 - DNA, 100 bp, Homo sapiens
cgcgaatatcgtcatcgttagaaggtcctgaatctgtgcctccttcccttcttaaagtagtgatgaaacccatagcaactgttggagaaagctaccaata

SEQ ID NO: 790582 - DNA, 98 bp, Homo sapiens
cgggccaaggttccgcgccgggcgtggacggtgtggggcggtcccggccccgcagctgtggcggggccttcgtgggcccgcgatgccaggaccccaac

SEQ ID NO: 790583 - DNA, 101 bp, Homo sapiens
ctttaggatttgcagctccaggaagcgagatgtcgaagccgccacccaaaccagtcaaaccaggtactccaaagattcaggtttactcacgtcatccagca

SEQ ID NO: 790584 - DNA, 75 bp, Homo sapiens
gcaaaagttcactaaccctgcagtggaagacaacactaagcagttgagatttgaagatgtagtaaaccagtcaag

SEQ ID NO: 790585 - DNA, 82 bp, Homo sapiens
ctgcatcaacctgatcaccagccaggagtacgccgtcaagctggtcctggctgagggtgctcactcggatgcggggtcccag

SEQ ID NO: 790586 - DNA, 75 bp, Homo sapiens
ctccgtggctgcgctgctggaacccgctggaagcccaataggggcacaaaacgtccccgggatgatgaagaggag

SEQ ID NO: 790587 - DNA, 133 bp, Homo sapiens
tgagtgtatgtgggtcaccgttgggctctacctccaggaaggtcacaaagtgcctcagttccatggcaagaacttcaaggtagaatttgctttaaattgtgagtttgttcctgttgaatttcatgaaatccgg

SEQ ID NO: 790588 - DNA, 98 bp, Homo sapiens
gcaagcgcggggaaccaaggagacgctcctggcactgcaggaacacctgattgagaatgaagtgtcaatactgcgccgagtgaaacatcccaatatca

SEQ ID NO: 790589 - DNA, 75 bp, Homo sapiens
ggataaagatctgaccattggccagatgcaagaggtcggatccgcagctgcttgcccggttctactatgccgacg

SEQ ID NO: 790590 - DNA, 100 bp, Homo sapiens
aactacaggaacctgctttctctcgatgaggataacatccctccagaagatgcacttgcacctcctgcgccgccgccccccatccaaggatatgccttca

SEQ ID NO: 790591 - DNA, 90 bp, Homo sapiens
gtagccatcaataggttgttgtctatgaccatagcccagtggcgtaaagctggctaccaggacatgcccgagtatgaaaacttcaagcac

SEQ ID NO: 790592 - DNA, 75 bp, Homo sapiens
cgctgtacgccgagcacccaggcgactgcctcatcttcaaggagcattggtttgaaaaggccctacgagacaaga

SEQ ID NO: 790593 - DNA, 82 bp, Homo sapiens
caggaacccgcgccgcgagggctccttccctcagattaactgctgaagtactgatcgagttctgcatttcttcaatgaggaa

SEQ ID NO: 790594 - DNA, 100 bp, Homo sapiens
ggcggctgctccgggtgagcagggagctcttgtccctggcaaagcgaaagcgcagtgactctgaggagaaggagccgcctgtgagtcagcctgcagcctc

SEQ ID NO: 790595 - DNA, 50 bp, Homo sapiens
ctcccgaagtgctgggattacaggatatccatcaaatattgagaagaaag

SEQ ID NO: 790596 - DNA, 83 bp, Homo sapiens
accgctgacccttggcctgctaactgaaacaaggtcctactgctctgttggctcatgaaataggttttggaagtaaagttaca

SEQ ID NO: 790597 - DNA, 100 bp, Homo sapiens
gtagaacttgttggaaacttggatcaagagggtgtgacaaataaccagatgacggctgcccgaagccccccgagattgcacatggctatgtggagcactc

SEQ ID NO: 790598 - DNA, 98 bp, Homo sapiens
gtttcccaacagtgatgtcacaagattgaccacattgatcacaagaaatcaacttttcagtaattggtcagtatgtggattatcttgtgaaagaacag

SEQ ID NO: 790599 - DNA, 74 bp, Homo sapiens
cttgctgcggaggaccgtgggcagccagggtcggtgaagctgccactgcagagccccgccatggaagacacgcc

SEQ ID NO: 790600 - DNA, 100 bp, Homo sapiens
tccaagtcaaacgcagaaggactgcctcactgagcaaccaagacaaaatctagtgaattcattttccttgaactacacaatcctgtttcacaaagagaag

SEQ ID NO: 790601 - DNA, 75 bp, Homo sapiens
agctcctggcctccccgcagctgaccccgatgaggagcgggaaggcctcctgcaccctggagaccgtgtgggaag

SEQ ID NO: 790602 - DNA, 98 bp, Homo sapiens
ttttatgttgatcccagaaatcctgttcaccttgaccagaatgaccctcgtttcattggaaactggaaatacaactggagcacgcaaagcaagccttt

SEQ ID NO: 790603 - DNA, 90 bp, Homo sapiens
cgggcccgttccgccggagctgaggaccagggctgacgcgccactatgtagcgggtttcgggcgggccacgcgtgcgggacaggaaccca

SEQ ID NO: 790604 - DNA, 74 bp, Homo sapiens
cggatgccctgcagtacctgcagaaggtctctggagacatcttcagcagatcttcgtgaagactctgactggta

SEQ ID NO: 790605 - DNA, 100 bp, Homo sapiens
ctgagagtccgccgccaacgcgcaggtgctagcggccccttcgccctgcagcaggtattaatctctggagaagacacatccacagttagcactttcttca

SEQ ID NO: 790606 - DNA, 100 bp, Homo sapiens
tcccgacctccctatcataccacactcttcagcgaccacgcaggcactttcccggtccccaggaggttgctcaaagaagtacagtctttaaaacaaccat

SEQ ID NO: 790607 - DNA, 109 bp, Homo sapiens
catctgtagagactgatttgcaacccttccgggaagccatagctctgcatggtactccaaagattcaggtttactcacgtcatccagcagagaatggaaagtcaaattt

SEQ ID NO: 790608 - DNA, 98 bp, Homo sapiens
tgcgttacaagctttgtctccttcgacttggagtctttgtccaggacgggcagctggtggaatttttgaagaaaatggaatctcgaggccccctttcg

SEQ ID NO: 790609 - DNA, 75 bp, Homo sapiens
tgccaggggtacagtgcactgaggcacagccaaaattggtcagaaaggggagtaaagtgggacacgagcttcaaa

SEQ ID NO: 790610 - DNA, 90 bp, Homo sapiens
gggaaatcagagacaatgatggggctcttccccagaactacaggggctctggccatcttcgtggttcagttccggaaggtgtcttagagg

SEQ ID NO: 790611 - DNA, 74 bp, Homo sapiens
cagagttcctccgatggccaggaaccttttagtacttccgggggcagtgcccaaaggaaatgccactaaagaat

SEQ ID NO: 790612 - DNA, 91 bp, Homo sapiens
gcgcagggcctgcagcgggagctggacggcgagcgcgagcggcgcgagaaaaattcagaaggagctggcggacatcactttagaccctcca

SEQ ID NO: 790613 - DNA, 73 bp, Homo sapiens
gggctggcctgcggcgcctgggcgctctgaggggccgctacctggtggcgctgggccacgcgtaccacccgga

SEQ ID NO: 790614 - DNA, 80 bp, Homo sapiens
cattatcacaaagctatcatcctgccaaactccaggctcagatgtcacaggccagtacagatgacggctttgtatataat

SEQ ID NO: 790615 - DNA, 101 bp, Homo sapiens
taatatatacctgcactgtctgtaggctggcaaacttccccagactctgcgaggaaacggaaaggattgttgctaaccacattcgtgagcgagaagggaag

SEQ ID NO: 790616 - DNA, 100 bp, Homo sapiens
ggtcccggttggtagagggtttgagtccgcatcgccacagctgaaggctgcgagggactaagagcagagtcaaaatgcagatcttcgtgaaaacccttac

SEQ ID NO: 790617 - DNA, 98 bp, Homo sapiens
acatgtctgggaggataattgggatgatgacaatgtagaggatgacttctctaatcagttacgtgacagaaatgttggtaaatgttctgagtatttgc

SEQ ID NO: 790618 - DNA, 74 bp, Homo sapiens
cgggactccaaatgggtcgcagtcgcagccgctctccacggaggggatgctgaaaacgccattcaacagatggg

SEQ ID NO: 790619 - DNA, 51 bp, Homo sapiens
ccacgatagtgccaggcctatgttggagaatgtggaggctgtggacccacg

SEQ ID NO: 790620 - DNA, 75 bp, Homo sapiens
gcgccttcggcaaggtttacaaggttcgttaccgtgaacgcatcaccattcttcgagggaatcatgagagcagac

SEQ ID NO: 790621 - DNA, 100 bp, Homo sapiens
ccaacggctcaagaatttcaagaacaaaggccgcgacttggagcaattctgtggtgttcttggtcacacatttatggagtttctgaagggcagtggagat

SEQ ID NO: 790622 - DNA, 100 bp, Homo sapiens
agatggaggccgtttttctggagaacctgaggcatgcagctggggttttggctcaggtgctgtatctcaccttcctgggagccccctgctacgccccagc

SEQ ID NO: 790623 - DNA, 50 bp, Homo sapiens
gggagcttcaggctcgctccgtgcggcgtgaggtcttgcactccgacctg

SEQ ID NO: 790624 - DNA, 75 bp, Homo sapiens
taatgatcacttacaaggacgaccaggccaagcttaagaaggtacaggtttgcagattccgccagcagcacagca

SEQ ID NO: 790625 - DNA, 98 bp, Homo sapiens
gcaggagacacagatgtccaccacctcaaagctggaggaagctgagcataaggttcagagcctacaaacagggtctccgtctctccaccgggggcttc

SEQ ID NO: 790626 - DNA, 90 bp, Homo sapiens
atcagctgaatcagagtttgcattgttaacaaggcctactgaacttgacgcactggtatttggccatctatacaccattcttaccacaca

SEQ ID NO: 790627 - DNA, 75 bp, Homo sapiens
actgaggcccagaagaaagcagctccagcttctactaaacaggctgttgtccctggaccggcagagcatcccctg

SEQ ID NO: 790628 - DNA, 97 bp, Homo sapiens
tgtcccccgccaactctgacctggccaattctgacgccctcaaggtcgccaaggaggtggacccccagggagtggctgagcagtttgccatcgcgga

SEQ ID NO: 790629 - DNA, 96 bp, Homo sapiens
tttacctccctggtctcaggtgtctctcacaggaattgaatgatctggcacgggaccctccagcacagtgttcagcaggtcctgttggagatgata

SEQ ID NO: 790630 - DNA, 100 bp, Homo sapiens
cgctgctgggagatgggcctactcgcccgccaccctgcgctgccgccgctctgaggagttaaagtgagttggactatggatcaggtactgtgctcagcat

SEQ ID NO: 790631 - DNA, 96 bp, Homo sapiens
accaccaaatatcggaacccctccttgaagctgatggtgaatgtgtgcggacacactctgaagaatttttaactttgaccatagagcataggaagg

SEQ ID NO: 790632 - DNA, 75 bp, Homo sapiens
tcaaagctcgacttctcaatcccaagtggccaaagagtgatcagcagctggactgtgccttggacctaatgaggc

SEQ ID NO: 790633 - DNA, 100 bp, Homo sapiens
tggaggaatttgtggctggctggatctctggtgagacatttttcttccttctgtcacatcacacccaatgcttgtgctgcattgcacctgtcctcgcggc

SEQ ID NO: 790634 - DNA, 95 bp, Homo sapiens
gagtgcgctactcaggcgctggagaaatacaacatagagaaggacattgcggctcatatcaagaaggtttaacaatgcatgcatcaattcttgca

SEQ ID NO: 790635 - DNA, 50 bp, Homo sapiens
caggccctgcagcagcagcttcaccagccaataatttctgaagatcagac

SEQ ID NO: 790636 - DNA, 99 bp, Homo sapiens
tggactcagctccctggcgggagccccttctttaaaagactctgagaatggtaaacctatgctacgccagggagatacaggagactggattggaacatt

SEQ ID NO: 790637 - DNA, 74 bp, Homo sapiens
tcggggactctgccttttaccgaagtggatgcacccccaagtgacacctactgatgactcaaacccttggtggg

SEQ ID NO: 790638 - DNA, 83 bp, Homo sapiens
cgaggggtgcacggcggccacctgagtggcgcggcggtgtcagacctgcctagagctggaacgttacctccagagcgagccct

SEQ ID NO: 790639 - DNA, 82 bp, Homo sapiens
taaaaatgacatcagtttctggaagaagaagaagagcatgatcggcatgtccaccaagggtctccatcacccaactccatgc

SEQ ID NO: 790640 - DNA, 82 bp, Homo sapiens
gcttcggaacaagagaccctgggttgcagcttcacaggattcaaagcaaatgaacttactcagctacccagacatttggatg

SEQ ID NO: 790641 - DNA, 100 bp, Homo sapiens
gacactgccaccctcaaggagttcacgttcatgggcgagggaacagatgagaaacccggcaatgaaaacagccagctaaaggtgtggatgagcaaatacg

SEQ ID NO: 790642 - DNA, 98 bp, Homo sapiens
tccgaacaatcacgacagcgtactacagaggagccatgttttcaacttgaccaacaatgtggatttggacaacaccaaaaagaaaatggagatatacc

SEQ ID NO: 790643 - DNA, 99 bp, Homo sapiens
attttgatgtggatgatgccaaagttttattaggttatgatgtgattgctcaagcccaatctgggactgggaaaacggccacatttgccatatcgattc

SEQ ID NO: 790644 - DNA, 82 bp, Homo sapiens
cgcccggcctcccgcccgccgcgctccagatgaagtgtgagcactgcacgcgcaagaacatccagtcatggataaaaatgag

SEQ ID NO: 790645 - DNA, 73 bp, Homo sapiens
acagccggcgaagaagaagcaggtcagcagacatagctctggttgctgggggcagccggaaacgctggatcat

SEQ ID NO: 790646 - DNA, 78 bp, Homo sapiens
cactctagttccaacatggttatcatgctcattgggaataagagtctgcagatctccaggggagcccaccagcctagt

SEQ ID NO: 790647 - DNA, 101 bp, Homo sapiens
gatgatttcaattattttatcagtgcttcagaacatcttcatcagccagccagtaaagtctctcagcaaacctgctgggcgacagcggactcagatgcctt

SEQ ID NO: 790648 - DNA, 96 bp, Homo sapiens
gagacaacgccttaacccaaggaagtgactcaaactgtgagaacttcagagcatgaataatctttcatttagtgagctatgttgcctcttctgctg

SEQ ID NO: 790649 - DNA, 75 bp, Homo sapiens
gcggcggagactgcgggcccgtagctgggctctgcgaggattaacctccatttcagctaatcatgggagagatta

SEQ ID NO: 790650 - DNA, 97 bp, Homo sapiens
caactccagtgctaactcaacaggagaaggaagccaacatccttttggagccatgaatattgtccgaactccatctgttgctcagattggaatttca

SEQ ID NO: 790651 - DNA, 100 bp, Homo sapiens
cgagtttgtaatgtgactagacggccagccagtcatcaaacgttcagtggtcacctcacaatgagactattttagcttccagtggtactgatcgcagact

SEQ ID NO: 790652 - DNA, 75 bp, Homo sapiens
ggcgaggcagatcctgccccgtggccgcggccgtctcgtagagctccatgaacctgcctccagacaaggcccggc

SEQ ID NO: 790653 - DNA, 98 bp, Homo sapiens
agagtcaagttcttcgtggagcctcatctcatcttacaggagcagactaggaaagcagatggtggagctgaatatgccacttaccagactaaatcaac

SEQ ID NO: 790654 - DNA, 82 bp, Homo sapiens
atctttgtcaatggaatacttattatggtttgtgtgagtggctttccacggcaacatgaaaaacactggaaagaactctgtg

SEQ ID NO: 790655 - DNA, 90 bp, Homo sapiens
gacggcgctatgtacgccctcttcctcctggccagcctcctgggcgcgggtatctggacaggaagacttctcccatcagctttaccagag

SEQ ID NO: 790656 - DNA, 100 bp, Homo sapiens
atttccaagctgtgggtttgtgacgaggatccagactgtgcagatgcatcagacgaggccaactgcggaccctctttgcaagttcagtgcttaacctgac

SEQ ID NO: 790657 - DNA, 116 bp, Homo sapiens
gcccactgttcccccaggatcactcaagaccctgtgacttgtggtcactgatgagtggaccaagtgaaggatttccagatgtgacttgcactcagaagatcagtggtcaacttcag

SEQ ID NO: 790658 - DNA, 75 bp, Homo sapiens
agataggcggccatggtccaaccttgaagaaactggcagacctttcacttcgtatccaacaaattgaaacaactc

SEQ ID NO: 790659 - DNA, 141 bp, Homo sapiens
cctcttcctcttcaagctcatctacaacgagtactgtgggcctggagccaagcccctcttcaggagtaaggagcagcgcaaccatttgcagggcaaactgtcggagctgcaggtggagcagacatccctggagcccctcca

SEQ ID NO: 790660 - DNA, 74 bp, Homo sapiens
agacatttcctgctcggaaccttgtttactaatttgctttggagaagaggttgttcacaacaggtatccagcaa

SEQ ID NO: 790661 - DNA, 96 bp, Homo sapiens
ctggcatcaccaagatgacactccacgccacccggggggctgcactcctctcttgggtgatgaaacaggaagactgaagcccaggcctggccggcc

SEQ ID NO: 790662 - DNA, 75 bp, Homo sapiens
ctctgtctattcctgcatggcccagaggacagatgcagtgagacggtttaagcggaagcatcttactgccattga

SEQ ID NO: 790663 - DNA, 51 bp, Homo sapiens
accttgaacaaggcaaatatggttttggtgtggatgaggtcaccattgtca

SEQ ID NO: 790664 - DNA, 85 bp, Homo sapiens
atttacccttcctaacctctccaaaaaaggtgttggaggtacttctgaaaatgatgacccttccaaaatggttatggttctggca

SEQ ID NO: 790665 - DNA, 75 bp, Homo sapiens
gtaatgctgtttctgcttaagttggcaagacactccaagtttggcatgaaagatgccatggacaatattaccagg

SEQ ID NO: 790666 - DNA, 75 bp, Homo sapiens
tacatcaagtgatgaaaaacacccacctgaaaatatcattgatggatgaggaaactgaggccgcgaggagcgcgc

SEQ ID NO: 790667 - DNA, 100 bp, Homo sapiens
ctgggccgcagcgggaccccagttcctccgccaagcgcggccgccgcccccgcctcagattgctggactcgctgaagagagactacgcaggaaagcccca

SEQ ID NO: 790668 - DNA, 90 bp, Homo sapiens
gtgagcgcctcgcctggatgtgagtttcagccagaccctatcagatttggatatgtccttcatatttgattggatttacagtggtttcag

SEQ ID NO: 790669 - DNA, 99 bp, Homo sapiens
cttttactggcaaatagtacttcaagagcacagtcttatgtaagtggctgcctccgggtgatgatggctgtgtgaacgactgccatggcccaccggaag

SEQ ID NO: 790670 - DNA, 90 bp, Homo sapiens
cccgctggttcactagagaacaggctgcccaagcgccagaggtgacctatgaggcagaagagggctccttgtggacgttgctactcacta

SEQ ID NO: 790671 - DNA, 83 bp, Homo sapiens
cacactcttggggctctacctctttttcaaattgctctaggtcgtaaccagcctttgaaaaaggagaaaccaaaatggaaaag

SEQ ID NO: 790672 - DNA, 91 bp, Homo sapiens
aaatgtgaccttagatagcgttaatgaaactggatctacggccctttccatagccagagcagtacaagaatggaatttcgctcttgtcgcc

SEQ ID NO: 790673 - DNA, 75 bp, Homo sapiens
acttccagctggagagcgtcaacaagctgtaccaggacgaaaagtgtaaactggagttgctggtgggcagccctg

SEQ ID NO: 790674 - DNA, 90 bp, Homo sapiens
gcgaccgtgaggacaggcttttgctctgcgacggctgcgatgcgggaggtattgtggccagtattttggttttcttatgttttggagtca

SEQ ID NO: 790675 - DNA, 75 bp, Homo sapiens
ggcacgggctgtgcagtgttaaacgacaatgcagatcttcgtgaagactctgactggtaagaccatcaccctcga

SEQ ID NO: 790676 - DNA, 100 bp, Homo sapiens
gaaaggaccctgagaagccagaggccagcatggaagtgaaggggcagaagctgatcatcaccaggggctttgacattgggaaccatttttgtgagtgggt

SEQ ID NO: 790677 - DNA, 99 bp, Homo sapiens
gggatatgaaaagtcttggattgaaacagaagaacattactttgaagataaactgatagaagatttagcagcagctgaaaaagttggatgaagatagtt

SEQ ID NO: 790678 - DNA, 100 bp, Homo sapiens
gagaaagccgttgcctccagcaccacttctaatggtcctagaccagaaggagcacaggctggatggccgtgtcattgaccctaaaaaggccatggctatg

SEQ ID NO: 790679 - DNA, 100 bp, Homo sapiens
tggagcttggtttcgggatctcggtgctgcagacggcgagacctcctgcacaggttatgtacaaagaaaacttgggaacaggcattccaaccactgtgac

SEQ ID NO: 790680 - DNA, 82 bp, Homo sapiens
gtctcctgtgtggcgatggtcttcctgctggggctcatgtttgagccttcatcccgcgtggagtctacccccaagcccttct

SEQ ID NO: 790681 - DNA, 95 bp, Homo sapiens
ctggaagacatggccactccagtcggtgttgagcacggcgagcagtctcaggcctttagtgatgatggccatttcataattctgaatcatgtctg

SEQ ID NO: 790682 - DNA, 102 bp, Homo sapiens
ctaagactccaggacacccctgaagccgagaaatgccagagactgctgctactttgaaacgtacgatagaggccctgatggacagaggagcaatagtgaggg

SEQ ID NO: 790683 - DNA, 101 bp, Homo sapiens
tacttcgttccccgccaaccgcaaccattgacgccatgtcgggttattcgagtgaccgagaccgcggccgggaccgaggtctcttgcatggcaccaagaat

SEQ ID NO: 790684 - DNA, 100 bp, Homo sapiens
actcaagtcctggctcagcaagactctcgagcccattgatgctccagtgagtgaactgtccctcgagctgcttctgcttcaggttgtcttgccagcatta

SEQ ID NO: 790685 - DNA, 97 bp, Homo sapiens
ccacagagaattaagtaactggtcgaggttgtatcagtaagaagggagcacggaacagattcaagctcaggatttgttaaggattccaagtaactct

SEQ ID NO: 790686 - DNA, 90 bp, Homo sapiens
gggagatccacagctaagacgccgggactccctggaaacctagaaatggtgaatgaaaactttgccattgatttgatagcagagcagccc

SEQ ID NO: 790687 - DNA, 51 bp, Homo sapiens
ccaaggagacgctcctggcactgcagatcgggcccgggacacccagacaga

SEQ ID NO: 790688 - DNA, 51 bp, Homo sapiens
ttaaaaaggaagctattcaccattgagagggctctgaactcctacttcgag

SEQ ID NO: 790689 - DNA, 83 bp, Homo sapiens
cgcggattcgccgaggcaccgaggcactcagaggagtttccctgaaacctgggctcttgaagacgcatcactggagcagatgg

SEQ ID NO: 790690 - DNA, 76 bp, Homo sapiens
cgccagaaggaagatggcggatctggaggagcagttgtctgatgaagagaagttccagtgtctcgccccatcctca

SEQ ID NO: 790691 - DNA, 100 bp, Homo sapiens
gggagaagagccatgggtcctcgacctgcagggagcagaggggacagaggcaccaaggacctccaagacaggtgtggtggctggaggtggccgaattgac

SEQ ID NO: 790692 - DNA, 51 bp, Homo sapiens
gcgcatccccgcggacgccacagcgctccttcgttcagaaaaacctggtct

SEQ ID NO: 790693 - DNA, 75 bp, Homo sapiens
tcgtcgtcggggtcctgctgcagtgcaccgtccaggtgaggttagagctggggcatcgcgcccaactgcgcaaga

SEQ ID NO: 790694 - DNA, 97 bp, Homo sapiens
tgggattgaattttcctaggactccgtttcaaggttaattcgaaagtcttgtggaagatctggaagaaacaggcgatcttcactctcctcctcggac

SEQ ID NO: 790695 - DNA, 82 bp, Homo sapiens
tgcggatgattgatgggaagccggaatacaagaacgggctggtcaaaatgcagatcttcgtgaaaacccttaccggcaagac

SEQ ID NO: 790696 - DNA, 100 bp, Homo sapiens
cagctcaagagccggggcctttttgacagcttccgccgggactgcctggccgacgtggacaccaaggtgcacttacagagtgctacgatgaactggggaa

SEQ ID NO: 790697 - DNA, 102 bp, Homo sapiens
caaggaaaaactggagagcttcatcaaaaatagtgatagctttgataagagccctctggcacaaatggaagaagaaagaagggagcaagtagctaaaattaa

SEQ ID NO: 790698 - DNA, 75 bp, Homo sapiens
atggagaacatgccgtggtacatggcaaggtgcttattgccaacaacgggattgccgccgtgaagtgcatgcgct

SEQ ID NO: 790699 - DNA, 92 bp, Homo sapiens
ggagctgggcgcggattcgccgaggcaccgaggcactcagaggagggtttccaggcctgaggtgcccgccctggccccaggagaatgaacca

SEQ ID NO: 790700 - DNA, 75 bp, Homo sapiens
ttcggtctcctggggtcggcgccgagtgggaggatggcggaagaagctcttcgtgggcggtcttgactggagcac

SEQ ID NO: 790701 - DNA, 100 bp, Homo sapiens
gagaaccgcttcattggaatgaagtcccgagctgcatcaacagagagtggccgcagcagcaggtgacccattaactgaggaactggctgccactgaacac

SEQ ID NO: 790702 - DNA, 100 bp, Homo sapiens
agttccagggctacaatgttctgctcagtctcaacaagggagacatcctaaggaccttgaccctgctgttcacagccagggggaccctcagagcagctgg

SEQ ID NO: 790703 - DNA, 134 bp, Homo sapiens
ggaagaacttttggacgtaactgatcaattgaatatggacccaagagtcagcggtatattagttcagttaccactaccagctggtaagcgggcccctcagtgctaccccagttccgtcaactctgccaggactg

SEQ ID NO: 790704 - DNA, 82 bp, Homo sapiens
ctggggccagggaaccctggtcaccgtctcctcagcctcctgcccgaaggccacctgaacctaacggctccctgcaacgctg

SEQ ID NO: 790705 - DNA, 83 bp, Homo sapiens
cttgagatttgaggccttggagactcagagaatggatcttggagaatgtctgaaagtccatgacctggctttaagagcggatt

SEQ ID NO: 790706 - DNA, 75 bp, Homo sapiens
cgcccagccaggagcaccgccgaggactccagcacaccgagggtactgtctgatgagcgtgaaaggttgtttcac

SEQ ID NO: 790707 - DNA, 100 bp, Homo sapiens
gctgatagacatgggggcctcaaacgtggagatcaactcctctctgttaatggagtggcgggcacatgaacgccccccaccccatccacataggatgcac

SEQ ID NO: 790708 - DNA, 111 bp, Homo sapiens
aggatgtccaagcggcaccggttggacctaggggaggattacccctctggcaagaagcgtgcggggaccgatggaacccttaggagaaatcttgagagtggacagcaattg

SEQ ID NO: 790709 - DNA, 114 bp, Homo sapiens
atgaaaatgaacagctaaagcaggaaaataaaactcttttgaaagttgtgggtcagctgaccagagggctacttctccaggagaacagcaggtttgcagaagcactacattatt

SEQ ID NO: 790710 - DNA, 89 bp, Homo sapiens
agaaagcacaaagcatggagaccctccctccagctttcagcttatgtggagaagtcgctgtgaagccacctataaatccatttactgaa

SEQ ID NO: 790711 - DNA, 98 bp, Homo sapiens
tgatgaaagagccacagagttggcagaactgtttgaaaatgctaccattcctcaagaattttgtatccaaggcccaaaagtttgttacccaagatgat

SEQ ID NO: 790712 - DNA, 100 bp, Homo sapiens
catgaaatatggaaacgactcctcggccgagctgagtgaggaggagagcattcccattgctttatctggtagggatatcttagctagagcaaaaaatgga

SEQ ID NO: 790713 - DNA, 75 bp, Homo sapiens
ctgcctggagacgacagcggtgtcaccaagccagggagggtatttgaagtataccatacaactgttttgaaaatc

SEQ ID NO: 790714 - DNA, 100 bp, Homo sapiens
taccaattcttgaatgacatccgagcgaaagagaaagagacactggaagaagagtttgccaggaaactacaggaacaggaagtattctttaaaatgactg

SEQ ID NO: 790715 - DNA, 96 bp, Homo sapiens
cgtcatcaagctctacatcatctacaacatgctggagtcaggtgacacacagtcttttgcacagaagctccagctccgggtgccctccgtggagtc

SEQ ID NO: 790716 - DNA, 82 bp, Homo sapiens
cccaaagcagcagcttcagccccgaacaagagtgagccatggagctacgtgtggggaacaagtaccgcctgggacggaagat

SEQ ID NO: 790717 - DNA, 82 bp, Homo sapiens
acatggacctgtacagcatcaactacctgcactttggggagcctaagtcctgggatgtttcagcagcccctgagaaggaaga

SEQ ID NO: 790718 - DNA, 82 bp, Homo sapiens
gagcgtgtggcatctccacctcaaggatccaaacgatcaaagatgttgctggagataaataggcagaaggaagaagaggacc

SEQ ID NO: 790719 - DNA, 83 bp, Homo sapiens
cctggcagactctgctccatgagaggtgcccattctgcatttattccaccaaccgccccgctgccatggagtgccacctcaag

SEQ ID NO: 790720 - DNA, 50 bp, Homo sapiens
tcgggaggctgacctagtgatatttcaggattcagtggtcccaatttaaa

SEQ ID NO: 790721 - DNA, 75 bp, Homo sapiens
tggagcaattgaagctgactactaaggagaataaggtggtcattgggactcccacacttaaacaaagaaaggaaa

SEQ ID NO: 790722 - DNA, 83 bp, Homo sapiens
cctgagtagctggaaccatcatatgcaccagcacgcctggctaagtggttgaggagtgggcccagggcaccttcaaactcaac

SEQ ID NO: 790723 - DNA, 99 bp, Homo sapiens
ttgccacttcttcacggaccagtttcagttcgccgatgggaaacccggagaccaaatccttgggtgtaccccagttgtcagtctgcttgtcagaagaac

SEQ ID NO: 790724 - DNA, 109 bp, Homo sapiens
aggagcagctgaaccgttatgaaatgtatcgccgctcagctttccctaaggcagccatcaaaagggagcaagatcttgtgcaaaccctgagttgtttgtctatgataat

SEQ ID NO: 790725 - DNA, 98 bp, Homo sapiens
catctgtctgtcactgaagcagagatgctcagggacccagagggaggccagcaggttgaaggggcccggccaggactcggggaagggtggcctgagag

SEQ ID NO: 790726 - DNA, 96 bp, Homo sapiens
accaaccaaattgtcgccattaagaaagcttgtgagaaggttggcatgcagatccctcgattctgttatcatgaaaggttgtctgttgctggaaac

SEQ ID NO: 790727 - DNA, 100 bp, Homo sapiens
gagaagcggaacctcaaattgcggcagcggaacctaaagtttcaggtagtggccacagaagaagtagttactgcagaatctgtggatggtgccattcagc

SEQ ID NO: 790728 - DNA, 75 bp, Homo sapiens
ggagggcacgatcgctcggtggtgcagtggaaaatcaccttaagggagaagaaatgggtgaccgttggtgacaca

SEQ ID NO: 790729 - DNA, 75 bp, Homo sapiens
agccctttgtgactgcaatctcgagaaactatgttccaacttcctgtcaacaatcttggcagtttaagaaaagcc

SEQ ID NO: 790730 - DNA, 90 bp, Homo sapiens
agacacaccaggccggcaggctgagaaaagcgagaccgcgtgcgaggaccggatcaccattaacaaggacaccaaggtacccaatgcctg

SEQ ID NO: 790731 - DNA, 90 bp, Homo sapiens
ataaggaagtgctactggaaaacctcaggaacctagaatttctggacaacccatttgttgagattaaaacaccaaaaaaatcgtcactga

SEQ ID NO: 790732 - DNA, 100 bp, Homo sapiens
gtcagcagaggggccactgctgggccctgaggctgcaccaagtggcgaaggagccggctccaaggtgctcacccatgacagtctctgaatccaggccgtt

SEQ ID NO: 790733 - DNA, 98 bp, Homo sapiens
gtctcagtcaaggcactcagctcaaatacacacacctgttgccattatagagctggaattaggcaaatatggacagtacaaaattggacagctgtaca

SEQ ID NO: 790734 - DNA, 77 bp, Homo sapiens
ccccgaagctaagagcccccttcagtcgcagcctcactctagagagtttgaggagacaatggatgcactccaggctg

SEQ ID NO: 790735 - DNA, 99 bp, Homo sapiens
cgtggcggcggggaccgtccagcccagcgattctcagtcaggcgggcgctaatattgacacctgctcagaagaccagaggaccccgttgatggaagcag

SEQ ID NO: 790736 - DNA, 100 bp, Homo sapiens
gaagaccacacactgggaaacatcattaaatcaataactgaagtgaagtgatggactccgatttggagagtagtaagacgtgaaaggaatacacttgtgt

SEQ ID NO: 790737 - DNA, 75 bp, Homo sapiens
gagatcaactcagtgaaccagccaaggtctggtccatcgaactcatatgtcatcctgtcgggtggataagccctc

SEQ ID NO: 790738 - DNA, 100 bp, Homo sapiens
ccaattgccactggacatacttgaaacaaaataggaaaatggcagcaaactcttcaggacaaggaatggaagttggatacactttgtgacttgtacgaga

SEQ ID NO: 790739 - DNA, 75 bp, Homo sapiens
ggacttccctttggatgtagcaaggaagaaattgttcagttcttctcagcttcttggacacttaatgattgttgg

SEQ ID NO: 790740 - DNA, 101 bp, Homo sapiens
aaatggccgctgtgtggttgcaacggagataaattcccggaaccgcgattcggcgtgtcaggcatttggctttatgtcccgagttgccctacaagcagaga

SEQ ID NO: 790741 - DNA, 90 bp, Homo sapiens
cattcaactagccaaggaaaaaaagcagagaggagcggggagcaatgcagctgtgttggggtggaagaggaggaggcgcccgacatcgac

SEQ ID NO: 790742 - DNA, 75 bp, Homo sapiens
ctggaattactctcaataaaccaggaacagcaactggaactgtgccgacttccgtgttgtcttactctgattaca

SEQ ID NO: 790743 - DNA, 87 bp, Homo sapiens
gctgcgctcaatgacagggaccaggggggcggcagcgctggacacccagcctccagtgatgatgatgatgattttgatgatgaggaa

SEQ ID NO: 790744 - DNA, 75 bp, Homo sapiens
agttggaagcagccgatccagcctgcggagcctgtggggcagtttctccttggaccaagatgactgatggaaaac

SEQ ID NO: 790745 - DNA, 51 bp, Homo sapiens
atttcacaaaagtgaagagagggaaacctgtccagtttaagtcgtcttggt

SEQ ID NO: 790746 - DNA, 100 bp, Homo sapiens
aaaacgagccagtgatttacaatagagcaaggttggtcaaagaaaaagtgatgtatgaaaaagaggcaaaacaacaagaagaaaagattgaaaaaatgag

SEQ ID NO: 790747 - DNA, 73 bp, Homo sapiens
ggaagaccacggcgtagcagaagccattccgacaatgatagcatatatagcagtgacgaggatgatgaggact

SEQ ID NO: 790748 - DNA, 74 bp, Homo sapiens
gtgtactgccccgttacttatttttacaatctgaagatgatgagaaactgaaaaagaggaaggagcgatttggg

SEQ ID NO: 790749 - DNA, 50 bp, Homo sapiens
gacgacatggcctccgctatgaaggcgacacgatgaggcgagtggtacga

SEQ ID NO: 790750 - DNA, 83 bp, Homo sapiens
gggaggcccggcgagagaaggacccgattattcagagctgggagagcttcccccacgatctcctttagaaccagtttgtgaag

SEQ ID NO: 790751 - DNA, 89 bp, Homo sapiens
tgcctccctgcgtggtggactgtggcaccgggttcctcaagccaggacctacgcacctgttgtgagtggtgttatagttctgcagggcg

SEQ ID NO: 790752 - DNA, 100 bp, Homo sapiens
ttctgccttattacgccgtctccaagatgtagctaatgaccgtggttcccactgagggagctgagcacataacgacttacacgttcaatactcacaaagc

SEQ ID NO: 790753 - DNA, 80 bp, Homo sapiens
acgcagagccaaagctggaacgtagagacgtcaaaatgcagatcttcgtgaaaacccttaccggcaagaccatcaccctt

SEQ ID NO: 790754 - DNA, 75 bp, Homo sapiens
gatctagaggcataattaggataataaatcctataacaatgcagtgtataaagagccagacataggcatgcctga

SEQ ID NO: 790755 - DNA, 75 bp, Homo sapiens
ggaagaaaagctttggatgaaggagcttcaaacccaaagaggtgtgctgatgtatcgggactaccccctggaact

SEQ ID NO: 790756 - DNA, 74 bp, Homo sapiens
agcccaccccggcggaccgggccccgcgcgcccaggcgagccgaggcctgcctggagccccagatcaccccttc

SEQ ID NO: 790757 - DNA, 89 bp, Homo sapiens
ccttgccgctgctgtcctgcgaccccaagcagttagagatgtttatgattacttccgagctgtcctgcagcgtgatgaaagaagtgaac

SEQ ID NO: 790758 - DNA, 75 bp, Homo sapiens
ctcgagagacctgcgtacattcggggtgccagaaggaaagcataggagaatgtactactcatcacctcccacctg

SEQ ID NO: 790759 - DNA, 75 bp, Homo sapiens
ggagcgggtccttcggagatatctacctggggagctcgaggagcagcacggcatccactgcaacatgacgttact

SEQ ID NO: 790760 - DNA, 90 bp, Homo sapiens
tggaaattgaacaagcgtcacttgacaagcctatagaatcggactcctcatctgtttttaagagggaaatctgagttttcaaggaaagcc

SEQ ID NO: 790761 - DNA, 75 bp, Homo sapiens
cgccacagcgacgccggcgccgagggacaccgcagtatgaggcagaggagcatcagatccatgctgctgctgact

SEQ ID NO: 790762 - DNA, 74 bp, Homo sapiens
atcttcccaccaccttaaaccactggataatggccttcagctccatccatgttgctgcaaaagacaggatttca

SEQ ID NO: 790763 - DNA, 100 bp, Homo sapiens
atagttcagatgacagtgattttaaagttggagatgcctcagcgttacatccttactattcaaagtgccatccacagacctgctgatgggcagcatgagc

SEQ ID NO: 790764 - DNA, 100 bp, Homo sapiens
gatggctttgcccatgccaaccaaaaggcgatccacatttgttcagtctcctgcagatgcctgcacacctcctgggtgtcaaattgagaaccaggtagat

SEQ ID NO: 790765 - DNA, 83 bp, Homo sapiens
cccacacctccggaccgagggacgcggaagtccattggaatattaagcccaggagttgctttggggatggctggaagtgcaat

SEQ ID NO: 790766 - DNA, 100 bp, Homo sapiens
aacctttccaacacagatgtccaagctgccaagaacgtgttgtgggctttcacgtactgggtccaaatgctggagaagttacacaaggctttgcagctgc

SEQ ID NO: 790767 - DNA, 143 bp, Homo sapiens
gtcgacgtcggtgcttccagtgccaaaccaaactggagctggtgcagcaggaattgggatcgtgtcgctgcggagtacaagcgcaagctagccagagtttccctggtgcgcaaagaactcaggtcccggatccagagcctgcc

SEQ ID NO: 790768 - DNA, 50 bp, Homo sapiens
gccgaggccgggaggccgtgcccggagtttgcagaaaatgattgccagag

SEQ ID NO: 790769 - DNA, 75 bp, Homo sapiens
gcgctggtcaccggggtctgcctgggctccaaacaggcatgcgaggtgcctttggaaagccccagggcactgtgg

SEQ ID NO: 790770 - DNA, 75 bp, Homo sapiens
aacttgttggaaatggaacatacgggcaagtttataagaattactgatttagggaacatcaaaagaagattatat

SEQ ID NO: 790771 - DNA, 88 bp, Homo sapiens
tgacagtcgtagatacaaatttttggatgatgatggatccatttctcctattgaggagtcaacaaatgcactcggtgatggaaagaga

SEQ ID NO: 790772 - DNA, 50 bp, Homo sapiens
cattgcatttacctcggatcatgtaaattcctcatctatgcctgtctgct

SEQ ID NO: 790773 - DNA, 83 bp, Homo sapiens
cttgttgccgtcccttcgcctccttcaccgccgcagaccccttcaagttctagtcatggctggtcgtctgatgataaggaaat

SEQ ID NO: 790774 - DNA, 74 bp, Homo sapiens
gttcctatggacagacgcacagacacctgcagctgccactgcagagccccgccatggaagacacgccgttggtg

SEQ ID NO: 790775 - DNA, 82 bp, Homo sapiens
tccacccaccgccgccgcctcccaggaggccactgtctgcagctcccgtgaagatgtccactccagacccacccctgggcgg

SEQ ID NO: 790776 - DNA, 51 bp, Homo sapiens
ttctggggagaagcagcgcatcagccgagggtggttctcttcccaaagtgg

SEQ ID NO: 790777 - DNA, 100 bp, Homo sapiens
cttgctgatctgagctcagacctgccaatttaccagagataattgataacaccctgtaacagctgatctcaggaggaggtctgcgatttgctccatgccg

SEQ ID NO: 790778 - DNA, 76 bp, Homo sapiens
tatgaatgagatagtccagagcaacctctttaaaaagcaagtatacgctcaacggcaagaaagtggaagttgccgt

SEQ ID NO: 790779 - DNA, 106 bp, Homo sapiens
gattctttactcagctgagtgtgccacacaggtagccctggacggcattcagtgttttggtggacccaagtggagagattgtggaactggcgaaaggtgcatgtcc

SEQ ID NO: 790780 - DNA, 75 bp, Homo sapiens
ccgaggtgaacctccggagccttggcacagctcgcttctaaagatgtaccaaagcttcagcctcatccgggattg

SEQ ID NO: 790781 - DNA, 51 bp, Homo sapiens
aagggagcattccaggagagaaaggacggcggacccagccgagaagacgcc

SEQ ID NO: 790782 - DNA, 75 bp, Homo sapiens
cggctgaagaaagaaggtgggagcggagagcgcaggcgtggagattgaccccagcctgggcgtggcggagctgcc

SEQ ID NO: 790783 - DNA, 78 bp, Homo sapiens
atatgagaaagctaggccatctgaataactttactaaggaaaggcagcaacaggtggaagctgttgagttggaggcta

SEQ ID NO: 790784 - DNA, 107 bp, Homo sapiens
cggacccaatgtggccaccaccactgtcagtgacgatgtctctatgacgttcatcaccagcaaagaggaacccaagacagaccaggatgaggagcattgccggaaag

SEQ ID NO: 790785 - DNA, 74 bp, Homo sapiens
tttcttatcactaaaacagcaatttagctttggagtcaaacccttctgaccatccaagggcaagcacaattttc

SEQ ID NO: 790786 - DNA, 90 bp, Homo sapiens
tggagaactacaggaacctggagtctgtgggtatggcgatttagtactgcattttgttctgttaatgaatggaaatttgctgacatccta

SEQ ID NO: 790787 - DNA, 95 bp, Homo sapiens
gcccaaatggagccgctgctgcctacgacctgtcatttactccatcctttatagtgatgctacaggacgaagaggaatggataaaaacattggcg

SEQ ID NO: 790788 - DNA, 100 bp, Homo sapiens
atgcagtcccccaggatacagggtcaaaggagagcacaaccatcgcagttggaagcccatggggcagtgtgaagcctcagtttaggtcatctggtggttc

SEQ ID NO: 790789 - DNA, 80 bp, Homo sapiens
cttttgatatctggggccaagggacaatggtcaccgtctcttcagatgtgaagttcatttccaatccgccctccatggtg

SEQ ID NO: 790790 - DNA, 96 bp, Homo sapiens
ctctcctgatactaacagttttacgatttaaaacttcgccagaatttatatctacgtctgcatgatctcctttgcgcacaatgtagcagcacaagg

SEQ ID NO: 790791 - DNA, 75 bp, Homo sapiens
gaaattcattatatgagagattcaggacctgatcccaaccttgaagaaagtcctaaaagaaaaaatattacatat

SEQ ID NO: 790792 - DNA, 134 bp, Homo sapiens
tagagaagagtggctgagggcgcgccctgatctcagcgggaagagtgcgaccccgagggcgcgctaggagcttactccacgggaacagcctctagataatctgagttgttgaaaatacgaagcctgttactcgt

SEQ ID NO: 790793 - DNA, 78 bp, Homo sapiens
aagactccacctcctggtgaagaaagcaaacaggacagagcagaatgggctgatatagatccggtgccgcagaatgat

SEQ ID NO: 790794 - DNA, 82 bp, Homo sapiens
ttcagcctctacaagaagctgctgactcttttcagagctggccacgaccaggctggtaggtgagtgctgtcctcggctcact

SEQ ID NO: 790795 - DNA, 101 bp, Homo sapiens
accggcttatggagcatggcatcatccagcatgttcattcggctcctaaagaagtagcagtgtccaaggaacaagaagagaaatctgatagcctagttaaa

SEQ ID NO: 790796 - DNA, 98 bp, Homo sapiens
tgtctgtgataagaaggctccatatgaacaccttattattgatggacgtgaagccctccaatatgctagtaaacacaagaggacaggttaagctgtgt

SEQ ID NO: 790797 - DNA, 100 bp, Homo sapiens
ttaagtatcttacaggagaacagactgaaaaaatgtggcagcgcctgaaaggaatgtgatggcttggacaacagtgtagcttcccccagcacaggtgacg

SEQ ID NO: 790798 - DNA, 100 bp, Homo sapiens
cgactcgggagctccgggagcggcccgcgcaggcaacatttcatttgttgcatttccagtttccaataccaactcacctacaaagattttaccaaaaacc

SEQ ID NO: 790799 - DNA, 90 bp, Homo sapiens
cggcggaaaaccgaagttggaagtgtctcttagcagcgcgcggagaagaacggggagccaggctacggggcgtggagtgctggacctgcc

SEQ ID NO: 790800 - DNA, 100 bp, Homo sapiens
agctcagcgcacacaagctggatggttgctgatttctgctctgatgacattagggttatgtaccgaaggactctaccgtgtcagcgggaataaaactgac

SEQ ID NO: 790801 - DNA, 74 bp, Homo sapiens
gccgcggctccggccctggccccgatggctctgtgcaacggagactccaagatgctgtgggccctgagggaaag

SEQ ID NO: 790802 - DNA, 83 bp, Homo sapiens
ttgaaaagttccggcagagaattctggctccctgtaagtcctatgacaatggactggcacagggagctggacttgaatctcat

SEQ ID NO: 790803 - DNA, 75 bp, Homo sapiens
accttcggcagccggctgtacgcacacaccatcgcaggattggaacatcagttaacatctgaccactgccagccc

SEQ ID NO: 790804 - DNA, 83 bp, Homo sapiens
ctggaggaggcagaaaaagctgcagatgagagtgagaggtaccctcacctgagtcccaagtacaaggagtcttttgatgtggg

SEQ ID NO: 790805 - DNA, 98 bp, Homo sapiens
aacttcttaacccctagaccggtttttagtccattgactatgcagcctaatgatcatccaagcctagaaaacatggaacagatagagaaatttcagga

SEQ ID NO: 790806 - DNA, 75 bp, Homo sapiens
cctacagaaacaaaatgtcaacaaattgatggcaatccaggagtggctgaaggagggcccaccccctgccagccc

SEQ ID NO: 790807 - DNA, 75 bp, Homo sapiens
gtccaaggatgaatcccagtccctgttacggactaaaatgttgatgggcgaagtgatgagagaagctgccttttc

SEQ ID NO: 790808 - DNA, 75 bp, Homo sapiens
gacaagcacatggaggctcagcgggccgaggaggcttctccagggaaagtgaccgaggcagtgaaagaggccatt

SEQ ID NO: 790809 - DNA, 51 bp, Homo sapiens
gccgcggtaccatgaggcgccggtgatcgccatgatcaaaggcctgcaggt

SEQ ID NO: 790810 - DNA, 100 bp, Homo sapiens
cggataccttagagagcacgcccatgctggagaaggagaagtttccgcaggactacttccccgaggagaacatattgtgatgttcgtgcctcagagctaa

SEQ ID NO: 790811 - DNA, 100 bp, Homo sapiens
ctggatgccaacaccagatatgagcaccgaaggatatcaatgagtgtattcttgaaaactatcccgagtgctccaaccccaggttattttacatcattcc

SEQ ID NO: 790812 - DNA, 75 bp, Homo sapiens
ctagccggcgacttgagtgacgaggcagcgggtggcatgagacgtgggaacatgggccacctcacacggatcgcc

SEQ ID NO: 790813 - DNA, 100 bp, Homo sapiens
cttggcctgcttccagaacgctctgccactctaatggtatatgaagatgtcgtccaaatagtatcaggattccaagagatggagtttcgccatgttgccc

SEQ ID NO: 790814 - DNA, 83 bp, Homo sapiens
caagcagcaagtgcgcggttggggccactgcgaggccgttttaggctatggtgaactaaacggtaatgctggagaaagagaaa

SEQ ID NO: 790815 - DNA, 75 bp, Homo sapiens
aactcagctttctaccagcagacagcctttgcaaaatgttagcacagtgctgcagaagcctaatcctctctataa

SEQ ID NO: 790816 - DNA, 82 bp, Homo sapiens
ctcaatctctggaaaaacttcttgccaaccaaattagagatgtttatgattacttccgagctgtcctgcagcgtgatgaaag

SEQ ID NO: 790817 - DNA, 96 bp, Homo sapiens
cgcgcctcctgcttcaagagcccagcggtgagagctggcctgcggcacgcggcctaatgccaggttggtcaaagaaaaagtgatgtatgaaaaaga

SEQ ID NO: 790818 - DNA, 75 bp, Homo sapiens
cccagattcaacccgtgtacgtgcctgtgcctaaaacagcaccagttgcccttgaagcagaaaacagaggtgaaa

SEQ ID NO: 790819 - DNA, 48 bp, Homo sapiens
ccgcagcgcgttctcccgggagagaggctttctcagaaatggcaagtt

SEQ ID NO: 790820 - DNA, 90 bp, Homo sapiens
tcgcagtggtcgcttcttctccttgaattaaacaaccaccatgtcgagcaaaaaggcaaagaccaagaccaccaagaagcgccctcagcg

SEQ ID NO: 790821 - DNA, 100 bp, Homo sapiens
ttcgacattgccgtcgacggcgagcccttgggccgcgtctcctttgaggttccagcaacagatagaaatgctttaagttcactctggggaaagctggcct

SEQ ID NO: 790822 - DNA, 98 bp, Homo sapiens
agctctcggattccttatgcagagtggccgacttgatccaacttagaaataatgtttcattcaagataaggctcgtggcttaggagattgtgacctgg

SEQ ID NO: 790823 - DNA, 75 bp, Homo sapiens
tggacaagagacgatcattctgcaagcaggcaacctgaatacagggatcatagacggtatttctatgtaaacgaa

SEQ ID NO: 790824 - DNA, 51 bp, Homo sapiens
ctgcctcctgcagcccccatagcaggagaagccccgatatccaagcaaaag

SEQ ID NO: 790825 - DNA, 100 bp, Homo sapiens
aaaaatggatttttgcagtacgatggatgctttggagtctgcaatgaagaatggcctgtggggtcacgctctgctacttgcaagtaagatggacagccgg

SEQ ID NO: 790826 - DNA, 90 bp, Homo sapiens
gctgtgttcaaaaccacccaaagagaccacaccgctgttccagaccctctccatggatgatgtcctgcccctgatgccttgggagaccct

SEQ ID NO: 790827 - DNA, 51 bp, Homo sapiens
cgagtatgagcagttcatcgcagccggcattttgcacagaggccgtgtctt

SEQ ID NO: 790828 - DNA, 100 bp, Homo sapiens
cgtgggagcgacgccagcgcctcaacagatgctttgcatgcatactttgggatctgtggcctgtcactaatggaggaaagtggaatttgtaaagttcatc

SEQ ID NO: 790829 - DNA, 90 bp, Homo sapiens
ctgagcaggtcatctttgtccgagatgcggtgacctgccagcacctgccgcagccttcgtccgggagtcgccccatctctccacgcatcg

SEQ ID NO: 790830 - DNA, 90 bp, Homo sapiens
cagttacagaggcagtattcagtgcccttgtgacagggcatgccagagctgggtctccaccagctcctggccgggttcgaggacaagtca

SEQ ID NO: 790831 - DNA, 75 bp, Homo sapiens
ccatgtgcaaatacccttttcccaaataacattcaattctttaccaggaaaggaggaataaacatggtgtgtctc

SEQ ID NO: 790832 - DNA, 75 bp, Homo sapiens
tcgtcctcatctgggttctcactggccattggcttctcatggatgtgtatttggtacaggaaattaatagagctg

SEQ ID NO: 790833 - DNA, 102 bp, Homo sapiens
cccgagaccccctctgaaggccgccagcccagccccagccccagccctacagagggagaagatgtcaaccggacactagaaggtggaaggaaacctcttcat

SEQ ID NO: 790834 - DNA, 96 bp, Homo sapiens
ccttaccagctttgacaatacaggaaatgtttatgatagtatttctgctgcaagtacttctgatgttcaagatcgcctgtcagctcttgagtcacg

SEQ ID NO: 790835 - DNA, 98 bp, Homo sapiens
agatccagcgcctcgcccagggcctcctgctgggacaccaccacccacggccagacacttccaggagcggtaattaaaaccatggaggcgatcagcga

SEQ ID NO: 790836 - DNA, 100 bp, Homo sapiens
tatcggaccatttcagaggttcaccgccatcattggacccaatggctctggacctgagagtcagtatactaagactgcccaggagattgtgaacgtctgt

SEQ ID NO: 790837 - DNA, 75 bp, Homo sapiens
ctgttttttgtaacgttccacggtattcggaattggctacagaacataataagatggttcacaggcaccagccag

SEQ ID NO: 790838 - DNA, 98 bp, Homo sapiens
gcagtggtcgcttcttctccttggtacttttacccatttccagttccacctttactttatcaagtggaactttctgtgggaggacagcaatttaatgg

SEQ ID NO: 790839 - DNA, 83 bp, Homo sapiens
gcgagccgcagtgaggccaacgccgtgttcgacatcctggccgtgctgcagatgatatcatcaagttgaatcgaaaggaaggg

SEQ ID NO: 790840 - DNA, 98 bp, Homo sapiens
actggagccaggctgagcgtcggcgccggggttcggtggcctctagtgagatctggagttacagaatgtctgaaggggacagtgtgggagaatccgtc

SEQ ID NO: 790841 - DNA, 98 bp, Homo sapiens
tacctgcagaaggtctctggagacatcttcagcaggttctcccatgggcaggtggtctctctggatgagctgcgccccttccaggacccagacctgag

SEQ ID NO: 790842 - DNA, 114 bp, Homo sapiens
acggcactcacgtggcatcagtccccactgcggtccacggccaggtgaacaatggttttttgccctgacatctcttcgtcttgtgtttttacttgcatttggcttgatgatcat

SEQ ID NO: 790843 - DNA, 96 bp, Homo sapiens
agaaaccgaagcagaatgtaccagggacacatgcagatacaggctagttccaaaggtttattttcctgagcaaattcatgatgttgtacgggccac

SEQ ID NO: 790844 - DNA, 127 bp, Homo sapiens
gacatccttactcattatgatgcaaaaaagaaagctgcccatgctgcaaaaactgttaaacatggctggtgaagcagcgcttgcagatgtacaactcgcagcaccggtcagcaatcagctgcatccg

SEQ ID NO: 790845 - DNA, 98 bp, Homo sapiens
acggcattggtgactttaacaactcagcacgtgaaatacatcagtgatgcactccggcgtctggaggaggaggaggttacacgcatggggagatactc

SEQ ID NO: 790846 - DNA, 50 bp, Homo sapiens
gacatgccatcatccttctgacagatgatggagtttcactcttattgccc

SEQ ID NO: 790847 - DNA, 75 bp, Homo sapiens
ctgcaagatgtcaagattgttgaacaccccagtgccggtggtggtgtgcacattgagccccggtatagacagttc

SEQ ID NO: 790848 - DNA, 84 bp, Homo sapiens
ctcctgaaggaagccgcccgccccccaccgccgccccctccggcgtgttcatgcccccgggggtttgccttcccggattgggcc

SEQ ID NO: 790849 - DNA, 76 bp, Homo sapiens
gccagaggtggcatctgtgaactaaatgacagactttttcattgaatgatgaggacacagcagccatattatgcca

SEQ ID NO: 790850 - DNA, 100 bp, Homo sapiens
attgaactgcttcagaaagcacagatggacgacgaagacacgttgttacctaggaagttacaggcagctctggagcaggctctggagaggaagaatgagc

SEQ ID NO: 790851 - DNA, 83 bp, Homo sapiens
cccagagccccgcgtttcagccctagggaagggagtggggaaggccagggccagattctgcagcgcttcccagagaaggactg

SEQ ID NO: 790852 - DNA, 73 bp, Homo sapiens
gctcaagaatttcaagaacaaaggccgcgacttggagacgagatcatcagatgttcattcatctggatcttca

SEQ ID NO: 790853 - DNA, 80 bp, Homo sapiens
cagcgctgaaggcgcagcccggaggccgcgcgggacaaccctccatatgataagggagccttcagaatcgaaatcaactt

SEQ ID NO: 790854 - DNA, 100 bp, Homo sapiens
tcgcgacgactaaatacccgtgtctgaagtcttcaggcgagctcaccacatgctacaggcccacggatgacagtaaccagcccccgggccggggtgtcct

SEQ ID NO: 790855 - DNA, 80 bp, Homo sapiens
acggctctgtaggaaggaacttggttccccctccctcagcttccgccccaaaaggatattagaaatggctactccccagt

SEQ ID NO: 790856 - DNA, 75 bp, Homo sapiens
cgagaactgcgcagacctggtggaggtgttaaatgaaaggtatgttagagcccaccaaggaaccactgaaaccac

SEQ ID NO: 790857 - DNA, 100 bp, Homo sapiens
ctgaagttcaagttcgtcttcaattcttgacttgtgtattttcaactctgggatcacctgatcatttcagatagtaatgatgacactgaagatgtttcac

SEQ ID NO: 790858 - DNA, 100 bp, Homo sapiens
ctctggtggaacttttgctctggtggaactgcttttctagaactggtgttggagcgggccggagagaagtagagtgggctgcgaggagaaggaaacaggc

SEQ ID NO: 790859 - DNA, 97 bp, Homo sapiens
ggcacgcaggtgggggccggcggggtccgtggccaggaccttctaccgctttgaggctgtgtgggatagctctctgcataactcccttcttctgaac

SEQ ID NO: 790860 - DNA, 82 bp, Homo sapiens
gacattagctcccactttcaagaagcaatagacttcattggaagaaggtagataatgactataatgcccttcgagaaagact

SEQ ID NO: 790861 - DNA, 82 bp, Homo sapiens
gagggttggaggcaaagttccgaatagggatgaggcatacgtgtactataaccaagagtggacattgtgggatcgctttgag

SEQ ID NO: 790862 - DNA, 75 bp, Homo sapiens
aacaaccggccgctggaggcgctcatggaggtgtctgtgtctggagggccctcctggacccgggagcggaccctg

SEQ ID NO: 790863 - DNA, 99 bp, Homo sapiens
aaggaatagaatgtcttcagaaacattccaaggtttcccttgggggctttgaaataacaccaccagtggtcttaaggttgaagtgtggttcagggccag

SEQ ID NO: 790864 - DNA, 50 bp, Homo sapiens
atcaaaactgccttcagaagcaaaagggccatttctgagcagtggaggtt

SEQ ID NO: 790865 - DNA, 86 bp, Homo sapiens
agaaaaacagaatggactaggactcagtataattctaacatctttgtcatcagtgttgacatctcttgattgtatcctgtcattcc

SEQ ID NO: 790866 - DNA, 100 bp, Homo sapiens
ggagatttggagcccattttagaggcatctgttctatcttcccatcataaaaaagaagaggatcacctagcccgggtagaagaggcaatcacccgtatgc

SEQ ID NO: 790867 - DNA, 97 bp, Homo sapiens
tagaaacacctaatgtcagggcagaccccttcaaagaactaaggtccatattcaagcctttcatctttgttgatgacgtaaaacttgtccccaaaac

SEQ ID NO: 790868 - DNA, 75 bp, Homo sapiens
ataaccctcttttccagtataagtatttggctcttaatatgcattatgtaggtcatggaaaatggaagatttgca

SEQ ID NO: 790869 - DNA, 75 bp, Homo sapiens
cagtgccacttcgacatcgagatcaaccgggagccgggacagtggtgattatcctcttaccatgcctggacctca

SEQ ID NO: 790870 - DNA, 100 bp, Homo sapiens
ctacctggtgcagggcctgattgaggactgccagctggcgctgcagtttgacaagtatgcgcccaagctggacagcccctacttccgacattccagcgtg

SEQ ID NO: 790871 - DNA, 90 bp, Homo sapiens
agacagcagtggccccgagcggagaatagacatttcccccagtacattcagaaaacatggtttggctcatgatgaaatgaaaagtccccg

SEQ ID NO: 790872 - DNA, 125 bp, Homo sapiens
cacggggacggattggttgttttttcctgtatgaagcggttggcaccactgaagtgaccgaatgagctggatgaaaaagaaagtcggcgtctgttccaacagatcctttctggtgtggattattg

SEQ ID NO: 790873 - DNA, 82 bp, Homo sapiens
tctcagatcctccagaagaacacagacgtggtggccaccttgaagaagataaaccctcgtctggatggctgcatgaggagct

SEQ ID NO: 790874 - DNA, 112 bp, Homo sapiens
aggcggcagcctggagagtcgaagcagcagctctcgctccagaagcttcactttggtcatgtccctgggactcctgtctacagagaaaaagaagatatgtatgacgagatta

SEQ ID NO: 790875 - DNA, 75 bp, Homo sapiens
aaagaatattaaaaaatctggagggactccaacttcaatggactcagcccaggagagtgttattactcgagatat

SEQ ID NO: 790876 - DNA, 110 bp, Homo sapiens
tttaccatccctggaggagacctggcagcagtgattcgcctttgccagtctcatctcgtgtctgctttgttaagttccatgatccagactcagcagttgtggcacagcat

SEQ ID NO: 790877 - DNA, 90 bp, Homo sapiens
cctgcgcgcctacctgctgccagcgccgccagctccagtgccccgggttgtggcagtttccccacagatgcgcctcgtggaggacaaccc

SEQ ID NO: 790878 - DNA, 50 bp, Homo sapiens
gcagcattggcgaccagcgcttcacggttgaattgaccaaagcaatggtg

SEQ ID NO: 790879 - DNA, 50 bp, Homo sapiens
cctggatacggtcactttctacaaggaggagatgttaaagtaacccatct

SEQ ID NO: 790880 - DNA, 75 bp, Homo sapiens
atggaaggcaactgtgtttcacttaccagaatactacgttcagctaaattaagataccgtcatgaatttaagtca

SEQ ID NO: 790881 - DNA, 82 bp, Homo sapiens
cttccagtgccaaaccaaactggagctggtgcagcaggaattgggatcgtgtcgctgcgcatttaaatcaaacggtattgag

SEQ ID NO: 790882 - DNA, 49 bp, Homo sapiens
accagctggaagccctgttgctgtctcttcaagaaaatgaggaggagga

SEQ ID NO: 790883 - DNA, 90 bp, Homo sapiens
agaaataaggacaaaagccaagaggaggacagttcgctacacagcaatgcatcgaggtcttcatcctccaggtccacctttagcaagacc

SEQ ID NO: 790884 - DNA, 100 bp, Homo sapiens
gccaagtatccgccagtcaataggaagtacgagtaaaaatggctacaaacttcctagcacatgagaagatctggttcgacaagttcaaatatgacgacgc

SEQ ID NO: 790885 - DNA, 74 bp, Homo sapiens
gaacagttaatcctcaatttaagcctgatctaacccctagaaacagtgcagaaataccataccatcaatggtca

SEQ ID NO: 790886 - DNA, 75 bp, Homo sapiens
ccctgctccaggaatgggacctcgagtcactgtgatgggggctccggaggtggcgcccaggctctgagctaccct

SEQ ID NO: 790887 - DNA, 82 bp, Homo sapiens
gccctgatccagacctgggcaggaatcaaagatcaactcccactgaggacaaatggacctgtaattccgggtgtgacgagag

SEQ ID NO: 790888 - DNA, 100 bp, Homo sapiens
ccggcaggatgaaagtgagcagtccagaaagcggcttatcgaacagagccgggagttcaagaagaacactccagaggggccagtgtcattcaaagatgtg

SEQ ID NO: 790889 - DNA, 90 bp, Homo sapiens
gctgctggcggagggtctgaggcggcgcggccatggctcacctccggggatttgccaaccagcaagagtgagccatggagctacgtgtgg

SEQ ID NO: 790890 - DNA, 100 bp, Homo sapiens
ggcgggggcagccgctgagacggtttttcacaaggagggagatactgagagtgaaccatatgatgatgaagaatttgaaggttatgaagacaaaccagat

SEQ ID NO: 790891 - DNA, 100 bp, Homo sapiens
agacggcggcagcagcggcattcaggctgcacaaggcccaggaggagcaccgcacagtggaggtggagaaggtccatctggaaaagaagctgcgcgatga

SEQ ID NO: 790892 - DNA, 100 bp, Homo sapiens
aaatcagtgctgctttctttaggacgaaaggagcagtatagcatcaagttctagaggaattgggagccattgcaaatctgagggtcaggaggaatctttc

SEQ ID NO: 790893 - DNA, 126 bp, Homo sapiens
ggagctcctgcttccgagcttcctgttccttcaggaagtgaaatggatggagcagaatctggaaaggtggtcattgggactcccacacttaaacaaagaaaggaaattctgcaagtgattacctcg

SEQ ID NO: 790894 - DNA, 100 bp, Homo sapiens
gaagccacggctagtccgcttctaccagcgtttcacaaaaggatgccacggagaaagaaaaaagttaaagaagtctccgaatctcggaacctggagaaga

SEQ ID NO: 790895 - DNA, 75 bp, Homo sapiens
ctgggattctctctgaaagtatgaagcaggaagcagttcaggtacttttgaagcattctgcagatgttaatgctc

SEQ ID NO: 790896 - DNA, 101 bp, Homo sapiens
ggaaagagatctaccgcaagagcaacatctccgtgtacgaagttgatggcaaagaccataagctagacagataagtttacagcagcagcttattcatgtga

SEQ ID NO: 790897 - DNA, 75 bp, Homo sapiens
gaaagaggaggaaaacaaaagctgctacttatggaagatacaaaggttactccacaggatccgctgaacatagga

SEQ ID NO: 790898 - DNA, 48 bp, Homo sapiens
gtcgcgctgagggactcggctcaggttctgggccggagaaggggcgac

SEQ ID NO: 790899 - DNA, 75 bp, Homo sapiens
gcagcccatggcaacagcctccggggcattgtcaagcatctggagggtccacaatctgcaggagctccggcgaag

SEQ ID NO: 790900 - DNA, 145 bp, Homo sapiens
ggctgggtgggcttggccatggtcagcgtgaacgcgcccctcggggctccagtggagagttcttacgggaatgggtactgttcaaaaaggaatgccccacaagtgttaccatggcaaaactggaagagtctacaatgttacccag

SEQ ID NO: 790901 - DNA, 95 bp, Homo sapiens
aactgggcacagcatgcggaaaatactacagagtgtgcacactggctatcattgatccaggagtccaacctataccttctcagggaggcaaacta

SEQ ID NO: 790902 - DNA, 90 bp, Homo sapiens
cctgaagcctcaaagtttcatgacccaagtggagaatgtaatcctgatctcagattaagaggtcaccagaaggaaggctatggtctctcc

SEQ ID NO: 790903 - DNA, 100 bp, Homo sapiens
ctcatcttgttctcgagttttctctgccatgttgctattgcaggacggaaagaaggacccagcccagttcctgcaggtacatggccgagcttgcaaggtg

SEQ ID NO: 790904 - DNA, 50 bp, Homo sapiens
catatgtggcaattgtccaagaaaagctcctgggctataacgaaaagcca

SEQ ID NO: 790905 - DNA, 83 bp, Homo sapiens
cggggaggcaagatgatccaccagcggttccatcctacacttgggtgcagcagtagcgggcatttacagagtagctgggaaga

SEQ ID NO: 790906 - DNA, 80 bp, Homo sapiens
ggcggcttcctggcctgggcgctccggtggcggcggagttcctccgtgtcacaaagcagtacctgccccacgtggcgcgc

SEQ ID NO: 790907 - DNA, 80 bp, Homo sapiens
agacgctgccagcatcgccgccgccaggttttaaaatcaaagatgggaaaatcggagaaaattgcccttccccatggcca

SEQ ID NO: 790908 - DNA, 124 bp, Homo sapiens
gtgctgaagtggatggagagaagtcatggaactgaaaaagcactgactgctctgcttaagttggatggcaagcatgtggtgtttggcaaagtgaaagaaggcatgaatattgtggaggccatgg

SEQ ID NO: 790909 - DNA, 90 bp, Homo sapiens
tgcagctgacctacatctcgaagaatgccagctgatgaagaccgagaggccgcgacccaacacctttgtcatacgctgcctgcagtggac

SEQ ID NO: 790910 - DNA, 80 bp, Homo sapiens
aaagcaagagtttctgtttagatgaccagtctcctgccatgctgtgacctacaagcaaactaaatagccaacatttctga

SEQ ID NO: 790911 - DNA, 80 bp, Homo sapiens
cattctgatatctgctcatggaaatagcagtagggcactcctaaaacacctggaagacagattatgagggacaagccaag

SEQ ID NO: 790912 - DNA, 83 bp, Homo sapiens
gaaaaaggaagccccttaaatgccgcaccctacggcatcgaaaggtatttctgggaaaagccagcttctgtttgcactggtct

SEQ ID NO: 790913 - DNA, 75 bp, Homo sapiens
tgtctgctgcatccaaatcttctccctggacctcgtgcatacgagaatccaggagtcctgccaaagtggcaccaa

SEQ ID NO: 790914 - DNA, 106 bp, Homo sapiens
ttaatgaaggaagaaggggtgaaacttctaagagaagcaatgggaatttacatcagcaccctcaaaacagtgatcctgccatgaagcagtttctgctgtacttgga

SEQ ID NO: 790915 - DNA, 100 bp, Homo sapiens
ttctagtcggacaaaatgcagccgagaactccgctcgttctgtgcgttctcctgtcccaggaggaggattgacaccagccacacgtatgtctgctgctga

SEQ ID NO: 790916 - DNA, 75 bp, Homo sapiens
ggctacatcaaggcctggcccccagcagaatacagattctgttcatcttgctctgaaattaaataattctgaact

SEQ ID NO: 790917 - DNA, 99 bp, Homo sapiens
gactgccctgtagaatcagtgctgtgaccccgagtaacaacgcgcgcttgagttggtataaactcctgaagctctggtgtctgtggaccctgcttctga

SEQ ID NO: 790918 - DNA, 100 bp, Homo sapiens
ggtattgctttggatttgttgtgcaactgttgctacagctgtggagcagtatgttccctctgaggagatgtgccccagagcctcccccacttccttgtgg

SEQ ID NO: 790919 - DNA, 83 bp, Homo sapiens
attcccaacagccaccaccaccaccagatggaaaggacttagaagccttacaaatacatctgtgcattcttgcttcagacttt

SEQ ID NO: 790920 - DNA, 50 bp, Homo sapiens
tggagttcacagaagagtcgaggagaaacacgaccctcctctgagtagca

SEQ ID NO: 790921 - DNA, 98 bp, Homo sapiens
ccacagggtgatcccttccttcatgtgccaggtcgcgtctccttcttcacctcggggtccgagaacctacaccgcgtggagaaggtccactggggcac

SEQ ID NO: 790922 - DNA, 90 bp, Homo sapiens
gaacagaaacacctaggaagggagaactggggcataaggaaatggtggcaggcacttcctcctaacaagaaggaagtagttaaagaaaat

SEQ ID NO: 790923 - DNA, 100 bp, Homo sapiens
agggatgggactggaaatcaaatgttacaggtggttgaagatggatatgaattttttgcaaagaggcagttggtcactctgttttctgcgcccaattatt

SEQ ID NO: 790924 - DNA, 75 bp, Homo sapiens
cccacctgtcagccttctaccccatgagaaagaccagggtgctggaaatgtaaacaagaatagactgttcattcc

SEQ ID NO: 790925 - DNA, 75 bp, Homo sapiens
cagagaatggcagccatttatttgtcccgtggccttaacagtacatgacaatttggctatgaaaatttgcaatga

SEQ ID NO: 790926 - DNA, 75 bp, Homo sapiens
gcgcgcctttgtgcgcgcgccgagcccgcgtgaccccaactctgccgaagcaggaccgtcctgtgcgtgagggga

SEQ ID NO: 790927 - DNA, 121 bp, Homo sapiens
ccgtcccccattcgcacacccgatgcccgggggtcgctacggacttaaaatctccgcaccgcaccctccacctcaggaagtattttggggagaagatcggcctgtacttcgcctggctggg

SEQ ID NO: 790928 - DNA, 100 bp, Homo sapiens
gccgcgcagctacctcatgactattgcaccacgcccggggggacgctcttctccaccacaccgggagaatcagctgaaccaagccagttggaagttccag

SEQ ID NO: 790929 - DNA, 83 bp, Homo sapiens
ctccgcctgccttctgccgccggccggcgcgtcgtccccacaggagcggtggtgccccccccgggcacggggccatgtacaac

SEQ ID NO: 790930 - DNA, 90 bp, Homo sapiens
ttcgacttggagtctttgtccaggacggtcgtccttggtggaaggaaccatgaactggcatctccccctcttcctcttggcctctgtgac

SEQ ID NO: 790931 - DNA, 100 bp, Homo sapiens
aggaacacatcgatctgggtatcaaatatgacccaagcattggtatctacggcctggacttctatgtgaatttcgctaaggagtttgtgatcagtgatcg

SEQ ID NO: 790932 - DNA, 74 bp, Homo sapiens
acacaaacccttcacagactgctctgactttgagaagcccgagagcccccgagccgccagcagcagctccccag

SEQ ID NO: 790933 - DNA, 123 bp, Homo sapiens
tggtccttatacctgttgggttctaacccagaagtccagaaaaaagtggatcatgaattggatgacgtgtttggctacaagatcaagctgcagagaccattgaagctctgcatgcagcaggcc

SEQ ID NO: 790934 - DNA, 97 bp, Homo sapiens
ttgactgctttatgaccatattaatgcagatgaggcgttctttggttatcaatactctggctgaccatcatcatcgtgggactgactttggtggaag

SEQ ID NO: 790935 - DNA, 50 bp, Homo sapiens
gcgggtctgctcgggggtctacttcgaggcaggtcagcgggactatgatc

SEQ ID NO: 790936 - DNA, 74 bp, Homo sapiens
ggtaactggtggagaccaaattttgaacctcctcagtctcttcaagaaaatgaggaggaggagattgggaacct

SEQ ID NO: 790937 - DNA, 50 bp, Homo sapiens
tccagctcacccactgccagcagaggtcctaggcctacttacaagcctcc

SEQ ID NO: 790938 - DNA, 100 bp, Homo sapiens
catgaactcggaacagcgcatcaaccggatcatgggctttcacaggcccgggagcggcgcgggtaactgtgacatttgatgatgtggccttatatttttc

SEQ ID NO: 790939 - DNA, 98 bp, Homo sapiens
agaagtcattttaaactatggacgactccgaggaacattgagaaaacgggcaatgctgtgagagccattggaagactgtcctctatggcaatgatctc

SEQ ID NO: 790940 - DNA, 83 bp, Homo sapiens
aaagcagcgtgcgttcagccctgggccccaccattgctctctctgtcttcagttccccaggagggcaatggcatcaaacagca

SEQ ID NO: 790941 - DNA, 82 bp, Homo sapiens
cccggcctacctcttcctctggcccgaagccttcctttatcgctttcagattgtggatttcttaaagaagaagcatgatttt

SEQ ID NO: 790942 - DNA, 50 bp, Homo sapiens
caagcttctctgtgaaagagcacagatggattttggtatttggaaagggc

SEQ ID NO: 790943 - DNA, 99 bp, Homo sapiens
tcaggactttaaaacagatctgcgcttccagagcgcagctatcggtgctttgcaggaccatggccaacctggagcgcaccttcatcgccatcaagccgg

SEQ ID NO: 790944 - DNA, 98 bp, Homo sapiens
ctgtagcgccgccgacgactgcagccagcagcgtggaggagcctgaagtggctagaagtgaccccaggatttttttattatcaagagagactagaaga

SEQ ID NO: 790945 - DNA, 129 bp, Homo sapiens
aagcaattgacattttagatagaagctcaagcatgaaaagccttaggatattgctgttgtcccaggacagaaaccattggggcccaggctttgatgagtggttcaaaccccatgctgggctgtaacact

SEQ ID NO: 790946 - DNA, 100 bp, Homo sapiens
cggattgcccatgcacttgttgcagaaacagccaagtgccggtggtggtgtgcacattgagccccggtatagacagttcccccagctgaccagatcccag

SEQ ID NO: 790947 - DNA, 83 bp, Homo sapiens
tacgagatcatggacggggcaccagtgcgagctgtaaaactaccatagaagctatccatggattgatgtctcaggttattaag

SEQ ID NO: 790948 - DNA, 82 bp, Homo sapiens
ttggccatcagtggtcacctagacagcgacgatgataggcttcagggatgacttcttagggggcaggggaggtagtcgccca

SEQ ID NO: 790949 - DNA, 100 bp, Homo sapiens
gccattttcttatggagaactgtccttgttgacattggctccctggattatcaagagtttgtagttgacattgaatccaggctgaggatggaaggtgtgg

SEQ ID NO: 790950 - DNA, 83 bp, Homo sapiens
gagattgaagcatgctctggaaatgttcccagaacattgcacgatgcctcctggctactgcagcactggggtgtcagttgttg

SEQ ID NO: 790951 - DNA, 100 bp, Homo sapiens
aaaagctgcttgaatgtctgccgaaatgttcaagtttaccaaaagagaggcaccgctggaacactaatgaggtagttggcaaaaaaggagaaagccacta

SEQ ID NO: 790952 - DNA, 103 bp, Homo sapiens
taatgggccgggaccgaaacctagccccggacgagaagcgcagcaacgtgcggtgggaccacgagagcagataattgacgaccttgccaacctagtggagaac

SEQ ID NO: 790953 - DNA, 74 bp, Homo sapiens
gcctccagcggggatgacacagaaggcccgatgagagaaagggaaagttaaggatgctggagcagaacaatgga

SEQ ID NO: 790954 - DNA, 74 bp, Homo sapiens
ggatgagacatttgctacagcatcccacattaagtcaacgatatgaagagaaggctactaaagacttggaacga

SEQ ID NO: 790955 - DNA, 100 bp, Homo sapiens
caggctgttcaaggtgaaggattcatgagtctatataaaggctttttaccatcttggctgagaatggtgaatgtaagacctttacttccttccaccaaac

SEQ ID NO: 790956 - DNA, 107 bp, Homo sapiens
aaaagacagtgttctgctttcatggagttcacagaagagtcgaggagacagaccccgtgcggctgacacagctgtatgagcaggcccggtgggacctgctgctggag

SEQ ID NO: 790957 - DNA, 100 bp, Homo sapiens
caccgctacaacgcctacccctcagagcaggagaagctgagcctttctggacagaccaacctgtcagtgctgcaagttctgacaacaaaggagattgtga

SEQ ID NO: 790958 - DNA, 76 bp, Homo sapiens
agctgaaggagaagtttatgaatgagttgcataaaattccatagaggagtctgcaatgccgagtggaggaaggagg

SEQ ID NO: 790959 - DNA, 75 bp, Homo sapiens
cgggagtgttcgttgtgccagcgactaaaaagaggaaacgccaccccagtgaccaccactgccccgtgggcctcc

SEQ ID NO: 790960 - DNA, 100 bp, Homo sapiens
gtcctgagatcaaatggcacttcattggccacctacagaaacaaaatgtcaacaaattgatggataactgttcccaggaaaaaaaggaggaaatcctgga

SEQ ID NO: 790961 - DNA, 98 bp, Homo sapiens
aaggagctggcggacatcactttagaccctccacctaattgcagcacttttccagccattaactccaggctctcgagaatttgaagatgttgtaaata

SEQ ID NO: 790962 - DNA, 90 bp, Homo sapiens
agggtgaagctcctcgacaccatggtggacacttttcttcagaagctggtcgccgccggcagctacctctacccagatggaaagacccac

SEQ ID NO: 790963 - DNA, 101 bp, Homo sapiens
tttggcggtgacaggggtgcgcccaagcggggctctggcaaggttacaggaggttccagtggcatcgggaagtgcattgctatcgagtgctataaacaagg

SEQ ID NO: 790964 - DNA, 96 bp, Homo sapiens
gtttactgtggattggatattctcaaggaaccacacatgtattaagatttggtagattggggtcaactggactacttagttgtagacatgccacca

SEQ ID NO: 790965 - DNA, 98 bp, Homo sapiens
aaaaagcatccccgaggaggaagacgaatcgttaaacatctgaaagggtcagtgattcgcctttgccagtctcatctcgtgtctgctttgttaagttc

SEQ ID NO: 790966 - DNA, 98 bp, Homo sapiens
ttgtttgtggatcgctgtgatcgtcacttggtcgttgaggacttccacatggagattggcacaggaccagactcaagacacacaactcataacagttg

SEQ ID NO: 790967 - DNA, 101 bp, Homo sapiens
ttggagtgaaccggagaccccgaaaacggaagcgcagggagaaggaagaggtgtttgaaaaggacagacccacgaagtcaagcatgcggagtgcagccaag

SEQ ID NO: 790968 - DNA, 85 bp, Homo sapiens
ggaaacatacagaagaagcaaggaaattacagttagaggttcagcgatacccaggccacgtgcccaacttcctgagccagaccca

SEQ ID NO: 790969 - DNA, 100 bp, Homo sapiens
acctctttctttgtgggccggatgggtccttgagtatcgtgttcgacgagtgtcacaaagccaagaatgccggctccaccaagatgggcaaggctgtgct

SEQ ID NO: 790970 - DNA, 95 bp, Homo sapiens
ggatctgcacagcgggacggcaaggatgaccaaaatgttagacttgcttgaggacttcttagactatgaaggctacaagtatgagcgcatcgatg

SEQ ID NO: 790971 - DNA, 100 bp, Homo sapiens
ggtgatccgcccgcctcggcctcctaaagtgctgggattacaggcgtgagcctccgcgcccggccgaagaagctcattcacacagaagacccatttaatg

SEQ ID NO: 790972 - DNA, 75 bp, Homo sapiens
ccaatattcatccacctcagataccagcaactcccccatcgtatgaatctgtacttcgacctggtgtcctgtggt

SEQ ID NO: 790973 - DNA, 74 bp, Homo sapiens
ggtgtccacatgagtgcctctcccagcagatccagtagaacttcatggaggaacacggagtgacccaaaccgaa

SEQ ID NO: 790974 - DNA, 83 bp, Homo sapiens
gtccctgagaaggaggggtatgagccacacatccccgaccacttgcggcctgagtatgtgcctccggagccagcgtggtggcc

SEQ ID NO: 790975 - DNA, 50 bp, Homo sapiens
ttccaaagtatgttgcacccaggtggttggaggcaaagtaaagaagcccg

SEQ ID NO: 790976 - DNA, 83 bp, Homo sapiens
ctcaacttcggtgcctctctccagcagactgcggtcctgaacgaggctgtgggggccctgatgtaccacaccatcactctcac

SEQ ID NO: 790977 - DNA, 128 bp, Homo sapiens
ttcccatgtgtctattgtcacatccgaagatggcacaacccggcgcaccgagaccaagatccgggaggagattgacaagtttgggatccatgtataccagttccctgagtgtgactcggacgaggatg

SEQ ID NO: 790978 - DNA, 100 bp, Homo sapiens
tagtggggcacgctctgcataatgacctaaagttcctccgtgtcacaaagcagtacctgccccacgtggcgcgcctctgtctgatcagcaccttcctgga

SEQ ID NO: 790979 - DNA, 98 bp, Homo sapiens
ggcgtcagcgagccgtgagatgcgtggtccaccatcggtgacctcaccgcctcggttcgccctcagccgccccggtttaaaatgctacctgaagttct

SEQ ID NO: 790980 - DNA, 83 bp, Homo sapiens
ccgagaccgcggccgggaccgagggctgtctgtccccagaccccagagcacgtccggcaccaccatgactgggctgttgaaga

SEQ ID NO: 790981 - DNA, 102 bp, Homo sapiens
aagaaaccaagtgtccgggattcagacctctctgcggccccaagtgttcgtgatatcaacaagtttctttggatggtccggattggagggagcacagataca

SEQ ID NO: 790982 - DNA, 100 bp, Homo sapiens
cagaggccgccatcaaccgccagatcaacctggagctctacgcctcctacgtttacctgtccatgattcttggtgccaccattgagaactccaggattgt

SEQ ID NO: 790983 - DNA, 125 bp, Homo sapiens
catggactacttttagagttggcctattttgtggaatattcattgtactgaatattacccttgtgcttgccgtgtggacaacagtgagtatatgcggaatggagacttcttacccaccaggctgc

SEQ ID NO: 790984 - DNA, 84 bp, Homo sapiens
aaaaagctgtggaaggctctggataaggaccagtacctgcccaggaaactggaactgtggctgcaccatctgtcttcatcttcc

SEQ ID NO: 790985 - DNA, 100 bp, Homo sapiens
ctttgacaagtgatgagaagctgtcggagcttcccaagggacagagcagaatgggctgatatagatccggtgccgcagaatgatggccccaatcccgtgg

SEQ ID NO: 790986 - DNA, 80 bp, Homo sapiens
ggaacctttgcttctatggaagctgtttgagggcatgaaggcgttcaaaggcaaagaccagcaggtgcgcctcttccgcc

SEQ ID NO: 790987 - DNA, 100 bp, Homo sapiens
tcctccaggcatgccccgctacgagctggctttaatcctgaaagccatgcagcggactcctgcccctgccacgagaacacaccctttccagtttgctgga

SEQ ID NO: 790988 - DNA, 75 bp, Homo sapiens
ttataatcaggaagtggatgcctccatttttaaggaatgtatcctgtcaggtataatgtcagtgaatggcaagaa

SEQ ID NO: 790989 - DNA, 100 bp, Homo sapiens
tgccgggggtcgctggctctgctgctgccgccggcgaaggaggaggcgttgccggtttgtagttcagaaccagaaaatgttcaggctgacccagagaatt

SEQ ID NO: 790990 - DNA, 96 bp, Homo sapiens
aagatccaggaaatactgcagaggaagatggtgcgagagttcctggccgagttcatgagcacatatgtcatgatgatgtttggctgtggctccgtg

SEQ ID NO: 790991 - DNA, 50 bp, Homo sapiens
cgccttagataacagccatcctattgaagacagagcgggatgccaccagc

SEQ ID NO: 790992 - DNA, 74 bp, Homo sapiens
ccgcgctgcttaggccggggcgtttcgacaggcagatctttattgaaacaccatctgattcagatcacaagaag

SEQ ID NO: 790993 - DNA, 90 bp, Homo sapiens
aaagctgccaaaagtgacatgcaggagtcagacaaaaagctgggtatatcactccagttcctggaggtgttggccccatgacagtggcaa

SEQ ID NO: 790994 - DNA, 100 bp, Homo sapiens
tgccgtttaacctttattgtggtggagtccaccccgctgtgaatgctgtccagtttcaacgagtggttttggcaggacaggttctggttaccacccaatg

SEQ ID NO: 790995 - DNA, 93 bp, Homo sapiens
tgcttcagagagaggaagccgaaaacaccctgcaatctttcagacaggagaactacgatgacccgcacaaaacccctgcctccccagttgtcc

SEQ ID NO: 790996 - DNA, 90 bp, Homo sapiens
tcgattccattgatgcatgaagcaatgcagaagtggtattacaaagatcctcagggagaaattcaagatgtgttcagagcaacattgttt

SEQ ID NO: 790997 - DNA, 123 bp, Homo sapiens
gggatcgtgaccgagaccgtgaccgagagcgtgaccgagagcgcgaatatcgtcatcgttagaagtaccgtgtggaatcaatgatgttgcgtattgctaaaccaatgaactatattcctgtga

SEQ ID NO: 790998 - DNA, 98 bp, Homo sapiens
tcaaccttgtgctgccaaacttgtccctcgggcccatcgactccagcgtgctctctcggaataagacagagaaatggcccatgcgatcaagattgtac

SEQ ID NO: 790999 - DNA, 100 bp, Homo sapiens
ccggtgctcttgcaactgacgcagtcactgcagcactggtggaacttgagatgccttcaattaagttgcagagttctgatggagagatatttgaagttga

SEQ ID NO: 791000 - DNA, 87 bp, Homo sapiens
agggctcctccggcgccgccgagctgcgcccgctgccttcacaccccggacatccgcgccacacggcacattcgcctcccaggtgac

SEQ ID NO: 791001 - DNA, 103 bp, Homo sapiens
gtggtaattaccatcaatactatggaatgcattttgaaacttaaggatgggatacagggcgaactttctgaccaagtatacaactacccagagggcctaggag

SEQ ID NO: 791002 - DNA, 51 bp, Homo sapiens
cttgaatggcgactagatgtacagagattctacattgcattgactgggatt

SEQ ID NO: 791003 - DNA, 82 bp, Homo sapiens
gaagagattcagccagcacactcctcgcgagcaaggtcagcccaaggccaaccccactgtcactctgttcccgccctcctct

SEQ ID NO: 791004 - DNA, 132 bp, Homo sapiens
ggagccttcactatgggtgtcatcggtggcggagtcttccaggccatcaagggtttccgcaatgcccctgttgaaaaatccaagctggagagtgagctagccaactttgggcctcgcattaatgatatcaag

SEQ ID NO: 791005 - DNA, 88 bp, Homo sapiens
ttaaggattccaagtaactcttatttgctccctgcacaagcagcactttcttttgccatagcaacatgtgcatcaataattctttagt

SEQ ID NO: 791006 - DNA, 100 bp, Homo sapiens
cttgattttaaggacaaaagtgctgaggatgctaaagctatttatgaactactttgctctattgccctagctcgatagatttacaaactttagcagaatg

SEQ ID NO: 791007 - DNA, 100 bp, Homo sapiens
tgtggttagtgtctatgctcagaatccaagcggagagagtcagcctctggttcagactgcagtaaccattctaaatggagcccctggatttataaacttg

SEQ ID NO: 791008 - DNA, 100 bp, Homo sapiens
gactgcgattgcttacgagcagcacgggttctttgagcaggtactggtcttcttggacattaatctttgaatacttgctgactgctaagaaatgaccaga

SEQ ID NO: 791009 - DNA, 74 bp, Homo sapiens
ccgccgcgtcttcccggtctcctttcccggccgcacaggactaactggatcttctgggtttgtgacagatggac

SEQ ID NO: 791010 - DNA, 83 bp, Homo sapiens
cgagcccggagcccggagcccgggcaagagctgggtcaaaatgcagatcttcgtgaaaacccttaccggcaagaccatcaccc

SEQ ID NO: 791011 - DNA, 90 bp, Homo sapiens
ccagcccctctggggagtgtgagtacagcccactcgtctcagtgtctacaaccaggttccgagtctgaggaagacataaccttgtgcctg

SEQ ID NO: 791012 - DNA, 98 bp, Homo sapiens
agctcataacccctactccacagctgtgagtacctcagactaactggatcttctgggtttgtgacagatggacctggaaattataaatacaaaacgaa

SEQ ID NO: 791013 - DNA, 96 bp, Homo sapiens
tgaagctcacaggttgaaaaaccaaagctccctgctgcataagaccttgtcagagttaagtgggcagaccaacatccacctcagcaaaaacttctt

SEQ ID NO: 791014 - DNA, 83 bp, Homo sapiens
cgaagcctaaattccaggaggatgctattaactgagtacttggatatgaaaaatactcgtacggcctctgaaccatcagctca

SEQ ID NO: 791015 - DNA, 98 bp, Homo sapiens
gtgattatgagcttgaagatgaaacaagacctgctaagttccacaaatgcatatatgctgatctatagactgaaggatccagccagaaatgcaagtat

SEQ ID NO: 791016 - DNA, 80 bp, Homo sapiens
agaagctggtcctggtcttgaacaagattgctctagaggacaaaatcccagtccttggcacaaactcaggaaatggaagc

SEQ ID NO: 791017 - DNA, 99 bp, Homo sapiens
gaccaatgtcatccttgcagacctcaacctctcagtcttgcctccagcaaatccatcctccaatcctgatgccagagtgatctgaaatgcaaatatgat

SEQ ID NO: 791018 - DNA, 74 bp, Homo sapiens
ttgagccttctccattgcagccatccctggccggctttgtgtgcaacacgtgccctgaaaagtggatcaatttc

SEQ ID NO: 791019 - DNA, 100 bp, Homo sapiens
ctgaaaatgtcaaggcatgaaatccaaggattgactcagtcagcattgacacccttatcttcactttggagtttactaattggaagacacttgcaccagc

SEQ ID NO: 791020 - DNA, 50 bp, Homo sapiens
ggtcctttatatagaagggagagtagagttcacccagggcatgatcttac

SEQ ID NO: 791021 - DNA, 100 bp, Homo sapiens
gtttcttctgatttctgccattggggaaagtgatgaagcattgggcccaacaatgatgagttggaatgcagttgaaaagttatgcgcaaaatctgcaaat

SEQ ID NO: 791022 - DNA, 100 bp, Homo sapiens
gcgcagctggcagccgctcgggtaaaaaggggtcactatggagttcaaaggacagaactcctgcctggtgaccgggacaacctggccattcagacccggg

SEQ ID NO: 791023 - DNA, 75 bp, Homo sapiens
cagattcgcagtggtcgcttcttctccttgcaaggtgtccctgccttcactgtgctccaacctgaaggtcccctg

SEQ ID NO: 791024 - DNA, 75 bp, Homo sapiens
ctggccgcactgcgcgagcggctgcgcgagaagtaaggtcatgtgcttccacccctggtcggatgtaacgctgcc

SEQ ID NO: 791025 - DNA, 83 bp, Homo sapiens
agaactttgacatcttgcaaagtgccatcagtaagcatttggcaattcttcagttagatagtcctgaatctgctcagtcaatg

SEQ ID NO: 791026 - DNA, 100 bp, Homo sapiens
caaaatcagaggcatactttataggaggatcccactggaagacatccctgaagacgatgacgagtgctcggcctggctgcacaagctctaccaggagaag

SEQ ID NO: 791027 - DNA, 98 bp, Homo sapiens
tcaagcagtcctaccatgtcagccttcccagtagctgggaccacaggcactgcaacatggtgctggagaacgtgaaggagatgtggactgaggtaccc

SEQ ID NO: 791028 - DNA, 76 bp, Homo sapiens
ttcctcatcaaattgtgtgactgatatttcccaccttgtcagaaagaaggcgcagccctattgttcaggagagatg

SEQ ID NO: 791029 - DNA, 100 bp, Homo sapiens
tacagcgccacggtggatcagcgcctacccgagtgtgcgaagctagccaagttcctctgtgacgagggtgcaggtatctctggggactacatcgatcgcg

SEQ ID NO: 791030 - DNA, 83 bp, Homo sapiens
ttgcagccccagacagccggcgctggctgtggtcggtgctggcggcggcgcttgggctctacaatgcagatcttcgtgaagac

SEQ ID NO: 791031 - DNA, 73 bp, Homo sapiens
agaaggtgatcaaagttggcaaggtgctactcgtgagcagtagtcgccatccagacagatggattgtccctgg

SEQ ID NO: 791032 - DNA, 96 bp, Homo sapiens
aaacaatgctttctcctcgagaaaagattttctattacttcagcaacagtccttcaaaggacctcttctcagctctcatcaagggccccactcgaa

SEQ ID NO: 791033 - DNA, 82 bp, Homo sapiens
gttgactaccaccagtggagtccaggatgagataaaatttgatgctgggactctccttcttagtacacaccgactgatttgg

SEQ ID NO: 791034 - DNA, 75 bp, Homo sapiens
ctggaaactgtacattgaagcagagcgagtaaccagctcataaatcacatcgaacagtttttggatactaatgaa

SEQ ID NO: 791035 - DNA, 75 bp, Homo sapiens
cagatttacaaactggccaagaagggccttactccttcacagatcgatacctgctatacaacttcccgatgacct

SEQ ID NO: 791036 - DNA, 88 bp, Homo sapiens
aagctggaggtggacgccatcgtcaacgccggtctggaaatctctccaggcaccctgctttggccctctagaatacagacagttcctg

SEQ ID NO: 791037 - DNA, 75 bp, Homo sapiens
cacacatcaagttaaatttggtcaacaaaatccacgtcagatgtgttcagagcaacattgttttgttgacacaag

SEQ ID NO: 791038 - DNA, 95 bp, Homo sapiens
ttcatctccctgctctggatcatcgaactgaatgtggcgggacaggcttcattgggacagccctaacccagctgctgaatgccagaggccacgaa

SEQ ID NO: 791039 - DNA, 96 bp, Homo sapiens
gaaatggtgacctttgtctgccgagttcatgagtctagccctgcccagctggctgggctcacaccaggtgtggacatgatcagtaaaatgctgaag

SEQ ID NO: 791040 - DNA, 74 bp, Homo sapiens
gctcatcaagctgctggaggtcctctctggagagaggctgatgatagtatttctgctgcaagtacttctgatgt

SEQ ID NO: 791041 - DNA, 97 bp, Homo sapiens
actgcagtgaaaaggacctagattttctacacagtgttttccaggatcagcatcttcacacactactagatggtctttttggagttcctgagctgag

SEQ ID NO: 791042 - DNA, 98 bp, Homo sapiens
gctttgattatgaagtaaaaatacacaatacaaggaatggatatttgcaggacttggatgtgaaatcattgctgctagaggcttatgttaaaggacaa

SEQ ID NO: 791043 - DNA, 75 bp, Homo sapiens
ccccgcccggccagccgccccgtccgggagattcgggccgacggtcccccccatggtggggtccagtacgagatg

SEQ ID NO: 791044 - DNA, 100 bp, Homo sapiens
tggggaccctgctttcctctacttgctgtcagctcctcgagaagccccaggagtctcccaaagggaagaggaagttggatttgaaccaagaagaaaagaa

SEQ ID NO: 791045 - DNA, 100 bp, Homo sapiens
gttgctgttgatccaactgaagagtactttgttacaggatctgccgaaggcaatataaaggtgcagctgctagcaaggaaaattatcttttcatatttaa

SEQ ID NO: 791046 - DNA, 88 bp, Homo sapiens
cttgttcaaaggagacaagtgtcacagcctggttggaaaacccaagatatttatcattcagtttgaggaggatcgtatctatcgtcat

SEQ ID NO: 791047 - DNA, 83 bp, Homo sapiens
gcctcgcgccggctatggccgtgccctggggctgagccctcaggccaagtacctggcccagatcattgtgatgggcgtgcagg

SEQ ID NO: 791048 - DNA, 75 bp, Homo sapiens
cttggtgtcatccagccttagcaaaccagagaacaatgctaaagtagctgtgctaggggcctctggaggcatcgg

SEQ ID NO: 791049 - DNA, 50 bp, Homo sapiens
gtaacggacaaagagcccgaccgaggttcgagactataagaggcttaccc

SEQ ID NO: 791050 - DNA, 100 bp, Homo sapiens
ttattttttgggaaaacacttcaaatgctgaggaggcctgcagtatccctgggattgggaagcggatggctgagaaaatcatagagatcctggagagcgg

SEQ ID NO: 791051 - DNA, 83 bp, Homo sapiens
catctgggccgagaccattccgtatggagagccgggatggaaaaattcgagtcaccattcttgcacggagcacagaataccgg

SEQ ID NO: 791052 - DNA, 80 bp, Homo sapiens
caacaattacttacctggcccaggaggatgggcccgttgtgaacctagaagtcggaatccggaagaagatcgaacatgac

SEQ ID NO: 791053 - DNA, 100 bp, Homo sapiens
aaatggggtgaatcatttgacaaactgctttcccatagagctctgggaaaccaaggttttgcagtctaaagcaacagaagacttcttcagaaatagcatc

SEQ ID NO: 791054 - DNA, 100 bp, Homo sapiens
gtgggtgcactcataggctcgtctggtgctatcctgtcatacatcatgtgtgtggtcagtttaggggctggtgcaaaggatgagttgcacattgttgaag

SEQ ID NO: 791055 - DNA, 83 bp, Homo sapiens
tgaagatgatgacgatgatgatgaagaggatgatgatgaagaaagctatggagatattttgcatagaatgaaggatctctgca

SEQ ID NO: 791056 - DNA, 83 bp, Homo sapiens
agccagtgcggagagaggctgcctcctgcagcccccatagcagactttgtgtggacagtaatgacctcacgtttccgattgcc

SEQ ID NO: 791057 - DNA, 100 bp, Homo sapiens
aagggatcgtgtggcatgaaacagaagaagatgaggagcttttctctggaatgtatatagatttcatggggacagatgctgctatttttcgaagtttaac

SEQ ID NO: 791058 - DNA, 50 bp, Homo sapiens
ccgagtcgcgcggaggcggaggcttgggtcatccgtccttggctcaggat

SEQ ID NO: 791059 - DNA, 75 bp, Homo sapiens
tagtcggacctttcccgctggcgcgcagcctcagctaggacaaatatcagtggatgggttcatgcgctatctgag

SEQ ID NO: 791060 - DNA, 83 bp, Homo sapiens
cttgggcctcgcgccggctatggccgtgccctggggctgagccctcaggaaattcgaaatgagtcccatgactatcctcatag

SEQ ID NO: 791061 - DNA, 108 bp, Homo sapiens
ctcgctgggagagaggtacctctccttttccctctccctttccctaagtcgtgagatggagaataaagaaactctcaaagggttgcacaagatggatgatcgtccaga

SEQ ID NO: 791062 - DNA, 100 bp, Homo sapiens
tctcgtctactgcaagcggaaatccagactaatagggatgccaaaggaaaaatatgatcctccagatcctcgcagaatttataccatcatgtcagcagag

SEQ ID NO: 791063 - DNA, 50 bp, Homo sapiens
aggaggaaaacacccccattgctgaatattctgaactggtcgaaacatta

SEQ ID NO: 791064 - DNA, 50 bp, Homo sapiens
tcccaggaatacagctttgcattaggttcatgaactggaatgtaagaggc

SEQ ID NO: 791065 - DNA, 83 bp, Homo sapiens
gcactcttagggccgaggggcactgcagctgacaagaggttctgcggggagtgtctccagccctgcctgcaggtgccatcccc

SEQ ID NO: 791066 - DNA, 105 bp, Homo sapiens
gtggatcaccgcgctgcactacgcctttcaggacgagaaccacctggattttttatcaagcagaaatgcatcgaacaacgagaatcaagatcactgagctaaatc

SEQ ID NO: 791067 - DNA, 75 bp, Homo sapiens
acctgcagtccatgcaccagtttcgccaggacacaggtttacccaaggtccagcctagcccctaggcaccatgtc

SEQ ID NO: 791068 - DNA, 83 bp, Homo sapiens
cattatggctgtaactggagatgacacaggtatggcatttcaaatatagatacaaccattgaaggaacgtcagatgacctgac

SEQ ID NO: 791069 - DNA, 100 bp, Homo sapiens
tttgctgtctatggatctgctctaaaccttatagcctgcttatgggggaagagcgtcatgaacaggatgcacgtggtcagcgtcccctacgcgctgatga

SEQ ID NO: 791070 - DNA, 100 bp, Homo sapiens
ttacattgcttgaacaaaataattgggacttagtgattcagaatggacagtttagaagaacctcagaaaaaagtctttaaggctcgaaaaacgatgagag

SEQ ID NO: 791071 - DNA, 140 bp, Homo sapiens
ggacctgccaccagctccagagcttgactggatggagacaggaccatctctgacattcattggccatcaggacaacgtggatctgggagagctgatgttttccctgtgctatcttccaacggctggcaggctgaccatta

SEQ ID NO: 791072 - DNA, 100 bp, Homo sapiens
tgggaacaaaatacaaatcatggagccgctggggtcccttttgcctcagatactattttgaagttcccgatgggtcccggctcggacggtccgatgggcg

SEQ ID NO: 791073 - DNA, 78 bp, Homo sapiens
ggccagctgactgcacttcttttttgagaaaggaaggaatatatcctgactgattctgagtcagtgctgattctctca

SEQ ID NO: 791074 - DNA, 100 bp, Homo sapiens
aagattcaaagataaaactcctgcccctcttcaacacctggacaccttgttagatggaacctacaagcaggttgtttttgagcacgttcactctcgcagt

SEQ ID NO: 791075 - DNA, 75 bp, Homo sapiens
atcatttctgggaaattgttgtccaggaggaagaatacaagcgattgagtgaagcactagcagaggatgggagct

SEQ ID NO: 791076 - DNA, 98 bp, Homo sapiens
gtgctttgcccaaggagatggtctcattaagcattcgcaacgacaggcgcctcctctgccaaccggtttgtcagcatcggaccccgggacggcaactt

SEQ ID NO: 791077 - DNA, 100 bp, Homo sapiens
tacaggcacgcgccaccactcccaggctcatcagttagcatctatgcaagtgcaggcttataatggtgggaatgccaacccccgacctgccaataatgag

SEQ ID NO: 791078 - DNA, 98 bp, Homo sapiens
cgcgcacctggcagtcccgggctcgagccccgccctgccgccagccagattgccacggcagtgaagtttctacagaattcccgggtccgccagagccc

SEQ ID NO: 791079 - DNA, 75 bp, Homo sapiens
caagagtgagcgagcggacccgcgatggagaatgctctcatcactcagtcaaggctaatgcttttggaatcagtg

SEQ ID NO: 791080 - DNA, 90 bp, Homo sapiens
caactgaaaaaccccttggaaatagtcagcatacctgatctctcaaaggccttggttctgacagaaattggccccaaacgtgaccctgcg

SEQ ID NO: 791081 - DNA, 75 bp, Homo sapiens
aaacaatagctcaaggaaacctttccaacacagatgtccaagctgccaagattccaccagtactgttgctgctct

SEQ ID NO: 791082 - DNA, 100 bp, Homo sapiens
tatagatattcagaagaaggatgctgttaaaagggtgctttcatgtatcatcattccacttgaggctcaaagcacaccaataacaagtacttgttcagaa

SEQ ID NO: 791083 - DNA, 100 bp, Homo sapiens
acagtagcagctggaaccatgacaggcatgttgtataaatgtacaggtgaactgtcacccctacaactcagcttgcaaccagccctggccaccagtttcc

SEQ ID NO: 791084 - DNA, 75 bp, Homo sapiens
cgagcacataacggggttcgggtgtctcgtgtgtgaacatcacagctctaagcgaaagacatgaggcctcagcct

SEQ ID NO: 791085 - DNA, 100 bp, Homo sapiens
cagcgcgtccaccgccctcagcagcgagcttgagtccagcagctttgtggactcggacgaggatggcagcacgagcagcttccgcaactttgacgtggag

SEQ ID NO: 791086 - DNA, 75 bp, Homo sapiens
tttgacgaccatgactccgtggataagattgtcagcatccgtgtcattctggaccttactcccaactaccggggt

SEQ ID NO: 791087 - DNA, 102 bp, Homo sapiens
gttcattttatgtgggaggatgttcagcagcgcggcagagtcatggggatggcccactgcgtgaccttggttcagctgtccatttcctgtgaccatctcatt

SEQ ID NO: 791088 - DNA, 116 bp, Homo sapiens
cggcgcctcggccggggcgctcacggccacggcgctggtcaccggggtctgcctgggtgagaagccctaccactgcaactgggacggctgcggctggaagtttgcgcgctcagacg

SEQ ID NO: 791089 - DNA, 98 bp, Homo sapiens
agctgctaacccgacccggattggcgctgaggtggcccgtggggcaggaagtgctggactccctggtcagcaatgtcaacattgagctgctcaatgcc

SEQ ID NO: 791090 - DNA, 97 bp, Homo sapiens
gccccgtgtcctgcaggtattgggagatccacagctaagacaccgggacctcctggaagccaaaaatgccggagcggttgcagggcacacattactc

SEQ ID NO: 791091 - DNA, 101 bp, Homo sapiens
ataaaaacttgcgccagagaaacacaaattaagtactgcttacaatatggagtgaaggtacctgagcgcaggaaccatggtcttcattgctgcctcagcat

SEQ ID NO: 791092 - DNA, 87 bp, Homo sapiens
ccaggatgtgagcaacacgggaccgacagcccacctgaggatattgaccataaggactcatatctcattacaagaagcatcatggcc

SEQ ID NO: 791093 - DNA, 90 bp, Homo sapiens
acggtggtcacagcagcattgaactgtgtggggaagggcatggacaagaagaaggcagccgagttcgtggatgagagctgaagaggtttg

SEQ ID NO: 791094 - DNA, 83 bp, Homo sapiens
gggagaggcacccgagacccacggagaccgcatcaatgtccgagttaccaccatggatgcagagctggagtttgcaatccagc

SEQ ID NO: 791095 - DNA, 96 bp, Homo sapiens
tcccagttagagcaaggagaagacccctggatggtggagagtggagttccccaaggcgcacatctcgatgtgactacccctgaatctacaaagaat

SEQ ID NO: 791096 - DNA, 88 bp, Homo sapiens
ctgatgcagcaggcatcatccgctatgcaattgggggctaccgacagaaggactatttcatcgccacccaggggccactggcacacac

SEQ ID NO: 791097 - DNA, 100 bp, Homo sapiens
aacagcggcgtttcacggtggcacatacatgtgggaagagattggtgaagtggatgaaaattatgcccctatccacacataccaagtatgcaaagtgatg

SEQ ID NO: 791098 - DNA, 124 bp, Homo sapiens
catacaaagaattttatacacagagacattaaaccagataacttcctaatgggtattgggcgtcactgtaataagagctggctttatgtgctggggcagaagagatccgatagctatgttctgc

SEQ ID NO: 791099 - DNA, 83 bp, Homo sapiens
ggtgtgttttacatacataacatgggaattgtgcaccgagatctgaaggaagctgatctggatgcagaattagaaaactgcca

SEQ ID NO: 791100 - DNA, 50 bp, Homo sapiens
agctgaatgcaacaaacattgagaaaaagatgctatggacgtatggtgca

SEQ ID NO: 791101 - DNA, 83 bp, Homo sapiens
gaaatcttccaagtccaaggatgtatgacagacaaccttctgtgccttcatcaagctggttgtgtacccaccatgtccctggc

SEQ ID NO: 791102 - DNA, 82 bp, Homo sapiens
gcccgcatgaaccgggtcctcagcttccacagcgtgtctgcaaattgtggctactaatttgccccctgaagatcaagatggc

SEQ ID NO: 791103 - DNA, 99 bp, Homo sapiens
ctaccctggaggagattctggggcagtatcaacggagtctccggggatggtgccatgacaatggtgtgaactacaagattggagagaagtgggaccgtc

SEQ ID NO: 791104 - DNA, 74 bp, Homo sapiens
gcaagatggcggcccatcaccggcagaacacagcagggcggaggaaagtgcagtctgtaggtatattgttagag

SEQ ID NO: 791105 - DNA, 100 bp, Homo sapiens
cgctctaagaatcaagaaaatggaccagtttgttcgttacgaggacctcagcagccatgtcgaagccccatagtgaagccgggactgccttcattcagac

SEQ ID NO: 791106 - DNA, 100 bp, Homo sapiens
gatcacatagctgaaatatcagctaagcttgtagcgataatggatagcttatttgacaagctgttatctaaggccaaactgttttcagatagtagttcag

SEQ ID NO: 791107 - DNA, 50 bp, Homo sapiens
ggaaattgtcccgaatccctgcagtgagaagctcttcatggagatggcag

SEQ ID NO: 791108 - DNA, 82 bp, Homo sapiens
agctgatgaagcttctgaaccatccacacatcataaagctttaccagaggacaaaagcatgtcttcccttcctgggtgcatt

SEQ ID NO: 791109 - DNA, 75 bp, Homo sapiens
cctccgcgagggcaccatggaggtgaatgcaggagaatgcagttgaaactaattttgtggatagagaaactgttg

SEQ ID NO: 791110 - DNA, 100 bp, Homo sapiens
cgctgttctgcttcctgctgctctgtctcagcgccgcctccctgcttcttaacagatctccagtctatgtgctgaagaagcagcagcccaagagcagaca

SEQ ID NO: 791111 - DNA, 53 bp, Homo sapiens
caccagctcctttataatgcatgtcagattctgttcattggagattcaaccaa

SEQ ID NO: 791112 - DNA, 78 bp, Homo sapiens
acctatgagacttcatctgtgtgagtttatgtggccgaggcagacaagtggaattaggccttgctgcaggggacttca

SEQ ID NO: 791113 - DNA, 90 bp, Homo sapiens
catactacctctggccccgagatcagaatgccgacatgaagccattattatatcaggaaccgaaatggccaagcatatccagaaagaaat

SEQ ID NO: 791114 - DNA, 100 bp, Homo sapiens
aagaagcctcaggaagctgtgtttgtcccagagtgtggcgaggatggctcctttacccagcgaaaccttgaaagccatttgatgtcccctgctgagattc

SEQ ID NO: 791115 - DNA, 51 bp, Homo sapiens
ggacgagactacagcttggatgaatttgaaattttactgcaggataaaact

SEQ ID NO: 791116 - DNA, 75 bp, Homo sapiens
ccgagtcgcgcggaggcggaggcttgggcatgactttgttcgacgagaccggccactacgtgtcctcattgacct

SEQ ID NO: 791117 - DNA, 50 bp, Homo sapiens
caaatttccttttccaactaaggttagctccattcagaaccaaatgcagt

SEQ ID NO: 791118 - DNA, 100 bp, Homo sapiens
cgtctaagaaacttggagaactccaggagcatgtatcccgtttggaaatcttttctcgagggaacaatgcaggtagcccagtctcggatgaatatatgtg

SEQ ID NO: 791119 - DNA, 100 bp, Homo sapiens
ccagacagagacacacggtcactgcagctgaagccgctgcccctgctacaggatctcaccctgtatcacctgggctgaagcgtagtgacgctatcacggc

SEQ ID NO: 791120 - DNA, 74 bp, Homo sapiens
aagcccctcggagcaggcctgccagaaatcagcgaggagctcaaggacctgatcctgaagatgttagacaagaa

SEQ ID NO: 791121 - DNA, 50 bp, Homo sapiens
cgcctctccaagaccatccctggctgctgtgtcctgggacaatttttggc

SEQ ID NO: 791122 - DNA, 78 bp, Homo sapiens
ctcaagatctcagagaaggaggaggtgaccacgcgcgaggaccatgaatggcacctacaacacctgtggctccagcga

SEQ ID NO: 791123 - DNA, 100 bp, Homo sapiens
gaccaaaagaggaagatagtcttgggacccttgcatggtgtttcaaagggtggtgaagaactaaggtagacgttacatccaagaggaaataatccaggca

SEQ ID NO: 791124 - DNA, 75 bp, Homo sapiens
agctgatggagccacacagaccagaacggcaggagcttgaagaaatccgcaaatgtgggatgaaaaacttccgta

SEQ ID NO: 791125 - DNA, 100 bp, Homo sapiens
aaaataatctagatattgatggctttgctgatgttctaatcatgtcagataaagatgatattgagactccactgctaactgaagcagcccccatccttga

SEQ ID NO: 791126 - DNA, 96 bp, Homo sapiens
ccggaactggagccgaggcgcaggtggcgctggccttgttgtcctcctggtgcgaagagctcggccgcctgctgctgctccgacatcagaagagcc

SEQ ID NO: 791127 - DNA, 83 bp, Homo sapiens
gccccagccagtaccagcgccgtgggggatatgagactttctactcggaatatcctgagtgttgcgtggatgtaaaacccatt

SEQ ID NO: 791128 - DNA, 90 bp, Homo sapiens
cttcgctcgtggatcgatacttcactcgctggtacaaaccggccctcccagctcttcactctgggggcctcggagcacagcccactcaag

SEQ ID NO: 791129 - DNA, 75 bp, Homo sapiens
agttgcttttggaatgaatttggaatcttcccttgaagaggtatccacaaattacccattatcaaaaacaaatag

SEQ ID NO: 791130 - DNA, 75 bp, Homo sapiens
gccctctcgaaggcaggacagcggtggcggcagattttaggtgatgggcaagtcagaaagtcagatggatataac

SEQ ID NO: 791131 - DNA, 74 bp, Homo sapiens
cttattaataggaataccactattccaaccaagaagagccaggaatgggtaccacagaccatgtcatcgtcctg

SEQ ID NO: 791132 - DNA, 83 bp, Homo sapiens
gataacgggaggtgaatttccatgtcaacatagtcctggtgaacacacagtgttcatcccctcaggaggacacagcttttgag

SEQ ID NO: 791133 - DNA, 82 bp, Homo sapiens
cccacaagcagatctactactcggacaagtacttcgacgaacactacgagtaccgcggagctggagtttgttcagatcatca

SEQ ID NO: 791134 - DNA, 101 bp, Homo sapiens
gcagagtgtttgaagatcatgtgtgaaatcctaagtggattgcagttgggagactttctcattaaggtgctgaaggtcgccatcctggctgagaagtacgc

SEQ ID NO: 791135 - DNA, 100 bp, Homo sapiens
cggctaacctgccccggcttcaggatttacacagacgtggggcgatgcttgtgaccctgcagctcctcaaattcacccatctcaggagcctggctggttg

SEQ ID NO: 791136 - DNA, 50 bp, Homo sapiens
ggacgcggcgctgctgaccgacatcgaagtggacggctgcattcatcggg

SEQ ID NO: 791137 - DNA, 75 bp, Homo sapiens
cgacgacatgtatgggccagaaaaggtggcggctttgaaatacatcccatctgtcctgcatgatgtagaaatggt

SEQ ID NO: 791138 - DNA, 100 bp, Homo sapiens
tcttgtcctggcattgcatccacaggaggggcaggaaattctttgaaggtgaagccaaaaaccttccctcttacccggggccgagcaagatgagggattg

SEQ ID NO: 791139 - DNA, 99 bp, Homo sapiens
ctgcgactccggagacagcccaaatatcctcggaagagcgctcccaggagaaacaaccttatgtttgatcatcggccaaggtcctggcgagaactgcct

SEQ ID NO: 791140 - DNA, 97 bp, Homo sapiens
cggctgtgggggccccactgagtatgtcggaggagagcgacatggacaaagccatcaagcctctgaagagccaatccattcaggatgggaaaccacg

SEQ ID NO: 791141 - DNA, 50 bp, Homo sapiens
atttaaacaagagatttccacagaagtcatattccagagagactctgtga

SEQ ID NO: 791142 - DNA, 71 bp, Homo sapiens
tggcccccagcggcttcctcggcctcccggcgcccttcagcgaggaagccctgggcgctgcctatggcaca

SEQ ID NO: 791143 - DNA, 83 bp, Homo sapiens
cagaatgaccctcgtttcattggaaactgcaatcatttggggaagaatctacagttgctgatggacagagtggatgaaatgag

SEQ ID NO: 791144 - DNA, 75 bp, Homo sapiens
gggccgacgagtccggaggggctgccgcgggaggctgctgacttgagtaaaccaatagataaaaggatatacaaa

SEQ ID NO: 791145 - DNA, 98 bp, Homo sapiens
tgatgcgtcttccatttgcaagggagcatgattgagcggatattagtgtcgtgcaacaaccagcaggatctgcaggaatgggtggagcacctacagaa

SEQ ID NO: 791146 - DNA, 100 bp, Homo sapiens
aattgtctctgccttggactatctacattccggaaagattgtgtaccgtgatctcaaggatcacctgctgttaccagctaccacccataacaagaccaca

SEQ ID NO: 791147 - DNA, 100 bp, Homo sapiens
cagaacgcagatcagaggtagtcggacctttcccgctggcgcgcagcctcagctagcacctgtgagaatatgaacttctcttggaggaatgaatgcaacc

SEQ ID NO: 791148 - DNA, 75 bp, Homo sapiens
gcaactcactttgttggagggatgtatagggaattttcaacgtccggttcatctaatacagacactggtaaagtt

SEQ ID NO: 791149 - DNA, 82 bp, Homo sapiens
aagcagccgatccagcctgcggagcctgtggggcagattttgcaagaacgaggctcaaggatgtgagggacacagtattgac

SEQ ID NO: 791150 - DNA, 100 bp, Homo sapiens
cgaggcgccgcgttggcgcttggacggcgggaaccggctccggagcgagaacgcgcgtacatgtcccagagcaagcacacggaggcccgggagctcatgt

SEQ ID NO: 791151 - DNA, 97 bp, Homo sapiens
ggcggcggcggctgctgctgctgctgcccgcgtccgaggctcgcgggcggcgggcccggcgttacatccttactattcaaagtgccatccacagacc

SEQ ID NO: 791152 - DNA, 73 bp, Homo sapiens
gtggtggacttggacacgtcccagctctctctgggcatctggaaaggttctggctccttggcagcaatggctg

SEQ ID NO: 791153 - DNA, 100 bp, Homo sapiens
acagggcgctcctgagaccctccagcgctgcctggaggagaatcaagagctccgagtggtcccaggctgcacccatggcagaaggaggagggcagaatca

SEQ ID NO: 791154 - DNA, 100 bp, Homo sapiens
cgccttctgcctggtcgggatcccgccccgcccggagccccggcccccacagacagaagatccaaccatggagcgaccctatacatttaaggactttctc

SEQ ID NO: 791155 - DNA, 90 bp, Homo sapiens
agcccaagaaacatctcaccaatttcaaatctgttaattggccttggtcctcacagctccaaaaagaaacaggatctcgataagctctat

SEQ ID NO: 791156 - DNA, 100 bp, Homo sapiens
gcggttaagtatgcggcgccaggagctaagccaacaaaatcctgcaccagcacctcggggcccctgaagagcggcttgctcttcacatcctcaggactca

SEQ ID NO: 791157 - DNA, 83 bp, Homo sapiens
acgcagaaggtgaaggtgctcacgggcacggtgtactaatggtcacttgatgtgcgctggctgttttatccacctactagcag

SEQ ID NO: 791158 - DNA, 51 bp, Homo sapiens
tgacaatctcatagacccaggaacatcgggtcagaagttgagatttccact

SEQ ID NO: 791159 - DNA, 75 bp, Homo sapiens
gaccaacgcaagaacatatgccagttcctcgtagagcatgttggcagataaattgaacatgactccagaagaagc

SEQ ID NO: 791160 - DNA, 97 bp, Homo sapiens
ttaccgccgacctttaaattttccactcagggaacattctggacgtgtgtttcggctccagtttgatgagtttcagatcatcagcagctcccatgat

SEQ ID NO: 791161 - DNA, 82 bp, Homo sapiens
aattaatgaatgcattgctcagctgaaagatttactgcctgaacatctgaaattgacaacatgaagacatcttatccatcct

SEQ ID NO: 791162 - DNA, 50 bp, Homo sapiens
cgcgcgcacccagcgcgtccccactggaacagcctgcttggacacagctc

SEQ ID NO: 791163 - DNA, 50 bp, Homo sapiens
taaagacggaaccgccacagcactcaagttttaaaatcaaagatgggaaa

SEQ ID NO: 791164 - DNA, 75 bp, Homo sapiens
ctgaagcctcagaaactgctggcagcggaaatatattcttccctctctcctgcctttatgaggaaactgatcatc

SEQ ID NO: 791165 - DNA, 88 bp, Homo sapiens
gctgctaaaaacaagactggggctgctcccatcattgatgtggtgcgatcgctgaaccttattcacagtgaaatcagtaatttagccg

SEQ ID NO: 791166 - DNA, 100 bp, Homo sapiens
ggcagcagcatctcagcccaagagaagaacagctttgctgagccatcaaggtctaatggaagcatggttcggcattcttcatctccatatgtagtatatc

SEQ ID NO: 791167 - DNA, 82 bp, Homo sapiens
ctgctgcaggccgagaagcgggcagccgagaaggtgtccgaggcccgcaaaacaaattgtggctactaatttgccccctgaa

SEQ ID NO: 791168 - DNA, 84 bp, Homo sapiens
tgggacaggccacgctgtccgtccgcagtaccgacgcctgcagactagacgcttgaagcaaagctgccatcccagaagacgaca

SEQ ID NO: 791169 - DNA, 90 bp, Homo sapiens
tactccttccttcctccccacccattcctttaaatccggagggggaaaaaatcccaaggtctgcaaagaaaggcctaaagaatgtatttg

SEQ ID NO: 791170 - DNA, 78 bp, Homo sapiens
gcagactggtgacttcacttttgagtgcaactgccttccagaaactggcgatggaatatgagaggagccctctggaaa

SEQ ID NO: 791171 - DNA, 100 bp, Homo sapiens
catcgggtgttctctactccagagctccgacttatttctgtgggcagacattaacattcaggttctgtacagagtaatgagatgtgtgacggctgcaaac

SEQ ID NO: 791172 - DNA, 100 bp, Homo sapiens
tctccaagggggacataatctactctcatcagccagttttcagtttacaggctggtaacctacatctttgtctacgagaatcccatctccctgctctgcg

SEQ ID NO: 791173 - DNA, 99 bp, Homo sapiens
gcctgggcagtgcccagagtgccctcttcttgcagcatggcctggccacccagagggcccttgtgtccaaggacaaaattcttctaagcagtggacgag

SEQ ID NO: 791174 - DNA, 83 bp, Homo sapiens
ctggagtacaccccgcagcacagccgcgacttcaagatcagggagcagagaaacatgaaggcacaggtcagtcctctgggatc

SEQ ID NO: 791175 - DNA, 75 bp, Homo sapiens
tggaggtgttgcagcccgggatcagctctctgttttggaaaatggagtgaatgattccaattgtgaccaagaact

SEQ ID NO: 791176 - DNA, 141 bp, Homo sapiens
gcatggcgaagtccccggagaactctaccctggaggagattctggggcagtatcaacggagtctccgggaatcaaaggcatgggaggttgatacctgccggggccattacaacaatgtatcttgtgccgtcttccaccctc

SEQ ID NO: 791177 - DNA, 75 bp, Homo sapiens
gctctgcggctggtccaggccttccagtacacagacgagcatggggaaggcctgtagtggtggagacacgcccag

SEQ ID NO: 791178 - DNA, 90 bp, Homo sapiens
catctcctggaaagatgtaaatctcccaagtccaaaggatgggatggaggtggataccacaccaacagttgctggacagtttgaggatgc

SEQ ID NO: 791179 - DNA, 90 bp, Homo sapiens
gttgtagacttgctaaaggagaagtctggtgtaatacaagatgctttaaagaaggtactaacttggttaagaaagctatatatgccatgg

SEQ ID NO: 791180 - DNA, 83 bp, Homo sapiens
cagagccaaaatcagagctggaacctgaggagagagcttaaagcttttcaagccaggccaagaagctgtgaagtaccagggtc

SEQ ID NO: 791181 - DNA, 82 bp, Homo sapiens
ctggaacggaagtgaggatcacctacagcggagctggagtttgttcagatcatcatcatcgtggtggtgatgatggtgatgg

SEQ ID NO: 791182 - DNA, 90 bp, Homo sapiens
gctgctgctgaggagaggagcgtcaacagcagcaccatggccaccctgaagggtcccttcccaagcccttagggaccgcagaggacttgg

SEQ ID NO: 791183 - DNA, 73 bp, Homo sapiens
ctccaaactcctctccaccagcgccaagaggttttatgctgggggctcagagagaagtggacagcagattgtt

SEQ ID NO: 791184 - DNA, 90 bp, Homo sapiens
cccaagcctggaagaactcgtcatgctctttgtagcgtggtgcttctgttgctcacaggaaggccgctgcttgtttgtcatcctgctcat

SEQ ID NO: 791185 - DNA, 100 bp, Homo sapiens
ggagaatcgttgtcagagccttactgaggacttggagtttcgcaaaagcatgtatgaagaggtgacataccgcgtagtccaggtgactgatggtcagctg

SEQ ID NO: 791186 - DNA, 75 bp, Homo sapiens
cggtaacatcgcagtgctgctcgcgggtctggctagtcaggcgaagtttgcagtgacgtttatcagatggagaag

SEQ ID NO: 791187 - DNA, 100 bp, Homo sapiens
attggcatgttctgtttcacagggctaaagcctgaacaggttactggtaaaaagctactagaaaggggggaactgaaacgtcgatacactataattccac

SEQ ID NO: 791188 - DNA, 98 bp, Homo sapiens
ctaagggcaatgagaatgctaatggagcccctgccatcacactgctaatacgagaaaaggtatgttcgcaattcgtgctgatcatgattttgtagtac

SEQ ID NO: 791189 - DNA, 51 bp, Homo sapiens
aatgccatagctattacaaataggtgtggcgaaatcttgtttgagaacccc

SEQ ID NO: 791190 - DNA, 50 bp, Homo sapiens
aggggtctgagtctcacagcttgtaaagacgaaggggaggaccaggctgg

SEQ ID NO: 791191 - DNA, 82 bp, Homo sapiens
cccagcaacaacggggaagtcacccagcccccaaggattctgggggaggcctcaggaactgtggctgcaccatctgtcttca

SEQ ID NO: 791192 - DNA, 75 bp, Homo sapiens
tgcatcggtcggctcaggacttacggaaacaggattttttatcaagcagaaatgcatcgaacaacgagaatcaag

SEQ ID NO: 791193 - DNA, 100 bp, Homo sapiens
gacatttacgcggatgtcggcgaagagttcaaccagggatggagcctatagaggtgcctcttgaggaaaatagtgaacggactcagattcgccaaagcag

SEQ ID NO: 791194 - DNA, 75 bp, Homo sapiens
atcacggagatgtacaagagcaacaactatttgggtactactcagtcctctatccactggagaggaaaatatctg

SEQ ID NO: 791195 - DNA, 82 bp, Homo sapiens
agatctttcattccatccaaggcagtgaaaaactatcacattaacaattgcagagatacaatcttgcttgaccgtttgggac

SEQ ID NO: 791196 - DNA, 87 bp, Homo sapiens
caaaaggtgatctggacaaaggaacaggtatctcagttacaggtttatgataatggatcgctttgggagtgaccttcagaaaatata

SEQ ID NO: 791197 - DNA, 102 bp, Homo sapiens
gggcggctctgcgctggccgggggcgcgggcggcggcgccggcaggaagggtatcagcatggaagccatgagtgagaataaaatggtgccctctgagtttag

SEQ ID NO: 791198 - DNA, 95 bp, Homo sapiens
ttgtatctcagttaaagaagatgaagaagtcttcaggggagattgtctactgtgggcaggttaaaatctggtttcagaaccgcagagcaaaggag

SEQ ID NO: 791199 - DNA, 75 bp, Homo sapiens
gaaacaaagttattttgctcgacaagttggatggcttgaggactggtactaaaaggaaacgtgactgggaggcca

SEQ ID NO: 791200 - DNA, 75 bp, Homo sapiens
gcggccgccgccttcttcctccatggttagcatggcctcattgaaagaactagatcaaagactctttgaaaatta

SEQ ID NO: 791201 - DNA, 98 bp, Homo sapiens
ggggatcggttgaatttgcgatgggttctgtcttttggcatgtgctcttctgcattagtgctcaacatcctggtggatacaggcagcagtaactttgc

SEQ ID NO: 791202 - DNA, 50 bp, Homo sapiens
agaagctttacctcgctgaccctatgaagttactaaaagatgtaactgaa

SEQ ID NO: 791203 - DNA, 100 bp, Homo sapiens
ccggcggcggcgcgcagcgtgtcaggcggagagacccgccgccaggtgactccccggacagctcaacaccaaagctttcgcgggcacagcggccgcagtc

SEQ ID NO: 791204 - DNA, 51 bp, Homo sapiens
caacaacatccgcgagatcgagattgacaagtatctctatgccatgcggct

SEQ ID NO: 791205 - DNA, 75 bp, Homo sapiens
ccttctgataacctgcttcattattgttatgtacactgctatcttaaggattggatagctttagtcaaagcagct

SEQ ID NO: 791206 - DNA, 95 bp, Homo sapiens
cgttattgtctttttggagacacagtgaacactgcttctcgaatggagtctaatggtcaaggtttggaacaaactctcccttcacttgttgccct

SEQ ID NO: 791207 - DNA, 75 bp, Homo sapiens
ctcccaaacttcatgtagataaaggatttgtgaacatcttaatgactaggaattactctgcttaatgtaagcaag

SEQ ID NO: 791208 - DNA, 99 bp, Homo sapiens
ggatgacaaccgtacccggctgtaccggcagatcctcaggggcaagtacagttactctggggagtgggttgccagcgttgatgtggtggagaatgaaga

SEQ ID NO: 791209 - DNA, 83 bp, Homo sapiens
cttgttccgaggcggccccagagaatttgttcctagagacagagaacccaatacaaaagtgagaacatgtatgcataatcaga

SEQ ID NO: 791210 - DNA, 100 bp, Homo sapiens
ggactggttcttggctgcccaccttccccaggcccacggccacatctctgtcaagctcttcacccagatcttcggggtcggtgtgaagactgctgaccgg

SEQ ID NO: 791211 - DNA, 58 bp, Homo sapiens
gctttcccccgagggtcaacgagaaagagatcggtggatcttcttgttccaaccaaag

SEQ ID NO: 791212 - DNA, 80 bp, Homo sapiens
ccaagacaccccttgaccagcacacactgcaaggagatcagcttgcactttccagtgacaagattgctgcattacgaatg

SEQ ID NO: 791213 - DNA, 58 bp, Homo sapiens
ctggtctttcattcactgtccagggtcatcatcaaatccacagcaaatttccagtttt

SEQ ID NO: 791214 - DNA, 75 bp, Homo sapiens
tacactggtgacatgtagctgtattcagaggatcttaaatgtatttcggcattgggttgaacatcatttttatga

SEQ ID NO: 791215 - DNA, 85 bp, Homo sapiens
ggaaccgcttactacagaaggggtttttgtatgaatatgcaagaaggcatcctgattactctgtcgtgctgctgctgagacttgc

SEQ ID NO: 791216 - DNA, 100 bp, Homo sapiens
ccacctggaactgcaggagacatgggaccaccaggtcgtctggtccagaggtgtccttctaaagctggtagaggtttcacgagtcatcagggacccagaa

SEQ ID NO: 791217 - DNA, 74 bp, Homo sapiens
gcccctattgtaagtgcagatggaacacaacaggaatgtcgttgtctgctgggtcttcccctcttcattccccc

SEQ ID NO: 791218 - DNA, 82 bp, Homo sapiens
ggggtcggcgccgagtgggaggatggcggaagtattgatgtcaagctgaaccatcgtaggaagttgaaagccttagaaagag

SEQ ID NO: 791219 - DNA, 50 bp, Homo sapiens
caggaggagcaagtggcacgtcttcgggtaagaatgattgatgttggctg

SEQ ID NO: 791220 - DNA, 75 bp, Homo sapiens
ccgacgagcgctgcactaacgcaggatccggctgccgaaggtcctcgccaggaagctactctttgtccgtgcgag

SEQ ID NO: 791221 - DNA, 52 bp, Homo sapiens
ccagaattcaattaaagtggctcaggttggaaaagagactgttcaaaccact

SEQ ID NO: 791222 - DNA, 100 bp, Homo sapiens
gcgtacagtcaaggaggcggcaaaaaaaaagtctgctactactacgacggtgctggagaatctggtaaaagcaccattgtgaagcagatgaggatcctgc

SEQ ID NO: 791223 - DNA, 51 bp, Homo sapiens
caccaacaaagatgcctatacttgtgcaagaaatgtggctttagataatct

SEQ ID NO: 791224 - DNA, 75 bp, Homo sapiens
gctggccacggacgccgacatcatcagccgctgccaggagtggagtcaacatatcaatggagcaagtcacagtcg

SEQ ID NO: 791225 - DNA, 100 bp, Homo sapiens
tccaagtctcttaaggagcgattaggcatgtcagctgatccagataatgaggatgcaacaggtgaccttatatccagctgtgaaaagtctgctgcaggag

SEQ ID NO: 791226 - DNA, 90 bp, Homo sapiens
ctgactgctgccatggggctcaagacccggtgtggaggcaagctgggcttcctggcccgaaaacagtgttacaccagaagagcagccggc

SEQ ID NO: 791227 - DNA, 100 bp, Homo sapiens
caaaaaggatcagtatttcttagacaagaagatggtcacgaaacctgtccagtttaagtcgtcttggtctgagatataacagactgtcagcaatacccag

SEQ ID NO: 791228 - DNA, 100 bp, Homo sapiens
ccatggggtgaaggaccttgaaggggatggcttggcagatgtggctgtgggggctgagagccagatgatcgtgctgaggcagctgcattcagcctcagcg

SEQ ID NO: 791229 - DNA, 75 bp, Homo sapiens
acaagtgaaattgaggtcacaccttcagtccttcgagcaagtatttataacagcaatgatgtagcagtatcgttt

SEQ ID NO: 791230 - DNA, 102 bp, Homo sapiens
cagaagccgggagaaattgctgaagaactcgcaagctcctacgaaagaaagctcatcgagggcctgatcaagatccggggggaccggtgctggcgagacctc

SEQ ID NO: 791231 - DNA, 75 bp, Homo sapiens
ggccaacacggtcttgctgaaagccagggaaggttccaccctatggtggattcttctacatcacgcttggaattc

SEQ ID NO: 791232 - DNA, 100 bp, Homo sapiens
cccgtcgttgctgccgggattttggaggccggggccgcgctgagggcgcccagctggctcaggtggccttccttcagggagagaggaaagggcaggagaa

SEQ ID NO: 791233 - DNA, 82 bp, Homo sapiens
gcgctgctcgccgacaaggctgcacaacagcagaaaggacccaggagcgataacagtaaatcaaataagatatttgtcggtg

SEQ ID NO: 791234 - DNA, 97 bp, Homo sapiens
gaagcaggggctatcgagcgggtcctgagggattacagcgacaaggctggatcctcattgaccgctgtgggaagcactttggtacgatactcaacta

SEQ ID NO: 791235 - DNA, 100 bp, Homo sapiens
gtattggtcttaaaacagtaattggagaacttcctccagcttccagtgatctatgatcgaattctgtcaatttcctctcaagagggtgagacgattgaat

SEQ ID NO: 791236 - DNA, 50 bp, Homo sapiens
gctcaaggagcacaacgggcaggtgacagaaggcagacggtaacaagtac

SEQ ID NO: 791237 - DNA, 100 bp, Homo sapiens
ggatcttctgccgcaccaggctcatcctgtccatcgtgtgcctgatgatcacgcagctggctggcttcagtggaccagagactacacagacttctattcc

SEQ ID NO: 791238 - DNA, 100 bp, Homo sapiens
ttgctgcctctgtgtacgctgaggggggagagtctcattctattgcccatgctggagtgcagtggcaacagcgtgcagtgagtgatcccggctctctgca

SEQ ID NO: 791239 - DNA, 75 bp, Homo sapiens
tgacagttcaagagcctccaaggattgaagcagaaggctcgtccactgcctcttcaggaagccaactagccgaag

SEQ ID NO: 791240 - DNA, 100 bp, Homo sapiens
gctgttttgccggaggagcccctcaggccgtgtgggcagaagaaaaagctagtgatcaacagtggcaatggagctgtggaggacagaaagccaagtggac

SEQ ID NO: 791241 - DNA, 98 bp, Homo sapiens
ctgggctcctgggccgctcccgggccagcgagggctgcgaaagaagttgtaggtccagcccagaatcaaatgcaggttccatctggatatggattgca

SEQ ID NO: 791242 - DNA, 75 bp, Homo sapiens
cccagtgcatggcgctcaagtctgtgcgccgtctctggggaacaagactcatggaggaaagcagcactaaccgag

SEQ ID NO: 791243 - DNA, 82 bp, Homo sapiens
aaagattatttgccagggtttcactggcaaacaggcctgacggagatggcggtcttcagttgtgaggcccacaatgacaaag

SEQ ID NO: 791244 - DNA, 78 bp, Homo sapiens
ttgccaaagctgtgtgaggaggaggaggaagtgagaggaggaggtggaagtgatagagggcaccctgcagtgcccgga

SEQ ID NO: 791245 - DNA, 50 bp, Homo sapiens
gcaaggtgctgctcttcgtctcagaaaattgtacaagctggagataagga

SEQ ID NO: 791246 - DNA, 100 bp, Homo sapiens
gttgccccgatttctgacatcattgcaatcaagtcacctgacacatttgtgagaactatttatgcagtggtctcacgtgtgaaacatggctacagattgg

SEQ ID NO: 791247 - DNA, 130 bp, Homo sapiens
ctttactactgtccgacacggagcctcatttactgaacagtggacagatggttatgcttttcagaatcttatcaagcatgaattgctggaggaagcccggagacaaggtttaccttttgcccaatgggac

SEQ ID NO: 791248 - DNA, 82 bp, Homo sapiens
cctgaagaaggtcagtgtgcttgcttggagatcaggacgcaaagggctagtcgttggatttatcctaaccattgcaaatttc

SEQ ID NO: 791249 - DNA, 75 bp, Homo sapiens
aagagaaagaggagcggaagaaacagcaggaggtgatctgtgaaaatggttcgctattcacttgacccggagaac

SEQ ID NO: 791250 - DNA, 101 bp, Homo sapiens
gccctgggggcctttttttaaaaaacaaaaaccacaaaaattcccaaaccatacttgctaaaaattctgcctgtgccctgggaatggcaccacaaaggaag

SEQ ID NO: 791251 - DNA, 96 bp, Homo sapiens
agccaagcttccatgctcccgagcccaaagcccactacgagcctgctgaccgagcgcgagagggaggaagagatagtcgctctggatcacccatgg

SEQ ID NO: 791252 - DNA, 75 bp, Homo sapiens
gaacagcagtcaaaatggagctgatgaccaaaggttcgatacaagaggctgttttcctagcgtggcttgctgcct

SEQ ID NO: 791253 - DNA, 50 bp, Homo sapiens
aaaatgtgatgcatgtctcagtgatgaagttgcggagaataatgaacatg

SEQ ID NO: 791254 - DNA, 76 bp, Homo sapiens
ggcaatgcctcgcgggcgcaatgaatccgcggcagtggaagatagatgataagcctgtaaaaattgacaagtggga

SEQ ID NO: 791255 - DNA, 98 bp, Homo sapiens
gagaggggagcgccgcggggagcgccgcgggaagcgcatgaaaacaaccctttttgctgcacatgtaagtggagctgtgcttacctttggtatgggct

SEQ ID NO: 791256 - DNA, 100 bp, Homo sapiens
atgacgcaggtgcaggtgtctcttctcgccctggcggggaagagcccccctccatgcgcctgaaggcccgacccagcagccctggcttttccgtgcttac

SEQ ID NO: 791257 - DNA, 100 bp, Homo sapiens
ttatatcgcatcctatggctcaaagaaagatgattatgtgtaatcctgagagattcacatggtgttgcacaagtacgttttgtgacaggcaataaaattt

SEQ ID NO: 791258 - DNA, 83 bp, Homo sapiens
atcagacaccgcaatgaaaaaaggggagacactgcgaaagcaaaccgaggagacttatgaaaatatgcatcagtttaatactg

SEQ ID NO: 791259 - DNA, 99 bp, Homo sapiens
cacccggcaactcagaaacatcaggtccaaggccccttcacagatgtagtcactacaaatcttaaattgcgaaatccatcggatagaaaagtgtgtttc

SEQ ID NO: 791260 - DNA, 89 bp, Homo sapiens
cagattcgcagtggtcgcttcttctccttggtaatgtttgaaacttaccagttttccggtgtatatgtagccatccaggcagttctgac

SEQ ID NO: 791261 - DNA, 98 bp, Homo sapiens
ggtgatgcaagaagtttctaggaaaggccggacaccagagataatcattcaggtcttcgtgagctaaggccaaacaaacaaaaaacacttgctttgat

SEQ ID NO: 791262 - DNA, 83 bp, Homo sapiens
ctgcccttcgccaaggagatcgtctctctcatcgaggcccaaaccgccaagcttttcggagactgggaagcccaactgcgaag

SEQ ID NO: 791263 - DNA, 90 bp, Homo sapiens
gtccagccagggtcctgggccgcgacctggttctcccggagtctacaaacatccagtcatggataaaaatgagctggttcagaaggccaa

SEQ ID NO: 791264 - DNA, 100 bp, Homo sapiens
ggctcatcgagaaggcgtctgcgagaccatggagaacggacaatgcagatcttcgtgaagactctgactggtaagaccatcaccctcgaggttgagccca

SEQ ID NO: 791265 - DNA, 83 bp, Homo sapiens
ggctggagccctgcattcgcggcgtgtgcagttatttctcaaactctgaggctgcggagttcacacattgaaatctgtcatct

SEQ ID NO: 791266 - DNA, 83 bp, Homo sapiens
cgcctcccggctctcgtcagcctcccgccggccgtctccttaacaccgaacaccgggaggtcatcaaggcttgggacattgcc

SEQ ID NO: 791267 - DNA, 99 bp, Homo sapiens
cgccgcgccaggccgggcgggcggcagaggtggaggagacactgaagcgactgcagagccagaagggagtgcagggaatcatcgtcgtgaacacagaag

SEQ ID NO: 791268 - DNA, 75 bp, Homo sapiens
cgtctcgctctgggtctccaggcccgcgaccgtccgccagtcgtcccgagccgcggcgagtcctttgcacatgtt

SEQ ID NO: 791269 - DNA, 98 bp, Homo sapiens
agaagcaagaatgctgtgccgacttcttcaaagattcaaagttgtcaaggccataggaaaaggatacagagtagagtttcatgaacctgaaacttggt

SEQ ID NO: 791270 - DNA, 125 bp, Homo sapiens
ggaatgttcactggagtttgcattgtcttggctgttgagtgaagaaaaagagcaggaagtcattacatgtctcggaagggtgctgacctggaccgggagaagaaggctgccgagtgcaaggtgga

SEQ ID NO: 791271 - DNA, 90 bp, Homo sapiens
gctgacgatccgttggtgcatgaaagtcttctaaccattccaaaatctctttcagttcccagtgacctgacagcagaggagcgtcaagaa

SEQ ID NO: 791272 - DNA, 100 bp, Homo sapiens
agctgcctcagttcttagcgcagatgtcagtattgaatatggtggtgaggcgtgaccctggcaacactgaacctgtgaaagccaaggaagagctcatatt

SEQ ID NO: 791273 - DNA, 100 bp, Homo sapiens
aaatagacaccatgctggtcttggaaggcagtggaaacctggtgctatacacaggagtggttcgggttttcaagatggcagcatctatgcatggtcagcc

SEQ ID NO: 791274 - DNA, 49 bp, Homo sapiens
gccagcgccccatcctgagccggtgttactgcggaaatgcaaaacttag

SEQ ID NO: 791275 - DNA, 75 bp, Homo sapiens
aagctacccttggggcatctgatcctaattcccttgctgatgatattgttggtgagtttgtaagtgatgcccttc

SEQ ID NO: 791276 - DNA, 82 bp, Homo sapiens
ggcggcttcctatgctatctctcttccgaggttctcacagagttcagcgtggtgatggtggatgaggcacacgaaaggaccc

SEQ ID NO: 791277 - DNA, 98 bp, Homo sapiens
tgccgccatacgcgctctccctgtttagggaaggacatggagcccaacggcccgtcgctgcccagggatgaagggcccccgaccccaagctctgccac

SEQ ID NO: 791278 - DNA, 100 bp, Homo sapiens
ggcgaccccaaccagaccatccgggaacccaagacagaccaggatgaggagcattgccggaaagtcaacgagtatctgaacaaccccccgatgcctgggg

SEQ ID NO: 791279 - DNA, 100 bp, Homo sapiens
tattttactaagcccctaaaatgtcgagatttgtacaagacagatgtgctggtgctgagctgtgatctgataacagacgttgccttacatgaggttgtgg

SEQ ID NO: 791280 - DNA, 75 bp, Homo sapiens
ccggcgtgaacaggagcttcatcgctcttggtgctggagaatctggtaaaagcaccattgtgaagcagatgagga

SEQ ID NO: 791281 - DNA, 80 bp, Homo sapiens
acaagcccagcaacaccaaggtggacaagaaagttggaatggttccccaaggtgaggccaactttgctccatctctaagc

SEQ ID NO: 791282 - DNA, 90 bp, Homo sapiens
gagcctaggcttagtcctagccctgcactgaaggaatggaagttggatacactttgtgacttgtacgagacactgaccattacacaggct

SEQ ID NO: 791283 - DNA, 83 bp, Homo sapiens
cgccatgctccaaacaacttggcctcagcatggacaccacgttgctgaaaacatgctttgggactgccactgaatttatcttt

SEQ ID NO: 791284 - DNA, 90 bp, Homo sapiens
gcatggatatggatgaagatgacgacttttctaaatggaacttctactacagccctcagtcctcccacctttgaaacggagctggtcgca

SEQ ID NO: 791285 - DNA, 75 bp, Homo sapiens
tagattggcctccagggcagacagcagcgcatcagagcagagtgacgatgatcctgtttgtcctggagctggagt

SEQ ID NO: 791286 - DNA, 100 bp, Homo sapiens
ggcgctcaccatgttccctggaggctgaggccgcggaaggagcagggcacatacgccctgtccctcatctatgggaagacggtgtaccactacctcatca

SEQ ID NO: 791287 - DNA, 96 bp, Homo sapiens
tggacctgttccgactctacgtctgcgtcaaagagatcgggggtttggcccaggtttacatcctcagcaaggaggaaggtggccgccacaagccct

SEQ ID NO: 791288 - DNA, 100 bp, Homo sapiens
cccatggttgccggctcccctctcaggacaacccagatgtgcaacaaagtgcgatggggatcctcttggtgtatgacatcaccaaccgctggtcctttga

SEQ ID NO: 791289 - DNA, 90 bp, Homo sapiens
gacatgagcaagaaaagcctctgggagcagaagggaggctccaagacctcatcaacaattaaggttaatttggagtggcccctggagtca

SEQ ID NO: 791290 - DNA, 50 bp, Homo sapiens
aaagggcacgcagcaactcaaccagtgggcttatctaaatcagatcccaa

SEQ ID NO: 791291 - DNA, 90 bp, Homo sapiens
aaacaattatgaggtggaatacttgtgtgactacaaggtagtaaagccctttctaaggcacaaaatgatgtgatggaaatgaagatgcag

SEQ ID NO: 791292 - DNA, 100 bp, Homo sapiens
attccagtgactagtaatggagaagttgatgactctcgtgaacatagctttaataggggtgaatttgtaaatgaatacgtcggtgaattaattgatgaag

SEQ ID NO: 791293 - DNA, 74 bp, Homo sapiens
attgttgaaggaaatcatcttggtggatgatttcagctcaaatggtatgagactgagagaggaatacgtctaac

SEQ ID NO: 791294 - DNA, 98 bp, Homo sapiens
acatcctcctggccaccgactcctacaagttgattatggaagattcccacaagagtaccacgtcagagacagcacctcaacctggttcagcagttcag

SEQ ID NO: 791295 - DNA, 98 bp, Homo sapiens
gaaacccttccagctcgatctgctcttcgtctgcttcttcctcttcagtcaagagaggagctctaaattgggaagtaatgcaggaaacaagccttgta

SEQ ID NO: 791296 - DNA, 98 bp, Homo sapiens
tgggagccctcacgagtcccgcatttaaatcaaacggtattgagatggattgggttatgaaacataatggtccaaatgacgctagtgatgggacagta

SEQ ID NO: 791297 - DNA, 95 bp, Homo sapiens
ccgtttccctaaactgctcttgctcatgtgttcgagaacttgtcttggacaattgcaaatcaaatgatggaaaaattgagggcttaacagctgaa

SEQ ID NO: 791298 - DNA, 136 bp, Homo sapiens
gtggctgctgggtttgaacggaatgctggagtcagtggaagacggagctggtcggcccgaaggtactccaaagattcaggtttactcacgtcatccagcagagaatggaaagtcaaatttcctgaattgctatgtg

SEQ ID NO: 791299 - DNA, 100 bp, Homo sapiens
gcaacgtcggggacggctgcgcgggacggctctgtaggaaggaacttggttccccctccctcagcttccgccccaaaagacggttgatgatgaagcgccg

SEQ ID NO: 791300 - DNA, 101 bp, Homo sapiens
cgcgccggagggaataggaaagcttggttacaacccgggacacccggttgcccccaagtttcctggcagtgtgtgatactgaggaggtgagcttgtttctg

SEQ ID NO: 791301 - DNA, 75 bp, Homo sapiens
tctcctccttcttcctcaactatctcgctgacacgcagccactgaggcggctcccagctgcgttggcgacatggc

SEQ ID NO: 791302 - DNA, 60 bp, Homo sapiens
ctggtctcgaactcccgacctcagtgcacttcagaaggagatcacaacgcgttatcaact

SEQ ID NO: 791303 - DNA, 98 bp, Homo sapiens
tacaaagccaaaatggagtatgcaaagttgatgtctattctcctggagacaaccaagcccaggactggaaaatgtgctcaatggtgcccaggctggag

SEQ ID NO: 791304 - DNA, 90 bp, Homo sapiens
ccgccgagtcgcgcggaggcggaggcttggggaattgaatgatctggcacgggaccctccagcacagtgttcagcaggtcctgttggaga

SEQ ID NO: 791305 - DNA, 50 bp, Homo sapiens
actactctttccaaatgagtgagaattacttactgtcatctacctttcca

SEQ ID NO: 791306 - DNA, 90 bp, Homo sapiens
gaacaaagtcgttatcctcctcactctgtccagtatacatttcccaacacccgccaccagcaggaagagagaagggcacagttacctaag

SEQ ID NO: 791307 - DNA, 98 bp, Homo sapiens
ttcaaagtactcaagatgaatttgaggatgttgagaaagaactggagatgcagatcagcatgaggcaggagatggaattggctatgaagatgctggag

SEQ ID NO: 791308 - DNA, 82 bp, Homo sapiens
caagagggtgttcgactgctagagccgagcgaagctgcctccggagccagcgtggtggccatagacaacaagatcgaacagg

SEQ ID NO: 791309 - DNA, 102 bp, Homo sapiens
cggcaaggggacccagtgcgcccgcatcgtcgagacagagtcaagcggaacatcctggccatgggcgagaagacgggtatgaccaggaacccccatttcagc

SEQ ID NO: 791310 - DNA, 100 bp, Homo sapiens
cagaggcgacctccccgcgttccatgcgcacagggacaggggacctgaaggagaagaaggagaaggtggaggagaaggcaagccggaaagagcgaaagaa

SEQ ID NO: 791311 - DNA, 75 bp, Homo sapiens
cagtcatgtctgcaggtccgaggggatttttgacatcttgtgaagcagaactacaggagctcatgaaacagattg

SEQ ID NO: 791312 - DNA, 100 bp, Homo sapiens
aggacctggaggccatccggctgcgggaggaggccatcctgcagatggaggtttttagaacttcagccataaaaatgggcagaattttccttgatcatat

SEQ ID NO: 791313 - DNA, 75 bp, Homo sapiens
atgaaacacttttcccgtgtcgtttgagtgcatcttctcaacaaccctaggagtgggctcgggatgagtttgaag

SEQ ID NO: 791314 - DNA, 98 bp, Homo sapiens
gtgttcgcagctgcttccaacagcaatcatttggggaagaatctacagttgctgatggacagagtggatgaaatgagccaagatatagttaaatacaa

SEQ ID NO: 791315 - DNA, 100 bp, Homo sapiens
tggagtgaaccggagaccccgaaaacggaagcgcagggagaaggaagaggtgtttgaaaagtgtgcaacttgctttggtgtttgctgttttattgccaca

SEQ ID NO: 791316 - DNA, 100 bp, Homo sapiens
gcagcaatgaccttccctcgggaattccacctctgcgtttttccctccaggtttgggtacccagaccccacctacctgacccgggtgcaagaggagctga

SEQ ID NO: 791317 - DNA, 82 bp, Homo sapiens
gggggcggcgtgcggcctagcgtctcagctccttccgcttccagccgttcgagtcctatgactccaggccctgcctgccgga

SEQ ID NO: 791318 - DNA, 48 bp, Homo sapiens
gcgaagctgccaaagccttagacaacctgtgccatatttcgggaggct

SEQ ID NO: 791319 - DNA, 83 bp, Homo sapiens
gcatccacattgcacataaagttgtttcagaagaggagccccgccgaggcatgagggccgtgctccccccagaggaagggatg

SEQ ID NO: 791320 - DNA, 100 bp, Homo sapiens
ctcagagctaggaaaaaagctgaaggcaactatggatgctgggaaactggggtgtcgccatccagatgtgttggaagcttcccctcctgccttatgctca

SEQ ID NO: 791321 - DNA, 100 bp, Homo sapiens
aggggctgggttagcaaaaggcttttaaagccatatacaggagtaaacatggaagtactaacttcattccagaacaatttttggatgacttcattgatct

SEQ ID NO: 791322 - DNA, 98 bp, Homo sapiens
tagagttagacctaccagagaaatcttagagtttcccgcaagggatgtttatgttccaaacactacttacagatccaggatgagaagactgataaaag

SEQ ID NO: 791323 - DNA, 129 bp, Homo sapiens
agaagatcggcttgaaattaccaactgctttcctttccctcagcacacagaggatgatgctgactttgatgaaggtctgctgagaacagacccagtccctgaggaaggagaagatgttgctgccacgat

SEQ ID NO: 791324 - DNA, 89 bp, Homo sapiens
gttaaggattccaagtaactcttatttgagggccatccgcgtacgcagccactccatggagaccatggtgggcggccagaagaagtcgc

SEQ ID NO: 791325 - DNA, 82 bp, Homo sapiens
agagggccccgctgggctggccctgcagggaccatggaatccagagctgaatcagacctattgtgaccgcctggtgcaggac

SEQ ID NO: 791326 - DNA, 96 bp, Homo sapiens
gtgaagcaaaagcctttcatgattatgtacccttgagggattcaaggtggagacagcagatctgaaggaggtgctggccgggaaggaggattccga

SEQ ID NO: 791327 - DNA, 98 bp, Homo sapiens
ggagattctggggcagtatcaacggagtctccgggtgtggcttcctgttgtggtgcatggccccgagcccttctaatggggctgaactgctctacaag

SEQ ID NO: 791328 - DNA, 100 bp, Homo sapiens
aagaagtgcatcttctgtcaaagatcggtgccgactgatgaaggatacttgcaacacaggcattggaggtgatccttttaatggaacagattttattgac

SEQ ID NO: 791329 - DNA, 100 bp, Homo sapiens
ggcctgtcaggccatggggaacctctaccatgacacatgcttcacctgtgcagcttgcaaactgcatgtccaaggagctatacatttgctagaaggggat

SEQ ID NO: 791330 - DNA, 75 bp, Homo sapiens
caaagaccaagtagatggagttctcagaattcaactagagggcagccttgtggatggccccgaagcaagcctgat

SEQ ID NO: 791331 - DNA, 100 bp, Homo sapiens
cctctctgcaagtgaataggcccagaaaggtgagagcaagccctggaggttcactctttcaagaagtcgtgtgctgaggtgtaatgctacacaagtcaga

SEQ ID NO: 791332 - DNA, 95 bp, Homo sapiens
aaacagatatacagatgtggagaaggtactctttgagcacatcaaattcttccattgccgctcttctctgtgccctttatccgcacttcccagct

SEQ ID NO: 791333 - DNA, 80 bp, Homo sapiens
ggtagaagatctagaaaggagagttgcatcagcaagtttgcaagtgaaggtgtgaaagctgtggagccgttttccattct

SEQ ID NO: 791334 - DNA, 75 bp, Homo sapiens
tcaaggatatttatctaaaaattcttcttttgagtgccagtaaagactaaatgtgttaaatgggcttgccaacaa

SEQ ID NO: 791335 - DNA, 100 bp, Homo sapiens
caatgatttataccatgaaatgattgaatctggtgttatcaacttaaaagatgccacctctaaggaagcccgaaagatgagatcaatacaggaaaccctg

SEQ ID NO: 791336 - DNA, 96 bp, Homo sapiens
gaacagttgcagggtcacagaaacatcgttatctgaaaaactgcaagacacagagaatgaagccatgtccaagattgtggaactggaaaagcaact

SEQ ID NO: 791337 - DNA, 112 bp, Homo sapiens
ctttgtcttacttgtcatttgaaggtgcaactaaaagaaacagaccaaatgtgcagctccatttatcttaaagaaattggacagcatatgaagacaggacatcacatatgaa

SEQ ID NO: 791338 - DNA, 100 bp, Homo sapiens
gcaagactgggtcattgacgattgcattggtaactggtggagaccaaattttgaacctcctcagacattccactgcccttctcccaaaaagatgtctttt

SEQ ID NO: 791339 - DNA, 50 bp, Homo sapiens
ttagacttgagtgatgccgaagtgtgcacttcagaaggagatcacaacgc

SEQ ID NO: 791340 - DNA, 96 bp, Homo sapiens
tcctacctcttgcatcgtacacaacagaacatcttacatgaggaagaaggcagggaagaaggagaaagggccaacccctgaagaagcaatacagaa

SEQ ID NO: 791341 - DNA, 82 bp, Homo sapiens
cagacaggaacctatgtcactttcaagaggatacgaagcgttttcggcttcctgcccggagctgtgcagcaaacagtcgacc

SEQ ID NO: 791342 - DNA, 100 bp, Homo sapiens
gtggaatcgtagatatggccagtagtaccttccaaggcattcagagatcccaattttgttcgtacttttcttaccacatatcgttcattttgtaaaccac

SEQ ID NO: 791343 - DNA, 83 bp, Homo sapiens
ctggattgcaacatagaaatacaaaatattgccattgaactgaccaaacctcagtttcaggaccaatgccacttgttcttcag

SEQ ID NO: 791344 - DNA, 95 bp, Homo sapiens
aagctttccagcagtcagttgaacaagacaacttatttgatgtttatgctaaaactatcgatgggcaacagactattattgcatgtattgaaagc

SEQ ID NO: 791345 - DNA, 83 bp, Homo sapiens
ctcgcctcactatggcagcagcacggcacagcacgctcgacttcatgctcggcgccaaagacaatgcagatcttcgtgaagac

SEQ ID NO: 791346 - DNA, 126 bp, Homo sapiens
atcaggactcggtcgaagcatggctggacgatcactgggactttaccttctcatactttgttagaaaagccaccagaaaagaggcacagttagatgaagaaggacagtttcttgtcagaataatat

SEQ ID NO: 791347 - DNA, 51 bp, Homo sapiens
ttgctttctcggagcaaaagtacgttgagaaagaagggccttaatggctgt

SEQ ID NO: 791348 - DNA, 82 bp, Homo sapiens
ttgtggatcgctgtgatcgtcacttggctttccatctgatggtcccctggtgtgtgccctggaacaggagcgaaggctccgc

SEQ ID NO: 791349 - DNA, 80 bp, Homo sapiens
ctggaacttcatcatcatctacttcacaggaattgccatttcctgccacagtgactcaggtcactcaaggaactatccga

SEQ ID NO: 791350 - DNA, 99 bp, Homo sapiens
gcgggagcaggagcgcggagcggagcgtcccgacccgccgaggtgcctcattagaccttaaagcttgtcctccaaaaccatcaaaatggatcctggaca

SEQ ID NO: 791351 - DNA, 75 bp, Homo sapiens
agatgatcacctcagcagaaaactgttcaccggaacagcacaatccgccctggctgtgatgtgaatccctcctgc

SEQ ID NO: 791352 - DNA, 100 bp, Homo sapiens
tcgtgcccgaaacgccgaatataatcccaaggagctgcagaggctggagacagagttgggccaacccgctgagcgctggaaggacacctgggaccgggtg

SEQ ID NO: 791353 - DNA, 100 bp, Homo sapiens
aaaatgtcattgttgcttgtatatggcagttggtttcagcctactattgagcgagtgcgcctttccttcgaggagctcaaggcatttttcaaaatctgac

SEQ ID NO: 791354 - DNA, 98 bp, Homo sapiens
ggatggccccaggtgtaagcgcagaaagcaggcgaacccgcggcgcaataacggacatgtattcctctgagaaaccttggacagcagattttggttta

SEQ ID NO: 791355 - DNA, 100 bp, Homo sapiens
tcaagtcagtcatgaatacagctggaaatgtgaagatggagctggaaaaacaagcttaataagaaaaattcagggaatagaggagtataagaaaggaaga

SEQ ID NO: 791356 - DNA, 75 bp, Homo sapiens
ctgcgtcaccgccgcccccccagacaagatggacaccgcggaggaaggatggtgattgctcacaccaaagccttg

SEQ ID NO: 791357 - DNA, 75 bp, Homo sapiens
tgcgggaaatcgggctgaagcgactgagtccgcgatggaggttagcatggcctcattgaaagaactagatcaaag

SEQ ID NO: 791358 - DNA, 90 bp, Homo sapiens
ctggagcaaatcacggcagtcactacgaatttaacacgtgaactggagaatggggaaaaacagcaactgcagatgttggatcgacttaag

SEQ ID NO: 791359 - DNA, 75 bp, Homo sapiens
ttggaccgagccgatcgccgcggggcagttcgggccggctgtcctggcgcgctctacattaatcatactcctcca

SEQ ID NO: 791360 - DNA, 82 bp, Homo sapiens
atgaagcgggactggatgcacacaggccggcgcccctcgggcctctgcggagcagagcccagccctgaccctgctgctggtg

SEQ ID NO: 791361 - DNA, 98 bp, Homo sapiens
aggggtccgggctagagctggagtcgtgagcgcgcgcccgccccgctctgggaggaccgcgagaggcgtgcaaagactccagaattggaggcatgatg

SEQ ID NO: 791362 - DNA, 83 bp, Homo sapiens
caggatttctccgcctcagcccaacggggagctgcatcttcctcccgtgaggctggccgagctccacgctgatctgaagatac

SEQ ID NO: 791363 - DNA, 87 bp, Homo sapiens
ctgaggagccattttgagcaatggggaacgctcacggactgtgtgaccccaccaacaactgaacgctttggtcaggctgctacaatg

SEQ ID NO: 791364 - DNA, 75 bp, Homo sapiens
tggagacttgacctaaacagcaaagagtggatccgacctttggcttcagttgcagcatgagaaagccgaactaga

SEQ ID NO: 791365 - DNA, 101 bp, Homo sapiens
atgaggtggaaaaatgcacaaaatacatgcagaagatggtggcagatctggtaactgcacttttgtgagattataaatataccacggagggtaacgaagct

SEQ ID NO: 791366 - DNA, 100 bp, Homo sapiens
ccactcccagctggctctgcttccggaatgaacctcagctccttgacaagacgggaggcgctgccctgctgtggtgcagtcagcctcagtttccaaagcc

SEQ ID NO: 791367 - DNA, 75 bp, Homo sapiens
aaatcagccctggacctggcagatccttcagcaaaagctgtccttacaggattactacagcatcccatttcccac

SEQ ID NO: 791368 - DNA, 101 bp, Homo sapiens
gcctaactggatgtttatcctagcgtcaacccaccaaagatttggggaacatacttggagtccaggtgtgagaaatttctacaaaaagacatttttgaaat

SEQ ID NO: 791369 - DNA, 100 bp, Homo sapiens
cagcaacgtgcggcgagtcatggccgaccagggtgtcggcgccgagctgatggggctgcaggtggactactggacggcagcacagcctgcggacaggaag

SEQ ID NO: 791370 - DNA, 83 bp, Homo sapiens
caagcacacactatggcgctgaaacggattaataaggataccgaagtgtataaagctacagtaaaagatgacctcaccaagtg

SEQ ID NO: 791371 - DNA, 95 bp, Homo sapiens
cgatggcaggcttgatccccaagagctgttaccttgggtagtacctaataatcagggcattgcacaagaggagtccctagatgacactgagctcc

SEQ ID NO: 791372 - DNA, 74 bp, Homo sapiens
ccccactcaaattctaccatgactttcactgtgacctgaaacatatcacgaagctgaaaccttggggccttttt

SEQ ID NO: 791373 - DNA, 100 bp, Homo sapiens
cacccaggcccctgtcaagaaggtgccggtggtgcgagtcttcggagcgaccccggcagtgaaaattgccaccaaggccaacccttgggatggaaaatca

SEQ ID NO: 791374 - DNA, 83 bp, Homo sapiens
tatctgtactgccggcacctcaaccagatgaggaagtacaactttgaggtcagaaagcaacattgaatgcagaagaaatggcg

SEQ ID NO: 791375 - DNA, 88 bp, Homo sapiens
taacgttgaggcccttcttgtgtatctggagaaaatagaggagcctcctcaacaagcccaagagtgagatgaccccagaggagctgca

SEQ ID NO: 791376 - DNA, 100 bp, Homo sapiens
ccattttggctactggtggaattgactctgctgaaagtggtcttcagtttctccatagtggtgcttccgtcctccagagagggtctcaccccgtcaccca

SEQ ID NO: 791377 - DNA, 100 bp, Homo sapiens
tggggcttgatgaaggcgtggatagcctgaaggcagccattcaggctgacgtgatggcagacagggttccccgctgcccggtctgcaccggcgttgtgaa

SEQ ID NO: 791378 - DNA, 75 bp, Homo sapiens
gactctgatgaggaagaaaatggccagggggaaggaaaggtgagggaaaggggtgcgttggaggtgcaaagtcag

SEQ ID NO: 791379 - DNA, 75 bp, Homo sapiens
tctccagtcgacactctcgcgcccggaggctggagcattggatttgctaaaggagcttaagaatattcctatgac

SEQ ID NO: 791380 - DNA, 100 bp, Homo sapiens
cgggcgggtctggaaaaaaattactgccgtaaccctgatggtgacatcaatggtccctggtgctacacaatgaatccaagaaaactttttgactactgtg

SEQ ID NO: 791381 - DNA, 96 bp, Homo sapiens
tcagtgagatgctgcttcattacagccaggaggactcttcggacggggacagagagctgatgaaggtctgtttctgtcgactgtggaccacttatg

SEQ ID NO: 791382 - DNA, 100 bp, Homo sapiens
agatgactccttttcccacccagctggagagaaaagacccctctgaagacaaggaggacattgaaagcaacctgctccggcccacaggcgtagccctgcg

SEQ ID NO: 791383 - DNA, 156 bp, Homo sapiens
gcgcttgagggggactggcctggcgtgcactccgcacctcggggacattattgcgcgtggaacggctgcttttggaaggctcggggaccagttctacaaggaagccattgagcactgccggagttacaactcacggctgtgtgcagagcgcagcgt

SEQ ID NO: 791384 - DNA, 100 bp, Homo sapiens
attgagcaggctacagtccactccagcatgacaaatcttcctattttcaagctgaaagaatctactgttagaagaagatacagtgactttgaatggctgc

SEQ ID NO: 791385 - DNA, 97 bp, Homo sapiens
gtcgcctctgtgctcgtgagtgcatggggtataaggccaacgaggtgacggacagcgcgtacatgggctccgagagcacctacagtgagtgtgagac

SEQ ID NO: 791386 - DNA, 100 bp, Homo sapiens
gccaccagaaccctacttaggggcgggatgtcactccgaggaacgactgagacggctaaaccacagtgttgccaaggaaacagcccgcaggagagcaatg

SEQ ID NO: 791387 - DNA, 74 bp, Homo sapiens
gtatggccagctcactttaaataccacctcaagactcatcggtcagctgcatggccacagacaggagactgtgg

SEQ ID NO: 791388 - DNA, 100 bp, Homo sapiens
ggtgggcttcctgtgtcccagtcccaggagatcttcagctccttgcagcccttcagtctggagggcagtatgagctttttgctgtgattgcgcacgtggg

SEQ ID NO: 791389 - DNA, 100 bp, Homo sapiens
gttggaccttcgagcctagctgctcgcacaggactcggccacctgcccttcctgcaccgactggccagacgcaaacatgcagatctttgtgaagaccctc

SEQ ID NO: 791390 - DNA, 82 bp, Homo sapiens
cagcacacactgcaaggagatcagactcaccccacacagaccgcgtttctctccagtgtcgacctacacactcactgctctt

SEQ ID NO: 791391 - DNA, 90 bp, Homo sapiens
ctaaattctgccgaaaggactgaggaacggtgcctggaaaaggctttcatctgagtggcacagtaactgagctggccactgcctctgaac

SEQ ID NO: 791392 - DNA, 82 bp, Homo sapiens
gggctttggacgccggtggagacgcaggcgagggaaatcctcattgacgattcaatttgttgaaggccaatttgtggactcc

SEQ ID NO: 791393 - DNA, 74 bp, Homo sapiens
agaagatcatgatcccaccattggtgactgggtacctggatatgtgatcgagtattcttctgggtgtttctatg

SEQ ID NO: 791394 - DNA, 51 bp, Homo sapiens
gtggccccgaaggaggactgaggaagacgaagggaacgtcatcgtttggaa

SEQ ID NO: 791395 - DNA, 101 bp, Homo sapiens
ctgtgtgggaagaagatttgtaaagaaaactcttaggagcggcctattgccaattcatggacatgctcttccctggctgcattagtttgaagaaagtaaaa

SEQ ID NO: 791396 - DNA, 99 bp, Homo sapiens
gctgggttcgttttattcagcggcagtggtgctttcccgaatctcagaatgccgtttcccaggcagctgcagacttgaaacagttctgtctgcagaatg

SEQ ID NO: 791397 - DNA, 90 bp, Homo sapiens
gttaggagaatgccgacagatgtcctcttcgagtcaaatcggtaatgactcattccagctccagattcaattagcagagcctcacagaca

SEQ ID NO: 791398 - DNA, 75 bp, Homo sapiens
ccaaggatgaatcccagtccctgttacgggagggagaagagattgtgataacaaccacaagctacgatttccacc

SEQ ID NO: 791399 - DNA, 100 bp, Homo sapiens
aacttcagttctccttaaagaagttaggggtaaacaatatctctggtattgaagaggtggccaggaagctggtgatcctggaaggagagctggagcgctc

SEQ ID NO: 791400 - DNA, 100 bp, Homo sapiens
tgccagaagacatccttacttttatgccccggaactccttttctttgctaaaaggtcctggctgctgtctacaaggccctgaatgaccatcatgtttacc

SEQ ID NO: 791401 - DNA, 100 bp, Homo sapiens
cagaaataccagtccccagtgagggtgtacaaatacccctttgaattaattatggctatgccttcaattaagttgcagagttctgatggagagatatttg

SEQ ID NO: 791402 - DNA, 100 bp, Homo sapiens
tccgcttctaccgcgtgctcacctgtatcagctggcccctgtcggtgattggcgaggacaacgtggcagtcccctcacacctttataaggtaatcctggc

SEQ ID NO: 791403 - DNA, 100 bp, Homo sapiens
cgccgcgtagacctccgctcccccagatgctgacctgacctttgaccagacggcgtggggggacagtggtgtgtattactgctccgtggtctcagcccag

SEQ ID NO: 791404 - DNA, 88 bp, Homo sapiens
aatgacaatcagccatcctggattggacatttaaactcatatcccaggcatatgaagtgctttcagatccaaagaaaagggatgttta

SEQ ID NO: 791405 - DNA, 100 bp, Homo sapiens
aaaaaaagccagtctcaacgttttacttatacaccaggtcctaatctacccatggctacagttgatataaaaaatccagaaatcacaacaaatagatttt

SEQ ID NO: 791406 - DNA, 89 bp, Homo sapiens
gaccggtttcaggctgaaggctctttaaaaaaaaacgagcagaattttaaacttgcagcctcaaggaataggttctcctagtgtctatc

SEQ ID NO: 791407 - DNA, 75 bp, Homo sapiens
cgagtgggagcaccaggatctcgggctcggaacgagactgcacgattgatgaggacatgactgcccgaattagca

SEQ ID NO: 791408 - DNA, 97 bp, Homo sapiens
ataaagtcacttcagatgagaccagaggtgcggaaggaacagaaaggcacattgcaagcaacccgtgccttgatggtggttggcatcctcctgggag

SEQ ID NO: 791409 - DNA, 90 bp, Homo sapiens
tgttcgagaacgaccccgagacgatggtccatacccttacactctgaagttgtgtttctccactgctcagcacgcctcctaattaggtgc

SEQ ID NO: 791410 - DNA, 100 bp, Homo sapiens
atcttggctcacctcccaggttcaagcgattctgctgcctctgcctcccgagcagctgggattccagccctactgccaataaagggaaaataagagatgc

SEQ ID NO: 791411 - DNA, 96 bp, Homo sapiens
tgaggacaagaccatcgagctcatgagttacactgttagaccttatgatagccaagataacgagtgatgagccactcaccaaggatgacatccctg

SEQ ID NO: 791412 - DNA, 82 bp, Homo sapiens
gtgaccgagagcgcgaatatcgtcatcgttagaagggtcctgcagttctgagcttgggttccctttgcctggacaccaacca

SEQ ID NO: 791413 - DNA, 123 bp, Homo sapiens
ctggactggatatttctacctcggccccaggttctctgcagatgcagtaccagcagagcatgcaggtgcctctcttgaccagctaccctcccaggggaccatgaggaagctcagaggaaagac

SEQ ID NO: 791414 - DNA, 101 bp, Homo sapiens
atgcaatagcccttcagtactgttgtacggattcatactcatatgtaaggtccacagctcctgctgtagcttatgatagtaagcaatactaccaacaacca

SEQ ID NO: 791415 - DNA, 82 bp, Homo sapiens
gcgcccggagaaggacatgcatggctatgacatcagacaatgcagatcttcgtgaagactctgactggtaagaccatcaccc

SEQ ID NO: 791416 - DNA, 90 bp, Homo sapiens
tgctcgggatggtgccacaggaggctgtgcgggccccgctccgcttcgaatgggatcctcagtcttccacaatgaaccctgtttacagcc

SEQ ID NO: 791417 - DNA, 74 bp, Homo sapiens
acgctttcaaagatgcactgcagagagcccggcaggtgcctatggttcatgcttgaagttttaatgacaaagaa

SEQ ID NO: 791418 - DNA, 100 bp, Homo sapiens
aggactcttccagatggcactcatgagctcatcgtgcataagatggagtctcatgctggagtgagtctcaccaggctggagcgcagtggtgcgatctcgg

SEQ ID NO: 791419 - DNA, 100 bp, Homo sapiens
tgcggatcaccctgcggaacctggaggaggtggagttctgtgtggaaggaatggttttagggaagactgttgccggatgacaaggctgtcactattgttc

SEQ ID NO: 791420 - DNA, 100 bp, Homo sapiens
atagttgcccatcttatatagcaaaagatttgatgaaagtacttcagggagtcaacggtgaggtggtgatcgtggcagaggtggccctggtggcatgcgg

SEQ ID NO: 791421 - DNA, 99 bp, Homo sapiens
ggatgacaccggagtttgacgaagaggtggtttttgaggttggacgtgataagtatgagcctgcagctgtttcagaacaaggtgataaaaagggcaaaa

SEQ ID NO: 791422 - DNA, 74 bp, Homo sapiens
tctgctagctccctatgccaagggtggcaaaattgggcctgctatggtgtgctgcggttcatcatggagagtgg

SEQ ID NO: 791423 - DNA, 75 bp, Homo sapiens
gagatccgagagcagggggatggggcagaggacgaggagtgggagatcatgcacgccctgaagatgacctggcac

SEQ ID NO: 791424 - DNA, 75 bp, Homo sapiens
cttggtttcgggatctcggtgctgcagacggcgagacctcctgcacaggttgtggcagcactgcctgaaggtatg

SEQ ID NO: 791425 - DNA, 75 bp, Homo sapiens
aaggagacgctgacacttgtgtttgaatatgtggctgaagccgacgtagcttctctgaacagacgcatccagctg

SEQ ID NO: 791426 - DNA, 75 bp, Homo sapiens
gataattaaagagtaaagttgtgctcaacggtagggaagacatatgagctactcaactgtgacaagcacaagtct

SEQ ID NO: 791427 - DNA, 82 bp, Homo sapiens
cctggcctgggcgctccggtggcggcggagcctgcggcgagagggctacaccgtgcaggtgaacgtgaacgactatctggat

SEQ ID NO: 791428 - DNA, 74 bp, Homo sapiens
gcaaacagtgtttgcctctggttcagctcatacaacagcttcttaggaattggcagcaatgaaacagattctcg

SEQ ID NO: 791429 - DNA, 100 bp, Homo sapiens
gggagccgctgcccgaactcccggcccgaactccaggttaaaaataagaagttggttgagctgctgagaaggaaagttcgtctcgcccagccttatgtcg

SEQ ID NO: 791430 - DNA, 78 bp, Homo sapiens
cggcgccgagtcgaacggggagccgagctggagctgccgcggcgcagccaggctgaaggggatgctaagggagataaa

SEQ ID NO: 791431 - DNA, 88 bp, Homo sapiens
tcgcagtggtcgcttcttctccttgatgagtgtgggtcagagagccaaactgactatatctccagattatgcctatggtgccactggg

SEQ ID NO: 791432 - DNA, 87 bp, Homo sapiens
ctcagttttcttatcactaaaacagcagcaacttgttccagcgatggcatgttcctctagaactccagatgacaagacaaatggcta

SEQ ID NO: 791433 - DNA, 100 bp, Homo sapiens
agataaccatcagtttattaaagagggtcggatcatgctaaaaggagataatattactctgctacaaagtgtctccaactagaaatgatcaatgaagtga

SEQ ID NO: 791434 - DNA, 75 bp, Homo sapiens
tctctccagtccttgctgaagagactttccgttacatgatgctgggattacaagcgtgagctaccacacccagcg

SEQ ID NO: 791435 - DNA, 100 bp, Homo sapiens
cagccggcagccgcagagcggggaggaggcggtggccctgctggaggagctctggaggatctctgggaaagtttagaaaatgctagtggtaaacctatag

SEQ ID NO: 791436 - DNA, 100 bp, Homo sapiens
ccttgcctgcttgccttggctgtgcaggcctctatgccaggtatccagatggttcccatcagctggtgtgagatgcagtgccctaagacccacactaaag

SEQ ID NO: 791437 - DNA, 74 bp, Homo sapiens
tacgtggcagctgtgaaaaaagccatttccgaaggcaacgtgttggaccttccggagcttctcagaagacagag

SEQ ID NO: 791438 - DNA, 87 bp, Homo sapiens
actggcaggatactcgtgatgatccctacagaccagcaactattctgtcaaccctggccaatttggaaggtgaagaaacttttgaag

SEQ ID NO: 791439 - DNA, 100 bp, Homo sapiens
cacccctagatctttcttgaagacttgaattagattacagcgatggggacacagaagggctcctcgcacctaccccagcaactcaaattcaccacctcgg

SEQ ID NO: 791440 - DNA, 50 bp, Homo sapiens
ctggtctcgaactccggacctcaggtgatctgcccgcctctgcctcccaa

SEQ ID NO: 791441 - DNA, 75 bp, Homo sapiens
aggcaggcacaaacaagactgatgttgtctgtgcccagctccatgaccttctccagctgaggcaggagaatgcct

SEQ ID NO: 791442 - DNA, 100 bp, Homo sapiens
cagcgccagctccacgctaaggagggtgctggagtgagtcccccacttatcactcagggctacttctacaagtccgaacagccagtccagcaaaatgaac

SEQ ID NO: 791443 - DNA, 99 bp, Homo sapiens
taccagagaagaatgaatcatcctcagctagccactgctcagtatgtgggaacctgcccttccgacggatctgcaagcgcttcggggcggatgtgacat

SEQ ID NO: 791444 - DNA, 74 bp, Homo sapiens
gccctgggctttaccatctttgtggctgtgcttgccaggcctggctccacaggagtcctggcaaaataagcatg

SEQ ID NO: 791445 - DNA, 100 bp, Homo sapiens
caggagggacccacagggctgaaggaagctgccttgtacccacatctcccgccaggtcacagtcaccagctgtttcacgtgtgtgtgatcctggccacgc

SEQ ID NO: 791446 - DNA, 100 bp, Homo sapiens
tcatcgaggccaacaacccattccaggctgtgcaggaagaacaaggcaaaggcaatctgcatgtaacatcaccagaagatgcagaatgccgcagaaccaa

SEQ ID NO: 791447 - DNA, 124 bp, Homo sapiens
gaggaagagggcggcgacggtggtggtgactgagcggagcccggtgacaggatggcagatacacaaattgaccgagaacatcagaacttctatgaagcatcattagaatatgtctttaaaattc

SEQ ID NO: 791448 - DNA, 100 bp, Homo sapiens
tcgggagattcagccgtgaagcaagtgcagatagatggccttgaatgctgtctctgcaatttgagaggaggtgctcttaagcaaacgaagaacaataagt

SEQ ID NO: 791449 - DNA, 106 bp, Homo sapiens
cgcctcggccggggcgctcacggccacggcgctggtcaccggggtctgcctggacaatgcagatcttcgtgaagactctgactggtaagaccatcaccctcgaggt

SEQ ID NO: 791450 - DNA, 100 bp, Homo sapiens
gcacttttgattgtgtattatggataccaaggaagagaagaaggaacggaaacaaagttattttgctcggaacttggcattagaattcctcgaccactag

SEQ ID NO: 791451 - DNA, 98 bp, Homo sapiens
cccagccgcccgacttcgccgccgcctggagccggctggccgcgacctcagccgcccgccgcccgccggggattacaccaggaagcaaggcggcagct

SEQ ID NO: 791452 - DNA, 83 bp, Homo sapiens
acccaggagaaattcgccctcaaatactttaggaagaatcatcaaagtaactcaggaggtgattgactaccggaggtggatca

SEQ ID NO: 791453 - DNA, 125 bp, Homo sapiens
agttgtttgacttagtggaggaggtgcagctcaacttctaccagttcctcggggtgcagcagtacatagtggaatgtcatgggatcacccttcttccccagttcttgggcatgtaccggcttaat

SEQ ID NO: 791454 - DNA, 75 bp, Homo sapiens
agggagtcgccgctggagaggggctcggcgcccggcggggactgcagctcctgcccctcctaaagctgaagccaa

SEQ ID NO: 791455 - DNA, 100 bp, Homo sapiens
caggagcttgacgccttagataacagccatcctattgaagcagcccttgacattagacagtcagtgtttggtggcaaaaatatccacgtagcaacagctc

SEQ ID NO: 791456 - DNA, 101 bp, Homo sapiens
ctttgatgtggtgtccctctgccctaatctggagcacctggatgtgtcaggtctgaaggggcgtctcgattacctgagctctctgaaggtgaagggccttg

SEQ ID NO: 791457 - DNA, 100 bp, Homo sapiens
caagctgctggacaaggaccctgacctgcctgtcgtcgtggtggccaacaagcaggtgtggggcattggctgtgaggaccgagccgtgtacttccggcag

SEQ ID NO: 791458 - DNA, 51 bp, Homo sapiens
aagacagagggttttcttttgaggatgagacctgcacgcagtggctcacag

SEQ ID NO: 791459 - DNA, 82 bp, Homo sapiens
aggcttgttctggatccctatttattaaaggattggaatacttttctgctacggttcaatgatttggacttgtgtgtatcag

SEQ ID NO: 791460 - DNA, 80 bp, Homo sapiens
aggaagtcatcatgggccggcctggaacaggatgatcggctgaatgtaacagaggaactaacgtccaacgacaagacgag

SEQ ID NO: 791461 - DNA, 83 bp, Homo sapiens
cctccacccaccttcaccccgaaacatgggaatgtaagacggacttagatattgcatacaaatttggaaaaactgtggtgagc

SEQ ID NO: 791462 - DNA, 96 bp, Homo sapiens
caccctctggagacccaggcagggaaggtgcaggaggctcagaactggaagaagttcgggaactcagagtttgacccccccggacccaatgtggcc

SEQ ID NO: 791463 - DNA, 50 bp, Homo sapiens
aaacacctaggaagggagaactgctctttcgacgtgtagcagcagctttg

SEQ ID NO: 791464 - DNA, 100 bp, Homo sapiens
caagatggcgtctgctagtagggtcgttcagagaaagtggttgcttattttgaaacaactgaccagattctagataatgaagatgatgtccttattcaga

SEQ ID NO: 791465 - DNA, 75 bp, Homo sapiens
ctgcaacaagtatgttgattactcaaggattaattagtaaaggtggctttaaccaagagagcagatccagctgag

SEQ ID NO: 791466 - DNA, 83 bp, Homo sapiens
ctggaactggacaggctgaaaatgatatcatcaagttgaatcgaaaggaagggaagaagcagaattttccaagactaaataga

SEQ ID NO: 791467 - DNA, 97 bp, Homo sapiens
gctgatccgagaccctcgctcccccatcaacgtggagagcttgctgctggccagctcagcgtccctggaagggaagggacaactgaagttcacctca

SEQ ID NO: 791468 - DNA, 83 bp, Homo sapiens
ctgccgggcgattggcatcctcagccgcttttctgccttcaggatcctccgctcccgaggcgccatgtcagaaccggctgggg

SEQ ID NO: 791469 - DNA, 74 bp, Homo sapiens
tgccatcacagacaccgcctacaggagtatgatgcaagcactattggaaataattatgaaaaatggaagcacgg

SEQ ID NO: 791470 - DNA, 83 bp, Homo sapiens
gaagctgtttatggccaaaatgttgctgaagcagaagattgttataatacagctctccgtctgtgtcccacccatgcagactc

SEQ ID NO: 791471 - DNA, 75 bp, Homo sapiens
aagagggtctggaggagccttctcaagaacagagagtaagccatatcaaagacttcattgaaaaataccaaggat

SEQ ID NO: 791472 - DNA, 74 bp, Homo sapiens
ccgacccttcctgtcgctgacggcgactgcgggaggccagtttcaggtttagctgtgcctcccagtgactataa

SEQ ID NO: 791473 - DNA, 100 bp, Homo sapiens
atttgacttggaagcaatgtttgaacaaactcgaagaacagctgtggaaagaagttgcaaaacactggctgcaggacaagttcgagcatcttaaaatgat

SEQ ID NO: 791474 - DNA, 82 bp, Homo sapiens
ggatattacggaatgtgtccagcttgatagctacaaatgaggaccacaggtctcggcgcggaagatggccggcggcgtggac

SEQ ID NO: 791475 - DNA, 75 bp, Homo sapiens
tctacaccatcgacaccgaaaactccaccgtagcccttgccaaaggtcctcagaatggttggaatgaccctccag

SEQ ID NO: 791476 - DNA, 82 bp, Homo sapiens
agtatttgaagtctgtgtcaaacatccatatcataagtggaattttggagatattcaaagtgtctttctcgagaagcaggtg

SEQ ID NO: 791477 - DNA, 100 bp, Homo sapiens
tgggagatggtgtgggagcagaaaagcaggggtgtcgtcatgctcaacagagtgatggagaaaggttcgaaatttaaaagcctgttgattcaagaacttt

SEQ ID NO: 791478 - DNA, 75 bp, Homo sapiens
cgtgacttcccggacgctgggaaatgatccgagtgaagcctgacaggaccggtgtggtcacggatggtgtgaagc

SEQ ID NO: 791479 - DNA, 95 bp, Homo sapiens
gtactgtcgcggaggcttgtcattctgacccggggattcctcacagcgtctggcagatgggaatttcttagccataggctcacatgacaactgca

SEQ ID NO: 791480 - DNA, 83 bp, Homo sapiens
caagaaggccctggacacagcaatatctctgggctttcacagagacacctatggctgccgatgaaggctcagcagagaaacag

SEQ ID NO: 791481 - DNA, 89 bp, Homo sapiens
cccacgactgcctgggacctggccaagggctccacacaccaagaccaagcatataggttgctgtagatgaatgttcttagctgtcatgt

SEQ ID NO: 791482 - DNA, 50 bp, Homo sapiens
gatttgacgttggaggagaatcaggtttatgtgtggtacgggggtcaaga

SEQ ID NO: 791483 - DNA, 60 bp, Homo sapiens
cgacacacctgtagacgttcgccaggtaaaggacttccaatagtagtcagacattatcat

SEQ ID NO: 791484 - DNA, 78 bp, Homo sapiens
ctcgggacggaggacgcgctagtatgtatttccactacacaaaattttccacctctgggataccttactacttgggaa

SEQ ID NO: 791485 - DNA, 82 bp, Homo sapiens
gcaaaacgagactgttaataaaacctaccccagggtaggacggactgttcggttggatgaagctaacttaccaaaagaaatc

SEQ ID NO: 791486 - DNA, 100 bp, Homo sapiens
ccagcattgccaccaccaccaccaccaccacagagtctgtggaagaggtggttcgagcgggaagagaggcagagcacttgtcctccccttggggagaatc

SEQ ID NO: 791487 - DNA, 51 bp, Homo sapiens
agaaaatattgacagaatgtgccagcttctgcagaaagccgtcattacacc

SEQ ID NO: 791488 - DNA, 50 bp, Homo sapiens
caggttttggactcgctgaagcgccaggcccagacatgtccgtccttgta

SEQ ID NO: 791489 - DNA, 100 bp, Homo sapiens
ttgttcctaaaccagaagaggaggttgcccagaagaaaaagtcactattccaggtcctcaggatatagccgtgacctaaacacagaaatctaccctggcg

SEQ ID NO: 791490 - DNA, 51 bp, Homo sapiens
cttggcagggttactatttaggtttcctccagcttatggaggcatatctga

SEQ ID NO: 791491 - DNA, 82 bp, Homo sapiens
gcgttcccagcccgggtccccgcgttcacagccccagcgcaggtgcgcgcggagccatggttatcatgtcggagttcagcgc

SEQ ID NO: 791492 - DNA, 100 bp, Homo sapiens
ccagtcctttccggctagtgcctaatgtcagaatccacatggatgggaggtgcccacgagtgtattcggggagaagcttcgagaacaagttgaagagcga

SEQ ID NO: 791493 - DNA, 74 bp, Homo sapiens
ttcatccgttctggaaactgagaagcgagggtgacaatgtgcagctcagtggaagatgatgacaaccagaagac

SEQ ID NO: 791494 - DNA, 100 bp, Homo sapiens
acccatgctcgttttgtgggcacggatcctgccagtgatgaagttgtcctgatgaaaatccttcaggtctctagcatcaattcacgctttgccaaagtac

SEQ ID NO: 791495 - DNA, 74 bp, Homo sapiens
gagctgaggactgcctgtttgcaggttaatgttgaagaaggaaaatgcggaagtcgtcatttgacaagttttat

SEQ ID NO: 791496 - DNA, 83 bp, Homo sapiens
ccctactctgccccgggggagagatggggtcgaggatttggtcttttgggttccatttttggaaaggatggtgtattaaacca

SEQ ID NO: 791497 - DNA, 100 bp, Homo sapiens
ggttatgatgatgcctgggaccaggaccgcttcgagaagtggatgacaatcgagcagcagaagaatggtgtgcctaccctttaatgctgcagtttaagag

SEQ ID NO: 791498 - DNA, 100 bp, Homo sapiens
caagggattcagcctggcggacatcccctaccaggagatcgcagcttcaaaagcagtggactgtcttttggattcaaagtgggcaaaggccaagaaagga

SEQ ID NO: 791499 - DNA, 100 bp, Homo sapiens
taacagtccactttggaaagaagatttctcagggctgtgtctggctgtccctgataaaactgtgagatggtgtgcagtgtcggagcatgaggccactaag

SEQ ID NO: 791500 - DNA, 51 bp, Homo sapiens
gatttctgcagctctgtgtgaaggccaagcacacccaggagaactgtgaga

SEQ ID NO: 791501 - DNA, 51 bp, Homo sapiens
gtaacagtgtgtggagatatccatggacagcaaaacttagagagtaacctc

SEQ ID NO: 791502 - DNA, 101 bp, Homo sapiens
gggaagccggactgcgccgtgtcttcctgaagaaggctgggggatggcaccacagatgtgacgcggacaatgcattttgggacccctacagcctacgagaa

SEQ ID NO: 791503 - DNA, 99 bp, Homo sapiens
tggaccccaactcagccttcctgcataccctggaccagcagaaacctagagtgagctccaaacgagaatggaagccgctggaggaccgtagctgcacag

SEQ ID NO: 791504 - DNA, 100 bp, Homo sapiens
tggttgaaaaaatttacccacaaatacctggttaatcatgttatcagccctctgttggatatctactttcctgaaggatctggtgttaagataatttcag

SEQ ID NO: 791505 - DNA, 100 bp, Homo sapiens
cgaagcgctggtggcgggcccgggctgcggcgtgtgcgcgcccgccagctgctccggagatacggtccagcctgatgagtgaagaggctaagcgaggagc

SEQ ID NO: 791506 - DNA, 100 bp, Homo sapiens
aatggatctctttctccacccatcccgagaacactgtgatgcagatccatccgccctagcaaaatatgttctggctttggtaaagaaagacaaaagtgaa

SEQ ID NO: 791507 - DNA, 100 bp, Homo sapiens
gccagctgacggagatggtgcagaagatggaggaggagaagaatttggattggtttcctcggatgcgagccatgtccctcgttagcaatgaaggcgacag

SEQ ID NO: 791508 - DNA, 80 bp, Homo sapiens
tgagccagagacctacgtggcagctgtgaaaaaagccatttccgaagtaagtacaaggtggactgtgcatgcctcaaaga

SEQ ID NO: 791509 - DNA, 75 bp, Homo sapiens
tcccgagtagctgagattacaggttatggaattccactgaaagacggagatgagaaaacagatgaagaagcagag

SEQ ID NO: 791510 - DNA, 75 bp, Homo sapiens
tttttaatgaccacaacaagcaagcatgcagcttactgcttgaaagatcgaatggagctgttagaaatagcaaaa

SEQ ID NO: 791511 - DNA, 100 bp, Homo sapiens
gaaagactactttggacttttgtttcaggaaagccctgagcagaaaatcgaaagctgctttgcgtcgcagttggagcagcacccccaccgcaggtggcat

SEQ ID NO: 791512 - DNA, 100 bp, Homo sapiens
agctcgtgctggctctgacccatctggaattgcctctagagtggactgtgttgggaagttcttcacttgaagtcataccctatggtactgcagtatcgac

SEQ ID NO: 791513 - DNA, 83 bp, Homo sapiens
ctgcgggaagcgggcggccccggccgcctccgcgagggcaccatggaggtgaatgcaggaatactcccccagttgcaagaggc

SEQ ID NO: 791514 - DNA, 51 bp, Homo sapiens
tgatgtcagatttatctcatgctgtgcagactatctgttatagtccctggg

SEQ ID NO: 791515 - DNA, 75 bp, Homo sapiens
tggcctgttccagagtctttttggccagatcaaaattcgccaacactaggagtacagaagtaggtttacgagtga

SEQ ID NO: 791516 - DNA, 51 bp, Homo sapiens
ctatcacagttacatgctacagatttcctttcctggatgaaaatgttgtct

SEQ ID NO: 791517 - DNA, 100 bp, Homo sapiens
catcaccctgcggaagggcaacctgggggccgagcgcatctgccaagccattgaggctctcacaccattttgctggtacagcctaccaagaggccagaag

SEQ ID NO: 791518 - DNA, 145 bp, Homo sapiens
gactctgctaacaccagatagtggaaagaaaccatgtgctgaaatgtttgacgacactgatggtttggtactccaaagattcaggtttactcacgtcatccagcagagaatggaaagtcaaatttcctgaattgctatgtgtctg

SEQ ID NO: 791519 - DNA, 100 bp, Homo sapiens
ccatgagcactgcagcgattgcgagaatgaggaggacaacagctacaaccggggggtaatcactttgatcagtatgaggaaggacacttggaaattgaac

SEQ ID NO: 791520 - DNA, 71 bp, Homo sapiens
atgtgggcccagccctgtgccaggaggctggctggaataaaggcagttcaattaacctccagaagatggct

SEQ ID NO: 791521 - DNA, 87 bp, Homo sapiens
tgggaggacctcttcctccacatctggctctcaaagcagctgatgttctaatcatgtcagataaagatgatattgagactccactgc

SEQ ID NO: 791522 - DNA, 100 bp, Homo sapiens
ggcgtgtggattggtggtgtggcctgtgagccactgcctgacagatacacggtgtcggaggagctggccactcagtactccttgtccctggcctcgcagc

SEQ ID NO: 791523 - DNA, 82 bp, Homo sapiens
cgaacagttttttctaatggctattcaaggtgtgagttcttgatacgaatgaaaggccaagagtttgttgatgagattcaag

SEQ ID NO: 791524 - DNA, 100 bp, Homo sapiens
ctctttgggccgttatctcacattggcccccgccgcatccacacagtccgtgtgcggggaggtaacaagaaataccgtgccctgaggttggacgtgggga

SEQ ID NO: 791525 - DNA, 50 bp, Homo sapiens
gcctgctgtcgcccagccgcggggaggagccccagccccgcgacgaggag

SEQ ID NO: 791526 - DNA, 96 bp, Homo sapiens
aattgaaatgttaggaggtgaacttggcagcaagatacctgtgcatcccaacgatcatgttaataaaagccagattgagaggatccagaatccaga

SEQ ID NO: 791527 - DNA, 100 bp, Homo sapiens
ttttcagcagcaatttgccctcagaggaacccattctccataaacactatccgcttcttttttccgatgttgagatccagatgatacagggaattctttt

SEQ ID NO: 791528 - DNA, 90 bp, Homo sapiens
atttacttctcctatcaagtagtgagccacatggtctctgttatgttgaaactgctgagcttgatggaggatcttcaaatgcttccttga

SEQ ID NO: 791529 - DNA, 95 bp, Homo sapiens
cgctactgaggccgcggagccggactgcggttggggcgggaagagccggggccgtggctgacatggagcaggtgctggagaatctggtaaaagca

SEQ ID NO: 791530 - DNA, 82 bp, Homo sapiens
gtgctctctggagagatgctggaggcagagccccggatgtggacatatgtttatcctgccaagtactcagacatcaagtcag

SEQ ID NO: 791531 - DNA, 74 bp, Homo sapiens
gaagccttcaaatccatcaagctcatcaaaagctgggagtgtccactcgccttccaccagcatggcaacgtctt

SEQ ID NO: 791532 - DNA, 140 bp, Homo sapiens
ctttggtggtggtcgtggaggtggtttcggtgggaatgacaacttcggtcgtggaggaaacttcagtggtcgtggtggctcgtaagttggtgatcattgaaggagacttggaacgcacagaggaacgagctgagctggca

SEQ ID NO: 791533 - DNA, 83 bp, Homo sapiens
ggaagggtggtcagcgccgtggaggaggtgtgagatgcacaatgcgaaacctaggccccagcttttacaccatgatgcgcagg

SEQ ID NO: 791534 - DNA, 51 bp, Homo sapiens
ccaaaataaccattctccagatccagggctgaaatctctttaatgatggag

SEQ ID NO: 791535 - DNA, 100 bp, Homo sapiens
cagagttcctgccatcaagaagccaaccttgagaaggacaggaaaggacagtcattttgtttactcattcagccctgttgcaggtcccaataaactcttc

SEQ ID NO: 791536 - DNA, 88 bp, Homo sapiens
ggccgagcaggaggcgccatcatggccctggccaacgtcaacattgggagcctcatctgcaatgtaggggccggtggacctgctccag

SEQ ID NO: 791537 - DNA, 100 bp, Homo sapiens
ccggagcccccctcaacacggaccgcgcccgccgggcacacaagaatggtcactgaatgggtaccacagaccatgtcatcgtcctggcgtccacgaaccg

SEQ ID NO: 791538 - DNA, 100 bp, Homo sapiens
gaagctggatgagctgaggagagtgagcgtcccctatccaagtagcctgctgtcgcccagccgcgggttccaggcccggccggagctcctggaggtgttc

SEQ ID NO: 791539 - DNA, 74 bp, Homo sapiens
ccacaagacggtctgccagattgtcagcggaagcaaaatgtggattcagcaaacaaattctggaaatactaaat

SEQ ID NO: 791540 - DNA, 100 bp, Homo sapiens
ggaagatggcggacggcgtggaccacatagacatttacgcggatgtcggcgaagagttcaaccaggacttgggaccctggaggactgacgctgctggcct

SEQ ID NO: 791541 - DNA, 83 bp, Homo sapiens
ctgcttaacaacctgggcaacttcatcaacagggcttccgagtggacctgccaatcaagtcggcccgctaccgtggccagtac

SEQ ID NO: 791542 - DNA, 50 bp, Homo sapiens
gcgagtgtgttgcaaacatgaaagacaatgcagatcttcgtgaagactct

SEQ ID NO: 791543 - DNA, 82 bp, Homo sapiens
catacccaataaccaggtgcttggcaaaatcgagcgggccattggctttatcctgtggataaacgcagagtgaacgagtttg

SEQ ID NO: 791544 - DNA, 100 bp, Homo sapiens
gggagagatgacactataatggctacagacaaagtgattccagttactcggtcattgagggctagaaacatcgttcaaagtacagaacacttacatgaag

SEQ ID NO: 791545 - DNA, 75 bp, Homo sapiens
gcagcaacaacagagagcacgtgatataattggtgattacaactttcctctataaattaactcttgacactcctt

SEQ ID NO: 791546 - DNA, 83 bp, Homo sapiens
cacttggtgaatggagatgcagctcagcaggtgtgagttcttgatacgaatgaaaggccaagagtttgttgatgagattcaag

SEQ ID NO: 791547 - DNA, 98 bp, Homo sapiens
gtcgaagcgagggtctgaagttcacgactactagaaggggaggggagtggaaaggctctcagtgaaaaagaaatgcactcggtgatggaaagagagcc

SEQ ID NO: 791548 - DNA, 95 bp, Homo sapiens
gtgagatccaggcgcgcgccaagagggtcagctgggacttcaagacggccgagagccactgcacaatgcagatcttcgtgaagactctgactggt

SEQ ID NO: 791549 - DNA, 74 bp, Homo sapiens
gctgtgtgtacatcacccccatggaggccctggcagagcagtttaattggttggggtcagataagaagaggagt

SEQ ID NO: 791550 - DNA, 122 bp, Homo sapiens
gctccgtggccttagctgtgctcgcgctactctctctttctggcctggaggctatccagcgattttttatcaagcagaaatgcatcgaacaacgagaatcaagatcactgagctaaatcccc

SEQ ID NO: 791551 - DNA, 76 bp, Homo sapiens
tccagctcgatctgctcttcgtctgcttcttcctcttcagtcaaggtggagtaactaatacggcacaatatcagaa

SEQ ID NO: 791552 - DNA, 100 bp, Homo sapiens
tgggatacagctggacaagaagattatgacagattacgccccctatcctatccgcaaacagttttgaacgaagaatgtgatcagaactggtacaaggcag

SEQ ID NO: 791553 - DNA, 100 bp, Homo sapiens
tgagtctgtccagtcaggtacctggtatcagcatggaagccatgagtgagaataaaatggtgccctctgagtttagcacaggacctgtggaaaaagctgc

SEQ ID NO: 791554 - DNA, 75 bp, Homo sapiens
tctggggaagaaggtccgcgttaaatggctatgacgggaaggagaaggtctacattgccacccagggccccatgc

SEQ ID NO: 791555 - DNA, 101 bp, Homo sapiens
cagcagcactactacgacaagtgccccaagatctttaatctcatgaagtacgacagctacagccgcttcttaaagtctgacttgtttttaaaacacaagcg

SEQ ID NO: 791556 - DNA, 97 bp, Homo sapiens
ggggctcagaggggagtcatcatgagcgatgttaccattgtgaaagaaggttgggttcagaagaggggtgaaagtcatgcttcgcatctgttccacc

SEQ ID NO: 791557 - DNA, 75 bp, Homo sapiens
ggcggcccagctctctctgacacagggggcagctggcattttatgctatgtgggagcctatgtcttcatcactta

SEQ ID NO: 791558 - DNA, 83 bp, Homo sapiens
gtgcatccacactggacgcgagctgcgctgcaagggcgatgccagtccctccactccagaggagaacgaaaccacgacaacca

SEQ ID NO: 791559 - DNA, 101 bp, Homo sapiens
aggcaagaccgaattcagaaggatatcgacgtcgtgatccagaagtccagagctgaggactgcctgtttgcaggttcgagaacttgtcttggacaattgca

SEQ ID NO: 791560 - DNA, 75 bp, Homo sapiens
ctcgcagaacgccatcaaccagctgttggggtgactcagtgggaacgccatctgagcggggcatgacctatgacg

SEQ ID NO: 791561 - DNA, 50 bp, Homo sapiens
tgaagagggaagacacgcggaaacaggactggaatgtcacgtggaatacc

SEQ ID NO: 791562 - DNA, 82 bp, Homo sapiens
tagtagctgaatacatcactactgcttcctgcctgacacagctcacttcaagaagtgcacaatgtcagaacgtggaattaag

SEQ ID NO: 791563 - DNA, 100 bp, Homo sapiens
tccaaagccattcccaaattatagagctaattacaactttcggggcatgtacaatcagagagagaagaagaaggaggttcctgctgtgccagaaaccctt

SEQ ID NO: 791564 - DNA, 80 bp, Homo sapiens
tgagaatcctcagtgtttgctagctttctgccctggcatgaacttacatggtcagagctggtttttcctgccctcaaata

SEQ ID NO: 791565 - DNA, 97 bp, Homo sapiens
ctcgacttgaccggcgccaaacagaacacaggagtgtggctagtcaagggcgaatgaggaaagatccagctctgacagaataatgagttgtgcaaag

SEQ ID NO: 791566 - DNA, 83 bp, Homo sapiens
cgccaagatgccggcctattttcagaggccggaaaatgccctcaaacgcgccaacgttgtcgagatgtccacagaaggaggat

SEQ ID NO: 791567 - DNA, 100 bp, Homo sapiens
cgggaagtggacacagggtgggctggaggagatctataaggacaggcagaaattctcagaacaggttttcaaagtggcctcctcagacctggtcaacatg

SEQ ID NO: 791568 - DNA, 100 bp, Homo sapiens
ccaatctcccaaatcaagtatacagaaaatcggtgaagagaggttttgaattcacgcttatggtagtgggaggccagatgctccagtgcctgatggcgaa

SEQ ID NO: 791569 - DNA, 90 bp, Homo sapiens
gtctacccctcctgtcggggaggcaaggtggttttggaccagacaggcgtgtctaagaaagaccacagcaagattctttcattcgtctcc

SEQ ID NO: 791570 - DNA, 90 bp, Homo sapiens
cgtggatttggggatggctataatgggtatggaggaggacctggagctccatcaagtatgatggtgaaggatgaatatgtgcatgacttt

SEQ ID NO: 791571 - DNA, 100 bp, Homo sapiens
gtggatgagctcctggacatggagagtgacgatgcccgggctgccagggtcaaggccaccgaggtccgtatctgccctgtggaattcaaccccaacttcg

SEQ ID NO: 791572 - DNA, 100 bp, Homo sapiens
tctgcttgacaagaattaactcaaatatctcttcttaacacctacctgattctggcatacaaataattgtgtgcccaagaagatgctgcagctggttggt

SEQ ID NO: 791573 - DNA, 75 bp, Homo sapiens
cccggaaccactctttgtgccgcagcttcgcaggtcaagaagcaggtctcgatcccggaccagaagttcctctag

SEQ ID NO: 791574 - DNA, 98 bp, Homo sapiens
gctggccgctggcctactctggaagttcagtggacaccgcccagaggaagacgaagaggaggagattgtgattgggtggcaggagaagctctttagcc

SEQ ID NO: 791575 - DNA, 101 bp, Homo sapiens
aaacctcctagtagaaaaagttcttgggacaaacttcatttggaaatggctagtgatgagctgaaagagatgcggaaaaacttgaccaaagaagccatcag

SEQ ID NO: 791576 - DNA, 97 bp, Homo sapiens
tgatggtgaagctaaagaaatttctacacctacccattggtctaaacttgatccaaagacaatgaaggctccttctcctgaaaaagccgaggaggag

SEQ ID NO: 791577 - DNA, 90 bp, Homo sapiens
tgctctattcttcacctgcaatactgctgaaggaaatcattttggtggatgatgctagtgtagatggtacaaattctgagctgtctaacc

SEQ ID NO: 791578 - DNA, 75 bp, Homo sapiens
ttgacccaaaccgaatggcagcatcggcacactgctcaatgcatgttatttgaaagcaattgagacgcaaccgaa

SEQ ID NO: 791579 - DNA, 100 bp, Homo sapiens
aatcttgaaacacctgcaggatattaaagtgaaattttctgaccctggacagcctatggtggaagtgggctaactggagctaaacttcaggactgtatga

SEQ ID NO: 791580 - DNA, 101 bp, Homo sapiens
gtggaagtttgagagaagtttaagagaagaaatggacatgattgcctaaatcagccaaacacaggccttggaatggatggctttggccaaccagttggcat

SEQ ID NO: 791581 - DNA, 100 bp, Homo sapiens
atctttgcagggcacctgaactcccaaagccactgaggagaaggtatcgggctttccgggatgacgatggacattattcccagacctactggaatcttct

SEQ ID NO: 791582 - DNA, 86 bp, Homo sapiens
ctgtgcggttccggggagctcggctccaagttctgggccaggtcagagcagcccaccatgggatggggagggggtggaggctgcac

SEQ ID NO: 791583 - DNA, 98 bp, Homo sapiens
gcaagcatgcagcttactgcttgaaaggaggaccatgtcattagactttggcagtgtggcactaccagtgcaaaatgaagatgaagagtatgacgaag

SEQ ID NO: 791584 - DNA, 75 bp, Homo sapiens
gtcacactacgacagtgagaaaggagttggtgcttcccgtgctgctgttgatgctggctttgttcccaatgacat

SEQ ID NO: 791585 - DNA, 90 bp, Homo sapiens
gctgtagctgccctttccgtttccagggttccgaccaggctgtacaagaagcatgatgccagcatctgcttctggtgacaacctcaagaa

SEQ ID NO: 791586 - DNA, 87 bp, Homo sapiens
ccacgcacctgcagctctgctgagagagtgcaagccgtgggactgtggatattcataaggagaaagtggcacgaagagagattggta

SEQ ID NO: 791587 - DNA, 50 bp, Homo sapiens
gacggagagaacacgagcccatcagacaaagtggtgaagaaagggaagaa

SEQ ID NO: 791588 - DNA, 90 bp, Homo sapiens
caggaccgtggagaaggaggagaggcatggcggccttgaccagccagtgctgcaagctttcttcctggtggcagatgacatcatggattc

SEQ ID NO: 791589 - DNA, 74 bp, Homo sapiens
agcacagctgtcacccggacatcaagtattcaccagttaatagcaccaggattgacttctaaagactcttggta

SEQ ID NO: 791590 - DNA, 100 bp, Homo sapiens
ctcgctccgctcgtcccgctcgtcatggcctacccgggatacggaggaggggagtttgttcatctggcaaagagactggttagtgatcctgcattagaaa

SEQ ID NO: 791591 - DNA, 100 bp, Homo sapiens
catgatacaacatggatgaacttcaaaagtaaaggacgccatgcaccaagataaatgtatgagttgcctgttagaagtagcactttctggaaatgaagaa

SEQ ID NO: 791592 - DNA, 90 bp, Homo sapiens
agacagaaaacctgaagatgtgcctcctgagattttgtctaatgaaagacatagacgagtgcactgcagggacgcacaactgtagagcag

SEQ ID NO: 791593 - DNA, 98 bp, Homo sapiens
gggctttaccagcaactaccccagtgccggggagggttctgctgcttcgaaagctggtttttgtctgatgaaaatagtctggagtataaatattacaa

SEQ ID NO: 791594 - DNA, 100 bp, Homo sapiens
gaacggtcaaggagccctaaacagccaggaggaagaagaagtcattgtcacagagggtctgacggtaactgctgtaaaagactcaggagaatggaatttg

SEQ ID NO: 791595 - DNA, 90 bp, Homo sapiens
tgccactgcggtgatggctccatggcctctcctggactggctgcgtgaccccgacggctgcttctgggtctcagccaaaatgagtgatac

SEQ ID NO: 791596 - DNA, 100 bp, Homo sapiens
acctagcaacaaaaagaaagctgcgttaatgtttgcaaatgcagaggaagaatttttctatgaggccaaaacagcttcatgaaatcccagccttttattg

SEQ ID NO: 791597 - DNA, 100 bp, Homo sapiens
gctcttcatcaccttcgtggtcgtctggtcctactacgcgtacgtggtggagctctgcgtgtggcgatgccagtccctccactccagaggagaacgaaac

SEQ ID NO: 791598 - DNA, 100 bp, Homo sapiens
acccactattcagccattgggtcacaagcgatgaaaagagcaccttgaagccatcactggtgcaagctatatttaacggagatcctgatgaagttcgagc

SEQ ID NO: 791599 - DNA, 75 bp, Homo sapiens
ctcagtaccagagacagaagcagatggattcgtccttttagaataatcatgggccagactgggaagaaatctgag

SEQ ID NO: 791600 - DNA, 98 bp, Homo sapiens
cttcaaccccaggggaccagaggaactcagccctgattgcgtacttcctcctgtgctggttccaagacacagcgaatataatcctcagcacagcctct

SEQ ID NO: 791601 - DNA, 100 bp, Homo sapiens
gttaaacaagagtcggcactgggaacagctgtgcgtagaccagaccagtgacttataagaatgaagagcttcgaaacttgtctttgtctggccatgtggg

SEQ ID NO: 791602 - DNA, 100 bp, Homo sapiens
gcacaggcttgtccggggagcagtatgccggaagctggttttcaggccacaaatgctttcacaggactatcctattaagtgtaatctcactgcttaatga

SEQ ID NO: 791603 - DNA, 101 bp, Homo sapiens
actgcttaacagctcgcacagcattcctgttgatatactttggtgttgaacatttgggatagaagagagaaatttaaaattaaaaattttccatatttcta

SEQ ID NO: 791604 - DNA, 90 bp, Homo sapiens
tatgggtgaaatttggctttcattcatgaatgagaagtccaaggcttgcgagaaggtcatttccgtgggtcaaacggtcatcacgaagca

SEQ ID NO: 791605 - DNA, 106 bp, Homo sapiens
gccaggaaagtggtgatccaggcaggaccaggctgcactgaagggacagagctgacaaagatgttcttcctcttccccgacccacatttcaagcggacaaagcaca

SEQ ID NO: 791606 - DNA, 74 bp, Homo sapiens
cgctcttcagcaagacccaaggccaacaagtgtctagcctcaaagagtgcctggaagagctgggatgtctggtt

SEQ ID NO: 791607 - DNA, 100 bp, Homo sapiens
tagctgaaataacccttgatcctcctcctaattgcagtgccgtggaggtcccagcccccgctgcggttctcggaggtccggagcccctgatgcagtgcac

SEQ ID NO: 791608 - DNA, 89 bp, Homo sapiens
ggacggcggcgcggagaaggcaggtcattcccaaaagcaagttcgtcttggtgaagttcgacacccagtacccctacggtgagaagcag

SEQ ID NO: 791609 - DNA, 80 bp, Homo sapiens
catgccgctcctaagcctgcacagccgcggcggcagcagcagtgagaggtggccgtctgcccggcccagcaccatgcaca

SEQ ID NO: 791610 - DNA, 75 bp, Homo sapiens
ggccagcttcacgaagtcagagagaacactcgtgaaactgctcaggccatcaagggtatgcatatacgaaaagcc

SEQ ID NO: 791611 - DNA, 90 bp, Homo sapiens
aaataaggacaaaagccaagaggaggacagttcgctacacagcaatgcatcgaggagtctatgggtaaaacatcagggaagctgtttgat

SEQ ID NO: 791612 - DNA, 100 bp, Homo sapiens
gcggtcaaaccgaagcagacaagaaccatcgcgatttaatattaaggaagagcatggtgacatggaccagaaggagagagatgttatcatgagggaattc

SEQ ID NO: 791613 - DNA, 98 bp, Homo sapiens
cgcgggccgggggccgccacggcgaggggccgggccaggccgggcggagagaatatgccttctgcatcctgtgatacactactggatgacatcgaaga

SEQ ID NO: 791614 - DNA, 100 bp, Homo sapiens
gaatgacaccatttctaagcaacttacattagaacaggtgtaccttgaaagacttttaacatacgcagagatagatatctgtccggccaactggaagcgg

SEQ ID NO: 791615 - DNA, 98 bp, Homo sapiens
ggcgccgccgcgtcttcccggtctcctttcccggccgcacaggcttgtactcccagagtacctcatccacgctttcttctgtgtcatgtttctttgtg

SEQ ID NO: 791616 - DNA, 98 bp, Homo sapiens
ctgtaaaagcataattgaatttgtttcacccccgtggattccagtgggcccgacagcgcaacagctccagaacctgggtatcaacccagcaaacattg

SEQ ID NO: 791617 - DNA, 83 bp, Homo sapiens
catgttcctaatacctacacttgtttctgtggcatcaagattacgcgaagaagcgcataacatgggaactattcacatgtccg

SEQ ID NO: 791618 - DNA, 100 bp, Homo sapiens
cagaatttgatgctgtggttggatatttagaggacattatcatggtggaaatcctgactgctcgtcagaagaaagcagaagaactaaagagactcactga

SEQ ID NO: 791619 - DNA, 96 bp, Homo sapiens
gcggaagtgcagctgcctcagttcttagcgcagattttaggtgatgggcaagtcagaaagtcagatggatataactgatatcaacactccaaagcc

SEQ ID NO: 791620 - DNA, 100 bp, Homo sapiens
tcgaatcctctcctggtttagggaggggaagcctagaagaagtccaaagtgccctttacaacaaagagatggaatgccttagaatgactgatgaagtcga

SEQ ID NO: 791621 - DNA, 100 bp, Homo sapiens
ggaccatggtggatcgggcagaggcaaccacatccctgtgtttagtcccgcacttacagacggctcgctgggcgacatgatcttcttccattcctacaag

SEQ ID NO: 791622 - DNA, 108 bp, Homo sapiens
ggtgctgcgggacctcaagctgcggaaattcatctttaaggacgaagagagaataagaagatctacttggacattattcacacatacatggaagtgcatgcaactgtt

SEQ ID NO: 791623 - DNA, 100 bp, Homo sapiens
caacattggccagaaggaagacttcgaggaagccaggaagaaggcactgaagcttggggccaaaaaggttacgggtaaattccggggaggtgtgaacccc

SEQ ID NO: 791624 - DNA, 82 bp, Homo sapiens
cacgccgagctggccgcgccgaccaccatcccggtcaccacgaggatggataaggtgggggatgccctggaggaagtgctca

SEQ ID NO: 791625 - DNA, 90 bp, Homo sapiens
ctcgctgttcccatggacatggcccaggtgcctggtggtgctagctcctcccacctcagcacctgctgcatctggagcagcccaagcctc

SEQ ID NO: 791626 - DNA, 82 bp, Homo sapiens
cccgcccgccatggccaccaagtgcctacaccaactaatgttacaattgaatcctataacatgaaccctatcgtatattggg

SEQ ID NO: 791627 - DNA, 100 bp, Homo sapiens
tccagctccagtgctttggtctgttgtgctggcttggtgacgctcacagtgctgggaaggaatctatccaaggggaagactcaggagagaaggacccaag

SEQ ID NO: 791628 - DNA, 73 bp, Homo sapiens
gagctgctgctggcgagcccgctactgcagggacctatggagctggttgttcgtttcctcaagcgagcatcaa

SEQ ID NO: 791629 - DNA, 75 bp, Homo sapiens
gccagacacttgtagagagaggaggacaaattggcagagggggtcgatttgggaggaaaggtgtggctataaact

SEQ ID NO: 791630 - DNA, 75 bp, Homo sapiens
accagcgagtgaagcaaagcacgatgtctttggtggacttgggaaagaggttgctagaagcagcaagaaaaggcc

SEQ ID NO: 791631 - DNA, 74 bp, Homo sapiens
ttgctgacccagaggagagttctccaaacatgatcgtttactgcaaagtgcagatgaaggattttcggttttct

SEQ ID NO: 791632 - DNA, 89 bp, Homo sapiens
tctcgaaagcctatcagcatagttaagagtgcccttatgcctgcacagttgttttttaagacggaagatggaggcaaatatccagttat

SEQ ID NO: 791633 - DNA, 98 bp, Homo sapiens
agcagacagctccctgggcaccaggcagctaacaggtctgaatttcctgctgctgttcacaaagatgctttttatctttaactttttgttttccccac

SEQ ID NO: 791634 - DNA, 75 bp, Homo sapiens
atgagaaggacccacggcgtctgttcgaagacgcaaacatgcagatctttgtgaagaccctcactggcaaaacca

SEQ ID NO: 791635 - DNA, 90 bp, Homo sapiens
ccgagactctccttgcttggaattctgcccactctgcggagttagcagtcacgacctccagcacagttcccaaagagaatattacgtctg

SEQ ID NO: 791636 - DNA, 100 bp, Homo sapiens
gggccggaactggagccgaggcgcaggtggcgctgggtgtccctggccagtgtccttccacctgtccacaagcatggggaacatcttcgccaacctcttc

SEQ ID NO: 791637 - DNA, 96 bp, Homo sapiens
tgggagtcgaagcgagggtctgaagttcacgactactagaaggggaggggagtggaaaggctctcagtgaaaaagatgagaacaacgtgtcaagct

SEQ ID NO: 791638 - DNA, 98 bp, Homo sapiens
tggagctgctgaatcctgcccgcgtgaaccacatgcccagcacgggtatctgaaaaggtttaaagtgatgaagatcaaagttctaagaagctggtgcc

SEQ ID NO: 791639 - DNA, 82 bp, Homo sapiens
accaaggatctggggatcttcgcactatcccaagggaacggcaggagcagctgatgggatatcggaagagagggccgaagcc

SEQ ID NO: 791640 - DNA, 103 bp, Homo sapiens
ggagcgcgaggaggaggccctggcatccaagcgtttccgtgccgagcggcaggacaacaaggagaactggctgcaattatgtttgagaccttcaacaccccgg

SEQ ID NO: 791641 - DNA, 100 bp, Homo sapiens
gcttcacgatgcccagcggtcagctgtccccatgggctcgtcaggcgttactttgaagcctaccagcacacgttggaccctgaggagaggtttaccttag

SEQ ID NO: 791642 - DNA, 100 bp, Homo sapiens
atatgaaatgagtctggaaaactgggccaaagcagtgaaacgctccatgaattggttatcaatactctggctgaccatcatcatcgtgggactgactttg

SEQ ID NO: 791643 - DNA, 99 bp, Homo sapiens
gtttgtcaagcattttcaattgtatttccgttcatttacaagttattttctcttcttctgaaaaagagatcttgacagggtttcaccatgttggccagg

SEQ ID NO: 791644 - DNA, 111 bp, Homo sapiens
agtgtccctttccttcctggcgctttcctgggttgcttctggcggccatggtgttgctgctgtactccttctccggtgattcgcaaggggtggctcaccatcagcaacatt

SEQ ID NO: 791645 - DNA, 98 bp, Homo sapiens
catctgtatcctctgcagcatccttgatgataaaccagtaaatagtttcgctcttgtttcccaggccggagtgcaatggcgccatctcggctcaccgc

SEQ ID NO: 791646 - DNA, 98 bp, Homo sapiens
tggaaaggaatgaggagttacagagggccgagaaggacaggatcagtgaacagagtatctgtcaggcaagagctgctgtgatggtttatgatgatgcc

SEQ ID NO: 791647 - DNA, 83 bp, Homo sapiens
gcctcccccgtccggtccctctctccacggtaagggaacaccttccaccatgaccacctcagcaagttcccacttaaataaag

SEQ ID NO: 791648 - DNA, 100 bp, Homo sapiens
cttttttcttcaaatactgttgaagtatatggttattcaggctcaggccacagggtcaccacatacatcgcccacccatggaggcggccggccaatgccc

SEQ ID NO: 791649 - DNA, 100 bp, Homo sapiens
ggtggaagtgcggggctccaatggcgctttctacaaggtgctggagaatctggtaaaagcaccattgtgaagcagatgaggatcctgcatgttaatgggt

SEQ ID NO: 791650 - DNA, 98 bp, Homo sapiens
ggctctctgctcttcagagtctgcttggaacgggataagtggggcagagcatcaaccccaagttggcgggcctgattgggcggcacgggccccagaac

SEQ ID NO: 791651 - DNA, 75 bp, Homo sapiens
tttgttatctgcttctatttggaggctggggacctctcaaagcacatggattaattgatgtatgttgagtttatg

SEQ ID NO: 791652 - DNA, 100 bp, Homo sapiens
cccaacccctaaggacctagaggagtccatagtacaggaagaaaagaagaagctgacccctgaaggaaacaaagggcaggaagatcccaacagtttgcgc

SEQ ID NO: 791653 - DNA, 90 bp, Homo sapiens
cccagtcagaccgatctgctctgctctcggtctctccaagtttgtgcctaagaagatgataatcacacaaacaagtcactgttacatgac

SEQ ID NO: 791654 - DNA, 75 bp, Homo sapiens
ggaccatgtgatgcacctgctccaggtgttgcagtatctcaacaaaatggctgggaatgaatacatgggtttcag

SEQ ID NO: 791655 - DNA, 90 bp, Homo sapiens
gtgaccaccgctgcgttttctcggggtgagatttcaatggaaaaagtgaaggtaaagcgttatgtgtccggaaaaaggccagactatgcc

SEQ ID NO: 791656 - DNA, 99 bp, Homo sapiens
gctcagaggaaaggctacttttcaagatttaagcgagagcctcactggttcccaggacatcaacctgaactggatcctccccgatacaaatgcacagaa

SEQ ID NO: 791657 - DNA, 97 bp, Homo sapiens
ccgctccgagtgccagtgggagcggatccctgagctcgtcaagcagctgtcggccaagctcatcgccaacgttactgtgactgtgggaggcaagcaa

SEQ ID NO: 791658 - DNA, 75 bp, Homo sapiens
ggacccgctgcccctgccggcccggccgggtcgggcggcccagattcgacggaggcgccttgcacgacttgctgg

SEQ ID NO: 791659 - DNA, 98 bp, Homo sapiens
agggctcgtccaactggtccctcagtcacacatgccagagattgctcaggaagcaatggaggacacctgactgatagtgaatgtaatcagaaacacac

SEQ ID NO: 791660 - DNA, 71 bp, Homo sapiens
ccgcagcccgggcccaggccccggcagcgcctgggacaagacatgcacatgatggtgtccaagccagaaca

SEQ ID NO: 791661 - DNA, 88 bp, Homo sapiens
agaaggtctctggagacatcttcagcaggattgtggctgcacggctcaacggttcccttgatttcttctccttggagacccacactgc

SEQ ID NO: 791662 - DNA, 95 bp, Homo sapiens
tcacagagggagatgtcaggtgggagaaaggcttggccttcgtgcctctgcagatctggtccaaagtcctggccatctcaggaatcttcaccatg

SEQ ID NO: 791663 - DNA, 76 bp, Homo sapiens
cagaaagccattgagatctatgagcaggtgaaaaattagacgatttcaagaattggagctgaatctgatgttaagt

SEQ ID NO: 791664 - DNA, 87 bp, Homo sapiens
cgaagctggccgagcaggctgagcgatacgacgcccgagcgggaagaagttccgcagcaagccgcagctggcgcgctacctgggcgg

SEQ ID NO: 791665 - DNA, 100 bp, Homo sapiens
ctggctatcttctgagcgtgtgccagaagatccagctttgttgaaaagcgaagccgttagtcccttaatacaaaggatccctgggtatcagtatgtgtca

SEQ ID NO: 791666 - DNA, 99 bp, Homo sapiens
ctcggtgttcccgctggcggcgggcatcttcttcgtgaggctgctcttcgagcgatcccggcagcggctccgctgaagggcccaggcccctcttcgtcc

SEQ ID NO: 791667 - DNA, 100 bp, Homo sapiens
taagcactgctgcactttatgagttaacaagcacaagccctggctggagcccacctaccacggcatagtcacagagaacgacaacaccgtgctcctcgac

SEQ ID NO: 791668 - DNA, 83 bp, Homo sapiens
ctgctgctcgggctgctcttggagctacgagttccagggagctctgtcctggtgaccgtgcccgggttatgacgactaatccc

SEQ ID NO: 791669 - DNA, 100 bp, Homo sapiens
catccttcgggagaggatatgtagcgaggaggaacgcgctaaggcaaagcacctggtattccctgtcaacgatgagccaccagtcttaaaggctgacctc

SEQ ID NO: 791670 - DNA, 129 bp, Homo sapiens
agcagcagctggatattgagccggatagacctattggatatggagcctttggtgttgtctgaacaacaccgatggacttcaggaacttgcctgtgggggcttaatttattgcttgggagttgtgttctt

SEQ ID NO: 791671 - DNA, 74 bp, Homo sapiens
ccagaaagcagttaacagtgccaccggtgttccaactgtttaaatttgaaggaggagtttcctgcctggtatga

SEQ ID NO: 791672 - DNA, 101 bp, Homo sapiens
ggccactccagtcggtgttgagcacggcgagcagtctcaggcctttagtgatgatggttttggcacaaataccagtgggaatagtatttttggaagtaaac

SEQ ID NO: 791673 - DNA, 83 bp, Homo sapiens
ccggcgcctcctcggagtccttggggacggagcagcgcgtcgtggggcgagcggcaggatccctgctgccttggtgatcccgg

SEQ ID NO: 791674 - DNA, 96 bp, Homo sapiens
aagaaccattgaagcttgagagaaaagcccccaaaagcagctattcaggactttccttatcccagttgattgtgcagaatacactgcctgtcgctt

SEQ ID NO: 791675 - DNA, 73 bp, Homo sapiens
ttccttactttgtcttggtatactacatggcaaaatgggaaagcgagcttgacatgatttccacaagggtgat

SEQ ID NO: 791676 - DNA, 100 bp, Homo sapiens
agccaggttgaccattgctgccgttctgtacttgcttttcatgattggagaacttgtagctatccagtcagttcgctgctattcccatgggtcacaggag

SEQ ID NO: 791677 - DNA, 98 bp, Homo sapiens
gacttcctcacccgcgcctgcgacctcgggagtggggaaggccagggccagattctgcagcgcttcccagagaaggactgggaggacaacccattccc

SEQ ID NO: 791678 - DNA, 80 bp, Homo sapiens
gcattggtatctacggcctggacttctatgtgtctggccttaccaaggcagtgaaggagagtacaattacattgcagcag

SEQ ID NO: 791679 - DNA, 75 bp, Homo sapiens
cggagagcggcctgcgggcgatcgggccgagggccatgaagcccccaggaggagaatcgagcaatctttttggaa

SEQ ID NO: 791680 - DNA, 100 bp, Homo sapiens
aggtcatctacacggggaaggagggaaagagctcccgcggttgccccattgcaaagtggacgtgcctcttgccttccgccatgattgtgaggcctcccca

SEQ ID NO: 791681 - DNA, 90 bp, Homo sapiens
cggaagcgcggacggcgcacgacgagtactggcatgcgcacgtggacaaggcatccgtgtacaagatttgcagagaaatgtatgacgatg

SEQ ID NO: 791682 - DNA, 82 bp, Homo sapiens
aactccagagtatttggctccagaaataattctcagcaagttggtgtaatacggtgcccagtatgccgccaagaatgcagac

SEQ ID NO: 791683 - DNA, 83 bp, Homo sapiens
ctgatctcaaacagcgacgagagatccgtgcaggcacagccttttacattgatcagacattaaaactaccactactatggaag

SEQ ID NO: 791684 - DNA, 100 bp, Homo sapiens
gcaaagattaagactgtgaaaaggctggtgaaagttaaggaaatggtgatggtatttcaaaactgatgagtgaaaatacagaaggatcagcacaagcacc

SEQ ID NO: 791685 - DNA, 50 bp, Homo sapiens
cttgaagtgtgaacttcagcagctgagagcagtagaagactcagaaagtg

SEQ ID NO: 791686 - DNA, 50 bp, Homo sapiens
gcactgctacaggactctactatggaggtctgccatcatggatgttctcg

SEQ ID NO: 791687 - DNA, 100 bp, Homo sapiens
gggatgacagctctgaatgggggaactccttcttctgccttatgtttgatcatcggccaaggtcctggcgagaactgcctctgcggctagctgattttgg

SEQ ID NO: 791688 - DNA, 138 bp, Homo sapiens
ctgaaggagttcaagaattcccagaagaggcagcatgcggaaggcattgctgggagcctgaaaactgtgaatggtgctggagaatctggtaaaagcaccattgtgaagcagatgaggatcctgcatgttaatgggttt

SEQ ID NO: 791689 - DNA, 101 bp, Homo sapiens
ttcatctttcatgcagtgacatgttgataaaaaatgatgatgccatggacaatattaccaggcagaaccaattctacgatacccaagtcatcaaacaagaa

SEQ ID NO: 791690 - DNA, 99 bp, Homo sapiens
gttggggccctcttgataaaaagagatgtggggggattctcgacctgctaacagaactggaccttttcggctcaagaccatcagcctggtgatccgcgg

SEQ ID NO: 791691 - DNA, 80 bp, Homo sapiens
aaattaaaagaggagcagcatggcatttcagtcactggtttgcagagtccaggagccagatgaccaagatgctccagatg

SEQ ID NO: 791692 - DNA, 100 bp, Homo sapiens
gggacgcggagtcctgaagccggcggacggttttcgtacgggcggccgtgcgcgaggcgagggattaaagcctgtggtttccacagaagcaccacctatc

SEQ ID NO: 791693 - DNA, 100 bp, Homo sapiens
acgggacagagcggtcggtgacagcctcaagggcttcagcaccgcgcccatggcagagccagacccctacacgcttgaatgtgttcaagaatgatcagga

SEQ ID NO: 791694 - DNA, 100 bp, Homo sapiens
ccagtgtatgaagcccttcaccaacaaagatgcctatacttgtgcaatctccctttcctggtgatgatgaagaggaagtttttgacagtattgtaaatga

SEQ ID NO: 791695 - DNA, 83 bp, Homo sapiens
gtttcagagcgcagccatcggtgcgctgcagatctctgttgaggagctggcgcggaatctggtcatcaaggtcaacagggatg

SEQ ID NO: 791696 - DNA, 82 bp, Homo sapiens
gtgactacaacatattgctgcaatcaggaccattgcaataaaatagaacttccaactactgaatttctagaaggaggagttg

SEQ ID NO: 791697 - DNA, 73 bp, Homo sapiens
gtggaaagtgaatgtgcggaaaatgccttcaaatcagaatgagccggcaggtggtccgctccagcaagttccg

SEQ ID NO: 791698 - DNA, 98 bp, Homo sapiens
tcagctgctcctcaagctgcacaccaccagccacctccacagtgactttgttgagtgtcaaaacatcctcaaggtgctgcttggagagctgaagggca

SEQ ID NO: 791699 - DNA, 82 bp, Homo sapiens
agggtgccctcaatgagcacatgaccagcttagcttctgtcctaaaggcaatgataccgtctttatccaagttactctgccc

SEQ ID NO: 791700 - DNA, 100 bp, Homo sapiens
cccacatgacagcaggagcgatggccgggatcctggagcactcggtcatgtacccggtggactcggtgaaggtgatggccattgccactttggctgcctg

SEQ ID NO: 791701 - DNA, 100 bp, Homo sapiens
atttcatataccaaaatccacatatcttcaaagacaagtgcctggatcaaagtggaacagctgaagccatatcatgctcataaagaggaaatgataaaaa

SEQ ID NO: 791702 - DNA, 100 bp, Homo sapiens
caacaactgctacatctgttggaggagccaactagcatggaagtgcagacatatctgaagagatggattaagaatgctttggattaaggattgtggagca

SEQ ID NO: 791703 - DNA, 50 bp, Homo sapiens
ctgcccgcctgcggctgctccggcaataagagctaactgccatcaagagc

SEQ ID NO: 791704 - DNA, 134 bp, Homo sapiens
cgagtttgcgactcgcggaccggcgtccccggcgcgaagaggctggactcggattcgttgcctgagatggcccactgcgtgaccttggttcagctgtccatttcctgtgaccatctcattgacaaggacatcgg

SEQ ID NO: 791705 - DNA, 50 bp, Homo sapiens
aggggccactcagagtcgcccgagaagccatgcggaccctcagttggaag

SEQ ID NO: 791706 - DNA, 75 bp, Homo sapiens
agaaaatttttttggtgctataggctgctgtcaacctatgttactaagacacgatggagtctcgctctggcatcc

SEQ ID NO: 791707 - DNA, 75 bp, Homo sapiens
gctgcccacagcctagcagtcgggaccgtactgaggtaagaatgattgatgttggctgatattggagtgctcatt

SEQ ID NO: 791708 - DNA, 82 bp, Homo sapiens
tgctcggcttagtgctgccaaatcttctccaatgatggaaacaatcaacatgatgataagagcacttttgaagaaacgtgtc

SEQ ID NO: 791709 - DNA, 101 bp, Homo sapiens
gcttttctgaggacagcagtacgctgggtcggaccaggtctcttcccatcactattgaaatgctaaaagtttcaattttgtggggaagattcttggaccac

SEQ ID NO: 791710 - DNA, 98 bp, Homo sapiens
acagacctagtgggcgttgcctttagacccagattacataccggttacggcacctccttcgtgcaaggtgtgatgcatccccagtgaccaacaacacc

SEQ ID NO: 791711 - DNA, 75 bp, Homo sapiens
aagctggtaggcacgggcggctccgcagtgaccggactcgggggaggtgtattacctgactgcttaaccgatggc

SEQ ID NO: 791712 - DNA, 100 bp, Homo sapiens
gcctacggcgaggacctgggcgcggactacaacctctcccagagctcccagctcctccagcagccgacaggaggcccgtcaagatgcaggcaggcattgc

SEQ ID NO: 791713 - DNA, 83 bp, Homo sapiens
gggtgcccgtggaccacaggccctcgttgcccagatgcatcgactacaagacgaccaccatcctgctggacgggcggcgggtg

SEQ ID NO: 791714 - DNA, 100 bp, Homo sapiens
agacaaacataaagatgaagtgcttaattcaaggtcacacaatgtcggggatggacctccagatttccttactgaagccctacaggtggcaactactagc

SEQ ID NO: 791715 - DNA, 90 bp, Homo sapiens
gctgttcctcccagctacgagctgccccagaaagttggagtgactggtccccctgatccacaagtccgctgtccctctgtcattgagttt

SEQ ID NO: 791716 - DNA, 76 bp, Homo sapiens
ctgactttcagctatggaatcggaattgaatgatctggcacgggaccctccagcacagtgttcagcaggtcctgtt

SEQ ID NO: 791717 - DNA, 83 bp, Homo sapiens
aaaaataccacgacaaaaccaccctagaggccactgtctgcagctcccgtgaagatgtccactccagacccacccctgggcgg

SEQ ID NO: 791718 - DNA, 76 bp, Homo sapiens
attctgcagatgaacatttgattccacagctgggctatgtggcaacaagcacagtgtggatacaagtccaggatat

SEQ ID NO: 791719 - DNA, 98 bp, Homo sapiens
ctgcttccctgtgtgcctgcagtttttcaccctcacgctgatgaacttgtacttcacgcagggaactctaatgatccaggacaaagaagttaccctgg

SEQ ID NO: 791720 - DNA, 154 bp, Homo sapiens
cttcaagccggaagtgccctagggcgggaaaaggtgaaccggaagggccaacaggagctagaggcgcgcttcgctgaggttcatcctaagttccactataaacaggctcatgactcgggcacagacacttcttgcgtgactttttcctatgatg

SEQ ID NO: 791721 - DNA, 100 bp, Homo sapiens
ctggaccagagtcgagcccggcaccagacaagttggatggcttgaggactggtactaaaaggaaacgtgactgggaggccattgccagcagaatggagga

SEQ ID NO: 791722 - DNA, 100 bp, Homo sapiens
gccctcatccacgatggcctagcacgtggaattcgcgaagctgccaaagccttagacaagctcttctggagctggagatgaactcggacctcaaggctca

SEQ ID NO: 791723 - DNA, 82 bp, Homo sapiens
ctggaccagctcatgggcacggctcgggacgaattcagaaggagctggcggacatcactttagaccctccacctaattgcag

SEQ ID NO: 791724 - DNA, 82 bp, Homo sapiens
ccatttcgcccctcgcgtccggagtccccgtggccagccgagagggtgacctctctgggcaaggactggcatcggccctgcc

SEQ ID NO: 791725 - DNA, 75 bp, Homo sapiens
agaggaatcagccaggaccaatgctgaaaaacaggaagtggagttcttgtccacgtccattgctcagctcaaagt

SEQ ID NO: 791726 - DNA, 100 bp, Homo sapiens
gtaaattgaaaattggtggtgtgtcttcagttaatgagagacctattgaatatgcttttaaggctattaaccagggtggccttacatcagtagctgtcag

SEQ ID NO: 791727 - DNA, 83 bp, Homo sapiens
agtaacagtacttgggatcccccagttccaaagtgtcttaaaggtaatggcaccattgacttccccgaatttttgactatgat

SEQ ID NO: 791728 - DNA, 97 bp, Homo sapiens
agaaagcaggaactttcgtggtgagagttggcagggggttagcattgaagaacgtctgggagcaatggatatagacacacacaaaaaaggaaaggaa

SEQ ID NO: 791729 - DNA, 83 bp, Homo sapiens
caaataaattgcaagcattctatccaaatggaggagatgttaaagtaacccatcttgcaggacgacattgaagattggtcttc

SEQ ID NO: 791730 - DNA, 100 bp, Homo sapiens
cggagtcaccagacctggagtttgagtatgctgacacagacaagtgggctgcagagctctcggggctacagaactggctacccttatcgataccctgctc

SEQ ID NO: 791731 - DNA, 100 bp, Homo sapiens
gccaagcagagcccacccatcgtgaagatcctgaagtttggctggttcccaatcatcctggccatggtcatcagcagcatgtcctcctcacattcttcca

SEQ ID NO: 791732 - DNA, 89 bp, Homo sapiens
ttggtgaagaccttggactctcaaactcgtacctttattgtgggggcccaggctggaggcaaagctggaaaggacagtgggaaggccaa

SEQ ID NO: 791733 - DNA, 75 bp, Homo sapiens
gagatgcagctcaaggggaagaaagcatttgccgaatacattctgatggatcccagtcccgagtatgcgcccata

SEQ ID NO: 791734 - DNA, 99 bp, Homo sapiens
gattcgcagtggtcgcttcttctccttgtgacagctatattgtgcgtgtcaaggctgtggttatgaccagagatgactccagcgggggatggttcccac

SEQ ID NO: 791735 - DNA, 101 bp, Homo sapiens
tagcctggacccacgacggcaggaattattggaggccaggtttactggagtaggtgttagtaagccggttgctgaaccaatccccatctgtagtttctgtc

SEQ ID NO: 791736 - DNA, 75 bp, Homo sapiens
tggagatatggcgcaactgcggcgccgagacggtcatctgttccagccgggccactgtgatgctttatgatgatg

SEQ ID NO: 791737 - DNA, 74 bp, Homo sapiens
ttcacagctgattcctgggagcacatccatttcattggcaagatcaataagatggagtggtggagccgcttggt

SEQ ID NO: 791738 - DNA, 100 bp, Homo sapiens
atggatatggcagtggacgtggatttggggatggctataatgggtatggaggaggacctggagacagagatttgggattagaatctaccttaatatcgtc

SEQ ID NO: 791739 - DNA, 98 bp, Homo sapiens
tgtgacctccgcagccgcagaggaggagcgcagcccggcctcggtgctggagaatctggtaaaagcaccattgtgaagcagatgaggatcctgcatgt

SEQ ID NO: 791740 - DNA, 83 bp, Homo sapiens
tgcagctgcctcagttcttagcgcagacaatgcagatcttcgtgaagactctgactggtaagaccatcaccctcgaggttgag

SEQ ID NO: 791741 - DNA, 136 bp, Homo sapiens
cttcccttcccacattctatactgcccagcgcctgggattccagatctgcgtttgaatccaggaaagggaggaaaattattgcaagtgaattcaggtgccagagaacaacttttttttgaagctccaagaggcaaa

SEQ ID NO: 791742 - DNA, 100 bp, Homo sapiens
aagcaacaggaaaagcccctttactgtaaaaggaaattggtacccctataatgggcagtgtctaccagatattgccattttcaatgtggatgactccgtg

SEQ ID NO: 791743 - DNA, 50 bp, Homo sapiens
ctgacctgtaaatcatcctttaggttctgcacttttaaaagaaaagcaaa

SEQ ID NO: 791744 - DNA, 75 bp, Homo sapiens
agcctcccgagtggctgggattacagagatggagtttcaccatgttggccagactggttccgaactcctgacctc

SEQ ID NO: 791745 - DNA, 100 bp, Homo sapiens
tttcctcggctgccgccaaggtgttcggtccttccgaggaagctaaggccgcgttggggtgagaccctcacttcatccgatgaagactcttaagatgaca

SEQ ID NO: 791746 - DNA, 100 bp, Homo sapiens
ctcccaggctcaagcagtcctaccatgtcagccttcccagtagctgggaccacagaaagtttcctacactactgaggtttaggggcactgtgaagcaaaa

SEQ ID NO: 791747 - DNA, 74 bp, Homo sapiens
tggccttcgcgcaggagatctcgattgcttaccacagtgcggagactcctttctgaaaaggccactcacgtgaa

SEQ ID NO: 791748 - DNA, 89 bp, Homo sapiens
gccgggggctcggccgggccgtcccggcctgcgcagcctgagtgccggtggtggtgtgcacattgagccccggtatagacagttccccc

SEQ ID NO: 791749 - DNA, 75 bp, Homo sapiens
ttcggaaccccagagcacgagtagtagtcttaagagaaactgttaaggcagcaataatagaagagcagaaacgaa

SEQ ID NO: 791750 - DNA, 90 bp, Homo sapiens
ctggtctgatgaagccaactgtaccgggtctctctgtgtctccagagccctgtctgtcgctgggagctccatctctcctgccccacccat

SEQ ID NO: 791751 - DNA, 98 bp, Homo sapiens
tgagctggtcgtctccgagatcttcgtcagccagacaaccttcgtgggcatcgtccctcttgccatgaaggtagaagatagcaccatgccgattcgtc

SEQ ID NO: 791752 - DNA, 82 bp, Homo sapiens
gaaatgttccttagaaaggagcagcagggcactgtgacctttgaagatgtggctgtgaacttttcccaggaggagtggtgtc

SEQ ID NO: 791753 - DNA, 97 bp, Homo sapiens
cagcagcttcctgtggctatctcaacatagcagaaatttcacggtccctcatggtgtctcactccagcagacagaggattgtgtcgtgccaatgaga

SEQ ID NO: 791754 - DNA, 100 bp, Homo sapiens
aatggaatctggtccaaacaatcatgggaatttccaaggggattcaaacttcaacagaatgtggcaaccagggaatctaagggaggaaattatcaactgt

SEQ ID NO: 791755 - DNA, 100 bp, Homo sapiens
gttcttgtttgtggatcgctgtgatcgtcacttggcacgggcgagagcgggaagagcacgttcatcaagcagatgcgcatcatccacggcgccggctact

SEQ ID NO: 791756 - DNA, 98 bp, Homo sapiens
agacattcaacatgattgcatttgaatattctaccttgtaaatactgttatttgtatatactgtaaatgatgacatcggtgggcactaaccgagcccg

SEQ ID NO: 791757 - DNA, 75 bp, Homo sapiens
gtgaatcatccacattatgaagacgcaggcttgagggatgagtatttccgcatgaagctgcagtggaaatctgtg

SEQ ID NO: 791758 - DNA, 76 bp, Homo sapiens
agcagacaccgtgtttgataaggaaacactctttggtattcagcaagcggaaatgggagcagcaatggatgcgctt

SEQ ID NO: 791759 - DNA, 74 bp, Homo sapiens
gtcaacaggaatgcagcagtggagctgacacggagacacatcgctggtaatgaatcttgccctcagcctcagac

SEQ ID NO: 791760 - DNA, 100 bp, Homo sapiens
tacgtcagctacctatgataagagtcgaacggccgcagagcagtgaaccgaggctacgtcaccagcctgctcgggctgcaccaggactggcacagccatg

SEQ ID NO: 791761 - DNA, 82 bp, Homo sapiens
gcgagcggagcttcgcggggatcctgctggactgcacgaaaaacaaattgtggctactaatttgccccctgaagatcaagat

SEQ ID NO: 791762 - DNA, 106 bp, Homo sapiens
cgaaaacggaagcgcagggagaaggaagaggtgtttgaaaaggtgaatctggattgggaaagtcgacattaatcaactcattattcctcacagatttgtattctcc

SEQ ID NO: 791763 - DNA, 97 bp, Homo sapiens
cctcgctctgagctgcgcctggacctggttctgccttctggacaatctttccgagccaaagccttggctggacagtcagtacgaatctgtaaaggcc

SEQ ID NO: 791764 - DNA, 74 bp, Homo sapiens
aggattccaagtaactcttatttggttgcccccaagtttcctggcagtgtgtgatactgaggaggtgagcttgt

SEQ ID NO: 791765 - DNA, 100 bp, Homo sapiens
cttttcgaccttcaatccagttccaaggactccacgggacttgtgtatgcggatacctgcttcagtaccatcaagttaaaagcagaagatgcttctggta

SEQ ID NO: 791766 - DNA, 90 bp, Homo sapiens
tttgtcactgcctggaccattgtccctgctgtttctcaggtcttgggcgtctttggtactggcttttttaggggtctgcctggggattac

SEQ ID NO: 791767 - DNA, 95 bp, Homo sapiens
ccagctgctcagcggcatcggccggatttccctgcagtcctctttgatacgcaacctacggctctctgagtccttgaaaaagaaccaactctgga

SEQ ID NO: 791768 - DNA, 83 bp, Homo sapiens
ccgcgcacttcgtcatgttcttcgcgccctggccaccagcccctcgggttccaagatgcagctactggagacagagttctcac

SEQ ID NO: 791769 - DNA, 100 bp, Homo sapiens
cggccactcgggcggcggtggagcgggagcgcgcagcaggaaaacagttcctcctgaggatttcagagaagagctggacttcctggctgactctcacatt

SEQ ID NO: 791770 - DNA, 100 bp, Homo sapiens
ctgatgagctacgccaacgacgccttcccagaggaatacgtgcccactgtgtttgaccactatgcagatgatcatgggaacagcaatagtagtcatgtaa

SEQ ID NO: 791771 - DNA, 50 bp, Homo sapiens
tgaagtgtggcatccaaaatcagaaagactgtgcagtctttgtaactgat

SEQ ID NO: 791772 - DNA, 100 bp, Homo sapiens
caagtttacgacaaggaggttcagtggacccttggagccatcctctacaggacccgctttctaccattaagcattatggatccaagcctgttgagagaaa

SEQ ID NO: 791773 - DNA, 75 bp, Homo sapiens
aaggatcaacagtcaattgtgtactagcattccaaggtggacgacatccttggagaaggcagcgacgacagcgac

SEQ ID NO: 791774 - DNA, 75 bp, Homo sapiens
caggacatggagtatgaaagacggatgcaaggtgttgtaaaccgactgtccaagttactgaaacctgggggaatg

SEQ ID NO: 791775 - DNA, 100 bp, Homo sapiens
gagcgactccccggctcgaagcctggatgaaatagatctctcggctctgagggtgctggagaatctggtaaaagcaccattgtgaagcagatgaggatcc

SEQ ID NO: 791776 - DNA, 100 bp, Homo sapiens
aggctttgccgacttcagccagatgtccaaggcctccggtgtggctgtctctgatggtgtcatcaaggtgttcaacgacatgaaggtgcgtaagtcttca

SEQ ID NO: 791777 - DNA, 100 bp, Homo sapiens
gctgggctctggactccagaggcagtgatagaacacccagacgcagataacggagggcagactttggcagggggtaataactggccccttcgaggaagaa

SEQ ID NO: 791778 - DNA, 98 bp, Homo sapiens
tggatgtgtcccccctgcgccgtgtgaaccagaccatgctcgacagctgaccaaggccatgatgcgaaaggccacggccagccgcctggtcacgcagc

SEQ ID NO: 791779 - DNA, 100 bp, Homo sapiens
cctacaacagtttggcgtgcaacatggggcttgagaaagggttgacttccccagaaatctggccaagtctgtaactgtggaatgaggctgagaccgtgac

SEQ ID NO: 791780 - DNA, 100 bp, Homo sapiens
agggactgctaagaagataccaccagacgactgcaagaacattgccaacatcatgaagacactcgcctatcgaggcttcatcttcaagcagacatcgaag

SEQ ID NO: 791781 - DNA, 100 bp, Homo sapiens
gggccctgggagatgcgggagcggctgggcaccggcggcttcgggaacgtctgtctgtaccagcatcggagctgtaccgtggtgcgatgactagtagcat

SEQ ID NO: 791782 - DNA, 100 bp, Homo sapiens
cgcagactgtgcccggcaggagactgactacgtgctcaacaatggtacaggtttgcagattccgccagcagcacagcaagctctacagatgagtggctct

SEQ ID NO: 791783 - DNA, 75 bp, Homo sapiens
caagatttcatctattgaatttgggtacatggtatgatctcgtgaaaccttgagagaaactgaatgacgaatgaa

SEQ ID NO: 791784 - DNA, 80 bp, Homo sapiens
gccgggctgagaggagcgtggctgtctcctctctccgccatgatatacctgtgtttcccacaatcacagccactgtgact

SEQ ID NO: 791785 - DNA, 100 bp, Homo sapiens
cgacgcggaggcggcagcggcgggcctgaggcgaaggagcggccgggagcccgccgcgctggtagcgatcagctggacatcatctccatggcggagacaa

SEQ ID NO: 791786 - DNA, 75 bp, Homo sapiens
gggcatctcggaagatccaggtcccaactggaagctgaagaactctgagacgtctcctgggatgtttaactttga

SEQ ID NO: 791787 - DNA, 82 bp, Homo sapiens
ttgtacagcgccggtcaacatcgcggtcatcaagtactaaaattgtacaagctggagataaggaccttgatgggcagctaga

SEQ ID NO: 791788 - DNA, 98 bp, Homo sapiens
tgggacttcccgtccgcggcgtggaggcatcaaagctaagccagaagatttatcacattttcatcatcagctacaggattagaaaggaggctgggatg

SEQ ID NO: 791789 - DNA, 75 bp, Homo sapiens
cccggcctccgtaatgagagcccggaaccactctttgtgccgcagcttcgcagaccattcccggagtaataaatc

SEQ ID NO: 791790 - DNA, 75 bp, Homo sapiens
ccgccgccggagcctgcgagccgagaccgtggcgacctgcacatgacccagtttttccgaggcaatctggctggc

SEQ ID NO: 791791 - DNA, 75 bp, Homo sapiens
aaagaaaaaagaagaagtccccgagttcaccaaaattcagacattgtaagaaagcaaacttaggtaaaaatgcaa

SEQ ID NO: 791792 - DNA, 83 bp, Homo sapiens
aacagggcagttatccattatagggatgatgagaccatattcggaaaccccgacctcagagagaacgtgctcagtgggatatt

SEQ ID NO: 791793 - DNA, 80 bp, Homo sapiens
cgcgccgcgcaagtcttcttcctcaaaggctttatcctgtggataaacgcagagtgaacgagtttggggagtcctacgag

SEQ ID NO: 791794 - DNA, 137 bp, Homo sapiens
aacgttatattttgtcttctgtgtggattcttcagaaagtgaacttggcattttagatctaattcaactagagaccgttggatggcagcttaaccttcagatggctcactctgctcaagcaaaactaaaatctcctc

SEQ ID NO: 791795 - DNA, 87 bp, Homo sapiens
ggacagatggcacagaaaccgctgcgcctactgcttttcaggaagccttggacgctgcaggtgataaacttgtagtagttgacttct

SEQ ID NO: 791796 - DNA, 100 bp, Homo sapiens
gggatcctttctggaatggaggtcttatgagctgctattgaacacggcaggaaatgtgctgcagcctggggccggggcaatcatggcccgaatcgcccag

SEQ ID NO: 791797 - DNA, 82 bp, Homo sapiens
cactggccctggtggggattgacagccacgggaaggatcccatgacagattctgttgtcacgtctccttacagagtttgagc

SEQ ID NO: 791798 - DNA, 101 bp, Homo sapiens
tgcatgtaaacaaatgaagcagcgctttgaaagggagaagtgagtcatctcattcccctccgtggatcagaggacttggactagatagaagcatgtggtgt

SEQ ID NO: 791799 - DNA, 76 bp, Homo sapiens
gacagcctgtctacatcattatggaactggtttcagctcatttagaggcgagttttgaggaggtagagaacaacct

SEQ ID NO: 791800 - DNA, 83 bp, Homo sapiens
cagtacttgaccctgtattttgggagtcgaacggagtttccattgtttactgcagtgtatcagatctgctacgaaagcagacc

SEQ ID NO: 791801 - DNA, 100 bp, Homo sapiens
gggggccagttcctgccgtctgctcttctgcctcttgatctccgccaccgtcttcaggccaggtgacaaagttgttgtcacgtactccaaaggttatccg

SEQ ID NO: 791802 - DNA, 100 bp, Homo sapiens
ctcatgagagtccacaaaacaatgccttcaagtgccaagaaacagtgcgacttcaaccaagctctttcgacgtgtagcagcagctttgccgggaatggaa

SEQ ID NO: 791803 - DNA, 82 bp, Homo sapiens
gaggaaggagaagagaaacttggtgctggagaatctggtaaaagcaccattgtgaagcagatgaggatcctgcatgttaatg

SEQ ID NO: 791804 - DNA, 100 bp, Homo sapiens
gctgatcacttggagtgctgtcccttggaacaggaggagtaagattgaggatctgctgtatatccttccaactcacattcaggcagcaagagccggcaac

SEQ ID NO: 791805 - DNA, 98 bp, Homo sapiens
ctggagcaggagcggggccggaactggagccgaggcgcaggtggcgctggcattccacgcctacgggaaggcaggcaagatgctggtggagaccaggt

SEQ ID NO: 791806 - DNA, 75 bp, Homo sapiens
atacaaccaggaactactgttctcaactgctcccatgacttcctgtcagccgcagggccgtaggcagccatggcg

SEQ ID NO: 791807 - DNA, 103 bp, Homo sapiens
agcagatcctatctgttcaattcttatagccattcttatagttgtaagaccatagtcttgagtttacttatgaggtcaattggaaataagaacaccattttac

SEQ ID NO: 791808 - DNA, 74 bp, Homo sapiens
tgttaaggattccaagtaactcttatttggtcccaaaggcaagcagttagaaggaactgaatgtccactccatg

SEQ ID NO: 791809 - DNA, 102 bp, Homo sapiens
taaaaccccagatggaaacaagtcacctgctcccaaaccttctattacataccggttacggcacctccttcgtgcaaggtgtgatgcatccccagtgaccaa

SEQ ID NO: 791810 - DNA, 82 bp, Homo sapiens
aggagttcgtctcttacgtctgcggaagtgcagctgcctcagttcttagcgcagtatgccctggagcgcttaaaggtcatgt

SEQ ID NO: 791811 - DNA, 82 bp, Homo sapiens
gacgattcacctgtccagcatccgaccaccgaggctggagggggagaacacccaggtcagcccaaggccaaccccactgtca

SEQ ID NO: 791812 - DNA, 100 bp, Homo sapiens
gtgaaagttaaagacccaacagaatacactggacctgaaagttatgtggctcaaatgattgtggttcgagaaaacaactacacctatgaatttgattttt

SEQ ID NO: 791813 - DNA, 73 bp, Homo sapiens
cggagcataggaggaaaattcatcatctgatatgaggccccaggattcctggcgaggtcctcctccccttttc

SEQ ID NO: 791814 - DNA, 75 bp, Homo sapiens
tgctcgcagataagcatgctaggaagtcgagataacatgagtattgtactagtttgcttttcaaatgctcccaag

SEQ ID NO: 791815 - DNA, 87 bp, Homo sapiens
ttctaatggatcctcttccaaaaccacaaacttgcctacgtcagtaacagccaccaaggtactaggttttgacaagcttgcatcatg

SEQ ID NO: 791816 - DNA, 75 bp, Homo sapiens
acacaaccaatgcatttcctggagaatatatccctactgtatgacctcattccacctatggacttgcttgaaatg

SEQ ID NO: 791817 - DNA, 75 bp, Homo sapiens
ctctgacctgaatcctgaattttccttgatggtcaaaagattaaggcttgtccagccggaagccctgagggcagc

SEQ ID NO: 791818 - DNA, 100 bp, Homo sapiens
tgtattttgctattcatgtaagcacagtcttcacagtattgcaggaccagactctggctgaactgcagaacaacatggtgctagtgaaactggaccttcg

SEQ ID NO: 791819 - DNA, 48 bp, Homo sapiens
gaaaatcctggcagaggacaagggctttgttatgcacctaaagccata

SEQ ID NO: 791820 - DNA, 98 bp, Homo sapiens
tttgaattacagagaaactttcagctcatgagggacctagaccaaagaacagagggtgctgctgatgtagagaaggtggaggaaaagtcagcaataga

SEQ ID NO: 791821 - DNA, 76 bp, Homo sapiens
ggcaagttgccgtgcctggagatctcacagtgccaggtggagctcaacaggaaagtcctagcggatctggccatct

SEQ ID NO: 791822 - DNA, 80 bp, Homo sapiens
cctgaagagggaagacacgcggaaacagatcttgagccagatgattgtgcatccatttacatctttaatgtagatccacc

SEQ ID NO: 791823 - DNA, 75 bp, Homo sapiens
gccgtccacgtgaaggggcccttctcggtggaggccgacccatccagcctgtcaggattggagctgctttccgag

SEQ ID NO: 791824 - DNA, 100 bp, Homo sapiens
gggtgaggctgcaacacgaggctgccgttcagcacccgtcgagcagagaatttcccattcctgaacagttcaagacagcatgggatggatccaagttaat

SEQ ID NO: 791825 - DNA, 76 bp, Homo sapiens
atgattttaaagttatgggactacaacagcagccacaggaaccttgagtggaagatgcaatgctgatgtttgataa

SEQ ID NO: 791826 - DNA, 100 bp, Homo sapiens
gggctggacacaggaccccactcagtgattctggggttacacagagatatgatggacgtggtcacctgcatgacctttctgagtacgatgctgagtattc

SEQ ID NO: 791827 - DNA, 75 bp, Homo sapiens
acatcaggacaccgggagtgggagagattggactgggagactcagcagagagcgccttcgctgacacgctgacgc

SEQ ID NO: 791828 - DNA, 98 bp, Homo sapiens
cttccttcctcttctgaacaaaggtgatgtacagttcattgattatgaatattctggatacaactacctggcatatgatattggaaatcatttcaatg

SEQ ID NO: 791829 - DNA, 82 bp, Homo sapiens
ggggctgaggcggccgcggggcccgagcgcagacgcaaacatgcagatctttgtgaagaccctcactggcaaaaccatcacc

SEQ ID NO: 791830 - DNA, 82 bp, Homo sapiens
gcagtacctcgtgtatactacgctatcgaatacggggtgctttgcattcaggaatacagaaaaaacagcaaagtggagtcaa

SEQ ID NO: 791831 - DNA, 100 bp, Homo sapiens
aaggatgacatatttttggacctgaaacagaaattctggaacacctatatggatgagctttctgatgttagccaaggcggatctaaagctaccactccag

SEQ ID NO: 791832 - DNA, 100 bp, Homo sapiens
ctgagcgcaactagcggcgggtcgtgggcacctccagatgccttcaattaagttgcagagttctgatggagagatatttgaagttgatgtggaaattgcc

SEQ ID NO: 791833 - DNA, 87 bp, Homo sapiens
aaaagagttggaaagaagaaaagaattaaagaaaatacgagtaaaatatggtttacaggagtctcgctctcagtcaaaatctccaac

SEQ ID NO: 791834 - DNA, 74 bp, Homo sapiens
tccttcggcagtccacccaccgccgccgcctcccaggtgaagagtcttttgaagacctgaccgaagaaagcaaa

SEQ ID NO: 791835 - DNA, 75 bp, Homo sapiens
cctcaacagccaaggactgaggatggttttactgcaatcacagcaaccaaccccatttggcttataaagactcgg

SEQ ID NO: 791836 - DNA, 75 bp, Homo sapiens
ctctgggagaagcagaaaaccctgtgccagggacaggaaagataggagaccaaactcttacccaggatctactgg

SEQ ID NO: 791837 - DNA, 100 bp, Homo sapiens
ccaggtgcacagcgcgggagccgtcacggtgctcaaggagcatccccttagtgcaggtgctgcggactacggccctgaccagcgcctgcgcggagcactc

SEQ ID NO: 791838 - DNA, 74 bp, Homo sapiens
gatggacaagtcctgcagaagcttttcggccgaatccacatatgtcgaagcaagacagaaaccaaagaccgtcc

SEQ ID NO: 791839 - DNA, 100 bp, Homo sapiens
tgggtcatgaaacttaatccacagcaagctcccttatatgctttcctcggagacgggtggcatggggagcagctagaacaatgcagattcatccataatc

SEQ ID NO: 791840 - DNA, 75 bp, Homo sapiens
gaggagagctggcctggggggcagcatgagggaaattcaactactgaggaggttacggcacaaaaatgtcatcca

SEQ ID NO: 791841 - DNA, 76 bp, Homo sapiens
ctgcggctgtatggagcgattttgcagatgataaagtgaaatctttccgtgcagctctacaagaggaggaacaagc

SEQ ID NO: 791842 - DNA, 148 bp, Homo sapiens
cagcccttcctcacttttggaaatggcgggtgaaattacagagaccggggaactctactcttcctacgttgcaaaagcttctcatttcagagagatgccaggatcctaagtgcctgccaaacttaccaattctaaggaataagtggat

SEQ ID NO: 791843 - DNA, 83 bp, Homo sapiens
ttcctggcctgggcgctccggtggcggcggagcgtgctgagctacgtggcgggcatcgcctggttcttggcgctggttttccc

SEQ ID NO: 791844 - DNA, 50 bp, Homo sapiens
ttttccacagggaattgagttgaagtacatccaggaagccaggactatgg

SEQ ID NO: 791845 - DNA, 75 bp, Homo sapiens
ggatgatgagcgccttaaggatctctttggcaagtttgactctgtccctacctgtggttgtcatcgtccacggca

SEQ ID NO: 791846 - DNA, 123 bp, Homo sapiens
cccggctccatcgacctcaaggacatcaacttccggccgcagatgtcccagatttctccacccaggtgaactcctccctcacctccccgacggggcgaggctccatggctgccccctcgctgc

SEQ ID NO: 791847 - DNA, 75 bp, Homo sapiens
aggttactttttctcgcggcacagatgtttgtgaagtgtggatatgcaggctctaactttccagaacacatcttc

SEQ ID NO: 791848 - DNA, 101 bp, Homo sapiens
aggacctcgggcctgctacgatgaaggcaaacgtgttgcagagaccatgtgctatgcctacatgaagcaggtgcctgtggcatttgatgatgtctccatct

SEQ ID NO: 791849 - DNA, 100 bp, Homo sapiens
caaaccacaccctggtccttctggacaccgaaggtctgggcgatgtggaaaagatcattcatttttctgaagccagaagatgagaactatcaaatgtgtg

SEQ ID NO: 791850 - DNA, 82 bp, Homo sapiens
gatcgtgttaaatttgaacctagtggtaaaacagggtgatttcaagagacacgtgaagaatgttatctaccatgcagtgaaa

SEQ ID NO: 791851 - DNA, 74 bp, Homo sapiens
agtaccggaaggtaaaggagattgtgatggtcactcaagggctggatgggctctcagaacgctgtgcccaatac

SEQ ID NO: 791852 - DNA, 100 bp, Homo sapiens
tgcctcagcctcccgagtggctgggattacaggtctaactcatcttattactatggatttacaccagaaggaaattcagggcttcttcaatattcctgtt

SEQ ID NO: 791853 - DNA, 100 bp, Homo sapiens
taaagatggcggcttcctagtgagtcggcggctgatttagaaggaggttcaggctacggtgagccgaaggtatatagtatttgaaggagaagaagggcag

SEQ ID NO: 791854 - DNA, 90 bp, Homo sapiens
tccacttccacattccagcccaagggaaagtccaagagactcctaaaggggaactcccctccagctgcgctgggaccccaggaccctgcc

SEQ ID NO: 791855 - DNA, 100 bp, Homo sapiens
tcaagatggcggccaatgtgggatcgatgtttcaatattggaagcgctttgatttacagcagctgcaggagagggctgaacccccctcatcgtgtcaagt

SEQ ID NO: 791856 - DNA, 90 bp, Homo sapiens
catgtaaagatcaatgtgtcccggcagacattgtttgaagattccttccaacagctctcatttcactcttcagtgttcctgttatttatg

SEQ ID NO: 791857 - DNA, 75 bp, Homo sapiens
tggcatgacgtgcaggtctctagcgcagcgggaacagcttccacgtgttcgaccagggccagtttgccaaggagg

SEQ ID NO: 791858 - DNA, 75 bp, Homo sapiens
agcgcgtttcccgcctgagcgcaactagcggcgggtcgtgggcacctccaggtcagttcaccgggacctggaggc

SEQ ID NO: 791859 - DNA, 51 bp, Homo sapiens
tccagtcgatctctccaaagtggtggagctcagtgagtacaacgccacagc

SEQ ID NO: 791860 - DNA, 83 bp, Homo sapiens
aagtatacgtttcccagcacccaccaccagcaggctgtattcatcaccaaagaaaaaacttacaccaatgcagaaatcggtta

SEQ ID NO: 791861 - DNA, 100 bp, Homo sapiens
ggagccacagtttaccctgttgctatcaagcagttaggacttcaggaattatttcctcaaggtcatagctgtgctgtttgtggtaaagtgaaatgtaaac

SEQ ID NO: 791862 - DNA, 100 bp, Homo sapiens
caggagttcgtctcttacgtctgcggaagtgcagctgcctcagttcttagcgcaggtgttcactgttggcagaatttgtgccagccgtaccagaatttat

SEQ ID NO: 791863 - DNA, 50 bp, Homo sapiens
tggcttcagcagctaccaaggaaaggccactactacgtgcccctcctgag

SEQ ID NO: 791864 - DNA, 98 bp, Homo sapiens
tctgcgggaataggacctatggcgtggtggcccagtactaccggcccctgcatgtcatatataccagaagttctgagattgaagagctgaaagccact

SEQ ID NO: 791865 - DNA, 98 bp, Homo sapiens
gacgatccgggtccctaaggctggagaccgggtccacaaagacgagtgcgccttctccttcgacacgccgatatcagaaaaccaggactctgcagatg

SEQ ID NO: 791866 - DNA, 75 bp, Homo sapiens
cgggcggcggcgccggcaggaagattgacgagatgcctgaggctgccgtgaaatcaacagccaacaaataccaag

SEQ ID NO: 791867 - DNA, 98 bp, Homo sapiens
ttttggcattgacatttaattttagggtcctttatatagaagggagagtaggaattgatggtgaagttccccctgaaggagatccagtcgacgcggac

SEQ ID NO: 791868 - DNA, 100 bp, Homo sapiens
tggattcccagcgcgggacagccaggttaaagctgaagctcaacaaagatatagtgatctctgtgggcatttataatctggtccagaaggctctcaagcc

SEQ ID NO: 791869 - DNA, 100 bp, Homo sapiens
ctccttcccgacgtcctcaagaaagtcctgtgccggcagctgtggccaacagcaacagagagagtccagatctctgttgaggagctggcgcggaatctgg

SEQ ID NO: 791870 - DNA, 76 bp, Homo sapiens
ttcgaccccacacaaggaggatctaagcagcaagttcgaacaactgccacagcagcaagcaacttgattgaagtat

SEQ ID NO: 791871 - DNA, 82 bp, Homo sapiens
ctccaattaaccagatcttgccctggtgcagacaagacttagtatctgggctcatggcgactactgcagaatcaaccccaag

SEQ ID NO: 791872 - DNA, 99 bp, Homo sapiens
gcaagccctactgagcgtgctcccctctgagactggagtgagagggtcttctggtgagagaacgccgagccgtcgccgcagcctccgccgccgagaagc

SEQ ID NO: 791873 - DNA, 82 bp, Homo sapiens
aagataatgacaaagaagatggctgcttctatttcaggtcgttccaggggtagaggaggcatgaaggatgaccgtcgggaca

SEQ ID NO: 791874 - DNA, 100 bp, Homo sapiens
gccgctctgcctacttccagacccatgtaaaggagaattgcctgcactatgcccgcaaggtgggctacagctggaagaagcacgccaaattcattctcgt

SEQ ID NO: 791875 - DNA, 75 bp, Homo sapiens
aacgaggcaaggagctaaagcagcgtgcgttcagccctggggtgagcgagtgctgtgctttcatgggcctcttct

SEQ ID NO: 791876 - DNA, 100 bp, Homo sapiens
aggtgggcctgatggtgcaggagaggtttgattggaaccaaccagatggctgtgtgtgccaaagcacagaacaaacctttctatgtggttgcagaaagtt

SEQ ID NO: 791877 - DNA, 100 bp, Homo sapiens
tgagggaagcgtctccgttgggtccggccgctctgcgggactctgaggaaaagctcgcaccagggaaatcctcattgacgattcaatttgttgaaggcca

SEQ ID NO: 791878 - DNA, 100 bp, Homo sapiens
gtcgtgatccagaagtccagagctgaggactgcctgtttgcaggatggagagcaatacatcatcatctttggagaatttagcgacggcgcctgtgaacca

SEQ ID NO: 791879 - DNA, 100 bp, Homo sapiens
gccgcttcagttctcccggtgtggccacgagtcgggtgcctatggttcatgcttgaagttttaatgacaaagaatgaaaacaatagccatgcctttatga

SEQ ID NO: 791880 - DNA, 90 bp, Homo sapiens
cacctatctatggtgcagatattaatgggagcatatatgatgagatcttactgtgccgagatcgctcacaatgtttcctccaagaaccgc

SEQ ID NO: 791881 - DNA, 74 bp, Homo sapiens
cccgccgcgcccgggatgtattcgtccccgctctgcctcacccaggagggtgaggacaaaatcttcttaatcaa

SEQ ID NO: 791882 - DNA, 75 bp, Homo sapiens
gtgggggtgtgcaaacccgagagaactggaattcctggaaaactcaagcaattcgtatttgacttacattctgga

SEQ ID NO: 791883 - DNA, 100 bp, Homo sapiens
aagagctgcagctcctcctgtgcggatcccgactgggcctcctacactctgggcgtcttcatctgcctgagctgctcgggaatccaccggaatatccccc

SEQ ID NO: 791884 - DNA, 100 bp, Homo sapiens
gggtgaatcagtatgttgtgcaagaggtactgtccatcaaacatcttccaccacagcttagaggtagacgttacatccaagaggaaataatccaggcaag

SEQ ID NO: 791885 - DNA, 94 bp, Homo sapiens
acagaatctaatcaagcgagacccgccggcctacatcgaggagctgttaaaaagaaagctggctttatcactccagttccaggaggtgtgggac

SEQ ID NO: 791886 - DNA, 75 bp, Homo sapiens
aaagacaccaaagtttctattaaagcaaggggcctggagagtcacataaaatcctatctgagcagctggtttgag

SEQ ID NO: 791887 - DNA, 82 bp, Homo sapiens
tttcgggatctcggtgctgcagacggcgagacctcctgcacagatcaggatcctcatgaccagccaaagagaagaagaatta

SEQ ID NO: 791888 - DNA, 95 bp, Homo sapiens
cgtcgacaacggctccggcatgtgcaaggccgaaatagaactatttgtgaacagacttgattcagtggaatcagttcttccttatgaatacacag

SEQ ID NO: 791889 - DNA, 74 bp, Homo sapiens
gaggcactgctgagggggcgcgaggggaacggaggccagagctgcggttacatccactaccagcctgcccagga

SEQ ID NO: 791890 - DNA, 80 bp, Homo sapiens
ggggacaagtacctttatgaaccagtgtatcccaagcctcctcttccagcagcctctatctttattctacaggatccaga

SEQ ID NO: 791891 - DNA, 74 bp, Homo sapiens
cagcagtgagttcaaacccatgacacagaaacacccgccgggcagcagaggtctggatggatgaatacaaaaat

SEQ ID NO: 791892 - DNA, 100 bp, Homo sapiens
tggcaaggagagtttctgaaacttccactggagggctctgcgtgttccggcaggaatggtttatcaaagacacagctctccccttctatcaagcgcaaga

SEQ ID NO: 791893 - DNA, 99 bp, Homo sapiens
cactttcgccagcccgtgccgcgagcgcggcctgcaggaggtgacaccttgtttgtggctggctgcgggaagttctatgaagggactgcggatgagatg

SEQ ID NO: 791894 - DNA, 96 bp, Homo sapiens
caacactgtgtggatccccgatgtacatggttggcaaaagcagcttttgatgatgcaattgcagaactggatacgctgagtgaagaaagctataag

SEQ ID NO: 791895 - DNA, 100 bp, Homo sapiens
cccaactgcgcccggtgcggcaagatcgtgtatcccacggagaaggtgaactgtctggataaggagcacatcctgatgagaaatcagaacttagtggggc

SEQ ID NO: 791896 - DNA, 100 bp, Homo sapiens
ttgcataaacatggagaaaagctctacactggactaagagaagttgttaccgaacatctcataaataaggactcacaccacccggcaagaactgctcact

SEQ ID NO: 791897 - DNA, 83 bp, Homo sapiens
agaaaataaaggagctgctgtctggaattggcaacatctctgagagccgcggcgagtcctttgcacatgttggcaacacacgc

SEQ ID NO: 791898 - DNA, 98 bp, Homo sapiens
ccgcagcctggcagaagaggctctgcgcacggacatcctgtgcaacctgcccagctacaaggccaaggactaatggctgaaggataaatcaacatggc

SEQ ID NO: 791899 - DNA, 83 bp, Homo sapiens
gcggggagatcgacttatcgccattggagagacgagttgtactgctgtcacaggaaatggacgctggattacaagcatggcag

SEQ ID NO: 791900 - DNA, 100 bp, Homo sapiens
actgctgaggactggggcctcattttggatatctgtgataaagttggtcagtctcgcactggagatccgtgctcagctcacagagcagatgaaatgcctg

SEQ ID NO: 791901 - DNA, 100 bp, Homo sapiens
ggagacaccctctgggggtcctctctgagtcaaatccagtgatggtggagccagggcaagatttactgcttgctgctttgagtgagagtggaattagtcc

SEQ ID NO: 791902 - DNA, 50 bp, Homo sapiens
gtgtactttaccaacgagctgaagcaggtttgtggtaaatatgccagctc

SEQ ID NO: 791903 - DNA, 75 bp, Homo sapiens
tacacccgtgcccaggagcttgacgccttagataacagccatcctattgaaagatgggaactttgtccccataag

SEQ ID NO: 791904 - DNA, 90 bp, Homo sapiens
atccttgctcaggctctttatgaattattttctgccacagatggtgaaaagccatacaagtgtacctgggaaggctgcgactggaggttc

SEQ ID NO: 791905 - DNA, 97 bp, Homo sapiens
ccactgccttggcagaagcttttaggggcagggtgccatttgccgtgcctgacaaagtgctgtggccacagctgtgtgaggcgctcaacatgaaatt

SEQ ID NO: 791906 - DNA, 82 bp, Homo sapiens
atgaaccttgggtgatttgttctgtatcagaagacaatatcatgcaagtgtggcaaatggaaaatcaggaaaatgtttccaa

SEQ ID NO: 791907 - DNA, 105 bp, Homo sapiens
ggagaaggtgaaattctgtgtgctccctccggcgagagactttgtcagctcccgcacagtaacgttttgaggttttgctgaagatattcctgaagaatcatccca

SEQ ID NO: 791908 - DNA, 93 bp, Homo sapiens
cggcaaagttttgcagatcttcaacaagaggacccaggagaaattcgccctcaaaatgatatcatcaagttgaatcgaaaggaagggaagaag

SEQ ID NO: 791909 - DNA, 100 bp, Homo sapiens
aaactaaggaatatgaattgcttagtgatgaattgaatcagaaatcgggacatctctacaccgttcccatccgggaacagggcaacatctacaagcccaa

SEQ ID NO: 791910 - DNA, 100 bp, Homo sapiens
cggcgaccggactgagagcgactggcaggggctggtgagcgagaattaaacaaccaccatgtcgagcaaaaaggcaaagaccaagaccaccaagaagcgc

SEQ ID NO: 791911 - DNA, 101 bp, Homo sapiens
ccttggtgtcatccagccttagcaaaccagagtccttctgagatgatggctctgggcgcagcgggagctacccgggtctttgtcgcgatggtagcggcggc

SEQ ID NO: 791912 - DNA, 51 bp, Homo sapiens
gtgaaactggcctcccaagccctgataagggatggagaagtttatgtttgg

SEQ ID NO: 791913 - DNA, 50 bp, Homo sapiens
gggaattcatattcctgaaaagatgaaaactttcggaagagaaagttgcc

SEQ ID NO: 791914 - DNA, 82 bp, Homo sapiens
ttgaacttaatacagcaagaaagaccatcaagtttaccagatgcctttgtggaactgtacggccccagcatgcggcctctgt

SEQ ID NO: 791915 - DNA, 75 bp, Homo sapiens
aagaaacctcaggacttgagtaacagcaacatgagcagcccgacggccatggaggctgaagagacgatggaatgc

SEQ ID NO: 791916 - DNA, 83 bp, Homo sapiens
ggcctcgcggcgacggcggcggtggcggcttggacgactcggagagccgggcttcccacggcacgacatggagacctgtggtt

SEQ ID NO: 791917 - DNA, 80 bp, Homo sapiens
aagagaggaacactacaaactgctgtatgaagtttcccagttatacatgggaagctgttgataccaaaaataatgtactt

SEQ ID NO: 791918 - DNA, 100 bp, Homo sapiens
gacacaactgtatcagacccaaacttggttgggattgttgtttacacgccagttattaatgtattggaccaggtacagacatttctcccacagatggcac

SEQ ID NO: 791919 - DNA, 100 bp, Homo sapiens
cacaaagcagtggtgaatgagaaagtgctccagaatattattaagatcagggagctgattttggatggatctttacagttgatccaggaaggtctcaaaa

SEQ ID NO: 791920 - DNA, 82 bp, Homo sapiens
tatgaccttcacctcattaacagctgccccgggagacgctggccttcagggaggagctggatgtcctcaagttcttgtgcaa

SEQ ID NO: 791921 - DNA, 98 bp, Homo sapiens
gaagctggagttcgaggacgaagacaagttggatggcttgaggactggtactaaaaggaaacgtgactgggaggccattgccagcagaatggaggatt

SEQ ID NO: 791922 - DNA, 100 bp, Homo sapiens
gcggtggccgctagctccaaggaaggtcagctggttaagatgctgctttatacagaggtaactcgctatctggattttaaagtgactgaagggagctttg

SEQ ID NO: 791923 - DNA, 101 bp, Homo sapiens
aaaccagataacttcctaatgggtattgggcgtcactgtaataagttgcctttccccatcttcctggttctgctccttcgtggcctagtcttgtggacacc

SEQ ID NO: 791924 - DNA, 100 bp, Homo sapiens
ttttgattggcgcctttctcattattataggctccctcctgctgtcaggctacatcagcaaaggggctgtgggtgagcgtggaggatgctcagatgcaca

SEQ ID NO: 791925 - DNA, 95 bp, Homo sapiens
caagagtcacttctttacttggtgcaggaaggcagtctttgctacgtacagcaaaagcgggacgaccctgggacagtctccactggggcagatcc

SEQ ID NO: 791926 - DNA, 88 bp, Homo sapiens
aagaatccttttggcttagagatcactaatccatcttcagcttcaattacaaggccatgctatgatagtggaagcttatccaaaataa

SEQ ID NO: 791927 - DNA, 90 bp, Homo sapiens
aacggaatttacactgacagaagcagtggtcgaatccagtagaaaactggtcaaggaagcttatatgactgctgctgctcctatgcaagg

SEQ ID NO: 791928 - DNA, 90 bp, Homo sapiens
ggcaaaatgagccaattcttctgtatatttacgatttccatggaatgaagccaagagtgatgaaagaagctgtatctactccatcacgaa

SEQ ID NO: 791929 - DNA, 76 bp, Homo sapiens
ctgctgctgctgcgcctgggccagtgtgcaaagatccaccttacaaagtagaagaatctgggtatgctggtttcat

SEQ ID NO: 791930 - DNA, 89 bp, Homo sapiens
cctggagaactacatcaccgctctgcaggctgttcctcctcggaactcttcatcttggcttatacctatactgcctgatatgctccgac

SEQ ID NO: 791931 - DNA, 90 bp, Homo sapiens
gacagaaaaacctaaaataaccctcaagaatgccatgaaaatggaaagtgggcacaggtttagccccaacatgactgagcgcgaggctgc

SEQ ID NO: 791932 - DNA, 100 bp, Homo sapiens
cttcctgcagcagcataaaaaggaggtgatgaagcagcaagatgtcatctatgtggatatcaaagtattgcagagtgccttagcagccatccgacatgcc

SEQ ID NO: 791933 - DNA, 94 bp, Homo sapiens
ccgaaggccagctactagagctgcgcaagcaaagcagccagatccagatgcaagtgctgctggaccaggcgggctgctgtatcgtgggtcagag

SEQ ID NO: 791934 - DNA, 75 bp, Homo sapiens
ttgtgtggtcgcgtctcggaaaccggtagcgcttgcagcatgacggccgaagccctgcagcccacgctacagccg

SEQ ID NO: 791935 - DNA, 118 bp, Homo sapiens
ctcaccctctgccgagtctcaatatctgtcttcggtggactccttcggcagtccacccaccgccgccgcctcccagggactggtgattgcagctggaagtgcccatgaccgagctggc

SEQ ID NO: 791936 - DNA, 76 bp, Homo sapiens
tctacgcctcctacgtttacctgtccatggtcggatttgaatccactgcttttcaactcatgaacatcactgctgg

SEQ ID NO: 791937 - DNA, 74 bp, Homo sapiens
caacaataaaatcaactcatactgcaaggcagtggatcaggcagatccatttgcacatgtggctgcccttcact

SEQ ID NO: 791938 - DNA, 100 bp, Homo sapiens
tgatacccggatgtgaggcgatccgctggcgctagtctgaccctccgccaggcaaaaggaagtatcagcagcgtcgccagcaggagaatatgcagcgcca

SEQ ID NO: 791939 - DNA, 90 bp, Homo sapiens
tcttgctgtggggcttgtgaagccaaaagcagtgattcgcctttgccagtctcatctcgtgtctgctttgttaagttccatgatccagac

SEQ ID NO: 791940 - DNA, 75 bp, Homo sapiens
tggctcttgccctcatcctggttctggaatcctcagttcaagtatctagaaatgatggaattagatataggagat

SEQ ID NO: 791941 - DNA, 74 bp, Homo sapiens
aagaagcctctggctgtgacaggcagcgatgaccgctctgtcaggtggtggctaatgccgtagcggcattatct

SEQ ID NO: 791942 - DNA, 75 bp, Homo sapiens
gctgatactggaggacttggaaggaattgaccgactcatcagtcacggggccgacatcctgaagcctgtaatgct

SEQ ID NO: 791943 - DNA, 100 bp, Homo sapiens
gcggccgctgcggacggacgctcgcctgccggctgagcataagctgtggccatgactactgaagtaggctctgtgtctgaagtgaagaaggactctagcc

SEQ ID NO: 791944 - DNA, 74 bp, Homo sapiens
ggacactgtccggatcttccctccctgcaattaccagctctggctgggtcgccacaacttgtttgacgacgaaa

SEQ ID NO: 791945 - DNA, 74 bp, Homo sapiens
ggagatgaccttcacggccactggccagaggtacttcctcaatggtggtgaccgcggtggcttcaaaaattttg

SEQ ID NO: 791946 - DNA, 75 bp, Homo sapiens
tacagcctcagcctgacggcagagcagctctcccacagcgtggcggtgcaggtgatggtcctaccagtgtgtctg

SEQ ID NO: 791947 - DNA, 100 bp, Homo sapiens
gaggcgcaatgatgagaggatgtggtggtctactctgatgtcaatcttgagggctagaacctcaagaaggcatgaagccagcccctgcagtgccgtccac

SEQ ID NO: 791948 - DNA, 98 bp, Homo sapiens
gaaagggccggaaaacacacgttcctccgaaaccggtttgcaagtccttgtagagtaatctatgccagcaattatgacaatgttagcagaccatgcag

SEQ ID NO: 791949 - DNA, 74 bp, Homo sapiens
atgacattgtggacagtgacagcgatgctgaggatcgaggaacgttgtctgtcaggatggctaaaggtgacccc

SEQ ID NO: 791950 - DNA, 107 bp, Homo sapiens
ctctccccgccaggcgctctgaccactctccagcaccagcttccagttagtggatatagcacaccatccccagccacaaattgtggctactaatttgccccctgaag

SEQ ID NO: 791951 - DNA, 90 bp, Homo sapiens
gaaaattgctgaggcaggatccaggatggacaagcttggccgcaccattgcagaccatgtcgggtcacaaatcttcgaagagtgacatat

SEQ ID NO: 791952 - DNA, 90 bp, Homo sapiens
cctttacacacctcagaaatttatagataacaggatcatttcatctaaggtatctctgcattagccagattggacatatgtaaagggaca

SEQ ID NO: 791953 - DNA, 100 bp, Homo sapiens
caaacagagagaccttgaaggggcagtcagtaggcagcacacttctgcttttgttccttcatcaggacgaatttactcttttgggcttggtggtaatggg

SEQ ID NO: 791954 - DNA, 101 bp, Homo sapiens
caaagagtgcagccgggaaaactcagggtacagtgcagcacctgcaggcaggcaacgctcaccttgacccagatactgcttctaaactaggacccatagaa

SEQ ID NO: 791955 - DNA, 83 bp, Homo sapiens
gcaaaacgaaaaagctcaatgcctcagaaattcattggtgtagctagcttgaaccagagtgcactgagccgtccaatgcaaag

SEQ ID NO: 791956 - DNA, 87 bp, Homo sapiens
tgagctcgcggctcacgctgagagggacacgcagtgacgagcggccgaagcagctttgcgaatcctcactatggatgggctcattga

SEQ ID NO: 791957 - DNA, 74 bp, Homo sapiens
cgaagctgctgcggttcctgagccggagtctcaaaccatgaattatgtgggacagctggctgggcaggtgattg

SEQ ID NO: 791958 - DNA, 75 bp, Homo sapiens
taacagtacatctttttctaaggactttttttatgaagacatggagtccttgacgcagatgcttagggccttggc

SEQ ID NO: 791959 - DNA, 75 bp, Homo sapiens
cggcgagcagtctcaggcctttagtgatgatggtggagccgccaccaaaatgcagattttcgtgaaaacccttac

SEQ ID NO: 791960 - DNA, 74 bp, Homo sapiens
cggaaatctggaaccgggatggcgacgtctacactgagtcggaggcgaaggttgaaatcacaaagattagacac

SEQ ID NO: 791961 - DNA, 82 bp, Homo sapiens
agcaaagataagaaaagaaaaagagaagaagatgaagaaacccagcttgatattgttgaaactgccaagttttggaccttat

SEQ ID NO: 791962 - DNA, 90 bp, Homo sapiens
cactccctttcctctgctgccgctcggtcacgcttgattctttccaccatggccagacgcccccggaacagcagggcctggcacttcgtc

SEQ ID NO: 791963 - DNA, 100 bp, Homo sapiens
gcagccgacccctgccggccggtgtccccaccgccatccctgacccatggcgctgaagaggattcagaaacctatatatgcaaacagatttgcagtacca

SEQ ID NO: 791964 - DNA, 100 bp, Homo sapiens
atgctccacaagttagtcacaagcctggtggagagccaaagatcaaagcctctaagaaatatgtctccaaagaacttgccaaagagattcgtgtcaaagc

SEQ ID NO: 791965 - DNA, 95 bp, Homo sapiens
aaggtcatccggtccctccacgggcggctgcagggtggagggccctggaatggcaaggaagttctctgcacctgggcaactgtgcatctccatga

SEQ ID NO: 791966 - DNA, 83 bp, Homo sapiens
aggcaaagggaaggtggtggacctgctggcgcaggacgccgacatcgtgtgccgctgccagcaaaatgatgcttcaacaccca

SEQ ID NO: 791967 - DNA, 97 bp, Homo sapiens
atgaccctaattcagaaaagaagaagaagagggatactcccatgctgccaaagataatcagcaactgctgtgatgagatgctgcctttaatgctgct

SEQ ID NO: 791968 - DNA, 100 bp, Homo sapiens
cctggacctgtgcctgcagcagctctacaaatagttcaagaacatgaagactcgggtgactcagaagtggagaatgaagcaaaaggtaattttccacctc

SEQ ID NO: 791969 - DNA, 50 bp, Homo sapiens
ctggctaagctcatcattgttactgatcctatagcaatggaactcagcga

SEQ ID NO: 791970 - DNA, 100 bp, Homo sapiens
tgatagaagacaatgagtacacagcaagacaagcaaacgtcactgctgcctccactcccacccaacttgggcgatgtgaccgatttgagttcgaatgcca

SEQ ID NO: 791971 - DNA, 75 bp, Homo sapiens
gatctattcactgagctgcagaagaagatctatgtcattgagggttctgtacagagtaatgagatgtgtgacggc

SEQ ID NO: 791972 - DNA, 75 bp, Homo sapiens
ggctttcccagccacgtggaacttgatgggcccccgacatgaaactggcactcagaatgaagaatgccttttcca

SEQ ID NO: 791973 - DNA, 100 bp, Homo sapiens
cgtctcttacgtctgcggaagtgcagctgcctcagttcttagcgcaggtatccagctcacatagaagacattgactacgaggaaggaaaagtactcatcc

SEQ ID NO: 791974 - DNA, 51 bp, Homo sapiens
gatggtttgaaacatcagcaaagaaaccagcaaatatcctagtaatgggag

SEQ ID NO: 791975 - DNA, 75 bp, Homo sapiens
ttcggcctggaggagttgtacggcctggcactgcgcttcttcaaaggttgtggcagcactgcctgaaggtatgag

SEQ ID NO: 791976 - DNA, 101 bp, Homo sapiens
tgagttctcccgccctcttggtgaggtcaccaccggtggcatggtcctcaagctggagcagggggagaacgtcttcctgcaggccaccgacaagaactcac

SEQ ID NO: 791977 - DNA, 75 bp, Homo sapiens
actaaagaggcagcaaagatcattcaagattgtgggccaaactgaaattgcagaaggcttcagaacgatggcagc

SEQ ID NO: 791978 - DNA, 100 bp, Homo sapiens
gcccgaggtccccgcgcggcccgggcctggcgccctgaggggaagagcggcccggcccgagaataatccagaatggctactctgatctatgttgataagg

SEQ ID NO: 791979 - DNA, 83 bp, Homo sapiens
ccaggccaacaactgccccatctgccggctgcgtgagaagccctaccactgcaactgggacggctgcggctggaagtttgcgc

SEQ ID NO: 791980 - DNA, 89 bp, Homo sapiens
gcatccgagagcccggactggaggaaacctcgacctgtctcccagttggttgcacagcaggttactcagcagtttgtgcctcctacaca

SEQ ID NO: 791981 - DNA, 75 bp, Homo sapiens
cgccatacgcgctctccctgtttaggtacatgtcccagagcaagcacacggaggcccgggagctcatgtactcgg

SEQ ID NO: 791982 - DNA, 98 bp, Homo sapiens
ttgttctcataataattcagatggagaatatatggctggacagctagctgcttatggctataaaattacagattctgaaggaagatttccattaggta

SEQ ID NO: 791983 - DNA, 98 bp, Homo sapiens
ttcggatcatgtctggtggctccgcggattataacagtctgcgggccaggcatcgacatccgcaacgactatcagcagctgaagcgcctggagaactg

SEQ ID NO: 791984 - DNA, 98 bp, Homo sapiens
cgacatcaccaagctggaggtggacgccatcgtcaacgccgacaatccatgtcctgccacagctctgaccaccacaaagaggagtccttggtgtccac

SEQ ID NO: 791985 - DNA, 87 bp, Homo sapiens
gcaggacgagcgcgccggccgcgagcagaccggcctggaagcctacgccctggggctggacaccgtttggacatatttgactctttt

SEQ ID NO: 791986 - DNA, 100 bp, Homo sapiens
gcaaactgatgacttttccgtgctgatttctttcaacctcgggatcatagacggtatttctatgtaaacgaacagtcgggcgagtctcagtgggagtttc

SEQ ID NO: 791987 - DNA, 98 bp, Homo sapiens
tttggctttggatgagacttttaaagatgcagaggatgctttgcagaaacttcataaatatatgcaggtattcaaagcaatgagtatcccacagatca

SEQ ID NO: 791988 - DNA, 73 bp, Homo sapiens
tttctcaaaactggaaggcgctgcaagagcatgcttttcacttccactgcatctctcgctggctcaaaacacg

SEQ ID NO: 791989 - DNA, 101 bp, Homo sapiens
aataacacaacaagtttagggagtccatggccagaaaacttttggggcgaggattaaatccaccacacagggtgaaatctatctccatgacaacattcaca

SEQ ID NO: 791990 - DNA, 100 bp, Homo sapiens
ctcagaagaacttgtacagagatgtgatgttggagaactatagcaatctggttttcttggcatgttgacatagcggctttattgataaaatacaacacgt

SEQ ID NO: 791991 - DNA, 100 bp, Homo sapiens
cagataaatacctttgatctaagggttcagcctttcaatgtgacacaaggaaagtattctacagctacaagcctatcgtggaattcatcgatgcacaatt

SEQ ID NO: 791992 - DNA, 73 bp, Homo sapiens
ctggaaagaaatatcctactgtgctgttcatatatggtggtcctcagtgggttgaccacacaggtgcagcctc

SEQ ID NO: 791993 - DNA, 75 bp, Homo sapiens
cgagaactggctgaagccgatgaacagcgccgggatccaggaattacatgaacgacagccttcgcaccgacgtct

SEQ ID NO: 791994 - DNA, 98 bp, Homo sapiens
tgtcgccagaaggaagatggcggatctggaggagcagttgtctgatgaagagaagagttcttggagtctctgcggagtccctgggccagatctcacag

SEQ ID NO: 791995 - DNA, 100 bp, Homo sapiens
tcagatgtatgatcgtgtgattgactttgatgagaacactgctctggatgatgcagaagaggagtcctttaggaaggtacttgagctggatacactggtg

SEQ ID NO: 791996 - DNA, 80 bp, Homo sapiens
ttaccatctttgtggctgtgcttgccaggcctggctccaaccattcccggagtaataaatccagttggagcagcagtgat

SEQ ID NO: 791997 - DNA, 100 bp, Homo sapiens
cttcgagctgaagcacctctccagcggggacctgctccgggacaacatgctgcggggcacagcctgctatgggatggatgaagaagagaaccactatgtc

SEQ ID NO: 791998 - DNA, 50 bp, Homo sapiens
ttcgcagtggtcgcttcttctccttggtttccacttgagcggcacagtga

SEQ ID NO: 791999 - DNA, 98 bp, Homo sapiens
gcaacagccccttcgtcccaagcaaaatttggtttctctaatattactggaattgattactctccttctgcaattcagctttctggaagtattataga

SEQ ID NO: 792000 - DNA, 96 bp, Homo sapiens
aggagacggattcagaagggctacagggaaaaagacctcgatgaagttctgcagacccactcagtgtttgtaaatgtttctaaaggtcaggttgcc

SEQ ID NO: 792001 - DNA, 90 bp, Homo sapiens
agagagcagctgcccatgccaaatagttacctcttttaaactcattctactggagcaaatgcctgcccctgcgcttctgggtgaacgtga

SEQ ID NO: 792002 - DNA, 75 bp, Homo sapiens
tcagcatcatgcagccgccgccgaggaagatcagtcgcatcgaatacattcattcaaagaacttcatccaccggg

SEQ ID NO: 792003 - DNA, 50 bp, Homo sapiens
ctcggcccctggctcctgctcctggggttccgagtctgaggaagacataa

SEQ ID NO: 792004 - DNA, 75 bp, Homo sapiens
gttcgctgcccagaagaagggaaggcgcgagtgaggaaaggaggtactgtaggccagctttgctccaatggagga

SEQ ID NO: 792005 - DNA, 87 bp, Homo sapiens
aggacctaaaaggacttgaaaatgtctccgcaaacttggtcctgatgtctgaccatggagatgtgagcctcccgcccgaagaccggg

SEQ ID NO: 792006 - DNA, 75 bp, Homo sapiens
atctttgtggctgtgcttgccaggcctggctccaacctggccccagttttgcagagccccgacgggaactgggtg

SEQ ID NO: 792007 - DNA, 87 bp, Homo sapiens
tggaagagaagagggtggctaatgattaagtgtgccggtccaacaaaagcccttgggtctgtttgacttgttcaagtgtccactgtg

SEQ ID NO: 792008 - DNA, 73 bp, Homo sapiens
tcatctgggttctcactggccattggcttctcatggatgggctcctcgcacctaccccagcaactcaaattca

SEQ ID NO: 792009 - DNA, 98 bp, Homo sapiens
tcaaatggaaagaagtttgattccagtcatgatagaaatgaaccatttgtctttagtcttggcaaagacggccatcctgagacgacagggtcgataca

SEQ ID NO: 792010 - DNA, 98 bp, Homo sapiens
gaaagatcgagcagaggcctatttgatagaggaaatgtatgatgaaggtttagaaacatcaactggaatcaatttgcatttgaaaattagatcagcac

SEQ ID NO: 792011 - DNA, 50 bp, Homo sapiens
ttcagcaattcaccagcaaggccgagggactgctgagatgtcctctattc

SEQ ID NO: 792012 - DNA, 90 bp, Homo sapiens
caagtgcactgtgtgtggccagtcatttaccaccaatgggaacatgcacaggcccgccatgttcatagaggataaagcagtagacaccct

SEQ ID NO: 792013 - DNA, 95 bp, Homo sapiens
gaaggtagagctgctggagaagtttcgggacaactgtttggcaattttggagagcaagggccttgatccaggttggaagtactccatgacacaca

SEQ ID NO: 792014 - DNA, 50 bp, Homo sapiens
ggaatttaacatgcttgcacaaggttctgggttgaatgatggacagtggc

SEQ ID NO: 792015 - DNA, 98 bp, Homo sapiens
tcgctcagacaccatggggaaggtgaaggtcggagtcaacgggtcaatgagctgaaggagaaaggcaacaaggccctgagcgtgggtaacatcgatga

SEQ ID NO: 792016 - DNA, 100 bp, Homo sapiens
catgtggaccagaaaaatttcgttatgcccaagatgactttgtcctggatcatagtggtggtggaatgggtagcatgaacagtgtgactggaggaatggg

SEQ ID NO: 792017 - DNA, 83 bp, Homo sapiens
cccctggacctggtcagagcgcggatggccgtaaccccgaaggaaatgagttaagggagcatggagaaaagaagaaacgctcg

SEQ ID NO: 792018 - DNA, 90 bp, Homo sapiens
cgagaagcagcgggggggcaggcgatcgaagtccggttccagttgttggcaaaggagaggaagaggaagaggaagatggcatgcggcttt

SEQ ID NO: 792019 - DNA, 83 bp, Homo sapiens
aaaggctgtgtctacggcagcctggggatatacaattctgtggtgttcttggtcacacatttatggagtttctgaagggcagt

SEQ ID NO: 792020 - DNA, 100 bp, Homo sapiens
attcacctcatgctgttactgtatatatgctagagcctcactcctgtcaatatattcttgggtgtttgatatcctgtccacttacttagagactcacaac

SEQ ID NO: 792021 - DNA, 75 bp, Homo sapiens
ggcgatttcaactctcgaatgggaggaggcagtatagaggtttccatggatctcaatagtgccagcactgttgtt

SEQ ID NO: 792022 - DNA, 74 bp, Homo sapiens
tctaagtttcctgacgcctcccagccgtgcttcctgttaagcctgtgaaactgagaccaggcacctggatgaga

SEQ ID NO: 792023 - DNA, 101 bp, Homo sapiens
agctgtaaagccacccacaaacaaactacccattttcttttttggaactcatgagacatctttaatctcatgaagtacgacagctacagccgcttcttaaa

SEQ ID NO: 792024 - DNA, 98 bp, Homo sapiens
agaatttgtatagagatgtgatgttggagaactacagaaacctggtctccctagatgccatgaagtacaccattgtggtgtcggctacggcctcggat

SEQ ID NO: 792025 - DNA, 75 bp, Homo sapiens
ttgccgccgctgctgcccggggccggatccagagacaatggccccgatgggatggagcccgaaggcgtcatcgag

SEQ ID NO: 792026 - DNA, 98 bp, Homo sapiens
cctcagccttccgagtacctgggattacaggttaaaaatgtgtctgcaggcacacaggacgtgccttcacccccatctgactatgtggaaagagttga

SEQ ID NO: 792027 - DNA, 98 bp, Homo sapiens
aattgtgagactaaaggatacggaggaagtgtggacagtggacctacatacaatggggtaaattccttcctcgtgtacatggctttcaaagatcgctt

SEQ ID NO: 792028 - DNA, 104 bp, Homo sapiens
gaagattccactcgtggtatgagagtggataatataatcaactcctctgcctgacttaattcagtgcacaaatgagatgaatgtgaacatcccacagttggcag

SEQ ID NO: 792029 - DNA, 89 bp, Homo sapiens
ctaccaggaggccaggggtgtcgccatgaatttctacagacagttcaaggaaattgctgcagttattgaaacggtgtgaagacggattc

SEQ ID NO: 792030 - DNA, 75 bp, Homo sapiens
aagtacaagttagaactctttatctttctgtggatccttacatggaaaatttctaccttgaaccgtatctgaaag

SEQ ID NO: 792031 - DNA, 75 bp, Homo sapiens
ggttgaggttgtatatgagtgggcccggggcatggttgaaggggcccggccaggactcggggaagggtggcctga

SEQ ID NO: 792032 - DNA, 90 bp, Homo sapiens
ccggctgcgggaggaggccatcctgcagatggagcaaagtgcagaggaaagttccacttccagaaaaagaactacagaagacgatatccc

SEQ ID NO: 792033 - DNA, 100 bp, Homo sapiens
ctgcagccgcagccgcctccgaagatgggggatttctacgacccggagcacccgacccctgacggggatctgatgagcttctttcttctggcatcattaa

SEQ ID NO: 792034 - DNA, 98 bp, Homo sapiens
gtcaagcttgaaaaaacaacgtacatggatcctactggtaaaactaggcctaatgggattgtttgaaaaacgtcgcttcaggaaattcctagtgtatg

SEQ ID NO: 792035 - DNA, 100 bp, Homo sapiens
ccggcgccgccgcccccgggctcgcggcctgcaggaaaattgtgaggccgtgccccacagagccaccgtctatgcacagctggtggagtccgggaggatg

SEQ ID NO: 792036 - DNA, 76 bp, Homo sapiens
ccgcctcctcctctcccgcgggcaccgaggactccgctcctgcccaggcttctccagggaaagtgaccgaggcagt

SEQ ID NO: 792037 - DNA, 100 bp, Homo sapiens
cggacactttgttattggagaaacatgcagattatatcgcatcctatggctcaaagaaagatgattatgagtccaatgtgctgattgctgctaacagtca

SEQ ID NO: 792038 - DNA, 100 bp, Homo sapiens
caggcgctcaccatgttccctggagacaccagttggcgctccgaggcaacctttcagttcactgtggagcgcttcagcagactgagtgagtcggtcctta

SEQ ID NO: 792039 - DNA, 83 bp, Homo sapiens
acacttgcgcaaatgtctccgccctgaccctctattctgcaccctgtgagccaccgagactgaaccaaacccaggaagcggcg

SEQ ID NO: 792040 - DNA, 110 bp, Homo sapiens
gccatggatgaagatgggcttgaattacaacaagagccaaactcattttttgatgcaacagactgtttgtctgtgggatataaacgcaggaccaaaagaaggcaaaattg

SEQ ID NO: 792041 - DNA, 48 bp, Homo sapiens
ctgggagccagatgacgaccccattgcaccaattccagctggacatca

SEQ ID NO: 792042 - DNA, 105 bp, Homo sapiens
cggggatgggctgcaggagcttgccgtggtctccctgaagggcgtgcacatcctgcagaccctgctctcagcggcccacgaggtggagttgcagcggcagaagga

SEQ ID NO: 792043 - DNA, 99 bp, Homo sapiens
ggatatcgctgggacggagtggacaggtaggtgatgctctgatgctgctgcctcttatgaattgacgacaggtgcagagagagaataaactgtgtctaa

SEQ ID NO: 792044 - DNA, 51 bp, Homo sapiens
ccatttctagcttgttgaaacccaaaactatactgtaagattgatgttaaa

SEQ ID NO: 792045 - DNA, 98 bp, Homo sapiens
ggcacagccacagccattctcccatgtctactcgcaggcgtcatgttgggaatcgggaaatctgaaatagagtactatgctatgttggctaaaactgg

SEQ ID NO: 792046 - DNA, 74 bp, Homo sapiens
cttggtattacagggtcttcatgcactctgtcaagctgaggaatgtgcaagtaaagatgttctggtgaagaccc

SEQ ID NO: 792047 - DNA, 100 bp, Homo sapiens
cgacgcaaaccaaggatctggggatcttcgcactatcccaagtttggaccagaaaatccctttaggacacagcaaatggctgcccctagaaatatgcttt

SEQ ID NO: 792048 - DNA, 100 bp, Homo sapiens
ccaagcaaaacatcttctcctggtggatcctgaaggcaaggtatcctgagcatgattatcattcggaccctccggaaggacattgccaactacaacaagg

SEQ ID NO: 792049 - DNA, 80 bp, Homo sapiens
gtcctgatgacacagccctcagcgagagtgccaaccaggccttcctgacatctgaatgggactccgagtgccttacatcc

SEQ ID NO: 792050 - DNA, 75 bp, Homo sapiens
tttaccatgaatagttctactccttctacagatcccggagatcgcccgccatggctttacttactgcggccgccc

SEQ ID NO: 792051 - DNA, 82 bp, Homo sapiens
attggaagagactcctagaccctcagaagagatagaaaatggcagtagttcttcagatgaggatcagctgatttattcggag

SEQ ID NO: 792052 - DNA, 100 bp, Homo sapiens
agaccgtgaccgagagcgtgaccgagagcgcgaatatcgtcatcgttagaagcccaggttcgggaaagcaaattcaggctgcaggacagctgcccgggcc

SEQ ID NO: 792053 - DNA, 100 bp, Homo sapiens
tcccgggcagcccggcccgtgtcaccgccctgcgcttcaacagctccagcctgcagtgccagaattcctcgattcagtttaaggagaaagtgctgtggac

SEQ ID NO: 792054 - DNA, 125 bp, Homo sapiens
gaccccgaactccaggacagcatccaggcctcattggacagcattcgaggcctcaggcccaggcccaaggccaagtgagagagcccaggccacaggacatgctgccattctgccaagagaggctc

SEQ ID NO: 792055 - DNA, 87 bp, Homo sapiens
cctggtccaaggacacctacagccccgacgaacatttctgggtgacactcaacaggattcccgttcccagtgacctgacagcagagg

SEQ ID NO: 792056 - DNA, 90 bp, Homo sapiens
gaagaaacgggccgcgaaccgcagtatcatgctggccaagaagatcatcattaaggacggaggcacggaggaggaagccaagaatctggt

SEQ ID NO: 792057 - DNA, 82 bp, Homo sapiens
gtctctggagacatcttcagcagaaagtttcctacactactgaggtttaggggcactgtgaagcaaaagccacgcctcagaa

SEQ ID NO: 792058 - DNA, 100 bp, Homo sapiens
gggcttcaagacacccaaggaggtgccagctgctgcccgtgctggtgccattgccccatgtgaagtcactgtgccagcccagaacactggtctcgggccc

SEQ ID NO: 792059 - DNA, 100 bp, Homo sapiens
cactttgttttcaatgacaccaagttggacgctatgctggaagaatttaagaaaggtagatataatctgtggtgatcacctgttggagcagtatcaaact

SEQ ID NO: 792060 - DNA, 89 bp, Homo sapiens
aagtccagagctgaggactgcctgtttgcagggtcgtcatgtcaaaacgggccagcttgcagccatcaaggttatggatgtcacagggg

SEQ ID NO: 792061 - DNA, 98 bp, Homo sapiens
cggaacccgagctggagctgaagcgcaggctgcggggcgcggagtcgggaggcctgaagctgcccagcaggcattccaaggcctgggtcctggtttct

SEQ ID NO: 792062 - DNA, 100 bp, Homo sapiens
ggtctacaagactctcttcgctctttgcatcttaactgcaggactatctgctgccaaactcttgactgaatatggcgttagtgttttggttttagaagct

SEQ ID NO: 792063 - DNA, 75 bp, Homo sapiens
ctgtgctgcatttctctggataggtgcactttacaggtccccgatgaaccaagagaaccctccaccatatccagg

SEQ ID NO: 792064 - DNA, 98 bp, Homo sapiens
cacagagttagagagagggatggtgatcgttaactgaagacaatatgcaaaattctcacatggatgaatacagaaattctagtaatggcagcacaggc

SEQ ID NO: 792065 - DNA, 100 bp, Homo sapiens
agcagacaagttcacccaacataactttcaagagacttgcacacctacccctgtggagcgtgcaccctataagggagaagtcgccacactgaaatccaga

SEQ ID NO: 792066 - DNA, 75 bp, Homo sapiens
cgagatcatggggcccaagaaaaagcacctggacttacctggagtagaacagaaaaattattatgtctgtgttcc

SEQ ID NO: 792067 - DNA, 51 bp, Homo sapiens
cgctgtccctgcggcttctggggggacacagcaggtcaggagagattcaac

SEQ ID NO: 792068 - DNA, 90 bp, Homo sapiens
tacccgagggggtgaacaaagagaagatcacaccactcacgctcaaggactgagcagggggaggaacatttaagctgatggaagtggaag

SEQ ID NO: 792069 - DNA, 90 bp, Homo sapiens
gggaccctgaccacggaggcctcttttacttccaggatgctgataacttctgccccacccaggagatggcgtctaccagaaggggatgga

SEQ ID NO: 792070 - DNA, 51 bp, Homo sapiens
ggccgtaccgagctaccaggctgtcgtgagatggagaataaagaaactctc

SEQ ID NO: 792071 - DNA, 98 bp, Homo sapiens
tatcattggatgaagtggctccggagatgtgtatactcttgatgtaccagatgcattctattactgttatagtccagaccctggtaatgcaaagggaa

SEQ ID NO: 792072 - DNA, 75 bp, Homo sapiens
cgggagaagagcggagcagtggtcggagatgtggcgaccgattggtgctgaagacatggacggcttccaggcaga

SEQ ID NO: 792073 - DNA, 101 bp, Homo sapiens
gactacccacctagaagaggtgatgatagctttggagacaaaactgattcagcagtacagaaagaacttagaaaccagacacctgctccatctgcagctca

SEQ ID NO: 792074 - DNA, 100 bp, Homo sapiens
ctcatcctcattttaaaaagattggatagaatgttcaacaaaattcataagatgcctactttgaggaaaagaccagtgccctcagtctgagcaacgttgc

SEQ ID NO: 792075 - DNA, 96 bp, Homo sapiens
gtgagagccacgtgtgccgcgctctgggcacagccttggaaagtcaggaccgcgacggcagcagagcaaatgcctctctgtatggaacataaaatt

SEQ ID NO: 792076 - DNA, 100 bp, Homo sapiens
gtggctttgtcactggcaggttcctcaccggcatcaaacctcctctcaacgggacccaggtggagtctgtacagctcaaagtcaacatagcccgaaaaca

SEQ ID NO: 792077 - DNA, 75 bp, Homo sapiens
cgaggagcgggaagagttgctgggattgcttgcacacatttagatgtggatttagtctgcataactgtaacagag

SEQ ID NO: 792078 - DNA, 50 bp, Homo sapiens
actcgatccgcctgcctgcgcacctgcgagaatggtgttgaacgcgtgtg

SEQ ID NO: 792079 - DNA, 100 bp, Homo sapiens
gacgcagatgcccgggccgtggctctagcaggctccactaactggggctacgactctgatgggcagttaagtgggcagaccaacatccacctcagcaaaa

SEQ ID NO: 792080 - DNA, 82 bp, Homo sapiens
gagatcctgggatcagatgatgaggagcaagaggaccctgcggactactgcaaaggttgaaatgttccttcttgcctatgct

SEQ ID NO: 792081 - DNA, 100 bp, Homo sapiens
ggaaagatcacttctgtttgcacagagaaaggcacctggagagaaagtactttaacatgcacaggctttcttagaaatggcttctgaggaagctgccgtt

SEQ ID NO: 792082 - DNA, 100 bp, Homo sapiens
cttcaatatgttaaccaaagaaacaccagagaccttctacattggtctctggacctctgactgacactgtgcctgcccaggtccctgtatgcactgccac

SEQ ID NO: 792083 - DNA, 100 bp, Homo sapiens
cgttgtgtatggcctgaagctcttctctccagtgtttctacaatcagctagggactacttaataggtacgcaataactgtttggtattttgatgcagatg

SEQ ID NO: 792084 - DNA, 50 bp, Homo sapiens
gagaactacagaaacctggtctccctaggctttcagataaacttctgtga

SEQ ID NO: 792085 - DNA, 98 bp, Homo sapiens
ggataaccaaatgtgccgtgatgtatgtgaacagtttcatcaagaccaacttctcctgaaaaattttcagtgcctcatgtctgtgccaggtttggccc

SEQ ID NO: 792086 - DNA, 80 bp, Homo sapiens
ggaggatggcgcctgtctcttccgggctgtagtgcctccggagccagcgtggtggccatagacaacaagatcgaacaggc

SEQ ID NO: 792087 - DNA, 78 bp, Homo sapiens
ctcgaggacgctggagcccagcaaggtgtcctgtggccaggcggaaagcagtgagaagcccaacgctgaggacatgac

SEQ ID NO: 792088 - DNA, 100 bp, Homo sapiens
gagagggcagatctccgtgcaaagtatgtcagaaagcagatggaagccaggccccctcctgaaagaggctccttgaagcccacagcccccatcccgtagc

SEQ ID NO: 792089 - DNA, 75 bp, Homo sapiens
cgtagagaggaagagagaagacttggcgatagttccctttctagaaagattatggctgaacggaagaatgccaaa

SEQ ID NO: 792090 - DNA, 98 bp, Homo sapiens
gccccgcctctgccttcggatagggcaaatcataccccttcagggggccattcccacctgtatggaatccaattacctacttagatcataacaacttt

SEQ ID NO: 792091 - DNA, 100 bp, Homo sapiens
tggagcaggtgttattatggactttcaaacatctgaagatgacaatttattagatggtgacactgcagttggttactataacaacagtaccaaggtggct

SEQ ID NO: 792092 - DNA, 96 bp, Homo sapiens
agactgactggcacagtggagaaaccgcctcgaaaacggagaagcagccgagtcgtccggaaatccattgcccgtgttctcacagttattaaccag

SEQ ID NO: 792093 - DNA, 74 bp, Homo sapiens
cttcccgcttgggcgcccggacggcgaatggagcaggggcgcgcagaactctcagaaattgagcccaatgtatt

SEQ ID NO: 792094 - DNA, 75 bp, Homo sapiens
gaggaagccgagtttggcgaggaggatcttttccaccaacaggctctctaggaaacaccagaattatcagtgaag

SEQ ID NO: 792095 - DNA, 100 bp, Homo sapiens
cggcccacagtgggggtgtgcaaacccgagagaactggggaccttctgatgaaacccctcatgactatgttctgatgactgaccaatgtctcacttccag

SEQ ID NO: 792096 - DNA, 101 bp, Homo sapiens
cgccggcgcgcgaccccatccccatcccggtccctgcagagcgatccccgggcccagatatggacgcagcagagccggatgaggaaactgagacccagaaa

SEQ ID NO: 792097 - DNA, 90 bp, Homo sapiens
tttgggagagacgctctgaactgactgccccgcatcaccggagcgtcccagctgcgaggaggggagttgctgagtcagcccagaccggaa

SEQ ID NO: 792098 - DNA, 98 bp, Homo sapiens
ctcgctctgggagcctagaatgcatcagtgcccttgtggcgaatggggctcacgtcgatgttctaagaacggaagcatctgggctggatggaatttag

SEQ ID NO: 792099 - DNA, 74 bp, Homo sapiens
accccaagcactggcaaagcaggggtccttgtaccatgagatggcttcgagagctgtgcccaggagtgaacaac

SEQ ID NO: 792100 - DNA, 75 bp, Homo sapiens
cccttagagtcttggttgccaaacaggagtgaaagctggacattgaagaagccaaaatctgtttccaagaaacta

SEQ ID NO: 792101 - DNA, 100 bp, Homo sapiens
gatatagcacaccatccccagccagagaatgacatcttcctgggctgggaaaaaggagcttataagaaatggggaaagagtaagaaaaaatgttcagatc

SEQ ID NO: 792102 - DNA, 100 bp, Homo sapiens
gctgctgacgctgctgctgcccggcctcggggcatcagcaatgcagaagcacggcagccagggaaggcccccaacttcagtgtcaactggacggtaggcg

SEQ ID NO: 792103 - DNA, 90 bp, Homo sapiens
caaagttcacgtgactgtggatctcaagtactaccggccaactgaagtgtgaagttattgccagtggactgtgagagaaaaacagatgag

SEQ ID NO: 792104 - DNA, 80 bp, Homo sapiens
tcagctcctggttcaacgaggccattgacttcatagtgttctaagaacggaagcatctgggctggatggaatttagcatc

SEQ ID NO: 792105 - DNA, 83 bp, Homo sapiens
cgtgggtgttgaggcggagaggaaggcgtggtgtggcgtctccaggagggagccatggatttgctgcgggagctgaaggccat

SEQ ID NO: 792106 - DNA, 75 bp, Homo sapiens
agacagaccccggcccggcgaccgagctgggcccgtgagccactcggcctcaggcttctgccctaagaagatggc

SEQ ID NO: 792107 - DNA, 89 bp, Homo sapiens
ataactgaggacaatggacctgcctgggcatagacttccttaaggttcagcagactgtacaggatctttttggcagagccccaagtaaa

SEQ ID NO: 792108 - DNA, 83 bp, Homo sapiens
gccgagcgcaccgacatctgcctgctcaaagcacttgcacctcctgcgccgccgccccccatccaaggatatgccttcaagcc

SEQ ID NO: 792109 - DNA, 75 bp, Homo sapiens
atcgggtgtgaccgccgccgcccaggctggctataagaaaaaattatggaaaaagacacctgcaaggaagaagcg

SEQ ID NO: 792110 - DNA, 98 bp, Homo sapiens
aagagttggaacagaaggagaaagagaaggaagaagatacttcaggcaatactacacattcccttggtgctgaagatccttcccgccagaagaaactt

SEQ ID NO: 792111 - DNA, 75 bp, Homo sapiens
agcgcagcaacgtgcggtgggaccacgagagcacctgcctagagctggaacgttacctccagagcgagccctgct

SEQ ID NO: 792112 - DNA, 82 bp, Homo sapiens
gcttttactacgtggagagtggcaagttgttctccgtaaccagaaacaggttcattcattgcttaaagcttttcaagccagg

SEQ ID NO: 792113 - DNA, 75 bp, Homo sapiens
cttattttttctcatggatgttcttcttcgagtatttgtagaagggtccctgactatggctccccagagcctgcc

SEQ ID NO: 792114 - DNA, 90 bp, Homo sapiens
ctcacaatttatatggccaacttgggtcctaacctgattataaaacaaccagatgagttgctggacagcatgtcagattggtgtaaggag

SEQ ID NO: 792115 - DNA, 76 bp, Homo sapiens
ggcggagaaaaccggcatctgcaaaattcggccgcccaagattttccatctttgaccagaaatttgccaagccaag

SEQ ID NO: 792116 - DNA, 100 bp, Homo sapiens
ttgctcaagattttctgatcagaccaattggagagaagttgccaacatctggaggctgttctgctttggagttaaagatggagtcttgctctgtcgccca

SEQ ID NO: 792117 - DNA, 101 bp, Homo sapiens
gcgtgagccaccatgcccagccaaaaactttaaacttagaagaacattgcaagaatgattgactggctatcctggccattggctcagcatgtggatacatg

SEQ ID NO: 792118 - DNA, 75 bp, Homo sapiens
ggacggacaagcacagtcttcggaagatgaacaagagaactgggcaacccatgatccacatctacctggacaagg

SEQ ID NO: 792119 - DNA, 75 bp, Homo sapiens
tctgcactggagaagaagcaaggacagctcaggacacgtccaaatatggtagagacggggtttcgccatgttggc

SEQ ID NO: 792120 - DNA, 75 bp, Homo sapiens
gtcagagagcagaggttgaaagtccctctctgaaaagtattccaacgtgatattccttgaagtagatgtggatga

SEQ ID NO: 792121 - DNA, 90 bp, Homo sapiens
ggagccgcgaggagacagctgaggcccgcggagaccaggggtgtctgcccaggaggtcaggaaggagaatcccctccagttcaagttccg

SEQ ID NO: 792122 - DNA, 100 bp, Homo sapiens
cccggaattgggaagtgctcagaagcttacaaagctgcctcgagtggaccatagcaaaatatgctcccaggtttaatgggtttcagcaacaggactccca

SEQ ID NO: 792123 - DNA, 74 bp, Homo sapiens
tcaccccaagggctacaccgagtacaaagtaaccgcgcagttgttgaagtccgaagaggattcctcatataaac

SEQ ID NO: 792124 - DNA, 74 bp, Homo sapiens
cgtcgtcgtctgccttcgcttcacggcgccgagccgcggtccgagcctcccgaggagcccagacagctgcagcc

SEQ ID NO: 792125 - DNA, 95 bp, Homo sapiens
atgaaacatgccacaggaaactacatcattattatggatgctgatctctcacaccatgactatcggacaaaacctttctgctgcagcgcttgtcc

SEQ ID NO: 792126 - DNA, 75 bp, Homo sapiens
gcttttctggggagtcctggcggtttttattaaggctgttcatgtgaaagatatatttttgccatcatggatcag

SEQ ID NO: 792127 - DNA, 100 bp, Homo sapiens
gcaagacattgtttctctccctctgcccccccttccccacgcaaccccagatccatttacactttacaatggccctgctgtggcaccagtgaccaacggg

SEQ ID NO: 792128 - DNA, 75 bp, Homo sapiens
ggcggcgcctcaggcacctcggcccggggcaagaagactatgaccggctgcggcccctgtcctaccagaacaccc

SEQ ID NO: 792129 - DNA, 74 bp, Homo sapiens
cgaagggaagacttccagtagctccaaggaggttaaggtcagtttaggggctggtgcaaaggatgagttgcaca

SEQ ID NO: 792130 - DNA, 83 bp, Homo sapiens
cccgcggccgcaccttcccgccttctcagacagcacttcaaatgcaggcggggcgaaggcggagccccgggaccgtttgtccc

SEQ ID NO: 792131 - DNA, 88 bp, Homo sapiens
ccagagtcattgcaggaagtggatgagttccacctcattttagagtatcaagcagatgttgacgatgagtatgaggacgaggaccagt

SEQ ID NO: 792132 - DNA, 75 bp, Homo sapiens
tgcggcgaaggaggcagaggcacttatgcttgtcagggatagctgggagtatggccaccctgctccacgatgcgg

SEQ ID NO: 792133 - DNA, 75 bp, Homo sapiens
cctcgatctgggaaaaggttctgtccatgtcagaaatcaagaggctgcattgaggcgtgagcaaaagaagttgga

SEQ ID NO: 792134 - DNA, 75 bp, Homo sapiens
agatgtgtaatgttggtgtatccatggggcttacaagtgtaagctggagctacagggcgtcaagggtggggtgga

SEQ ID NO: 792135 - DNA, 101 bp, Homo sapiens
cgattgtctatgagaagtacaagggggagagcaaggacctgctgtttatcttgacagcgaagtacaatgcctgcatcctggagtataaacagagtggcgag

SEQ ID NO: 792136 - DNA, 100 bp, Homo sapiens
acggggccaccggctggagcggatcccacacctccggaccgagggacgcgggctccaccgaggacaccgcgtccagcttgtgtggcgaggaggacacaga

SEQ ID NO: 792137 - DNA, 99 bp, Homo sapiens
gggaatttaatggcttctgcctctgtggataacacagccatcatatgggatgtcagcaaagatttacagaatgtcaacatcacactgcgcatcctcttc

SEQ ID NO: 792138 - DNA, 75 bp, Homo sapiens
aagcaactggattttttaactgaagatagtgcctttcagccctaccaggttatggaattccactgaaagacggag

SEQ ID NO: 792139 - DNA, 100 bp, Homo sapiens
tcctttccggctagtgcctaatgtcagaatccacatggatgggaagttcaccatgtctattctcaagatccatgccagggagatctttgactctcgcggg

SEQ ID NO: 792140 - DNA, 101 bp, Homo sapiens
cctgcatgctgtttatgaaaggaactcctcaagaaccacgctgtgggagtgttggtggtcttcaatggtgtggagagccaaaacgtttagaaactgaagct

SEQ ID NO: 792141 - DNA, 50 bp, Homo sapiens
tacggaggtggcagccatctccttctcgtgcctccggagccagcgtggtg

SEQ ID NO: 792142 - DNA, 71 bp, Homo sapiens
gacatcttccaaactgtggacctctgggaaggaacaggagctcttcttcttccatgaactgagccctggga

SEQ ID NO: 792143 - DNA, 87 bp, Homo sapiens
tcagtggagccttctcagacccacaggtatgggctacgtgagttcgtggtgattgcccctgctgcacacagtgacgctgttctcagc

SEQ ID NO: 792144 - DNA, 75 bp, Homo sapiens
gtataacaatcagtgccgagcaattgtgatgagatattctgctgagtggaagcacttttccagccattaactcca

SEQ ID NO: 792145 - DNA, 74 bp, Homo sapiens
aaagtcccaaacagggcagcaataaaatcaagctcaagagtcgcctttcagtttttcagaagaagtgaagtcaa

SEQ ID NO: 792146 - DNA, 100 bp, Homo sapiens
cattgttttccggccatttaaaggggaggtcgtggatgctgttgtcactcaggtcaacaaggtgaacctgccgctgctcaccctgagccagcccctgctg

SEQ ID NO: 792147 - DNA, 100 bp, Homo sapiens
ctcaggaaagtctaagttcatcaaaatcggatacagatacagggattggtggaacgagaatgcctacacgcagccacaggaatccagtttccatggaaac

SEQ ID NO: 792148 - DNA, 100 bp, Homo sapiens
ctgggattcgcgctgctgggcacccacggagcctccggggctgctgcctgtggaggaaccgattgtgtccacagatgaggtcatcttcccactcaccgtt

SEQ ID NO: 792149 - DNA, 75 bp, Homo sapiens
gcaggggcggcgggagccgctaggcggagagagaccagacaatgcagatcttcgtgaagactctgactggtaaga

SEQ ID NO: 792150 - DNA, 101 bp, Homo sapiens
cggggacccgctgtcactgcgcctcccgctgccgacgccgcctggacggccgcactctccctgcccgagacccgggccaagaccagcttcaagtctccatg

SEQ ID NO: 792151 - DNA, 82 bp, Homo sapiens
gctgctgaagcccaccgaattaggttgtgaactaaaggccgacaaagattatcactttaaggtggataatgatgaaaatgag

SEQ ID NO: 792152 - DNA, 100 bp, Homo sapiens
aagccagccaggctctcatcgaggacgtggagaccacgtacttctgcaacacgtgcggacagcccctatgcgcgcgctgccgcgacgagacgcaccgagc

SEQ ID NO: 792153 - DNA, 90 bp, Homo sapiens
gctgcctccagctagttatttcgtcctcttccgttcttcacccctacaccttggagcttggtggagccagtgaacgtggtggacaatgga

SEQ ID NO: 792154 - DNA, 100 bp, Homo sapiens
ggcatgtttaaaagttcccgaagcaaattcttcttggatggacacagttataagacaggtgagcagggcagcatttccttctcccactgctgctgagatg

SEQ ID NO: 792155 - DNA, 91 bp, Homo sapiens
atctgtcttcggtggactccttcggcagtccacccaccgccgccgcctcccagtccagaatgacagggtccagaaactggcgagccacgag

SEQ ID NO: 792156 - DNA, 100 bp, Homo sapiens
cagagcaagaaaaaaaggaagacgatgacttcagtccgattcatagtcctgtccaacaactacctgcagatccggggcatcaagaaaacagatgagggca

SEQ ID NO: 792157 - DNA, 90 bp, Homo sapiens
gggaagatggcgaaggtctcagagctttacgatgtcacttgggaagatgccatggacaatattaccaggcagaaccaattctacgatacc

SEQ ID NO: 792158 - DNA, 76 bp, Homo sapiens
aggtgtgatttgccagaacaggagatattccagatgagaggtggtgggcccagatcaacaggcggtccttcgggtc

SEQ ID NO: 792159 - DNA, 100 bp, Homo sapiens
gcctcgcgaagatgataggggggaaacctcaagatataatcttcacttccgggggcactgagaccatgacattgggtgacattgtcttcaagagaatcag

SEQ ID NO: 792160 - DNA, 100 bp, Homo sapiens
acagaaaccacctctgccatcctcgcctcagtcaaagaacagacaggggcaagtgtccgagtggtgaatcagctacttacagagatggatggtctggaag

SEQ ID NO: 792161 - DNA, 90 bp, Homo sapiens
gcggtgttcatctccgacatccggaactgggtagatgtgattaatggggccctcgagtcagtcctgtcctccagcagccgtgaacaatgg

SEQ ID NO: 792162 - DNA, 90 bp, Homo sapiens
gaggacaaagagcccctcatcgagctcttcgtcaagaggaaagtctagacagtgacttgtatgctgaactccgctgcatgtgtataaaga

SEQ ID NO: 792163 - DNA, 82 bp, Homo sapiens
ccgagatgcagctgctgtccttgtgtccaggtgcacattcaggttcccgagcacaaacatcaagataacgttcactgccctg

SEQ ID NO: 792164 - DNA, 75 bp, Homo sapiens
tttcatgggccggctcccattgctccggcgcgttctcaagggcttgcagctgctaatagctcgatttgaagaaga

SEQ ID NO: 792165 - DNA, 83 bp, Homo sapiens
gcctgcgtgtcggcggagtcgacaatgcagatcttcgtgaagactctgactggtaagaccatcaccctcgaggttgagcccag

SEQ ID NO: 792166 - DNA, 100 bp, Homo sapiens
ccgccaccgccgccgcgggacgggcccaaggccgagccggagccggggcccgggcccgcgtccgctcccgcgcccggagccgacacccgcactgccagga

SEQ ID NO: 792167 - DNA, 82 bp, Homo sapiens
actgagactatcagtatcaaataatcagcttcagctttagctgcagctgcctctgttcagccacttgcaacacaatgtttcc

SEQ ID NO: 792168 - DNA, 74 bp, Homo sapiens
cgcagtccatctgactcctgcttcccgggtgttgctcgtgtattaatctctggagaagacacatccacagttag

SEQ ID NO: 792169 - DNA, 88 bp, Homo sapiens
cacatcgctcagacaccatggggaaggtgaaggtcggagtcaacggacaatgcagatcttcgtgaagactctgactggtaagaccatc

SEQ ID NO: 792170 - DNA, 80 bp, Homo sapiens
ttatccccacctctgatgattcctcagagatgggaactttgtccccataaggatggagctttaaaaagaacagataatgg

SEQ ID NO: 792171 - DNA, 90 bp, Homo sapiens
cctgtgtcctcattgctccaaactgtgttgtttcagctgtattagggctaaatttattgtgaagaaatcagaagatgaagaagacgccgc

SEQ ID NO: 792172 - DNA, 75 bp, Homo sapiens
agatacgctttaacttgaaatcaaggaatgtagaaatcagggatactcctatacctggcacttaccacttgaaaa

SEQ ID NO: 792173 - DNA, 98 bp, Homo sapiens
aaagtggtgaatcccctgtttgagaaaaggcctaagaattttggcattggggcaattccaaaagtcttcagatttccaaaaggaaggactgcagcaga

SEQ ID NO: 792174 - DNA, 82 bp, Homo sapiens
actaagagaaaattttctcctggtagacctcggtccaaacagacagtcagtcggatgcggagactgcagccgccgcgggcga

SEQ ID NO: 792175 - DNA, 75 bp, Homo sapiens
actcagtccctctgtgctccaggactccctcaataatctgctacaggagctgagagaccctaccctcactttccg

SEQ ID NO: 792176 - DNA, 89 bp, Homo sapiens
gggacattcttcaagaaatctccccagaagagattcagccaaaccccccatcctctgggatgcttgatatgcaaagcctagagaagcta

SEQ ID NO: 792177 - DNA, 102 bp, Homo sapiens
cacagctcccgaaagcgacgttcggccaccggaggagcgggagccaagcaggcgtccgagctgggccacagcctgaacgagaacgtcctcaagcctgcgcag

SEQ ID NO: 792178 - DNA, 88 bp, Homo sapiens
tgtgaaagaccgattttctgcagaagatgaagctttgagtaacattgccagagaggcagtatttggcagtcgtattcagagataaacc

SEQ ID NO: 792179 - DNA, 98 bp, Homo sapiens
cggcggcttttcggaaggcggctaagtcccggcagcgggaacacagagagcgaagccagctttaatgcgcccaaatgtgggcggggcaaaccggctct

SEQ ID NO: 792180 - DNA, 76 bp, Homo sapiens
cgagaactgcgcagacctggtggaggtgttaaatgaaaacctgtcgcgaaatcgcctttcagaaattcctatagaa

SEQ ID NO: 792181 - DNA, 74 bp, Homo sapiens
gtaagaactcctacatcaaactctccttcaaagaacatggccagattgagtttattggctcttctgaagccctg

SEQ ID NO: 792182 - DNA, 100 bp, Homo sapiens
gtctcttccagggtcttctaagtcagagacatcaaaacctggaccttctggattacaggccaaattagcaagcagctgttgtgctgtgtatggacgtggg

SEQ ID NO: 792183 - DNA, 100 bp, Homo sapiens
gtatgataccttacttaatactatatggctcgtggacagcagaaaattcagtctcagcagaaaaatgccaaaaagcaagctggacaaaagaagaaacaag

SEQ ID NO: 792184 - DNA, 82 bp, Homo sapiens
gtcacttacaacattaatcagatactgcatttaaggctgctccagttacagcaccacccggccgctgcacccggctgctccc

SEQ ID NO: 792185 - DNA, 90 bp, Homo sapiens
gctgaggcgtgagaatggcgtcccgcggccggcgtccggagcatggcggacccccagagctggagaagatggtataaactggtccatcag

SEQ ID NO: 792186 - DNA, 134 bp, Homo sapiens
acagcaagagcacctggctgatcctgcaccacaaggtgtacgatttgaccaaatttctggaagaggagattcctgtcaacgtccgattctgcctcgaaggcatggaggagtcaggctctgagggcctagacgag

SEQ ID NO: 792187 - DNA, 75 bp, Homo sapiens
tgcctaggcattttgctgtctcctcctaatacgagagatggctgcccaaagattgtcaatctggggagctctaag

SEQ ID NO: 792188 - DNA, 74 bp, Homo sapiens
ttccttctcctccactgggaactgagttttgggatttgagattgacgcggtgaactctgtccagttttcaaacc

SEQ ID NO: 792189 - DNA, 100 bp, Homo sapiens
ctatcgacaacacggcttttatggacgagttcttttctgaggaaatgcctacagtgtctgtattagaatatgctttgcctcagaggcccccccagggtcc

SEQ ID NO: 792190 - DNA, 90 bp, Homo sapiens
ggtggtgcgagtcttcggagcgaccccggcagggttacagctgaagtaaagcacaacatcaccaacactgtggtatgcagagtgcaaggg

SEQ ID NO: 792191 - DNA, 90 bp, Homo sapiens
ctgctgggattcgcgctgctgggcacccacggagcctccggggctgcattttgaaagcgaagcagaagccgtagaatcagcggcgagcct

SEQ ID NO: 792192 - DNA, 97 bp, Homo sapiens
gaactacgtcttctctgcattttgtccacatgagaggattacctttccaagccaatgcccaagacattataaacgctatgtccaaactgggtcttcg

SEQ ID NO: 792193 - DNA, 87 bp, Homo sapiens
atcctcttcacagggttctgcatcttagcctgctggagggaattgtcgagaatcttttcaaatgggcccgagaggccgatcaaccat

SEQ ID NO: 792194 - DNA, 75 bp, Homo sapiens
ggcgcaggccctcaagctggtggaggggccggacgtccgggtacccactgatggtaatgctggcctgctggctga

SEQ ID NO: 792195 - DNA, 75 bp, Homo sapiens
caggccagcaactcccagctcaatgcaatggtggtggctaatgccgtagcggcattatctgaaatcagtgagtct

SEQ ID NO: 792196 - DNA, 74 bp, Homo sapiens
ctatggcctgaagacgggattctttagagccacctgagctgaagattcccttgagaacaagtactgtcctgtgg

SEQ ID NO: 792197 - DNA, 101 bp, Homo sapiens
acaacatgggcaaccacctgccgctcctgcctggtttgcctgcaatgagatttcattctctacatttaaaggacatcctttctgagctgctgtgaataaat

SEQ ID NO: 792198 - DNA, 49 bp, Homo sapiens
tacaaggagatcgaggtggaagagatcatgaagactttgatagttgcgg

SEQ ID NO: 792199 - DNA, 108 bp, Homo sapiens
ctggctccgggctgagcttcctggagaagaggaaggctgtggatgagatgaacggaaaggagctcaatggaaaacaaatttatgttggtcgagctcagaaaaaggtgg

SEQ ID NO: 792200 - DNA, 83 bp, Homo sapiens
ctcgcatcgctgccgccaacgggtagcataatggcagaacctgtttctccactgaagcactttgtgctggctaagaaggcgat

SEQ ID NO: 792201 - DNA, 100 bp, Homo sapiens
ccgattccacacttgattctcttatacgctacttttactcagagtttgaaggttgtgaccaaaagaggctccggtgattcgcaaggggtggctcaccatc

SEQ ID NO: 792202 - DNA, 100 bp, Homo sapiens
ggctttggtccccagcgcagtgaagtggtgagcctttttgtcactgaatctgatgttccagcagaaatccaggtgttaaaagaacccctacaacagccaa

SEQ ID NO: 792203 - DNA, 76 bp, Homo sapiens
cgacatccacctggtgcacgccatcgaggagcagatcaacctccttgaggcccgccgcccgcgggcccacgagtgc

SEQ ID NO: 792204 - DNA, 100 bp, Homo sapiens
tgtcaggctacatcagcaaagggcacatcccgctctgggctttaaacgtgacccctcgcctcgactcgccctgccctgtgaaaatgttggtgcttcttgc

SEQ ID NO: 792205 - DNA, 90 bp, Homo sapiens
ctctcccaggacccgcctggctgcgagatatgcacccagtcagtcagagtcagagccagagaaggctccattgtgcagtgtgcccccacc

SEQ ID NO: 792206 - DNA, 83 bp, Homo sapiens
aagaagatgaggcagaaggttcaacggggagagtgtcagactactatccaagggcaggatttctctgcctcttccaaactttt

SEQ ID NO: 792207 - DNA, 98 bp, Homo sapiens
ggaggcgttccaggcggtgggggagatgggcatctaccagatgtacttgtgcttcctgctggccgtgctgctgcagaggcatttcatccttcatgaag

SEQ ID NO: 792208 - DNA, 100 bp, Homo sapiens
atattgagccggatagacctattggatatggagcctttggtgttgtctgattttaccaaatgttgcaagaactctggagttcttatggtagtaaaatgcc

SEQ ID NO: 792209 - DNA, 100 bp, Homo sapiens
aacagtgattcacaggtgtttccctctttgaatgccagtgactacttctcaaaagctttaaaatttgatccagaaaatgaatatgttctcatgaatcgag

SEQ ID NO: 792210 - DNA, 100 bp, Homo sapiens
agaccccattcggaaagacacctggccagcggtccagagctgatgcagttgccttgttgaaggggatgctaaagaagaaatactgcagccaccggaacct

SEQ ID NO: 792211 - DNA, 75 bp, Homo sapiens
tcttcagctgctcggacagatgaagctccccaaggagctgcagaccacaggcggagcagcagcagccggagccag

SEQ ID NO: 792212 - DNA, 82 bp, Homo sapiens
ggacatggagatgaagaagaagattaacctggagttaaggaacagatccccggaggagctcaccatggatgatgatatcgcc

SEQ ID NO: 792213 - DNA, 75 bp, Homo sapiens
cgcttcgtgcaactctccgggcggccgcacctgccaggaactgtggctgcaccatctgtcttcatcttcccgcca

SEQ ID NO: 792214 - DNA, 82 bp, Homo sapiens
ccagtcgcctccaggccaagagggatccttcacccgtgtctggagaaccaggtgcatcagcgcattgcggagctgaggaaag

SEQ ID NO: 792215 - DNA, 75 bp, Homo sapiens
ctggttgtcacatacccccagcttagaggtgcttcaccctgccccaaggaagaggagttgtacgcatgtcagaga

SEQ ID NO: 792216 - DNA, 76 bp, Homo sapiens
gtgatgctggaaaatctcaggaatctggtctcattggctgggacgacatatatctttagcaaaggtggtggacaaa

SEQ ID NO: 792217 - DNA, 100 bp, Homo sapiens
cagatacactcatgcagcaaacacagttgtttacagctctaacaaaatagacggaagcactaagtaatatggatgattatgacaaaacctgcttggagtc

SEQ ID NO: 792218 - DNA, 83 bp, Homo sapiens
ccttcgtgctggaagtgatgggccggcactgcggtgtctttggtgcaacactaacaaggcttgtctggactacccagttacaa

SEQ ID NO: 792219 - DNA, 100 bp, Homo sapiens
cggcaaaggtgtcgtggtggtcattaagcggagatccggtgcacgacgccagctcccttctggggggccggggcctgggggttgccatggcccccagcca

SEQ ID NO: 792220 - DNA, 101 bp, Homo sapiens
cttcacagcacagttcctgggaaggtggagccaccagcctctccctgctgaatatctgtattctacacctgaacagctttcaaaaaggctccagaatttct

SEQ ID NO: 792221 - DNA, 51 bp, Homo sapiens
ctcagtgcctgccatggactgtcgtcattgaattttgagaagcattctgaa

SEQ ID NO: 792222 - DNA, 73 bp, Homo sapiens
aggggattcaaacttcaacagaatgtggcaaccagtcctgacacagctctccctgaggagcagccacattcca

SEQ ID NO: 792223 - DNA, 74 bp, Homo sapiens
tcgctgagagctgggaagaggcggcagacagcggggatgggaaggccattgtgactatgtggtgattacagttg

SEQ ID NO: 792224 - DNA, 100 bp, Homo sapiens
aacaaagctgggaattccttatagagttattcacaatgcctccataatgaatgctgtaggctgctgtggtttacagatgcctgaaatgtgcagatgcccc

SEQ ID NO: 792225 - DNA, 90 bp, Homo sapiens
gccctggccgccgcctgcgaggcgctgcgagcagtgtttgccagctctgagcctgtgccaggattccagggggataccctgcagctagca

SEQ ID NO: 792226 - DNA, 100 bp, Homo sapiens
ccgccttcccaggaccctcagggagagcgggcagccttccaggtggacagcacagactccccctccccccggcccctcaggccgggggtgaccttgcccc

SEQ ID NO: 792227 - DNA, 83 bp, Homo sapiens
ttcagatcttcacagcacagttcctgggaaggtggagccaccagcctctccctggcagaagctcctcctggggtagagacaga

SEQ ID NO: 792228 - DNA, 100 bp, Homo sapiens
gagacgccctcctccattctcttaggctccaaccaaggctctgttacagatgtagagctaaaacgactgaaggatgctttcaagaggacctgtggactct

SEQ ID NO: 792229 - DNA, 74 bp, Homo sapiens
ccagccatggcagattcctccgggcagcagggtttaagaattgtttaagctgcatcaatggagcacatacaggg

SEQ ID NO: 792230 - DNA, 50 bp, Homo sapiens
ccaatgttcagtggcggaacttgcacacatttaactggacggtccccttc

SEQ ID NO: 792231 - DNA, 82 bp, Homo sapiens
gagaggatctggtgtaccaggcgaagctggccgagcaggctgagcgatacgacggtcagcccaaggccaaccccactgtcac

SEQ ID NO: 792232 - DNA, 101 bp, Homo sapiens
aatgaagaccacaataaaagagacctctacttagctcagcaattcttacctttagtagagatcagagagttgtgacatctgaggaccaagttcaagaaggg

SEQ ID NO: 792233 - DNA, 74 bp, Homo sapiens
tgacaaaatgtgttccatggtcaaaaaatggcagacgaagcggcgggctctggagaagattgaccttaagttca

SEQ ID NO: 792234 - DNA, 98 bp, Homo sapiens
gcgtgcggaggaccaggcgcggcgcggctgcggctgaggtgctggagaatctggtaaaagcaccattgtgaagcagatgaggatcctgcatgttaatg

SEQ ID NO: 792235 - DNA, 96 bp, Homo sapiens
tgggcagagctcgcctatgccggagctctgtgtgtcgtctgagcagtcgcgagaagatttccctccaggacttgtccaaggagcgccggcctggtg

SEQ ID NO: 792236 - DNA, 73 bp, Homo sapiens
aagaggttccaagaatctttaaagaccttgggggttgtggaaaccagaacttcgcctggagaacagagtgcaa

SEQ ID NO: 792237 - DNA, 101 bp, Homo sapiens
cagcggccgcgcggcgctggactggagcagaaccccaggactgcgcccccgggagcgggcgcccagaggccatcgaagacggcaatttggaggaaatggaa

SEQ ID NO: 792238 - DNA, 90 bp, Homo sapiens
cacagactgccaagtgggacaactttctggcttttgaaaggctccttcttcaggatgctttcattggatttggaggaaatgtgatcaggc

SEQ ID NO: 792239 - DNA, 75 bp, Homo sapiens
ctttcttggactattccagagaggagtttgaccactttctggccaccaagttctcgacagtgaagcgatatggag

SEQ ID NO: 792240 - DNA, 82 bp, Homo sapiens
ccgcgccccgccgctgagccgtcgcggagccgcgcagccctcggagcacgcatcatggcagaacaggatgtggaaaacgatc

SEQ ID NO: 792241 - DNA, 74 bp, Homo sapiens
acatgcctcaccctcatctatatcctttggcagctcacaggaacctagaaagattgtacaatgaatggtgattc

SEQ ID NO: 792242 - DNA, 74 bp, Homo sapiens
ctgaaggcatccgtggttgtttttaagtggaatgcagtagccctctgggcctgggatattgtggttgataactg

SEQ ID NO: 792243 - DNA, 90 bp, Homo sapiens
acgtgcattgcggtggggctgcccctgctgctcatctcgctggccttcgcgcaggagatctcgattggtctttactcacctggagacctg

SEQ ID NO: 792244 - DNA, 154 bp, Homo sapiens
tcaccgccccggatgcggccggagggcgcgggaatggagctcggaggcggcgaggagcgcctgcctgaggagagcaggagatgagtatgatgtatgtgccatttgtttggatgagtatgaagatggagacaaactcagaatccttccctgttcc

SEQ ID NO: 792245 - DNA, 121 bp, Homo sapiens
gggagccgcacgcggcgatatggaagaggagggcaagaagggcaagaaggtgctggagaatctggtaaaagcaccattgtgaagcagatgaggatcctgcatgttaatgggtttaatggag

SEQ ID NO: 792246 - DNA, 74 bp, Homo sapiens
cgacggcgtcgggagagcgcgcctagccggctcgcgagggcatggtctagtggcccagtcaggacgcggaaaca

SEQ ID NO: 792247 - DNA, 100 bp, Homo sapiens
cgaaagcctcttcgggacatttgcaagcatccagagcagagatgagatggagtctcactctgtcacccaagctagagtgcagtggtgtgatcatagcact

SEQ ID NO: 792248 - DNA, 74 bp, Homo sapiens
gtaccagtacaggatcatcttccggacccgcgagtgtttcagctgaaccatccgttcatcttcaagccatcatg

SEQ ID NO: 792249 - DNA, 100 bp, Homo sapiens
cgcactgtgacatgtctgatcccttgctcccatccctgcagcatgaacaagcggggatctgatgagcttctttcttctggcatcattaacggacctttta

SEQ ID NO: 792250 - DNA, 96 bp, Homo sapiens
atcaagttccacctcagtctgaacctgagagcaacaggtggtattggcaaaaggaaaagataccgaagtatgtggaatttatgaaagataattacc

SEQ ID NO: 792251 - DNA, 75 bp, Homo sapiens
tcagcctgcacggatggtcttgaaacacaaatggtttttggttcctaaaagtaaagctttagaggccaccaaatt

SEQ ID NO: 792252 - DNA, 95 bp, Homo sapiens
ccgggccgggccgggaccggggccgaggcgaaccgaggggcctgtgcggccgcccggcccggccgcggatcaggctacggaaaaacctgcgagcc

SEQ ID NO: 792253 - DNA, 83 bp, Homo sapiens
tctttccgtcctctgaggcgacggccgcggctgcacagaccgctcgggcatggagaattccgcttcggtggagcagctccagg

SEQ ID NO: 792254 - DNA, 75 bp, Homo sapiens
agatgatccaagtcaccaagaaattactgtctcaagtgatacggtaaagtgcaagttaagagttcagacatacaa

SEQ ID NO: 792255 - DNA, 75 bp, Homo sapiens
gcaggccgggaggagccgcagcgccgggcgaccccgcccgggcctcggagttgctggagaatgtaaccctaatcc

SEQ ID NO: 792256 - DNA, 101 bp, Homo sapiens
gtgtacacactgctgtttaccttggcgaggcctttcaccaagtccatggtcatactccctgtcacaaactccagctgaactaacttggaggaggatcttcc

SEQ ID NO: 792257 - DNA, 88 bp, Homo sapiens
gattctggggcagtatcaacggagtctccggggaagccagttgagggaagttctccatgaatgtacgtcacaatgatgatgaccgacc

SEQ ID NO: 792258 - DNA, 82 bp, Homo sapiens
acgacccctccctgccatgtatccgcagggcagacatccgtctctgctttctatccgtcaagatgataaagtcgtgtgcccg

SEQ ID NO: 792259 - DNA, 83 bp, Homo sapiens
cctgctttttctggtgtcctgaacctggaagttgtgctttttaaggtcagcccaaggccaaccccactgtcactctgttcccg

SEQ ID NO: 792260 - DNA, 75 bp, Homo sapiens
tggaagatgtggcagccggccacggagcgcctgcaggtttggaaagaaatcccggcctgcaatgtatgatgtgag

SEQ ID NO: 792261 - DNA, 100 bp, Homo sapiens
cattcaagggatggtgaaatggatgatagtcgagagcagcccgacggccatggaggctgaagagacgatggaatgccttcaggagttccctgaacatcat

SEQ ID NO: 792262 - DNA, 83 bp, Homo sapiens
gaagccgaggcggagaagccgcgcgcgcctcagaagctcccggacgcccaggtcactctgtgcggtgtgcactgaccccagcc

SEQ ID NO: 792263 - DNA, 100 bp, Homo sapiens
gcaacccgtgcttatgcagatagttactattatgaagatggaggtttgtttgaagagactgtaccagagggccagggaggaggagaaaggaattgagctg

SEQ ID NO: 792264 - DNA, 83 bp, Homo sapiens
tggtggcttgggcactgatgaacttagactgctctatggcatggcattggtcagataacgaaggaggcccaacttcattcaat

SEQ ID NO: 792265 - DNA, 82 bp, Homo sapiens
tacgcggatgtcggcgaagagttcaaccaggtttacccaaggtccagcctagcccctaggcaccatgtcggacagtgatcta

SEQ ID NO: 792266 - DNA, 83 bp, Homo sapiens
gtacagggaagtctataagctttgcaacagaattacagagtatgatatctattccagaggggagcttcaccacttcattgacg

SEQ ID NO: 792267 - DNA, 75 bp, Homo sapiens
tcgcaacctggcagccgccgccgtggaaggataaaagaatcagagtgtctcaacccttgacaagaggaccaagtg

SEQ ID NO: 792268 - DNA, 83 bp, Homo sapiens
ggaaccaacccactttctcggcgccgcggctcttttctaaaagtgaagatttcgatgtcgatcattttgtgtctgactgtagg

SEQ ID NO: 792269 - DNA, 75 bp, Homo sapiens
cggagacggagcggggcctgtccaggaagcacataatcgaaggtaccgaaagcacagtaatcactggtgtcgata

SEQ ID NO: 792270 - DNA, 74 bp, Homo sapiens
gcgagagcggcccggacgacaaggtgaccagaagtcagcagcttcccagaagccccgaagccggggcatcctcc

SEQ ID NO: 792271 - DNA, 90 bp, Homo sapiens
gctgtcgcctgcagctgctcgcctgtctccgtcggaagggagcccaagctttgcagagggaaagcgctctagcgagtgctgatttagaag

SEQ ID NO: 792272 - DNA, 118 bp, Homo sapiens
ctatcgtgaggttcagctgatgaagcttctgaaccatccacacatcataaagctttaccagacaatgcagatcttcgtgaagactctgactggtaagaccatcaccctcgaggttgag

SEQ ID NO: 792273 - DNA, 82 bp, Homo sapiens
tcggcaggaacttgctcgactgagagactcaggtttttcccactcggctttcacgtttgggattgagagccacatcagccag

SEQ ID NO: 792274 - DNA, 100 bp, Homo sapiens
gttagagtctggaagacctcagaagacctcctgtcctatgaggccctccccatggctttaggtccagcatcctttgaagcatgagttcttaccagcagaa

SEQ ID NO: 792275 - DNA, 100 bp, Homo sapiens
cctaaggaaggacccgcctttaggataaagataaagtttctctaaccaagaccccaaaactggagcgtggcgatggcgggaaggaggtgagggagcgagc

SEQ ID NO: 792276 - DNA, 75 bp, Homo sapiens
gtctcagtcagaacctagcgaacaagaacccagtgacttgattgtaaaaatttacagagcggaatcatatgctgg

SEQ ID NO: 792277 - DNA, 75 bp, Homo sapiens
gtttccatctcttcagagatgaaccagtactatactggcaattgctggagaagattttgcaattgttgcttctga

SEQ ID NO: 792278 - DNA, 100 bp, Homo sapiens
gccatttttcttaacagcaattgctttgaacatctcatacgactgctacagaactgcaagtttcccaggcaaggcttgcagcagacccagcagcagcagc

SEQ ID NO: 792279 - DNA, 83 bp, Homo sapiens
gtttcctgtagcgtccatcctgccagagactgtactgcttagggtttggtgccctggttgtcagatgttggaaagcagtagga

SEQ ID NO: 792280 - DNA, 50 bp, Homo sapiens
gtagagccaaatattaaatggtttgctatctcacgtgagagggcagtgga

SEQ ID NO: 792281 - DNA, 75 bp, Homo sapiens
gcgtcaagaagaggaggaagccatgcgtaggtttctagatgcattggaattatctcaaagccctatgttgttgga

SEQ ID NO: 792282 - DNA, 50 bp, Homo sapiens
agcgggctgagctctcagaaggcgtttgcctcagcatggagggcggggcc

SEQ ID NO: 792283 - DNA, 75 bp, Homo sapiens
tttggagaagttgaggaccttgtcgctcatttggcagaagtgtgtgatccagtcttgggtgacaagtgggacggc

SEQ ID NO: 792284 - DNA, 100 bp, Homo sapiens
gaaagggataggagaaggatgtggactgcagtgctgcagtgccagacatcaaaatttacaagctcttcggatattccagtagaatttataagaagaaatg

SEQ ID NO: 792285 - DNA, 90 bp, Homo sapiens
ctattgtgaaggagggttggctgcacaaacgagatattctctaagccgctttcatcatgggagaaatagagcagaggccgaccccaggat

SEQ ID NO: 792286 - DNA, 149 bp, Homo sapiens
gttgctggaggcacctgacaaatcctagcgaatttttggagcatctccacccaggaacctcgccatccagaagccaagtcctgtatctgccatgtctgtggcgtccacctcaacaggctgcattcctgcctctactgtgtcttcttcgg

SEQ ID NO: 792287 - DNA, 74 bp, Homo sapiens
ctcggaggcgttcagctgcttcaagatgaagctgccactgcagagccccgccatggaagacacgccgttggtga

SEQ ID NO: 792288 - DNA, 100 bp, Homo sapiens
gaccagcctgagctcctgctttgcacagctttgccacaaagcccagtctgtgtctcaaatcaaccacaagctggagggaactctcagactttgataaaga

SEQ ID NO: 792289 - DNA, 100 bp, Homo sapiens
catattgactgcatggggattgataggcagcatattcctgatacatatctatgtgaacgttgtcagcctagtcactctgagaggagtgataccaatgaaa

SEQ ID NO: 792290 - DNA, 75 bp, Homo sapiens
gaaaacatcagcaaatggcttagaaacatagatgaggaaaaccgtcttcagatacagtccctaagcccaagagag

SEQ ID NO: 792291 - DNA, 74 bp, Homo sapiens
gtaaacaggaggtggataaagtactaaaggtgggccaggagatagaagtaagacctggtattgtttccaaagat

SEQ ID NO: 792292 - DNA, 90 bp, Homo sapiens
cttggattacagaatgacctcttctccttggtggtggtgacgaatactgtccctcatgaggttcagaagctgcaatgtcccaagataaag

SEQ ID NO: 792293 - DNA, 100 bp, Homo sapiens
aggcaggggaggaagccacctcgagttggaagcaagaattggataagacttctcaggcgtctgcacaatccctaatggcccccagatctgccaaggagac

SEQ ID NO: 792294 - DNA, 75 bp, Homo sapiens
aagagggaagacacgcggaaacaggagtcgatagcagcagttggtgacgagatggcactcagaaacggcgttgac

SEQ ID NO: 792295 - DNA, 95 bp, Homo sapiens
gcactttaatattcctgccatcacaaaagctggacaagcgaaggtgattgtgatgtcagctacgatggatgtggacctgttctctcagtatttca

SEQ ID NO: 792296 - DNA, 100 bp, Homo sapiens
cgaccggttcgtcgcctccttgcccgtgaccgtcgctagaactcagttgtgcgttgcggccagtcgccactgctggaaagtacggtggccagactttaac

SEQ ID NO: 792297 - DNA, 74 bp, Homo sapiens
tagtgctgtgtgctggagggcactaccagatggggcctatgaaaggaggttccctacatgtcctttgattccga

SEQ ID NO: 792298 - DNA, 50 bp, Homo sapiens
agatgatcctggcggattttcaggcatgcatatcattctgtttcaactcc

SEQ ID NO: 792299 - DNA, 108 bp, Homo sapiens
acgttttagagtaccaaccattgtgtgctgtgaggtaaaggaactttcgaaagaaggtaccacctatcataggtattaccacacaatttcatgcatggtggcatattt

SEQ ID NO: 792300 - DNA, 110 bp, Homo sapiens
ctgttgtgtgctccccgcagaaggggctaccatgatcctttcctcctaacccctgaacagtgcccaagtgttgtctctttgttgtcagagagttacaaccctcatgtgcg

SEQ ID NO: 792301 - DNA, 100 bp, Homo sapiens
atgaccgtggagcagaacgtgctgcagcagagcgcggcgcagaagatgcacacttgactgaaggaggacagggaatctgaagactccggatgacatcaga

SEQ ID NO: 792302 - DNA, 50 bp, Homo sapiens
ctgaggatgagctggaggaggggaacgttctcaggttgaccagctgctga

SEQ ID NO: 792303 - DNA, 100 bp, Homo sapiens
tgagtccggtctcccggcgaaagtgagcgaggtttgcccggagcgcgcacgaggtgaatctggattgggaaagtcgacattaatcaactcattattcctc

SEQ ID NO: 792304 - DNA, 83 bp, Homo sapiens
ctcctagcagaagcctatggatctggaggtagaacgtcatgacatgaataccttaagcctgcccctgaacatacgccgagggg

SEQ ID NO: 792305 - DNA, 83 bp, Homo sapiens
cgccttgacagcggctttcaacccccacctcagcccagcaattcgtctgaccagtgcacaggacttcagggcttcctggtgtt

SEQ ID NO: 792306 - DNA, 100 bp, Homo sapiens
ccacagccagagccatgcaagcgcagttctcttcggacagaaaagcacttggttctgcttcgagatggaaggacacttataggctttttaagaagcattg

SEQ ID NO: 792307 - DNA, 82 bp, Homo sapiens
cagcccgcgcacagctgctcccttcgccttcgccctttccacctcgcggcagttcgtcaggatggctaaaggtgaccccaag

SEQ ID NO: 792308 - DNA, 96 bp, Homo sapiens
cccacgctggatcgtggaggagcgggcggacgccaccaacgtcaacaactggcactgctgcgctgagcacagacccaagtgtgctggggaagtacc

SEQ ID NO: 792309 - DNA, 76 bp, Homo sapiens
ggaaaggtgtgctgtgcctgaggccagaaaaatggctacaaacttcctagcacatgagaagatctggttcgacaag

SEQ ID NO: 792310 - DNA, 89 bp, Homo sapiens
ggcaaaggctaggcgctagggcggcggcgccagcgtagagcggcggtttggaggaaagatgagacgaatataacaccagcaatcctgac

SEQ ID NO: 792311 - DNA, 87 bp, Homo sapiens
gcgtcctgccaacgcctctttggaagaaatggcttctctagaggaggaagcctgcagccttaagatcagtggaccatcccctgcccg

SEQ ID NO: 792312 - DNA, 101 bp, Homo sapiens
atggaagagaatcttcttcgaataactgaaacctggaaagcttacaacagtgactttgaggaatcagaatgattgaagatagtgggaaaagaggaaatacc

SEQ ID NO: 792313 - DNA, 97 bp, Homo sapiens
tggaaaatctcaagcattcacaaaagtagagagaaagaaaggactctcaggtcactctgactgctgagacctcatgtagctacatttcctggccccg

SEQ ID NO: 792314 - DNA, 80 bp, Homo sapiens
gcgcgtcaggccgcgacgagggcgctgagtctctgctttctatccgtcaagatgataaagtcgtgtgcccgagaaccaaa

SEQ ID NO: 792315 - DNA, 83 bp, Homo sapiens
cccggatgcaggacagacccctcagaaactgttcaggttccattatcaaaacgagcaaaatttgttggacctggtggctataa

SEQ ID NO: 792316 - DNA, 75 bp, Homo sapiens
gcaggggacccctgacccaggttacggaccggaagtgctccagaactcaagctgctggagccagttctgcttctc

SEQ ID NO: 792317 - DNA, 74 bp, Homo sapiens
agctaattatgaaaacatttatcattggaatcagtgggcatcatgacggtgatgtcagctctgtcggtggcccc

SEQ ID NO: 792318 - DNA, 51 bp, Homo sapiens
tgatcgggacccccccgcagaaggaataatttttactctagccaaggaata

SEQ ID NO: 792319 - DNA, 83 bp, Homo sapiens
tggcgagcctgcaggatggcgcggccgagtccccgtacggccacccggcggtgcactggtgattgctgcggtgtttgaccgag

SEQ ID NO: 792320 - DNA, 82 bp, Homo sapiens
cagattgtcatagatgatgcaactatcttaatcctcggagggtgtggcggtcccaatgctatatggccgcgtggaaagtgtc

SEQ ID NO: 792321 - DNA, 100 bp, Homo sapiens
cagcgcccagccccctgctatgacccttgcgactgcctggaaggctgaagtcccagctgctcggaaggctgaagtgagaagattgagtctgggaagtcaa

SEQ ID NO: 792322 - DNA, 75 bp, Homo sapiens
tcatcgctcctgacaagcatgagacaaagaaacagccttggtataatagcacgttagcatcaagacgaaaacgac

SEQ ID NO: 792323 - DNA, 75 bp, Homo sapiens
ccgtgcccatttccccagggcatggagatggtgaccctctttcagatgtgggttgttcccctctatttcacagtg

SEQ ID NO: 792324 - DNA, 75 bp, Homo sapiens
accatgagctggggcaccgagctctggatcgggagcggtgccgagaaaaatttccttactagatgacatttcatc

SEQ ID NO: 792325 - DNA, 100 bp, Homo sapiens
catgggcgagtctacgatgtcacccgcttcctcaacgagtctgaagatgatgagaaactgaaaaagaggaaggagcgatttgggattgtcacaagttcag

SEQ ID NO: 792326 - DNA, 50 bp, Homo sapiens
tcaccagcactgtctccaccctagagatttatgtgatcagtttggctgaa

SEQ ID NO: 792327 - DNA, 82 bp, Homo sapiens
gctggagctgggtcagtccgccgctcaccccgcggccgcaccttcccgccttctcaggctgatcagctgaccgaagaacaga

SEQ ID NO: 792328 - DNA, 101 bp, Homo sapiens
gaggaagagccgggcagtccctggagcgggccagccccagtggacaggaaagctaaggcctcagcgatgccggactccccagcggaggtgaagacgcagcc

SEQ ID NO: 792329 - DNA, 98 bp, Homo sapiens
gtgaaggagggttggctgcacaaacgaggaccgtataatagacgctggccccaaaggaaactactctcgatttatgaatcacagctgccagcccaact

SEQ ID NO: 792330 - DNA, 100 bp, Homo sapiens
cagattccagaaaaattacagcacatctcagtgaatttgcaagtgcctccttttagaggactcagaagaagaagaaggtgacttatgtagaatttgtcaa

SEQ ID NO: 792331 - DNA, 51 bp, Homo sapiens
aaattaactatctgtacttataagaaatgaagctgttgtcatttctggaag

SEQ ID NO: 792332 - DNA, 100 bp, Homo sapiens
cgcatcaggtggccgggcacatgtacgggaaggacaaagtggggtttcatcaccttaaatggttttgaaccaatgaaggtgtattcccttaaaaagacgg

SEQ ID NO: 792333 - DNA, 100 bp, Homo sapiens
gaggagagtcagcccgaggccaaggtagtaaaggcttttgtcgttctaaatcctgattacaagtcacatgatcaagaacaactaataaaggagattcagg

SEQ ID NO: 792334 - DNA, 75 bp, Homo sapiens
tctgtttatttagaagacacagactaacaattttagatggttttgggatttgagattgacgcggtgaactctgtc

SEQ ID NO: 792335 - DNA, 90 bp, Homo sapiens
gcctgcacggatggtcttgaaacacaaatggtttttgacgaagttatacggaagcgtctcctcattgatggagatggtgctggagatgat

SEQ ID NO: 792336 - DNA, 103 bp, Homo sapiens
cggcgagccggagcgcggagcccggctcccgcaccatggaggaggacgacagctacgggcgtgatggtgggcatgggtcagaaggattcctatgtgggcgacg

SEQ ID NO: 792337 - DNA, 98 bp, Homo sapiens
ctaagggacaaggttccccacatctacttggaaatctttgggatgctcaatggcctctaattgtggcattgtagaaagtatcctgaactgggtgaaat

SEQ ID NO: 792338 - DNA, 78 bp, Homo sapiens
cctggagatgattgagccgcgcacgctacagtacaagggacgtccagatcggtgacatcgtcacagtgggcgagtgcc

SEQ ID NO: 792339 - DNA, 83 bp, Homo sapiens
cgcagcaacgtgcggtgggaccacgagagcgggatggagaagtttatgtttgggatgtgaactcaaggaagtgccttaacaga

SEQ ID NO: 792340 - DNA, 75 bp, Homo sapiens
ccttgccagatgatcttttacagaggtgcagttttgccaaggagtgctaaagaacttagatgtcagtgcataaag

SEQ ID NO: 792341 - DNA, 74 bp, Homo sapiens
aagggccacctgttcctcagttccaaccacaggcaacgcggtaaaaatattgcttcggtgggtgacgcggtaca

SEQ ID NO: 792342 - DNA, 74 bp, Homo sapiens
aaatgcagtcgagaggaggtcgaacagattgagctgatccagtttattacaactggtcctattattgccatgga

SEQ ID NO: 792343 - DNA, 83 bp, Homo sapiens
ctcgtggaggggatggatttccataagttttactttgagaatcgtactggctgtgatcgaacttctcaaccctcagagactta

SEQ ID NO: 792344 - DNA, 90 bp, Homo sapiens
tgaagaccccattcggaaagacacctggccagcggtccagagctgatgcaggtgttaagtgtgatgcttccataatacatttggatgctg

SEQ ID NO: 792345 - DNA, 90 bp, Homo sapiens
acacatcggatcgatgctacgctaacctatcgggttctctctccgcgcgttcagattagtgggatggtttggccatgaactcagcaccag

SEQ ID NO: 792346 - DNA, 100 bp, Homo sapiens
tagaccccaacaatataaaaacaaatgctaaactctactgtaatcggggtacggttaattccaaggcccgccaagctgccccctgtgtgctattctttga

SEQ ID NO: 792347 - DNA, 90 bp, Homo sapiens
gcaggcgctggttggacagacaaaaaatgatttggtggtcagcttgcctgaggagatgagctcacagtgcctgcactttaccccagtagc

SEQ ID NO: 792348 - DNA, 100 bp, Homo sapiens
aaatcgccctggaatcacttttgagattggtgctcgtttggaggcactggactacttacaaaaatggccataggaaaaggatacagagtagagtttcatg

SEQ ID NO: 792349 - DNA, 80 bp, Homo sapiens
aagatggcggacggggagctgaacgtggacagcctcatcacccggctgctggagggcaatactgaacactgcgcagcttg

SEQ ID NO: 792350 - DNA, 100 bp, Homo sapiens
gtggatcctctggccagctgactgcacttcttttttgagaaaggaaggaatatatcctgactgattacttaattcagtgcacaaatgagatgaatgtgaa

SEQ ID NO: 792351 - DNA, 100 bp, Homo sapiens
tggggtgtgagaacttgatcagtttgtgtcagccaccttgttctctaaaggtatgactacgtggaagtcttcgatggagaaaatgaaaatggacatttta

SEQ ID NO: 792352 - DNA, 100 bp, Homo sapiens
caacatgacacagcttgtttcaaatttatcagcaacagtagcagaattgaaacgggagcagttggaattgatcacaccttttcagttgtacttcaatcct

SEQ ID NO: 792353 - DNA, 100 bp, Homo sapiens
ccagctcttcagcattgtccgccaggcctgtgtccggagcctgagctgtgagaatccagtagagacacccaagaaggactatagtctgttaccactgtta

SEQ ID NO: 792354 - DNA, 98 bp, Homo sapiens
gaagaattaaggggcatgttggtgcatttaactacaaaaccagattggcagtatggagttactcaggccttccctcacacagaggaggaggtggaagt

SEQ ID NO: 792355 - DNA, 100 bp, Homo sapiens
aggagaattcaacacaggtgtgctgcctcctctcctgccaggtgtgtggctgcacaggagtcttgctgatggtaccatatggctctgactgaaacctggc

SEQ ID NO: 792356 - DNA, 101 bp, Homo sapiens
agctggcagcagcatctcagcccaagagaagtttcttatcaccacaggagaaaatctagattatcttgatggtgtccatacggtgtttggtgaggtgacag

SEQ ID NO: 792357 - DNA, 100 bp, Homo sapiens
tctcattcccaaaatgaaaatttctccaaaaaggatgtcatgttcctggcctgctggagaatgctggaggagaccttaaggatggccaccaccactatga

SEQ ID NO: 792358 - DNA, 95 bp, Homo sapiens
tgcaggacaaaactcctctctatagtcaactccttcaagcatataagtggtcaaacaagggcgatgccagtccctccactccagaggagaacgaa

SEQ ID NO: 792359 - DNA, 50 bp, Homo sapiens
aggacatcaagttcttgccgttcaagcggctatgtgactacgtttgtgac

SEQ ID NO: 792360 - DNA, 81 bp, Homo sapiens
atcctaaagcgtttcctcgcttgcattcagctcctctgtgtttgccgcctgggttgtttgatgtgtgcacagtgtcacgaa

SEQ ID NO: 792361 - DNA, 96 bp, Homo sapiens
aagctgctactgaatggagcccgccatctgggttataccctttgtaaacaaatagagagagcaggagattcggatgggtcagatggctatgggagg

SEQ ID NO: 792362 - DNA, 50 bp, Homo sapiens
cgcgctgcaacccccggctcgggtggacacctgcgcaggtgtgtgccctc

SEQ ID NO: 792363 - DNA, 82 bp, Homo sapiens
aacatctgctcgctagccacacaatgcagatcttcgtgaagactctgactggtaagaccatcaccctcgaggttgagcccag

SEQ ID NO: 792364 - DNA, 75 bp, Homo sapiens
cgcgtctctctgctgcggcgcggggaccgctgtgctctcgttgtgggatccaacgaagaataaaaagttgcaaga

SEQ ID NO: 792365 - DNA, 76 bp, Homo sapiens
tcagcctgtttgataagtataaaggaaaatcagtagacgcgattagatcctcagatgagtgtgggtcagagagcca

SEQ ID NO: 792366 - DNA, 74 bp, Homo sapiens
caagcatgatgattcttcagataacttctgtgaagctgatggatctcaaagatttcatgagacaagctggggaa

SEQ ID NO: 792367 - DNA, 98 bp, Homo sapiens
tatgttttcccgaaacccttcaatagatcctcaccagatgtcaaatttgtttgtcagcacctgtggaatcctctcaagaggaacagtcattgtgtgaa

SEQ ID NO: 792368 - DNA, 82 bp, Homo sapiens
aaacaacttcagaaaatggaatacattctgaatttagagtgttctaagaacggaagcatctgggctggatggaatttagcat

SEQ ID NO: 792369 - DNA, 73 bp, Homo sapiens
aaaaccatcaagctatggaataccctgggtgtgtgcaaatacactgtccaggaggacgaatccatgaaccaac

SEQ ID NO: 792370 - DNA, 100 bp, Homo sapiens
cagggaccaggttaccctaacagcaggaaggttgtggaggtggggaagacagggctccagctaccacaggacgggctctgggtatagccgttccagtcag

SEQ ID NO: 792371 - DNA, 98 bp, Homo sapiens
gcggcggtcgacatgttccaggtcccggatagcgagggcggccgcgccggctccaggctcaccagctggattccctcctgggggcttcattcccaaaa

SEQ ID NO: 792372 - DNA, 75 bp, Homo sapiens
ccagcacttcatccagcagtgcacagaggaggaggtggaggaggaggaggatggagagctgcccaagacagggat

SEQ ID NO: 792373 - DNA, 100 bp, Homo sapiens
gtgaccgaggcctgggccccggggggcttgtacatgacagctggaatagcctccagttgaggggcttggtggtgctccttatctctaaagcagctgggcc

SEQ ID NO: 792374 - DNA, 75 bp, Homo sapiens
ctttctgcacgagaccgggctggccatgatctatgttaaacacagtgggaatatcacttttgatgagattgtcaa

SEQ ID NO: 792375 - DNA, 90 bp, Homo sapiens
aaaacagataccgagatattcttccatgcaacatgtcggaaggaaacgccgccggcgagcccagcacgccgggagggccccgacctctcc

SEQ ID NO: 792376 - DNA, 90 bp, Homo sapiens
ctcacagatgctgtcgatgacattacttccattgatgacttcttggctgtctcagttggtgaagaagctgagtgatttcacaggctgcac

SEQ ID NO: 792377 - DNA, 100 bp, Homo sapiens
tttgcaagaggctcctggattatagcctgcacaaggagaggaccggcagcaatcgatttgccaagttaagtgggcagaccaacatccacctcagcaaaaa

SEQ ID NO: 792378 - DNA, 98 bp, Homo sapiens
agccgagcacgaaggtttcagaggaagccgagtcccagcagcagtggtcatctctgaatttgagcaatggtgaaacggaatctgtgaaaaccatgatt

SEQ ID NO: 792379 - DNA, 100 bp, Homo sapiens
gtgagagcccagagcctggcaggagtccagaaagccagatggctgaacatcaggcatgaacaaccgggaggtgctggagcaggtggagcgaggctacagg

SEQ ID NO: 792380 - DNA, 83 bp, Homo sapiens
ggaaggagggcgtccgagtcaacaaccgcttcgagctggctttatcctgtggataaacgcagagtgaacgagtttggggagtc

SEQ ID NO: 792381 - DNA, 90 bp, Homo sapiens
tcttcttcgagtatttgtagaagggatgaggaagatggagagaatgcccacccatatagaaacagtgaccctgtgattgggacccacaca

SEQ ID NO: 792382 - DNA, 75 bp, Homo sapiens
acacgcaaacgagagctgaggctaatgaaaaacagtttgcattgagactccttgcattccgccagatacacaaag

SEQ ID NO: 792383 - DNA, 83 bp, Homo sapiens
tattttttggagcttccatcctggttcttccaaagtgcccggacccaaaacaggaacaccgaacaagatttgtgatgaaatgg

SEQ ID NO: 792384 - DNA, 100 bp, Homo sapiens
tatccatggagacaagagtcaaccagaaagagattgggtacttaatggttatatcttaagtgtggtgctgctaacattgcccaggcagcatctggttcag

SEQ ID NO: 792385 - DNA, 100 bp, Homo sapiens
cagccatgttttctgtctacgatggacatggagttggatcatcatcgctgccacagtggtttccattatcattgtctttgaccctcttggggggaaaatg

SEQ ID NO: 792386 - DNA, 50 bp, Homo sapiens
cgcacagatgagagcgctccgaagactgatgaaggatttgggggcagagc

SEQ ID NO: 792387 - DNA, 90 bp, Homo sapiens
cgtggccaccgctgtgatgtgggctgccgccctatattttttcttccagaatctcagcagctgggaggtttctccaacaactaacagaag

SEQ ID NO: 792388 - DNA, 74 bp, Homo sapiens
acgccgagagcacgtacggcctctaccgggacttgattattcttagaaatgcacttgacctgcttttgccaaag

SEQ ID NO: 792389 - DNA, 74 bp, Homo sapiens
aatagtgctcagactggtagcttcaaacagctcacagttaagttttttgctccactcaagcctgttagaatcac

SEQ ID NO: 792390 - DNA, 100 bp, Homo sapiens
ccctttacacagactcacttgtcactcactgccatagagtacagccacagccacgacaggtacctaccaggcagcttggatcttaaaagcaagagcgcta

SEQ ID NO: 792391 - DNA, 75 bp, Homo sapiens
gagctcatctggaattttgccgatttcatgactaaccagtgtgtggacactgcaagagacttgcacctgagtatg

SEQ ID NO: 792392 - DNA, 75 bp, Homo sapiens
ctgggagaagcagcagagaaaggtattgggagagttgctgctacatctttaggaaatttgactaaccatggttct

SEQ ID NO: 792393 - DNA, 82 bp, Homo sapiens
ctttttcttgctgcgaagaagattcctggaatctcatcaactgcaaagctacccattttgaggtttagctttgctcttgtag

SEQ ID NO: 792394 - DNA, 82 bp, Homo sapiens
aacctgaaccagtaactgaagtatctgcccctgtcaaatcattccagatttcgacctcatcaggatgcaaaccccgaaaaac

SEQ ID NO: 792395 - DNA, 100 bp, Homo sapiens
ataacgtttatgtagctgaaagattccaagaagctaagggtgattcaccgcaggggtatagaacaggctatgcttacaggcatcctctcattcgagagaa

SEQ ID NO: 792396 - DNA, 75 bp, Homo sapiens
acccgagaacgtgcgggaagagaagatcatcgagcatttcaaacgataaggagtcaggccagggcgggatgacac

SEQ ID NO: 792397 - DNA, 82 bp, Homo sapiens
gaagaaatgatgatggaaatgaagtataataccaagaaagccccacttgattgaccctgctacgggaatggttatgaatctg

SEQ ID NO: 792398 - DNA, 83 bp, Homo sapiens
tttctggcagggagacaccttccatcggggcagcgacaagatggctttatcctgtggataaacgcagagtgaacgagtttggg

SEQ ID NO: 792399 - DNA, 100 bp, Homo sapiens
ggcggctcagccccatcatgctgggagtggttaatgtgttgctaacaactccactctgggtggtaaacaccagactgaagcttcaaggagcaaaatttag

SEQ ID NO: 792400 - DNA, 98 bp, Homo sapiens
catgctgtctggagaaacagccaaaggggactatcctctggaggctgtgcgcatgcagcacctgccgaaggagtaaaggtgctgcaatgatgttagct

SEQ ID NO: 792401 - DNA, 75 bp, Homo sapiens
ctcttcagaacagagccaatggcttggaatgaggaaggatgaaggggaggcctggctgagctgtcatcccccagg

SEQ ID NO: 792402 - DNA, 82 bp, Homo sapiens
gaggaacaggcaaagcgcctggaagaggaggaggcagcggcagagaaggaggaccgcggccatacaggaactaatgaaaatc

SEQ ID NO: 792403 - DNA, 100 bp, Homo sapiens
agcgaccgatatagctcgccaggtgtttgctgctttgtggtgcacaagcggtgccatgaatttgtcacattctcctgccctggcgctgacaagggtccag

SEQ ID NO: 792404 - DNA, 101 bp, Homo sapiens
tttaaagaaacagtctgtctctgtcacccttttaatcctagacatctccagaagtgaggccaggtggagatcgaggaccaggtggagggcctgcagttcgt

SEQ ID NO: 792405 - DNA, 50 bp, Homo sapiens
cggaaaactcccaacttcctgcaggaagaagatgagccttaggtctgaac

SEQ ID NO: 792406 - DNA, 82 bp, Homo sapiens
cttcctacggctacgggaaggatcgtccagtggctgaggctggacagagcacagcagcagcagcagccacgacgaggccccc

SEQ ID NO: 792407 - DNA, 73 bp, Homo sapiens
gaagctggaccccttggtaaaagacaaggccttctccaaggtgcaaattgagcatgacccagaattagaaaaa

SEQ ID NO: 792408 - DNA, 82 bp, Homo sapiens
gattgttgcttttacgggcgcctgcattactcaaaacatccatgatagcagtcttctgtaaatcgaacttttcaagaattct

SEQ ID NO: 792409 - DNA, 100 bp, Homo sapiens
gcttaggaaggaagaggtcatctcgctcggagcttcgctcggaagggtctttgttccctgcagccctcccacgatttgaaagttgagagcagcatgtttt

SEQ ID NO: 792410 - DNA, 100 bp, Homo sapiens
tttatgcagttattcgtttcttacgggaacaaagtcagatggacacttacacctcggatgaacaagaaagtttggaagtccaaacccctgatacctcttc

SEQ ID NO: 792411 - DNA, 75 bp, Homo sapiens
cttgcatggtgtttcaaagggtggtgaagaactaagttgatattcactgatggactccaaagaatcattaactcc

SEQ ID NO: 792412 - DNA, 100 bp, Homo sapiens
ttagggtgacgtgtgcattgagtaaacttatttgctggtataaaggatggagaaagcctgcagctctttgaacaaagttctcgctctgcgcataaacaag

SEQ ID NO: 792413 - DNA, 109 bp, Homo sapiens
tgcttctgcctaaagtggtcaacacaagtgatcctgacatgagacgggttgaagatgacagcgatgcagagacctatggagaagagaatgatgaacagggaaattattc

SEQ ID NO: 792414 - DNA, 100 bp, Homo sapiens
agaaaatacaaatcacacgcataatggatgaaaggaaccgacagtgaaagagtttctagccaaagccaaagaagactttttgaaaaaatgggagaatcca

SEQ ID NO: 792415 - DNA, 101 bp, Homo sapiens
aatcggggagcttacccagcttaaagagctccacattcaggggaaccgcctcaccgttctgcccccagaactagccgagccgctgccgctcatggatttgt

SEQ ID NO: 792416 - DNA, 75 bp, Homo sapiens
tcagaaactcctggtcaaagaaggttcctgtgtcagccaatgaccctgttccagattcagttcctgaatagtgtt

SEQ ID NO: 792417 - DNA, 90 bp, Homo sapiens
aattgacataaaacagttgatagcaaagaagataaagttgacagcagaggcagagggattaggcaaagaggagtcccaaaatgagaaaca

SEQ ID NO: 792418 - DNA, 75 bp, Homo sapiens
cgatggcagcgctgagtgccaggatggctctgatgagtcccaggagacgtgctaattgccatgggaccaacccag

SEQ ID NO: 792419 - DNA, 96 bp, Homo sapiens
actcatgactactgaggattctgtggcagtgcccagagtgttgaatttcatgaaagaggaaagaatcataaggaaaatgtggcaaaaaggatcagt

SEQ ID NO: 792420 - DNA, 90 bp, Homo sapiens
ctcatctagaaggagagcaattagtgagacagaaccagaggaagagatcattgccgaggactatgacgatgatcctgtggactacgaggc

SEQ ID NO: 792421 - DNA, 96 bp, Homo sapiens
gcgagcctcgtggtgtggtgtatggccgtgggcatctcctacattagcgtctacgaccaccaaggggcaacaccctccactaaagagtcaagccag

SEQ ID NO: 792422 - DNA, 98 bp, Homo sapiens
cttggatatcttcggggacctgaagaagatgaacaagcgccaggaatactcccccagttgcaagaggcgcaggaccgtggaagacttcaacaaattct

SEQ ID NO: 792423 - DNA, 100 bp, Homo sapiens
cagattacgccccctatcctatccgcaaacatatggtttgaagtggtgaacatggatttttctcggcttcacatgtacagtcctccccagtgtgtgccgg

SEQ ID NO: 792424 - DNA, 98 bp, Homo sapiens
cgagagggagccgcagctgatgtcagctacaagagactgtgaaaaggaagttggaaggagctcgatcaccacttaatggagaccagcagaatggtgct

SEQ ID NO: 792425 - DNA, 100 bp, Homo sapiens
ttttttccaaagtagaaaggaagcacttctgagccagtgaccactgaaaggaagtgcccaccgcgtgccccgattggagaggggaccttctgcaggttgt

SEQ ID NO: 792426 - DNA, 83 bp, Homo sapiens
tccggcgggaactcgactcttggcgccaccgcctcatgcactgtgtagctccatgtccatccgctggccgggccgccccctcg

SEQ ID NO: 792427 - DNA, 50 bp, Homo sapiens
tttgacatctgtacttcaagaaaggttttaaaatcaaagatgggaaaatc

SEQ ID NO: 792428 - DNA, 75 bp, Homo sapiens
gcccattcctccctctggtggcccctttagtgagactcggagccgtgggtcccgactgaacatcatcatcatcgc

SEQ ID NO: 792429 - DNA, 100 bp, Homo sapiens
cggaaaattaactataaaggagagcgccaaaccattactgatgatgtggaggttaacagctatctttctctatgctaagaaggaatctgatcttaatggc

SEQ ID NO: 792430 - DNA, 74 bp, Homo sapiens
ctcagaggaagaggccgtggagctgacgcctggagtcaggctgtactcagggctggagtgcagtggcgtgatct

SEQ ID NO: 792431 - DNA, 90 bp, Homo sapiens
gtgacagctgcagttgctccccgcccccgagcagccgagggtaatgatggtggcaaagaaattcctggatgctgggcacaaactcaactt

SEQ ID NO: 792432 - DNA, 100 bp, Homo sapiens
ctgaggttttcctaagccatcccctggcggaaccgcccccagggaaggccaaaaatccccctggagactccagcctacactgggcagccatggcattgcc

SEQ ID NO: 792433 - DNA, 75 bp, Homo sapiens
cgctgaggccggaaggagctagacggcggtcggatatcgggaggcaattcagaagtgggatgaagcactacagtt

SEQ ID NO: 792434 - DNA, 74 bp, Homo sapiens
atccagagctgcatcattccttggggcaaaatgtggacaaggagactctgacctgtttttgttggacacccgtg

SEQ ID NO: 792435 - DNA, 100 bp, Homo sapiens
tgatcacgaaccggagagcaaggttgagatacagatccacgggttttagaaaaacaagaattacagcagccaacctatgttgccctgagttacataaata

SEQ ID NO: 792436 - DNA, 100 bp, Homo sapiens
tggctttcagagagaacagcgtttcagttttggtcatcggaagtggtgccttcagcacaggcaaggggagagccagttgcgcagagccctgcaaccagca

SEQ ID NO: 792437 - DNA, 82 bp, Homo sapiens
tggaagccatgttcccaccagccagggggaaggcctgtgatcctggacccggcggaccctacaggaaacttgggtggtggag

SEQ ID NO: 792438 - DNA, 75 bp, Homo sapiens
aaagaaggacacagctactactacatctttctcctgtgcctcctgttggctctctttgcatctggcctcatccac

SEQ ID NO: 792439 - DNA, 74 bp, Homo sapiens
gaacagccctccatcttgcagcccagaaggcctacgagaagcatgtgagcatgttgcagcctcagaagaagaag

SEQ ID NO: 792440 - DNA, 51 bp, Homo sapiens
cgcagagtgggcggcggtggtgaattcagaaggaacttgcagaaatcacat

SEQ ID NO: 792441 - DNA, 96 bp, Homo sapiens
ggctgtgaaccctggcgaccactgcttctccgtgggcagcattggcgaccagcgcttcacgcactcctgtaggaggcctgctgatggcatttcaga

SEQ ID NO: 792442 - DNA, 75 bp, Homo sapiens
cgcggatggccgtaaccccgaaggaaatctttggaaacatgatgagcaaggagaagcgagaggctgtcagtaaag

SEQ ID NO: 792443 - DNA, 100 bp, Homo sapiens
ctactgtgcgctcgatccagcaccatggggaagcgggacaatcgggtgttggcaaacatgaattgactgggcataaagtagctgtgaagatactcaatcg

SEQ ID NO: 792444 - DNA, 83 bp, Homo sapiens
atcccaggttgccttggaaaatgccaacgccgtgtctgaaggtgagctgtcagggagaaatgtcgaaacaggtcaagagatgt

SEQ ID NO: 792445 - DNA, 75 bp, Homo sapiens
ctgaaagactctctgaaagccttaaattaagtgtttctgaaagatctatccagcactccgatggccagcaacaac

SEQ ID NO: 792446 - DNA, 100 bp, Homo sapiens
ctgcttcctccatcctggtattttttggagcttccatcctggttcttccaaagtgcccggacccaaaacaggaattgatcacagccgagttaaattgaca

SEQ ID NO: 792447 - DNA, 100 bp, Homo sapiens
tgcaaccattggcgtggatccgctggcctgccctcagtctccgaggaggatctcaaggtcctgttttccagcaatgggggcgtcgtcaaaggattcaagt

SEQ ID NO: 792448 - DNA, 80 bp, Homo sapiens
cgccgctgccactcccgggagcatgaaggaccgaacccaggagctccgcacgcaagagtgagccatggagctacgtgtgg

SEQ ID NO: 792449 - DNA, 100 bp, Homo sapiens
cgtctcctcaccttctgatacacaccaaccaaccagtcaaccagccattgctgtttactggatacctggtaaaagcagctgttaagtatgcccttagcgt

SEQ ID NO: 792450 - DNA, 75 bp, Homo sapiens
cgttcaacgacttactggggagagaaagaaaaggaacgggagctgagagacatagatgcccttgtaggaggagaa

SEQ ID NO: 792451 - DNA, 100 bp, Homo sapiens
attccacctctgcgtttttccctccagatctttgatggaaaacagattccacagagaatggttgatggatggaatgctttcttctttgataaaacagaag

SEQ ID NO: 792452 - DNA, 75 bp, Homo sapiens
gtcagactccagcagccaagatggtgaagcagatcgagagcaaggaaattcgaaatgagtcccatgactatcctc

SEQ ID NO: 792453 - DNA, 90 bp, Homo sapiens
ctttatcctgctgcgatccccagggaacaaggtcatccactgcagcggctacttgaagatccgccagtacagcctggacatgtccccctt

SEQ ID NO: 792454 - DNA, 75 bp, Homo sapiens
gtctgtgctgagaataatggcccggttggcccgggacgagtggaatgaaggagcgatatatagttatcagcaaag

SEQ ID NO: 792455 - DNA, 75 bp, Homo sapiens
ggagaagattgactttgacaatgacggtccttcgctacccaccaaacagaacgaggaattccgccccttcattcg

SEQ ID NO: 792456 - DNA, 50 bp, Homo sapiens
ctgaatcacaggagatatttccaggtttttggattcaaagcataaaaacc

SEQ ID NO: 792457 - DNA, 88 bp, Homo sapiens
tgcgacggcgcgctgggctggcgcggcctggagcactgcagcctgtggtgttgaggctcacagcgatgccatccagccctgccacatc

SEQ ID NO: 792458 - DNA, 80 bp, Homo sapiens
ctcaaagccctgggtcgcttggaagaagccaaggccataggaaaaggatacagagtagagtttcatgaacctgaaacttg

SEQ ID NO: 792459 - DNA, 83 bp, Homo sapiens
agggtgtccgacggctggagcggctgaccccgcactacatctacccaccagccatcgtgcagcccagcgtggtgatcccagcc

SEQ ID NO: 792460 - DNA, 99 bp, Homo sapiens
gctaagactgcttccaatgtagaagaggttttgattcccaccatggccatcacccagtttcggttatttaaattttgtacctgcctagcaacagtattc

SEQ ID NO: 792461 - DNA, 100 bp, Homo sapiens
ttcacaatgtatggaaacagagtgagatggaagattttcgaggtatagcagaagaatcatttccaagctttctcaccaattcattatttggtaacagtgg

SEQ ID NO: 792462 - DNA, 95 bp, Homo sapiens
tcgtcgggagtgatcacctaccctacaggctaaaacactgtcttatgaaccattatcttcagcaactgtttccactgggagccttttaagttatg

SEQ ID NO: 792463 - DNA, 75 bp, Homo sapiens
catgagagccggacaaactcagacatcgtggaggtacaatgactcttcttgcttttcacctaagttgaataagca

SEQ ID NO: 792464 - DNA, 75 bp, Homo sapiens
ggccaataagttcgccaaagcgacaggagctctgacaaaaagtttgcccggaagccaccccgattttcctgtctc

SEQ ID NO: 792465 - DNA, 107 bp, Homo sapiens
ccggggcatctccaacatgctggatgtcaacggcctctatgaataatacggcagctagtccaatgtctactgcaacttcaagtagtggaaggagtacagggaagtct

SEQ ID NO: 792466 - DNA, 75 bp, Homo sapiens
aagctctccctgccgtggctgctcaacaaggagctgggctgcatcaactcgactagacgcttgaagcaaagctgc

SEQ ID NO: 792467 - DNA, 82 bp, Homo sapiens
cagggaggatgacggagctgcagtcggcactgctactgcgaagacagctggcaggacctgaaggagaagaaggagaaggtgg

SEQ ID NO: 792468 - DNA, 100 bp, Homo sapiens
atgcctgcaaagcgaggctgaagaaggccaaggctgcagaagccaaagccacggaagtactagccggacatcatgagtggctgtcgggtattcatcggga

SEQ ID NO: 792469 - DNA, 100 bp, Homo sapiens
gggaaattgtattctccgagtcagattggagcatttgtgttgatgaagatgaaagagactgcagcaatggcaccagcatgatatcattgatcattcctcc

SEQ ID NO: 792470 - DNA, 99 bp, Homo sapiens
catggaccaggccctcaagtccctgatggcctcagaggaggagagaggactggaagccagtccttacgataaactccataatttatggcctgcagtatc

SEQ ID NO: 792471 - DNA, 50 bp, Homo sapiens
agctgtgggagaaggcccagcgagtagtgaagcgcgcagtggcgagccag

SEQ ID NO: 792472 - DNA, 85 bp, Homo sapiens
agaaaagccaagaggaccaggagcagaagaggaagaggtcagatggcaaaaatcaagcaaacccttctagacagccggggagtgt

SEQ ID NO: 792473 - DNA, 96 bp, Homo sapiens
gcagtggtcgcttcttctccttgaaatcgtggatgggaatgtgaagatgaccctgggcatgatctggaccatcatcctgcgctttgccatccagga

SEQ ID NO: 792474 - DNA, 124 bp, Homo sapiens
atcaagatttaacattccaacacataaaaattatttatccaacagctcctcccagaaaagtagcagctctgaatccttaagtgacaaaggctctgaattgaagaaaagctttgatgctgtggta

SEQ ID NO: 792475 - DNA, 74 bp, Homo sapiens
acccagacacgacaccatgcatctcctcggcccctggctcctgctcctggccttccccgaggtgcagccaaagc

SEQ ID NO: 792476 - DNA, 100 bp, Homo sapiens
attccaagccagtagattctgacagcgatgatgatcccttggaggcattcatggctgaagtggagtgtctcaatgagatcttggagtcagcagatgcacc

SEQ ID NO: 792477 - DNA, 100 bp, Homo sapiens
cttttacctacgttggcggccccagaaggaatacaggagtttccagaaaatataaaaaattgtaaagttttgacaattgtggaggccagtgtaaacccta

SEQ ID NO: 792478 - DNA, 75 bp, Homo sapiens
gtggaagttcccgccccggagagcggcgaggcggcagccacaggtgattaaggctgcagaagacagtgcgttgca

SEQ ID NO: 792479 - DNA, 75 bp, Homo sapiens
ctggcttctacacggcccaacacctgctaaagatcaatgagctgagcaatgttcctgttcctgtcatgctaatgc

SEQ ID NO: 792480 - DNA, 100 bp, Homo sapiens
ggaagatgctcgcctactgcgtgcaggatgccaccgtggtggacgtggagaagcggaggaacccctccaagcactacagagaggctgctcacccaacaga

SEQ ID NO: 792481 - DNA, 100 bp, Homo sapiens
tgaagacatagtagggggtggagaatacaaacctgacaagggtaaaggcatttgtaaaggatgttcatgaagattcaataacagttgcatttgaaaacaa

SEQ ID NO: 792482 - DNA, 83 bp, Homo sapiens
gaagaagcccacgcagattttaattcccactctagattctggatctctctaggagctgacactcgaaccttcacgacccattc

SEQ ID NO: 792483 - DNA, 101 bp, Homo sapiens
cacatgtcaggggcagtggaggctggctgctgaaggatgaacggagaggaagaattctttgatgccgtcacaggaaactcattatctgcaatattagaggg

SEQ ID NO: 792484 - DNA, 82 bp, Homo sapiens
cggatatttaagtacaatggtgggcttaattttagtttagcagccactgctgcatcaggggcttttgttccaccaccaagtg

SEQ ID NO: 792485 - DNA, 75 bp, Homo sapiens
tccttgttcctatggcctaatgaacaacttccaggtcagaagagatcaattctacagaaatttccagtggttctg

SEQ ID NO: 792486 - DNA, 107 bp, Homo sapiens
gcttcaaggacccgggactagtggaccagctggtgaaggcagacagcgagtggcgacgatgtgccgtgagcgatgtggagatgcaggaacactatgatgagtttttt

SEQ ID NO: 792487 - DNA, 88 bp, Homo sapiens
ctgagtggtttttcggatcatgtctggtggctccgcggattataacagattgttctctggggccggactgagaaatgcctgaaggaga

SEQ ID NO: 792488 - DNA, 90 bp, Homo sapiens
ggactgctctcctactacacgaaatcatgaccaccccaggaaaagagaactttcgcctgaaaagttacaagaacaaatctctgaatcccg

SEQ ID NO: 792489 - DNA, 75 bp, Homo sapiens
ggacgcaaagacaagggagaagctgtgtttcttggacaaggtggaccccaagttcctgaggaacatgcgctttgc

SEQ ID NO: 792490 - DNA, 100 bp, Homo sapiens
aacgcagtggcacagagtagcagagcttgtggacaaatgtataggatcaagaattcacatcgtgatgaagagtgataaggaaattgttggtactcttcta

SEQ ID NO: 792491 - DNA, 83 bp, Homo sapiens
tctcagcaagcaactttgagctgcacgttgcacaagagcatacctggatgtccaggcaagactgggcgaagtttctgagtggc

SEQ ID NO: 792492 - DNA, 98 bp, Homo sapiens
cggtggccagcgcgcagaggcgggcgcggaggcggctagaaggtgaccgcggatcccagcttcctgcagccagatccatttgaaccacagcgacgtct

SEQ ID NO: 792493 - DNA, 75 bp, Homo sapiens
aagaaaccctctctgagttcttgggcacgttcatcttgattgaagctctggaggaatatgtgaaaaaagtaaact

SEQ ID NO: 792494 - DNA, 100 bp, Homo sapiens
ccttgtggggttggcgcggccgctggtcttggcgctcctgcttgtgtccgccgctctatccagtgagtatggtgtttgcgaaaacttgcggaagctggag

SEQ ID NO: 792495 - DNA, 80 bp, Homo sapiens
ccggagtcagtcattttactgtcaagacatttcttcggcattctgcaacagccaggactaaaagaagtggtagaatcctg

SEQ ID NO: 792496 - DNA, 96 bp, Homo sapiens
gcttttatatgccagagaaccctgagtgtgcccctgacatgacaaggagccgtcgtcgttaggtttctagaccaactggggagattcccgttaaaa

SEQ ID NO: 792497 - DNA, 122 bp, Homo sapiens
acctgccatggagagccatctctttataattccctaagcatagctatgcagactctaaagatgttgctggagcactgtcagtagaagaaatcactgaactactcagtctccataaattatgc

SEQ ID NO: 792498 - DNA, 51 bp, Homo sapiens
ccagggtccttagcacagacattttgacggatttggagttccatggagtga

SEQ ID NO: 792499 - DNA, 99 bp, Homo sapiens
ataagatacttaaaagtcatctttgaaatgataatcaagcgagaattagaactgcagcgtcagcgtgacttgcataagatcaagcagcttcagcagaca

SEQ ID NO: 792500 - DNA, 100 bp, Homo sapiens
aacagatgctaaaaatctcttctgaaaacagcaatccagggaaatcctcattgacgattcaatttgttgaaggccaatttgtggactcctacgatccaac

SEQ ID NO: 792501 - DNA, 100 bp, Homo sapiens
aggaaagccccagccacccatcaaatcagagagaaggaatccaccttcttacgctatggcaggtggccccccacctcctacagccagccagcctgcctct

SEQ ID NO: 792502 - DNA, 100 bp, Homo sapiens
ctggcaacggcgaccgcctctgcttcaatgtgggccgggagctgtacttctatatctacaagggggtccgcaagagttgtggaaagtaaaaatgtagccc

SEQ ID NO: 792503 - DNA, 100 bp, Homo sapiens
ctcggatgctgatggggctggacctgctggtgttcgcccacgaccatgaccagcatctcagacatgtcgaaaaagatgttttgatccctaaaataatgag

SEQ ID NO: 792504 - DNA, 98 bp, Homo sapiens
tggcttatgcagcacctgagttaatacaaggcaaatcatatcttggatcagaggctggacgtaaagaaagaagtgatgcactcaattctgcaatagat

SEQ ID NO: 792505 - DNA, 50 bp, Homo sapiens
ggcattaaactcttgaaaaccagatcactactcttggaatcaaagataaa

SEQ ID NO: 792506 - DNA, 50 bp, Homo sapiens
ggagaacaagcccatcgtcacctagccagccccagtgcctgctgagccgt

SEQ ID NO: 792507 - DNA, 100 bp, Homo sapiens
cgttcagcacaccagtggggcagtgcctcgtgattcatcagaaagtggcatgctgtcccgcctgggtgatttgctcttttacactattgctgaaggacag

SEQ ID NO: 792508 - DNA, 96 bp, Homo sapiens
tcaaagacgtaatcaaagacggcaacgcgcttatcagcgctatgagaaggttacattccgaaaagcaaatgggagatggacacatctgaggcaaag

SEQ ID NO: 792509 - DNA, 83 bp, Homo sapiens
ccatatccggaaaagttgtagctttcaagataacgaaggaggcccaacttcattcaataaggagcctgacggatttatcccag

SEQ ID NO: 792510 - DNA, 75 bp, Homo sapiens
gaaactgggctgggtagagatcaacagcagttcaaggcgagtggctgaactgtttatgtttgattttgaaattag

SEQ ID NO: 792511 - DNA, 100 bp, Homo sapiens
aaaggatttaataaagtggtgttaaagcatctgaagaagacaaagaacctttcatcacttcttggacacttaatgattgttggcaagaaatgtgctgctg

SEQ ID NO: 792512 - DNA, 98 bp, Homo sapiens
gctgaggagctggaaactttcccggcagatcgagctgggagcattagtacccttgattctttagactttgcaagatattcagatgatggtaacaggga

SEQ ID NO: 792513 - DNA, 95 bp, Homo sapiens
cctatttgatagaggaaatgtatgatgaagctttgctgcaagataacatcgctgatgctgtagcttgtgcaaagagggttgtccgtgatccacaa

SEQ ID NO: 792514 - DNA, 100 bp, Homo sapiens
gctccagccgaaggagaagggggagccagaggccaagaagagtaagacggccgcaaagaaaaatgacaaagaggcagcaggagagggcccagccctgtat

SEQ ID NO: 792515 - DNA, 100 bp, Homo sapiens
tgggctaatggatactacagacaacagagaaaacttgttgaagagattggctggtcctatacaggttgcaaaagcttctcatttcagagagatgccagga

SEQ ID NO: 792516 - DNA, 85 bp, Homo sapiens
gcgtccgggacgcggagcccggagctggggcgacgaggcgattgcgggggcctgggctagagtaacagttacccctcaatgagcg

SEQ ID NO: 792517 - DNA, 73 bp, Homo sapiens
ggcgagcggttccttgtgggctaggacattctcactattctatgccttaaaggcccttcaacggaagggatat

SEQ ID NO: 792518 - DNA, 80 bp, Homo sapiens
ctctctgaaaagaaggtggcagacccggtttgctgatcgccccagggatcaggaggtcagcccaaggctgccccctcggt

SEQ ID NO: 792519 - DNA, 101 bp, Homo sapiens
gtgggatgattacctctctaatttcgataccactttctctcctacctcctgtgagggacacaagggtattgcaggcaacaaggacctttcatacagggcag

SEQ ID NO: 792520 - DNA, 95 bp, Homo sapiens
ttgaaaacaacgtgtcaaaattgagccttcttttgaatgacatttcaaggaagagctaaggagcaaatccaagatctgtgccaatgtgttttgtg

SEQ ID NO: 792521 - DNA, 75 bp, Homo sapiens
gtcgagggatttattcccaagaactacatccgcgtcaagccccatccccttatgccagcctggaccatcttggag

SEQ ID NO: 792522 - DNA, 75 bp, Homo sapiens
ctgctttcgaaaaatgtcacccttggacaagtgacaaccatgagtggaaaaaactaattatggttcagcactggc

SEQ ID NO: 792523 - DNA, 84 bp, Homo sapiens
cgagcacatcatcaagtacaagggctgctgcgaggaccaaggtgtccaggggcaggagttccttttgcgggtggagccccagaa

SEQ ID NO: 792524 - DNA, 51 bp, Homo sapiens
tggaaccgaagagagctctgttgttgcaggcagagcggcttgggtaaatcc

SEQ ID NO: 792525 - DNA, 82 bp, Homo sapiens
gctctttccccgtcagcatcccagccgtgctcacgatggcatgatcaacattgacatgactggagagaagaggtcgttggat

SEQ ID NO: 792526 - DNA, 82 bp, Homo sapiens
cagaaggcacagattagaggaaggaagagaaaagggtttttgtatgagaggagacatgtgtccttttgatcatggaagtgat

SEQ ID NO: 792527 - DNA, 84 bp, Homo sapiens
gccgcgaggaggcgcgggaggtgttcgagaacgaccccgagacgggactttgaacatgtcggggatcgccctcagcagactcgc

SEQ ID NO: 792528 - DNA, 75 bp, Homo sapiens
ggcctctccagggagtgctctgttcacggctccatcgctgttaagccatttcctgcttttaagtcttggcaggag

SEQ ID NO: 792529 - DNA, 92 bp, Homo sapiens
ccaggccgtcaagtacctcatgttcgccttcaacctgctcttctggcttccccgggcgctgcctggacaggcctgcctgcgtgctgggacat

SEQ ID NO: 792530 - DNA, 83 bp, Homo sapiens
cggcagtttcgtgagcgacctcagcaggctccccatcaacccgggcagccgggatttaaattcacggtggctgagtcttgtga

SEQ ID NO: 792531 - DNA, 100 bp, Homo sapiens
gaggcttcgagtgacccgggtgccgaggagcgggaagagttgctgggacccctcctcctgtagagagtggtgctgccctctcgggatgtacctgcaggtg

SEQ ID NO: 792532 - DNA, 80 bp, Homo sapiens
atctgtcagaaacagaactgaaacaactggaaactgttttggatgatcttgaccccgagatggaccacacatccccgacc

SEQ ID NO: 792533 - DNA, 75 bp, Homo sapiens
tccggatattacctgtggagaccctcctgagacgttctgtgcaatggttcgatctggggctaatgttctaatttg

SEQ ID NO: 792534 - DNA, 88 bp, Homo sapiens
gtggacgccctgagctcccattaggagccgctggctgcggcagcaggggactagcgtgagaggagtgggaatagctttgcgaaaaatg

SEQ ID NO: 792535 - DNA, 76 bp, Homo sapiens
gtggaggcttccgccctgggacaccctcactgcacccttacagcactccagccccaccccagggtcaatttttgcc

SEQ ID NO: 792536 - DNA, 107 bp, Homo sapiens
ctggtcctcgatccgcccacagacctcaaattcaaagattccgaagaggctcaatctgtaaatccttctagtgttgatgaaaatattgactctgaaacagagaaaga

SEQ ID NO: 792537 - DNA, 75 bp, Homo sapiens
agaaccatcacctgcattggttccatccttgactgttactacagaaaaaggtcaaagaattgactgtagatccaa

SEQ ID NO: 792538 - DNA, 75 bp, Homo sapiens
accgcagatgttgtcaaggtggcctaccaggaggccaggggtgtcgccatggcaggaagaccaactgcatccatt

SEQ ID NO: 792539 - DNA, 100 bp, Homo sapiens
gggaattggaggagcttctggaaacttctcacctggggcgggtgggttctgcaccaccctcccaccctccttcctccgtgtggacgatagagccacatcc

SEQ ID NO: 792540 - DNA, 50 bp, Homo sapiens
gttttcagcagcaatttgccctcagaggattgatttccagagacttatgt

SEQ ID NO: 792541 - DNA, 96 bp, Homo sapiens
ccaaggagacggagaagctgcctttggtgcctcctgcctcctccctgctttgttccaataattttgtgctcgattttgtacttcagctgctgatat

SEQ ID NO: 792542 - DNA, 100 bp, Homo sapiens
atgtgtccaagcaagctgctgacatgattcttctggatgacaactttgcctcaattgtgactggagtagaggaagcgtgtgaaggcaaagaagaatgctg

SEQ ID NO: 792543 - DNA, 101 bp, Homo sapiens
gcaaaagcttccaggaacaagccatggagggtcaaagaaactcctggttgagctcaaagttattttacattgttggagtgcaacggtgcgatctcggctca

SEQ ID NO: 792544 - DNA, 75 bp, Homo sapiens
ggtcgtcggctggcggagcggcttgtgtatgcaacagcgttattgcaacaggctaacgaaaacagacaaaattca

SEQ ID NO: 792545 - DNA, 74 bp, Homo sapiens
cgagcttccctcgtggccgacggaacaatgaaggatgatcacggacgtgcagctcgccatcttcgccaacatgc

SEQ ID NO: 792546 - DNA, 82 bp, Homo sapiens
tggaggcggcgggatggaggcggcggccggatgatcggctgaatgtaacagaggaactaacgtccaacgacaagacgaggat

SEQ ID NO: 792547 - DNA, 75 bp, Homo sapiens
tgaccagtggccacctctgcagtgtcttccacaacctggttcaaggagcagggacaagttacaggaatgttctcc

SEQ ID NO: 792548 - DNA, 82 bp, Homo sapiens
tccaatgggcctttccagcccgtggtccttctccatattcgaggacgccaggaaagcatgtgcagatgcaactctctctcag

SEQ ID NO: 792549 - DNA, 100 bp, Homo sapiens
agcctggtgagactttcttcatgtgttcctgtagctctgatgagtgcaatgacaacatcatcttctcagaagggaagaaacccttttttcttggagccag

SEQ ID NO: 792550 - DNA, 97 bp, Homo sapiens
cgtctctctcggcagtcaccggagtgcccgagggggaagcacgatttacggaagagatgtgataatggatcatcatgtttctaccatcaagcctcga

SEQ ID NO: 792551 - DNA, 100 bp, Homo sapiens
cggatcaccggcgtgccccaccatgtcagacgcagccgtagacaccagctccgaaatcaccaccaaggcgccatgtcagaaccggctggggatgtccgtc

SEQ ID NO: 792552 - DNA, 87 bp, Homo sapiens
gaacgacggctccctcaagaatgtgcatgctgctgtggcccgagggaggcagatgatgctgacctgacctttgaccagacggcgtgg

SEQ ID NO: 792553 - DNA, 95 bp, Homo sapiens
attcacaaggcagctcgctctgggagcctagaatgcatcagtgcccttgtggcgaatggggctcacgtcgagactccatccccgtgtctacctcc

SEQ ID NO: 792554 - DNA, 98 bp, Homo sapiens
agatgagcagccctttgatctctgctttgggggccgaaggcagttctgcaagaggagctattctgatcttggagaatggccaccagtccttactgagc

SEQ ID NO: 792555 - DNA, 98 bp, Homo sapiens
ccacctcagagtaaacctgaagtttctgaccaggacgagaagcaccgtggctgagtctgtgagccagcaggaaacttttgagaagaactttgaaagag

SEQ ID NO: 792556 - DNA, 89 bp, Homo sapiens
atccagcgaggggtggttgtcattcctaaaagctttaatcttgaaaggatcaaagaaaattttcagagatggggtcttgctatgttgcc

SEQ ID NO: 792557 - DNA, 96 bp, Homo sapiens
tgtgacgtccccgaggacgtgcgggttggctgcctgaccacagacttcgccatgcaggctgctctttggcgtaaattgcaatcgattagggatcgt

SEQ ID NO: 792558 - DNA, 82 bp, Homo sapiens
ggtcaagttgctgaccttgaaggagcatcgagtacagctgtccggcctccaacgagtgtgagatcaccaagcggagacgcaa

SEQ ID NO: 792559 - DNA, 90 bp, Homo sapiens
ccggaagatcaactgcagactgtcctattgcatctcaagccgatatcaatgagtgtattcttgaaaactatcccgagtgctccaacccca

SEQ ID NO: 792560 - DNA, 100 bp, Homo sapiens
cgcagccaggccgggggcgcctgcgactgcggggacagcaacgtgatgcgggagagcggattttgtggaagtataatactttgtcattatgagatgtcgt

SEQ ID NO: 792561 - DNA, 98 bp, Homo sapiens
gagggaaatgggaatgtacacgataattaaagagtaaagttgtgctcaacgttggctggggaacagaccagggaattggtggatttggagaagagccg

SEQ ID NO: 792562 - DNA, 75 bp, Homo sapiens
agggtccctgaagagggaagacacgcggaaacagcaggtccttctggcactcctctggtggaccgcccccatcgg

SEQ ID NO: 792563 - DNA, 80 bp, Homo sapiens
ctggacccagctgagcgggcggtcattcgcatcgcaggcacttccgttccggcgcccctccggtcatcaacccgctgggc

SEQ ID NO: 792564 - DNA, 99 bp, Homo sapiens
tgaacttatccagtcactttgggtatacccgaaatcttgtggatcaaggaaatggaaaatttaatctgatgattctctgttggggtgaaggacatggca

SEQ ID NO: 792565 - DNA, 100 bp, Homo sapiens
cgaccgcaacttacgggaggacggggaaaaagcggccaaagaagtgaagctgctgctactcggaaaacgggccttactatacatcatatcccccatcacc

SEQ ID NO: 792566 - DNA, 90 bp, Homo sapiens
ccagagaatgaccacaacctcttcagtagaagctacgagagtacaaggtagtgggtcgctgcctgcccacccccaaatgccacacgccgc

SEQ ID NO: 792567 - DNA, 88 bp, Homo sapiens
aaggggaggggagtggaaaggctctcagtgaaaaaggaaaactacatctcagacccaactatcttatggagggcttatccccataacc

SEQ ID NO: 792568 - DNA, 87 bp, Homo sapiens
gccccttttgacagccgcttccccaaccagaaccagactagaaactgctggcagaactacctggttattgccttgtctgtcaagatc

SEQ ID NO: 792569 - DNA, 75 bp, Homo sapiens
cttttagaaatgtatgcagacttttttgcacatccggacctgtttgtgagtggactgcccctgatggtgattatt

SEQ ID NO: 792570 - DNA, 100 bp, Homo sapiens
ccagactgtgaacctgctggccgagtggctcattcagacaggtcagaatggcggcagtggagcatcgtcattcttcaggattgccctactggccctacct

SEQ ID NO: 792571 - DNA, 74 bp, Homo sapiens
tggacatcttcgagatcaatgaggcctttgcaagccagggcctgtgtttggaagcaaagataacttccacggct

SEQ ID NO: 792572 - DNA, 90 bp, Homo sapiens
aagaaagacagctttgtggaagagacttcagtattgatgctcctccatcctttaagccagctaagaagtattctgatgtttcaggtctgc

SEQ ID NO: 792573 - DNA, 75 bp, Homo sapiens
aggacactgaaataacctgctctgagcgagtgagaacctagtgtggcatgcagcattttggaaggaaaattgaag

SEQ ID NO: 792574 - DNA, 100 bp, Homo sapiens
gtattgctatgacaacattcatttcatgaaagccttccagaaaatagtggtgcttttttataaagagaccttgtacacagacagacggctagtgcagtgg

SEQ ID NO: 792575 - DNA, 100 bp, Homo sapiens
tggaggtgtcactggaatgcctggggcagctgttgccatcagcaactgtgacggattggtgatgagaagctacaaggcgaccatccagcagaccttggac

SEQ ID NO: 792576 - DNA, 90 bp, Homo sapiens
tgctgacgaagatggcgactgaggcacagagtgaaggggaggtgccagcccgcgaatccggccggagatttccttgatagctgccgtgcc

SEQ ID NO: 792577 - DNA, 102 bp, Homo sapiens
tccgtggccttagctgtgctcgcgctactctctctttctggcctggaggctatccagcgatctgatgacgcaaaatggaataagctacgtcctcaacgccag

SEQ ID NO: 792578 - DNA, 100 bp, Homo sapiens
ttcataaactgtaccaggagaaggtagatgatgagctggagatcaaggcctactatgcaggccacgtgctgggggcagccatgttccagattaaagtggg

SEQ ID NO: 792579 - DNA, 96 bp, Homo sapiens
tgtatgaccacaaacagccatcaagatctggagaagggactcctgaaagccctgaaggttttagacaattacttaacatcccccctcccagaagaa

SEQ ID NO: 792580 - DNA, 50 bp, Homo sapiens
ggcgagcgcgagcggcgcgagaaagagcgtgaggatcatccccggagagg

SEQ ID NO: 792581 - DNA, 83 bp, Homo sapiens
cggaaaccggtagcgcttgcagcatggccaccagcccctcgggttccaagatgcagctactggagacagagttctcacacacc

SEQ ID NO: 792582 - DNA, 75 bp, Homo sapiens
caacatggaggccgtgaagaccttcaatagcgaggcagagaaagctgatggatttgtcaacctgcctgatttcac

SEQ ID NO: 792583 - DNA, 100 bp, Homo sapiens
gtctgcgagccaggattcccggtatgtgaggagcagcgctgtgaggaggaagtcttccccctggccatgaactacctggatcgctacctgtcttgcgtcc

SEQ ID NO: 792584 - DNA, 90 bp, Homo sapiens
ggcgtctggagcaggaggtcgacggcgtgatgcggatttttggaggcgtccagcagctccgtgagggtgactatgaccagagcaggacca

SEQ ID NO: 792585 - DNA, 80 bp, Homo sapiens
aggaaaattacccggtatcgttagagggtgcagcccggaatcccgaggatgtggaccgggagcggcgagaacacgaacgc

SEQ ID NO: 792586 - DNA, 74 bp, Homo sapiens
aaggacggcgttctggatctcaaagcgttgcctttccccatcttcctggttctgctccttcgtggcctagtctt

SEQ ID NO: 792587 - DNA, 114 bp, Homo sapiens
ctcggatcgaatccctcacgcgggcgcggatcgaccggagcagagagctggcgagcaagacaatgcagatcttcgtgaagactctgactggtaagaccatcaccctcgaggttg

SEQ ID NO: 792588 - DNA, 51 bp, Homo sapiens
ggactacacatgtgccatcacactcaggtgactctcctattccatctgttt

SEQ ID NO: 792589 - DNA, 75 bp, Homo sapiens
aaggaatgcaagggccacctgttcctcagttccaaccacaggtgtggacactgccagcggctgcagccgacttgg

SEQ ID NO: 792590 - DNA, 83 bp, Homo sapiens
gggcaaaagagctttaaattctggtgaattatgtaacctcattacgctggatgtagctcacaatcaacttgaacaccttccaa

SEQ ID NO: 792591 - DNA, 96 bp, Homo sapiens
tgcccagaaagctttgcaggaaaagcttttagcgtctcagaaattgagagagtcagagacttctgtgacaacaggaatcagagaagatcattgctg

SEQ ID NO: 792592 - DNA, 100 bp, Homo sapiens
gaggtagaagaagatgaacccacagatttggtggtgaaggcatttgtggtcctggcctcgcagttcctgtcccatgacccagaacagctcaccaaggagc

SEQ ID NO: 792593 - DNA, 49 bp, Homo sapiens
gacagccacctggagcgcagctgccagggagaagaaaatggctttccag

SEQ ID NO: 792594 - DNA, 50 bp, Homo sapiens
ccggagcgtcccagctgcgaggaggatgtgtgaccggaatggtggtcggc

SEQ ID NO: 792595 - DNA, 100 bp, Homo sapiens
gtagcaggtggctccgcttgaagcgagggaggaagtttcctccgatcagtagaggtctgtgtgccattgcccaggcagagtctctgcgttacaaactcct

SEQ ID NO: 792596 - DNA, 116 bp, Homo sapiens
gtgccagctgctgcacaacctctcccccggctccatcgacctcaaggacatcaacttccggccgcagatgtcccaggagggtgtgaagacagagaatgaccacatcaacctgaagg

SEQ ID NO: 792597 - DNA, 75 bp, Homo sapiens
agaaagaccatcaagtttaccagatcttcaagatgaagttcaaagggagaatactaatctgcaaaaactacaggc

SEQ ID NO: 792598 - DNA, 100 bp, Homo sapiens
gagcgcgtgaacacggagatacactttgtcaccaaatgtgcctttcagatcaagctgtctgtgcccaaggctggcgagggtctgggaacctcatcgggtg

SEQ ID NO: 792599 - DNA, 73 bp, Homo sapiens
acagcatcaactacctgcactttggagaaccaaagtcctggaggcaagtgaggcctatctggttggccttttt

SEQ ID NO: 792600 - DNA, 100 bp, Homo sapiens
cagagcagaccacctgccaggaagtggtcatcgcactagcccaagcaataggctggagtgcagtggcgagatctcgactcactgcaggctccgactcccc

SEQ ID NO: 792601 - DNA, 100 bp, Homo sapiens
tggtatacgaactcctggatgaagtgctgctgtcggaaaaggtaacagaagatggaactcgaaatcccaatgaaaaacctacccagcaaagaagcatagc

SEQ ID NO: 792602 - DNA, 83 bp, Homo sapiens
cggtgctggcggccggcgaggaggatgcagacggtgaccgccgcggtggaggagcttttggtggccgctcagcgccaggatcg

SEQ ID NO: 792603 - DNA, 90 bp, Homo sapiens
caacccccagccagggtcaccatcaaaatggaatgtaaccctagccaggtgaatggctcaaggtatacaaaactaggatatgctggaaat

SEQ ID NO: 792604 - DNA, 100 bp, Homo sapiens
atgctgcccgagaaattgaggccgttgtacaaccatccagcaggaataatgtatttgtggccttggacatgaggcagtcagtcctctgttgctgttaaca

SEQ ID NO: 792605 - DNA, 74 bp, Homo sapiens
gacacaattaaacactgcagtgggagtacacctttaggatgctataaaaaactaatagaatatcataagaatgg

SEQ ID NO: 792606 - DNA, 75 bp, Homo sapiens
tattctttacctgcttcccaatcccactgatgaggatcagcccatgggctatcattaagaaggcttccgatctag

SEQ ID NO: 792607 - DNA, 76 bp, Homo sapiens
gattccaagtaactcttatttggaaacgtactcccaaactaagcccaagatgcaaagtttggttcaatgggggtta

SEQ ID NO: 792608 - DNA, 78 bp, Homo sapiens
ggcactcaacatgaacaactacaaaggctatgaaaagaagccctattgtaatgcagataattgacgaccttgccaacc

SEQ ID NO: 792609 - DNA, 75 bp, Homo sapiens
cacatgtgcaatgcaaagctcctgagaaacatgccagatatggaatgtgcagatgtcccactattaactccaagc

SEQ ID NO: 792610 - DNA, 75 bp, Homo sapiens
cttgcctacccgccggcccgcgggtctacttcctcaaagggatcatagacggtatttctatgtaaacgaacagtc

SEQ ID NO: 792611 - DNA, 135 bp, Homo sapiens
acgtcctgaacatgagcctcctcctctccttctacctgctggggttgcttgtcagtagcgggcaaggcaaagccaaagctaattgagccactcgactatgaaaatgtcatcgtccagaagaagactcagatcctg

SEQ ID NO: 792612 - DNA, 100 bp, Homo sapiens
agcgacccgctgctcagcgtcctcatgtggggggtaaaccactcgcctttcagtgggatctacctgaataacaaggaagcaggaatgtatcattgcgtgt

SEQ ID NO: 792613 - DNA, 82 bp, Homo sapiens
agttatcataaccttgaatggcgactagatgtacagctggccctgaaggaccctgttcatacagtgtcactgcagcagttca

SEQ ID NO: 792614 - DNA, 98 bp, Homo sapiens
ttaaaaggaccatacgagtcctagatgtcaataaccagtccttcagagaacaagagaaaatgtgccagaggaacttcaagaaccattttacacagatc

SEQ ID NO: 792615 - DNA, 75 bp, Homo sapiens
actcaaactgccaactgaacttcatcgctcctgacaagcatgagaactctttcatcaatctaccaacagccctta

SEQ ID NO: 792616 - DNA, 100 bp, Homo sapiens
caagtatccgccagtcaataggaagtacgagtagtggtggacatgacaacagagtcaactgcatacagtggcatcaagacagtggctgtttatatagttg

SEQ ID NO: 792617 - DNA, 101 bp, Homo sapiens
actgctgctcccgccctttcgctcctcggccgcgcaatgggcacccgcgacgacgagtacgactacctctttaaagattttgatccaaacaatatcttcaa

SEQ ID NO: 792618 - DNA, 103 bp, Homo sapiens
tccttcaaactcggattttccgtttctctcttctcctaagagctgcctgctgccttctggttatgaagacagtatggagtttccagaccatagtagacatttg

SEQ ID NO: 792619 - DNA, 100 bp, Homo sapiens
accctccggaaccgcccaagaaagggctgctccagagactcttcaagcggcagctgttgtcaacttcagataccactggagaagaaaatgctgacccacc

SEQ ID NO: 792620 - DNA, 78 bp, Homo sapiens
gctacaatgctatgggattctcccagggaggccaatttctgtggtccattatggctgacatgcaaaatctggtagaaa

SEQ ID NO: 792621 - DNA, 75 bp, Homo sapiens
agcctcaggcgtgcgcggacggtgtgcggtacacgagcaagaagccattaactctgacccagagttgtctaattg

SEQ ID NO: 792622 - DNA, 75 bp, Homo sapiens
aaaactctctctgcaagtccttaactttgttcactcattccagctccatggctacatggaaaacaagcctctggg

SEQ ID NO: 792623 - DNA, 83 bp, Homo sapiens
ctgcctcagcctcctaagtagctgggactacagtttagcagccactgctgcatcaggggcttttgttccaccaccaagtgcac

SEQ ID NO: 792624 - DNA, 90 bp, Homo sapiens
agaagcagttcaaccgcatgaagcagctggctaaccagaccgtgggcaggcgttcgtggcattcagggatgtggctgtgtacttcaccca

SEQ ID NO: 792625 - DNA, 75 bp, Homo sapiens
ttcgctgcccagaagaagggaaggcgcgagtgaggaaaggaggtactgtaggtaaaagagaacctgctttcatgc

SEQ ID NO: 792626 - DNA, 114 bp, Homo sapiens
cgcccactgccacttgactggatgtatcttgtctacaccatcatgtttctggcttcttggacacttaatgattgttggcaagaaatgtgctgctgatctgggcctgaataaggg

SEQ ID NO: 792627 - DNA, 100 bp, Homo sapiens
attgccaccgcaaagcctacagcaccaccagtattgccagcgtcgctgattgctttggattgcccatctgagctctgccgattatatacgcaatttcaag

SEQ ID NO: 792628 - DNA, 96 bp, Homo sapiens
agacattagaggtcatccaaagcagccgtcccctctgcagcctctctgacaagtgcactctcgagtggaccctgaggagctcttcaccaagctcga

SEQ ID NO: 792629 - DNA, 100 bp, Homo sapiens
tgccgctatggatgatcgagaggatctggtgtaccaggcgaagctggccgagcaggctgagcgatacgacgcgccgtgccgtccctgcagtgacaccgag

SEQ ID NO: 792630 - DNA, 80 bp, Homo sapiens
agcagctggactatggcatctatgttatcaaccagccccggaaagccagcgccacatgcagttcggccacagcagcagcc

SEQ ID NO: 792631 - DNA, 101 bp, Homo sapiens
cactgccctggggcagctgaactgagcgtatgtgccacgccgcccaggagacccctctgctgcaccacttcatggagcagattctggccagatttctgaag

SEQ ID NO: 792632 - DNA, 100 bp, Homo sapiens
tacagcaatatagaggaattcgcagagggatccaagatcaacgcgagcaagaatcagcaggatgacggaatgaacggagaccagaattcagatgtttatg

SEQ ID NO: 792633 - DNA, 100 bp, Homo sapiens
gcgtgaggcagtacagctgatggcggaggccgagaagcgagtcaaggcctcccactccttcctccgagggctgtttggttgtggtcagaaatgagaagac

SEQ ID NO: 792634 - DNA, 50 bp, Homo sapiens
ggcaaccgccccgtctgagaaacagctacagacagttcttctaattcctc

SEQ ID NO: 792635 - DNA, 83 bp, Homo sapiens
cttggactgagtcctgcaggacacagagagacacatctcaattcaaaggcagcttgctgatctagagaatttagcttttgtaa

SEQ ID NO: 792636 - DNA, 100 bp, Homo sapiens
ttctactccatcgtgggactcagcagccttggtgctcaggtgccagatgcaaaggacctgggctatcccttggagcttggctatcagaacttcctctacc

SEQ ID NO: 792637 - DNA, 75 bp, Homo sapiens
gtggcactttccatagctgtaggactgctggagggctcagtaaagagacaagcactatatgcctgtagtacctgc

SEQ ID NO: 792638 - DNA, 90 bp, Homo sapiens
ctgctcagcgatccccgctccggggagcctctggaccgcgcactggtgctctggttcccagatcatggccaccaccatcgacaactcccg

SEQ ID NO: 792639 - DNA, 90 bp, Homo sapiens
agctgctgctggagcaccagcgtccgagctgcatccaggggctgcgctgggagaatgtggattatattattcaggagctccgaagaccca

SEQ ID NO: 792640 - DNA, 51 bp, Homo sapiens
cggtcgaagaaggggacgccgacaagtcctcatcaccgggggcatcgtggc

SEQ ID NO: 792641 - DNA, 75 bp, Homo sapiens
ctcctgagtagctgggactgcaggagtacttcttgcaagcagagctgacaagcaacgtcttaaaaacaggcgtgg

SEQ ID NO: 792642 - DNA, 87 bp, Homo sapiens
ctgcgctggccaaggccatctccaagaacgtgctcttcgctcacctggatgacaacgagaggaggccctgccctgggagaagccctg

SEQ ID NO: 792643 - DNA, 75 bp, Homo sapiens
cctcctggagaatttaatgaggttttcaatgtgccctatagaatggttccattatggctgcgttggattgacaga

SEQ ID NO: 792644 - DNA, 99 bp, Homo sapiens
aagagtgtgcagcggattaaagctaaagacatagttcctggtgatattgtagaaattgctggattggcctaatgaagaagttcaacctggagagatgga

SEQ ID NO: 792645 - DNA, 100 bp, Homo sapiens
acctggaggatacctgctacctgtgatctttagacagtgactgagtatggatcatttgaacgaggcaactcaggggaaagaacattcagaaatgtctaac

SEQ ID NO: 792646 - DNA, 82 bp, Homo sapiens
ggagtcgcctctgatctgcaaagaaggagaaagcgtgcagtcaactgcttggaccagcatgttcggaagtcccccgagagcg

SEQ ID NO: 792647 - DNA, 100 bp, Homo sapiens
gaagaggaagatgctgatgatgggatattatcaactcactggtaacaacagtattcatgctcatcgtatctgtgttggcactgataccagaaaccacaac

SEQ ID NO: 792648 - DNA, 51 bp, Homo sapiens
cttttctactttattaatagttccgtttcagagactcctccactctctggg

SEQ ID NO: 792649 - DNA, 74 bp, Homo sapiens
gaaggaacttgcagaaatcacattggaccctcctcccaactgtaggacttacggtaactattatgagggaggca

SEQ ID NO: 792650 - DNA, 75 bp, Homo sapiens
agcgctttgatttacagcagctgcaggtcttattagtaggtaagaaacagctgctcctccacctccaccccagcc

SEQ ID NO: 792651 - DNA, 98 bp, Homo sapiens
taaatagtaaaaagacgttgcgagaagttggaagtgtgaaagcattgatggaatgtgctttagaagttaaaaagggacactccggacgcaggcccggc

SEQ ID NO: 792652 - DNA, 98 bp, Homo sapiens
caggcccaccctttcctggatgaggatggctgtggcttcctcattgctatggacagtgctatcaccctgtggcagttccttcttcagctcctgcagaa

SEQ ID NO: 792653 - DNA, 100 bp, Homo sapiens
ctacaggaagcgaccccgcgatggcaagggagactgcattgcttattgatccaaaaaattcctgttcttcatcccgccagtgggttgctctggttgtggg

SEQ ID NO: 792654 - DNA, 76 bp, Homo sapiens
gccttacaatacctctgtccataatagctgacatgtgtatgcaaaagactcatggagagatttctcatggatggct

SEQ ID NO: 792655 - DNA, 100 bp, Homo sapiens
ccggccaggaaccacccgttaagggatatctgtgtttgccttacatggcattgcagcagcatcatcttctctccgatgtcaccgttcgggggtttgttgc

SEQ ID NO: 792656 - DNA, 95 bp, Homo sapiens
gcccggaggctcggagccccctgccgtgttcacaggtcaaaatgcagatcttcgtgaaaacccttaccggcaagaccatcacccttgaggtggag

SEQ ID NO: 792657 - DNA, 100 bp, Homo sapiens
ctaaggcaaaggagtggaagtttgagagaagtttaagagaagaaatggacatgattgcctaaatcagccaaacacaggatagttttgaggcagctgtgcc

SEQ ID NO: 792658 - DNA, 91 bp, Homo sapiens
ccatctaccgcaactctcagttcgagagtaaaggtgagaagccctaccactgcaactgggacggctgcggctggaagtttgcgcgctcaga

SEQ ID NO: 792659 - DNA, 99 bp, Homo sapiens
ggttcgaagctgagtatgtgacaggacttccagctggatgctgccatgacctactgcagagctgcccgccagttggtggagaaagagaagtacagtgag

SEQ ID NO: 792660 - DNA, 94 bp, Homo sapiens
agaagctggaggacattttccagcaggagttttccaccccttccaggaaggcccttttgtctacttgtctttagtaggaaacgttgcaaattcc

SEQ ID NO: 792661 - DNA, 90 bp, Homo sapiens
tgaaaaccatcagaacatgattaagcagtttaaagcaccgacgagagtgctggggaataaaaaggggatcttcactcggcagagacaacc

SEQ ID NO: 792662 - DNA, 98 bp, Homo sapiens
tacctcactgcagaggtgctggagctggcagggcggcgactggcggcgcgatggacctgaccgggctcctgctggacgaagaaggcaccttctccctc

SEQ ID NO: 792663 - DNA, 50 bp, Homo sapiens
gcgtctctctcaggacaggacgtggggttgactatagtcaatggggccaa

SEQ ID NO: 792664 - DNA, 75 bp, Homo sapiens
tggttgctcaatgtctatgacacgtgacatgatgacattgctaatgaagaaagacaccttgacagaagaggaaac

SEQ ID NO: 792665 - DNA, 73 bp, Homo sapiens
tattgactatacaattctagatgatattggacatggagtaaagatgatatcatcaagttgaatcgaaaggaag

SEQ ID NO: 792666 - DNA, 122 bp, Homo sapiens
ctggaattttggcatcaaggacaaacccaccttcatcaaaggggttggccgactgcgatgtgagtgacagcagctgcagcagcctcgccgcaaccctgttggccaaccacagcctgcgtgag

SEQ ID NO: 792667 - DNA, 100 bp, Homo sapiens
gctgctggagaatatgcagagcgacttgcgcgccttgtcactggagtgcaagaagaaattcccacctgtcaaagagtcatgatttcattggagaatttac

SEQ ID NO: 792668 - DNA, 82 bp, Homo sapiens
ggaccaaggtggaaatcaaacatgagagtccggagtgttgtcatgtgaagcctgccatccaggaacctccaatagttattag

SEQ ID NO: 792669 - DNA, 90 bp, Homo sapiens
ttcaaggacaaaggtggcccagaattttccagtgccctgaaaaataggaccccagagctaagcacagctgagcggaaggagttggagaac

SEQ ID NO: 792670 - DNA, 100 bp, Homo sapiens
tatttcttgtggatattatggctaataacacaacaagtttagggagtccatggccagaaaacttttgggtccttaatggatcagtactttgcccgaatgt

SEQ ID NO: 792671 - DNA, 83 bp, Homo sapiens
ccggagtcctcccacgagccacgcctgatgaagccgccgatctggaaaggcaaatagacaatgcagatcttcgtgaagactct

SEQ ID NO: 792672 - DNA, 75 bp, Homo sapiens
ccgagctccagagaatcaagaagacccaggaccagatcagtaactgtctttggtgcaacactaacaaggcttgtc

SEQ ID NO: 792673 - DNA, 78 bp, Homo sapiens
ccgggaggctcccgggcttgcgtggctcaccatggatgatgatatcgccgcgctcgtcgtcgacaacggctccggcat

SEQ ID NO: 792674 - DNA, 100 bp, Homo sapiens
ttcctaaatgacagttacctaaaatatgttggctggactcttcatgacagggtgaatccagtctggaaaaagtgtttggaagaacaaggcttgaagtttg

SEQ ID NO: 792675 - DNA, 75 bp, Homo sapiens
ctgccacaaaggatgcctccacacctaccactacccgtgtgccagcgatgcagcgtttgcctcagcatggagggc

SEQ ID NO: 792676 - DNA, 75 bp, Homo sapiens
agaagactttgaaatattaaaggtgattggtcgaggagcttttggggagctgcagaaccttggcctgaaaatgct

SEQ ID NO: 792677 - DNA, 78 bp, Homo sapiens
aggaataatatttatggagcatatattatggaacacaacggttacctggcacgctggccacattctgcctcactctta

SEQ ID NO: 792678 - DNA, 86 bp, Homo sapiens
tcgagcgcccctccgagctggggttggacgctgccagtttgcacagcagcagcgtgagtgcatctccatccacgttggccaggctg

SEQ ID NO: 792679 - DNA, 75 bp, Homo sapiens
tttggaaaagaaatgtatcaggtaacaaattagagtgtgatgaatgcagactctgctaccattttggctgtttgg

SEQ ID NO: 792680 - DNA, 90 bp, Homo sapiens
cggcgggaagcggcgatcctgccaccgggaggtgtggaagagccggatttgaacatggaattcaatccttcagatcatcctcgggccagc

SEQ ID NO: 792681 - DNA, 80 bp, Homo sapiens
caagtttgcagatcgggagcgcaaggtcgccctcaaggccatgatcaaaactaaaatgtttatcggtggactgagctggc

SEQ ID NO: 792682 - DNA, 55 bp, Homo sapiens
ctttgtggacatctgatcatggacatggcctggcgctggtgccgaggaagctctg

SEQ ID NO: 792683 - DNA, 90 bp, Homo sapiens
cttccctcctcttcctttctccgccatcgtggtgtgttcttgactccgctgctcgccatggtgctgaacatgtacgggaaggtggtgact

SEQ ID NO: 792684 - DNA, 88 bp, Homo sapiens
ccgcagcgcatcccggcgtgtcggacagtggcttacagaagagacgaaatgtggtctgagggacgatatgaatatgaaagaattccga

SEQ ID NO: 792685 - DNA, 99 bp, Homo sapiens
cagaccccaacttccagctcgccctaaacttcgcctggtccaacttcagtggctccagcagttccatcatgtgaagtaccctcttctgctctgagtgga

SEQ ID NO: 792686 - DNA, 75 bp, Homo sapiens
ggagggccggcggagcgccatggcctgcatcctgaagtgccggtggtggtgtgcacattgagccccggtatagac

SEQ ID NO: 792687 - DNA, 100 bp, Homo sapiens
gattcctcctccttggtcgccgcgtccttggctggcgtgccttccggagcagtactacagcctcacctggttcctgagccccatccttggcctcatcttc

SEQ ID NO: 792688 - DNA, 73 bp, Homo sapiens
gaagaagcactccagagacgactaaatggtatactctgaaactaatgattgataaagcaagtttaggtccaat

SEQ ID NO: 792689 - DNA, 100 bp, Homo sapiens
gggactctgaacttccctggtcgaacagttttttctaatggctattcaagtctgagggaaaaggccataccaatgctggagatgcaatatatgaggtggt

SEQ ID NO: 792690 - DNA, 103 bp, Homo sapiens
caagttttgtgcagattgccagtctaaagcggggccttttccgaagtggttttagctgaagagaaggcaactggcaagctctttgctgtgaagtgtatcccta

SEQ ID NO: 792691 - DNA, 100 bp, Homo sapiens
attgccgcagttctagcttcaccttcacgatgtttcccttggtcaaaagcgcactaaatcgtctccaaggaagcagtcaattatagatttcttcaaacca

SEQ ID NO: 792692 - DNA, 75 bp, Homo sapiens
tctcagcctccaaaagtgctggcattacaggcctcgaaggagctccagcaagcccagacaaccagaccagaatcg

SEQ ID NO: 792693 - DNA, 75 bp, Homo sapiens
caggcgctcaccatgttccctggagaaagttcaggagccctggaaaggagaaggaataagacggcaggaggaaga

SEQ ID NO: 792694 - DNA, 100 bp, Homo sapiens
cactgctgcagtccaggctgaagacagagggctctgatctgtgcgacagagtaagaatgattgatgttggctgatattggagtgctcattcacatgaagt

SEQ ID NO: 792695 - DNA, 98 bp, Homo sapiens
gccactccagtcggtgttgagcacggcgagcagtctcaggcctttagtgatgatggagctggtggtggctctgagtcatcttgtggttcagtatgaaa

SEQ ID NO: 792696 - DNA, 100 bp, Homo sapiens
cccaggagcctcaaggcggcccggcgggcgactggacggccggacaggtctgaatttcctgctgctgttcacaaagatgctttttatctttaactttttg

SEQ ID NO: 792697 - DNA, 100 bp, Homo sapiens
gtttggatatcttagcaggcatttatctttctttgagtctaaagaatcccttgaagaaagtattggcaagcacttgctctgaaatttggggactgagtac

SEQ ID NO: 792698 - DNA, 87 bp, Homo sapiens
gtgctctgttcacggctccatcgctgttaggagttgaccacatttggccatttcccagaagggccccaccccaagggtgagtggcca

SEQ ID NO: 792699 - DNA, 75 bp, Homo sapiens
gtcttctgaggaagaggtgctctcctgggcccccactgtccccaggcctcagcatactaaataagcttactcctg

SEQ ID NO: 792700 - DNA, 82 bp, Homo sapiens
atgcgactcaaagctgcacggcagtctgtttatgagggggatatgagactttctactcggaatatcctgagtgttgcgtgga

SEQ ID NO: 792701 - DNA, 100 bp, Homo sapiens
cccagccagggtcaccatcaaaatggaatgtaaccctagccaggtgaatggctcaaggctgagtcatcactagagagtgggaagggcagcagcagcagag

SEQ ID NO: 792702 - DNA, 50 bp, Homo sapiens
ggagcgtcaacagcagcaccatggggggaaatttgcagtggtgagaaaat

SEQ ID NO: 792703 - DNA, 75 bp, Homo sapiens
cctgctccctccgagcgctccgccgttgcccgcctggcccctacgggtgggcctttgcagaacgggcagccctca

SEQ ID NO: 792704 - DNA, 101 bp, Homo sapiens
tgatcgcagtccggaggtgaggcggaactctgagggaaaagttcagttagaagacatacttcaccatcttgaaaaagaagaaatcaatccccttgctacta

SEQ ID NO: 792705 - DNA, 88 bp, Homo sapiens
ttggttttccagaaagctgtaatcatgtcttctgtatgacttgtattcttaaatgggcagaggaggaagaagcagtacttttttgtct

SEQ ID NO: 792706 - DNA, 83 bp, Homo sapiens
ctcagccgaagtgctgcgattacagacctgagccactgcgcccagccttgatcttgaggtgagaatgagatggtgatcatgag

SEQ ID NO: 792707 - DNA, 112 bp, Homo sapiens
aggaaaatacagcggaaaaatgcagagctggagtcgtgtgtactgctccttggccaagaaacattgctgaggctcttgtcagcaaaggtctagccacagtgatcagataccg

SEQ ID NO: 792708 - DNA, 115 bp, Homo sapiens
ctcgtgtccaggttcctcatgggcagtgctcggggtgacaaagaaggcgtggtgtccctcgtggccgttcacccctccaccgtcaacccgctcgggaagcagctcttgccaaaaa

SEQ ID NO: 792709 - DNA, 101 bp, Homo sapiens
gaaaggattttgcacttgtgcagaccgggcgagcagagtaagaagcagggggctcgagttggtagaatagatgcttttgttcagagcttggacaaaaattt

SEQ ID NO: 792710 - DNA, 82 bp, Homo sapiens
gaatatcatgctggtggctctacccagaattcaattaaagtggctcaggaactgtggctgcaccatctgtcttcatcttccc

SEQ ID NO: 792711 - DNA, 80 bp, Homo sapiens
agatgaaatctatgtaacttgcgaatcagatcagagtgtggtcgaatgtaagggattcacctacgctcttaccagctgga

SEQ ID NO: 792712 - DNA, 124 bp, Homo sapiens
tgctcctccaggcgctgcccagccccttgtcagccagggctgaacccccgcaggtactaggttttgacaagcttgcatcatgcgtgagtataagctagtcgttcttggctcaggaggcgttgga

SEQ ID NO: 792713 - DNA, 89 bp, Homo sapiens
gaccctcagggagagcgggcagccttccaggtggacagcctcttgttgctgtaccacatagaattcactcaacaagtagaaacgtgaga

SEQ ID NO: 792714 - DNA, 75 bp, Homo sapiens
cgggcagctcccgctacggacacctcagggcatcttcgtctcccgcattgccgagggcggtgctgctcaccgcgc

SEQ ID NO: 792715 - DNA, 74 bp, Homo sapiens
aaaagttgaagatatcaatggatgtcctagaagtcagtctcagatgatgaagaagagagaagtccctgcaccac

SEQ ID NO: 792716 - DNA, 50 bp, Homo sapiens
gctcggattctcgtagctgtgccggatggtcagtaggacagaaggtaaca

SEQ ID NO: 792717 - DNA, 83 bp, Homo sapiens
cctggggccctgggtgaagtgctccgtcgcccttgcctccagagccacctgagctgaagattcccttgagaacaagtactgtc

SEQ ID NO: 792718 - DNA, 100 bp, Homo sapiens
aaaggacagcattcctgtgacctctgcctaccatccataaaatactcattcccctctcaggaattaatgaccaagttaataactgagacacctgaccagc

SEQ ID NO: 792719 - DNA, 51 bp, Homo sapiens
actcaacaatattatccccatgaggagatgttaaagtaacccatcttgcag

SEQ ID NO: 792720 - DNA, 98 bp, Homo sapiens
ggggtcttaaaggctgatgaaggcatctcgttcagaacccagtgacttgattgtaaaaatttacagagcggaatcatatgctggtctccaagagttta

SEQ ID NO: 792721 - DNA, 75 bp, Homo sapiens
atccactgccgcggccgtgggcccgaccgcggggacccgagtgacagtgaggattcacatttgggttatttcaag

SEQ ID NO: 792722 - DNA, 83 bp, Homo sapiens
ttgggttttttgtggcttccttcgttattggagccaggcctacaccccagccttatgccagcctggaccatcttggaggcagt

SEQ ID NO: 792723 - DNA, 101 bp, Homo sapiens
tacaacttccccgcaggcggcgtgggcatgggcatgtacaacaccgacgaggaactgtggctgcaccatctgtcttcatcttcccgccatctgatgagcag

SEQ ID NO: 792724 - DNA, 75 bp, Homo sapiens
atgccttggtttcaacactatcggaatggcaaatgaagaggattcttccagttctctagtgaaggatcacctttt

SEQ ID NO: 792725 - DNA, 89 bp, Homo sapiens
gctgagagacggcggcggccgaaagcggagagatgctgggcgtggcggccgggatgacccacagaaatgtatgtcccagaaccaaccaa

SEQ ID NO: 792726 - DNA, 99 bp, Homo sapiens
tccaaggaagaggtgggagattttattcaacgctaccaggatattgagaaagaatctgagtcagatgaaggcttgactattgacctgaagaattttaga

SEQ ID NO: 792727 - DNA, 98 bp, Homo sapiens
aaagcgagcctcttctgataactcaggatttacttgaaatgaaaggagattccaacctacttcaggttgcttttaactttgacagaggaagaattttc

SEQ ID NO: 792728 - DNA, 75 bp, Homo sapiens
cgagtgggctgcacgcatttcggaagaatatttttctcaggaagttggtgaaccatctaaagaagagaaggctgt

SEQ ID NO: 792729 - DNA, 83 bp, Homo sapiens
ggatggggccctggatgagggggaagggcctcaaagccagaagattccaaacagaggcattgatttactgaaaaaagataaat

SEQ ID NO: 792730 - DNA, 97 bp, Homo sapiens
agaggaggccgtccagcagatggcggatgccctgcagtacctgcagaaggtctctggagacatcttcagcaggtatagggctcaaggaataagcgca

SEQ ID NO: 792731 - DNA, 75 bp, Homo sapiens
aggaaccggaccccggcagctgtgctggagaatctggtaaaagcaccattgtgaagcagatgaggatcctgcatg

SEQ ID NO: 792732 - DNA, 149 bp, Homo sapiens
cgacgagctcagcaacatcgctatgcaggtgcggaagctggtgggcactcagcaccctctgcttaccacagccaggatgtgatcttcgtggtggaaagctaaattttaaaaccaccccaatggatgcagacagtgatgttgcattggac

SEQ ID NO: 792733 - DNA, 75 bp, Homo sapiens
ctcccttcctcttccccatcttcttctctcggtcccgggagcccccgcccggaataaagcatatgatggctttca

SEQ ID NO: 792734 - DNA, 90 bp, Homo sapiens
cagcaggaaagacaaaagagggtgttctctatgtaggaatataaatagtttctggaaaggacactgacaacttcaaagcaaaatgaagtt

SEQ ID NO: 792735 - DNA, 80 bp, Homo sapiens
aagatgatgttgtaacagtgactgttggttgaatctggcgatgtggaacccatggatatggagggctgactatatacacc

SEQ ID NO: 792736 - DNA, 100 bp, Homo sapiens
ctgtctgagggagatggtgacaagctcaaggcctgcgagcgttccggttatgcccttgccattcccttgtgtgcattccaggggactgtgtctctccatg

SEQ ID NO: 792737 - DNA, 100 bp, Homo sapiens
cctggttctgccttctggacaatctttccgacagagtgggaagctttggagctgacggatcaccagtgggcactagatgatgtcgaagaagagctcatgg

SEQ ID NO: 792738 - DNA, 88 bp, Homo sapiens
caccggtccccaacgcatcatgccagggagccaagcgtcctgcccggccacagaaagaatttactttcaggttttcttacctaaaggg

SEQ ID NO: 792739 - DNA, 82 bp, Homo sapiens
gcggattctacattgcctccggaggcagttatacttaagcatgaacattgacgacaaactggaaggattgtttcttaaatgt

SEQ ID NO: 792740 - DNA, 76 bp, Homo sapiens
ggagttaatggtctaatttatgataggttacccctgtttcaggccagtgcttttgcatttttggcccctgctcgag

SEQ ID NO: 792741 - DNA, 50 bp, Homo sapiens
gggcctgggagcttgctgcagcttcaggcgagaaccactgtctctgatca

SEQ ID NO: 792742 - DNA, 90 bp, Homo sapiens
cttctggtgatgtgagctgtgtggatgaaatcctaaaaaaaaggcgacggcggattgacagaagtatgattggagagcccacaaactttg

SEQ ID NO: 792743 - DNA, 90 bp, Homo sapiens
tccaagcggcaccggttggacctaggggaggattacccctctggcaagaagcgtgcggggaccgatggttgtcaggagctagacttgctg

SEQ ID NO: 792744 - DNA, 75 bp, Homo sapiens
gaagaaactgtggcagaggtgactgaggtaaagtccatggttccctggcccgtgctggaaaagtgagaggtcaga

SEQ ID NO: 792745 - DNA, 75 bp, Homo sapiens
ttaatttcagtgactgaattaaaaggtgtcaagaagctcagaatgcatggaggaatctatgtaaagcgcagtgcc

SEQ ID NO: 792746 - DNA, 83 bp, Homo sapiens
cagctgcggcgggacaagcgcgacgcccggcgcgagctcaagctgctgctgctcgacaatgcagatcttcgtgaagactctga

SEQ ID NO: 792747 - DNA, 80 bp, Homo sapiens
ggtttctgcacaggaatatcgagagcgtcatgaacccgagctatagagaaaggagatgagatttggtcgtattgggcgcc

SEQ ID NO: 792748 - DNA, 51 bp, Homo sapiens
cccggctggacgccgctgcctcagtggtgatcatgtgtgcgagcagtgaca

SEQ ID NO: 792749 - DNA, 90 bp, Homo sapiens
gactttgaacgcactcctcagagtccgactctcccacctgctaaggtaaatattgcaacttcagcaacttcaaatattgaatatgcccac

SEQ ID NO: 792750 - DNA, 100 bp, Homo sapiens
cgggctgaagcgactgagtccgcgatggagaattaccccctctacattcgcagcacccctacggagaacgagctgaagttccactacatggtgcacacat

SEQ ID NO: 792751 - DNA, 75 bp, Homo sapiens
atcgcatcctatggctcaaagaaagatgattatgacaaccctccatatgataagggagccttcagaatcgaaatc

SEQ ID NO: 792752 - DNA, 87 bp, Homo sapiens
ctgatggaagatctgtttgaaactatcaagaagctactctagaagtcggagcagaggatggtacagcagaggccgaaccagaagccg

SEQ ID NO: 792753 - DNA, 75 bp, Homo sapiens
gttgagagcttccagcagctgctcaatgctcggacacagctacgtccagacgggctgcacctccctgaagctgat

SEQ ID NO: 792754 - DNA, 100 bp, Homo sapiens
ggctttatggggagggaagaactgttcttgactttcagtttttcgagcgggtttcaaggcagcacacttctgcttttgttccttcatcaggacgaattta

SEQ ID NO: 792755 - DNA, 50 bp, Homo sapiens
aatttcttcagactgcaatcatagggagcactatgtctgcggaagtcccc

SEQ ID NO: 792756 - DNA, 83 bp, Homo sapiens
caacagtgggacagccaggtcaccatgggccacctcttccagaagctgttggactaaatgctcttccttcagaggattatccg

SEQ ID NO: 792757 - DNA, 75 bp, Homo sapiens
ccattgttgctacctcagaaggctccctttggggactggtacatggtggatgctgctgaccaggagaagattgag

SEQ ID NO: 792758 - DNA, 82 bp, Homo sapiens
ctggaaaactggatgctgcagacactgaacgaggagccagtggtatctgatggtataattgccccaggatatgaagaagaag

SEQ ID NO: 792759 - DNA, 90 bp, Homo sapiens
aagaacccatcgggcagctacacatcttgaaagagaagctcttcctgtgagatctccagtctggctcagctgccagtggtgggagtggtg

SEQ ID NO: 792760 - DNA, 74 bp, Homo sapiens
cagatgctgcaggacgccatcagcaagatggaccccaccgttttatttccggaactggcatggcatgaatcctc

SEQ ID NO: 792761 - DNA, 100 bp, Homo sapiens
tggctgcagggacccggtgacagcgtgagaggttcgcagacgaacacttgccaagtatttcaatccttgctatgccactgctaggttaaaaccaacattc

SEQ ID NO: 792762 - DNA, 90 bp, Homo sapiens
tcatcatggaacatctcaagtgaactcaacaaagtgaagccactgcctccatccagtgtgaaagcagaaattactataaacattggatta

SEQ ID NO: 792763 - DNA, 88 bp, Homo sapiens
actccgctccacctggcctgtcagaagggctaccagagcgtgacgggggaaggatttgaaagaacagcatgatcagaaagtatgtgag

SEQ ID NO: 792764 - DNA, 100 bp, Homo sapiens
gaccagaaatgcagaacattttaaaaaaagttgcagctactttgcaagtgccagtaaatgatttaaatgcagggtggatccatgctgtgctcacttctca

SEQ ID NO: 792765 - DNA, 96 bp, Homo sapiens
ttcttccagctgcagcgcggagaggtgaatcagttcagacagctgtattccaaagtcatcaatgataagcatgatgatgtcatggccaagtttggc

SEQ ID NO: 792766 - DNA, 82 bp, Homo sapiens
agccacaaacaacaacaagacattcattcccaacgatggcaccttttgtacagtgaaagccctgtgtaaggaatgtgtagta

SEQ ID NO: 792767 - DNA, 101 bp, Homo sapiens
gcgcggaaggacgaggctgaggcgagaaacgagttgctgcagcaaacgagattgctaaggaaaggaggaagcaagatgtggttaatcgtgttgcaacccat

SEQ ID NO: 792768 - DNA, 100 bp, Homo sapiens
atgaagctacagccatgatgaaagctcagtttatgagtctctgggatggattggatactgatcacagctgccagatcatgtttgagaccttcaacacccc

SEQ ID NO: 792769 - DNA, 83 bp, Homo sapiens
gtagccaatgcaattgtgggtgtatggcagactgaaactgttgaggagcccatggaggaagaagaagcagccaaagaagagaa

SEQ ID NO: 792770 - DNA, 100 bp, Homo sapiens
aggttcggccggtccccggcccgcctgccggagccgtggtggcagccccgggaggagcactggcgtctgtttccttcgatgtgctagtgctgctgatgac

SEQ ID NO: 792771 - DNA, 75 bp, Homo sapiens
acgtctttctagaaatgactggaaagtttcaagaggcataagatacaggtcagctccgccgaaggcgccgccaag

SEQ ID NO: 792772 - DNA, 100 bp, Homo sapiens
aaaaaaaggtcttggtgaggtgccgccatttcatctgtcctcattctctgcgcctttcgcagagcttccagcagcgcttcccatcgacggtcagtgcgca

SEQ ID NO: 792773 - DNA, 87 bp, Homo sapiens
gctgattcctgggagcacatccatttcattggcaaggagcctgattccccacgtgtcacattggtccgtgacgtttccccactaagg

SEQ ID NO: 792774 - DNA, 80 bp, Homo sapiens
cgacgctgccaacaacgggcactacaaggaagtgcccaccgcgtgccccgattggagaggggaccttctgcaggttgtgc

SEQ ID NO: 792775 - DNA, 99 bp, Homo sapiens
cgctccgtggccttagctgtgctcgcgctactctctctttctggcctggaggctatccagcctcctgcccctcctaaagctgaagccaaagcgaaggct

SEQ ID NO: 792776 - DNA, 75 bp, Homo sapiens
aagaagtgctatctggaaagagagcctccagggtcgtatagacctccccctcctatgggcaaaccaccaggttca

SEQ ID NO: 792777 - DNA, 90 bp, Homo sapiens
cttccgggagcctagatcctgtgctttactctgaagactcgaaggtgggagtcaatcattttgacaagtctcctgaaaggaacagctagc

SEQ ID NO: 792778 - DNA, 87 bp, Homo sapiens
tggtgtttgtaagaggtggtatcgcctagcggcttcctactatgagatttcagttgatgatggtccatgggaaaaacagaagagttc

SEQ ID NO: 792779 - DNA, 90 bp, Homo sapiens
gcaaactttccgagaatatggagatacaggtgaaatctggcctactgaacttgacgcactggtatttggccatctatacaccattcttac

SEQ ID NO: 792780 - DNA, 51 bp, Homo sapiens
gaagtaatttctgggaaacaagaagggtttgctactcaacaagcagaaatc

SEQ ID NO: 792781 - DNA, 98 bp, Homo sapiens
cgcagaacgccatcaaccagctgtatgtctttgcaagactccactctttccagagaggggaaaccagagggagagattatggctgctgtgtttttctc

SEQ ID NO: 792782 - DNA, 51 bp, Homo sapiens
aaggattccaagtaactcttatttgtgtctcctttcctcttgggccgggca

SEQ ID NO: 792783 - DNA, 100 bp, Homo sapiens
cttcctctggcccgaagccttcctttatcgctttcagctcctgagaaccatgtctatgcccaaaggtagagttctggataaaaacctggatgaggaaggg

SEQ ID NO: 792784 - DNA, 100 bp, Homo sapiens
aaggtgacagccctgccccccaaggaagcgtgcaaatgccagaaagaggatttggccagagcgttttgtggcagctgcaatgactctccgcacggtatta

SEQ ID NO: 792785 - DNA, 75 bp, Homo sapiens
agtggagaagaaatcagtcagccgcagggagatgcacttatttacatggaaccagagaaacaagtgatgtccagg

SEQ ID NO: 792786 - DNA, 75 bp, Homo sapiens
ggagaaaccaaggctgaagagtcaggttgaagcacaggctctggaatgggcactctccttatcagcaagatccga

SEQ ID NO: 792787 - DNA, 100 bp, Homo sapiens
tggccttgttgtccttggagctgtggtcactggagctgtggtcgctgctgtgatgtggaggaagaagagctcaggtggcagggcccagccccgaaccaga

SEQ ID NO: 792788 - DNA, 75 bp, Homo sapiens
ccagtatggtggcaaccaagaagcttcttggacacttaatgattgttggcaagaaatgtgctgctgatctgggcc

SEQ ID NO: 792789 - DNA, 100 bp, Homo sapiens
aaaaccagtcatgaccactagacccacagctgttaaagcaacaggagatgtatctgcaaagtctttttacaccaggacaattcacaaatgaagctttatg

SEQ ID NO: 792790 - DNA, 83 bp, Homo sapiens
acggggtcgagtcagtgcgttcgcgcgagcaaccatgtccaagggacctgcagttggtattgatcttggcaccacctactctt

SEQ ID NO: 792791 - DNA, 100 bp, Homo sapiens
gaggacacacctaaacatgtggaatcccaatgccggtttcacaacttctgccagagaaatttgcagagcagctgattcgagtatattgtaagaaggtgga

SEQ ID NO: 792792 - DNA, 75 bp, Homo sapiens
tcactcgagcccagaagatcaagactagtgtgagcaacaaagctcaaagatttggaaagagacagcttaacagaa

SEQ ID NO: 792793 - DNA, 75 bp, Homo sapiens
gaggcaaggagctaaagcagcgtgcgttcagccctgggcctcctctattggcccaggaagcccacccagccccgc

SEQ ID NO: 792794 - DNA, 101 bp, Homo sapiens
caccttaatctcatcacccagtggaaggcgtgtttaccagacatatggaaagttgatcatgtgctggagcgcttgcagagtgaaagcctggtgaacagaag

SEQ ID NO: 792795 - DNA, 85 bp, Homo sapiens
cgatctcccagaattcccatttgaggctgacccgcggctgattgagtccctctcccagatgctgtccatgggcttctctgatgaa

SEQ ID NO: 792796 - DNA, 75 bp, Homo sapiens
gcaagaggcaaagagaatcggttggatgaaattgattctgcagtaaagatgttggtgtcattaaaaatgagctac

SEQ ID NO: 792797 - DNA, 100 bp, Homo sapiens
cttgggccctgcttccaggtctccctgtcccccttgcctgccttcttccctgctctgtcccctaagctccctccagggcttagcctccaagtgggactac

SEQ ID NO: 792798 - DNA, 75 bp, Homo sapiens
ctgaacgtcttgcaacagtggccgcacgcatagaaacctgctcctccaaagccagagcccaagcctaaaaaggcc

SEQ ID NO: 792799 - DNA, 75 bp, Homo sapiens
cggaggagacatcggcctctgcaggcttgccgaagaagggagataaacaggggtcacatgacgacagaagccaag

SEQ ID NO: 792800 - DNA, 98 bp, Homo sapiens
ggacatcgggcagcactgccaggtggagcattgccggcagcgaggtctgctgagaacagacccagtccctgaggaaggagaagatgttgctgccacga

SEQ ID NO: 792801 - DNA, 106 bp, Homo sapiens
agaaaattaagagttatgtgaattatgtgctaagtgaaaaatcatcaacctttctaatgaaggtagtttgtgaagctataaaaaatgaaatgaatgttatgctgaa

SEQ ID NO: 792802 - DNA, 100 bp, Homo sapiens
tacaaaagcagtatagatctctatttctatgtgattggcagctcctatgaaaatgagatgagagtccctacactaaatccgccagccagacaaagccgcc

SEQ ID NO: 792803 - DNA, 101 bp, Homo sapiens
ccacaccatcatgaactgcacaaggacctgtcctaaggtaagaattgtgacaaaggccagtcttttttcattgacgccccagattccccagccacgttagc

SEQ ID NO: 792804 - DNA, 75 bp, Homo sapiens
gaatgtgcaacttgcaagggaactggagacaatgaaaatcttgtcagaaatacactttcgggaaatggcctctaa

SEQ ID NO: 792805 - DNA, 100 bp, Homo sapiens
cacgttctttcgcttttttacctgccaatcaaactgctacaagacaacaccctgatctggcatggacatccgaacgcacggccggcgacgcagagcgggc

SEQ ID NO: 792806 - DNA, 96 bp, Homo sapiens
gctgtctcagtttggggcaagtttatacgggcaacaaaccttccacctattacccaagaagaagctttacatattctgggctttcaacctccattt

SEQ ID NO: 792807 - DNA, 75 bp, Homo sapiens
aaagtccatgctaacctactatgagggtcgagcagaggtcttggctgttcaaccgtactttctccagaaggatca

SEQ ID NO: 792808 - DNA, 100 bp, Homo sapiens
gcttgacaccgccatgatcaacaactctcgaaacctcaacatccagctcaagtggaagagacccccagagaatgctcctattcagacatatgtgcttggt

SEQ ID NO: 792809 - DNA, 50 bp, Homo sapiens
tacttggattcagcaaggaaccttccgggtgcaacaccggaggatttcag

SEQ ID NO: 792810 - DNA, 100 bp, Homo sapiens
gcgtcattgttgtctttctgggaactcattcccatgagcacatcaaagctgcccaatgatctgcttgatttgcagcagccaacttttcacccatctgtac

SEQ ID NO: 792811 - DNA, 82 bp, Homo sapiens
tgagcacgccctttacctgcgtttcctggatgctcttaaaggttgatgataattagaagcatgctttccactgaacttcccg

SEQ ID NO: 792812 - DNA, 90 bp, Homo sapiens
aggatgtggagatgaaagaggaggctatggaggctatgatgattacaatggctataatgatggctatggatttgggtcagatagatttgg

SEQ ID NO: 792813 - DNA, 101 bp, Homo sapiens
tccctctaccttaaggatgtgcaggatcttgatggtggcaaggaaaaatggtgtgaatggaacattaacttcaaatgtagcagactctccccggaataaaa

SEQ ID NO: 792814 - DNA, 82 bp, Homo sapiens
ctcgggcaccatgagcgacgtggctattgtgaaggagggttggctgcacaaacgaggcgacgttgtggacgtttaccagcgg

SEQ ID NO: 792815 - DNA, 83 bp, Homo sapiens
gcccttttcagggcccccaaactgtcacagaaagagctgttaacacttcctagataacggcccctggaggaacgcgcatagat

SEQ ID NO: 792816 - DNA, 82 bp, Homo sapiens
cgactacaagaagagggcggagcggagacgggagtattatgaaaagatctctctggcatctctatcccctatgaggcaccac

SEQ ID NO: 792817 - DNA, 83 bp, Homo sapiens
gttcgagatcaccttcgagtgcatcgaggacctgtctgaaggtgtggacactgccagcggctgcagccgacttggaatgacct

SEQ ID NO: 792818 - DNA, 107 bp, Homo sapiens
cgagggctgagttgtccgcgaggccccgcgctcaagccgccttctcctgccgtgtctctggagaatggttcgactgttgcctgataccatcaatagcattaacctag

SEQ ID NO: 792819 - DNA, 80 bp, Homo sapiens
gtctcctaagcctcaggcacagccattaagaagcctgtgggaaagacaaaggaggaactggctttggagaaaaagcggga

SEQ ID NO: 792820 - DNA, 75 bp, Homo sapiens
gatctgaagagctatggtgaaacaccactgaagcattgccaaggttgaactcccaccacctgatcttggaccaag

SEQ ID NO: 792821 - DNA, 100 bp, Homo sapiens
cgaaatgttcaagtttaccaaaagagaggcaccgctggaacactaatgaggctgaagctgttcgtgaggaggaggacaccaccgtgcatgaggatgatct

SEQ ID NO: 792822 - DNA, 100 bp, Homo sapiens
cagactctgaagatgatcagacaaggcaaagcgaaattggtcattctcgctaacaactgcccagctttgagcccagctcaacattggcaatgtgctccct

SEQ ID NO: 792823 - DNA, 75 bp, Homo sapiens
atttaattttagggtcctttatatagaagggagagtaggaaaagaagatttttcagatcccctggatgcatgcgg

SEQ ID NO: 792824 - DNA, 98 bp, Homo sapiens
cattcctggggaaaagtcagcatggcttatatggtgataatgtggaggagatggactggctcataggtgaactgtcacccctacaactcagcttgcaa

SEQ ID NO: 792825 - DNA, 95 bp, Homo sapiens
ctctactcacaggctccgatggcggcggccgccctgagggaccccgctcagggacttcatctgcagcatcctcaccattaaaaaaagaacagccc

SEQ ID NO: 792826 - DNA, 80 bp, Homo sapiens
aaaagctgccctgagacggtgtcccgccgaaaggtgtcgtgaaaactacccctaaaagccaaaatgggaaaggaaaagac

SEQ ID NO: 792827 - DNA, 90 bp, Homo sapiens
atcatgggctttcacaggcccgggagcggcgcggatccagtgccctacctgccaattcgtctggtgttttaagtgccactctccttggca

SEQ ID NO: 792828 - DNA, 100 bp, Homo sapiens
ataaaaacacagctcgacagtacgcctacttctataaagtcatccaggtgaatggaattgacttgagaaaggccacacatgatgaagcaatcaatgtcct

SEQ ID NO: 792829 - DNA, 83 bp, Homo sapiens
aatggaagtatatgatgctgaattgttcaacatgcagccactattttcaggtacaccaggggttggaaaaaccacactaggca

SEQ ID NO: 792830 - DNA, 100 bp, Homo sapiens
cacggatcggattcctcagctacgaggaggcgctgaggagaggcccatgaagcttcccatcaccaacagcaggcagcacagaacagcttgctgcccctcc

SEQ ID NO: 792831 - DNA, 50 bp, Homo sapiens
gaaaccggtagcgcttgcagcatgaacgatgccaacgggactgcaaagcc

SEQ ID NO: 792832 - DNA, 75 bp, Homo sapiens
gctggccaaagcctgcccagacggctcacctgtgcgggatggaacaaaaggacgccaagagtgccgaggatgagg

SEQ ID NO: 792833 - DNA, 76 bp, Homo sapiens
acgtgggctcgctcaggaatggagttcagtctgaaaggcaagttgctttggcagatgccattctcattaataaaac

SEQ ID NO: 792834 - DNA, 100 bp, Homo sapiens
tggggctagtggtcctctggtcttccctgaccccgcggccggacgacccaagcccgctgagcaggatgagggagagaagtatggctacctttcacttcca

SEQ ID NO: 792835 - DNA, 100 bp, Homo sapiens
gcggaacaggctaccaagtccgtgctgtttgtgtgtctggtttgcgtgtgaacttggacatgggcaaagcggtgtatggatggatgatgatgaaagatga

SEQ ID NO: 792836 - DNA, 49 bp, Homo sapiens
ccttgatggagaaggggcatctgggaggaggagaatcggcttcgggaag

SEQ ID NO: 792837 - DNA, 100 bp, Homo sapiens
tctatccttttgggaccatgcgcggaggaggctttggggaccgggaccgggatcgtgaccgtggagggtgaaggcattctcatctcctcagaggcttcag

SEQ ID NO: 792838 - DNA, 97 bp, Homo sapiens
gaagccccctcggtccatcaccctcagggatgatgatgctgaagctatccttgctgcagacttcgaaattggtcactttttacgtgagcgtataatc

SEQ ID NO: 792839 - DNA, 75 bp, Homo sapiens
ttcgagtgaaggacccggagccgaaacaccggtaggagcggggaggagcaactttcagccagaggcatggatgct

SEQ ID NO: 792840 - DNA, 100 bp, Homo sapiens
tttgcaccctatcaagcagagcggtttcgaagacttggctggacctaccatgaaagacttctgaatccaggaagagaaactgactgggcaacatgttatt

SEQ ID NO: 792841 - DNA, 90 bp, Homo sapiens
agaattcaaacatggaaaagctcctattctgattgctacagatgtggcctccagagggctagagcccagcattacatcaacatgcccgtg

SEQ ID NO: 792842 - DNA, 74 bp, Homo sapiens
caggatatgaagaaattgagggttcttgccatgctggtaagcgggcccctcagtgctaccccagttccgtcaac

SEQ ID NO: 792843 - DNA, 98 bp, Homo sapiens
aggaatcgtatcgtatgtccgctatccagaacctccactctttcggtattggaaattatgcccttgctcagcactgtttcatcaaatcaatccagtca

SEQ ID NO: 792844 - DNA, 50 bp, Homo sapiens
tctgcccggaggagccgcccgtgtaggagctgcacgatctgggaacctca

SEQ ID NO: 792845 - DNA, 100 bp, Homo sapiens
cgccggcggtggcgcctgcggacctaactagctccaggttaggccgagctttgcgggaaagcagcgcgtacacagactttactaaaagagtacaaagaaa

SEQ ID NO: 792846 - DNA, 108 bp, Homo sapiens
gaaaaaaaaacaagtcctggagaggctgacaacatccctctggtcacacagctagatctcaaggcccagccccagcctagggggctccagaagtctccaacccctttg

SEQ ID NO: 792847 - DNA, 87 bp, Homo sapiens
ggagctagctgacttcatggagcaggtaaacgccctgcagaagatatggaagaggaacaagcatttaaaagatctagaaacactgat

SEQ ID NO: 792848 - DNA, 98 bp, Homo sapiens
tcgggcgaggagaggaggtgaccccgcgaaagggtatgcagaagttggctagtcaatacctgaagagagattggcctggagtaaaagctgatgatcgg

SEQ ID NO: 792849 - DNA, 83 bp, Homo sapiens
agagaaaaggcaacatcctgtcacaggccatgctctggcaaaaactttggtgccctggttgtcagatgttggaaagcagtagg

SEQ ID NO: 792850 - DNA, 83 bp, Homo sapiens
gagcggggccggaactggagccgaggcgcaggtggcgctggttccagggtctccctccactgctgtagtaacccgggtccggg

SEQ ID NO: 792851 - DNA, 123 bp, Homo sapiens
atgctttccagaaagggggaccagagggtgccactacccggcttatgaaaggagagatcacactttcccaggtggcttcccacacttctgactcggacgttccttccggtgtcactgaggtgg

SEQ ID NO: 792852 - DNA, 51 bp, Homo sapiens
cctctatgaggagttttggattaaggttctgagtcttctggtagtgtaggg

SEQ ID NO: 792853 - DNA, 75 bp, Homo sapiens
cgccaggacaatggggacccgggacgacgagtacgactacctattcaaaggccaagactaaggggctgcagagcg

SEQ ID NO: 792854 - DNA, 100 bp, Homo sapiens
gtgggtgtccagcctggcggtgcaccctgcaggttggagtgggtggagatcatcgaaccgcgcacccgcgagcgcatgtacgccaacctggtcaccggtg

SEQ ID NO: 792855 - DNA, 100 bp, Homo sapiens
ctgtgggacctgctggaagggaaggaaaaacctgtatgtggaaccacctaaaaagcgtgaagtcatactaaataagtcaacaaacgcttttacaactggg

SEQ ID NO: 792856 - DNA, 74 bp, Homo sapiens
atggcatctaagaaatttgctgttaaaaaatttgatgctgatccagttgaattatttgaaattccagtaaaaga

SEQ ID NO: 792857 - DNA, 98 bp, Homo sapiens
ttgcttctgttgatgtagctctggaagtgggagctgaacaaacagagtttctgcgagggccattagagaatttgccatctgccttagtaagtcatgta

SEQ ID NO: 792858 - DNA, 100 bp, Homo sapiens
tgaatgaatttggacatcacaaggccagaaatgatagacaccgcaagaaacaaagctcgagtgaaagcttgttacataatgattggactcacaattatcg

SEQ ID NO: 792859 - DNA, 75 bp, Homo sapiens
tttcgaggagtgtctgaaggactcgccccgcttcagttttgggaggtcatcagtgatgagcatgggattgacccc

SEQ ID NO: 792860 - DNA, 100 bp, Homo sapiens
cggagatgatgccgaaaacgcaaggccgaagccaaagccagtacgtagagaaatcgacactcttaatgaacgtttagctgctgaaggacaagcgattgat

SEQ ID NO: 792861 - DNA, 87 bp, Homo sapiens
gacctaggccctgcagctgaggctgctgccagccaggtaaaccccagtgataggtaccatcttatgcctataattacaccagcatac

SEQ ID NO: 792862 - DNA, 100 bp, Homo sapiens
accactcctgtgatcgttgcggctggggctggaggggaggaaggccttctccacagtaggcactcctgactacattgctcctgaggtgttcatgcagacc

SEQ ID NO: 792863 - DNA, 100 bp, Homo sapiens
acctgtgcacagaaatagtggagtacaccagcaaagatgagggttccaggacatagtctgaggcaagatggagggtatgaggggccttcacacttcactt

SEQ ID NO: 792864 - DNA, 74 bp, Homo sapiens
agcctcttcctgcgcaaggacatgtgctcctgcagaaaagggatgcagatcagaccatggaccgcgagttcagg

SEQ ID NO: 792865 - DNA, 83 bp, Homo sapiens
cagctgggcgcctccttcctgcaggccagctcttttgaaacagatggtcaccatgtttagatattagcagtcccgtatgtgca

SEQ ID NO: 792866 - DNA, 82 bp, Homo sapiens
ttggatatttgcttggaaaaacgtgtgggtacgaccttggtgatgcagtttggacggattgatggcagtgcgtacattctag

SEQ ID NO: 792867 - DNA, 100 bp, Homo sapiens
catgcagcaaccactattttcttcctgcccctcgttgatgagagcattcgaagtgacctcagcagggcatccagatgttctcgtccgtggcgcacctggc

SEQ ID NO: 792868 - DNA, 74 bp, Homo sapiens
ccccgggatctcggctgtccttcctcccgctgcggttggatttctcacgatgtccagtgttatctccatgtctg

SEQ ID NO: 792869 - DNA, 71 bp, Homo sapiens
cacacactatggcgctgaaacggattaataagctggccctgaaggaccctgttcatacagtgtcactgcag

SEQ ID NO: 792870 - DNA, 97 bp, Homo sapiens
tcggggcaaagtgttcccaccggcagcaaatatggaatatatggttgctattggcagaacagacattgaagacttagacctttatgccacatctcgg

SEQ ID NO: 792871 - DNA, 82 bp, Homo sapiens
gggcggcttcctggcctgggcgctccggtggcggcggagacggcgggcgctaacaccaccgacaaggagctagaggttctct

SEQ ID NO: 792872 - DNA, 100 bp, Homo sapiens
cgatctccagggcatccagaagatctatgggtgaagttgaacaaattgctatgatgaaaccaaaaggccagactgaacacgatgagggtatgcttgaata

SEQ ID NO: 792873 - DNA, 75 bp, Homo sapiens
cgcgcaggaaacatggcggcggcgggtgttgtgagcgggaaggtatcttcaaagaacagtaaaacatccaacttt

SEQ ID NO: 792874 - DNA, 136 bp, Homo sapiens
ttttcaacagaaaattgcagaaaagtccagagcgctgcttcccatggcgcagaggggcagtaaacagatggcggctcagcggcagcgggcgctggccatcatgtgccgcgtctacgtgggctctatctactatgag

SEQ ID NO: 792875 - DNA, 82 bp, Homo sapiens
tctggattcatatccttcgaaaacgacggtagcaacacaagtcggaatagaatggaacctgtcccctgttggcagagttacc

SEQ ID NO: 792876 - DNA, 78 bp, Homo sapiens
aggccgcttggttctgacccagctgagaatgtatgacaacatgtccacaatggtgtacataaaggaagacaagttgga

SEQ ID NO: 792877 - DNA, 100 bp, Homo sapiens
tactggtaaacgcgttcaactggcggaagacctcaacatccctttaaaagtagttggaatgttcccaagtagaggtgagaaaagggcactttggaaactc

SEQ ID NO: 792878 - DNA, 100 bp, Homo sapiens
cgagcggtgacctggaccacggcgcagacgcgggcgagctgcggctcggacgccagcggacacgcgggcgaggaagctcttcgtgggcggtcttgactgg

SEQ ID NO: 792879 - DNA, 88 bp, Homo sapiens
gaaggcacagctcactccagcactacgtgaccagcacgttcctggagccgagagaatggtcagatttgaatataacctgccgctttgc

SEQ ID NO: 792880 - DNA, 80 bp, Homo sapiens
tgcctttagtgcactcttctccttcacagtaaagtggctgagtcctgtgaagataaatcagattagcttggatgaaagtg

SEQ ID NO: 792881 - DNA, 83 bp, Homo sapiens
ataacatcagcattacgctcgttgagcaatgccaccattatcaatgaagagatcgaaagctgctttgcgtcgcagttggagca

SEQ ID NO: 792882 - DNA, 99 bp, Homo sapiens
tgatattgaagcaatgcttgaggctccttacaagaagtgttgctaaagattatgtgcgactgatgaagtatggcgactctctctaccgctgcaaacagc

SEQ ID NO: 792883 - DNA, 74 bp, Homo sapiens
attcctttgtgctgactatgccgagcaagatgaggccaaacgtaccaagaaagtcgggatcgtcggtaaatacg

SEQ ID NO: 792884 - DNA, 100 bp, Homo sapiens
agcggaaaatgatccagtcacagggcggcgactggcggcgcgatggacctgaccgggctcctgctggacgaagaaggcaccttctccctcgccggcttcc

SEQ ID NO: 792885 - DNA, 90 bp, Homo sapiens
aggacagaattgaatcacttgaaaagaggctcgagaagtaaattttcgcagaaggacttagaaatgctattccatggaatgagtgctgat

SEQ ID NO: 792886 - DNA, 88 bp, Homo sapiens
ccgtcttcgggttcgtcctcttcttggtgctgtggctgatgcatttcatggctatcatctacacgttcttgggtgtctctggggagtc

SEQ ID NO: 792887 - DNA, 100 bp, Homo sapiens
gccgggggtcgctggctctgctgctgccgccggcgaaggaggaggcgttgccgggtgagcgagtgctgtgctttcatgggcctcttctttatgaagcaaa

SEQ ID NO: 792888 - DNA, 119 bp, Homo sapiens
acgagcctgccgtacttctgattttgaaacacctgggtctgggcttcccgggcgagcggtgggtctgccatcatggatgttctcgcagaagcaaatggcacctttgccttaaacctttt

SEQ ID NO: 792889 - DNA, 83 bp, Homo sapiens
gaaggatctttgagtctagcaagtgttattatttctgccctttgtacccttacaagcctggtccgacccccagtggcactaac

SEQ ID NO: 792890 - DNA, 90 bp, Homo sapiens
ccggggccgtggggcttccgcctcgtgggcggcaaggacttcgagcagcctctcgccatttcccggagaatagtgacagtggtacaggaa

SEQ ID NO: 792891 - DNA, 100 bp, Homo sapiens
aaagtgtcctgccctacttcaagaaatggttaatgtaatctgccaactaatagtaatggcccggaaccgtgaagaggtgctgagccccacaggccgccag

SEQ ID NO: 792892 - DNA, 75 bp, Homo sapiens
tttgtgaaagtcagtttctgaggaatttcatcaggtgcgttccatggatgaactgaatcatgattttcaagcact

SEQ ID NO: 792893 - DNA, 100 bp, Homo sapiens
tgatgaagatgaggactccacagtattcgacatcaaatacaggatggagagcaatacatcatcatctttggagaatttagcgacggcgcctgtgaaccag

SEQ ID NO: 792894 - DNA, 99 bp, Homo sapiens
aggatataccgccccaccactggggccctcctgctgctcactgcccttcagctctgtgaccagagaataacttgtctgactaccagtattcttggatgc

SEQ ID NO: 792895 - DNA, 90 bp, Homo sapiens
cacggaccttgggctgaccggtctgtctggcttcagcttcggaaccaaaaagaagcttcccagagccggggccaggagccccaagcgccc

SEQ ID NO: 792896 - DNA, 89 bp, Homo sapiens
ccgccccccgctcaatggcgactccctcaccgagtacgaagcgggcgtttgcgaagctggagaatgctggaggagaccttaaggatggc

SEQ ID NO: 792897 - DNA, 90 bp, Homo sapiens
caagaatcttgattacaagagagacttgttttgcctcagtgttgaagccattgaaagcttggtaaaatgcggctgacaattccgtgtcgg

SEQ ID NO: 792898 - DNA, 88 bp, Homo sapiens
tgattacctctcctacaactgaattgcaggggctggagagacttcttcatgaaggaatacagggacagtcacaggagacaggagcacc

SEQ ID NO: 792899 - DNA, 83 bp, Homo sapiens
gtcagcaccgcgcacacctcttcgatctcaactgtaaaatttgcacaggcacaggctgcatgtgattgtggatgaggtctaca

SEQ ID NO: 792900 - DNA, 100 bp, Homo sapiens
acctggccgtggggaactaccggctcaaggctttgaagacgacccccaggctgtgctgcagacaatgaggaggtacgttcacaccttctttgggtgtaag

SEQ ID NO: 792901 - DNA, 75 bp, Homo sapiens
cgaaccccgggacacgcaggaacggctccagcatcaagatccgtctgacaggtccatattcaagcctttcatctt

SEQ ID NO: 792902 - DNA, 99 bp, Homo sapiens
cctcaccgcggcatcaagcaggtccggacccactggctgctggagcttgtcaccaccaggtaaaaagatggcctatcagaaggtccatgcagatcaaag

SEQ ID NO: 792903 - DNA, 75 bp, Homo sapiens
ctaccagtcatttgtggatgtcatggaatttcgggactttgtgtcattgtatcaagattttgaaaacttttatac

SEQ ID NO: 792904 - DNA, 50 bp, Homo sapiens
gccggtcaggctcgccgccgagctggtgaaagaacttgtcctggacaaca

SEQ ID NO: 792905 - DNA, 100 bp, Homo sapiens
ttcggatcatgtctggtggctccgcggattataacagcctacgaggacaagcagaaactcaagcggaccgagatcatcagccgctcctggttcccctctg

SEQ ID NO: 792906 - DNA, 100 bp, Homo sapiens
cttcagtctataataaagagatgttgttaatgtaccgcggtgaggctcttgaagatttcacaggcccggattgtcgttttgtgaattttaaaaaaggtga

SEQ ID NO: 792907 - DNA, 90 bp, Homo sapiens
agaaacgcaagaagtacaacgtgccggtccaggatgagagccactcagagtgggtgtcttgtgtccgcttctcgcccaacagcagcaacc

SEQ ID NO: 792908 - DNA, 73 bp, Homo sapiens
tgggaatgttttcttaaaattcacctgcctagagctggaacgttacctccagagcgagccctgctatgtttca

SEQ ID NO: 792909 - DNA, 100 bp, Homo sapiens
cccgcctctgcgtctttgctcccggagcgcttgaaggagctgcgggaagcagaatctggtaatataagtcaaaagtctgatgaagaagattttgtaaaag

SEQ ID NO: 792910 - DNA, 75 bp, Homo sapiens
taaaaataaactgcttgaacatcctttgactggttagccaggattgtcagctgacctctgtcctgtgtgcccagt

SEQ ID NO: 792911 - DNA, 100 bp, Homo sapiens
ggaaccggcgccgcgcttgctgctggtaacagggccttgcctagtgggccttccttcccagcatcctggtggggaagaagttttaagggaacaagctgga

SEQ ID NO: 792912 - DNA, 90 bp, Homo sapiens
gctgcgggtccgggattcccagccatggcagattcctccgggcagcaggttccaagatgagatgggattctccaacatggaagatgatgg

SEQ ID NO: 792913 - DNA, 120 bp, Homo sapiens
ttctacttcattcagaagatcaggtacacaaatgcacgcgacaggaaccaggacatggatttgattgacatactttggaggcaagatatagatcttggagtaagtcgagaagtatttgac

SEQ ID NO: 792914 - DNA, 100 bp, Homo sapiens
aaggaacaacatctttaccatctcatctcaagaatggaggatttgacttgaagacactgcctgtggactttgtggaatgcttgatgcggttcctaccaac

SEQ ID NO: 792915 - DNA, 76 bp, Homo sapiens
acaggtccagggcagaggaccaacatgggcattttgtttatgagcaaggtggaaaaggagggagctgctctcaggc

SEQ ID NO: 792916 - DNA, 109 bp, Homo sapiens
ggaagcccctatcgccgagctcgttggagcttgaacccattgtcacccctccgttgtcgagatgtccacagaaggaggatttggtggtactagcagcagtgatgcccag

SEQ ID NO: 792917 - DNA, 75 bp, Homo sapiens
agcccttcaagaaatacaaatgccctttctccggccctccaggcactgaagcgtaagaagaggtatgagaagcag

SEQ ID NO: 792918 - DNA, 101 bp, Homo sapiens
ccaggcggaaacagagcaacccccggcagatcaagcccctgggcgctgcctatggcacagccaagagcggtaccggcattgcggccatgtctgtcatgcgg

SEQ ID NO: 792919 - DNA, 85 bp, Homo sapiens
caacgttaggaagtctgcactgcaggcattaagcagtcacactgcttttaccaaacacagcgaggaacttggaactgaggagggc

SEQ ID NO: 792920 - DNA, 98 bp, Homo sapiens
agtattgctgtgggtgctgggacttcccgtccgcggcgtggaggacaccattcgcttttcacccaagatgatttgatgtcttataaaactctgatgaa

SEQ ID NO: 792921 - DNA, 108 bp, Homo sapiens
gtcagagagccttgggccagagttccaggggctctgggagtggctgccagctattgacctgttgtattggcgggacatcaagcagacgggcatcgtgtttgggagttt

SEQ ID NO: 792922 - DNA, 75 bp, Homo sapiens
ggatcccggctcgcggccagcccgagcggctcggctgggctcaaaatgcagagaactcaaagatattcatttcgg

SEQ ID NO: 792923 - DNA, 101 bp, Homo sapiens
cttctgtatcttcatggtgcggctcatcttcgagaggtgactattatatggttaaaaagattttggaggaaaacagttcaggtgacttgaacataaattgc

SEQ ID NO: 792924 - DNA, 75 bp, Homo sapiens
ccggcaggctgagaaaagcgagaccgcgtgcgaggaccggtcccgcagcccccggaagccaatagactccctcag

SEQ ID NO: 792925 - DNA, 100 bp, Homo sapiens
agcgcagcgacggggcgctgcctggcccaggcgcacacggaagtggggcatggtctagtggcccagtcaggacgcggaaacactccctggaggttctgac

SEQ ID NO: 792926 - DNA, 50 bp, Homo sapiens
ggaaatataagaaaacgtcccagagagactggagcacaaggaggttttag

SEQ ID NO: 792927 - DNA, 82 bp, Homo sapiens
cgctgagtggtttttcggatcatgtctggtggctccgcggattataacagagcccagccctgaccctgctgctggtggacga

SEQ ID NO: 792928 - DNA, 75 bp, Homo sapiens
gcctagaaggttatgttcacgacctcgagggaaattgcatcaagaaagactctgagatttgcccacctgatgacc

SEQ ID NO: 792929 - DNA, 75 bp, Homo sapiens
cagaacagttaatcctcaatttaagcctgatctaacccctagaaacaggcacagtatgaaaacccaccacatatc

SEQ ID NO: 792930 - DNA, 83 bp, Homo sapiens
ctatcagatcactaagaacagactgtaccgggaaaatgactgcatgttcccctcaaggtgtggacactgcaagagacttgcac

SEQ ID NO: 792931 - DNA, 98 bp, Homo sapiens
cccacattcagagacacaagtgcagcagtttggactatgacttgagccagctgcagcagcctgacactgtggagcctgatgccatcaagcctgtggga

SEQ ID NO: 792932 - DNA, 75 bp, Homo sapiens
ggaaaggaagtaccaggacttgcacaggtactaggttttgacaagcttgcatcatgcgtgagtataagctagtcg

SEQ ID NO: 792933 - DNA, 90 bp, Homo sapiens
aacggagataaattcccggaaccgcgattcggcgtgtcagggacttgccatgaggtgttgaagccttgtttcactgagttggagagactg

SEQ ID NO: 792934 - DNA, 75 bp, Homo sapiens
ttcgtgggcacgcgctcctacatggctggaattggctcgggaaaaggtaatgcgagaagttaaagccttagccaa

SEQ ID NO: 792935 - DNA, 114 bp, Homo sapiens
aaggtgttcggtccttccgaggaagctaaggccgcgttggggtgagaccctcacttcatccgattagaagcccaggacccaggaaggagacacaggaaatttattcaaagtccc

SEQ ID NO: 792936 - DNA, 100 bp, Homo sapiens
catgtccgtctgatcacaaaggagtccaggccacgggatcctttcacaaagtatgttgagtctaaaaaggacagagtcacagtagtcttcagcacagtgt

SEQ ID NO: 792937 - DNA, 97 bp, Homo sapiens
cgtgttgagtgaagctcttggggccagcgtgcgtcctgacgcacaggagagagctgaaggtgatgtgtccaatctagatcccaacttctcatttgaa

SEQ ID NO: 792938 - DNA, 132 bp, Homo sapiens
accacggctgccaccagcagcccttctgcaacgcgcccctccctggccctggaccctatcgaatgtgaaagatgttgcagaagtgttccagaagtggctgaagatagaaggaaaaaagtgccactgcctatc

SEQ ID NO: 792939 - DNA, 98 bp, Homo sapiens
caacgagctcaacgccaggcgccgctcctttacagctgcaccacctcgtgagcgatgacgtctgcctgaaggtggtggagctctacctgaacgagaag

SEQ ID NO: 792940 - DNA, 128 bp, Homo sapiens
gggaaggtccgggagctggccagcgccgtccggaacgccaaatacttggtcgtctacacaggcgcgggaatcagcacgaccggtaccgggagtaccagtggatcggactcaacgacaggaccatcgaa

SEQ ID NO: 792941 - DNA, 100 bp, Homo sapiens
catcactggaagcaatgaggacagcttgtgaaggcgctaaggcacatatactcaggggtcctcataaacaggtctctaattaacagaagatggcaaagcc

SEQ ID NO: 792942 - DNA, 83 bp, Homo sapiens
ttaagtagctacaggggaaaatattctgaggttgctcggcgctggggcatccagaagaaccggccagccatgaactatgacaa

SEQ ID NO: 792943 - DNA, 100 bp, Homo sapiens
ttagcaaaggcttcaggaaatacccttgttagaatcaacttatcagagcaaacggttacacgcatggggagatactctggaggaagcatttgagcaatgt

SEQ ID NO: 792944 - DNA, 90 bp, Homo sapiens
gtcgggcgccagctgcatggtgcagatcatgcgaaaatccaaagcagctgatgagaagagacgctccttggctaaacaagcacgagaaga

SEQ ID NO: 792945 - DNA, 50 bp, Homo sapiens
gtggactgcagtgctgcagtgccagcacttttccagccattaactccagg

SEQ ID NO: 792946 - DNA, 100 bp, Homo sapiens
ctggaggccatccggctgcgggaggaggccatcctgcagatggagcaattctgtggtgttcttggtcacacatttatggagtttctgaagggcagtggag

SEQ ID NO: 792947 - DNA, 105 bp, Homo sapiens
attcattcagtggtgttaaggattccaacaacaattccgatggcaaagccgttgccaagacctgcctagagctggaacgttacctccagagcgagccctgctatg

SEQ ID NO: 792948 - DNA, 83 bp, Homo sapiens
cggctgcggtttaacccgcggtggcggcggcgacggcggccctggcaggctctccgtgtgaaatggtcccatctcagactgcc

SEQ ID NO: 792949 - DNA, 100 bp, Homo sapiens
cttttcagaaaatcagccatttccttctcttaagatggaacaggagtacagctgtgtagtaaagatgccttctggtgaatttgcacgtatatgccgagat

SEQ ID NO: 792950 - DNA, 76 bp, Homo sapiens
agttataaggactcagcatcatgtagaagcacttgtggagcatcagaatggcaagctgtggtgcacgtaccatgag

SEQ ID NO: 792951 - DNA, 111 bp, Homo sapiens
atcagatcgatctaagatggcgactgtcgaaccgagtcaagtaaagaacagtttgccagtacaaacattgctgaagagctagtaaaactcttcaagaaacaaatagaacat

SEQ ID NO: 792952 - DNA, 75 bp, Homo sapiens
tttatgagagcgaccgtgatggggccattgaagacatcatcacaggcccagaggcacatcagtgacctgtatgaa

SEQ ID NO: 792953 - DNA, 82 bp, Homo sapiens
gctgctgctggtttggggactggacccgggcacagacaatgcagatcttcgtgaagactctgactggtaagaccatcaccct

SEQ ID NO: 792954 - DNA, 100 bp, Homo sapiens
gctagaagcagagacaccaggacagaaaagacagtgttctgctttcatggagttcacagaagagtcgaggagtttacagaagcacttgcagaactcatca

SEQ ID NO: 792955 - DNA, 75 bp, Homo sapiens
agaggaaaagaaaacagcaacacagttacatagtaaaaggaggcctaaatgacattcctgaaagctcactcttct

SEQ ID NO: 792956 - DNA, 100 bp, Homo sapiens
gcggaaaatagcctttgccatcactgccattaagatcgccacatcacagaatcgtatctatctcacagctgacaaccttgtgctgaacctacaggatgaa

SEQ ID NO: 792957 - DNA, 90 bp, Homo sapiens
gtccgtggccttcgcgtctgcccggccaagaggcaaaggggaggttacgcagcaaaccatccagaagctgtcgcctggttgggcccggaa

SEQ ID NO: 792958 - DNA, 100 bp, Homo sapiens
cttagccaatcacaacgccaatctagaatactctgcgccacctggtttccatcgggcctatagttccccactctacagcaaccagcagtacgcttgtgtc

SEQ ID NO: 792959 - DNA, 82 bp, Homo sapiens
gatcccgccccgcccggagccccggcccccacagatcttcgtgaagactctgactggtaagaccatcaccctcgaggttgag

SEQ ID NO: 792960 - DNA, 75 bp, Homo sapiens
gatctacagaaattcctgcaagattgtcaagaggaagtcctggctgagcaaggttggaagccctagttctcgcat

SEQ ID NO: 792961 - DNA, 50 bp, Homo sapiens
cttctgggccctacgcgcggcttgcgcggaaccctactctggaaactgtc

SEQ ID NO: 792962 - DNA, 80 bp, Homo sapiens
cgaacgggttgcttcccccgctgcgaggaggcaggtggaagtcatcataaagtttctgtttcacccgtcgtccatgttcg

SEQ ID NO: 792963 - DNA, 97 bp, Homo sapiens
ctggagacatggaccgcggcgagcaagctctgcctgcagttgaacacaaagacctggaggagactcccacctccttcagggagaagaaaggaggcag

SEQ ID NO: 792964 - DNA, 118 bp, Homo sapiens
cgactccgtcgcagactacggacctgtctgggtctcagccgccaaagaccccgtccggtagacaatgcagatcttcgtgaagactctgactggtaagaccatcaccctcgaggttgag

SEQ ID NO: 792965 - DNA, 101 bp, Homo sapiens
ccccagcagcccccgaaggccctatcaggacatggagtatgaaagacgagctacagagacttctgaagtggagagtctgcgacctcctcggttcttcaatg

SEQ ID NO: 792966 - DNA, 74 bp, Homo sapiens
cggctcgcggggcccggcgaagggcaggttttaaaatcaaagatgggaaaatcggagaaaattgcccttcccca

SEQ ID NO: 792967 - DNA, 100 bp, Homo sapiens
tgaaaccactcaagagtcataggattagatgatccaagtcaccaagaaattactgtctcaagtgatacggacagccagtagaggtgacttcatgttttct

SEQ ID NO: 792968 - DNA, 101 bp, Homo sapiens
ggaggagcggctgctgctgctgctgctgctgctggtggcccctttgcaggtccagacatcatctggtctccctgaacctgaaatcacaccatggatgattt

SEQ ID NO: 792969 - DNA, 50 bp, Homo sapiens
ttacttggaagaatataaattccagtctctagtgatccctgaaaagttcc

SEQ ID NO: 792970 - DNA, 96 bp, Homo sapiens
gggtgaagtggcaggaggaggaggaggggctccggctggtctgtggtgagggtagaagagcagaggatggctctgtcattgattatgaactgattg

SEQ ID NO: 792971 - DNA, 74 bp, Homo sapiens
ctcagaagggtgcaagaagaatcagtggtttcgtttataatgtcagcccttatatggagtatcatcctggtgga

SEQ ID NO: 792972 - DNA, 75 bp, Homo sapiens
ggagaatggatgagcctaagcaacccagctcccagtctgtaggtatattgttagagccatgcagtgaccgtggtg

SEQ ID NO: 792973 - DNA, 75 bp, Homo sapiens
ggatccttccgcacactgaagagtacgtcttcgggtctacccctaatcaccaatgagtattacccagcagatctg

SEQ ID NO: 792974 - DNA, 82 bp, Homo sapiens
acctccaaggatgcccgtgagcctgttgtcggggccagactgcctctgtcaccgggtccctccacccttgtctcctgtgcgg

SEQ ID NO: 792975 - DNA, 74 bp, Homo sapiens
caagatcgacgaactgcgcctcttcccgccggagctgctgatactttggctgtgaggcaaaaaaggagaattta

SEQ ID NO: 792976 - DNA, 95 bp, Homo sapiens
gggacgggtcccgcggcgagcgagctcctgagggaaggtatcaactctacactgcaaagcagacaatattaggcagcagtgtgtactatttctcc

SEQ ID NO: 792977 - DNA, 99 bp, Homo sapiens
gtgaggctcagaggtgcttgtaccgtgatgtgatgctagagaacctggctctcatatcctcgctgggcagaatccagagaccacatttgaagtatatgt

SEQ ID NO: 792978 - DNA, 75 bp, Homo sapiens
ctttgttgattaactggacaaattcagtttgccagggtttggatacctgatccagaggaagtctggaagtcagca

SEQ ID NO: 792979 - DNA, 100 bp, Homo sapiens
atggccgagaaccccagcttggagaaccaccgcatcaagagcttcaagaacaagggccgcgatgtggaagtgaatccgccatactacatcccgctggttg

SEQ ID NO: 792980 - DNA, 90 bp, Homo sapiens
ggacccttggagccatcctctacaggacccgctttctaccattaagaaactccaagaggaggaggaggagagcaacaccagcaaagtgcc

SEQ ID NO: 792981 - DNA, 83 bp, Homo sapiens
ctcaaggccatgatcaaaacgatggataaggtgggggatgccctggaggaagtgctcagcaaagccctgagtcagcgcacgat

SEQ ID NO: 792982 - DNA, 76 bp, Homo sapiens
gcttatcctgtgggggccgccgggctgcggcaagaatcttatggcaagggccttatatgacaatgtcccagagtgt

SEQ ID NO: 792983 - DNA, 82 bp, Homo sapiens
cggaagcgctggagcttgagagacaatgcagatcttcgtgaagactctgactggtaagaccatcaccctcgaggttgagccc

SEQ ID NO: 792984 - DNA, 74 bp, Homo sapiens
gtccccggcacgcaccatctgttgccatcccggccggccgaggccattgcaggaatcagagatcattgatttct

SEQ ID NO: 792985 - DNA, 82 bp, Homo sapiens
caagaaggcagacacaagagacagcagacaagcctgcctggcgccaaatcttaaaggcagaccacgcaaaaagaaaccatgc

SEQ ID NO: 792986 - DNA, 50 bp, Homo sapiens
caggacatggagtatgaaagacggtaacacaagtggcaagacagccggga

SEQ ID NO: 792987 - DNA, 75 bp, Homo sapiens
ttcccggcccttctacaagagcttagaccgagtcctggaagcccacctgcggctgggctgagggcaaccttgccc

SEQ ID NO: 792988 - DNA, 100 bp, Homo sapiens
ccctgcatgtgattggttccctagctgagattttactgaaggttcaaaccttgtactactcagctgatcacaagctgcttgatgggaacctactagatgg

SEQ ID NO: 792989 - DNA, 75 bp, Homo sapiens
agcgcgtccaggcctgacagctctgcggctcgggccctgagaaatgagccgtcagactgctacagcattacctac

SEQ ID NO: 792990 - DNA, 75 bp, Homo sapiens
gctcaagttgctactcgggacgctgcacctcccgcgccgcacggtggacgagttgtggaagctgatcgaggaagc

SEQ ID NO: 792991 - DNA, 82 bp, Homo sapiens
actgggagcacatattcttggaccactataatgatccagccttttatgaagaatgcaaaatggaatacctgaaggaaaggga

SEQ ID NO: 792992 - DNA, 90 bp, Homo sapiens
gggagagcaagaccatcatgctgcgcggccttcccatcaccatcacagagagcgatgaacccttctctgaagcaacagctcttctcctac

SEQ ID NO: 792993 - DNA, 89 bp, Homo sapiens
gaaacaccatggctgcggcggcccagctctctctgacacagaactgataaatttcaaacggaagagagtggcagcatttagaaagaatc

SEQ ID NO: 792994 - DNA, 100 bp, Homo sapiens
aggatatcgacgtcgtgatccagaagtccagagctgaggactgcctgtttgcagatgctattaactgagtacttggatatgaaaaatactcgtacggcct

SEQ ID NO: 792995 - DNA, 74 bp, Homo sapiens
gcctcggtgaccaggagactcggcgcaaggcccgagggctacttctacaagtccgaacagccagtccagcaaaa

SEQ ID NO: 792996 - DNA, 100 bp, Homo sapiens
cagggtcgggggacacgcaggatgagccccgcgaccactggcacattcttgctgacaggaaaatgtctaatcaacaggagaagtatgaagctcagaatat

SEQ ID NO: 792997 - DNA, 87 bp, Homo sapiens
caatagaagctgtggatgaatttgcttttctggaaggaaataatgcaaaaggtgtcccaaggctcctgaccagtgaacaaagatttg

SEQ ID NO: 792998 - DNA, 98 bp, Homo sapiens
ctggaaatgacacctctgggcttgagaataagactgttgttgtcaccacaattttggtactactgagcgagtgtgcttgatccagggaacggttgaag

SEQ ID NO: 792999 - DNA, 75 bp, Homo sapiens
gacaacagtgatgaggaaagctgtgaaagttctcaaggagccaaaaacctgtatatcatctccgtgaaggggatc

SEQ ID NO: 793000 - DNA, 90 bp, Homo sapiens
tcccgcccttcccatgcactcttcctgtttccctttccagttctcacggtgactcaagggtgtcaaattgagaaccaggtagatccccac

SEQ ID NO: 793001 - DNA, 98 bp, Homo sapiens
ccatgggggacgaggacgacgatgagagctgcgccgtggagctgcggatcacagaaggacctgaaggagaagaaggagaaggtggaggagaaggcaag

SEQ ID NO: 793002 - DNA, 74 bp, Homo sapiens
gagcgcctcagtcttccacccaatagtcattcttatagaagagcatcagaggaagataaaaaagaatcctcaat

SEQ ID NO: 793003 - DNA, 83 bp, Homo sapiens
cgcgggtcgcgtcgttgtcctccgcgagcgtccggattgcagtaagactttgaccccgacgcaggcttcagtgattgccgcgg

SEQ ID NO: 793004 - DNA, 82 bp, Homo sapiens
ccagtggatatatttttggtttcttacatgaaaaatcaaaatggtacatttaaggttttaaaatcaaagatgggaaaatcgg

SEQ ID NO: 793005 - DNA, 87 bp, Homo sapiens
tctctctgctgcggcgcggggaccgctgtgctctcgaaggaaggggagttcaccctgcacggccgggccatcctggagatggagcaa

SEQ ID NO: 793006 - DNA, 83 bp, Homo sapiens
caagtatgtggagtgttctgcacttacacagataacgaaggaggcccaacttcattcaataaggagcctgacggatttatccc

SEQ ID NO: 793007 - DNA, 97 bp, Homo sapiens
ttcaaatcctagcactctgggagaggtgctggagatcagaatttatttacctctgtttatccaacgctctctcagcagcttccaagagaaccaatgg

SEQ ID NO: 793008 - DNA, 75 bp, Homo sapiens
ccgggatctcaggtcctcgggggcggcggccacgccaaggacgggaaacctcgacctgtctcccagttggttgca

SEQ ID NO: 793009 - DNA, 100 bp, Homo sapiens
ccaggctaggtgcctgcaggttgaagaactgagctctatctggacggcggctccctggaccaggtgctgaaagaggccaagaggattcccgaggagatcc

SEQ ID NO: 793010 - DNA, 100 bp, Homo sapiens
gggggaagtggcggcgccggcagcggacagctcggacagcgcccagggccggagcccgagcccttggagccacatccatcctgaagcggcagaagcagct

SEQ ID NO: 793011 - DNA, 100 bp, Homo sapiens
aaatcttggatactgcaggaacggttcaccggaacagcacaatccgccctggctgtgatgtgaatccctcctgcgcactgtgtggttcaggcagcatcaa

SEQ ID NO: 793012 - DNA, 100 bp, Homo sapiens
acaaagacagatgtatggctgacaagacgctcccagagtgttcaaaattacctctcgatgaacttcgggatgaagggaaggcttcgtctgccaaacagag

SEQ ID NO: 793013 - DNA, 75 bp, Homo sapiens
cccgccgccctcgcaacctggcagccgccgccgtggaagattggccctgtgtactcctctgtctcgtctgaagca

SEQ ID NO: 793014 - DNA, 50 bp, Homo sapiens
catcaatggcaggaggtttcctgttgaggctcctcctcagccatcctggc

SEQ ID NO: 793015 - DNA, 75 bp, Homo sapiens
attcctgaagacaatttcttcttccaaaatcctcggattctctacttctgctgtgcacgttcatcgggaaccagg

SEQ ID NO: 793016 - DNA, 75 bp, Homo sapiens
caatgtttgaacaaactcgaagaacagctgtggaaagaagttgcaaaacactggcattatagccttcagaaaggc

SEQ ID NO: 793017 - DNA, 90 bp, Homo sapiens
ggggcggtgggcagggccaggtgcgcaggggagaaacaaggcgccttggagttcagcttcggaaccaaaaagaagcttcccagagccggg

SEQ ID NO: 793018 - DNA, 99 bp, Homo sapiens
gagaacagctctgcgcggctttttgagcggtcccgcatcaaggctctggcaggtattcaaaacctttgaccacatggcccgtcaggatgatgagaagag

SEQ ID NO: 793019 - DNA, 96 bp, Homo sapiens
gcgacgagcaggtggcggcggctgcaggtgacctgccgagccattgggattggggcctacttggtgaggctgggccagcgagtgatccaggtggag

SEQ ID NO: 793020 - DNA, 128 bp, Homo sapiens
ccgaggttggaacacctggcgagtcctcggtgtcggtggccggcagtcatctcgcggccgttcaggagagtgggcgctccctttctcttcctggaagatcagtcccaccccccatttctacatctcct

SEQ ID NO: 793021 - DNA, 49 bp, Homo sapiens
cggacattcagcaagattttaaagccatctctgtcctggagatggagaa

SEQ ID NO: 793022 - DNA, 90 bp, Homo sapiens
gcggcggccgcgccatgtggctgctggggccgctgtgcctgctgctgagcagcgccgcggatgaggacggggacttggttgccttttcca

SEQ ID NO: 793023 - DNA, 98 bp, Homo sapiens
ttatagctaagactccaggacacccctgaagccgagaaatggtctgccatcatggatgttctcgcagaagcaaatggcacctttgccttaaacctttt

SEQ ID NO: 793024 - DNA, 90 bp, Homo sapiens
caagcacgtgacggtcatcggcggcgggctgatgggcgccggcattgcccagtcaaataaagtgcccgtggtgcagccatcccatgcggt

SEQ ID NO: 793025 - DNA, 100 bp, Homo sapiens
tggcaacagttttcttcagcgcccaggatgcagccggctaagatcacacacccagctggctgcatgtctcagtttataaagttctttggagaacagatcc

SEQ ID NO: 793026 - DNA, 96 bp, Homo sapiens
gaaaaattgtccatcttgtcgtcttcggaaatgttatgaagcagggatgactctgggaggtttgcaggaatcaaagatgtgtgagttcttcatact

SEQ ID NO: 793027 - DNA, 145 bp, Homo sapiens
ggcgcctttctcattattataggctccctcctgctgtcaggctacatcagcaaaggggtcttgactccactaacggggacttctcatacggctttgaacttggaccttggtgcataagcaaatgtaactcagcgaattgtaatgg

SEQ ID NO: 793028 - DNA, 100 bp, Homo sapiens
gcccagggctggccgcgctcctgggacgcctgtccgaccgcctcggcaggaaccgggaccgccagcgcaggagtggagaccatcctgggcctcacaggag

SEQ ID NO: 793029 - DNA, 100 bp, Homo sapiens
tttttgggctgtgttgacatcaaggatctaccaggcgatgacaacctatgcaacactccccatttacctccttgttctccaccaaagcaaggcaagaaag

SEQ ID NO: 793030 - DNA, 90 bp, Homo sapiens
cggtgcgccagaagaagcggatggacagcaggccccgcgccggatgataatccagatgtcctggattccagaatagaaacagcacaaagg

SEQ ID NO: 793031 - DNA, 98 bp, Homo sapiens
cgggaacacggactgggcaaggcggttggtgttcgaggaagagacattgttgttcttggtgtggagaagaagtcagtggccaaactgcaggatgaaag

SEQ ID NO: 793032 - DNA, 98 bp, Homo sapiens
acttccccaccggaggtttatcacaagggagtaccctgacttctaccggaagctctacggcctcttggacccctctgtctttcacgtcaagtaccgcg

SEQ ID NO: 793033 - DNA, 100 bp, Homo sapiens
gtggatccgggccaagtacgagcgacaggagttcatctacccggagaagcaggagccctactcggcagtgacatattcgatgccatgttccctgtcactc

SEQ ID NO: 793034 - DNA, 100 bp, Homo sapiens
ctttttttcataagagagaccatattaaacttacatgattaacctccatttcagctaatcatgggagagattaaagtctctcctgattataactggttta

SEQ ID NO: 793035 - DNA, 100 bp, Homo sapiens
agagattgagaatgtccatggatttgtttctcattctcatatttcaccaataaaggatgactcactggttgtgtggaaggaagtcgatttgacccggctg

SEQ ID NO: 793036 - DNA, 82 bp, Homo sapiens
cacacaccctcgtattctcctgcccttccccaggtccttctatatgatccactctttgactggaccatgaatcctttgaaag

SEQ ID NO: 793037 - DNA, 75 bp, Homo sapiens
ggagacgtatgcggaggttgggaaggagggcaaggcgttggagaccagggccagccctggccacaccccaggctg

SEQ ID NO: 793038 - DNA, 75 bp, Homo sapiens
aaagggaaggagcaagccgtggaattgaatgatctggcacgggaccctccagcacagtgttcagcaggtcctgtt

SEQ ID NO: 793039 - DNA, 100 bp, Homo sapiens
cgagccttcagcagaggcggcagcctggagagtcgaagcagcagctctcgctccagaagcttcactttgggtgatgacaactccgtgagggtggagatta

SEQ ID NO: 793040 - DNA, 76 bp, Homo sapiens
ctgataggctgcgctaccggaatgtcatccagcgagtgattagatattttccagcagatgccaccgctgagatgct

SEQ ID NO: 793041 - DNA, 75 bp, Homo sapiens
gagtcctggtgactttgaacatgctggtgccgctagccaagctgtcctgcctggagattaaaagctgctttgacc

SEQ ID NO: 793042 - DNA, 51 bp, Homo sapiens
tggaactttctatgaatttggagaagagttgtagatcttatggctctgaca

SEQ ID NO: 793043 - DNA, 75 bp, Homo sapiens
gcctcgcctcagcacccggcccaggcatcatgacggtgatgtcagctctgtcggtggccccctccaaggcccgcg

SEQ ID NO: 793044 - DNA, 100 bp, Homo sapiens
acaagaaaagctgcacttgaggcccagaatgcactgcacaatattaaaactttacctgggttgctgattgttggaggttcttttggtcttcgtgagtttt

SEQ ID NO: 793045 - DNA, 95 bp, Homo sapiens
gtatagagatgtgatgttggagaactacagaaacctggtctccctagatataaagatgaagcgcagctgtataaagaagagcacctgaggaatcg

SEQ ID NO: 793046 - DNA, 51 bp, Homo sapiens
ccaggacatggacacctgtgagggcttgaactgcatagacctaatctattg

SEQ ID NO: 793047 - DNA, 82 bp, Homo sapiens
ctgctggtggcggtggccgcgctgctactgggcgccgcgggccacctgtaccccggagaggacaaagatcattccactcagc

SEQ ID NO: 793048 - DNA, 98 bp, Homo sapiens
aagatttcgtcataagaccgcgaccagacaggcggcgccatcttcgaacttagacttccggaaggactttggcgagggatcgacgagaacgtgctagg

SEQ ID NO: 793049 - DNA, 75 bp, Homo sapiens
gccctgtgtgacaccaagataagtaacgtaatgctatgggctatgtacgaatgataagatctggtggtcttcatt

SEQ ID NO: 793050 - DNA, 96 bp, Homo sapiens
cccactggcttccgcaagatcagcagccacgcctgtgcccagaaccattactgggacttccacccccaccacgtgcacagcgagttcgagagcttc

SEQ ID NO: 793051 - DNA, 101 bp, Homo sapiens
ctacgtcgtcataccgggcttccttgccctgtccgggctatgacagagactccactttcaatgtgtttgtgggaaaaggacagctgatcacagggatggac

SEQ ID NO: 793052 - DNA, 100 bp, Homo sapiens
aaaaagaagaaaatgaaggaaagcgaggctgacagcgagtttggcctcagccagtttccttccaaaatacttcagttccaagtggagtttctccaagttt

SEQ ID NO: 793053 - DNA, 98 bp, Homo sapiens
catcagtgcaaaactcctattatccaccgggacctgaagtatggaaatttcatcgataagctaagactcttcaccaggggaggatccggtggaatggg

SEQ ID NO: 793054 - DNA, 100 bp, Homo sapiens
gatgaaatccaaaggtgaatcttttggttggtgattttgatgatagccacaaagcaagcagggtgtcatggagaaactccagctgggcccagagattctg

SEQ ID NO: 793055 - DNA, 75 bp, Homo sapiens
gatccagcctgcggagcctgtggggcagcttcaaggttactgactttttatgatgtttggtggctatgagactat

SEQ ID NO: 793056 - DNA, 96 bp, Homo sapiens
gtacaagatccttgatgtcatgctcaaggggctctttaagctcaaactggaggattataaggatcgcctgaaaagtggagagcatcttaatccaga

SEQ ID NO: 793057 - DNA, 100 bp, Homo sapiens
ctgccagcaacatggcactgggcaagttccgggccgcgctgcgagactacgagacgtgttttcaggtccagggccaggaaccccagagccgggtgaagtg

SEQ ID NO: 793058 - DNA, 82 bp, Homo sapiens
cctgcctttccttccccctcggaaaatggttcccactgccgggcgaggtggcttcagtaagttccaagccgagttctccctg

SEQ ID NO: 793059 - DNA, 96 bp, Homo sapiens
agatgacatgccagcccagactttcataattaaatgtgagggagtctgacgtaagagtttgtgatgagtcatcatgtaaatatggaggagtctgta

SEQ ID NO: 793060 - DNA, 100 bp, Homo sapiens
acagcaaagcctggaagcttgacgcgcacctgtgcaagcacacgggggagttaatacacgaggaactcatgcaaaggaggggactttcggaaatccaaac

SEQ ID NO: 793061 - DNA, 100 bp, Homo sapiens
aaaatctccctgctccgcagcgacatcaccaagctggaggtggacgccatcgtcaacgccgagcactgtcatccgtggtggccctgggagccaacatcat

SEQ ID NO: 793062 - DNA, 96 bp, Homo sapiens
aaacatctaactagaagggatacccttccatttcaaagaacagaatgctaaggaagctgtggcaagacccagatgatgtggtaccagttggccaaa

SEQ ID NO: 793063 - DNA, 75 bp, Homo sapiens
gtacagcaatggctgaggaattgaatgctgtcattgtttccattgaagctccactggttcaacagcctctcctcc

SEQ ID NO: 793064 - DNA, 90 bp, Homo sapiens
gaaaagagtaccctgtgcttatgacaagactgccttggcattagagggatgatgcagtgtgtgattgcagtcgcggacaaagtattcgat

SEQ ID NO: 793065 - DNA, 49 bp, Homo sapiens
gctgggggtcataatattggaaggcacaacaaggcaatagcatttaaaa

SEQ ID NO: 793066 - DNA, 74 bp, Homo sapiens
agggacccggtgacagcgtgagaggttgtttacattcagagctctatcaataagaggaatacatattacagtga

SEQ ID NO: 793067 - DNA, 101 bp, Homo sapiens
agtggttcctggatgttcctggatgcctgacatcacattgatacatgctggaggtctggctcaggagtatctaactatcaagttgaagaagatataggaaa

SEQ ID NO: 793068 - DNA, 77 bp, Homo sapiens
aagaccgaagcgttcgtatctggaagttggagtgcttagtgcagttggtgagagcgggagccacactcaacgtctcc

SEQ ID NO: 793069 - DNA, 75 bp, Homo sapiens
ctggaactgttggagccgcagtgcagcctaattttgacttcagatgcttgctctgtcaaggcacagcctattgtc

SEQ ID NO: 793070 - DNA, 100 bp, Homo sapiens
tttaaatctgcacatgaaacgttttgtcaaagacctggttacggacgagtttatgctgccgacccctaccaccacgcacttgctccagcccccacctacg

SEQ ID NO: 793071 - DNA, 73 bp, Homo sapiens
tgacatggaggatgatttcatgtgcgatgatgaggaggactacgacctggaattgtggtgcttggaataaaca

SEQ ID NO: 793072 - DNA, 75 bp, Homo sapiens
ctggagaagctgggattggagattccacccaaacttgctggtcactgggaggtgtcagcacagcgggctactcct

SEQ ID NO: 793073 - DNA, 99 bp, Homo sapiens
agagttggatcaacccagagctattgccttagatccttcaagtggtgattcgcctttgccagtctcatctcgtgtctgctttgttaagttccatgatcc

SEQ ID NO: 793074 - DNA, 75 bp, Homo sapiens
atatgaggatggttcatatacttacatcagttgttgataccgaagtgtataaagctacagtaaaagatgacctca

SEQ ID NO: 793075 - DNA, 100 bp, Homo sapiens
cgtactgggacgttggggagggggctgtgccgggcggagagaactcagcgaggattctgagtcactcagcctctgaagaagcttcgggttcagactcagg

SEQ ID NO: 793076 - DNA, 82 bp, Homo sapiens
attcggtggaacgaggacgcggactgcgaaggcagaacaagttgaaatcatcgcagaaggataaagttcgtcagtttatgat

SEQ ID NO: 793077 - DNA, 51 bp, Homo sapiens
catcaccactggagatggcactgggggccctgaaagccattatcgccatgg

SEQ ID NO: 793078 - DNA, 89 bp, Homo sapiens
ttccctccgtgagcgctggcctgggggaaccaaggccccctgatgttgagctgtctgacagcaaagatgcttttaagaagacgtggaac

SEQ ID NO: 793079 - DNA, 100 bp, Homo sapiens
gaaaaatatccagcaaaaccgctgctaaattgtcaactagtgctaaaagttaataacgacatgatagtcactgacaacaacggtgcagtcaagtttccac

SEQ ID NO: 793080 - DNA, 100 bp, Homo sapiens
agtgataattttaagcatttaaatgaaattgatctttttcactgtattgatccaaatgccctgtctctgcccctggtggtcatcgtccatggcaaccaag

SEQ ID NO: 793081 - DNA, 98 bp, Homo sapiens
ctgccttccgggttcgagtaattctcctgcctcagcctcccaagcagctgggtctacaggtaaatgaaattgcctttataaatacccttgaagcccag

SEQ ID NO: 793082 - DNA, 75 bp, Homo sapiens
tccaaaaccacaaacttgcctacgtcagtaacagccaccaaggtgttggctgaactcaacgccatgcttggggca

SEQ ID NO: 793083 - DNA, 81 bp, Homo sapiens
aagtggagagtgacatgcagttggatggcggtgactgcgtgagagaagaagaaggaggttcctgctgtgccagaaaccctt

SEQ ID NO: 793084 - DNA, 100 bp, Homo sapiens
cagaacgtggcttatgagtacctttgtcatttggaagaagcgaagaggaactagaacagtctttggctagctggactcagaacttgaaagaacttcaaac

SEQ ID NO: 793085 - DNA, 101 bp, Homo sapiens
tcaggacggaacccccagaaacaggcccggacctcctcctctaccacccccaatcgaaagatgtctttggtggacttgggaaagaggttgctagaagcagc

SEQ ID NO: 793086 - DNA, 74 bp, Homo sapiens
ggattccaagtaactcttatttgagtaatcaagtcagaggattatatgacttttatctgcctagagaagaacta

SEQ ID NO: 793087 - DNA, 50 bp, Homo sapiens
agggacaatggtcaccgtctcttcagagccactgacaagactttaagcaa

SEQ ID NO: 793088 - DNA, 98 bp, Homo sapiens
atgcaccattggctcctgtttgaaatgagcaggcactccttggagcaaaagcccactgacgctccaccgaaagagtttgtacaaatgatgacagcaaa

SEQ ID NO: 793089 - DNA, 100 bp, Homo sapiens
gtccggctagtacgcgaattggagaaaaagttcagtgggaagcatgtcgtctttatcgctcagcctgagaagccaggccccggcagcaaggaccccaagg

SEQ ID NO: 793090 - DNA, 101 bp, Homo sapiens
ccgaagcctcctctgtggcgctcagcaactgcgatgggctggtctcctctgagcctccggcctccataagacccaaaacagatgacacctcttcccagtcc

SEQ ID NO: 793091 - DNA, 100 bp, Homo sapiens
cgagaagagccccagcatggagccctcggccgccacgccgttccgggtcacggctactgcagcactggggtgtcagttgttggtccgacccagaacgctt

SEQ ID NO: 793092 - DNA, 83 bp, Homo sapiens
cggtggagatcggagaaacgtacctgtgccggcgaccggatagcacctggcctctctgatgtaaaggatggagtaaatcaagc

SEQ ID NO: 793093 - DNA, 82 bp, Homo sapiens
gcggaggcagagaagggaacgcccggcccagcccccttccatgaggcaggctgaacctgcagatatgcgcccagagatatgg

SEQ ID NO: 793094 - DNA, 115 bp, Homo sapiens
caaaatccaaaagatattcacaccctggcacagcttatttctgcttactcacttgtagatccagagaaagccaaagcgaagctgagctgaacacattacgatggatgatggaaac

SEQ ID NO: 793095 - DNA, 142 bp, Homo sapiens
agggaacggacagcccgacctcttaggcgccgggaccctcaggctcagatcagtggccgaggccccagagcccctttgatgccaagaatccgttcctggctgcagtcaccaccaaccggaagctgaaccagggaaccgagcg

SEQ ID NO: 793096 - DNA, 103 bp, Homo sapiens
agacccagggcatttggtggacacttttgcttgcagttaggtcaagtggaggtactccaaagattcaggtttactcacgtcatccagcagagaatggaaagtc

SEQ ID NO: 793097 - DNA, 97 bp, Homo sapiens
ctgcccctctggcagccgccgggcctcccctccagggacgcccacaccaggaggccactgtctgcagctcccgtgaagatgtccactccagacccac

SEQ ID NO: 793098 - DNA, 99 bp, Homo sapiens
taggctgggtcactgggactggaggaggaattagcttgaagcatggacacttgaatattgcaaaggaaggttttactcaagctagtttaggccttcttg

SEQ ID NO: 793099 - DNA, 80 bp, Homo sapiens
tgcgggggggaagtgactgggcggtgccggcgccggagacgatgccgttagctggaagtcgagtgtgctactcaactcag

SEQ ID NO: 793100 - DNA, 98 bp, Homo sapiens
tgggcaagtcggcgctcaccatccagttcatccaggctccccttccctgcgggcatatccgctcctctcggtgatcacccgccagcccactgtcatct

SEQ ID NO: 793101 - DNA, 83 bp, Homo sapiens
ttctctatctgcgcaccttggagtccaagcttgtgctctttggtgagaagccctaccactgcaactgggacggctgcggctgg

SEQ ID NO: 793102 - DNA, 98 bp, Homo sapiens
tcccacaggaagtgtcacacagcagtcaagtatgtcccaaacgtctggccccacggggctgcccggagatctagggcccccaggagaccctggagttt

SEQ ID NO: 793103 - DNA, 98 bp, Homo sapiens
ggcggcggcggcggccgcggcggcgaatctgaatgcggtgcgggagaccatggacgaatagctctccagacccccagctggccatgtggtgagttcag

SEQ ID NO: 793104 - DNA, 100 bp, Homo sapiens
ggggccgccgggccctcttcgacagctacacaaatctggaacgggtggccgattactgcgagaacaactacatacagacaaatttacatgtattggagac

SEQ ID NO: 793105 - DNA, 75 bp, Homo sapiens
acgacggccccagggaggatgacgaacccaacctggtgcccggcccgcaggaaaactcaatgtgagtagtgacac

SEQ ID NO: 793106 - DNA, 49 bp, Homo sapiens
gataaagaacttcttcccaaaatggggtccacatatagcctcagttaca

SEQ ID NO: 793107 - DNA, 100 bp, Homo sapiens
tcctgtaagaccagaattgcaaggccaggtccggaccctatttgtcagtggccttcctctggatatcaaacctcgggagctctatctgcttttcagacca

SEQ ID NO: 793108 - DNA, 75 bp, Homo sapiens
gcgcgaaggaaatctggccgccgccgccgcgagcgctcccggtcctgaacgaggctgtgggggccctgatgtacc

SEQ ID NO: 793109 - DNA, 50 bp, Homo sapiens
ccgcgggcgcccgaggggccgagcgagggccaattcctgtccccccagca

SEQ ID NO: 793110 - DNA, 75 bp, Homo sapiens
ccgcgttggcctcgccgcccctgctcgggaactttatattgctgttggaatatctggagccatccaacatttagc

SEQ ID NO: 793111 - DNA, 100 bp, Homo sapiens
ggtctagatgtaaatgtcagtggaaaggagagctaccatcactaagtcgccctttttcttccaaatggtctacagcaaatccatcaactgtggctggaag

SEQ ID NO: 793112 - DNA, 51 bp, Homo sapiens
ctcccattgcccttgcttcaggacagagaaagaaatttcagagcttccaag

SEQ ID NO: 793113 - DNA, 139 bp, Homo sapiens
ctggaaccgtgttggtggattttgttcctgaaaatcaccagttccgtgctccattatgtcgtgtgcttccccggagtcagccagcctgaaagagcaggatggatcttgatgtggttaacatgtttgtgattgcgggcgg

SEQ ID NO: 793114 - DNA, 75 bp, Homo sapiens
atttggaatgtacttgttttgtgggtgtgctgagaggatcggcaacatggcaagtttcaggtttagctgtgcctc

SEQ ID NO: 793115 - DNA, 89 bp, Homo sapiens
gtcccacttcaaacattcgtctcggaaaccccgcctcttacagtcacgaggggatgatgctcagttcgagatggacatctgactctcct

SEQ ID NO: 793116 - DNA, 48 bp, Homo sapiens
tcgaattagcaaaggaaacttttgctttaaggaagcctcctatttcag

SEQ ID NO: 793117 - DNA, 85 bp, Homo sapiens
ggatgtttgatgaagcactatgggctgccctggaagaggactgaagaagcagctgcaggataatttcttgagaggagataactcc

SEQ ID NO: 793118 - DNA, 100 bp, Homo sapiens
ctcaagtcagctcattttctttgtgcttttccagtttgcaagttttccacatatggtgctttctcttcatcagaagtggcaagatgtattagatattatt

SEQ ID NO: 793119 - DNA, 111 bp, Homo sapiens
ctcgatgtgaatatatattatgtctgcctgttctcccctcgtcggtggctaagggtacagagaaagcactttcaaaacttcacgagtatttccctgaaatgcagattctag

SEQ ID NO: 793120 - DNA, 96 bp, Homo sapiens
ggcagctggagatgtccgagcccaaggcaattgatcccaagttgtcgacgaccgacagggtggtgaaaggtcatcatcagatttgaaatatttaaa

SEQ ID NO: 793121 - DNA, 126 bp, Homo sapiens
ggaagttggttttccagaaagctgtaatcatgtcttctgtatgacttgtattcttaaatgggcagagagagcagcacttgaggcatgtcacaagggctggggcgtcagcgtcgtggttggagtagc

SEQ ID NO: 793122 - DNA, 75 bp, Homo sapiens
aaatctcccaagaggaatgacaaacaaccagctcttcaggcaggtaaagtgaggaaacatgcaactgaacaggaa

SEQ ID NO: 793123 - DNA, 82 bp, Homo sapiens
cttcgcgagcgtctgggcgggtggtagacacagccgccagcccaaacagcagcggcatgggcagcgccagcccgggtctgag

SEQ ID NO: 793124 - DNA, 82 bp, Homo sapiens
acggattcatttagagctgcggaacaggacgccctctgatggaaatcctcattgacgattcaatttgttgaaggccaatttg

SEQ ID NO: 793125 - DNA, 75 bp, Homo sapiens
aaaaagctccgcaggggctgtagggaggcacacattctggcagttccgccatgagaacccccagacccgggttgg

SEQ ID NO: 793126 - DNA, 82 bp, Homo sapiens
gcccagatgatgcggtggtgggggacctgccggcacgcgactccccccgggcccaaaatgccatggacaatattaccaggca

SEQ ID NO: 793127 - DNA, 100 bp, Homo sapiens
ctcctcggcgggagccctcgcgacgcgcccggcccggagcccccagcgcagcggccgcgcatcaagcttctagctgtgcaagaactgcttgacagagagg

SEQ ID NO: 793128 - DNA, 75 bp, Homo sapiens
ctttgatgagaacactgctctggatgatgcagaagaggagtcctttaggaagaaatacaataatgactggtggat

SEQ ID NO: 793129 - DNA, 100 bp, Homo sapiens
ccatgacgtctcacatccgctacgaggtggacgtctcggccggcaacggcgcagggagcgtacagaggatcctgctgggagagctggcgcgtgccttttt

SEQ ID NO: 793130 - DNA, 97 bp, Homo sapiens
aacgacttgttctctatcgaacaaaagtagagcaaccagcaggcctttttactggagaacgtcccttgtaataatgcaagctgtgaagaggcgcgtc

SEQ ID NO: 793131 - DNA, 75 bp, Homo sapiens
cccagaagtagctgaatgtgttactccattgctgaggagtggtaaaacttccttttcctgtagatcaaatcacag

SEQ ID NO: 793132 - DNA, 93 bp, Homo sapiens
gggggaagtagagagataacaaaagctgctcagagtctcaatgaacttggtgctggagaatctggtaaaagcaccattgtgaagcagatgagg

SEQ ID NO: 793133 - DNA, 90 bp, Homo sapiens
caaaaggccatgctagaagtacataagaccttatttggtggattctgaagagccagtctttgaggctgtcatcaactgggtgaagcatgc

SEQ ID NO: 793134 - DNA, 100 bp, Homo sapiens
gtgggagtcgaagcgagggtctgaagttcacgactactagaaggggaggggagtggaaaggctctcagtgaaaaagacacgttggtcgtcattgcctccg

SEQ ID NO: 793135 - DNA, 50 bp, Homo sapiens
cttggtattccaggtacaaggaagatacgtaggtaacctttccagagatg

SEQ ID NO: 793136 - DNA, 100 bp, Homo sapiens
gaccgggatccccaccggctcaactcgcatctcaagctgggcttcgctgacttgaacctggccgagtttgcgggctcgggctccacggtgcgctgctgcc

SEQ ID NO: 793137 - DNA, 97 bp, Homo sapiens
ccgagtgcctccggatgctagactctggggccgattatctgcacctggacgaatagccaggccagaagaaggaaggcctgtggtgagtgggacagga

SEQ ID NO: 793138 - DNA, 75 bp, Homo sapiens
ggaagcttgtggcgctgaaaacgaacggttgtaaacatgttaaaggcatcctgttatatggacccccaggttgtg

SEQ ID NO: 793139 - DNA, 50 bp, Homo sapiens
catagtcaactgcgtggaagagaagatctaagctggaaccagaaccaaat

SEQ ID NO: 793140 - DNA, 83 bp, Homo sapiens
ccacctcagcccagcaattcggacatgacaccagtggcatatcacggccatggggtctcagcattccgctgctgctcgcccct

SEQ ID NO: 793141 - DNA, 100 bp, Homo sapiens
caaggccgttctgcggagaaaaggcatgctgggggcctcgccgaaccgcccagactcttcagggaaaaggtgagagaacgccgagccgtcgccgcagcct

SEQ ID NO: 793142 - DNA, 100 bp, Homo sapiens
aaggacttcatctcctcaacatggaaactaagccgggggccatcaagtataagaccacaggaccacgtgattcataaagaactactgtcaaaactagggc

SEQ ID NO: 793143 - DNA, 100 bp, Homo sapiens
aaaaggcccttttcagggcccccaaactgtcacagaaagagctgttaacacttcctagataacggggaaatcctcattgacgattcaatttgttgaaggc

SEQ ID NO: 793144 - DNA, 80 bp, Homo sapiens
gataattttattggactgtttgtctttgttctctgcctcttgtattctaggcacgcacagaggctgggctgcggtccaga

SEQ ID NO: 793145 - DNA, 100 bp, Homo sapiens
gggaggaaggaacgaggcaaggagctaaagcagcgtgcgttcagccctgggacagaatgttgctgcgggatgtaaaagctcttaccctccactatgaccg

SEQ ID NO: 793146 - DNA, 100 bp, Homo sapiens
gcagcatattacctatcaggagaggaggtggtgaagctgctgctgcggtacggagggaacccgcagcagagcaacaggaaaggcgagacgccgctgaaag

SEQ ID NO: 793147 - DNA, 95 bp, Homo sapiens
gcgggaatcagaaggactttatggacagccaggaacaaggctgctgcaaaggttttttcgggcctgactgcacgcagtgtcctgggggcttctcc

SEQ ID NO: 793148 - DNA, 81 bp, Homo sapiens
tgacggtcggctccttcgtgtgtacctcctgctccggcagcctgaaatctactttcttcaatgtgttaaccaatagtcagg

SEQ ID NO: 793149 - DNA, 115 bp, Homo sapiens
ctctttgcaacatttcaggaaaacagagaaagaagtgataggagggctctgtaggagaccagtatgatgtctgtgccatttgcctggatgaatatgaggatggggacaagctgcg

SEQ ID NO: 793150 - DNA, 75 bp, Homo sapiens
tagagagaaaaatcctggatctgtatgctttgagcaagatgtggaaacaacttctgtgcatctcatcgttatgca

SEQ ID NO: 793151 - DNA, 87 bp, Homo sapiens
agttcaaagagaccctcggaacgccaaagaactgccaactctgaaagataatgatttcattaatgagggccaaaagatttatattga

SEQ ID NO: 793152 - DNA, 50 bp, Homo sapiens
gaaggagaaggatagacttggctttgaggaaccagcacctatgacagaag

SEQ ID NO: 793153 - DNA, 98 bp, Homo sapiens
tgaagtgaaaagacagtggagagaagaagttgcttcacttcaggctgttatgaaaggtgctcgcatttggcttttcgttggtttcatgttggcctttg

SEQ ID NO: 793154 - DNA, 82 bp, Homo sapiens
ctgggtgttcgacagctacagcctgacagggttacagaatgtctgaaggggacagtgtgggagaatccgtccatgggaaacc

SEQ ID NO: 793155 - DNA, 74 bp, Homo sapiens
caacacgatcccggggctcaagtggcttaacaagagtcctgtgtatggaaactcacatgagtcagctcagtcta

SEQ ID NO: 793156 - DNA, 101 bp, Homo sapiens
gcggcctagaggtccgggcttggagttcgcctcagacgcggtggagccgccggagtctgagaaggtgtgatgaatgcagactctgctaccattttggctgt

SEQ ID NO: 793157 - DNA, 98 bp, Homo sapiens
cgatgaaatgtttcttgaagcacttaacagtaaattgggcaaacacgcccatttttccagccgaaaggaagagagaagggcacagttacctaagtatc

SEQ ID NO: 793158 - DNA, 73 bp, Homo sapiens
ggacagggatcacaaacactcagagtggaaaaagtaccatcatttgaaacagctgactcaggtgttgacacct

SEQ ID NO: 793159 - DNA, 82 bp, Homo sapiens
ccggatccctccttctcccggcgcctcaagcggaaggcctgctggtgggtacccttgatgttgtgttggactccagcgcccg

SEQ ID NO: 793160 - DNA, 89 bp, Homo sapiens
cgcgaatgctccgatgtgcagcccaagctctgggcccgctacgaaaaacgttgacctcttggcgagaatgcaaagaagggaacgcttgc

SEQ ID NO: 793161 - DNA, 75 bp, Homo sapiens
aaaagtcaatcgaacagactcagattaagcgctggccgcgcgccgaacccgagtccggcggcaccgacgacgacc

SEQ ID NO: 793162 - DNA, 100 bp, Homo sapiens
ctcaggacggcccccgcagcaagccccagccaaagaatgagtccctggaacgccagatgcgtgaaatggaagagaactttgccgttgaagctgctaacta

SEQ ID NO: 793163 - DNA, 83 bp, Homo sapiens
ctgctgtagtcacaggagctgtagagaggaccccggtacatctgaaagccgggaaatgttcaaatctgaacatcaatgatgta

SEQ ID NO: 793164 - DNA, 98 bp, Homo sapiens
acctctccagcggggacctgctccgggacaacatgctgcggggcacagagccccccaagatgaacccagtggtggagccactgtcctggatgctgggc

SEQ ID NO: 793165 - DNA, 98 bp, Homo sapiens
aaaaagagaaagaaacactttccagagttccctgcaacccgtgcttatgcagatagttactattatgaagatggaggagccagcacgtcgtgtctcaa

SEQ ID NO: 793166 - DNA, 90 bp, Homo sapiens
ctacaagtttagtggcttcacgcagaagttggcaggagcatgggcttcggaggcctatagcccgcagcagggtaccaccatcttaaggac

SEQ ID NO: 793167 - DNA, 100 bp, Homo sapiens
atggctataatgggtatggaggaggacctggagaatacagattctgttcatcttgctctgaaattaaataattctgaactcatggggagaaaactcagag

SEQ ID NO: 793168 - DNA, 78 bp, Homo sapiens
gaaacctcaggacttgagtaacagcaacatggaagtgtacaagccccgtcggaaatacaaacgccaccagggagcaga

SEQ ID NO: 793169 - DNA, 83 bp, Homo sapiens
ctggctgttagaagaattcatgctcatccgggtcaggaataaattagatggtcagtattatgcaataaaaaaaatcctgatta

SEQ ID NO: 793170 - DNA, 83 bp, Homo sapiens
ctcgctcgggtggcgacttcctccccgcgccccctccccctcgccatgaagattgctcatttagaaagtggatgtgtgggata

SEQ ID NO: 793171 - DNA, 90 bp, Homo sapiens
gacttctggctcattgtccgggtcctgcaggaccgtgtggaagtgtatgcacatgcacgcaagacactaagggcgactaccagaaagcgc

SEQ ID NO: 793172 - DNA, 82 bp, Homo sapiens
aaggaaatcaagaactacatccaaggcatcaacctcgtccagcaagagtgagccatggagctacgtgtggggaacaagtacc

SEQ ID NO: 793173 - DNA, 132 bp, Homo sapiens
aggcaacgtgttggaccttccggagcttctcagaagacagagggttttcttttgaggccccttcacagatgtagtcactacaaatcttaaattgcgaaatccatcggatagaaaagtgtgtttcaaagtgaa

SEQ ID NO: 793174 - DNA, 90 bp, Homo sapiens
agctatgccggaggaaccaacttctgggggggtaccaaggaagatgattttgcctatctggggcgcctggctcacgaggttggctggaag

SEQ ID NO: 793175 - DNA, 83 bp, Homo sapiens
catgccagcccagaacagagaatcagaaactggcgatggaatatgagaggagccctctggaaagaaaaggacagaccctgtgc

SEQ ID NO: 793176 - DNA, 50 bp, Homo sapiens
caggccgcggggagcacctgggaaagaccggcagagaccaatgccaatgt

SEQ ID NO: 793177 - DNA, 50 bp, Homo sapiens
gcagcgtgcgttcagccctgggaccctgaggggcgagctgcgcttcgaca

SEQ ID NO: 793178 - DNA, 75 bp, Homo sapiens
tgcagattgcttaattccttgagactgggctggcttagatgaagatgaagatgcacatgtctgggaggataattg

SEQ ID NO: 793179 - DNA, 98 bp, Homo sapiens
ggacaagagcaacagccccctcaccatggctctgtgcggctccaaaggtgtcacgtcttgaaattttaaatgtcctcagtgactctctacctctggca

SEQ ID NO: 793180 - DNA, 100 bp, Homo sapiens
aggagtagaatgttattgccagcatgacagtggagctgcagtaatccagctccagttcctgattaatgagaattttaccttcaatgatgacttcagtccc

SEQ ID NO: 793181 - DNA, 100 bp, Homo sapiens
ccccgccctgtgggagaagcacagtccacaggcggcttacagggagaacacagttggcctccaccgtttctgccccacagaaaacgtagcaaagatcaac

SEQ ID NO: 793182 - DNA, 75 bp, Homo sapiens
accgcagtcattacaacagccagccacatccactacagaaactccggaattacatgaacgacagccttcgcaccg

SEQ ID NO: 793183 - DNA, 75 bp, Homo sapiens
ctgctgcggcgcggggaccgctgtgctctcgcttgccttgcgccatggactggcagccagacgagcagggcctgc

SEQ ID NO: 793184 - DNA, 98 bp, Homo sapiens
acagtgacgtgttctccaaataccagctcgacaaagatggggttgtcctctttaagaaggccctgtctctgcccctggtggtcatcgtccatggcaac

SEQ ID NO: 793185 - DNA, 51 bp, Homo sapiens
tttattactggagttcattggctatcatggtgaacttacttcagattgtgc

SEQ ID NO: 793186 - DNA, 100 bp, Homo sapiens
gagacttctgagaggaaaaactattgaatgcattagcctcattggtctggctgttgggaaggaaaaagaccctgatgctcccataagacagaaaatgccc

SEQ ID NO: 793187 - DNA, 51 bp, Homo sapiens
tgtggtgcgaatacaggagacgtgtggagacgtacttcaatgacaatatcc

SEQ ID NO: 793188 - DNA, 50 bp, Homo sapiens
ctccaagaccttgtccatcacagagtcctgtgtatggaaactcacatgag

SEQ ID NO: 793189 - DNA, 87 bp, Homo sapiens
gacagccgagcccggagcccggagcccgggcaagagctgggtattgggagagttgctgctacatctttaggaaatttgactaaccat

SEQ ID NO: 793190 - DNA, 83 bp, Homo sapiens
caccgtctgaactaggatgtcccgacatgaaggcacagaccccacaggctcctcggacactgggtccatcacctcctgcccca

SEQ ID NO: 793191 - DNA, 82 bp, Homo sapiens
accccaagaggaaggaattcctggatgacttgttcagcttcatgcagaagcgagaccttgacctcccaaggctccagaatac

SEQ ID NO: 793192 - DNA, 100 bp, Homo sapiens
agcacacctggagcaacaacctggcggtgctcgagtgcctgcaggatgtgagggagattattcttggagaaaccctgtctgtttactgtaaccttttgca

SEQ ID NO: 793193 - DNA, 85 bp, Homo sapiens
gacaagtgtgggaaccagcgcttctccaccaggatcacgtttgagtgtgctcagatatcggaaggcagcctggaggaggtggcca

SEQ ID NO: 793194 - DNA, 75 bp, Homo sapiens
acacgtcttatttaatccacatcatagcttcgggctcagaatcaggttctgaaaaaaggtgttgtggatgaacaa

SEQ ID NO: 793195 - DNA, 100 bp, Homo sapiens
tgatgtggtacttgaagacacctgtactgttggcccaagacccccagatgttggatcagctctccaaaaacatcactcggtgtgggctgtccaattccac

SEQ ID NO: 793196 - DNA, 100 bp, Homo sapiens
ggaccggctgccatcttagtctagggactgaggagtcgccgccgccccgagtcccggttttaaaatcaaagatgggaaaatcggagaaaattgcccttcc

SEQ ID NO: 793197 - DNA, 100 bp, Homo sapiens
tttgatcctggggagtctgattcagatgacaactgtacagatgtcactgtccacctctggaggtatgaaggaggctatccagccctcacagaagtcatga

SEQ ID NO: 793198 - DNA, 75 bp, Homo sapiens
gaggacttgaagcagaaagcaagtgaatacgagtcagaaggccctggccaacgtcaacattgggagcctcatctg

SEQ ID NO: 793199 - DNA, 80 bp, Homo sapiens
ggccttctgtatcttcatggtgcggctcatcttcgagaggtgtttgatatcagctgctaccaggaatccctggcaccgtg

SEQ ID NO: 793200 - DNA, 100 bp, Homo sapiens
agtcagtgcagtaaattcagtgtcagtatacagactagaccatacctttgagccttatgtttacacaacaccgccctttgtcagagtgacacatggaagg

SEQ ID NO: 793201 - DNA, 75 bp, Homo sapiens
ggggaggcagaagtcatgacaggcgaggtgggttctgagtgagaaagatcagtctaaagaaaaggagaagaaagt

SEQ ID NO: 793202 - DNA, 71 bp, Homo sapiens
agggaccgatgttgcgcgaggaaaatgcgggacgcccagtaagaaggcttctcttatgtgaagaattggag

SEQ ID NO: 793203 - DNA, 100 bp, Homo sapiens
cctccttcttcctcaactatctcgctgacacgcaggtggtctttgggaagaagcttcctgcctttgccaccatccccatccaccagctgcagcatgagaa

SEQ ID NO: 793204 - DNA, 75 bp, Homo sapiens
ctgcggaagccgtcgcccgtggcaggtcctgaacgaggctgtgggggccctgatgtaccacaccatcactctcac

SEQ ID NO: 793205 - DNA, 100 bp, Homo sapiens
cagattcgcagtggtcgcttcttctccttgagtgtagcttccattggcaatactttaaacagcgtccatcttgctgtggaagcactacagaaaactgtgg

SEQ ID NO: 793206 - DNA, 100 bp, Homo sapiens
tgtctggaacatctgtcccttgttcaaaggtgctaactttgagtacatcatcgcagaaaaaagagggaagaataacaccgtggggttgatccaactgaac

SEQ ID NO: 793207 - DNA, 95 bp, Homo sapiens
gcggagagcacggagatttctggggctttggagggaatcgtgagcgggcgggaggaggccggggaccacacagatctggtggctggacccagagc

SEQ ID NO: 793208 - DNA, 74 bp, Homo sapiens
tgccacctgcctttgacctttttgaagcctttgcaaaatgattcgcctttgccagtctcatctcgtgtctgctt

SEQ ID NO: 793209 - DNA, 75 bp, Homo sapiens
tggacgatgtgcggcggatgaacaagcggcaggccctggccaacgtcaacattgggagcctcatctgcaatgtag

SEQ ID NO: 793210 - DNA, 100 bp, Homo sapiens
cgcgccaaaaccgggacggacaagaccctggtgaaggaggtcgtacaggatattgacggccaagcactcctgcttctgacccttccgacggtgcaggagt

SEQ ID NO: 793211 - DNA, 50 bp, Homo sapiens
gatttggctaggcgcacagcagtggcaggttttaagaagcaaatggcaga

SEQ ID NO: 793212 - DNA, 100 bp, Homo sapiens
tggcctgcaggaacatggcaagggcgagtgaagcagtgtcacgcattttagaagaatgggtatcatcactgtgccatctttgggaagaatgagaaaatag

SEQ ID NO: 793213 - DNA, 73 bp, Homo sapiens
agcttggttaacttgggagaaagtttcatctgtggatggagtattgtcccatgaagctgaggtcttgaagcag

SEQ ID NO: 793214 - DNA, 75 bp, Homo sapiens
cttctcaaccttgtgggatgtgaaaactctgttactgaaggcattaccacaggagtcttggttcgagaacacagc

SEQ ID NO: 793215 - DNA, 84 bp, Homo sapiens
attcgcgctgctgggcacccacggagcctccggggctggttttaaaatcaaagatgggaaaatcggagaaaattgcccttcccc

SEQ ID NO: 793216 - DNA, 101 bp, Homo sapiens
gatttttagaactccacatttgagagcagagtggccaaaagaacagtttattccaccatatgttccacgattccgcaatggctgggagcccccaatgctga

SEQ ID NO: 793217 - DNA, 75 bp, Homo sapiens
tccggcgcctccactccgtcccccgcgggtctgctctgtgtgccatggacggatctggtggctggacccagagct

SEQ ID NO: 793218 - DNA, 114 bp, Homo sapiens
aggtgcttttatattcatctcaaaaacaaaattctgaactcaggacttggcaagtgtgtgctcatattgtccaagctattcgcatggaagctaccagagtccgtgaagaatggg

SEQ ID NO: 793219 - DNA, 100 bp, Homo sapiens
aagccttgggctcccttgcaggattcagaagtgtatttagcatctctagtgcaaagagccgtctcactcttctctctgaacgacccggccctgagcccgg

SEQ ID NO: 793220 - DNA, 83 bp, Homo sapiens
tggatggttccttgcaaagggcacgtatagcattggtaaagaacgatcgtccagtggagacgcaggaggagggagacgcactg

SEQ ID NO: 793221 - DNA, 50 bp, Homo sapiens
ccaggacacccggaagccggaaatgtggtaagcatccgtggcattcaaga

SEQ ID NO: 793222 - DNA, 101 bp, Homo sapiens
gaggccggtggccgtgaggaggttgggggccctcgcggaggccgagaggcttaaggaggtactaggttttgacaagcttgcatcatgcgtgagtataagct

SEQ ID NO: 793223 - DNA, 82 bp, Homo sapiens
ccgcaccatgccgctcctaagcctgcacagccgcggcggcagcagcagtgagaggctaagtcctatcagccatggaaacacc

SEQ ID NO: 793224 - DNA, 96 bp, Homo sapiens
gacggcctgggtgctggcgaagcggaggccggagtaagactttgaccccgacgcaggcttcagtgattgccgcggatcagaagcctgagcactttg

SEQ ID NO: 793225 - DNA, 75 bp, Homo sapiens
gacagcctcccaagctgaaggaaggtacaaagtacgagcttatatccaaatgaagtctctgaaagcatgtaaaag

SEQ ID NO: 793226 - DNA, 96 bp, Homo sapiens
caccccacggccgccaccaagatgagcagggcccttgcggagttccgcgtccgaggtgtgaagacggccaatgggaacgtggaggccaaagtggtg

SEQ ID NO: 793227 - DNA, 82 bp, Homo sapiens
gccccgcaccccagcccgcagctcggtgctttgcaagatatcaccttgtcacagcagaccccctccacttggaaggacacgc

SEQ ID NO: 793228 - DNA, 100 bp, Homo sapiens
atggcgagagggggcaccggaggtgacaacaataacaagactgtccttcggacaagttttaggtcactggaaggactgagcgcattcaggagcctggagg

SEQ ID NO: 793229 - DNA, 82 bp, Homo sapiens
gtgccctggggctgagccctcaggagagaacattgaaagtattctctaagctatttgaagagagtgactaaatgcacctggg

SEQ ID NO: 793230 - DNA, 80 bp, Homo sapiens
gctgcgcgacccccgcgcatgggatgtttcagcagcccctgagaaggaagaggaggaagctgagggcccgctgagggcgc

SEQ ID NO: 793231 - DNA, 85 bp, Homo sapiens
ggcggcaactctttgatgtactactataatgggaaagcgctctattaccaggttttaaacttcgccatgatcgtgtcttctgcac

SEQ ID NO: 793232 - DNA, 90 bp, Homo sapiens
cccatcactgcttccctcagccataacaggttccgtttgtcaaatgtgtgcgacccttctgataagtcaccagaggtgatgagggagaga

SEQ ID NO: 793233 - DNA, 96 bp, Homo sapiens
gtgctgaatacactcacttttatggtggcaagaagccaggagatacaactcgtcaacgaatcaaattcagtgatgacagagtatgcaagagtcacc

SEQ ID NO: 793234 - DNA, 75 bp, Homo sapiens
aggggagcaaattttactttctgacaatgcagcttctcttgcagtgcaggcctgaagtgttagaagattcacctc

SEQ ID NO: 793235 - DNA, 75 bp, Homo sapiens
ccaaggagatggtctcattaaggttctgaagccagacacaagatgaaaaagctaactccaaaacagaaattttct

SEQ ID NO: 793236 - DNA, 76 bp, Homo sapiens
aaccgcgaccctaaacacctcaacgatgacgtggtcaagttggttgaatctggcgatgtggaacccatggatatgg

SEQ ID NO: 793237 - DNA, 96 bp, Homo sapiens
ttgggagaagcctttaatcggttagacttctcaagtgcaattcaagatatccgaaggttcaattatgtggtcaaaaacaagttgaaatcatcgcag

SEQ ID NO: 793238 - DNA, 101 bp, Homo sapiens
agaagatccacaaactggtgcagaagagagacttcctggtggacgatgcggaggtcgagcggttaagggtcctggcggcagagaccacgtcccagcaggag

SEQ ID NO: 793239 - DNA, 75 bp, Homo sapiens
gccgacacgctggccctgaggcaacggctcatcagattccttgacaaggatatcctagcggcgaaacaacaccgt

SEQ ID NO: 793240 - DNA, 82 bp, Homo sapiens
ggcgctctggctctggctgtgcgcgctggcgctgagcctgcagccggccctgccgcccgagcgggaagaagttccgcagcaa

SEQ ID NO: 793241 - DNA, 98 bp, Homo sapiens
atctctaggtaccatccctgacctggtcctcatgctgccgaggctgttgctgttgatctgtgtaatggaggggaaagttccagtcgcagcgctgagaa

SEQ ID NO: 793242 - DNA, 75 bp, Homo sapiens
cccagatcggccagtccgagcgtgccggacacagccagctcctgtatcacgtggaagagatagttatggaggtcc

SEQ ID NO: 793243 - DNA, 82 bp, Homo sapiens
cgagaggaacctctatgccgacatcgacgccgcctggcaggccctgcgcaccaggggcagaaccccttcgagctggccttct

SEQ ID NO: 793244 - DNA, 50 bp, Homo sapiens
cccgacgctgagggcagccccgtccaggaaaatggacccaagtggggtca

SEQ ID NO: 793245 - DNA, 101 bp, Homo sapiens
tccagatgcgattttagtggaggactacagagccggtgatatgatctgtcctgaatgtggcttggttgtaggatcagttcgacagcttagacaagcataca

SEQ ID NO: 793246 - DNA, 100 bp, Homo sapiens
gtgaaacatggtgctgcacatagccatgatcatgctcatggacatggacactttcattctcatgttggttgaatctggcgatgtggaacccatggatatg

SEQ ID NO: 793247 - DNA, 75 bp, Homo sapiens
ttgcagtatgtggccagttatttgcctcagtaaaagatgacaccacagccaaagccctatgggaagctttactga

SEQ ID NO: 793248 - DNA, 82 bp, Homo sapiens
tatcataaaaatgaacagttttgtggaatagatgaccaaattttcctgctctacgaaacgcactcttttgccttgaagcggc

SEQ ID NO: 793249 - DNA, 75 bp, Homo sapiens
tgacagtccatatgtaaccaaatattatggatcctatctgaagatgacagacaaccttctgtgccttcatcaagc

SEQ ID NO: 793250 - DNA, 74 bp, Homo sapiens
aaaaactttgtgaggttatatatccgcagcaatccagatctctatgccccgggaaatggatacaagtagaagaa

SEQ ID NO: 793251 - DNA, 96 bp, Homo sapiens
cggtactgttgaaagcgacaagtggaggcgccgctctagcggccgggactctgaactatggcggattttatgggcagctgcagaagttctgtcccc

SEQ ID NO: 793252 - DNA, 82 bp, Homo sapiens
agctactggtgccagaacacagagacagcagcccagtgcaatgaattacatgaacgacagccttcgcaccgacgtcttcgtg

SEQ ID NO: 793253 - DNA, 78 bp, Homo sapiens
ccgactgcaactgctggattgctgcaaggctgagggacgagaacgagagctttcagcagaggccaaggcagcattgct

SEQ ID NO: 793254 - DNA, 149 bp, Homo sapiens
acctgtacctttcagctgcgccggccgcgaggccacggagagctcgccttggagagcccaggagcaggggagacatgtcggtgctgctgggcattgtgatcctgcttgcttaccgcctggagttcacggacaccttccctgtgcacacc

SEQ ID NO: 793255 - DNA, 75 bp, Homo sapiens
gctcttccatgaggcagcccagcaggcataagatgcacatttttctgctctggagccgggaatgaaatattcttg

SEQ ID NO: 793256 - DNA, 100 bp, Homo sapiens
ctgcgacctacggcaggaggacccaggaaagggacatctgctcctccaaggcagagcggctcccccctttcgctctctgatgtaaaggatggagtaaatc

SEQ ID NO: 793257 - DNA, 83 bp, Homo sapiens
cccgttcttgcctcaggccagtcgcctccaggccaagagggatccttcacccgtgtctggttgaggcctctggtgtctacgca

SEQ ID NO: 793258 - DNA, 100 bp, Homo sapiens
ggccgagcagctgcttgagccacacgtgcaagcgcccagcctggagccctcggtgtccccacaggatgaaacaacgctctgggcaggccaagaaccccgt

SEQ ID NO: 793259 - DNA, 82 bp, Homo sapiens
ggccgtcggagacatgggagacccggggtcggaaacctgcctagagctggaacgttacctccagagcgagccctgctatgtt

SEQ ID NO: 793260 - DNA, 96 bp, Homo sapiens
gcccatcttcctaaaatagagctctcaaaacctggctgttttccttcagagcactggcctccaattaattgctggaatccacaaataccaaactat

SEQ ID NO: 793261 - DNA, 96 bp, Homo sapiens
cgcccctgagcgccggcagcggccgcggtgggttcttcaggacctctttgtttttagacatgaattggccataatgagactagcagcctttatggg

SEQ ID NO: 793262 - DNA, 100 bp, Homo sapiens
gggaaatgaaagagcgccttgggacagggggatttggaaatgtcatccgatggcacaatcagctctaagcgaaagacatgaggcctcagcctgaaatgag

SEQ ID NO: 793263 - DNA, 100 bp, Homo sapiens
ggggaagtcatgctcgcttcacggaggcaatagctagccggtgctaatgtctcttcatgaaatgttcccagcagtacatgcagcagaaatggccgtccag

SEQ ID NO: 793264 - DNA, 74 bp, Homo sapiens
ctgtgatcgaaagtctgctgaagaggcattgcacagatcaaacaagttaattggccttggtcctcacagctcca

SEQ ID NO: 793265 - DNA, 75 bp, Homo sapiens
gctccccaaagacaggagcacagggaaggacatggagcccaacggcccgtcgctgcccagggatgaagggccccc

SEQ ID NO: 793266 - DNA, 100 bp, Homo sapiens
ctgaaacggggggagagaacaatgataaagaagaagaagagaagaaagatgaaacttcgagctcctctggaatccagacgctctgcagtgtcccatcgtc

SEQ ID NO: 793267 - DNA, 75 bp, Homo sapiens
ccgacccgcgccctgctccctctcagcacctgggcggacggctgacttatccttgtataatgaattccgattgtg

SEQ ID NO: 793268 - DNA, 99 bp, Homo sapiens
agaagatgacacttgggagcctggtgagagttacgtgtgtgcatccaatgaaccatttcgtaaagtcgattacaccaaaaatattaatccaaactggtc

SEQ ID NO: 793269 - DNA, 98 bp, Homo sapiens
gcttcgagaagattagcaaaggtgctaatccagtggaaatcaggagagtttttgcagggcactatggcaatttgaatgcttagaattttaaacctgaa

SEQ ID NO: 793270 - DNA, 74 bp, Homo sapiens
ctattcagacacccctgaaatctgccaaaagtcagctatcacattgaaatgagcttctttgaagtatataatga

SEQ ID NO: 793271 - DNA, 101 bp, Homo sapiens
gtcgtggtggaccacgtggtggcaaatcctccatcagttctggtttcagcaacatttgctgcaagtttagtcaccagtcctgcaattggagcttatcttgg

SEQ ID NO: 793272 - DNA, 88 bp, Homo sapiens
aagccaacgatggtctttcctctgcattgctgatcttgtacttggattcagcaaggaaccttccggagtggcagaagctcaactatga

SEQ ID NO: 793273 - DNA, 75 bp, Homo sapiens
agttggaagcagccgatccagcctgcggagcctgtggggcaggatggaggcgtcctgcctagagctggcgctgga

SEQ ID NO: 793274 - DNA, 100 bp, Homo sapiens
taaaaaagcaatcacaaagaagaggaaaactgtcataaagtcacctactgtaccagagtttcaggtctctgaagcaaaactgagggcagatgaggcaaaa

SEQ ID NO: 793275 - DNA, 75 bp, Homo sapiens
caacctgaagccatagcattttgtaaggatgaaattacaagttttcagggagaccttgcatcaccatggggagtg

SEQ ID NO: 793276 - DNA, 97 bp, Homo sapiens
aggagctaaagcagcgtgcgttcagccctgggtaccttctgtctgacttcaaccccacatctgcttgacaagaattaactcaaatatctcttcttaa

SEQ ID NO: 793277 - DNA, 90 bp, Homo sapiens
gtatttgaagtctgtgtcaaacatccatatcataagtggaattttggagatattcaaagaaaaggcgacggcggattgacagaagtatga

SEQ ID NO: 793278 - DNA, 82 bp, Homo sapiens
gccctaggggcagcgagcaagacagcaagcaggactgcctccgggcctgccaggagcagatcgaagccctgctggagtcaag

SEQ ID NO: 793279 - DNA, 98 bp, Homo sapiens
aaagtgaagcgctacatcatagaacacattgaccttggggcctattattaccgcaaattcttctatgggaaaggttatggccacaccgtgcccttgtc

SEQ ID NO: 793280 - DNA, 100 bp, Homo sapiens
ctgtgaacggcgttactgaccagagccccttctcgcctcagttcgcctctgtgaacatcaccaccaaccaggcaggtgtggaccactacaacgaggtgaa

SEQ ID NO: 793281 - DNA, 100 bp, Homo sapiens
ttcattgatgccacaaccataatagaatgtctacattcctgtgactcgaaaagccctgtttcctggtgactctgagattgaccagctctttcgtatcttt

SEQ ID NO: 793282 - DNA, 82 bp, Homo sapiens
aagaaggtgaagaggatgaagaaggtgaagtaccaaatatgccccaacagcggcaagaccagcatcatcagagtgccatgat

SEQ ID NO: 793283 - DNA, 75 bp, Homo sapiens
cccctccggccctcagctgctctctgctacaaggagaacattgacatcaccaatttcagcagcagctggagcgat

SEQ ID NO: 793284 - DNA, 100 bp, Homo sapiens
taccctcacttcaagactaagattgaaggtgactgctggctgctggcagccattgcctccctcaccttgaatgaagaaatcctggctcgagtcgtccccc

SEQ ID NO: 793285 - DNA, 112 bp, Homo sapiens
ttcccgtgtctccccgaacaccctatgggatgccatatcttgggtccttatgtcgtcagaagatcgagaagctcaggaggatgaattgctggccctggcaagtatttacgat

SEQ ID NO: 793286 - DNA, 80 bp, Homo sapiens
ctggaaaacttcaagcatttgccaccaaaaccctcaacaggggcatctctgagttcatcgtgatggctgcagacgccgag

SEQ ID NO: 793287 - DNA, 83 bp, Homo sapiens
agctgaacactttccagccttgtttttcagcagctttgaggaaaagtataggtatccaagcccaccaatgggatctgtctcag

SEQ ID NO: 793288 - DNA, 51 bp, Homo sapiens
ccttttgcagggatgctctttgctgattttcacacccgctaccactgtggc

SEQ ID NO: 793289 - DNA, 75 bp, Homo sapiens
cacttttgtccatgtcactgatctttctggcaagtcacgcacgttgaaccatgggagaaaggaagcaggaaaaca

SEQ ID NO: 793290 - DNA, 88 bp, Homo sapiens
aagctgaaggcctccagcaggacctccgccctcctctccggctttgccatggacataagcagctctatgaccaatagcacagctgcca

SEQ ID NO: 793291 - DNA, 82 bp, Homo sapiens
cacagacataccatggctgctgctcttcatcctcttctgcattgggatggtgttggtaaatcatgcttattgctacagttta

SEQ ID NO: 793292 - DNA, 98 bp, Homo sapiens
gttggtgtgattagcttcgcagtctggaaagctttaggagttcacagtgctcctggcgacctccctgctgcagggggccctcccagcggggccatgcc

SEQ ID NO: 793293 - DNA, 100 bp, Homo sapiens
aagaccagatggatgcccagatgagataatatcgtctactgcattatttttggctgcaaaagtggaagaacaggctcgaaaacttgaacatgttatcaaa

SEQ ID NO: 793294 - DNA, 83 bp, Homo sapiens
gctcgcgatggccgcgtcccctcccgctgcggacgggtcctttggtacatgcagtccgagggcggcaccttcctacttctgcc

SEQ ID NO: 793295 - DNA, 75 bp, Homo sapiens
ttcttgcattggatgcaatccattccatgggttttattcacagatcctgataacttaagtgactctctcttttcc

SEQ ID NO: 793296 - DNA, 83 bp, Homo sapiens
atggcaaagacgacatccggtgcgccgaggctgctcacaaaagtgacagagttagtccttgataattgcctgtgtgtcaatgg

SEQ ID NO: 793297 - DNA, 75 bp, Homo sapiens
cccgcggcgagcgagctcctgaggatttggagttccatggagtgatgagattttattttcaagataaagctgctg

SEQ ID NO: 793298 - DNA, 90 bp, Homo sapiens
aagcagcataagaagccctttgatgcaatgaataacattgtggcaaatttgctcctcaacctaacgaggattctcatcgctttggaaggc

SEQ ID NO: 793299 - DNA, 102 bp, Homo sapiens
cagaacctagcctatcagctggggctggatgagtatcacagattctgctggccatattctctactccaaagaggatgcaaccaaggggaaatttgcctttac

SEQ ID NO: 793300 - DNA, 75 bp, Homo sapiens
ggctagcactcatccgcttccgggtcaagagagacaagagagacacctccaacttcgacaaagagttcaccagac

SEQ ID NO: 793301 - DNA, 99 bp, Homo sapiens
caagccgtccagtggcaaacacgtctacaaaagaagatgggaaaggaatctgaatggcggcgctagatagtaaggcatcagggaagatgggaatgcgag

SEQ ID NO: 793302 - DNA, 73 bp, Homo sapiens
cgaaggcaggacagcggtggcggcagatgaagatgaggagagtgaggaatcaagtgaagaagaatctagcttg

SEQ ID NO: 793303 - DNA, 75 bp, Homo sapiens
ggccgacttcgatgatcgtgtgtcggatgaggagaaggtgatctgtgaaaatggttcgctattcacttgacccgg

SEQ ID NO: 793304 - DNA, 100 bp, Homo sapiens
tacgtggagatcaagcgcagcgatggcatttatgtttgaatcatctttaagtctggcggtcacaaagtggggactcaaggcctccaggtgtttggatgag

SEQ ID NO: 793305 - DNA, 80 bp, Homo sapiens
gggcaaggccatcggcgtcctgaccagcggcggcgacgcgcaaggtatgtgaggagcagcgctgtgaggaggaagtcttc

SEQ ID NO: 793306 - DNA, 100 bp, Homo sapiens
gggtccctggtctgggccatgtctggctgtgatgctcgggagggagactgttgttcccggagatgcggcgcgcaggtgcttttcagtgggaagaattgga

SEQ ID NO: 793307 - DNA, 99 bp, Homo sapiens
atacttatatattgccagctgtgttaatgatctttgcaacctgcctagggtagttaaaagacgagtgaatgctctcaaaaacctgcaagttaaatgtgc

SEQ ID NO: 793308 - DNA, 100 bp, Homo sapiens
ctcatgcaactgcctgaactttacagaagtggtcagaaatcagagatgactcctggtctccatcctggatccactctgattccaatgaataatatttctg

SEQ ID NO: 793309 - DNA, 101 bp, Homo sapiens
gagcgagtgcctgagcaacatccgcgagttcctgcgcggctgcggggcttccctgcggctggaggtggcgacatgtctaagaatgtgagccagtcacagat

SEQ ID NO: 793310 - DNA, 74 bp, Homo sapiens
cggcgtgtgcgcgcccgccagctgctccggagatacgctggagaatgctggaggagaccttaaggatggccacc

SEQ ID NO: 793311 - DNA, 100 bp, Homo sapiens
cttgcagagacagctcaacacggcacttccacagcatacacaagctgagggagaatgtctttcaagagcatcagacccttaaggagaaggaacttgaaac

SEQ ID NO: 793312 - DNA, 75 bp, Homo sapiens
gagaagagccgtgggtaggagatggagaaattccaagttcagattctccaggccctgggaggagcggggacactg

SEQ ID NO: 793313 - DNA, 95 bp, Homo sapiens
agaaaccaatgaggaggatgaggaggaaagtgacaaccagggcgacttcagacacaagtcatcgtttgtgatctgagacccgcggtgtggctgag

SEQ ID NO: 793314 - DNA, 100 bp, Homo sapiens
actacgccaaggaggtttacaaaatagacatgccgcccttcttcccctccgaaactgaggactggatagttgcaaacaaagatctgattgacaagacgaa

SEQ ID NO: 793315 - DNA, 100 bp, Homo sapiens
cctgaaagcccttcaagagaaagtggaaattaaacaattaaatcatttctgggaaattgttgtccaggtgataaaaagttgattgcagaaggacctgggg

SEQ ID NO: 793316 - DNA, 100 bp, Homo sapiens
actgtggattggatattctcaaggaaccacacatgtattaagatttggacttgtcagtcacatctgtaacctgctcactgaaactgccacactgtgcttg

SEQ ID NO: 793317 - DNA, 98 bp, Homo sapiens
tcctggacaccaaccctgccatccgggagcagacggtcaaggaccagttgctcttctgtgatgactgcgatcgtggctaccacatgtactgtctcacc

SEQ ID NO: 793318 - DNA, 75 bp, Homo sapiens
caagatcccccgtctgaggactgacctttttccatttgcctgaagacctggataatctccatttttgtcatggac

SEQ ID NO: 793319 - DNA, 100 bp, Homo sapiens
caaacatggcggtggactcggcgatggagctgttatttttagatacttttaaacacccgagcgctgagataattgtatggaagagatacagtgattttaa

SEQ ID NO: 793320 - DNA, 96 bp, Homo sapiens
ccgcgggctgcggacgctcggtcccgcgctgcgcatccccgcggacgccacagcgctctacgagagtacaaggtagtgggtcgctgcctgcccacc

SEQ ID NO: 793321 - DNA, 100 bp, Homo sapiens
cctgcgccggccttgcctcggccctggactttgtctcacaagatgaaatgttgacgcccctggggagattggacaagtatgctgcaagtgagaacatatt

SEQ ID NO: 793322 - DNA, 97 bp, Homo sapiens
agaccccgaaaacggaagcgcagggagaaggaagaggtgtttgaaaaggttaaataggattgcgaatcaggtggccattcagcggaagaagcagttt

SEQ ID NO: 793323 - DNA, 102 bp, Homo sapiens
gctgaataagcttccaaaatgatggttcatcatgcctagtggcgtataagaagaccccgccaccggtccctccacgcaccacttcaaagccgttcatctcag

SEQ ID NO: 793324 - DNA, 100 bp, Homo sapiens
ttcaaatccatcaagctcatcaaaagaataatcatgggccagactgggaagaaatctgagaagggaccagtttgttggcggaagcgtgtaaaatcagagt

SEQ ID NO: 793325 - DNA, 100 bp, Homo sapiens
gtcttcccaagcctttgatgacaaaccagccaggagtggtggctcacacctgtaatcccagctctgggaggccaaggccagtggattgcttgagcccagg

SEQ ID NO: 793326 - DNA, 82 bp, Homo sapiens
gacaatgccttggtttcaacactatcggaatggattttctgccgtctcttggcaaaaatggcaaataatgatgctgttctga

SEQ ID NO: 793327 - DNA, 90 bp, Homo sapiens
cgacaggaaaaaaatttgctggatattgatgcgccagtcactgccacacagaacccagcatttcatcatgaaagcaggaagacatacggg

SEQ ID NO: 793328 - DNA, 104 bp, Homo sapiens
ttaaccccaaaatcagtgattctacatctcaagctcatattttgaagtgtttacgggccataggaaaaggatacagagtagagtttcatgaacctgaaacttgg

SEQ ID NO: 793329 - DNA, 75 bp, Homo sapiens
ggccccctcaccatcctagaggtcaagatcagctctggctagggcacaagagactatagtccccggcagatggca

SEQ ID NO: 793330 - DNA, 90 bp, Homo sapiens
cgaagcccaaaaagctgaaggtggaggcgccgcaagcgctgagccactgaggcggctcccagctgcgttggcgacatggccgacaccccc

SEQ ID NO: 793331 - DNA, 75 bp, Homo sapiens
tccagattgaagctattcctttggccttacaagatgatgatgtgcctgcagatatggttgcagaagaatcaggtc

SEQ ID NO: 793332 - DNA, 100 bp, Homo sapiens
cgaggaccaactccacctccctggagaatgctggaggagaccttaaggatggccaccaccactatgaaggagctgttgtcattctggatgctggtgctca

SEQ ID NO: 793333 - DNA, 78 bp, Homo sapiens
tgccacagcatcctccagcacctcaggtgaaagcaaacctcgagaaggcaaagcagactctggagaacgagcgggggg

SEQ ID NO: 793334 - DNA, 98 bp, Homo sapiens
ccacctgggcgcaccgcggtgcggacccagcacgcctgggccgggggctgcagcatggtgctggagaatctggtaaaagcaccattgtgaagcagatg

SEQ ID NO: 793335 - DNA, 90 bp, Homo sapiens
acaaagagatctggacagaatcgccggacaggcctctacaactactacgacgacgagaaggaaaagctgcaaatcgtggagatgcccctg

SEQ ID NO: 793336 - DNA, 83 bp, Homo sapiens
gcccggcccggcagcgacatggaagtttggtgccctggttgtcagatgttggaaagcagtaggacggaacatactcttcgtgg

SEQ ID NO: 793337 - DNA, 75 bp, Homo sapiens
ttggagtgtcccccagataggtcattccacattggtgcctcatgctctggacttattggacaaaatgttgacatt

SEQ ID NO: 793338 - DNA, 80 bp, Homo sapiens
aagctctctcaagcacctcttttgccttctttactaaaatgtctcaagaaactaatctggattcactccctctggttgat

SEQ ID NO: 793339 - DNA, 74 bp, Homo sapiens
acattggcaccatgatatggttatggatttggctttttcagtgacagtttaattggttggggtcagataagaag

SEQ ID NO: 793340 - DNA, 95 bp, Homo sapiens
aaggaccctttggaaggccgggtgggccgagatgtcatccatactgtagggccaatagccaggggccatattaatggttcccacaaggaagacct

SEQ ID NO: 793341 - DNA, 95 bp, Homo sapiens
ctgaaccggaactcaaaacagacccatctttggatcttcattcattaagcagtgcagaaacacaggtggcaggtgtcacagctttagcctgtgga

SEQ ID NO: 793342 - DNA, 100 bp, Homo sapiens
caggagcttgacgccttagataacagccatcctattgaagccaagtcctgtatctgccatgtctgtggcgtccacctcaacaggctgcattcctgcctct

SEQ ID NO: 793343 - DNA, 98 bp, Homo sapiens
cctacccgagcggctgccagctgcgcgccgccagccagagggccgagagccgcggggagaaggccatcacccaggtttggagccccccatgcttcaga

SEQ ID NO: 793344 - DNA, 88 bp, Homo sapiens
ccccacttcagacgagctcttcctgcctggaatctgagtaaccagagagcacagagaaatgctggtgaaactggccaaacagaacacc

SEQ ID NO: 793345 - DNA, 75 bp, Homo sapiens
ccacgcggcgccagttctccggcgggaaggaaaaccgcgcagagaggtgcgcgcggagccatggttatcatgtcg

SEQ ID NO: 793346 - DNA, 75 bp, Homo sapiens
tgatattaagccatcaaatgtggaacctatggaaaaggtggaccccaagttcctgaggaacatgcgctttgccaa

SEQ ID NO: 793347 - DNA, 83 bp, Homo sapiens
gggactggccccaccgacctcatagactatccccataaatacggtcctcaggggggctgtgcagatcattcagtatttgaaag

SEQ ID NO: 793348 - DNA, 75 bp, Homo sapiens
aatattattagcacaagagcaccatactttgaggatacactgaagagatggtgccttggcacccttgcctggaac

SEQ ID NO: 793349 - DNA, 88 bp, Homo sapiens
gctcgtactcgtgcgcctcgcttcgaggcatttcatccttcatgaagccattcaggattttgaattgcatatgagtgcttggctcttc

SEQ ID NO: 793350 - DNA, 75 bp, Homo sapiens
gccaagctcatctctgagacccggaggaggttcgaagctgagtatgtgacaggtaacggaaggccattggaaatg

SEQ ID NO: 793351 - DNA, 100 bp, Homo sapiens
cccgtccaaggctgggaccatggcacaactcatctcatcaatgccgcaaagggcaagattcttgccaagagaattaatgtgcgtattgagcacattaagc

SEQ ID NO: 793352 - DNA, 75 bp, Homo sapiens
ccagcttctgctgtccttctttgtggagagcaagttaacaagcacaagccctggctggagcccacctaccacggc

SEQ ID NO: 793353 - DNA, 75 bp, Homo sapiens
atggataccaccttctggagattaaagatccagacatttaatgtggatgcaccatgccagaccgtggaagattta

SEQ ID NO: 793354 - DNA, 82 bp, Homo sapiens
ttggaccctcctcccaactgtagggtttgaaagtattcttgaagggctgtttggacctgcattattaaaagatctcagttta

SEQ ID NO: 793355 - DNA, 82 bp, Homo sapiens
gaccacgctacgggcctttacctgcgacgacctgttccgcttcaacaacatcattgctgctggaggtgtaatggacgttaat

SEQ ID NO: 793356 - DNA, 87 bp, Homo sapiens
cggttagcccgtcagtccctgctctgtgcgcgcctccatctgggccatggatggagcctcccctcccggaagtagaattttttacgg

SEQ ID NO: 793357 - DNA, 90 bp, Homo sapiens
ccgcggtttgtcgccagaaggaagatggcggatctggaggagcagttgtctgatgaagagaagatttaatccagagactgacttcactat

SEQ ID NO: 793358 - DNA, 100 bp, Homo sapiens
gctgtccctgctggaggagcgcttccggattgaaaactgtaactatgcagtggaacttgggaagaacaaggccaaattctccttggttggcattgctggg

SEQ ID NO: 793359 - DNA, 100 bp, Homo sapiens
ctccagcgccctggcctccctcaccttggacacctcgcttggaccaacatcgccttcctgcagaatgtgctcaacaaccagcagttcctggcaggcactg

SEQ ID NO: 793360 - DNA, 75 bp, Homo sapiens
tgctgcaaggctgagggacgagaacgaggtgacatctgttcccgagctgttcctgactgcagtgaagctcaccca

SEQ ID NO: 793361 - DNA, 75 bp, Homo sapiens
cccactcctccaagaaccaacccccaaattggctgggacaggagtacttgattcttcagaaaacctccaaagtag

SEQ ID NO: 793362 - DNA, 75 bp, Homo sapiens
gccaagaagatcatcattaaggacggaggcacggacaagaggaccctgccttggtgtgagagtgagggaagagga

SEQ ID NO: 793363 - DNA, 75 bp, Homo sapiens
cccagcagtatctggctacccttgaaaacagggcgcagtgctttcattggcattggcttcacagatcggggagat

SEQ ID NO: 793364 - DNA, 100 bp, Homo sapiens
ttcagcctttcaatgtgacacaaggaaagtattctacagctgtcaataccagcaaatatgcagaaagctatcggatccaaacctatgctgaatatatggg

SEQ ID NO: 793365 - DNA, 82 bp, Homo sapiens
tgcaatcatcaacaaaacaattattccccgacttacagatatggctcgtggacagcagaaaattcagtctcagcagaaaaat

SEQ ID NO: 793366 - DNA, 75 bp, Homo sapiens
gctggttttcaggccacaaatgctttcacagcccttagagatttgtttgattccatggataaaacttcttccagt

SEQ ID NO: 793367 - DNA, 101 bp, Homo sapiens
tgaatgtgtgcggacacactctaaaatcccgttttgtcaacctaatgaagcattcaaagaagacatatgactcttttcaagatgaacttgaagattatatt

SEQ ID NO: 793368 - DNA, 100 bp, Homo sapiens
tttcagaagattgtgattcagcctctactaaagttgtcatccgtggagcaggaaaccaggatctcgaggacctggaagaagcagaggagccagacatgga

SEQ ID NO: 793369 - DNA, 98 bp, Homo sapiens
tggagtccattgtggagaacatccgcatctatggtattcacgccctgctggtggtcggtgggtttgaggttcgctatcctgatcgcatcacactgatc

SEQ ID NO: 793370 - DNA, 76 bp, Homo sapiens
gcccccgtcaccctccgcgtctccaggcatgagccatgagcccaagtccccttcgctagggatgctttccaccgcg

SEQ ID NO: 793371 - DNA, 75 bp, Homo sapiens
ataaaacctgtttcaaattgggaagtgcacttcttattagagacactatggaaagtacggtggccagactttaac

SEQ ID NO: 793372 - DNA, 90 bp, Homo sapiens
gtagaagtcgagccgtctgtatttttcacccgagtcagcaccctcccagcaaccaggctgtggattcccctccaagtggaggaggatggg

SEQ ID NO: 793373 - DNA, 100 bp, Homo sapiens
aaattcttcctgggacacaacgacgacattatcaggtcccctcttgctgttggctgcacatcaggaaggctgtgatgggaatgaaggtgaaaacttggag

SEQ ID NO: 793374 - DNA, 125 bp, Homo sapiens
ggcggaaacaccggacacgcctggcagaaatcatcgacgattgtgtggacaacaccatcgacttcctggagtacgtggcagctctgaatctcgtgctgaggggcaccctggagcacaagctgaag

SEQ ID NO: 793375 - DNA, 100 bp, Homo sapiens
gctaagagatatctgcaatgatgtactgcaaattattttccatcacctggcattactttacatgagcgtttctcaacaatgcaagatatacacaaggcag

SEQ ID NO: 793376 - DNA, 123 bp, Homo sapiens
tcacctgtccttctacattttcgatagagacgttttccggagggattccatcataggtgtgcaactgaggaacatggctcaagaaactaatcacagccaagtgcctatgctttgttccactgg

SEQ ID NO: 793377 - DNA, 100 bp, Homo sapiens
ctaatatgttgatggcattccagaatatctcagatgagcagcttatgtccctgatgccaaaaatgcacctactctttcctctaactctggtgaggtcatt

SEQ ID NO: 793378 - DNA, 83 bp, Homo sapiens
acttcaagccaaacatcaagcagaatgtgatttgcttgaagatatgagcagatcgccaaactgaggcagcaactacaacgcag

SEQ ID NO: 793379 - DNA, 50 bp, Homo sapiens
cgtgtggctcatctacgaagagtccaggaccctaaagtaaattggttgaa

SEQ ID NO: 793380 - DNA, 100 bp, Homo sapiens
ttagccctgctccaggaatgggacctcgagtcactgtggatagcactataatatgcagaaatctacaaattctgatacttccgtggaaacactgaattct

SEQ ID NO: 793381 - DNA, 101 bp, Homo sapiens
ctgcggagggcttgaggctcgcgagcctccttcgccgcgccccacttgctcgtgcactttacacacatgaggtactaggttttgacaagcttgcatcatgc

SEQ ID NO: 793382 - DNA, 100 bp, Homo sapiens
ccaccgaggctgaggatgatggtagattgccagagcttggggcttccttggtcgcacccaccacctgcctgcccactggtcagccttcagggaccctgag

SEQ ID NO: 793383 - DNA, 100 bp, Homo sapiens
aagaagcaaagaagattaccattaaaaatgatccaagtctcccagagccaaaatgtgagtggaagctggacacactatgtgacttgtatgaaaccctgac

SEQ ID NO: 793384 - DNA, 73 bp, Homo sapiens
gcgagtgaggaaaggaggtactgtaggatcccgaaggcaagccgaagaagacacacatccaagacaaccatga

SEQ ID NO: 793385 - DNA, 100 bp, Homo sapiens
gccgtagcagccgggctggtcctgctgcgagccggcggcccggagtggggcggcggatatcaatgaatgcttggaggacaagagtgtttgccagagagga

SEQ ID NO: 793386 - DNA, 50 bp, Homo sapiens
tgggatgacccagtccctgggcacaggcagaaggagtctctccctgtggc

SEQ ID NO: 793387 - DNA, 98 bp, Homo sapiens
agtcaagagaaattttggaattttgtagaagccagtcaaaatattggatcatcagatcatgacgatgatggtggtgctaccccagtacaggatgaacg

SEQ ID NO: 793388 - DNA, 99 bp, Homo sapiens
caaggcgcagatccgctacgagggcattctctacaccatcgacaccgacaactccaccgtggcgctcgccaaaggcgcagcccagcctcgaaatgcaga

SEQ ID NO: 793389 - DNA, 82 bp, Homo sapiens
ggtctcttccgcggaaactgacattgcgtttccgttgtcggcctcccactgcagagcctgtcttccaccgtgacccttgaac

SEQ ID NO: 793390 - DNA, 75 bp, Homo sapiens
aatattgagatttccgatgagagaaattacgacaactacgagactgcattattgggaaaaggccagaagaagaaa

SEQ ID NO: 793391 - DNA, 140 bp, Homo sapiens
ccgagtggaaggaggcagaggagcttggggaggactctgcagccagcctcagcctgcagctgtccctccagagctttccccagacatggccaacaagggtccttcctatggcatgagccgcgaagtgcagtccaaaatcg

SEQ ID NO: 793392 - DNA, 75 bp, Homo sapiens
gccatgtgggctacacactctcctacaacaaaccagtccagctacgggggcccagccagccagcagctgagtggg

SEQ ID NO: 793393 - DNA, 83 bp, Homo sapiens
cagctccacattgagagcaaaatctacaagatgatgcagggaggaggctgaccccgcactacatctacccaccagccatcgtg

SEQ ID NO: 793394 - DNA, 100 bp, Homo sapiens
cggcatgtcatctttgccaggactgatgcagatgcccctcctccaccagaggactgggaggagcatgtcaacaggtcgccactgggacactgtgaaccag

SEQ ID NO: 793395 - DNA, 100 bp, Homo sapiens
ctgatttctggcaccagcatagccagtagtattcgatgtatgagaagagctgtcctgagtgaaacttttaggttaattactacgaagctgggaatttcag

SEQ ID NO: 793396 - DNA, 100 bp, Homo sapiens
gtggcagtcctttgccagtggaaggagttcctgctaaggggaggtgcaggaggtggagccgccaccaaaatgcagattttcgtgaaaacccttacgggga

SEQ ID NO: 793397 - DNA, 83 bp, Homo sapiens
ttcgccgaggcaccgaggcactcagaggagatctgggcggaccccggcaaatacgccctgatgggagctgctgcccagctggg

SEQ ID NO: 793398 - DNA, 100 bp, Homo sapiens
tggaaacaattgatttgctcttacgtatttgtgtgacttgactcttcaaacacaaaggactgccattttcattaagaactgccacttagaggtaccaaaa

SEQ ID NO: 793399 - DNA, 96 bp, Homo sapiens
cagtccctggatcaccgacagcacagacagaatccctgctaccagtcgaacaagtaaaattacttgaccgattcagtaccagcaacaagtcattaa

SEQ ID NO: 793400 - DNA, 100 bp, Homo sapiens
ccactaccgccatgggcctcactatctcctccctcttctcccgactatttggcaagaagcagatgcgcattttgatggccttcctctccggttctgggtg

SEQ ID NO: 793401 - DNA, 75 bp, Homo sapiens
ttatcctcaagagtcagctggcagccccatggcctttctgtggtgctcacgtccccagcggtgttcactttcacg

SEQ ID NO: 793402 - DNA, 99 bp, Homo sapiens
ttcatggaacctgtgaagagaacagaagctccaggatattatgaagttataaggttccccatgggctatggagttactagtagagaaagcaatcagcag

SEQ ID NO: 793403 - DNA, 75 bp, Homo sapiens
tttcactaagtagtttgaacctggctgttcctccaccaagatttgttgatgaaaaaaccgtaggagaacctggtt

SEQ ID NO: 793404 - DNA, 100 bp, Homo sapiens
gataaagatgatgatatccttctcaaccttgtgggatgtgaaaactctgttactgaaggtgatgcagaagatggggaagaatatgatgacccttttgctg

SEQ ID NO: 793405 - DNA, 101 bp, Homo sapiens
cgaaacctagccccggacgagaagcgcagcaacgtgcggtgggaccacgagagcgcttccgaagatcttctcaaggaacactacgttgacctgaaggaccg

SEQ ID NO: 793406 - DNA, 96 bp, Homo sapiens
gggagaggatggacgagggatgcggagagaccatatatgtcattgggcagggatcaggtcttgggcgtctttggtactggcttttttaggggtctg

SEQ ID NO: 793407 - DNA, 83 bp, Homo sapiens
gagacggcgatccgggcgctcgagacttaccagagccacaagaatgttggctaccagggtatttagcctagttggcaagcgag

SEQ ID NO: 793408 - DNA, 75 bp, Homo sapiens
ctctgttctaagtgccttaagagaggatcgcccaatccacatgcttttccagcaggagcgagaacccgagcagcg

SEQ ID NO: 793409 - DNA, 98 bp, Homo sapiens
agacggcggccttcgaggaggtcatgaaggacctgagcctgacgcgggccgcgcggaagctgcacacatacatgtaagagaagcaaaaatgtcagatg

SEQ ID NO: 793410 - DNA, 82 bp, Homo sapiens
cctggagtaaccctcactggagaatccagagacctcccagtgccaagtgtataagcgtgtccagaattggtgggtctcactg

SEQ ID NO: 793411 - DNA, 75 bp, Homo sapiens
ctgaactggatcataaatgacagcctatttgatggctttgcagatggactaggagttgctgaagctatttcatat

SEQ ID NO: 793412 - DNA, 119 bp, Homo sapiens
ccaggaccaaaagaggaagatagtcttgggacccttgcatggtgtttcaaagggtggtgaagaactaaggaacaagatcttgatatttggcctctttgaagagacagccctggctgctt

SEQ ID NO: 793413 - DNA, 100 bp, Homo sapiens
gccccgcgcctgccgctgccctacggcttctccgccatgcaaggctggcgcgtctccatggaggtggttcagtcaggtggcaaaaacattgaacttgctg

SEQ ID NO: 793414 - DNA, 100 bp, Homo sapiens
cagtcccacacactttactccaaaaggacccgaggatggcctaccaggtggtggagaagggcgcggccctgggcacgctggagtcggagctgcagcagag

SEQ ID NO: 793415 - DNA, 75 bp, Homo sapiens
ccagtacctgcccaggaaactgctgctgtcccccagcaacgtggccatctacggtggcctgtgcgccttggctac

SEQ ID NO: 793416 - DNA, 100 bp, Homo sapiens
cgctgccgctatggatgatcgagaggatctggtgtaccaggcgaagctggccgagcaggctgagcgatacgacggtggatggaagtttgcttagttgaag

SEQ ID NO: 793417 - DNA, 98 bp, Homo sapiens
cggcggcggcggcgccaggacatggagctcgagaacatcgtggccaactcgctgctgctgaaagcgcgtcaaggatgaatttcacccattcatcgagg

SEQ ID NO: 793418 - DNA, 83 bp, Homo sapiens
gctgacgctgctgctgtgtgcggtgctgctgagcttggcctcggcgtcctcggatatatttttgccatcatggatcagtttgg

SEQ ID NO: 793419 - DNA, 90 bp, Homo sapiens
aggtatcagaagttcacatatcaaatatatctgcccgcatgcatcaccagaaactagaacgtgaggctcggatatgtcgacttctgaaac

SEQ ID NO: 793420 - DNA, 75 bp, Homo sapiens
ctaggagagaagacttcctgtaaggggacacctgtgttcgtgcatgcgggcccttttgctaacattgctcacggc

SEQ ID NO: 793421 - DNA, 82 bp, Homo sapiens
gataagggcgacagcaacagctctgccggctggaaggacaaggaagatggggagccaaagaccaagcatctcagagaagagg

SEQ ID NO: 793422 - DNA, 75 bp, Homo sapiens
cctttgtctcctcagcagacgcggaagcttcccattgaccggggtggaggtgaaggaaaggccatgtacattgac

SEQ ID NO: 793423 - DNA, 90 bp, Homo sapiens
gtggaatgtttacttgtaaatatgcagattatatttctagggacaaacctatcacatttactcagggggtgctcaaaggatttaaaggag

SEQ ID NO: 793424 - DNA, 98 bp, Homo sapiens
gtacttgggcttgccagtggcggattacttcaagcagtggattaatctgaaaaaggtgaaagaactcttttcttctttgggagtcgaatgtaatgtct

SEQ ID NO: 793425 - DNA, 95 bp, Homo sapiens
caaatggcggacttcgacacctacgacgatcgggcctacagcagcttcggcggcggcagaggcataagctgtggccatgactactgaagtaggct

SEQ ID NO: 793426 - DNA, 50 bp, Homo sapiens
gctcctggagaccctggcctgcaggacttcggcagtctgtccaaccttca

SEQ ID NO: 793427 - DNA, 85 bp, Homo sapiens
tctgcctgtctgcaacaccgggaggcaaggagcacctggtctggcagtccacctaaacccactgtgttcatctctggggtcatcg

SEQ ID NO: 793428 - DNA, 100 bp, Homo sapiens
tgtgattgagcagtttgaagacttgctagttaggattttattactggcagcatgtatatcttttaacctgaatggcgtgatggtggcagtggcggagctg

SEQ ID NO: 793429 - DNA, 74 bp, Homo sapiens
cgctctgcaggggatcctctctgctttcctgacctgcgaccgcatcaagcagtccgccagcggaaccaagcggc

SEQ ID NO: 793430 - DNA, 87 bp, Homo sapiens
ccggtcctgaccaccgtgaacggacagtcccccccaggtgtattgccaggaatggcccctcctatcgtacccatgatacatccccag

SEQ ID NO: 793431 - DNA, 123 bp, Homo sapiens
ctcaggattcatatcccaggatgccttccagtccaagtcaccatcccccatgccgccagaggcccccaaccaggtcattgaatctttgggaattattatttataaagcactggactatggttt

SEQ ID NO: 793432 - DNA, 87 bp, Homo sapiens
cataatggagaccaagctcaaacccctccggaagagagacaagagagacacctccaacttcgacaaagagttcaccagacagcctgt

SEQ ID NO: 793433 - DNA, 75 bp, Homo sapiens
gcctcagcctcccaagtagttgggattacagtgccggtggtggtgtgcacattgagccccggtatagacagttcc

SEQ ID NO: 793434 - DNA, 76 bp, Homo sapiens
cgtcctcctcacggtcctcctggctgtgctcatatacacctggcagcctggcatcctcgctacaacctcattgttg

SEQ ID NO: 793435 - DNA, 74 bp, Homo sapiens
aatatagtttggtgtttcggaagccaaggagcgagaacccgagcagcgccatgagcaacactaccgtcgtcccc

SEQ ID NO: 793436 - DNA, 100 bp, Homo sapiens
cccgccgctccttgggctacgcgtatgtgaacttccagcagccggcggacgggctttgttcgcgggggtcacagctctcatggctgcagctagcgtgacc

SEQ ID NO: 793437 - DNA, 90 bp, Homo sapiens
gccaatggaatgggtgtcattggacaggatggtctgctttttaaagtgactctgggcttaattagaaaagtgttgcggagataggaacat

SEQ ID NO: 793438 - DNA, 96 bp, Homo sapiens
caatgatgggagaccaccgggatgggcaggtacaggtttgcagattccgccagcagcacagcaagctctacagatgagtggctctttggcatttgg

SEQ ID NO: 793439 - DNA, 124 bp, Homo sapiens
accggcgtgccccaccatgtcagacgcagccgtagacaccagctccgaaatcaccaccaaggtatcgagaaccttccctgcgaacttcagaggaacttccagctgatgcgagagctggaccaga

SEQ ID NO: 793440 - DNA, 75 bp, Homo sapiens
tctcgggggccgctctgggatcccggccaccagcaattgtccgcaaactgtgctcacaggagaaactagaggaat

SEQ ID NO: 793441 - DNA, 98 bp, Homo sapiens
cctcctcttcggcggcggcagcgtccaccatcttcctcttgctgccagtggtagcgctcgtctggcggagctggtaagagatgctaaaaaccttgtac

SEQ ID NO: 793442 - DNA, 100 bp, Homo sapiens
ggaggaagaagaagaaaaacagaagagtttgctgagagaaaggagacgacagcgaaaaaatagggaatctttccaggtggcccgaggcaccacaacccgg

SEQ ID NO: 793443 - DNA, 73 bp, Homo sapiens
gccatggtcactgctgactccaagtactgctacggcccccaaggcaggcagcggaggaggagaaagagatgga

SEQ ID NO: 793444 - DNA, 100 bp, Homo sapiens
tccgcgtggacggcgtctccggagaaaccagcctggacaccaagtctgtgtcagaaggccacctcaagaggaacatcgtggtgaagaccgtggagatgcg

SEQ ID NO: 793445 - DNA, 82 bp, Homo sapiens
ctgggatcccggccaccagcaattgtccggagttcaaagaaggacgcagagccagccacacagccccacaggtcctctttag

SEQ ID NO: 793446 - DNA, 100 bp, Homo sapiens
tggaagaggatcttgggcgccgccagggaaagaatatggcaaagctgatgcaagatgggtttattttgatccaaccattgtgtctgtggaaattctgacc

SEQ ID NO: 793447 - DNA, 83 bp, Homo sapiens
agaagcacagcaagaacatcacccagcgcggcaacgtcgccaagacctcggtcgcaatggaagaagagatcgccgcgctggtc

SEQ ID NO: 793448 - DNA, 100 bp, Homo sapiens
aggaagcagcccccagcctcggacgccgtggcccttgggagagagccatcgacgagtacaagccccaggatgctaccaccaacccgtccctgatcctggc

SEQ ID NO: 793449 - DNA, 95 bp, Homo sapiens
aaagttgatatttggtcacttggcatcacttgtattgaattgggtgaaatgacaatggatgctctgttggctcgattgaaacttctgaatccaga

SEQ ID NO: 793450 - DNA, 100 bp, Homo sapiens
gtcgtgactccagagaagccgatccccatttttattgaaagatgtattgagtacattgaagccacaggtggagccccctgagctgcccgctgatctgcag

SEQ ID NO: 793451 - DNA, 83 bp, Homo sapiens
gcctcagttggaagcagccgatccagcctgcggagcctgtggggcaggaaaatgttggggcttttcaggaagcataataagat

SEQ ID NO: 793452 - DNA, 85 bp, Homo sapiens
ggctcccacctggtgctcactgcccacactgaggctctcctgcagaaggaagagtctaacctgtctctgcaagctcttgagtccc

SEQ ID NO: 793453 - DNA, 100 bp, Homo sapiens
tcaagaagacagaggtgctgatggagaacttccgcagggccattggatttggtgctatggagaaatttttggtagaatataagagtgcagtggagaagaa

SEQ ID NO: 793454 - DNA, 96 bp, Homo sapiens
ccgtcagtacgcgaaggatatcggtttcattaaggtctatgttaacaatgaatgggcaaccagtgttggggaaggagggagctttggagaacttgc

SEQ ID NO: 793455 - DNA, 101 bp, Homo sapiens
ggtccattcaacaaatggttattggatgcccattatgtggcaggcactgttccgggggagaggatttctctctgatcaaacggacagttcaggactcagaa

SEQ ID NO: 793456 - DNA, 100 bp, Homo sapiens
aaatttcctgaacacaccattatggcctgcactgcccaaagtcttggaaacttgctggatatgatgtaccgggagccagcacgatggtcctacacattcc

SEQ ID NO: 793457 - DNA, 99 bp, Homo sapiens
catttttatggatgaaatagatgctattgctacttcagtgccctcatcctggtggagggcatggatatcgagtccttgcataagtgtgctttggatgac

SEQ ID NO: 793458 - DNA, 99 bp, Homo sapiens
cgggagcgagctgggagggagccgcgcgcctttgtgcgcgcgccgaggcttcaacggaccacaccaaaatgccatctcaaatggaacacgccatggaaa

SEQ ID NO: 793459 - DNA, 124 bp, Homo sapiens
atctgacgacgtgaaggagcagatttacaaactggccaagaagggccttactccttcacagatcggaaataatgaagatgtttcattttcaagaccagcagatcttgaccttattcagtcaact

SEQ ID NO: 793460 - DNA, 51 bp, Homo sapiens
ctgccagcttccttgtgagcaagaagcctcctgacaaggtgatccgggcgg

SEQ ID NO: 793461 - DNA, 88 bp, Homo sapiens
gcagtctacgagcttgagagaattctgaacaggtccaagccttatgcatttgatcgggtgttccagtcaagcacatctcaagagcaag

SEQ ID NO: 793462 - DNA, 82 bp, Homo sapiens
atccttcagacctggcagcagagggaggcggatctgctggaggacatcagtttggtgccctggttgtcagatgttggaaagc

SEQ ID NO: 793463 - DNA, 75 bp, Homo sapiens
tttagccagtatttctacctatggctttcgaggtgaggcctgggccgaggccactggtgcatatgttcccgggag

SEQ ID NO: 793464 - DNA, 100 bp, Homo sapiens
tttgtgggacaaggaacacatttatgatgagcagccccccaatgtcgaggagtgggtgtgaaaatcacaaatgtcaaatgatggaagatccaggaatcgg

SEQ ID NO: 793465 - DNA, 100 bp, Homo sapiens
gcctccccttctattggaatttccactgcatgctagctagtccttccctgggcggcgactggcggcgcgatggacctgaccgggctcctgctggacgaag

SEQ ID NO: 793466 - DNA, 90 bp, Homo sapiens
aaagccttgaagtacttgtttagattcatcatccaatcccgagtgctctacttgagcgtcagcctcgagtttgaccagcagcaggggtcg

SEQ ID NO: 793467 - DNA, 88 bp, Homo sapiens
gggactgcggcggcgccggcctccggggagaaacgaccatcatcaaagaggggatgctgaccaaacagaacaattcattccagcgatc

SEQ ID NO: 793468 - DNA, 100 bp, Homo sapiens
tcggaaggtggacttcatgttgatttagctcaaattattgaagcctgtgatgtgtgtctgaaggaggatgataaagctggagtcacatcagaagccgcgc

SEQ ID NO: 793469 - DNA, 83 bp, Homo sapiens
ctgaggtgccctaaacacactatgaccgagtgaagacatttccacctggacacctgaccatgtgcctgccctgagcagcgagg

SEQ ID NO: 793470 - DNA, 144 bp, Homo sapiens
gagaaatctgacataactctgcagatggctaggttgccatggaacacctggggattgttctttaaggaaaaggagtgtttctcaggagctatcagaaactatcctcaccatggtagccaattgcagtaatgttatgaataaggc

SEQ ID NO: 793471 - DNA, 100 bp, Homo sapiens
cactgctgtctctgtatatgttctgtgagagacaaagcatggaggacacaagaatgggaggaaaggcggactctcaggaacttcattcttcacgtggttt

SEQ ID NO: 793472 - DNA, 100 bp, Homo sapiens
gggtgtgttcttctctggactccttagatgactctgtggtgggtccctcagcccttctgagctctgtgctgaacaagatcagcatctcatggaatacttc

SEQ ID NO: 793473 - DNA, 100 bp, Homo sapiens
atgagcagccccccaatgtcgaggagtggggccaggaaggaatactgggagaatcttcggatagcctcaggccggccatacaacccttcaatgtcaaagc

SEQ ID NO: 793474 - DNA, 74 bp, Homo sapiens
agtgacctcagcagggcatccaggtgctgctagctgaggaggggatagctcctctttcttctgcaggaccaggg

SEQ ID NO: 793475 - DNA, 100 bp, Homo sapiens
gtccatcaatcacacgtaccacctggatgttgtgggagcagggaaaacctgaggtgcttggaggtccagacacaagaagaggattggaaccagttccgat

SEQ ID NO: 793476 - DNA, 100 bp, Homo sapiens
tggtcatcggaagtggtgccttcagcacaggtgtcatggagaaactccagctgggcccagagattctgcagcgggaaaatccaaggcttatttatgccag

SEQ ID NO: 793477 - DNA, 96 bp, Homo sapiens
cctttttgtcagattatcaggatgagggcagctggctaagagtcttgggcaggctggtgaaattgagcctgaaacagaaggaatactaacagagta

SEQ ID NO: 793478 - DNA, 82 bp, Homo sapiens
agcactcgagcccgagcgtgcggctgctgccctcaggtgagcccagagatgccctgtatccaagcccaatatgggacaccag

SEQ ID NO: 793479 - DNA, 90 bp, Homo sapiens
cagccgccctccatcctctacgggggcaggtgtgccgcatactaagtccctggagagccgcatcaaggaggagctaattgcccagggcct

SEQ ID NO: 793480 - DNA, 79 bp, Homo sapiens
ctggcatatctgggcgccaagccgcggagcctccagacggggagtgcatccgccccaacccttttccccctcgtctcct

SEQ ID NO: 793481 - DNA, 100 bp, Homo sapiens
tcgtcgacatgagtgatgtggaggaaaacaacttcgagggcagagtgtcagctgtgatgcatgtttaaaaggaaattttcgaggtcgcagatataagtgt

SEQ ID NO: 793482 - DNA, 105 bp, Homo sapiens
cgcgcatgggcctgttcctggcccgcagccgccacctacccagtgaccatgatagtcttcaggcagtgacagtggtgggagcagcagcagcagcagcagcagcat

SEQ ID NO: 793483 - DNA, 74 bp, Homo sapiens
ttcgcctggcccaccactcccagagatacagccttttcctccctctccatgaactctggaaacagtacatcagg

SEQ ID NO: 793484 - DNA, 82 bp, Homo sapiens
ttactgtacagcctgcagaactctaagaaacctttccagcttggacctacgtcatatcactgaactggataatgaaaccgtg

SEQ ID NO: 793485 - DNA, 100 bp, Homo sapiens
tgattgcagaattcacatatttgctcaacaaaatgatcaggccactggagaatgcacggcaaccgtggggaagaggagcagtacgaaattctccgtggct

SEQ ID NO: 793486 - DNA, 82 bp, Homo sapiens
ccgaggcaccgaggcactcagaggaggtggtggccgtggtgatggacatgttcactgatgtggacctgctcagcgaagtgct

SEQ ID NO: 793487 - DNA, 100 bp, Homo sapiens
cgcgcctggcggctacatggagagtgtcagttggttcgactatgcaatgagggcgcccggaagatggaaaggactgagatgatgtacacaattaactccc

SEQ ID NO: 793488 - DNA, 100 bp, Homo sapiens
ccgacggcagccggcacctgacggcgtgaccgacccgagccggtggtataagttgaaatccaaaccaggaaagaaggacaaggagcgaggagaaattgag

SEQ ID NO: 793489 - DNA, 100 bp, Homo sapiens
acaaattgatgcacaaaataagctggaaaaatctgagcttcgcctcaacagcatcaagaagctgtccaccatcgccttggcccttggggttgaaaggacc

SEQ ID NO: 793490 - DNA, 94 bp, Homo sapiens
atctgcttaggattcactgcacatcgaattaagagagcagaaggatgggaggaaggtcctcctacaggccctcgggaccaaggatcacgtcatg

SEQ ID NO: 793491 - DNA, 130 bp, Homo sapiens
caccgctccagccgcccgcgggccagcgcaccggtcccccagcggcagccgagcccgcccgcgcgccggcagaatccagagaccacatttgaagtatatgttgaagtggcctatcccaggacaggtggca

SEQ ID NO: 793492 - DNA, 100 bp, Homo sapiens
ggtgaatacacgatttggtgcagccggggtttggtaccgagcggagaggagatgcacacggcactcgagtgtgaggttgaaatcacaaagattagacacc

SEQ ID NO: 793493 - DNA, 90 bp, Homo sapiens
gaagcatgctaagaacaacagtcaggccaagccttctgcctgtgatgacctcctgccccccgaggtctgcagtctcctgaacccagcagc

SEQ ID NO: 793494 - DNA, 75 bp, Homo sapiens
cagagctgaggactgcctgtttgcagggcagaaatttagcatctggagaggttggattttttccaagtgatgcag

SEQ ID NO: 793495 - DNA, 100 bp, Homo sapiens
cagtgcccggcgacactgcacccatcccggctgcttttgctgcgccctctcagcttcccaagaaaggttttgagcaaaattttggactgtgaagcaaggc

SEQ ID NO: 793496 - DNA, 50 bp, Homo sapiens
ctcaaatcaaccacaagctggagacaaatcttcctattttcaagctgaaa

SEQ ID NO: 793497 - DNA, 75 bp, Homo sapiens
agaggagggcaagaagggcaagaaggaacattttagtggacaaaccaaatgaccaatcttcaagatggtcttcag

SEQ ID NO: 793498 - DNA, 100 bp, Homo sapiens
cctccccctcccccaaccaactgagaaactgctgcctcatatccgggggaatgtgggctttgtgttcaccaaggaggacctcactgagatcagggacatg

SEQ ID NO: 793499 - DNA, 100 bp, Homo sapiens
cagcttcccagacgtggaaaaggctgaatggctcaataagcttgccagcaaagcacggacagagaaggaggagaagctgagccaggcctatgcaatcagt

SEQ ID NO: 793500 - DNA, 75 bp, Homo sapiens
agcaaggggcttacgcagaaggacctggccacgattatgatgcatcattatcacagaagaaattcgtgtctatag

SEQ ID NO: 793501 - DNA, 75 bp, Homo sapiens
gcgacatcccagagagcttccagagagtacaagcgcaagctagccagagtttccctggtgcgcaaagaactcagg

SEQ ID NO: 793502 - DNA, 100 bp, Homo sapiens
ctaaaaacaagactggggctgctcccatcattgatgtggtgcgatcgccggaaggaatcagaatgaacaaaactgtggctgttcgcaccctggatccaga

SEQ ID NO: 793503 - DNA, 75 bp, Homo sapiens
tgctgctccaggcggtcttattggagttggaattagttggtccctactgtcccccatgaggttgtgaacccctcc

SEQ ID NO: 793504 - DNA, 48 bp, Homo sapiens
tatgctggctgttatgtacgcaggagacttaattcagtgcacaaatga

SEQ ID NO: 793505 - DNA, 100 bp, Homo sapiens
cgctttctacctgcccggcctggcgcccgtcaacttctgcgacgaagaaaaaaagagcgacgagtgcaaggacatggatttgattgacatactttggagg

SEQ ID NO: 793506 - DNA, 100 bp, Homo sapiens
acccacggagcctccggggctgggatgctgctgggctcccctgcgggctcatcctcaattcttagcgatggagtgtacgagaggcacatggaccctctgc

SEQ ID NO: 793507 - DNA, 80 bp, Homo sapiens
accgacgaggagaggctggctgagtccaagcaggcgtttgtaagactttgaccccgacgcaggcttcagtgattgccgcg

SEQ ID NO: 793508 - DNA, 74 bp, Homo sapiens
taaacgcggttagtgcaagcatctgggccatcttcaattgaaaatgcctcgtgtaaaagcagctcaagctggaa

SEQ ID NO: 793509 - DNA, 100 bp, Homo sapiens
gcgaagtccagcaagtattgaagtagtaaaaccgatggaggctgccagtgccatcctttcccaggctgatgctcgacagactatgaaagtgatgacgact

SEQ ID NO: 793510 - DNA, 100 bp, Homo sapiens
acacagccagcgcaggaggcaagattttgaaatctatggctgacagataaggcagtgaaggactattccgcttaccgttcttcccttctcttttgggccc

SEQ ID NO: 793511 - DNA, 75 bp, Homo sapiens
aggtgcgcgtgtgtgagccctgctacgagcagctgaacaggcatctctgggaaaggacctggggctggtgagggg

SEQ ID NO: 793512 - DNA, 98 bp, Homo sapiens
ccagcagtactctcggggcccccgggctccttcttcggattctcagtggagttttaccggccgggaacagacggggagaaggatggcatccggaaggc

SEQ ID NO: 793513 - DNA, 100 bp, Homo sapiens
ctcgactgcctcccagaacaaagtgggaaagggaagcttagcccgccgctgccgcctccgagcagcccgccaggaaccacttgggataaatgaacctccg

SEQ ID NO: 793514 - DNA, 75 bp, Homo sapiens
cttgaaggaaatgacattgagcttgtttcaaattcagagctttttagatgaggaatttcctcactatgattccct

SEQ ID NO: 793515 - DNA, 98 bp, Homo sapiens
ccgcggggcagttcgggccggctgtcctggcgcgaaatgtttgcaacacaaggacattcctgtccccaagggctttctgacttcctccttctggcgct

SEQ ID NO: 793516 - DNA, 100 bp, Homo sapiens
agattttaaggatcacattccaagggaaactgatatgaagatagagaagctattctggaatcagatgccagagtgaaggaacaacgtaaaggagctggag

SEQ ID NO: 793517 - DNA, 83 bp, Homo sapiens
cagacttccagccttcagaactgtgacttaagagattaaaattaatttggttgctgttggttctgaacaaataatgagttctt

SEQ ID NO: 793518 - DNA, 100 bp, Homo sapiens
gatgtgttgtgttcctggcttccctctggatgctgacagaaacaaggatccacagactttctattatgctgttgctgtggtgaagaaggatagtggcttc

SEQ ID NO: 793519 - DNA, 83 bp, Homo sapiens
ccagatccatttacactttacagccagaagcggactcctagaagaggggagcagcaaggatggaatgacagccgtgggccgga

SEQ ID NO: 793520 - DNA, 99 bp, Homo sapiens
gcagacgccaaggcccctccggccagggccgggagccgggccggcctagccagtccaagtggtaagaagttcagaagcaagcctcagttggcaaggtac

SEQ ID NO: 793521 - DNA, 73 bp, Homo sapiens
tcctggagcacctgcagctggcgcctctgcagtggggtaacatttgtcgatcacccattgcagaagcagtttt

SEQ ID NO: 793522 - DNA, 88 bp, Homo sapiens
ttatctaaacggttaggaaggagtatagatgacataggtcacctcattcatgaaggcctacagaagttagatgtaatcatagcagatt

SEQ ID NO: 793523 - DNA, 98 bp, Homo sapiens
gtctcggcaaatattacacttctctccttgaattcaactgaaaaaggtgcaggagcagcgggagcaggaggccaagcgggagccagtggggaatgacg

SEQ ID NO: 793524 - DNA, 101 bp, Homo sapiens
ccgggctcagtcctgtccaacacacttctcagaacttctggatgagttttcccagaacgtcttgggtcagctcctgaatgatcctttcctctcagagaaga

SEQ ID NO: 793525 - DNA, 75 bp, Homo sapiens
tgatgaggacattgacccctgtgagccgagctcaggtgggttaggatttacagaagggggaaacccaactgtgga

SEQ ID NO: 793526 - DNA, 75 bp, Homo sapiens
ccgacacttggaggagcgaggggtgcaggtggctggtcattgaccgcaaggtttacaacatcaccaaatggtcca

SEQ ID NO: 793527 - DNA, 74 bp, Homo sapiens
tatcattccatccctccttcattttcacctctgcacacagcatgcctctgcaatgccatcattgctttgctgaa

SEQ ID NO: 793528 - DNA, 100 bp, Homo sapiens
gagactccacagaggcctggaagccaatgcccctgctttcgacaggtgcactttacaggtccccgatgaaccaagagaaccctccaccatatccaggccc

SEQ ID NO: 793529 - DNA, 74 bp, Homo sapiens
aggaatccgagaagagcagagcggagggagccccagacacggctcactcagtaacttgatggattttgtgaaga

SEQ ID NO: 793530 - DNA, 98 bp, Homo sapiens
tggggaagcgggacaatcgggtgcggaaaggtcagccccccgctgcaagttcttagattcctggaggatctgcagagtcaacattaggagtatccatc

SEQ ID NO: 793531 - DNA, 74 bp, Homo sapiens
ggccagtctggagacagtcaagggcggcgactggcggcgcgatggacctgaccgggctcctgctggacgaagaa

SEQ ID NO: 793532 - DNA, 99 bp, Homo sapiens
gtcagcacaaatctgaagatggtgtcaaagagaaattctggtgctggagaatctggtaaaagcaccattgtgaagcagatgaggatcctgcatgttaat

SEQ ID NO: 793533 - DNA, 90 bp, Homo sapiens
aagaaaacctcaggaaattctacaaggcctcatgcattgtgcgtcagcagcaatgtttatggtgaaaaatggcaacgggaccgcgtgcat

SEQ ID NO: 793534 - DNA, 90 bp, Homo sapiens
gaatatgctagtggaggggaaatatttgattggctctaccagtgcacctggacagggaggaatcctggctcagcgggagtttgacaggcg

SEQ ID NO: 793535 - DNA, 83 bp, Homo sapiens
ctctcatctcgctcggctgcgggaaatcgggctgaagcgactgagtccgcgatggaggaacaagatcactcaaggtgaaggat

SEQ ID NO: 793536 - DNA, 96 bp, Homo sapiens
cgagaccgtgaccgagagcgtgaccgagagcgcgaatatcgtcatcgttagaagagtgctctgttactgactcagtgaacctggctgagcccatgg

SEQ ID NO: 793537 - DNA, 114 bp, Homo sapiens
tgctccacatcaccgacatgaagggaacaggcatcatggactgtgcgcccaagacgaagttatacggaagcgtctcctcattgatggagatggtgctggagatgatcggagaat

SEQ ID NO: 793538 - DNA, 75 bp, Homo sapiens
caggacgtctacctgtccaccgtcgtgaccgaggttcattttccagacactgaaagagcagaatggctaaataag

SEQ ID NO: 793539 - DNA, 75 bp, Homo sapiens
ttctctctttgggaggaggaagggacaccgagggaccaaagggcgaaccccgagatgcccctgtccttcacaata

SEQ ID NO: 793540 - DNA, 98 bp, Homo sapiens
aggatgaagacctctcggagatcactgatgagtgtggcatcagcttacagtgcaaagacaccctgtccttacggggttccccactgaaggacttggtc

SEQ ID NO: 793541 - DNA, 100 bp, Homo sapiens
tggagatgaagaagaagattaacctggagttaaggaacagatccccggaggaggcgtccgacctccgatcatgaacgggcccctgcacccgcggcccctg

SEQ ID NO: 793542 - DNA, 87 bp, Homo sapiens
gcgaactaactggagcacggagctgcagccggttgggccggtgtactttcccgactagatgagacaatacaggccattgccaatgga

SEQ ID NO: 793543 - DNA, 75 bp, Homo sapiens
gcgtcactaatggaggacgccgtccagattctccttgttttcatggattcagtcaagttcagcagctgtgtgggg

SEQ ID NO: 793544 - DNA, 50 bp, Homo sapiens
tcctcattcaaacagttattttggaaggtgtggctttgatagctggtggt

SEQ ID NO: 793545 - DNA, 75 bp, Homo sapiens
gggtcctcagcttccacagcgtgtctggacgcacgtggtccggcattacaaggtgaagcgggagggccccaagta

SEQ ID NO: 793546 - DNA, 95 bp, Homo sapiens
gtgtcctgagatcaaatggcacttcattggccacctacagaaacaaaatgtcaacaaattgatgggcgtcgaccagaagattatgatattcataa

SEQ ID NO: 793547 - DNA, 74 bp, Homo sapiens
gaggaataagcagacctacagcactgaactgtggctgcaccatctgtcttcatcttcccgccatctgatgagca

SEQ ID NO: 793548 - DNA, 100 bp, Homo sapiens
gctgcaatatttaattcagcctttggaagttttttggttaatttggagtggcccctggagtcagtttcctacaccatccgaggccccacccagcacgagc

SEQ ID NO: 793549 - DNA, 80 bp, Homo sapiens
gaattattttgcaccactggatgttgtttactggtaaacgcaaagcactgaagttgaattttgcaaatccacctttcaaa

SEQ ID NO: 793550 - DNA, 82 bp, Homo sapiens
ccaccgccctggccatctaccatgtgcggaatcggacatgtccaaaccaccgtgttacgaagaggcggtgctgatggcagag

SEQ ID NO: 793551 - DNA, 80 bp, Homo sapiens
agtaatgctggggaccctgagatcgtcaagtctcccagcgaccccaagcaataccgcatgttggaacaggattccaggag

SEQ ID NO: 793552 - DNA, 83 bp, Homo sapiens
atgagctcggttttcttatgcttataagagtggaacaggtgtcctgtggccaggcggaaagcagtgagaagcccaacgctgag

SEQ ID NO: 793553 - DNA, 50 bp, Homo sapiens
aatccatgtttcttccaagaagcaggtagctacagcaagctgggtagcag

SEQ ID NO: 793554 - DNA, 90 bp, Homo sapiens
ctaagatcgacgtgtaccactacgaggtggacatcaagccggataagtgtccccgtagagtcaaccggcaagctttgttgcttctgaaaa

SEQ ID NO: 793555 - DNA, 75 bp, Homo sapiens
caactatcgacttggagtactcgcgaatcagtgggaagtggcctacagtgggtcggctaccgaatacaccttcac

SEQ ID NO: 793556 - DNA, 96 bp, Homo sapiens
gaccaagcagttggggaaagtaattttgtttgccgaagtgacccccacaacgatgcgtctcctggatggatacaaggcagatccaaccatccccac

SEQ ID NO: 793557 - DNA, 100 bp, Homo sapiens
gaaaagtccatggaaccatctctcaagtatatcaacaagaaatttcccaacatagatgtccgaaacagcacgcaagaagatccatcgcagagtcctaaag

SEQ ID NO: 793558 - DNA, 82 bp, Homo sapiens
gatggacagggattttgtcaaggaggattcagcattgattttactaaagtgagccagccatgagagggtatcttgtggccat

SEQ ID NO: 793559 - DNA, 73 bp, Homo sapiens
gtctcctttttcaacaaatgggaaggtgggagtcaatcattttgacaagtctcctgaaaggaacagctagcag

SEQ ID NO: 793560 - DNA, 82 bp, Homo sapiens
ccctggacagtaacaaaacatataaagcccgagcccaaaccccgccaccatcataggtccagtggcattgcagagcacggat

SEQ ID NO: 793561 - DNA, 82 bp, Homo sapiens
ctcagccgcttggggcccgcacggaccctctacttcaggaccagttactctccacaagaaaattcacacaaccacagtgctc

SEQ ID NO: 793562 - DNA, 85 bp, Homo sapiens
gaggaagtggagatcggcagagacaccttctggcccgacttaattcagtgcacaaatgagatgaatgtgaacatcccacagttgg

SEQ ID NO: 793563 - DNA, 90 bp, Homo sapiens
gccggcaaccagctgtaagcgagtgattcgcctttgccagtctcatctcgtgtctgctttgttaagttccatgatccagactcagcagtt

SEQ ID NO: 793564 - DNA, 82 bp, Homo sapiens
aaaagctctcagggatgctggtctggcagtcaggctttgccacaaatgtcagtgcagaactctggctggccccaccaagaag

SEQ ID NO: 793565 - DNA, 98 bp, Homo sapiens
gggaatcgcgttatgtcgcgaccgaagcaccaacaatgaatttcatggtggatgaaacagcagcaatcaactcaaacaaggaatcccagcaattggtg

SEQ ID NO: 793566 - DNA, 96 bp, Homo sapiens
tccacttaaaacctgaaaacattggaccacacaaagtcttactggaaaaacatccaggcaagtggacagcatttgcaacagcccagcaataagaag

SEQ ID NO: 793567 - DNA, 100 bp, Homo sapiens
cagagacattaagctcagcactctctaaaggagcaacagtttacagcccttccagatacagctaccaggtaaaataccatgaagattttgaaaaaacaaa

SEQ ID NO: 793568 - DNA, 101 bp, Homo sapiens
ccacatgaatattctgttttgctgcccgaagcttgtgataacaatccatattcctcatttggagcaactctggtgagggatgatgagaagaatttatggag

SEQ ID NO: 793569 - DNA, 83 bp, Homo sapiens
ctgagagtcaccacaaggccaaggtactttggaagtgttgctgaaatcatcaggaatcatcaacatagtcctttggttcttat

SEQ ID NO: 793570 - DNA, 90 bp, Homo sapiens
gtgaccaacatgctgtgatgtgtgccgagggaggaattggctgggatatgaagaacaacagcctgaggttccaattctttatcatgatgt

SEQ ID NO: 793571 - DNA, 142 bp, Homo sapiens
catggagccaggtgacgaggacctagactgtgacaacgaccacgtctccaaaatgagtcgcatcttcaacccccatctggagaactggagaagttaaatcagtccacggatgatatcaacagacgggagactgaacttgagg

SEQ ID NO: 793572 - DNA, 50 bp, Homo sapiens
ttggggtggtgaggcccgaggcagttattttaccaagaaaatggtttgca

SEQ ID NO: 793573 - DNA, 100 bp, Homo sapiens
gctccttggaaggtcgctgggaggtggcattcaaagacctcgcgacctgtgtcagcagagccgccctgcaccaccatgtgcatcatcttctttaagtttg

SEQ ID NO: 793574 - DNA, 82 bp, Homo sapiens
ccagaattcggccatgagccgctacatactcatcatggggctcctgtacaagacaatgcagatcttcgtgaagactctgact

SEQ ID NO: 793575 - DNA, 100 bp, Homo sapiens
cgtggccaagattcgcattgaagatgacgggagctacttccaaattaaccaaaaaactgtcgctgaaaagcaggagaagagaaatcaggatcgcttgagg

SEQ ID NO: 793576 - DNA, 75 bp, Homo sapiens
ggggttgcttgtcagtagcgggcaaggtgttacacataatattgcattacttcgagaggtgataatcaactcacg

SEQ ID NO: 793577 - DNA, 82 bp, Homo sapiens
gcgcgtatggagtggaaacgcttgtagggtttcaccaggaaacaaagcttagcaggagaggagagccagagaagtgacaggg

SEQ ID NO: 793578 - DNA, 83 bp, Homo sapiens
tgagcctgtgggacacttcggtgagagggtccaagcctggtaagaatgtccagcttcaggagaatgaaatcagaggactgtgc

SEQ ID NO: 793579 - DNA, 51 bp, Homo sapiens
ctcctgcaatgtggaaaacttgcagagaggatgccagcccccatcagattg

SEQ ID NO: 793580 - DNA, 98 bp, Homo sapiens
ggtgcacccccagtgggtcctcacagctgcccactgcatcaggaatgtgaccgcaacaagggaaaacatggcttatactgtggaatgcctgcggggtg

SEQ ID NO: 793581 - DNA, 75 bp, Homo sapiens
cacatccgtttccccaaattcaacttctccaacccagctcaacattggcaatgtgctccctgtgggcaccatgcc

SEQ ID NO: 793582 - DNA, 74 bp, Homo sapiens
ataagaatgattcagattttgaagctaaagttaagcagataatggcatcagctgctaaggaatttaaaatggac

SEQ ID NO: 793583 - DNA, 101 bp, Homo sapiens
gggcacccacggagcctccggggctggtgtggccgacgacgatgccctcgctgaggagcgcatgcggagaggccagaacgccctgccagcccagcctgccg

SEQ ID NO: 793584 - DNA, 100 bp, Homo sapiens
gcaactcgagccaagaaagtgaagatggccaccaaatcatgccccgagtgcgaccaacaggagtgtttctcaggagctatcagaaactatcctcaccatg

SEQ ID NO: 793585 - DNA, 74 bp, Homo sapiens
ctagcagcctcctgaataaaagtattctaccttgtaaatactgttatttgtatatactgtaaatgatgacatcg

SEQ ID NO: 793586 - DNA, 75 bp, Homo sapiens
gccctcatcctggttctggaatcctcagttcaagacacgaatgcagagtttgagtccagatcccaaagcccagta

SEQ ID NO: 793587 - DNA, 83 bp, Homo sapiens
ccaccaggcagcaagaatacgatgccatcagtggtatgctccagaatcactgacagagagcaagttttctgtggcctcagatg

SEQ ID NO: 793588 - DNA, 130 bp, Homo sapiens
gaacacaaagagaaggtgcttcagcgctgggaggggggtgacagcaacagcgacgactatgacctcgagtctgacatgctgaacatctccttcccagccactggctgccagaaactcattgaagtggacg

SEQ ID NO: 793589 - DNA, 113 bp, Homo sapiens
ttctggtggggagatgaacccaacctagtgggtgtaatacatcatgaactgcagggtacaccaggggttggaaaaaccacactaggcaaagaacttgcgtcaaaatcaggact

SEQ ID NO: 793590 - DNA, 73 bp, Homo sapiens
tttgcttttgtaacttttgatgatcatgatacagttgataaaattgttggaaggtgtcttgctgcaggtaact

SEQ ID NO: 793591 - DNA, 98 bp, Homo sapiens
gaagattattgagcggctggaccacctggagaatgtcatcaagcagcacattcaagatcctcgttcctagctgcctgccagcgtcctcggcccggccc

SEQ ID NO: 793592 - DNA, 100 bp, Homo sapiens
tggatccattcctcccattcatgtgcctccaggttatatctcacaggttcaggaagatttgactgaagagaaaaaaagggaactggagcataatgctgaa

SEQ ID NO: 793593 - DNA, 82 bp, Homo sapiens
ctttgatccagaacttgcagcaacaatagacctgcctagagctggaacgttacctccagagcgagccctgctatgtttcagc

SEQ ID NO: 793594 - DNA, 83 bp, Homo sapiens
aaagtcatcacctcctgggatcagatgtgcattgagaacgaggtcactcggacactatggtgttcttttacctgtggattgtc

SEQ ID NO: 793595 - DNA, 100 bp, Homo sapiens
gggctggccggccggccatggaggctgatggggccggcgagcagatgagaccgctactcacccggatgagtttgatgcctacatcattgtgtctttcgtg

SEQ ID NO: 793596 - DNA, 75 bp, Homo sapiens
atcactcgtcttatggaggtgtctgtaactgagctctcaaatcgactggaagtggtgaaggaatttctgagaaac

SEQ ID NO: 793597 - DNA, 80 bp, Homo sapiens
attaatgcaactaccattacactaaggatgttgacaatgcgtctctggcacgtcttgaccttgaacgcaaagtggaatct

SEQ ID NO: 793598 - DNA, 75 bp, Homo sapiens
ctcggagcttctacagaaggtggagcccctacagaaggtggagcccgggcgggctttggccaaagagttgcaaaa

SEQ ID NO: 793599 - DNA, 75 bp, Homo sapiens
cgtagtagaagaaacaatatctgtgagagatctactgatctacttcttgcctggaatcccatttgtttggggttg

SEQ ID NO: 793600 - DNA, 100 bp, Homo sapiens
taatactactgtagaggatgagactgaaacaaatgaagttcaaggatttctctttgggaaactaaactgcaggacaagttcgagcatcttaaaatgattc

SEQ ID NO: 793601 - DNA, 80 bp, Homo sapiens
acactggcggatgaagcagctggtggggctctactgcgacaagggctggtgaattaccatatctccgtcaagtgcagtaa

SEQ ID NO: 793602 - DNA, 50 bp, Homo sapiens
cagcctcccgagcagctgggactacaggcggaggttgcagtgagccaaga

SEQ ID NO: 793603 - DNA, 82 bp, Homo sapiens
tctgacacagtctggcattgctggaggatacaaactgtgactatgaaaatgttccaaccactgtatttactcctttggaata

SEQ ID NO: 793604 - DNA, 75 bp, Homo sapiens
gcggggcggccgggagggggcagtcctcgccggcgagttcagcgaacttgctactaccagcaccatgccctacca

SEQ ID NO: 793605 - DNA, 50 bp, Homo sapiens
agcagaggcacccacgctcctacaatgcgcattggagtgactgtctggca

SEQ ID NO: 793606 - DNA, 100 bp, Homo sapiens
gctccggctgtaaggagccgcggcggggggaaaatggagcccttcaccaatgaatagcattgaagaacttgatggtgtccttacatccatattcaaacat

SEQ ID NO: 793607 - DNA, 75 bp, Homo sapiens
tgttcttttcttttccatgatatcattatatggacagtttaggtcctcctgcatatgcccaagaggattgggagt

SEQ ID NO: 793608 - DNA, 110 bp, Homo sapiens
ggccctccagatgaaccgacgtcaccggatgcctggatatgagaccatgaagaacaaagacacaggtcactcaaataggcaggtacgcaataactgtttggtattttgat

SEQ ID NO: 793609 - DNA, 98 bp, Homo sapiens
ctcccaagtagctggggttacagaatgcccaggaaaaccatgggctggctgtgcccaccccctcggttccagatgattttgcagacaaagaagtgaca

SEQ ID NO: 793610 - DNA, 101 bp, Homo sapiens
ttcaaggatatgctgtattcagctcaggaccaggcaccttctgtggaagcttcagtatcagacacagcacagcagccatctgaagagcaaagcaagtctct

SEQ ID NO: 793611 - DNA, 148 bp, Homo sapiens
gaaatccacagccttgttcatcggctcccagagaaaaatcggcagatgttacagctgctcatgaaccacttggcaaattgatattcactgatggactccaaagaatcattaactcctggtagagaagaaaaccccagcagtgtgcttg

SEQ ID NO: 793612 - DNA, 100 bp, Homo sapiens
agctacctgagcctgacgcccgagcagtggaagtcccacagaagctacagctgccagtgcagatacactttgggggatccaaaaggagctgcaattttaa

SEQ ID NO: 793613 - DNA, 72 bp, Homo sapiens
taccaggactccctgcagaacgaataccaaattgacatattttttgctcagacctggacagatagtcgcctt

SEQ ID NO: 793614 - DNA, 100 bp, Homo sapiens
ccgtcgatctcaagccgactctcaccatcatcaagacggaaaaagtcgatctggagcttttcccctccccgggctgttttggagtcagcggaagatcacc

SEQ ID NO: 793615 - DNA, 101 bp, Homo sapiens
gctagagccattattgccccgaaataatgcaaaaggtgtcccaaggctcctgaccagtgaacaaagatttgagaaagacagccaagctcatgttttctcct

SEQ ID NO: 793616 - DNA, 54 bp, Homo sapiens
attcagaatcccaaggaccatgaagaagaggagcaggacttggatggtgagaag

SEQ ID NO: 793617 - DNA, 100 bp, Homo sapiens
ttggacaggaaagtgtaacatcagttacagacaattctgtggtgttcttggtcacacatttatggagtttctgaagggcagtggagattactgccaggca

SEQ ID NO: 793618 - DNA, 100 bp, Homo sapiens
aagtaaccccttccgggagcctagatcctgtgctttactctgaagactctcccatatagaaatcatccgtggccatgcagccttcacgagtgatcccaag

SEQ ID NO: 793619 - DNA, 90 bp, Homo sapiens
tctgcctccggggacaagaaactagagcaaataaccgttttgaaattagaactggaccccatcctgactgaggtcaccctgatgaatgcc

SEQ ID NO: 793620 - DNA, 82 bp, Homo sapiens
cagattcgcagtggtcgcttcttctccttggagagaagtggatgggccctatacctccagccgtgaatgccagactttaaga

SEQ ID NO: 793621 - DNA, 101 bp, Homo sapiens
agtccccgacacgtcgtcttacatcaagggacaatgactcattcttcccaggacactggttcttgtggcattcaggaagatggaaagctttatgtggtgga

SEQ ID NO: 793622 - DNA, 51 bp, Homo sapiens
tgatgaagaagttattcaagatgcaccaacaatgtttagcagtattcagca

SEQ ID NO: 793623 - DNA, 75 bp, Homo sapiens
aaggattccaagtaactcttatttggaggaaacaccaattggaagcctccgctcaactgtaagatttataactac

SEQ ID NO: 793624 - DNA, 100 bp, Homo sapiens
ggggcaactgggccatgagagggaaggaaacaagccagacatgaagccattattatatcaggaaccgaaatggccaagcatatccagaaagaaatacagc

SEQ ID NO: 793625 - DNA, 78 bp, Homo sapiens
cttcgagagctaccgcgccagacaggtgctggagaatctggtaaaagcaccattgtgaagcagatgaggatcctgcat

SEQ ID NO: 793626 - DNA, 123 bp, Homo sapiens
aacccggcccggaccgtgtcgccgacgccaaaggggacagcgagtcggaggaggacgaggacttggaaggtccaggtgcaggtacagcagtctccgcaacaggtctcggctcagctctcccca

SEQ ID NO: 793627 - DNA, 74 bp, Homo sapiens
ggaaacttcgctatcatggagatcgtttcacgtgccacgatcatggtgccacggtactgcagtatgcacccaaa

SEQ ID NO: 793628 - DNA, 73 bp, Homo sapiens
tttctcgtcggcggcgccctgcaccgcgcctcgcaaagccaggaatagttgctgaacaccccaggcctgctga

SEQ ID NO: 793629 - DNA, 75 bp, Homo sapiens
cggagatgcctggaatacagtaaggtttctgctttgggacaaccatacatctaattccttaaagtagttttatat

SEQ ID NO: 793630 - DNA, 145 bp, Homo sapiens
tgcggagcccggcggagcccgggcggcccgcggacgccaggagcctcctcgggcagcgagattgctttttttccgaaatcagggagtggtgaggacactgtccagctctgcccaagaggacatcatccggtggtttaaagaggag

SEQ ID NO: 793631 - DNA, 101 bp, Homo sapiens
gtggccataccgttgaccgctcctccaactaaccagtacgaagatgccctggtgctcctgctcacagaggtgttgaatcgaatccagttcagatacaacca

SEQ ID NO: 793632 - DNA, 100 bp, Homo sapiens
tgcacaacagatatcatcctctcggccagaagcggactcctagaagaggggagcagcaaggatggaatgacagccgtgggccggaggggatgctcgaaag

SEQ ID NO: 793633 - DNA, 100 bp, Homo sapiens
gccatggcgacgggcggccagcagaaggagaacacgctgcttcacctcttcgccggcgggtacctgtttcccaggcaactactgatcaggcatttctgga

SEQ ID NO: 793634 - DNA, 83 bp, Homo sapiens
gaaatggcggagtatctggcctccatcttcggcaccgagaaagacaaggtttccaggcctgaggtgcccgccctggccccagg

SEQ ID NO: 793635 - DNA, 82 bp, Homo sapiens
actgattcaaattcaacagaatcctctgaaacttccacagcaattctgtggtgttcttggtcacacatttatggagtttctg

SEQ ID NO: 793636 - DNA, 83 bp, Homo sapiens
tgggacacgcggttcttctccagcgccctggcctccctcaccttggacacctcgcttgggcataatggttatgaaagcttctg

SEQ ID NO: 793637 - DNA, 98 bp, Homo sapiens
agagctccgatccctgcgcgggctcgagagctcgccccgaacgggggtcttcctcctccgccgttgacagacctgcagccagttacctactgcgagcc

SEQ ID NO: 793638 - DNA, 100 bp, Homo sapiens
tcccctcctctgttgtagctgttcctctggcaatacaaactttctgctttcagaatctgcaagcagaatatgaccgtctaaagcagcagcacgaacataa

SEQ ID NO: 793639 - DNA, 75 bp, Homo sapiens
ctgcccccacctcatgaagctccacaaggacaacaccacctgctatggcagcgagattgattgtgccgacaaatt

SEQ ID NO: 793640 - DNA, 100 bp, Homo sapiens
cacgtcgcctgtcacccaatatctccagccgcgcagtcccgaagagtgtctcagtgctgtgccccccccagagcctagaggatgtttcatgggatcccag

SEQ ID NO: 793641 - DNA, 75 bp, Homo sapiens
gaaaatcagtgacattccaattcctgaaagagctccaaaacgcgaagtttattttgagttggatgctgataaaat

SEQ ID NO: 793642 - DNA, 116 bp, Homo sapiens
tgaaggaagatggcggacggcgtggaccacatagacatttacgcggatgtcggcgaagagttcaaccaggtgctggagaatctggtaaaagcaccattgtgaagcagatgaggatc

SEQ ID NO: 793643 - DNA, 75 bp, Homo sapiens
ctgaagttcaaggcagggtccaagcggcttttcttctggatgcaggacagtaatcctctctacaaaagtgccatc

SEQ ID NO: 793644 - DNA, 99 bp, Homo sapiens
ctttacttggtgcaggaaggcagtctttgctacgtacagcaaaaggtcagaagagatcaattctacagaaatttccagtggttctgttgaggctttatg

SEQ ID NO: 793645 - DNA, 100 bp, Homo sapiens
tcgccatggccaagtcgggtggctgcggcgcgggagccggcgtgggcggcggcaacggggcactgacctgggtggtagttacttttggtgacgctgtcca

SEQ ID NO: 793646 - DNA, 83 bp, Homo sapiens
cgttagcgactcatgcaccggacccgttaacgcgttgattcgttccgtgctgctgcaggactacaaatccctccaggatatca

SEQ ID NO: 793647 - DNA, 83 bp, Homo sapiens
ctgtaaaagccccgcctctgccttcggataggccttcctggatgctctgcagaaccaggctgaggccagcagcaagatcatcg

SEQ ID NO: 793648 - DNA, 83 bp, Homo sapiens
aaaaaggccaggttggagccccgggatggggtaattaaaaccatggaggcgatcagcgaggttctccaggaccttaggtttga

SEQ ID NO: 793649 - DNA, 100 bp, Homo sapiens
ctggacagaccaacctgtcagtgctgcaacggcagtacatacctgtgaaaatgaagagcaaagccttctggatcttttcttgggagtatgccatgatgta

SEQ ID NO: 793650 - DNA, 75 bp, Homo sapiens
cccacctgcgtaagggggcagagacagtctctcctatacaaaaaagtgaatgaggctcagtatcgcagccacctg

SEQ ID NO: 793651 - DNA, 95 bp, Homo sapiens
tattccttctgttctggtggctcgatcttcattgctttcctctggacttctccagtgatccacaagctcagaaatacatcgcggaaagtaaatgt

SEQ ID NO: 793652 - DNA, 88 bp, Homo sapiens
ccatgttcacactgggtgaaggaagctgaaaccacagacatgactgagtcctccatgaagagattatacttactcagctgttaagagt

SEQ ID NO: 793653 - DNA, 75 bp, Homo sapiens
gaactgagagaagacggcagagaacaggaaatggtgttcacactggccctgaatcaagggaacaccagttttcac

SEQ ID NO: 793654 - DNA, 74 bp, Homo sapiens
tttgaatttgctagtaacgtcatggaggatgaacgacagttatttctcaaactctgaggctgcggagttcacac

SEQ ID NO: 793655 - DNA, 97 bp, Homo sapiens
acgcacctcgtcaccaaggccaagtttaaactcatatcccaggcatatgaagtgctttcagatccaaagaaaagggatgtttatgaccaaggcggag

SEQ ID NO: 793656 - DNA, 75 bp, Homo sapiens
cccgagaaggtggacgtgctggtgtctgagtggatggggacctgcctgctgatccagacatttaatgtggatgca

SEQ ID NO: 793657 - DNA, 75 bp, Homo sapiens
tcagagttgctcatggaggtgcacggaaatgggaagaggcccagtccagagagagacattttaaatccaaaggat

SEQ ID NO: 793658 - DNA, 100 bp, Homo sapiens
cagaagcacgttaagaagcccgaagggcttttcagaaatcggtttgaagttagaaatgatgcctgctctgtgcctgtatctgagatcatcgccgttgagg

SEQ ID NO: 793659 - DNA, 101 bp, Homo sapiens
gcgcgtccggtgttcaccgagtatcaggccagtgcgtttgggaatgtcaagctggtggtccacgactgtcccgtctgggggaagatggtgaaaggaatggg

SEQ ID NO: 793660 - DNA, 101 bp, Homo sapiens
tatcgagatatcctaaaatttcctgaagaactggaacacgtagaaagtgcaagcaaagcttaaagcttttcaagccaggccaagaagctgtgaagtaccag

SEQ ID NO: 793661 - DNA, 75 bp, Homo sapiens
gctggccgacaacagcctggcgtccgccacggtgatgtgtccaatctagatcccaacttctcatttgaaggcacc

SEQ ID NO: 793662 - DNA, 100 bp, Homo sapiens
ccagagctgaggactgcctgtttgcagattgtctccagctttaagaccacgacatcgagagctgcctgccagctcgtgaaggagtacatcggccaccggg

SEQ ID NO: 793663 - DNA, 75 bp, Homo sapiens
gcctgacagctctgcggctcgggccctgaggagacccccttcccacagaaagccgactcatgaacagctgtctcc

SEQ ID NO: 793664 - DNA, 80 bp, Homo sapiens
ctgtcatcgtcagtgggatccaggtgctgctgaccctgctggagcccaggaggccgaggcttcaccgctgacctgaggtc

SEQ ID NO: 793665 - DNA, 75 bp, Homo sapiens
cccaccatgtcagacgcagccgtagacaccagctccgaaatcaccaccaagatggagttttaacattgaatgcgg

SEQ ID NO: 793666 - DNA, 100 bp, Homo sapiens
cgcccgtgaaggccacgccattaaagcgcttcagtcaaaccctgcaggttgtttttcaccattcagaacattgcctgaagcaggtccaccatgccgttag

SEQ ID NO: 793667 - DNA, 82 bp, Homo sapiens
cgcggggcgtgcgcgtcctcctccccaggcccgccgcctccctgccaaggtggacgacatccttggagaaggcagcgacgac

SEQ ID NO: 793668 - DNA, 98 bp, Homo sapiens
tgaaccagaaggaaaaaataatggaagtgttggaaaagtccagtactttaaatgtgcccccaagtatggtgactctgacatcattagaagcatgccag

SEQ ID NO: 793669 - DNA, 100 bp, Homo sapiens
gcgtccgccccgcgagcacagagcctcgcctttgccgatccgccgcccgtccacacccgccgccagaagaagctcattcacacagaagacccatttaatg

SEQ ID NO: 793670 - DNA, 74 bp, Homo sapiens
gtggcgtccacctgctcgtccgcagagtgatgggtcgttcccctatgactctgtcccttggcagcagaacacca

SEQ ID NO: 793671 - DNA, 100 bp, Homo sapiens
gaccgagagcgtgaccgagagcgcgaatatcgtcatcgttagaaggcagtcgatgatgtgaagaaaggttacatcaaagcagaagaaaagtcctatcaat

SEQ ID NO: 793672 - DNA, 75 bp, Homo sapiens
cctcgcttggccgccagttcttctgcagccgaaggcgtgggaagagtgctgcaacccagccctagccaacgccgc

SEQ ID NO: 793673 - DNA, 75 bp, Homo sapiens
gccaggtccctgctgaatcacacgccgccatccgggaggcccagggaaggtgagccctattcccagaggcaggtg

SEQ ID NO: 793674 - DNA, 82 bp, Homo sapiens
ccgtttctggctccgggctgagcttcctggagaagaggaagagacaagaggagcagcagcggcaccgcccctcaccctggag

SEQ ID NO: 793675 - DNA, 76 bp, Homo sapiens
tggtgatggtgactcagcagagcagtgacgcccgagctacactggaaatcctcatccctgactttgttaaacagac

SEQ ID NO: 793676 - DNA, 101 bp, Homo sapiens
ggctccctcgtgaagaacctgaaggacacactaggaaaaagaccacatcagtgtcagatttgtaagaaagcgtttaaacacaagcaccaccttatcgagca

SEQ ID NO: 793677 - DNA, 82 bp, Homo sapiens
tggcgctcggctgcgcgctgctcctcgccctcaagttcacctgcaggaaactggagcacccatcctaactgatgatgttagc

SEQ ID NO: 793678 - DNA, 115 bp, Homo sapiens
tgccagcacctttcggcttctgagacggcggcagcagcggcattcagatgtctttggtggacttgggaaagaggttgctagaagcagcaagaaaaggccaagatgatgaagtgag

SEQ ID NO: 793679 - DNA, 75 bp, Homo sapiens
caagaatatgctgccaaaattatcaacaccaaaaagctttctgctaggggccctcgggaccaaggatcacgtcat

SEQ ID NO: 793680 - DNA, 100 bp, Homo sapiens
cgacattctccacctcctgggaggccagccattcccaaatgccccaaggatgaagaacggagacgatgagacaccaattattgcggtgatggtggccctg

SEQ ID NO: 793681 - DNA, 50 bp, Homo sapiens
gtcatcggtttccagacagctggtggacgtctgatttatgaagctcccca

SEQ ID NO: 793682 - DNA, 99 bp, Homo sapiens
gcttctccgctgcgtgtaggtgaagggggcttcctgaccgagggtagtggtggtgcacgaagatccgcactacttgacagcgacgagcccttggtgtat

SEQ ID NO: 793683 - DNA, 147 bp, Homo sapiens
cccgccccatccccgccactttccccggagctgggccgcgaacacctcactattgatggtgtagcgctttaggggaagaggctgacgcttgtgcttgccctggcaaccctgatagctgcctttgggtcatccttccagtatgggtac

SEQ ID NO: 793684 - DNA, 100 bp, Homo sapiens
cttgacaaagcctcttctgtttccaatgggggcaagatcacctgttgcctgaagcagaagaaatcactatgatcagtattcaacttgctgctaggttcct

SEQ ID NO: 793685 - DNA, 98 bp, Homo sapiens
tgggcccagtttatggcttccagtggaggcattttggggcagaatacagagatatggaatcagattctgcttctcagaagatgcactattatagatac

SEQ ID NO: 793686 - DNA, 98 bp, Homo sapiens
tcagccctggaggcggcccattatttcacagaggacagctcctcagaagggttcgggggtgattaaagctggctttgcaggagaccagattcccaaat

SEQ ID NO: 793687 - DNA, 50 bp, Homo sapiens
ttctggaatccagacagaatgggtcaaggagctgagcccccacagtgggc

SEQ ID NO: 793688 - DNA, 96 bp, Homo sapiens
gcacctgcaggaaacaagctcctacttccagaaaaagtgctcctgggactccaggataccagggtttgtaccagttgctggagccccgaatgattg

SEQ ID NO: 793689 - DNA, 101 bp, Homo sapiens
gagcgcctccttcgcaggcttcagcagtgcacagagccggaggatcgcctttctggtaaacttacagtaccgccgtctctaccgaagcatgaactcccagt

SEQ ID NO: 793690 - DNA, 100 bp, Homo sapiens
gagatgaacccaacctagtgggtgtaatacatcatgaactgcagggtcaatttttctgtggaaataaatattgtgataaaaaagaaggcttaaagagttg

SEQ ID NO: 793691 - DNA, 100 bp, Homo sapiens
cttcctcttctgcatcctctggtccctgctcttccacttcaaggagacaacggccacacactgtgggaaactgccagaggcatgcagcattggtgatgga

SEQ ID NO: 793692 - DNA, 97 bp, Homo sapiens
aacatcgaatcatggaatcccttgcatggctctcacctcttctgaaacagtctccctggagcaaccatcagagcagtggctggggcactggaagtat

SEQ ID NO: 793693 - DNA, 101 bp, Homo sapiens
gaagaagaaaatgagaggctcactgaaagtctgagaagcaaagtaactgctataaaatctgtgtgcaactgaggaacatggctcaagaaactaatcacagc

SEQ ID NO: 793694 - DNA, 53 bp, Homo sapiens
cgagccgcagcacgagctcaaattccgaggctgaccccgcactacatctaccc

SEQ ID NO: 793695 - DNA, 83 bp, Homo sapiens
ggacggcctccggaacccagagactgcatcagagccactgtctgaggctccttgccagaggcctccactcactccagacccct

SEQ ID NO: 793696 - DNA, 100 bp, Homo sapiens
tgcagttaacgggaccagctctgcggagaaaatgcaacatggcagcagcaatggaaacagaacagctgggtgttgagatatttgaaactgcggactgtga

SEQ ID NO: 793697 - DNA, 150 bp, Homo sapiens
cccatccggagagtgcgctccaagagcgacacgccgtacctcgcagaggccaggatctcctttaacctgggggcagcacactttcatattccccatcacattggctgaagtcgtcctcaggcctcactcctatccatcaaagaagacagg

SEQ ID NO: 793698 - DNA, 100 bp, Homo sapiens
gcctccaggcccagaacggagccgccttggcctcggggtctccctacaccaacgtaataaaagactagtggccttagtgcccatgcccagtgaccctcca

SEQ ID NO: 793699 - DNA, 100 bp, Homo sapiens
gaactctgcaaagcctccagaggacataccacctccaggatcaggatgcagagaattataaggctgtctgcagagatttgaaaaatggcaacaaatgaaa

SEQ ID NO: 793700 - DNA, 100 bp, Homo sapiens
gagaacttccgctttggaaaccctctgcacattgcccagaagcttttccgagacatatctgaagagatggattaagaatgctttggattaaggattgtgg

SEQ ID NO: 793701 - DNA, 90 bp, Homo sapiens
ctggagacggcctgggtgctggcgaagcggaggccggagaacgtggtgtagtatgggaagaaactattattttgcttcctgataacgtcc

SEQ ID NO: 793702 - DNA, 101 bp, Homo sapiens
aagacatttcacagggggtacacatatctgtatataggacagatcacttgtatgccttcttcattcagtggagtccagaaatatatgcagaagatactggc

SEQ ID NO: 793703 - DNA, 100 bp, Homo sapiens
tttgctgatggaagcataagaacatgagaactgcgactcagcatgcagaagctccgacagttagttaatatgtgcatcaacccagatccagagaagcgac

SEQ ID NO: 793704 - DNA, 48 bp, Homo sapiens
gcggcgccatggcagggcttgcaggaccgcagctgaatgcacagctag

SEQ ID NO: 793705 - DNA, 75 bp, Homo sapiens
gcatctaagaaatttgctgttaaacgaagcagcagttttgggaatttcgatcgttttcggaataattctttatca

SEQ ID NO: 793706 - DNA, 82 bp, Homo sapiens
catggttctcactaaaatgaaagaaaccgctgaggcttatttgggaaagaagacgctgaccggaaaggagattgagattgac

SEQ ID NO: 793707 - DNA, 100 bp, Homo sapiens
gaaggtactggtgttgggagactcagctggtggccaaggaattgggccagacagggacacggctcactccagctgacaaagcagagcacatgaagcgaca

SEQ ID NO: 793708 - DNA, 121 bp, Homo sapiens
ccaagactctgaggctgatatgcaatgtcacttacaacattaatcagatactgcatttaaggagtgagctgagtcgacagaaacttcatacccaagagctgctttctcagctggaaatggc

SEQ ID NO: 793709 - DNA, 75 bp, Homo sapiens
gcgagtgaggaaaggaggtactgtagaaaattggcaacttctccatcgtgcggcggcttggcgtgcaggagtgca

SEQ ID NO: 793710 - DNA, 90 bp, Homo sapiens
ctttgagaaaatccagaccttaaagtctcgagcagctgggagcgcccaaggaaataaccaagttgtggcagcactgcctgaaggtatgag

SEQ ID NO: 793711 - DNA, 50 bp, Homo sapiens
ccgggctgccccgcaggatcatcaagacctcagaatatattattcaagct

SEQ ID NO: 793712 - DNA, 82 bp, Homo sapiens
cttgaagaaagacagatcctgtgtcacccggcaactcagaaacatcaggtccaagggggatatgagactttctactcggaat

SEQ ID NO: 793713 - DNA, 74 bp, Homo sapiens
accaccaatgggaacatgcacaggaaaaacgtggtcttcgagaaatgcgagttcttgaaaatttgaagaacatg

SEQ ID NO: 793714 - DNA, 100 bp, Homo sapiens
agtttcaagcctgagtgtgaagattgtaccaaccaagaagctgaagaaatatgagaaagaatatcagacaatgcgagagagtcagctgcaacaggaagac

SEQ ID NO: 793715 - DNA, 100 bp, Homo sapiens
ccatttggtttggtcatcaatctgaactacaaagatttgaacgtggtttagattagaatccaaacaaggaaaacgaatcaaaaacaggggtgagataaag

SEQ ID NO: 793716 - DNA, 58 bp, Homo sapiens
gagatatctgcaatgatgtactgaataactgaagtgaagtgatggactccgatttgga

SEQ ID NO: 793717 - DNA, 85 bp, Homo sapiens
ccgggccggagtacgtcgttcccgctgcgctaggggaagcgggcagtaagctgtgctagaacaaaaatgcaatgaaagaaacact

SEQ ID NO: 793718 - DNA, 97 bp, Homo sapiens
tcatgaccctgaatgagctctttgcccggtttgacaagctggctgcgtttgtttcgacgccggaccgcgtaagagacgatgatgttgggcacggaag

SEQ ID NO: 793719 - DNA, 83 bp, Homo sapiens
tgaccgcgggccctgccctgggctggaacgaccctggaacaagatcactcaaggtgaaggataatctactaataccagcactt

SEQ ID NO: 793720 - DNA, 120 bp, Homo sapiens
ctttgtagttttgcgtgtgttgaaagtacaattctattgcacatcaatgatatcatcccagatgtagatgagtgtgcccaagggctagatgactgccatgccgacgccctgtgtcagaac

SEQ ID NO: 793721 - DNA, 100 bp, Homo sapiens
gcctgcccaacttctgcgggatcttcaaccacctcgagcggctgctggacgaagtttttcagttatgggacaaaaatattatatcaaaacactgaagctt

SEQ ID NO: 793722 - DNA, 83 bp, Homo sapiens
gttcgactgctagagccgagcgaagcgctttatcctgtggataaacgcagagtgaacgagtttggggagtcctacgaggagaa

SEQ ID NO: 793723 - DNA, 100 bp, Homo sapiens
atattgagccggatagacctattggatatggagcctttggtgttgtctgtttctcttcagcaacgggtagcagaattggaaaaaattaatgcagaatttt

SEQ ID NO: 793724 - DNA, 100 bp, Homo sapiens
ctacgccagctggggttcgctttgtttcactttccttttgtatgctactggccttttctacacttgtcaggtcagtcattggcaccatgaactggaataa

SEQ ID NO: 793725 - DNA, 51 bp, Homo sapiens
gcggctactacaatcagagcgaggccgggtctcacaccctccagaggatgt

SEQ ID NO: 793726 - DNA, 100 bp, Homo sapiens
gccgagatgacgggctttctgctgccgcccgcaagcagaggtgccagctgctgcccgtgctggtgccattgccccatgtgaagtcactgtgccagcccag

SEQ ID NO: 793727 - DNA, 90 bp, Homo sapiens
ggcgggcaggcgtgcggaggacactcctgcgaccaggtgcacgtcggcgacgaggacttcgtacacctgcgagtgttccaatctctccct

SEQ ID NO: 793728 - DNA, 100 bp, Homo sapiens
atacacccacctaccttgaaccaggtcggatcatgctaaaaggagataatattactctgctacaaagtgtctccaactagaaatgatcaatgaagtgaga

SEQ ID NO: 793729 - DNA, 50 bp, Homo sapiens
ggagcagtagatgatgatgtagcagaagggttccaagcttgaactaccct

SEQ ID NO: 793730 - DNA, 74 bp, Homo sapiens
cctggctactcacagttgaagcctgattgcagccctggtacctgacagtgtaaagaaggagctcctacaaagaa

SEQ ID NO: 793731 - DNA, 51 bp, Homo sapiens
ccaaattcgcctccatctgtaccatggttgatgtaagacatgaccatagaa

SEQ ID NO: 793732 - DNA, 90 bp, Homo sapiens
ggccgccccccgaagcccagggagagcaaggcgcgcggcgactccggacatacgggacggttattaaagtctctgtgcttcatcagtctt

SEQ ID NO: 793733 - DNA, 100 bp, Homo sapiens
aagtgtaatgaaaacaaatgacattgttcgatacagggtgtatgagggtcagatgacttgtctgcaaagctgtgggatgtgagcacagggcagtgcgttt

SEQ ID NO: 793734 - DNA, 100 bp, Homo sapiens
gaatgcctgaagacttggatgaaaatatggattacaggttgatgtgggagattatcttagaagacctaggactccaaaaatgtttcccctgaaggacgct

SEQ ID NO: 793735 - DNA, 75 bp, Homo sapiens
actggaggccaccctgtggttcagaccactgcagcaaacacagcccctgccagaaaggagggacctgtgtgaaca

SEQ ID NO: 793736 - DNA, 100 bp, Homo sapiens
tgaccaggctgaccagcaccagccctgatccagggtgatgaattagaagacaatggaaagaatttctacgaatctgatgatgatcagaaggaaaagactg

SEQ ID NO: 793737 - DNA, 100 bp, Homo sapiens
cagaattcaaacagatatactaaagcaggctaccaaggacagagtcagtgatttccataaattgaagcaaaggagtcgtcgcatggtggatgtcatggac

SEQ ID NO: 793738 - DNA, 100 bp, Homo sapiens
agtcatgtggcagtggaaaatgcgctcgggctggaccagcaggagcgggacggtatgcgggccatcctggggtcctacgacagcgagctgaccccggccg

SEQ ID NO: 793739 - DNA, 76 bp, Homo sapiens
gattcgcagtggtcgcttcttctccttgcagtaaaagccatgatggagataaattcattccagctccaccttcttc

SEQ ID NO: 793740 - DNA, 90 bp, Homo sapiens
cgagcgcgccgcgtagacctccgctcccccaggctcagccgcccagtgggctcaggcccagagcccagagcaaccagcacaatagcgtcc

SEQ ID NO: 793741 - DNA, 90 bp, Homo sapiens
gtacagatctgattatgaccgagggagaacaccatctcgccaccgcagctacgaacggagcaggtccaaattaactgtgctacagatgac

SEQ ID NO: 793742 - DNA, 71 bp, Homo sapiens
cgcacccaggtggttcagctcgcatagtgctttggggccatttggatcacacgatgttttttcaagatttt

SEQ ID NO: 793743 - DNA, 90 bp, Homo sapiens
ctcttggtgagcgaggagctctccgagaagcaatgagacagggaagctgcagctttatgacttggcttcagggaatctgctggagacaat

SEQ ID NO: 793744 - DNA, 50 bp, Homo sapiens
ccgagacccacggagaccgcgcagatgacctcagcaacccctttggacaa

SEQ ID NO: 793745 - DNA, 75 bp, Homo sapiens
cgaaaatctgggctaagtgctggcaagagcgatgtctactacttcagatttagccaggtggcaatcatgagtgaa

SEQ ID NO: 793746 - DNA, 100 bp, Homo sapiens
agtctctgcacctcgcgccccagcaggcgatggatgactacagtgtgatcggccgctccctgttcaaaaaggaaaccaacatccagctcttcgtggggct

SEQ ID NO: 793747 - DNA, 97 bp, Homo sapiens
tgtttgtcccagaatctacgtctaaactgcagaagtttacaaggctaccagcgccagctgacctacaagcgccaggatggctcctacagcgcgtttg

SEQ ID NO: 793748 - DNA, 74 bp, Homo sapiens
cagtatgtacctgtggagcagcttctttatcccttcatctgtggataagcaggaggagagcctggctgatagcc

SEQ ID NO: 793749 - DNA, 82 bp, Homo sapiens
ctactctgcctcggggacgaaagcagtgtgaacgagctctatgtcgatgacccagacaaggacagcggtggcaagatcgacg

SEQ ID NO: 793750 - DNA, 75 bp, Homo sapiens
tctccatattctcaggcacagagaaagctggagctctcaaacactgctgtcctgcaccagatgcggcgggaccag

SEQ ID NO: 793751 - DNA, 83 bp, Homo sapiens
cgcaggcctggtgcaaacagactcaagaggctcggagaaccagcttgggtgtcgtgaaaactacccctaaaagccaaaatggg

SEQ ID NO: 793752 - DNA, 100 bp, Homo sapiens
cccaacctggacgcttgcaccggagtattaaatccagctagagaatggcatgtgcaaagatacagaggcgaattgatgatgacaagggaaggacccatga

SEQ ID NO: 793753 - DNA, 83 bp, Homo sapiens
cgtgaagaaggttctggagaaaaagttccatactgtcagtggaagcaaggctgatatccccaataggtttgaaatgaaacttc

SEQ ID NO: 793754 - DNA, 100 bp, Homo sapiens
ctgatcttcgccaaactgtggagcctcttctgtaaccaaggaattctcaagaaatttgaggaagaagatttggatgacattttaaggaaaagattgaagg

SEQ ID NO: 793755 - DNA, 90 bp, Homo sapiens
caaagaaacaagccgtggaataggtgtatcaagtaatggtgcaaagcctgaatgggctcgggatgagtttgaaggcctcttcaagcagcc

SEQ ID NO: 793756 - DNA, 83 bp, Homo sapiens
atttccggagtcagtcattttactgtcaagacatttcttcggcattctgcaacagggaacccgagcgtcatgttagggtgaag

SEQ ID NO: 793757 - DNA, 74 bp, Homo sapiens
agctgcagccacaatgtgcctttgcaggggagcctgagagccacagctgtccgcaggcttgtccaaaaggaaac

SEQ ID NO: 793758 - DNA, 82 bp, Homo sapiens
cttggcgaagcgctgcgctcgcgcccggatccctcagaacaatcccgaagagatgacttggagtctctgggctacgtgctaa

SEQ ID NO: 793759 - DNA, 74 bp, Homo sapiens
gagaaggaagaggtgtttgaaaagatgctggtttttcagcagcagacagagaagccagtctggagcttattaaa

SEQ ID NO: 793760 - DNA, 90 bp, Homo sapiens
cgaggggctcggagaggtgctcggattctcgtagctgtgccgggtaatatgcacgtgtcactagctgaggccctggaggttcggggtgga

SEQ ID NO: 793761 - DNA, 82 bp, Homo sapiens
gttaaggattccaagtaactcttatttggagcttttctgtgtgtgtggggccctcaagcgagctcgactggtccatcctggg

SEQ ID NO: 793762 - DNA, 74 bp, Homo sapiens
aaagaggtgatcgagggctaccgcaagaaacttgggtccctgaacaatgagcctgcgctgccctccacgagcta

SEQ ID NO: 793763 - DNA, 80 bp, Homo sapiens
ctggttctacttcacactgcagaactgggttctggactttgggcgtcccattgccatgacctgcagccagttacctactg

SEQ ID NO: 793764 - DNA, 131 bp, Homo sapiens
gcgcttcgccgctgcgcaccccagcggagccaagccccacgctggccggacagggccgcctgtcgccggacaatgcagatcttcgtgaagactctgactggtaagaccatcaccctcgaggttgagcccag

SEQ ID NO: 793765 - DNA, 90 bp, Homo sapiens
gaggaatttttcccagcatttcaggcatttactaatgatctacttgaaatcttaggagtggaagctggacacactatgtgacttgtatga

SEQ ID NO: 793766 - DNA, 87 bp, Homo sapiens
atcacggtcaagtacacagagagacggcagccgctgtacagattcatcaccacggtgacatctgttcccgagctgttcctgactgca

SEQ ID NO: 793767 - DNA, 97 bp, Homo sapiens
acggctgaaccctccttctcaatcttggaacagcacccccttctttaagggatcatggcccaagttgcaatgtccaccctccccgttgaagatgagg

SEQ ID NO: 793768 - DNA, 51 bp, Homo sapiens
gcaaaggtggctgctaatgcaccaaaggaggagacagaggaggacagtgac

SEQ ID NO: 793769 - DNA, 103 bp, Homo sapiens
ttacctgcatggatacctccatcagagttagctgcagccaacctgagtgttgatacaacctacaggacactgcccatctctaagataagaacctggaaagggg

SEQ ID NO: 793770 - DNA, 101 bp, Homo sapiens
gtgtctgacgtcatcaggcttgttcaagacacaccggaggcgacggccatggccacagctcctctggtgcaagtgtggtagctattgacaacaaaatcgag

SEQ ID NO: 793771 - DNA, 98 bp, Homo sapiens
aagataatgctgacatggccagacttgatttcaatcttataagatcctgcactggatggatcagcggacaacacacagaccggtaatctgggtcaatc

SEQ ID NO: 793772 - DNA, 75 bp, Homo sapiens
ctcctgcgaccgccctgcgcttcgtgcaccggggcggtccgttgccaaagccagattgactggggcgactttggg

SEQ ID NO: 793773 - DNA, 78 bp, Homo sapiens
acacacaaaaagaaagactgctttgagcaaactgaaaccgtgtcagttcagtcttcggtattggggaagggtgtaaaa

SEQ ID NO: 793774 - DNA, 100 bp, Homo sapiens
attgctgcgtcctatgtaaagtacttggagtctgcaggtgcgagagttgtaccagtaaggaaggaagcagccaccctcgccatggcctccccgcccgcct

SEQ ID NO: 793775 - DNA, 100 bp, Homo sapiens
ccgagacgacgggaagttttatttgcagctcggagcctgtggcggatggtgggactctccggccctgtgcagttggtggtgaccgcggtggcttcaaaaa

SEQ ID NO: 793776 - DNA, 83 bp, Homo sapiens
gggacgacgagtacgactacctattcaaaggtttacccaaggtccagcctagcccctaggcaccatgtcggacagtgatctag

SEQ ID NO: 793777 - DNA, 96 bp, Homo sapiens
gattcctgtgctaagagaagaaaaactacctgtggtaggaattggaaagcatctgtgtggtatggcaacaggtgtacgccccaagttgggacgccg

SEQ ID NO: 793778 - DNA, 98 bp, Homo sapiens
agggaggaggcggacacgctcaggtacatgtcccagagcaagcacacggaggcccgggagctcatgtactcgggagccctgctcttcttcagccatgg

SEQ ID NO: 793779 - DNA, 75 bp, Homo sapiens
ggatgagtcatgtggtggtgaaaaatgaccctgaactggaccagcaggtgagaagccctaccactgcaactggga

SEQ ID NO: 793780 - DNA, 101 bp, Homo sapiens
gcggaggcgacggcagcggtcccagcggcagcagcagcggcgggaggagcctccgggtttgatgccgaccgcgatgaggatgaggtgttctatgacatcag

SEQ ID NO: 793781 - DNA, 100 bp, Homo sapiens
tacacatggcctacagacacttctggatgttggttctctttgtcattttcaacagtctgcaggtgtcatggagaaactccagctgggcccagagattctg

SEQ ID NO: 793782 - DNA, 78 bp, Homo sapiens
ccgggcccacctccccaccaaggaaggagtggagtcaacatatcaatggagcaagtcacagtcgtcgatgccagcttc

SEQ ID NO: 793783 - DNA, 83 bp, Homo sapiens
cccagaccctggagcctcagttggaagcagccgatccagcctgcggagcctgtggggcagctatacacagaatgggattttac

SEQ ID NO: 793784 - DNA, 90 bp, Homo sapiens
cgtctttgactggaacatgctgaaattcgccctaggcgagcccctttaccgggtgagcaccggcaactatgagtaccgcctgatcctgcg

SEQ ID NO: 793785 - DNA, 74 bp, Homo sapiens
cgggacctgctgctggacccggcctgggagaagcagcagcgcaagagtgcctggtgaagaatgtgatgggatca

SEQ ID NO: 793786 - DNA, 74 bp, Homo sapiens
gcccctccagccttcgagtcgttcttgctcttcgagggcgagaaggagcctgcccgctggagagcacagcttcc

SEQ ID NO: 793787 - DNA, 80 bp, Homo sapiens
ctgtcatcttctaaacagagcagcagcagcagagatgataacatgtttcagaatggagatctcctctcatcagtctcacc

SEQ ID NO: 793788 - DNA, 51 bp, Homo sapiens
attcagttcctggactccgtggtgtcagttgtacccgaggcgttctcagca

SEQ ID NO: 793789 - DNA, 75 bp, Homo sapiens
cttccctcctcttcccagcaggccaggtcatgttgatgctgggaaaagtactctgatgggccatatgctttatct

SEQ ID NO: 793790 - DNA, 90 bp, Homo sapiens
agttttacaagatttaacctgtcatcaagacctgggattttggtggagtatgctgctgctgttccgctttgcgtcctcgctacaaacgcc

SEQ ID NO: 793791 - DNA, 75 bp, Homo sapiens
aaacactctccttctgccacatttgttttgagctaaatattgaggggctgatcccttatccaacatggttctaac

SEQ ID NO: 793792 - DNA, 101 bp, Homo sapiens
cgggggcgacgcgcgggaacaacgcgagtcggcgcgcgggacgaagatcaggatcctcatgaccagccaaagagaagaagaattaggaagcataaatcaaa

SEQ ID NO: 793793 - DNA, 98 bp, Homo sapiens
gtcattgatggtctcaatgttgccaaaatgtttcctaaagttcgtgaatctcaacttgaacttataatcaaaactgtattaagctcggcaagagatga

SEQ ID NO: 793794 - DNA, 75 bp, Homo sapiens
aatttcccaccaggatgagtatgattggctgtgattttaggccctccctatcctgaagacattagctgagagtct

SEQ ID NO: 793795 - DNA, 116 bp, Homo sapiens
ggagcgggcagaggatgcagtggaggccatcaggggccttgacaacacagagtttcaaggtgctggagaatctggtaaaagcaccattgtgaagcagatgaggatcctgcatgtta

SEQ ID NO: 793796 - DNA, 100 bp, Homo sapiens
gaggagtccatagtacaggaagaaaagaagaagctgacccctgaaggaaacaaagcacctgcgcctgtccctgaacggccacggccagtgtcacgtacag

SEQ ID NO: 793797 - DNA, 83 bp, Homo sapiens
cagagccagcgcacctgtgcagccttctgcagctcttgtcaggatggtgaagctgttcatcggaaacctgccccgggaggcta

SEQ ID NO: 793798 - DNA, 90 bp, Homo sapiens
gcagccaggcagagccctccgagcggcgcgtgaagcgggagaagcgcgatgacggctacgaggccgagactggggatatttatatctggg

SEQ ID NO: 793799 - DNA, 90 bp, Homo sapiens
ctaggatgacttcagtgactagatcagagatcatagatgtatgaggagctgcagcagacagctggccggcatggcgatgacctccgcaac

SEQ ID NO: 793800 - DNA, 80 bp, Homo sapiens
gccggttctgcaccatcttcaggtcctactccaggggcgctcagtgtgccgtgcaggtgaagctggagctggggcaccgc

SEQ ID NO: 793801 - DNA, 100 bp, Homo sapiens
tcatggagttcacagaagagtcgaggagctactctgggcagttgaaaagtagaaagtcatacatgatacctgaaaatgagtttcatcacaaagacccccc

SEQ ID NO: 793802 - DNA, 75 bp, Homo sapiens
agatcaaaggataaacttgaccaggtttccagtgaaataagtgaccaagaatatggcccaggtgaccaaagccct

SEQ ID NO: 793803 - DNA, 76 bp, Homo sapiens
tggaggattgtcactccaacctcttttcgctgctatatgttctcctttcagccaagacctttcaccagtgcagggg

SEQ ID NO: 793804 - DNA, 82 bp, Homo sapiens
agaacaccccgagatgagaggagaagagcccagcacaacgaagggggggccctcagcctcttggccttgaacgggctgttca

SEQ ID NO: 793805 - DNA, 75 bp, Homo sapiens
agcacacaaagacctcctcctccacaggggagacagagactgaaagagcatattccttttgtggaactattgaat

SEQ ID NO: 793806 - DNA, 48 bp, Homo sapiens
accgacctcctgaaccgggcaggggcctttatcatctgctggactcct

SEQ ID NO: 793807 - DNA, 82 bp, Homo sapiens
ccgccatgcagggtcgaacggactgcatccgagccctgatgctagcagctttgcccgaagtttttacatacaaattctacta

SEQ ID NO: 793808 - DNA, 100 bp, Homo sapiens
cggaagccatcacctggatgcctacgtgggaagggacctcgaatgtgggaccccagcccctctccagctcgaaatcgaaactaaatatattttgccaact

SEQ ID NO: 793809 - DNA, 83 bp, Homo sapiens
caacaaggatgatatgaagacttccctgaagaaagttgtgaaggagaaaaggcgacggcggattgacagaagtatgattggag

SEQ ID NO: 793810 - DNA, 98 bp, Homo sapiens
ccactggtagcccccacccctctccgtccatggccccagatgacacttcaggttttgaagctggatttgagaatgaagataattcaaaacgggatatt

SEQ ID NO: 793811 - DNA, 101 bp, Homo sapiens
aatggttatctacacacccttctcatggcaatcgagttgagtacttggatagacttatacctcaggctttggtatcaggatgattctggcctcataaaatg

SEQ ID NO: 793812 - DNA, 98 bp, Homo sapiens
ttctggagagcggggtgtggggattatgatgttgatgaagaggacatgatgaatcaggtgttgcagcgctccatcatcgaccagtgagcagagtccgt

SEQ ID NO: 793813 - DNA, 73 bp, Homo sapiens
gccgggtgctggtcaccggggcaggcaaaggttatgatggagggtggtcgcagcaaagggtttggttttgtat

SEQ ID NO: 793814 - DNA, 73 bp, Homo sapiens
atatggaaatggaaattaaatgggttccagtcttcaccacacccaagaactgctctatgagagcaccaaagat

SEQ ID NO: 793815 - DNA, 100 bp, Homo sapiens
tctgctccttcaagtcctcctataacagccggctgaaaacacatatactcaaagctcatgctgccctgccaaggtaaccctgctggggtcagttatcttc

SEQ ID NO: 793816 - DNA, 83 bp, Homo sapiens
acaattccgatggcaaagccgttgccaaggtgaccattgtgaggtagatattttgttctaattttccagatgaggaagctgag

SEQ ID NO: 793817 - DNA, 75 bp, Homo sapiens
gggagagtagcagtgccttggaccccaggacagagcgggatgccaccagcttgtccaaagggaagttccaggagc

SEQ ID NO: 793818 - DNA, 83 bp, Homo sapiens
aggaaaaatgctgctgatgaaatttccagatttcaagaaagagctgaactcacgggaatcaaatggcgtaggtacaattttgg

SEQ ID NO: 793819 - DNA, 113 bp, Homo sapiens
ccgggacagcggcgagacgcgcgtgtgtgagcgcgccggaccaagcgggcccagaagcggtccacagacaaacgaatttaaaggagcaaccgaggaggcacctgcgaaagaaa

SEQ ID NO: 793820 - DNA, 140 bp, Homo sapiens
agaagattctgctccattttttctgattatggattctgttcagaaggaagccgaattttaagtcatcgttctaggatagatccatccttttacaatccctgctattattcgtccattcagcgtattgaactatgatccac

SEQ ID NO: 793821 - DNA, 98 bp, Homo sapiens
cctggcattgccttttgttgagccgcttacaaacacgcagatggcaagaagattgatggcaggagggtccttgtggacgtggagaggggccgaaccgt

SEQ ID NO: 793822 - DNA, 100 bp, Homo sapiens
attctggaaaactgcacagagaattccatcatggacctgacccaactgatacagccccaggagagagcatgaataatctttcatttagtgagctatgttg

SEQ ID NO: 793823 - DNA, 100 bp, Homo sapiens
caggaaccctcatctcaacaagtgaagatcccggtgttacacatccaatcgttcacctccttccaagactatgacattccaggaaaccttcactgctaag

SEQ ID NO: 793824 - DNA, 50 bp, Homo sapiens
aacaccactgaagcattgccaaggtgaacagggatattgtgtcaggcctg

SEQ ID NO: 793825 - DNA, 100 bp, Homo sapiens
cccaaagtgctgggattgcagggataccccatcagcctgagtctcttaaaggcctttatacacatatgtctacacatagggatttggatgatctcgggat

SEQ ID NO: 793826 - DNA, 82 bp, Homo sapiens
ccctgggggagctgaaacagaacctgtccaggagctggcatgacgtgcaggtctctagcgccacacgtcacatggagatggg

SEQ ID NO: 793827 - DNA, 100 bp, Homo sapiens
tgggctcagcgacaccgcgagctatatctgcgcgtggagctgagtgacgtacaggacccacctgccatgctgtgaggacacccaggccacatagagagag

SEQ ID NO: 793828 - DNA, 100 bp, Homo sapiens
gctgatctgagctcagacctgccaatttaccagagataattgataacaccctgtaacagctgaacatatgtagagtgtgtcggtcagaaggaacacctga

SEQ ID NO: 793829 - DNA, 82 bp, Homo sapiens
ccgtgtcctgcatgccgctgcctctgcgggcgagcacgagaaggtggtccagtggatacagctgttggggcagaagagacgg

SEQ ID NO: 793830 - DNA, 98 bp, Homo sapiens
tgaggtggaggcaggctgcggcagacggcgacagtggcggcggcgccatggcagggcttgcagagttgcatgctgagaatttgaaaaatgaagatgat

SEQ ID NO: 793831 - DNA, 90 bp, Homo sapiens
gtctcagcggccctccatggccagcggcttgcgaggatccctggaacgcctccagctgggatacgtggacattgtctttgccaatcgctc

SEQ ID NO: 793832 - DNA, 82 bp, Homo sapiens
agattgcgagggagcgatgcggtgcagcgcgaacactctgctccagccaaggtggtgagggcagctgttcctaaacagcgca

SEQ ID NO: 793833 - DNA, 98 bp, Homo sapiens
gaaaatggcggtgtctacagtgttctcgacttcgtcgctggagccatccgcaagcagttggcggctttcttagaaggcttctatgagatcattccaaa

SEQ ID NO: 793834 - DNA, 88 bp, Homo sapiens
acaaactgggtcccaatgatcaatacaagtacaagccagctgccatgttgtgagcacataccacatagctccatggagatgcccatgt

SEQ ID NO: 793835 - DNA, 95 bp, Homo sapiens
actgtgcaagatggacagcaagggaaatgaataagcgtctaacagaagaacaagccagaaaaacatttgagagagccatgaaactggaacaggag

SEQ ID NO: 793836 - DNA, 89 bp, Homo sapiens
cgatcaataaacttgatcgcattatggccagcactattaagctccagaacctgggtatcaacccagcaaacattggcttcagtaccctg

SEQ ID NO: 793837 - DNA, 100 bp, Homo sapiens
aggtggggccggtgaagcagtgcttcgtggtgactgaaaaagggcccctgggtagacagacacagcttgatttcagagcagacataggcgaagaaaacat

SEQ ID NO: 793838 - DNA, 83 bp, Homo sapiens
tccaggaggtggtcgtggcgaacctggcagctgcggctgcagacgtaggagatgcctgggacaaggaggccaccttctcaggg

SEQ ID NO: 793839 - DNA, 75 bp, Homo sapiens
ccggccggctgcgaagacgcggtgggccgcccctccggcatcaacttctaactcatctcgccaggagaggcctcc

SEQ ID NO: 793840 - DNA, 75 bp, Homo sapiens
gatttgtccctggggcggcagcgcggacccgcccggagatgagacaagttggatggcttgaggactggtactaaa

SEQ ID NO: 793841 - DNA, 74 bp, Homo sapiens
tactgggaaatccatagctaagatgccaggaccccctgaaagcctagacatggagaggcgggagatttttgagc

SEQ ID NO: 793842 - DNA, 100 bp, Homo sapiens
agaaggtgaaattctgtgtgctccctccggcgagagactttgtcagctcccgcacagtaaccgcaaatctgtccaaggctgcctggggagcattggagaa

SEQ ID NO: 793843 - DNA, 96 bp, Homo sapiens
tacttggaggctttctttatgctgtgggtggccaggatggtgtgtcttgcctcaacattgttgagagacacgttggtcgtcattgcctccgagccc

SEQ ID NO: 793844 - DNA, 119 bp, Homo sapiens
cggggacccagaccctggagcctcagttggaagcagccgatccagcctgcggagcctgtggggcagacgagatgatgcctattggccagaaggaaagcgtgtggcaatggaggaccgat

SEQ ID NO: 793845 - DNA, 83 bp, Homo sapiens
cagtgttagcaagacctgggggagaggatccctctgtgacccagctgaccaacgccccgcagggcggcctggcggaattcaac

SEQ ID NO: 793846 - DNA, 80 bp, Homo sapiens
aagatggcggacgagaaggacagggaagtcgggaacatgccctgtgtgccgccgtcatttcccacctgcggttattgaag

SEQ ID NO: 793847 - DNA, 100 bp, Homo sapiens
gcggaggctccatcatcacccccgagtggatcgtgacagccgcccactgcgtggaaaacaatccaagtcctgggcactgtcaaatggttcaacgtccgga

SEQ ID NO: 793848 - DNA, 74 bp, Homo sapiens
ttggtgagccttgaagctcaacatcgtattgcacctggctacaactatggagtgaaggtacctgagcgcaggaa

SEQ ID NO: 793849 - DNA, 75 bp, Homo sapiens
cgggcggggcggcggcgctgacaggtcgcctgcgaggccgctggccaggcctgagcctctgccaccatggccatt

SEQ ID NO: 793850 - DNA, 100 bp, Homo sapiens
ggctgggagtatttgtagacacctaccccaatgaggagaagcagcaagagggctattggacgtttgacatggaatgttataaaaagtatagaaaagtctg

SEQ ID NO: 793851 - DNA, 97 bp, Homo sapiens
cgacagttgtgttgtgccaatggtggagaagaaaacttcgggtacttccagtgcccacccaagtttggtctcttcgcgcccatccacaaagtgatcc

SEQ ID NO: 793852 - DNA, 100 bp, Homo sapiens
cacacgccctcacgcccggcgagcccgcgaggtttggtgcacctcgatttggaggaagtagggcagggcccttatctggaaagaagtttggaaaccctgg

SEQ ID NO: 793853 - DNA, 74 bp, Homo sapiens
ctgcctcagcctcctaagtagctgggattacaggctgcagccccgtacggagagccttctgcgagccctggttg

SEQ ID NO: 793854 - DNA, 50 bp, Homo sapiens
agaacaccatggagaccatagactggaagagatgccctgtatccaagccc

SEQ ID NO: 793855 - DNA, 82 bp, Homo sapiens
taaagcagcgtgcgttcagccctggggttgcagatatcaagaaagtcaacaacttcatcagagaacaagacttatatgcttt

SEQ ID NO: 793856 - DNA, 100 bp, Homo sapiens
gacagcttcgacttagccctgctccaggaatgggacctcgagtcactgtgagaacaaatccgtcaaggcctagaagaactccagaaagttctgccaggag

SEQ ID NO: 793857 - DNA, 100 bp, Homo sapiens
atatcccagctggagagagaagaaaagcttttgatggtggagacagaaaccccaagagatggatgttcaggtgtcatggagaaactccagctgggcccag

SEQ ID NO: 793858 - DNA, 100 bp, Homo sapiens
gccattgccaaggacaacatcatccccttcctccggacattcacggcatggtgtaactcccacctccggaaggcggggacacagatcgagaacatcgaag

SEQ ID NO: 793859 - DNA, 90 bp, Homo sapiens
ggaagccagaagaggaggaaaatgttttgccacgtggatgtgaagatttcctctaaaagggaacagaaagaacagcttcaaaagatgaaa

SEQ ID NO: 793860 - DNA, 90 bp, Homo sapiens
gcgggccctgctggaccagctcatgggcacggctcgggacgaaatcttcccaaggctgcagacaccgacggatttgctttgggagccaga

SEQ ID NO: 793861 - DNA, 50 bp, Homo sapiens
gtgactagatcagagatcatagatggaaaatggcattcctatgaagaaag

SEQ ID NO: 793862 - DNA, 83 bp, Homo sapiens
cgagcacagagcctcgcctttgccgatccgccgcccgtccacacccgccgccagatttaatccagagactgacttcactatag

SEQ ID NO: 793863 - DNA, 96 bp, Homo sapiens
aggcatgaggtgcagctggacatggaaccccagggctgcctggtggctgaggatgaaaactttcggaagagaaagttgcctgtggtaagttcagtt

SEQ ID NO: 793864 - DNA, 75 bp, Homo sapiens
aattccttttcgaccttcaatccagttccaaggactccacggggtgactgaacttgaatgtgttagtagccaagc

SEQ ID NO: 793865 - DNA, 100 bp, Homo sapiens
gcggtgactccccgccgctcccgggggccgtgacggtatgatctcgtgaaatcttgagagaaactgaatgacgaatgaaactattgttcctgtttcacac

SEQ ID NO: 793866 - DNA, 82 bp, Homo sapiens
cagtcggggcagccgctcgcccctcttttccatgtatccgtccagacctcctgccccccgaggtctgcagtctcctgaaccc

SEQ ID NO: 793867 - DNA, 98 bp, Homo sapiens
tggacagatctgagagatactgagaaatcgagctatagcagattatcttcgttcaaatggctatgaagaggcatattcagtttttaaaaaggaagctg

SEQ ID NO: 793868 - DNA, 100 bp, Homo sapiens
cccacccagatgccagtagtgcccgccccacccgcatgctctttgtcactccccggcggcagcacgaaagtaccatttccagggtcacccccgagaggac

SEQ ID NO: 793869 - DNA, 101 bp, Homo sapiens
cagcgcctgcgcgtggcgttgcagaagctttccggcacagatgctgtctttgcatttcaactacgcaacccagtgcacaatggacatgccctgttaatgca

SEQ ID NO: 793870 - DNA, 100 bp, Homo sapiens
aagcagctcttccggaagatcaactgcagactgtcctattgcatctcaagccaataagtggataagccgtagccccatgctgcagagaagggtctaccat

SEQ ID NO: 793871 - DNA, 90 bp, Homo sapiens
ggcggcctcagggcttgtgggccaggagaacgcgcgagaggagtggaagctggacacactatgtgacttgtatgaaaccctgaccatcac

SEQ ID NO: 793872 - DNA, 101 bp, Homo sapiens
agtcaaacgcagaaggactgcctcactgagcaaccaagaagttggtgttgaccccgatcaagacccaccacccaacaacgacagctttcaagtcttacaag

SEQ ID NO: 793873 - DNA, 74 bp, Homo sapiens
gcagcttcctgtggatatcttgatattgcagatgatgtccttgcattgcccatttttaagcaagaagagtcgag

SEQ ID NO: 793874 - DNA, 100 bp, Homo sapiens
ccaggattaacaggcagcaaaatgagctcttcagaagagaggcatttcatccttcatgaagccattcaggattttgaattgcatatgagtgcttggctct

SEQ ID NO: 793875 - DNA, 95 bp, Homo sapiens
gtgatgttgggccaggaagttggttactccattcgatttgaagactgcagtagtgcaaaaaccattcttaaaaacatccctttattttgatgtat

SEQ ID NO: 793876 - DNA, 90 bp, Homo sapiens
gctagaagaaaaggtgtacttgcaagaaacctcaggacttgagtaacagcaacatgatgctttcttcacatgtcgaaaaaatgtccttct

SEQ ID NO: 793877 - DNA, 112 bp, Homo sapiens
tccccccgccctgttcgagctgtgcgggcgggcggtgagcgcccatatgggggttctggagagcggggtgtggggtgagaagccctaccactgcaactgggacggctgcggc

SEQ ID NO: 793878 - DNA, 100 bp, Homo sapiens
ccccgccgagccgccaccgcaggtcgaggacggtcggactcccgcggcgggaggagcctgttcccctgaggttgttgactatatactgccacccttggtg

SEQ ID NO: 793879 - DNA, 98 bp, Homo sapiens
aatgagagagtggttgtaaaaatcctgaagaaaaaactgcctctgacagctcttgctcaaaatatgcaagaagcatcgactcagctggaagactctct

SEQ ID NO: 793880 - DNA, 50 bp, Homo sapiens
ggctgtgattggcaacctggatgaagcatttgatgaatacagaaatatca

SEQ ID NO: 793881 - DNA, 75 bp, Homo sapiens
tgccctgggctggaacgaccctggtatcagtcagagccggatctctcattggctgttgcagcagggatcagacct

SEQ ID NO: 793882 - DNA, 75 bp, Homo sapiens
taagtggctacacttgccactgtgtgctgccatacacagttgaccagatataccatctggcatctccagcctccc

SEQ ID NO: 793883 - DNA, 90 bp, Homo sapiens
caataattacctgaccaaggaggagtgcctcaagaaatgtgccactgtcacaggtgcagaggacgtggtgatggcgttttccaggtcgga

SEQ ID NO: 793884 - DNA, 90 bp, Homo sapiens
gccgaggcgggcggatcacgagccatcgtcagccagtggcagcaggagtccaaagagaaggtggtgtccctcctgctgtcccaccttccc

SEQ ID NO: 793885 - DNA, 100 bp, Homo sapiens
gtcctcaggagctgtggggtcccctgctagaagtgggggactcggcggggtccactggtctccacataatgaaactattctggcttcaagtggtactgac

SEQ ID NO: 793886 - DNA, 74 bp, Homo sapiens
ctcagtctcccaaagtgctggaattacaggggagacagtgtttcacaaaatgattttccttctgaagctcccat

SEQ ID NO: 793887 - DNA, 82 bp, Homo sapiens
tgctggccaccatccttgggaccgcctgcctggccattgcgagcggcatctacctactgttgtccgaacagacagcctgaag

SEQ ID NO: 793888 - DNA, 82 bp, Homo sapiens
attgccagcaaaggcgtcaagctggtctccatcggggcagaagggcgtctctggccgagcctctttttgtggaaaacgacag

SEQ ID NO: 793889 - DNA, 75 bp, Homo sapiens
caggggcggaggcggaggcagaggtggaggcgctttgaaagttactccacaggatccgctgaacataggatgttg

SEQ ID NO: 793890 - DNA, 76 bp, Homo sapiens
tgggcctggaaggggaagaattcgggaaaagcaacgtggggcattccaggaaagtggagaatgaggacatgaataa

SEQ ID NO: 793891 - DNA, 75 bp, Homo sapiens
ggatacttctgaagaacaaattaaagaatattttggagcctttggagagtgccatggcttatgggatgaagatga

SEQ ID NO: 793892 - DNA, 100 bp, Homo sapiens
agaatatatcacccataatcggaatgtgatcacagagcctatttacccagaagtagtccatatgatcctcaccagagactccgtaactactcaggtagat

SEQ ID NO: 793893 - DNA, 100 bp, Homo sapiens
agagtacatctcttttcaaatagctggattaggtcctcatgctgctgtggtcattgctggtcatctttgggtctcactctgcctctcaggctgtagtgca

SEQ ID NO: 793894 - DNA, 101 bp, Homo sapiens
cggcgctgaaggggttaattcaacagttcaccaccattaccgcatgacgtatcccagactttactcaaggcaacactggacagtgttgtagaagaatgtgt

SEQ ID NO: 793895 - DNA, 97 bp, Homo sapiens
ggatatcttgggcgggggatgtgagcgctgagcccttggcagacaatgcagatcttcgtgaagactctgactggtaagaccatcaccctcgaggttg

SEQ ID NO: 793896 - DNA, 100 bp, Homo sapiens
ctactcacagcgccaaaactgcaggggccaaggaacagggcggatacctgaccaactcgtgatcctagacatgaagcatggagtggaggcgaaaaattac

SEQ ID NO: 793897 - DNA, 100 bp, Homo sapiens
ccgcgcccgcctcatttgcgccttgcagcactgctggaccagatggagtcccctgtttccacaccagcagtgctgccaatacaccttttggtgccagtgg

SEQ ID NO: 793898 - DNA, 90 bp, Homo sapiens
tgaaaggaatgggtctgggaccttaacagggagccatggatgtgaagttaccccagatgtaaacatttcaggccaaaaatttaacattaa

SEQ ID NO: 793899 - DNA, 83 bp, Homo sapiens
tatactcctcccagtgacgggtctggagtgcgtgggggaccggctgttggcgggcctgggttctgaggaaaacgcaatggtgg

SEQ ID NO: 793900 - DNA, 74 bp, Homo sapiens
cgagcagtctcaggcctttagtgatgatgaacaactctgctcatggtgattacatgcaaaataacgagagcagc

SEQ ID NO: 793901 - DNA, 100 bp, Homo sapiens
caaacagatatccagatgctaaaatggacccaatgaacatctgggatgacatcatcacaaatcggagtccttcaataatgttaaacagtggctgcaggaa

SEQ ID NO: 793902 - DNA, 100 bp, Homo sapiens
ctcgtggggtgtgtgagggccgagtgaaatcgtgcatttgcggttggttcatgtgatcctggttaatggaacataagtgagattttatgggtgacaggga

SEQ ID NO: 793903 - DNA, 78 bp, Homo sapiens
aaaaaatggttgacctcacccaggaggataagatcaatgccctcattaaagcagccggtgtaaatgttgagccttttt

SEQ ID NO: 793904 - DNA, 75 bp, Homo sapiens
agagaatggctgctgggtacctgccccgctggtcccaggattttttatcaagcagaaatgcatcgaacaacgaga

SEQ ID NO: 793905 - DNA, 80 bp, Homo sapiens
attcagagaggggaagtgatttgcctcagcttgtactgcactaccgggaaggcgccgtccccaccacccctcctcactga

SEQ ID NO: 793906 - DNA, 100 bp, Homo sapiens
atgtgctattttgacaacacttattcatcttgttcaggtgccactgattaatgaacttgaatcagcaatacatcagctgtacaaacagcgagcttcccgc

SEQ ID NO: 793907 - DNA, 89 bp, Homo sapiens
cttccagttggaattgaagaatattcccaagtccttcacccgggtgaaagaacttgtcctggacaacagtcggtcgaatgaaggcaaac

SEQ ID NO: 793908 - DNA, 90 bp, Homo sapiens
tacgtctgcggaagtgcagctgcctcagttcttagcgcagtatacctgaggtgcaccggaggtgaagtcggtgccacttctgccctggcc

SEQ ID NO: 793909 - DNA, 74 bp, Homo sapiens
aaaataaaactaacagtctatgatgtcaaggataagtctcatgacaccgtcttgagagctgatgacaataacat

SEQ ID NO: 793910 - DNA, 98 bp, Homo sapiens
ggcgcagcttcgagggccgggagctcctggtcatcgagctgtccgacaaccctggcgtccatgagcctgaccattcctcaagaattttgtatccaagg

SEQ ID NO: 793911 - DNA, 74 bp, Homo sapiens
atgtcttgaaagaggcacgcatttttgacagttgaagcatatgtcctgtgagcttaggggtgctacaagttgac

SEQ ID NO: 793912 - DNA, 100 bp, Homo sapiens
ggccatcaagcccttctaccagaagagggaggtgaccaaggaggagtacaaggacatcctgcgcaaggccgtgcagaagaagaagaaaggagggcgcggg

SEQ ID NO: 793913 - DNA, 50 bp, Homo sapiens
gggagagtctgccggcggagaatataagcattccaaaatatgcccggtgc

SEQ ID NO: 793914 - DNA, 89 bp, Homo sapiens
gaagaggacgacgacgacgaggaagaggaggtttctgaggttctcagaggcactgtgactgacttccctggatttgatgagcgggctga

SEQ ID NO: 793915 - DNA, 97 bp, Homo sapiens
cagctgctggacatgtcctaggaaattcaactactgaggaggttacggcacaaaaatgtcatccagctggtggatgtgttatacaacgaagagaagc

SEQ ID NO: 793916 - DNA, 90 bp, Homo sapiens
cttgcggaaaggatgttggcggtccctgtgacctgtggagacacggccagatctgccctccagacaggaagatgtcacccaagcgcatag

SEQ ID NO: 793917 - DNA, 80 bp, Homo sapiens
cttctgaattgtgctgccttggccaaaagagacgcaaacatgcagatctttgtgaagaccctcactggcaaaaccatcac

SEQ ID NO: 793918 - DNA, 96 bp, Homo sapiens
caagtcggccatgagcgagaggatcttgcctcggagctggtcccactacacggtgcctgccggcatgaccgtcatccagtgggtgtccgacttcag

SEQ ID NO: 793919 - DNA, 96 bp, Homo sapiens
ggaccggccactcaatattgcacaccttatatgggaggcccccattcactggggagaatagaaagaaaacaattgacaaaatcctcaaatgtaaac

SEQ ID NO: 793920 - DNA, 83 bp, Homo sapiens
cgagctgacgtggcttgaattgggaggggggcagctggagcctcaggcggcagcgcttctaggatgctcgtcagaagttccgc

SEQ ID NO: 793921 - DNA, 92 bp, Homo sapiens
cttagctgtgctcgcgctactctctctttctggcctggaggctatccagcgaactctgcgaccttcaagtcgtttgaggaccgagttgggac

SEQ ID NO: 793922 - DNA, 83 bp, Homo sapiens
gaccctgcccttgccagaatttcctgcgctgttccacctcattcaacttcaggtgtcgtgaaaactacccctaaaagccaaaa

SEQ ID NO: 793923 - DNA, 71 bp, Homo sapiens
cggcaggctgaggagaaagcggcgcgcggaggggaatttcagagtgcctgccccggttgacatgcatgatc

SEQ ID NO: 793924 - DNA, 75 bp, Homo sapiens
agcaccacatccgcgggtccatcacacaaggttgggggccgtcccgctcctaaggcaggaagatggtggccgcaa

SEQ ID NO: 793925 - DNA, 100 bp, Homo sapiens
ctcagcgagtgggactggatggagttcgttggttgaatctggcgatgtggaacccatggatatggagggctgactatatacaccatgttttttcctggca

SEQ ID NO: 793926 - DNA, 82 bp, Homo sapiens
gtaagaagtgccttttgcctcccaccgtgattctgaggcctccccaaccatgtgcaattgagtcagagtcagaagcaaaggt

SEQ ID NO: 793927 - DNA, 100 bp, Homo sapiens
cagcccccgaaggccctatcaggacatggagtatgaaagacggaaaaagaggagcggtaccttatgttattttcaaatgtcctgataatgttatctgcaa

SEQ ID NO: 793928 - DNA, 75 bp, Homo sapiens
atgtctcagatatcaatgctgtcagtggtacagccaaagaccggagctttggagagatgaagtttaaacagtgtc

SEQ ID NO: 793929 - DNA, 100 bp, Homo sapiens
tccccagttctggcagattctggaaactgtacattgaagcagaggtatatgccctcattttgcttaagacctctggccagagcagggcatggaagattcc

SEQ ID NO: 793930 - DNA, 82 bp, Homo sapiens
tctacagagcggcctgcgccagcgacatgatgccttcttctgtagagtgggcgctttgcagaatacgtgttgaatgaaatca

SEQ ID NO: 793931 - DNA, 101 bp, Homo sapiens
aacgtggggaacgtgatcctgctgaacatggacggcaaagaggtgctcctctccgaattccggcccagtggggagctgttcgccatcaaggctctgaagaa

SEQ ID NO: 793932 - DNA, 97 bp, Homo sapiens
gtggtgtgcagcggcggggacctcccggagcctcccgagcccggccttctgcctaacggcaccgttaccctggagagctggaaaagcagcttctaca

SEQ ID NO: 793933 - DNA, 89 bp, Homo sapiens
gaaaatcctcactctgagtacggtctcacagacaacgttgagggctcagaatggaatgcctccaacttagaggacttacagaaccgagg

SEQ ID NO: 793934 - DNA, 93 bp, Homo sapiens
acgtcgtgatccagaagtccagagctgaggactgcctgtttgcaggttttgggatttgagattgacgcggtgaactctgtccagttttcaaac

SEQ ID NO: 793935 - DNA, 100 bp, Homo sapiens
gtttaaccggatcccattgtacccagagtgcagagccgcctttccagcatgcaggggctgctcaggaactagccagctgtggatggagtaagaaggagaa

SEQ ID NO: 793936 - DNA, 75 bp, Homo sapiens
atcaaaagaatatttagaatgcaggatggagaggtactctgtggatatccccttggacaaaactgtcgtcaataa

SEQ ID NO: 793937 - DNA, 100 bp, Homo sapiens
ggacggtggaggcccagagcccgggcctgaagggggggacaaacctgggtgcccgcaggagcccggcaggcaacaaatggtcattcagaatgcttacggc

SEQ ID NO: 793938 - DNA, 50 bp, Homo sapiens
cgcgtcggctgggcgccccacaagggtaaaccagacttgaatacaacatt

SEQ ID NO: 793939 - DNA, 101 bp, Homo sapiens
aagtgtctgtagccgcagctgcgggtccgggattcccagccatggcagattcctccgggcagcaggaaacagtatctcacctccctaaactggttaatagt

SEQ ID NO: 793940 - DNA, 99 bp, Homo sapiens
tcagaagaccagaccttcgctaccagctcggtttcagcgtccagaatggaattaggaagtccacaaatgaaggggacaccccattttaaggaagaacag

SEQ ID NO: 793941 - DNA, 100 bp, Homo sapiens
gggcatgggaagtatgagaaggtgcttgtggaagggggcccggctccctaggcgtcccatctcggattttttatcaagcagaaatgcatcgaacaacgag

SEQ ID NO: 793942 - DNA, 75 bp, Homo sapiens
agaaacttgaccgcaaatgatccatcacagtggccagtttgccatcgtgaagaagtgccgggagaagagcacggg

SEQ ID NO: 793943 - DNA, 90 bp, Homo sapiens
cagagctgaggactgcctgtttgcagggtgtccggtggagagctgtttgaccggatagtggagaaggggttttatacagagaaggatgcc

SEQ ID NO: 793944 - DNA, 51 bp, Homo sapiens
gcagtctcaggcctttagtgatgatgcaattctgtggtgttcttggtcaca

SEQ ID NO: 793945 - DNA, 99 bp, Homo sapiens
gaaacctttccaacacagatgtccaagctgccaacaagctatagtcagcagactggacctcaacaacctcagcagttccagggatatggccagcaacca

SEQ ID NO: 793946 - DNA, 105 bp, Homo sapiens
gggatttggcacctatgcacctccagagggtggacccgaactccccggtgctcttggaggacccagtcctttgtgccttggcaaaaaagcacaagcgaaccccag

SEQ ID NO: 793947 - DNA, 83 bp, Homo sapiens
gctgggcgagccgtgcgatctggacgcggcgctgctgaccgacatcgaaggaacaagatcactcaaggtgaaggataatctac

SEQ ID NO: 793948 - DNA, 100 bp, Homo sapiens
ccgattgctgcagccgcttgtcagtgtgatgaagattggcacccaggtgagcacctgcggatctgtccccagggctacacctgctgcaccagcgagatgg

SEQ ID NO: 793949 - DNA, 75 bp, Homo sapiens
cgagattattgagttaaagaagatggagttttaacattgaatgcggagaacactaattatgcctatcaagttcca

SEQ ID NO: 793950 - DNA, 99 bp, Homo sapiens
gctttcactggaccgcgccggctgcgctgcaggacagagcgggatgccaccagcttgtccaaagggaagttccaggagctcctggtgggcatcgttgtg

SEQ ID NO: 793951 - DNA, 75 bp, Homo sapiens
gaaggttctggtcttgcactaagcattgggaagctgtccattgaaaaggccttggatttatccctgtacttgaaa

SEQ ID NO: 793952 - DNA, 75 bp, Homo sapiens
tcagggacaagaaacagggggtctcagccaagaatcaagccccaaatccaaggccaggccatcctctccctccac

SEQ ID NO: 793953 - DNA, 80 bp, Homo sapiens
ctgagggccttcgagagctaccgcgccagacagaaagaaatgaccgcccggatgtgccactgagagccccgcgggtctcc

SEQ ID NO: 793954 - DNA, 101 bp, Homo sapiens
gaaaattcatctggaattactacccaatcaaggaatgctgatcaaacctgcaggctgggacaatgaaaagaaaatagctattttacatgaaaattttacaa

SEQ ID NO: 793955 - DNA, 100 bp, Homo sapiens
agctgatgttaatgcccaggacaagggtggtttaattcctcttcataatgcggcatcttatggggtattaccagagaaacggagtctgaaactcttgaag

SEQ ID NO: 793956 - DNA, 100 bp, Homo sapiens
ccggaggatttataccgctgcgctcaatgacagggaccaggggggcggcagcgctggacacccagcctccaggatgactcactggttgtgtggaaggaag

SEQ ID NO: 793957 - DNA, 82 bp, Homo sapiens
gagacgtaccggctctggaaaatccgcaagaccatcatgcaggtttggtgcacctcgatttggaggaagtagggcagggccc

SEQ ID NO: 793958 - DNA, 98 bp, Homo sapiens
ttgtccagaactctgtcaaatgaagaacactttcaagaaccagtggcctggtttgctttcgaccctggctcggcgcactcggacatcatcctctccaa

SEQ ID NO: 793959 - DNA, 50 bp, Homo sapiens
tgctgctgtctgggaagatggccctggacagtcattttgtttactcattc

SEQ ID NO: 793960 - DNA, 95 bp, Homo sapiens
cgaaggcaggacagcggtggcggcaggttaaagctcgagctactactcgagaggtaatggctacttatactattgaggacatagttattgaactt

SEQ ID NO: 793961 - DNA, 75 bp, Homo sapiens
gtaagaagaaatcacctagtacatttgcctgaagtaccactccagttgcggagagatttttcaccagttccacct

SEQ ID NO: 793962 - DNA, 75 bp, Homo sapiens
agattaaacatttagagattgaaaagaatgctgaaagtagcaaggtgttggcagagctgaaagagtacgcaacag

SEQ ID NO: 793963 - DNA, 75 bp, Homo sapiens
acctggcggtgctcgagtgcctgcaggatgtgagggagtggtatgtgtgcaacagagagaaattatgcgaatcac

SEQ ID NO: 793964 - DNA, 75 bp, Homo sapiens
ctgtattcagctcaggaccaggcaccttctgtggaagctgggatagatgggcagcagaagatcatgtgcttcgtg

SEQ ID NO: 793965 - DNA, 75 bp, Homo sapiens
gcagcagccgcgcctgcagaccggcctcgcggagcccgcgcgccgagccccacatccgtaatgcctcctgcctgc

SEQ ID NO: 793966 - DNA, 106 bp, Homo sapiens
cttggagaggccgagggtttgatgaaggtggaggcagcgcggctctcaggtgagaagccctaccactgcaactgggacggctgcggctggaagtttgcgcgctcag

SEQ ID NO: 793967 - DNA, 98 bp, Homo sapiens
ctcggacttccaatatgagaatgccaacatgtggttcaagaaccttgacaagctcatccggctggtaaatgcgcaggccaaacgtaccaagaaagtcg

SEQ ID NO: 793968 - DNA, 83 bp, Homo sapiens
atgaatcctgcggcagaagccgagttcaacatcctcctggccaccgactcctacaaggaatagctattcagtcagacagaacc

SEQ ID NO: 793969 - DNA, 90 bp, Homo sapiens
atgctttttattacaagactacggagcataggaggaaaattcatcatctgaccatgctcgacagctgaccaaggccatgatgcgaaaggc

SEQ ID NO: 793970 - DNA, 82 bp, Homo sapiens
ctgattaatgctgctaagacatccatgtcttccaaaatcattggaataaagtggatttcgataacaacatacagttgtctct

SEQ ID NO: 793971 - DNA, 51 bp, Homo sapiens
tatgagaaggacaacacctacttaggtgacgcatccaaagaagacattgac

SEQ ID NO: 793972 - DNA, 134 bp, Homo sapiens
tcctgagaaatgtgacagacacatttaaaagggcaagttacatccctgcatctgatggtgtccagacctgcgaccgcatcaagcagtccgccagcggaaccaagcggcgcgtgttcatcatcgagaccatgggc

SEQ ID NO: 793973 - DNA, 83 bp, Homo sapiens
aggaagacgaatcgttaaacatctgaaagggtcagggctatggaacacacctgatgaatcatttgaaagaatatcacataaag

SEQ ID NO: 793974 - DNA, 75 bp, Homo sapiens
acccctcctacattgctcatcggatcacccctaagaggcggggtttcaccatgttgcccagactggtcttgaact

SEQ ID NO: 793975 - DNA, 82 bp, Homo sapiens
aagatgcggctgctggacggcggcagcttcaccgccgagtcctccagcgtccagaggaccagaggttaatttattctgggaa

SEQ ID NO: 793976 - DNA, 100 bp, Homo sapiens
cgccggaacaccctggaagccgagaaatggttgaaaggattgtagacaagaggaagaacaagaaaggaaaatgggagtatcttatccgatggaaaggcta

SEQ ID NO: 793977 - DNA, 75 bp, Homo sapiens
cccaacgccccggagccgccggccgctagcgtcagcgccagccaggtttttggattcaaagcataaaaaccatta

SEQ ID NO: 793978 - DNA, 98 bp, Homo sapiens
cctggactccctggagaagcagatggaaaaggagccagcaccgctctttgaccttgccatgcttgccttagatagtccagagagtggctggacagagg

SEQ ID NO: 793979 - DNA, 75 bp, Homo sapiens
cagctgcaccccaccttgatccagcggacttacgggaactctgcgaccttcaagtcgtttgaggaccgagttggg

SEQ ID NO: 793980 - DNA, 118 bp, Homo sapiens
cggcgctccaagttgtggagaagctgcaggcgcgcctggccgcgaacccggaccctaagaagacaatgcagatcttcgtgaagactctgactggtaagaccatcaccctcgaggttga

SEQ ID NO: 793981 - DNA, 104 bp, Homo sapiens
ccggcttcaaggcccgcggaacagcggaggacgaagagcgggacccgagccctgattgcaaatagaagagtcttccaaaccagtgaggctatcacaacagctgg

SEQ ID NO: 793982 - DNA, 100 bp, Homo sapiens
caggccgtcatccgaactgacatggaccaaattatcacctccaaggagcaccttgccagcaagatccgaggattcttcttctcagacaatgcctgtggaa

SEQ ID NO: 793983 - DNA, 98 bp, Homo sapiens
ccttttcaaatctcactggtctatttcccagtgggtttctaaaccaaagaattgtaagtgctcagagcttggctgaagatgatgtggaatgagaaaca

SEQ ID NO: 793984 - DNA, 74 bp, Homo sapiens
ttctccagccaccccagccagtggaaccaaggcctcccgaggagcccagacagctgcagccacagctccccgta

SEQ ID NO: 793985 - DNA, 150 bp, Homo sapiens
aggagaacgatgaggagaacgaagagcgctgggttggacctttacctgtggaggcaacactggccaagaagaggaaagatggaatctcgctatgtcaccaggctggagtgcagtggcgcaacctcggctcagcgcaacatccgcctcccg

SEQ ID NO: 793986 - DNA, 100 bp, Homo sapiens
ctcctcacctatggccgctggcaggaactagaacagtctttggctagctggactcagaacttgaaagaacttcaaactatgaaggcggacttaacccggc

SEQ ID NO: 793987 - DNA, 101 bp, Homo sapiens
accagcatggctacttcatattttggaaagcagtttttaagacaacaagatgagaagatgaagtgaatttatggattctggtttttctgaattttcaaagc

SEQ ID NO: 793988 - DNA, 97 bp, Homo sapiens
tggatgggcgagtcaacgggggcctcaacctctccagagccattgctggcgatgaaatgcatgagaccagaagatgtgtcagtgctatacatcactc

SEQ ID NO: 793989 - DNA, 100 bp, Homo sapiens
gacgggtgatgccagcaagtgcctggccacggttctcagaagcagagtttagagcttaccagtgatctcagcatccttcaaatgtctaggaaagaacttg

SEQ ID NO: 793990 - DNA, 90 bp, Homo sapiens
gctggagcagtgaggagtgtttcttccaagagaagatgactgcctgagaggcgtttaaatgcagaattgcaggcaaaaacagctgacgtg

SEQ ID NO: 793991 - DNA, 97 bp, Homo sapiens
cggtggctcccaagaagtccgagacacgcggtgaggcggcgacgggctccgggtgtcatggagaaactccagctgggcccagagattctgcagcggg

SEQ ID NO: 793992 - DNA, 74 bp, Homo sapiens
ggaagcagccacacgggggggctctcacctccaggccccccaccccaagcaggaaccccaggagatcaattttc

SEQ ID NO: 793993 - DNA, 75 bp, Homo sapiens
aaactcagcgctggggaagaaggacacttggtggggttcccacacaagctcctccacctcttgaagcaacttcat

SEQ ID NO: 793994 - DNA, 82 bp, Homo sapiens
gctgagccagcggagctgcttgaaacttctgcagcatccagaactgagtaatagtcaacttctggcagactttctttcccct

SEQ ID NO: 793995 - DNA, 83 bp, Homo sapiens
gacgacgagtacgactacctattcaaagaagtcatatgttagaaagactctatcaaactaaggatggtagtcagcgtggagga

SEQ ID NO: 793996 - DNA, 46 bp, Homo sapiens
ctgtctcacgccatcactctggttatcaatactctggctgaccatc

SEQ ID NO: 793997 - DNA, 88 bp, Homo sapiens
gttgagggcacgagtcgggtcctgagaccaggcatgtcagagcgggagcgacaggtgatgaagaagctgaaggaggtggtggacaaac

SEQ ID NO: 793998 - DNA, 90 bp, Homo sapiens
ctttgacttcagcttctcctcggtgctggagaatctggtaaaagcaccattgtgaagcagatgaggatcctgcatgttaatgggtttaat

SEQ ID NO: 793999 - DNA, 75 bp, Homo sapiens
acacgggcgagaagccctacgagtgcaacatctgcaaggtccgcttcaccagcgtccgtctccaagagagtatga

SEQ ID NO: 794000 - DNA, 82 bp, Homo sapiens
cggaggaggacaacgactaccaccgcagcgacgagcagcacatggattaattgatgtatgttgagtttatggagctgccttt

SEQ ID NO: 794001 - DNA, 75 bp, Homo sapiens
gaacgggtcggggaaggcctcgatgtcagctgaactttccatccaaggtattaatctctggagaagacacatcca

SEQ ID NO: 794002 - DNA, 102 bp, Homo sapiens
tagcaccggcgaaccccccgccctggacgaggtgcccgaggtgcgcgccctcatcgagtggatccgcaggaacaactcagatcgtctgatagaagagacaat

SEQ ID NO: 794003 - DNA, 100 bp, Homo sapiens
cctgcagtcggtgaccgcgcgactcggcgcccgcccgcgggacttgagtgagaacgccatccaggccatccccaggaaagcttttcggggagctacggac

SEQ ID NO: 794004 - DNA, 89 bp, Homo sapiens
aacttacctctttgaatctgaaggtttagggaccagttactctccacaagaaaattcacacaaccacagtgctcttcatagttcaaatt

SEQ ID NO: 794005 - DNA, 75 bp, Homo sapiens
caaaacttcggacatagaggccaaccaacctttggaggttgcaccattactcagacttctaaagagactatttga

SEQ ID NO: 794006 - DNA, 100 bp, Homo sapiens
gctgtgggtagtctatattctaactgtagcccttcctgtgttcctggttatcctcttctgctgttctggaaaggatttgacgaaacgttcgagtcaaacg

SEQ ID NO: 794007 - DNA, 100 bp, Homo sapiens
caggcagagtggaaaaaagagaggatttgcttttgtaacttttgatgatcatgatacagttgataaaattgttgaacctgacttccatgcggttgaaccc

SEQ ID NO: 794008 - DNA, 83 bp, Homo sapiens
ctgagtacctgaaccggcacctgcacacctggatccaggataacggaggctggatcttcgtgaagactctgactggtaagacc

SEQ ID NO: 794009 - DNA, 100 bp, Homo sapiens
cggacgggcaccagcacgtgcacgtgctcccagggtgaacgtgggctgcggccctgcagaggagagggtccttctcaccgggctgcatgcggttgccgac

SEQ ID NO: 794010 - DNA, 100 bp, Homo sapiens
gggcgcgggcagcggcgtgccctatttctacctgagcccgctgcagctctccgtgagcaacctgcagatggaacttgctaaggaagaaaagtgtgaattt

SEQ ID NO: 794011 - DNA, 100 bp, Homo sapiens
ccgctgttactgatatacctttagaacaccttccaccatgaccacctcagcaagttcccacttaaataaaggcatcaagcaggtgtacatgtccctgcct

SEQ ID NO: 794012 - DNA, 75 bp, Homo sapiens
ggagaggagcgtcaacagcagcaccatgggatttccctggggaaagtcttcactcagagcttcgctgacagccaa

SEQ ID NO: 794013 - DNA, 123 bp, Homo sapiens
cagatgtgaataaaactgaccatagccagagaacagccctccatcttgcagcccagaagatcaacggcgaatgactgaaattacagggcacctaataaaaatgagattgggggatctggaccg

SEQ ID NO: 794014 - DNA, 100 bp, Homo sapiens
cggaaatccttgggtttgaagatgatgttgtgattgagtttatattcaaccagctggaagtgaaggggctggctgtgggcaatggactctcctcctatga

SEQ ID NO: 794015 - DNA, 74 bp, Homo sapiens
tctttacaggatatttatcacggtcctcgatgggcttcctggaatattggtgtgtttatttgcatcagatgtgc

SEQ ID NO: 794016 - DNA, 88 bp, Homo sapiens
agaacaggaatttaaagcacattgtcgactttcagaagaattattagataaatggctctcctacccagagacccagcacgtgcccctc

SEQ ID NO: 794017 - DNA, 74 bp, Homo sapiens
aaagctaaggatggagttgcaggtgtccagcggaattacatgaatgacagtcttcgaaccaatgtgtttgttcg

SEQ ID NO: 794018 - DNA, 100 bp, Homo sapiens
atgatgattctagcaggttcctgagtcctcgagcgcgggaagaaaggttccgaggcctcatcctgctgctgaccttcctaatttacgcctgctatcacat

SEQ ID NO: 794019 - DNA, 75 bp, Homo sapiens
cgcggcggcaggacgggaaccacgcgagctgcagccagacagcccacctgaggatattgaccataaggactcata

SEQ ID NO: 794020 - DNA, 98 bp, Homo sapiens
atgaaatcgccaatgccaactcccgtgaatcagtggctaacctggttagaaactgctgaagaagaagaatcagaggaagaagctgactaaagaaccag

SEQ ID NO: 794021 - DNA, 90 bp, Homo sapiens
aaatactgctctagacaacgtatggaattagccttcagcaggtgattaagagttgccaggtgctgaggaacctctaatcatctcccatgg

SEQ ID NO: 794022 - DNA, 100 bp, Homo sapiens
caagatggccgcagtcggcaaggagagacgtcgctgaggggcttgcctgaagcgagggtgacaccacagccaaagccctatgggaagctttactgaacac

SEQ ID NO: 794023 - DNA, 75 bp, Homo sapiens
caacgcgtttggcaacgctttcctcaacaggtgtttcccattaaacactaccaggacaaaatcaggccttacatc

SEQ ID NO: 794024 - DNA, 90 bp, Homo sapiens
ccacagcggctccttggccctaggacttcctcatctgccatcccccaagcagcgggccaagttcaagagatacgtctaccgcctctgccc

SEQ ID NO: 794025 - DNA, 101 bp, Homo sapiens
ctgtaagtttcctggggcctctccagaagacaagcagatgccgctatgcttcctgaacagcccacagaactgttttggtatcaggatgatgctggcctcat

SEQ ID NO: 794026 - DNA, 100 bp, Homo sapiens
gaagcgagtcaaggcctcccactccttcctccgagggctgtttggctgtcaaagctcgaaaaacagcagcagaggaaagaaaagaccagagctaagggac

SEQ ID NO: 794027 - DNA, 100 bp, Homo sapiens
aggaagaagaatttggacttgatgaagaagatgaagatgaggatgaggatgaagcaaagtggaagatgctttctacaaaggtgaactcaggctgaatgag

SEQ ID NO: 794028 - DNA, 114 bp, Homo sapiens
ctatactgcccagcgcctgggattccagatctgcgtttgaatccaggaaagggaggagcatcgtgcatcaagtcaccagggtggtccattcaagctgcagatttgtttgtcatc

SEQ ID NO: 794029 - DNA, 115 bp, Homo sapiens
cgagcggcgagccggagcgcggagcccggctcccgcaccatggaggaggacgacagctacgatggaaatcatattatgtagaatacttgggtgacatctgcctgagagatctcca

SEQ ID NO: 794030 - DNA, 51 bp, Homo sapiens
caatgttggtgctggcaaaaagctatcagttgagggatttgcagttgataa

SEQ ID NO: 794031 - DNA, 75 bp, Homo sapiens
caaggcactgctttttcatgacgcctttctgagaaaagtctacagcattctttctctgcaggttctcttaactac

SEQ ID NO: 794032 - DNA, 100 bp, Homo sapiens
gaggcccagcatgaacagccggaagatggatgcccctttggtgccctgacgcagcgcctcctgcaggccctggtggaggcaaagaagaaagagcttgcca

SEQ ID NO: 794033 - DNA, 89 bp, Homo sapiens
aataggatttgtcgtttctgttgtgaaaaaaacagggagttctgggaaatcgttcattcatttacagatgaacagaaaagactcttctt

SEQ ID NO: 794034 - DNA, 97 bp, Homo sapiens
tttttctcatggatgttcttcttcgagtatttgtagaaggatgagacaccaattattgcggtgatggtggccctgtcctctctgctagtgatcgtgt

SEQ ID NO: 794035 - DNA, 83 bp, Homo sapiens
tggagatatggcgcaactgcggcgcgtcatcatcagatttgaaatatttaaagtggatacaaaactatttcagcaatgcagac

SEQ ID NO: 794036 - DNA, 110 bp, Homo sapiens
accgaggcacggacaacatcaccgtgaggcagggggacacagccatcctcagctcaaagcttggattctgccgtgccactcacgaatggcgacacagaagacgatgctga

SEQ ID NO: 794037 - DNA, 100 bp, Homo sapiens
atgggggcgcaggaccggccgcagtgccacttcgacatcgagatcaaccgggagccgggtcctaggcctacttacaagcctccagtctcaaattatccag

SEQ ID NO: 794038 - DNA, 87 bp, Homo sapiens
ggccctgagtcaaagaagatgcctcgaactaaacaaattcatcccagaaatctaagagttttaacttctagtcatggcgaatgatcg

SEQ ID NO: 794039 - DNA, 74 bp, Homo sapiens
ttcctcttccattaccaccaaagaaaacacgaattatttctccaggtgactttatacacactttgggagatgca

SEQ ID NO: 794040 - DNA, 100 bp, Homo sapiens
ttccagaaaatccaagtccggctagtacgcgaattggagaaaaagttcagtgggaagcatgtcgtctttatcgctcaggcccgccaagctgccccctgtg

SEQ ID NO: 794041 - DNA, 83 bp, Homo sapiens
gacaagcgcgggacccgctatgaggtattgttgcagcatctggcagtgagactgaggatgaggacagcatggacattcccttg

SEQ ID NO: 794042 - DNA, 75 bp, Homo sapiens
cggggcgggacctggcgccaccttgcagaaggaagaatcctgctcaaaaatgaggtgaattaatacttgggcgct

SEQ ID NO: 794043 - DNA, 50 bp, Homo sapiens
cactgtttctcatcatcaccaaacgtttaaactcatatcccaggcatatg

SEQ ID NO: 794044 - DNA, 75 bp, Homo sapiens
gtcaagtgcagcagttggctttagaggttgcagtattttacagagctagcccaaggcacaagatgaaaattatta

SEQ ID NO: 794045 - DNA, 100 bp, Homo sapiens
aaaagctccactgtccctagtgtatgatctcgtgaaatcttgagagaaactgaatgacgaatgaaactattgttcctgtttcacacagaagaaaactgag

SEQ ID NO: 794046 - DNA, 75 bp, Homo sapiens
tcatcactcgtgacttcactcagccgattattgaacatggggaaggaagaggcctcacttgaggaagtgttagtc

SEQ ID NO: 794047 - DNA, 75 bp, Homo sapiens
ctttcttccagcttctgctgtccttctttgtggagagcaaggcaagaggaggaacgacgtagaagagaggaagag

SEQ ID NO: 794048 - DNA, 101 bp, Homo sapiens
acgctgatcacgcagtttctcgtgtataatggtgtctatcatgacttttttgaacgaaccattctgtgcaacagccttgtgtggagttgtgctgtgacggg

SEQ ID NO: 794049 - DNA, 75 bp, Homo sapiens
gggatggttccatcatggcgtcaatgcaggaacgaatgatcacacactttgaaaggtccaaaatggagtaaggaa

SEQ ID NO: 794050 - DNA, 75 bp, Homo sapiens
ggacggtacttctgccactgctgctccgtggagatcgtcccgcgcctgccgcttgaggtcctacctggtgtcctc

SEQ ID NO: 794051 - DNA, 100 bp, Homo sapiens
tcgcggaccggcgtccccggcgcgaagaggctggactcggattcgttgcctgagataccccatgtttccccatcactcgaggagtctgggcagagactgg

SEQ ID NO: 794052 - DNA, 100 bp, Homo sapiens
ctttgatcaccatcaccaacaacattggctcaatagcaagaatgtgtgcccttaatgaagatgcgtattggatagcaatgaatagttctctgaaatgtaa

SEQ ID NO: 794053 - DNA, 100 bp, Homo sapiens
agtggtactgaggcagacgttgtggcggagaagggcagtggctgtagctgccctttccgtttccagggttccgaccagtatgaagatttcttagatgctc

SEQ ID NO: 794054 - DNA, 80 bp, Homo sapiens
caggcggcgccatcttcgaacttagacttccggaaggactttggcgagggaagctgcagtaaaggaagatgaagaagaag

SEQ ID NO: 794055 - DNA, 75 bp, Homo sapiens
gattcaaacttcaacagaatgtggcaaccaggcttgtggaatatacccgtgctgatggcacagttggccgaagag

SEQ ID NO: 794056 - DNA, 74 bp, Homo sapiens
tccgccatgagctggggcacggagctgtgggctttcttagaaatggcttctgaggaagctgccgttactatggt

SEQ ID NO: 794057 - DNA, 80 bp, Homo sapiens
ctgaacggtgcagcagtgatggatgcagctcttctgttgatagacagctatgactatctccaaaatgcacctcctggatt

SEQ ID NO: 794058 - DNA, 89 bp, Homo sapiens
accatcgccaatgagttcagcgaccggtgcaccccattactgattttgggcactccaagattttgggagagacctctctcatgagaacc

SEQ ID NO: 794059 - DNA, 98 bp, Homo sapiens
cgcctcctgagagccagccctgacgtgaactcattttatctgccacgacccagaaggtttaggagacgcgtggggacagccgagccgcgccgggcccc

SEQ ID NO: 794060 - DNA, 83 bp, Homo sapiens
ctttggcctattctacaagcccagcccagatgcagggtgcgtcttcctgcctgaccagggtgccttctttgtgaactatgtca

SEQ ID NO: 794061 - DNA, 80 bp, Homo sapiens
tgtgaaaatggacatacggatgttgcagatgttttacttcaagcaggggctgatttaaaatcatttctaccagttcggag

SEQ ID NO: 794062 - DNA, 100 bp, Homo sapiens
ctgaaccagggttcatggggacatggcaaaacgctgatactaacctcttattcagaatgtcccaacaggtgaaagcagccctctgggctttgcaaggtgg

SEQ ID NO: 794063 - DNA, 100 bp, Homo sapiens
cacaaagattgaacgacatgccatgtactgcaatggtctgatggaggaagatacagacagaatgttgctgcgggatgtaaaagctcttaccctccactat

SEQ ID NO: 794064 - DNA, 98 bp, Homo sapiens
cctttgagaacttctctacgaatgccaagacagagcatgggtggtgctcgcacacagcaggatttaagagaatttggaggttttggttcagttagtgg

SEQ ID NO: 794065 - DNA, 100 bp, Homo sapiens
atgcaacagtcaaccttctgagctttcttcagagacctcaggtggaaaacgaagctcattcccaacgtgcaaagccaaggcagcgaccccaggacctctt

SEQ ID NO: 794066 - DNA, 90 bp, Homo sapiens
gccatctgcccagctgtgagctgcctgcagccagaaggagatgagatagcagactccttgaaagcagggtccttgtttagtgcatctttg

SEQ ID NO: 794067 - DNA, 100 bp, Homo sapiens
ctccctctcttcgtcctgtctgtacttcatctatgtggccccaggcatcgtgagatggaagattttcgaggtatagcagaagaatcatttccaagctttc

SEQ ID NO: 794068 - DNA, 50 bp, Homo sapiens
gaggacactgaagatcacagactgttggcattgtgggaagaaccggagct

SEQ ID NO: 794069 - DNA, 82 bp, Homo sapiens
ttgcggcggcgggaacgattgggctgagcagaggacgacatgttgcttttcgtggagatgtctttggtggacttgggaaaga

SEQ ID NO: 794070 - DNA, 98 bp, Homo sapiens
taaacgatgatgattttgaaccttacttgagtccacaggcaaggcccgtgcgttccatggatgaactgaatcatgattttcaagcacttgctctggag

SEQ ID NO: 794071 - DNA, 75 bp, Homo sapiens
aacagtttgtggcaagacaagctcagaactgagaagctgtcaccacagcacagacgcagtcttcagcaaggaagt

SEQ ID NO: 794072 - DNA, 98 bp, Homo sapiens
tggaagagaataaccgaaaaattgcagaagcacaagccaaactggtagcagaaggtcaagaaatttgtgtgattgaagccatgaaaatgcagaatagt

SEQ ID NO: 794073 - DNA, 75 bp, Homo sapiens
gacttgggggataagaaggaaggtgaatatattaaactcaaagtcattggacagcgattgaacaggagaagcaag

SEQ ID NO: 794074 - DNA, 119 bp, Homo sapiens
ggtgaagcattttcagttaaagcggaaacccaagagcgccacgctgcgggcggagctgctgcagaagtcggaaagtgaccagaagaggtgtgcagtttccaggcctggcccatacagac

SEQ ID NO: 794075 - DNA, 82 bp, Homo sapiens
gctgaacggcttgaggctccagtcaaaaaccattaaggcttcagtttcacattcttggtacctcctggtggtgcctgggagg

SEQ ID NO: 794076 - DNA, 100 bp, Homo sapiens
aacatccactagcctcactaaagatgaccgcacctcgagcaggagtggggatgccacgtctgcccccagcgcccggccctctgtccaccacggtcattcc

SEQ ID NO: 794077 - DNA, 80 bp, Homo sapiens
aggttctctccccctcctgctatggagaagaatggacagcaaattatggatgaacctatgggagaggaggagattaaccc

SEQ ID NO: 794078 - DNA, 74 bp, Homo sapiens
agcaaccaacttcgggcgcgctgtacagcaagtcaatgccatggcagcctggcatcctcgctacaacctcattg

SEQ ID NO: 794079 - DNA, 102 bp, Homo sapiens
aacagaactatcttcaacttttcagaacatggtccaagacaattcctgggaaagttcagttcttctcaagtgagggttctgacacatctgtaccaattccag

SEQ ID NO: 794080 - DNA, 100 bp, Homo sapiens
agacctgtatgcagaagtcattggagtgttggcacaagccaagttgtaaagctctctgaaatagtgaccttagcgaagcaagcacatgtggatgtgaaat

SEQ ID NO: 794081 - DNA, 82 bp, Homo sapiens
cggcaggctgagaaaagcgagaccgcgtgcgaggaccgaaagtttcctacactactgaggtttaggggcactgtgaagcaaa

SEQ ID NO: 794082 - DNA, 82 bp, Homo sapiens
ggggacattattgcgcgtggaacggctgcttttggaagccatcgactacagtgacagcgccatgctccaagctcagcagctg

SEQ ID NO: 794083 - DNA, 100 bp, Homo sapiens
cattatgctgccgcctatgggcacaggcagtgtctggaattgtgctgcaggtggagaaattttcagcctgtgtttacctgagttggctgaaatggtttct

SEQ ID NO: 794084 - DNA, 100 bp, Homo sapiens
ccggagcccagatgagctgccctcggcgggcggcgacggcggcaaatctaagaaatttgtgtctgtgacctttgaggatgtggctgtgacattcacccag

SEQ ID NO: 794085 - DNA, 75 bp, Homo sapiens
aaataaactgcttgaacatcctttgactggttagccaggtatgatctcgtgaaatcttgagagaaactgaatgac

SEQ ID NO: 794086 - DNA, 75 bp, Homo sapiens
ataccattagcagtaattacaacatgtattgtgctgtatatgaatgatttccacaagacggcaccctatgtcgtc

SEQ ID NO: 794087 - DNA, 101 bp, Homo sapiens
gaggaatcctcggcagataaactggactgtcctctacagaaggaagcacaaaaagggacagtcgcatggcttctcgctgtttctgggatgctgacactgac

SEQ ID NO: 794088 - DNA, 88 bp, Homo sapiens
caagtcggaacccggcggatcggatcccgcagatcggagacggggcctggagttggtgagtttgtaagtgatgcccttctcgttcctg

SEQ ID NO: 794089 - DNA, 131 bp, Homo sapiens
ggatggtgctggccacttgcttgggatcctttatcctggtcatcttctatttccaaagtatgttgcacccagacaatgcagatcttcgtgaagactctgactggtaagaccatcaccctcgaggttgagcc

SEQ ID NO: 794090 - DNA, 73 bp, Homo sapiens
agcaatttgatgatgcatttttgaaaggtactatggatatagaggagagaaatcgccaaatgaaaattaacaa

SEQ ID NO: 794091 - DNA, 60 bp, Homo sapiens
tcccgaatatctgggattacagattttgaagatgtaactgagtttctggaagaggtcatt

SEQ ID NO: 794092 - DNA, 80 bp, Homo sapiens
gagcaagaccacagctggtgaacagtccagaacactcctatgccaccttcaccagctgtacaagtgcagggccagcctaa

SEQ ID NO: 794093 - DNA, 50 bp, Homo sapiens
gcagggcaaggaaactggccacaagttggctctgactgtaccaccatcca

SEQ ID NO: 794094 - DNA, 90 bp, Homo sapiens
tctctgctgcggcgcggggaccgctgtgctctcgggggatatgagactttctactcggaatatcctgagtgttgcgtggatgtaaaaccc

SEQ ID NO: 794095 - DNA, 100 bp, Homo sapiens
cacctttcggcttctgagacggcggcagcagcggcattcagattgaaagtatccagctgatgatggacagtgaaactggtcgatccaagggatatggatt

SEQ ID NO: 794096 - DNA, 83 bp, Homo sapiens
gtgcgttgcgtgccctacttcaaggataagggcgacagcaacagctctgccggctggaagcgctggccgcgcgccgaacccga

SEQ ID NO: 794097 - DNA, 101 bp, Homo sapiens
gacacccccatgacccttccaaaaggctcactcagtaacttgatggattttgtgaagaaaacaggcatttgcgcttcaaagtgggaatgggggaccactca

SEQ ID NO: 794098 - DNA, 80 bp, Homo sapiens
cagcagcactgtggaggccgtcctcgctctggattaatcgaattacagctgctagccaggaacatggactgaagtatcca

SEQ ID NO: 794099 - DNA, 75 bp, Homo sapiens
tggttcatacctctagagggcaaaacatgttccaaatcaagtatagatattgagaatgggtttatttctgaatct

SEQ ID NO: 794100 - DNA, 90 bp, Homo sapiens
cctgcagtggcgcctaaagtctgagagagggaagtcgcctctgtgctcaactgataaatttcaaacggaagagagtggcagcatttagaa

SEQ ID NO: 794101 - DNA, 75 bp, Homo sapiens
ctcgaactttagataatctcattaatcctccactcaaccttcaagaaattttcggctttgtgagaaaccttacca

SEQ ID NO: 794102 - DNA, 82 bp, Homo sapiens
ttgcgttacaagctttgtctccttcgacttggagtctttgtccaggacgatatttagcttcctgtggtatactgatgagcag

SEQ ID NO: 794103 - DNA, 100 bp, Homo sapiens
gctgcgagagtggcagaggagctggcggagagcggcctgcgggcgatcgggccgaggtgctcacccatgacagtctctgaatccaggccgttgggagatt

SEQ ID NO: 794104 - DNA, 50 bp, Homo sapiens
gtcatcattgtccaggcctgcagaggtgggagaaaactggttgtcctgga

SEQ ID NO: 794105 - DNA, 50 bp, Homo sapiens
ctgctgaaatcatccagctagttggagtgggtggagatcatcgaaccgcg

SEQ ID NO: 794106 - DNA, 83 bp, Homo sapiens
ctcgaatgggcacacctgtgtaggctttggaatacgctaagaccatccccaaacccaaaccatcaaatctgactcatcaagca

SEQ ID NO: 794107 - DNA, 50 bp, Homo sapiens
ccagtgtatacatcaagtcactgagatgaagactggcccatttgcagagc

SEQ ID NO: 794108 - DNA, 75 bp, Homo sapiens
ccagcctggggcggccggccaggaaccacccgttaagatgcagaatcctgatacactatcagcaatgtcaaaccc

SEQ ID NO: 794109 - DNA, 87 bp, Homo sapiens
gatgagcaggacggcgattccaggggacggggcttgcgtcttgctgcgagcactggagcccctggaaggtctggagaccatgcgtca

SEQ ID NO: 794110 - DNA, 83 bp, Homo sapiens
taaagaacatggcgacgtctaatctgttaaagaattcaaaagcaggaagtggagggaaatcacagataacttgggataatcct

SEQ ID NO: 794111 - DNA, 50 bp, Homo sapiens
cggcgcccggatgggcagctgagtgctctacggaaacgtattcgagagga

SEQ ID NO: 794112 - DNA, 80 bp, Homo sapiens
acctacatgctgctgctctgggtgcagaacctctaccccaagtaaccttacctgtctacctgaacttcacccgtgcagac

SEQ ID NO: 794113 - DNA, 74 bp, Homo sapiens
acattcttctaatccaagcaataacccaagcaaaacttcagatgcaaatggctttaagtgtcattgtatgtccg

SEQ ID NO: 794114 - DNA, 74 bp, Homo sapiens
tggaaaaccagttattgaatatcaagaggaggagttgttgtgatgtccttgcattgcccatttttaagcaagaa

SEQ ID NO: 794115 - DNA, 74 bp, Homo sapiens
acggcgcggtggtcgggacagactggccgttgctgtggagacgcctggctacggggcgtggagtgctggacctg

SEQ ID NO: 794116 - DNA, 82 bp, Homo sapiens
agtgtcagaaaatgtgtcaaattctggaataaattctgcagaaatagataggtgcactggtggaccaaggtgtctttgagga

SEQ ID NO: 794117 - DNA, 100 bp, Homo sapiens
ataaccatgaacttcgaaacgtgataagaagcacctggatgagacatttgctacagcatcccacattaagtcaacgatcacaaggtttacatctggcaca

SEQ ID NO: 794118 - DNA, 90 bp, Homo sapiens
gaacaggattggtcagctatccagaatttctgtgagcaggtgaacactgaccccaatggttgcctgaagattttgctgtggtgtttggag

SEQ ID NO: 794119 - DNA, 100 bp, Homo sapiens
ctctcagcaggcctttgctggacagatgaagagtgacttgtttctggatgattctaagagccctctgcccgaggagatgctcagctacgcccgggatgac

SEQ ID NO: 794120 - DNA, 100 bp, Homo sapiens
ccgccatcaaccgccagatcaacctggagctctacgcctcctacgtttacctgtccatgtctggcttcagccttgtcatgaaccacccagcctgtgtcaa

SEQ ID NO: 794121 - DNA, 90 bp, Homo sapiens
aacaaagacaacattgttcctggaacgccctctttttaaaaaagatcctatagcaatggaactcagcgatgcaaatctgcaaacactaac

SEQ ID NO: 794122 - DNA, 50 bp, Homo sapiens
acaggcagtacggcatggtgctcggggcataaggaaatggtggcaggcac

SEQ ID NO: 794123 - DNA, 83 bp, Homo sapiens
ctggtgtcctgaacctggaagttgtgctttttaagtgtaaacaggaacatcgataagtagtgtaaaaacttgcacaatgaaat

SEQ ID NO: 794124 - DNA, 48 bp, Homo sapiens
ccggaggcaggaccagctgcagctgctctgccgggccgcaagtacagc

SEQ ID NO: 794125 - DNA, 119 bp, Homo sapiens
aagaagttgtgacccaggggaaaaattagactcaaaaattggagtccttataggaaaaggtggcgggacaggcttcattgggacagccctaacccagctgctgaatgccagaggccacg

SEQ ID NO: 794126 - DNA, 100 bp, Homo sapiens
cagtttgtgcaggacaccgacatggaacagggactcactggggagtctgataaggaggagaaaccacaacattctgtgatacccaaggaagtgacaccag

SEQ ID NO: 794127 - DNA, 100 bp, Homo sapiens
atccaccgttgcctccagcccacccacctccagttctggaggctgggaagtcaaagacaaggcactggcagattccatgactggtaagggccccctgtct

SEQ ID NO: 794128 - DNA, 50 bp, Homo sapiens
gagcagcagccccgcggtgctgggcatctatcgagctgtgcctattcgag

SEQ ID NO: 794129 - DNA, 74 bp, Homo sapiens
acttagaagctaccgagttaccctaagaaaggtatcattggaacatttcaagatcatcaaatcaaattccacag

SEQ ID NO: 794130 - DNA, 100 bp, Homo sapiens
cggcggcgcggctgccggctgccctgtgaatgggaagttacgcgaagtccacccagcgtttctgaggtgtgaccatgaagctcatggatgaggtcgccgg

SEQ ID NO: 794131 - DNA, 83 bp, Homo sapiens
agagaaggtgttttggatgcattctagaacacagggcatgaccattcggcccctggtagacctgttggctgtgaagaaaaagc

SEQ ID NO: 794132 - DNA, 90 bp, Homo sapiens
atcctggtgtcgccatgggccgccgccccgcccgttgcctgccgctgcgcttctgggtgaatgtgatcaagaacccgcagttcgtgttcg

SEQ ID NO: 794133 - DNA, 83 bp, Homo sapiens
cacaccagacctacggagggagctggaaattcctgacgttcattgatctgttttcggctttgtgagaaaccttaccatcaaac

SEQ ID NO: 794134 - DNA, 98 bp, Homo sapiens
taatggaagggcatggcaagactccacctcctggtgaagaaagcaaacagacaagaggaccctgccttggtgtgagagtgagggaagaggaagctgga

SEQ ID NO: 794135 - DNA, 88 bp, Homo sapiens
tcagcgtcctgctgctgccgctgctgggcgattcgacggaggcgccttgcacgacttgctggtggacagacctctcagccaaccaccc

SEQ ID NO: 794136 - DNA, 100 bp, Homo sapiens
ttgtgaccctgcagctcctcaaagcagcggaggaggagaaagagatggacctcccggactcggcctcgagggtcttctgcggccgcatcctgagcatggt

SEQ ID NO: 794137 - DNA, 83 bp, Homo sapiens
caatcttcaatgagtaaacatattccttgtgccgtgcaggtgaagctggagctggggcaccgcgcccaggtgaggaaaaaacc

SEQ ID NO: 794138 - DNA, 102 bp, Homo sapiens
agccctggagacagcagcccctagactactgagggacagcgacagcatgaaggctccggtgtgaacccacatccctgcccccagggccacctgcaggacgcc

SEQ ID NO: 794139 - DNA, 50 bp, Homo sapiens
ctcgagtgcctgcaggatgtgagggagggccgttgctccagggagaactg

SEQ ID NO: 794140 - DNA, 48 bp, Homo sapiens
cgggtgcacgtgccacgcacggtctcggcgcggaagatggccggcggc

SEQ ID NO: 794141 - DNA, 100 bp, Homo sapiens
aatggagctcggaggcggcgaggagcgcctgcctgaggagagcaggaatgtgttccagaagatctagaactgaagaagaagatttttgctcagttagatt

SEQ ID NO: 794142 - DNA, 100 bp, Homo sapiens
ccctaggatctgtgactgccacccctccccccacccgggctcggcgggggagcgactcatggagctgccgtaaggtgaaaggtgtagcagtcactcggcc

SEQ ID NO: 794143 - DNA, 50 bp, Homo sapiens
gccgtctctccaagggaatgaaagatctcacattcttgaaggtggcattg

SEQ ID NO: 794144 - DNA, 98 bp, Homo sapiens
aaacaaagaagacttccagatcagctttccaaacttgcagacagaatacaactgagtggaagatgccaacaagattcagaagaactgttgaaactagc

SEQ ID NO: 794145 - DNA, 75 bp, Homo sapiens
caggcccccccgcgccgaccgcgttcctatggacagacgcacagacacctgcagccagagactgctgctactttg

SEQ ID NO: 794146 - DNA, 98 bp, Homo sapiens
caccaacggcaccaactattcgcggagctggaatgactggcaacccaggagcactcactgtgggcctcgtgcgacagtgtcaaacaatccatggacga

SEQ ID NO: 794147 - DNA, 75 bp, Homo sapiens
cttggactgagtcctgcaggacacaggcacctgaatggacagaagaggacctcagccaactgacaagaagtatgg

SEQ ID NO: 794148 - DNA, 101 bp, Homo sapiens
tgccgcctgcctgcctgccactgaggatttttttcccaggaagccatcccgtcagaggggttcaagtgatgaaagttggcaaactgcagctacatcaaggc

SEQ ID NO: 794149 - DNA, 100 bp, Homo sapiens
ctggttagtgtgctctgagggagggtccgagccagccgctgttttgccggaggagcccctcaggcctgaccgattagcactgctccaggtccgggctatc

SEQ ID NO: 794150 - DNA, 75 bp, Homo sapiens
ctcagctctagctgatactacagacagtacaacagagacggtgccgagacctcaaggccaagggaattttatttg

SEQ ID NO: 794151 - DNA, 101 bp, Homo sapiens
cctggggcctgtgcatcctcctgacccacaggcaccgaccgtcacgagctaacttcctggaagagctttccgtctattttcaaattctttaccgaagcctc

SEQ ID NO: 794152 - DNA, 100 bp, Homo sapiens
ccacagagtcggggtcttcacgaagtccattggaatattaagcccaggagttgctttggggatggctggaagtgcaatgtcttccaagttcttcctagtg

SEQ ID NO: 794153 - DNA, 82 bp, Homo sapiens
ggactcatacagagattgaaatgttccttagaaaggagcagcaggttcttctgtgtggcagttcagaatgatggatcaagct

SEQ ID NO: 794154 - DNA, 100 bp, Homo sapiens
tagagccaaactgtccaaggctttggcactgttgttggcctactgtacccctgtatcgacagtcacctcggagaaccccacaaatttaagagagaatggg

SEQ ID NO: 794155 - DNA, 100 bp, Homo sapiens
gcggacgcgtcatcgagtgtgacgtggtgaaaggagccgaggaggtgctgctgctggcccggcggacggacctacggaggatctcgctggacacgccgga

SEQ ID NO: 794156 - DNA, 75 bp, Homo sapiens
aggggcacagagagatggagagagacctagttagcaaatactggcccctctttgttctatttttttacatccttt

SEQ ID NO: 794157 - DNA, 100 bp, Homo sapiens
ctgcaccccgaggagttccctcacatgcgggacatcgtgattgctatgcaatcttcttaccgcgaagaagccaggggaataggtagccacatcttgtttg

SEQ ID NO: 794158 - DNA, 74 bp, Homo sapiens
tgatttcctaagcagaggtcgctaactacaagaaatgttacactcgggcctggaagtgaaaaatacagtgatga

SEQ ID NO: 794159 - DNA, 77 bp, Homo sapiens
tccttgctgcctttgacaatttcaaagagagtggagactgctgcacggactctggaaccatgaacatatttgatcga

SEQ ID NO: 794160 - DNA, 99 bp, Homo sapiens
cgcattcgcgctggagcttgcgaggagcgcagggtggagcgcgccagccggggtcctcggatctggcccagatcatcagaaaagcccttactgaggaaa

SEQ ID NO: 794161 - DNA, 100 bp, Homo sapiens
aggagctcgagaaccgtttggcaatatgtacgacgcggatgaggactaatctggtagcttctggtgctaatgaatctgaaatctacatatgggatctaaa

SEQ ID NO: 794162 - DNA, 100 bp, Homo sapiens
gcgccgcccgccccgcccgcagagtccggctgccgcgcatcgtccgcagacgccgccaccgccatgggctcctgagatcatgagcgtcttgttgttcatc

SEQ ID NO: 794163 - DNA, 76 bp, Homo sapiens
caacaagtttgcctccttcatcgacaaggtattggcaagcttgccagtgtacctgctggtggggctgtagccgtct

SEQ ID NO: 794164 - DNA, 75 bp, Homo sapiens
tcgtcgacatgagtgatgtggaggaaaacaacttcgagggcagagtggtgagccggctgggcctggactccctgt

SEQ ID NO: 794165 - DNA, 75 bp, Homo sapiens
acttcatgtcagaactatgacatggtcagtgggatctactcatgctggagccagacggactgctggtgtgggtcc

SEQ ID NO: 794166 - DNA, 90 bp, Homo sapiens
ttgcttggtacacaaaatggatctggtacaggaggatcaacgggacctggatgaagactccgggaaggctgacagcgacgtggctgacga

SEQ ID NO: 794167 - DNA, 75 bp, Homo sapiens
tcctggtgtttgctggaatggggatctttgcagcctttagaaagtatcatcagagagtcttatatattgatatag

SEQ ID NO: 794168 - DNA, 100 bp, Homo sapiens
gggataaatttatgcacaaagatggttcggtcccacttgcagcagaaattcttgctggaggctgcgttgtggtttctcgatcaggaccatcaacccctca

SEQ ID NO: 794169 - DNA, 80 bp, Homo sapiens
ttcggtccttccgaggaagctaaggccgcgttggggtgagaccctcacttcatccgtatctttacgcgttcagtattgtt

SEQ ID NO: 794170 - DNA, 75 bp, Homo sapiens
gaatgattgttataaatgaaggctctcttgatatggatgagatcaaagggaaagaccgtgtgattctggccttgg

SEQ ID NO: 794171 - DNA, 100 bp, Homo sapiens
agacaggtggcgacggcagaggaattctttcttgtggagaagttattcatgtgaagatccttggaattttggctcttattgatgaaggtgaaacagattg

SEQ ID NO: 794172 - DNA, 82 bp, Homo sapiens
catggatgtaatgcctggaaagtatacaatgaggtcctatccttcccccaaagctggagcaactctggtcgtgtacaaggac

SEQ ID NO: 794173 - DNA, 100 bp, Homo sapiens
gccaggtgtccatccccgtgctgagggttttttgattaactcaaaaccagagaatgcctgtgaacccatagtgcctccaccagtaaaagacaattcatct

SEQ ID NO: 794174 - DNA, 116 bp, Homo sapiens
gtccggtacagctccaaggaggaggctgccaaggcccagaagtctctgcacattgcacctattccattcttccatcgctgtgctcctgtgaacatttcctgctatgccaagtttgc

SEQ ID NO: 794175 - DNA, 100 bp, Homo sapiens
gcctaaatgtagcatatatcctaaaggagatggaagtgatgtaccatcatgggtagcctttgataaacagcggatggacatggaccggcggagggaagat

SEQ ID NO: 794176 - DNA, 97 bp, Homo sapiens
tcggtcgccgcagtcacggagcgcacccaagagtcgaagctaaaccagaagttcaatctcagccacctcgtgtgcgtgaacaacgacctagagaacg

SEQ ID NO: 794177 - DNA, 90 bp, Homo sapiens
ctcctgagtagctgggactgcagaaatggggtctcattatgttccccaggctggtctcaaactcccgggctcaagcgatcctcctgcctc

SEQ ID NO: 794178 - DNA, 75 bp, Homo sapiens
ccataagggataacctttaccgccatgctgtgccttgaggactttttgtaaatagcccagaagagcccagcctca

SEQ ID NO: 794179 - DNA, 73 bp, Homo sapiens
cgtgccgctgagcctggcgcagatcggtgggcataccactgagatcctgaggctgcttgggagcttgtccaat

SEQ ID NO: 794180 - DNA, 50 bp, Homo sapiens
tcctgctggccgtgctgctgcaggtgtctgcttttggggcagagttttca

SEQ ID NO: 794181 - DNA, 100 bp, Homo sapiens
ccggccactttaagaattactggttacaaaaggtccccttcccctgagcccatctacaatagcgaggggaagcggcttaacacccgagagttccgcaccc

SEQ ID NO: 794182 - DNA, 100 bp, Homo sapiens
tggaaacaattaaacttaacgtggaggctgtgaacacgcaccgtgacaagccaactttgattatggaagattcccacaagagtaccacgtcagagacagc

SEQ ID NO: 794183 - DNA, 74 bp, Homo sapiens
cagatcatgggactgataaattgcttcccatcgacggtcagtgcgcacgttgtaatcagctgaggccatgtcag

SEQ ID NO: 794184 - DNA, 75 bp, Homo sapiens
ccagacatggcggacggcagcggctggcagggtgtcaaattgagaaccaggtagatccccaccacctacagtaaa

SEQ ID NO: 794185 - DNA, 90 bp, Homo sapiens
ggggcgtggctgtggagaaggcgctccggggcgaagcagggggggccctcagcctcttggccttgaacgggctgttcatcttgattcaca

SEQ ID NO: 794186 - DNA, 87 bp, Homo sapiens
ctcatcattgccctcatgctctggcggctgcactggcgcaggctcctcagcaaggccaccctggagaaatgtgccacgtgctcccag

SEQ ID NO: 794187 - DNA, 99 bp, Homo sapiens
ctaaccctcaataagaaatgcacgcatttgattgttccagagccaaagggggcccttatgttagctatgggatatcatgagaagggcagagctttcctg

SEQ ID NO: 794188 - DNA, 75 bp, Homo sapiens
cgggacacctggaagccgagaaatggttaacacagaaatctgcctcctgggccatgccgcttctaaggcctgttt

SEQ ID NO: 794189 - DNA, 100 bp, Homo sapiens
ggcggaggaggaggaggtggactctgccgacaccggagagaggtgtcatggagaaactccagctgggcccagagattctgcagcgggaaaatccaaggct

SEQ ID NO: 794190 - DNA, 83 bp, Homo sapiens
ttcgtggctcactccctttcctctgctgccgctcggtcacgcttgtgtcttgggacaaggtgcgcattcctggtgtgctgcag

SEQ ID NO: 794191 - DNA, 90 bp, Homo sapiens
cagaaggaacttgcagaaatcacattggaccctcctcccaactgtagctgtcaggaatgacaggaacaagaaaaagaaggagacttcgaa

SEQ ID NO: 794192 - DNA, 100 bp, Homo sapiens
gaaatggttaaagatggagaaattgtatacactggaacagaatcaacccagaacggatagctccctcctggaaaagagcacagcaatggaggaaacagct

SEQ ID NO: 794193 - DNA, 75 bp, Homo sapiens
caaagtttatactatcagaccttattttcctaaggatgagacaattgtggcaattaataaagacccagaagctcc

SEQ ID NO: 794194 - DNA, 101 bp, Homo sapiens
cccgctgaagggaaattcacagaagctatagttgattcatctgaaaactacattaagatgaagacctttgaaggtttctgtgctttgcatctcgctgcaag

SEQ ID NO: 794195 - DNA, 83 bp, Homo sapiens
cgcatgggggccctccctgggccccgtgagaccacagaccagcaagatccggaacatggtggcggtgctggaagtcatctcca

SEQ ID NO: 794196 - DNA, 90 bp, Homo sapiens
gtgagggatcgctgcaacctttagactaatgactgtccgaaacatcgcctccatctgtaatatggctgtattcatcaccaaagaaaaaac

SEQ ID NO: 794197 - DNA, 83 bp, Homo sapiens
ggaaggtctcacctgaggtgaaccttcgaccttggacttctcagcctccagaatgcaaattgtggctactaatttgccccctg

SEQ ID NO: 794198 - DNA, 76 bp, Homo sapiens
ggtgtctgagtggatggggacctgcctgctggctaaagaattacctccaaagccattgtcaagaccacagcagtca

SEQ ID NO: 794199 - DNA, 100 bp, Homo sapiens
atctcagaacagaagggtgggaagccagagccgcctgccatgccccagccagtccccacagcataacaggtatggcgactacccgaagctccctgaccgc

SEQ ID NO: 794200 - DNA, 80 bp, Homo sapiens
gggagatagtgcagagactgaaggtgaaaggaaagcaagccaggatggatatttacgacactcaaaccttgggggttgtg

SEQ ID NO: 794201 - DNA, 71 bp, Homo sapiens
catttaccaggagatgcacttgcagcaggaagattgccagtattgtgtatggatgcaaagatcaattttga

SEQ ID NO: 794202 - DNA, 100 bp, Homo sapiens
agtcggagggagtccatctggagcggccaagtgtcatggagaaactccagctgggcccagagattctgcagcgggaaaatccaaggcttatttatgccag

SEQ ID NO: 794203 - DNA, 90 bp, Homo sapiens
actcgcctctacagccggttcaccagcctggacaaaggagagaatgggactctcagctccccccacccgctgcctgcggttttgtttctg

SEQ ID NO: 794204 - DNA, 82 bp, Homo sapiens
tgtcccaacattacatcccattaaacaggtgttcaaggagctggagtttctgggttggtataccacaggggggccacctgac

SEQ ID NO: 794205 - DNA, 100 bp, Homo sapiens
gggatccaggaacacatcgatctgggtatcaaatatgacccaagcattggtatctacggcctggacttctatgtgaagctgccagtaactcagattctag

SEQ ID NO: 794206 - DNA, 82 bp, Homo sapiens
gggaagaggaggcggaaaaggacgcaaagttctccggcgaggtacatgtcccagagcaagcacacggaggcccgggagctca

SEQ ID NO: 794207 - DNA, 100 bp, Homo sapiens
gccgccattttgatggcaggaagagtccggttctgggacagctggagacagtggtggtgactggaaattcacagtatggccaacagcaagatgcatacca

SEQ ID NO: 794208 - DNA, 75 bp, Homo sapiens
cttggaggaagcaaccatttcagtctgcaggtcattaggacttcctcgttctgcccatcttcctaacaaggctat

SEQ ID NO: 794209 - DNA, 50 bp, Homo sapiens
ggagtgtgcgtgcgcgccgagcggctgaccccgcactacatctacccacc

SEQ ID NO: 794210 - DNA, 80 bp, Homo sapiens
aagtacagctcagaatttgacttcagtccccaaagctccagagatagatccagtagagtgtttggtggcagataactctg

SEQ ID NO: 794211 - DNA, 82 bp, Homo sapiens
tgttcctgggcaccggggagccggccttggacacgggcacagtcttttgctgagcgcctgcgcctgggaattgcagtgattc

SEQ ID NO: 794212 - DNA, 83 bp, Homo sapiens
ttggggctctacctctttttcaaaagatggggacttgcttggggtcttgctgcccaggctggtcttgaactcgtggcgtcaag

SEQ ID NO: 794213 - DNA, 100 bp, Homo sapiens
gagcggctacatgcacatccagtgcaccaagcctgacaccgtaggcaaagcaacaatttctaatgatggggccacaattctgaaacttcttgatgttgtc

SEQ ID NO: 794214 - DNA, 103 bp, Homo sapiens
gccttagctgtgctcgcgctactctctctttctggcctggaggctatccagcattctgcttctcagaagatgcactattatagatactctaacgccaaggtca

SEQ ID NO: 794215 - DNA, 75 bp, Homo sapiens
tcaggtcattgagcagttacctcagccaaacaggacaagcagctattatttcatcaaacatgtcccgccactgac

SEQ ID NO: 794216 - DNA, 96 bp, Homo sapiens
agtcggagaggcggctaaggaaaggtgccacagcagagacgcgaaggagaggccctagaaccggctccttaggcatgaatttccctttgccttcac

SEQ ID NO: 794217 - DNA, 90 bp, Homo sapiens
tcatctgttccagggaggtgggattgaaccatgctcgacagctgaccaaggccatgatgcgaaaggccacggccagccgcctggtcacgc

SEQ ID NO: 794218 - DNA, 101 bp, Homo sapiens
tgtgggatccggttccttggtgtcatccagccttagcaaaccagagggctggttgatatgtgaagagccaacctgtcgcaatcgaactcgtcaccttcccc

SEQ ID NO: 794219 - DNA, 90 bp, Homo sapiens
gttaccttcttgaaaaggatttggaagaaatactttatactcttggactacatctttctcgggctcaggaactgttagcttgtcaagaaa

SEQ ID NO: 794220 - DNA, 100 bp, Homo sapiens
cgtggtcaccgagggggtccttaccactaccttcagcgacgagggcaatctccgaggttcctccccgggcagaagaaatcaccattccagctgatgtcac

SEQ ID NO: 794221 - DNA, 136 bp, Homo sapiens
ggcagcggcggctggcgcttcctgcgcatcgtctgcaagaccgcgaggcgagacctcttctccaggacacgcgcgccccgagcctgggaggcatgctgaagccaggcggccggcaggatgagtgtgaaagaggcag

SEQ ID NO: 794222 - DNA, 100 bp, Homo sapiens
tctggaccttcagctactatcagagcttctttgacgtggacacctcacaggtggagccgccaccaaaatgcagattttcgtgaaaacccttacggggaag

SEQ ID NO: 794223 - DNA, 84 bp, Homo sapiens
ggccgaggcggcggtgtgggcgcgtcaggccgcgacgagggcgctgagggctgacagatgaagagattgatatggccttccagc

SEQ ID NO: 794224 - DNA, 101 bp, Homo sapiens
ccagtcttctatgtttccacatcggtcagaaaaagatatcagtcgcatcgaatacattcattcaaagaacttcatccaccgggatgtgaagccagacaact

SEQ ID NO: 794225 - DNA, 82 bp, Homo sapiens
gtcaccccagatgtcctcatcatcccgtcagagctgaggtacttcgtgaagggagtgcatccgccccaacccttttccccct

SEQ ID NO: 794226 - DNA, 98 bp, Homo sapiens
cagaggactaattttggcagttctaaatttgaatttgaggtaattggtacgcctcagagaccggcagcgtcaaacaccctggtggtaggaagcccaca

SEQ ID NO: 794227 - DNA, 75 bp, Homo sapiens
gatgttcttctaatactcctcctctaacatgtcagcgttattgtaatgcaagaagctgaagagggaactaccctt

SEQ ID NO: 794228 - DNA, 75 bp, Homo sapiens
tccaggagctctgctctcccctccaggttcagcaaaaggatgtcactgaaattgatattttagttaagaaccggg

SEQ ID NO: 794229 - DNA, 100 bp, Homo sapiens
ctgccggcggctgggactgaagagggacgggtcccgcggcgagcgagctcctgaggtgctggagaatctggtaaaagcaccattgtgaagcagatgagga

SEQ ID NO: 794230 - DNA, 137 bp, Homo sapiens
gcagacttggagctgatgtctgtgctgtcctccggctctctggtccactcaaggaacagtatgctcaggactccatgttttcgttggccctgaaatgccttatcagtctgtccaccatcatccttttgggcttgatc

SEQ ID NO: 794231 - DNA, 100 bp, Homo sapiens
ctcaccaagccctgttggagactatgcaaaacaagtttatcagaatggacaatcagaccgttctggctgtccagtcattattggatggccaaggagcagt

SEQ ID NO: 794232 - DNA, 101 bp, Homo sapiens
tgtacgactacttcacacgccagtacggggatgagtccactctggccttccagcagacccagcgcgtgtcctcaacatgccccctgtgatttacgtgcccg

SEQ ID NO: 794233 - DNA, 100 bp, Homo sapiens
cctccggcgcagcccggaaatgtccggcaagatcgagaaagcaggtggcacaagaatggctcaactctccaaatagagagaatttctatcagttgcaagt

SEQ ID NO: 794234 - DNA, 75 bp, Homo sapiens
ttcatatggacagatggacttcaaatgctgtttgtattccagagactaggtgccgtgagcgatgtggagatgcag

SEQ ID NO: 794235 - DNA, 100 bp, Homo sapiens
aagtggaaccggatatttaagtacaatggtgggcttaattttaggagaactgcgacacatcaccaagctgaagccctggagcctctttgatgtacttgtg

SEQ ID NO: 794236 - DNA, 83 bp, Homo sapiens
caaattaaagcaattatgaaagaagtcattccttttttgaagggaattcacaattgaaactgaagggaaaacatttcagttaa

SEQ ID NO: 794237 - DNA, 100 bp, Homo sapiens
gtacctctccttttccctctccctttccctaagtgtcgtgtgggagccaatgggagatgggaagaaaatcatttccttggctgataaccatatcctgctg

SEQ ID NO: 794238 - DNA, 98 bp, Homo sapiens
cgagatcgaccgcaccatcggcaagggcaacttcgcggtggtcaagcgggccacgcacctcgtcaccaaggccaagggccgttgctccagggagaact

SEQ ID NO: 794239 - DNA, 96 bp, Homo sapiens
cggaacttgcagcgaaagtcatctatcttttcctatagggatgcctccaggcccccagcctctgggagaggggagagagctcctcctgccaagaac

SEQ ID NO: 794240 - DNA, 75 bp, Homo sapiens
tcttgtttgtggatcgctgtgatcgtcacttgcgtctgttcctcacacaccccgcccaaggacgtgcctggcagc

SEQ ID NO: 794241 - DNA, 78 bp, Homo sapiens
tgaacttaaaaagcagtctaaacctgtgaccacccctgaagaaattgcacagcagcccataacggtacgtgaaggcca

SEQ ID NO: 794242 - DNA, 100 bp, Homo sapiens
cttcaggtgaaaatttccagtatccatattcgttatgaagatgatgtgaatgaaaactttgccattgatttgatagcagagcagcccgtgagcgaggtgg

SEQ ID NO: 794243 - DNA, 75 bp, Homo sapiens
agaaaacagggaagatattagccaatatggaattgccaggttcttcactgaatacttggctgaagaggaaataaa

SEQ ID NO: 794244 - DNA, 75 bp, Homo sapiens
cactgtccgtgagctcggccgaccgcacctacaagggcaaggttcttctgtgtggcagttcagaatgatggatca

SEQ ID NO: 794245 - DNA, 100 bp, Homo sapiens
gaagatccggactgctcgggaagctccatccgaatgtgtctgccccccaggactggttgccataaaggaagcccacgacatagagaccaggcttaatgag

SEQ ID NO: 794246 - DNA, 100 bp, Homo sapiens
gaggaaggaggaggcacccacaggctgctgggaggagagcataagttaattggccttggtcctcacagctccaaaaagaaacaggatctcgataagctct

SEQ ID NO: 794247 - DNA, 98 bp, Homo sapiens
cgcgcggcggggcgatggggggctcgggcagtcgcctgtccaaggagctgctggccgagtaccagctccctgagggcctcctttgactccttgaagca

SEQ ID NO: 794248 - DNA, 75 bp, Homo sapiens
gtactgtccatcaaacatcttccaccacagcttagagagttcacccagggcatgatcttacctacaatgaatgga

SEQ ID NO: 794249 - DNA, 96 bp, Homo sapiens
gggacagaggcaccaaggacctccaagacagatttatgtcccagcgagggtgagagcgacgccgaggccgagagcaaagaggagcatggccccgag

SEQ ID NO: 794250 - DNA, 51 bp, Homo sapiens
gagagcgcgaatatcgtcatcgttagaagaaaccccaatgatgggaatctg

SEQ ID NO: 794251 - DNA, 82 bp, Homo sapiens
aatgaaggctgcaatcacatgcagtgtgctaaggttttcctttggaatatggataaatacaccatgatacggaaactagaag

SEQ ID NO: 794252 - DNA, 83 bp, Homo sapiens
cgcgacccccggcaacccggagaaggtctacagagcggcctgcgccagcgagagggcccagttgaagcggtgcctggagcggc

SEQ ID NO: 794253 - DNA, 80 bp, Homo sapiens
attcaaactgccctgatgggcagtcaacagctaaaaccttcctcaccgtgtactcccaagaagatgaaaggattgttctt

SEQ ID NO: 794254 - DNA, 90 bp, Homo sapiens
gttgccacgaccacccagaacctcaccaggccagaaatcagcgaggagctcaaggacctgatcctgaagatgttagacaagaatcccgag

SEQ ID NO: 794255 - DNA, 100 bp, Homo sapiens
ttgtcacctgtggagactgggacttaaaagtcatatgtgtcttgctgaatcagggctctcttatccctgccatcgacttacagtgggaagaagatcttca

SEQ ID NO: 794256 - DNA, 83 bp, Homo sapiens
cttggactgagtcctgcaggacacagaggactacactgaaacattcaaatgtgtggcgaaaacataattttcattccttggat

SEQ ID NO: 794257 - DNA, 83 bp, Homo sapiens
ctgctcatcctggcctacgtcatcggcatgatgccttcttctgtagagtgggcgctttgcagaatacgtgttgaatgaaatca

SEQ ID NO: 794258 - DNA, 100 bp, Homo sapiens
atcgattgcattggcaatgagacaggttacactcctggcacaccttacaaagtgtcctgttcccccaccagcggggctgtgccaccgtactcctcctccc

SEQ ID NO: 794259 - DNA, 49 bp, Homo sapiens
tccattccatgggttttattcacagggagacaccacgaaatcattcttt

SEQ ID NO: 794260 - DNA, 96 bp, Homo sapiens
tgcagattggatttgccagggcatgtagctctccaggcttgcaagcgattaccagggagactcatgcatctgtatgccgtgtgcgtggactgcctg

SEQ ID NO: 794261 - DNA, 83 bp, Homo sapiens
ggtgtggctcctcgagcaaaaatgaaccagcagcgtgggaggcgttttaggagcttggaccccgattggctgcaatgctgaac

SEQ ID NO: 794262 - DNA, 82 bp, Homo sapiens
catgcttcaggctcctctctttactgctgaagctttacttcgagctcatgggaaatcctcattgacgattcaatttgttgaa

SEQ ID NO: 794263 - DNA, 76 bp, Homo sapiens
caagcagtcctaccatgtcagccttcccagtagctgggaccacagatgccaacgtccggcggtacctccagctgac

SEQ ID NO: 794264 - DNA, 97 bp, Homo sapiens
ctgcgttttgttttcccctcggcactaggcagcggaggagcccgaccgacccgactacactgaaggctggttacgctcttatgtgcaatagaacctc

SEQ ID NO: 794265 - DNA, 100 bp, Homo sapiens
cttctatatctacaagggggtccgcaaggtgcaccccctgtggatgtgctccgggccctgaggttcccctccctccctgatggtgtccggagagcgaaag

SEQ ID NO: 794266 - DNA, 75 bp, Homo sapiens
cctggaggtgccatttccctctctgttgaagcaaaggccggggcagacctcctactgagatctgtatctgtggac

SEQ ID NO: 794267 - DNA, 100 bp, Homo sapiens
accccagtataaacttctgaatgaaagagggcctgctcattcaaaggtgtatgtaatgcatactttagcagcttcactttctgcttgtatttatcagtgc

SEQ ID NO: 794268 - DNA, 98 bp, Homo sapiens
tgaaaaaatggttgacctcacccagtactatactggcaattgctggagaagattttgcaattgttgcttctgatactcgattgagtgaagggttttca

SEQ ID NO: 794269 - DNA, 83 bp, Homo sapiens
tgctattgtgaggcggttgtagaagttggaatcgaagcctcttaaaatggcagatgacttggacttcgagacaggagatgcag

SEQ ID NO: 794270 - DNA, 80 bp, Homo sapiens
ggattcgcgctgctgggcacccacggagcctccggggctggtcatcatcagatttgaaatatttaaagtggatacaaaac

SEQ ID NO: 794271 - DNA, 90 bp, Homo sapiens
ctattctgaattccgattggttggaattgtgtaatggaacaactagatgttggtattgttccatatattgtccttttagttgttcctgta

SEQ ID NO: 794272 - DNA, 90 bp, Homo sapiens
aagatgctgaaactaagaatgctgccttggagagggtggaagaactggaagaaaacatttctcatgagtctcacaactcaagaaagaaac

SEQ ID NO: 794273 - DNA, 101 bp, Homo sapiens
accgggtgctggaggagctgcacaaggcggaggacagcctcctggccgccgaagaggccgccgccaagcatcacagcttctacgacttcatcgtcaccaag

SEQ ID NO: 794274 - DNA, 82 bp, Homo sapiens
cttcagtgagcaaggcatcaacgagtttctcagcgatgtgcattttgtaagcactttggagccactatcaaatgctgtgaag

SEQ ID NO: 794275 - DNA, 99 bp, Homo sapiens
aggaagaatgccggtcacagcccaggagtttggaaattttagcattcaggtgccaggaatgcagatgggacagccagtgccagaaacaggcccagctat

SEQ ID NO: 794276 - DNA, 75 bp, Homo sapiens
cgtaggcaggaccccgggacaccctggaagccaggaaatgggtatacagggagctaccctgtgtttctgagaccc

SEQ ID NO: 794277 - DNA, 75 bp, Homo sapiens
caagggcgtggtccccctggcagggacaaatggcgagactaccacccaaggaccaccgctgctgtatgccttaca

SEQ ID NO: 794278 - DNA, 100 bp, Homo sapiens
gtggctttgaaggcgcggcgagcgggaacagctcttgaggagtgagactgcaggagatgtgggccggtgatctcatccattaacagctgtgtgttgccag

SEQ ID NO: 794279 - DNA, 100 bp, Homo sapiens
aatcgtgcacatccaggctggtcagtgtggcaaccagatcggtgccaaggtttcccaggcagctgcagacttgaaacagttctgtctgcagaatgctcaa

SEQ ID NO: 794280 - DNA, 80 bp, Homo sapiens
attggctcccactgactgacagccaggtccttgaatgggcaagagggcacatgaagtacggcgtcctccacattcacggc

SEQ ID NO: 794281 - DNA, 100 bp, Homo sapiens
gccaagctcagccccgaagtgcttcagatgtagaggtacccactgatggtaatgctggcctgctggctgaaccccagattgccatgttctgtggcagact

SEQ ID NO: 794282 - DNA, 101 bp, Homo sapiens
gtccatccatttcgtggttcacccgctgccgggcaccgaggaccagctcaatgacaggatcttctaagggtgtgaggatacaggcgtcaaagaccccgtgc

SEQ ID NO: 794283 - DNA, 78 bp, Homo sapiens
ttacgtctctgctcttcagtacaatcctggtgaaatagtggtgaaaaataacccaaatgaatctgtaactgctaatgc

SEQ ID NO: 794284 - DNA, 82 bp, Homo sapiens
tgagcgacccggacaccgacgcgctcatctgctggagcccggcataagatgcacatttttctgctctggagccgggaatgaa

SEQ ID NO: 794285 - DNA, 90 bp, Homo sapiens
gccacatcgctgacttggctggcaactctgaagtcatcctgccagtcccgagtgtgaaccggttggcaatggagacaagaaaagtaatga

SEQ ID NO: 794286 - DNA, 100 bp, Homo sapiens
cctactggagatggagcactcaccagatagctgcctggtgcggcagcggcggccaaatcttccgtcctcccgtggatctcccggggtgggggcagggcgg

SEQ ID NO: 794287 - DNA, 82 bp, Homo sapiens
ctcttcctcccttcgctcgcaccatggcaccatgactcctgtgaggatgcagcactccctggcaggtcagacctatgccgtg

SEQ ID NO: 794288 - DNA, 75 bp, Homo sapiens
cgagttatgcccaccctccaactttgcgacggaaatgtgtcatcgaaagccagatgccctcctctgccaaggact

SEQ ID NO: 794289 - DNA, 90 bp, Homo sapiens
tcaagtgatcctcctgcctgagcctcccaagtagctaggactatagaaacatgggctgaggcttcatcttcgaaacccctactccttcac

SEQ ID NO: 794290 - DNA, 80 bp, Homo sapiens
ctcctgaaccagctcgtcctggagcacctgcagctggcgcctctgcagtgggttactccacaggatccgctgaacatagg

SEQ ID NO: 794291 - DNA, 100 bp, Homo sapiens
gctctttgtatcagaaaactggatttgttttcattccaaagtctttggaaaagacacaaaggctcttgtcaggatggtgaagctgttcatcggaaacctg

SEQ ID NO: 794292 - DNA, 75 bp, Homo sapiens
gccccttcgcgtcccctgcaccatgagctggggcaccgagctctggcttcggaaccaaaaagaagcttcccagag

SEQ ID NO: 794293 - DNA, 101 bp, Homo sapiens
gcttctgtcattgctgctgactgctctggcttcctccaccaaaggacaaactaagagaaacttggcgaaaggcaaagccacagatgaagatatccttgcta

SEQ ID NO: 794294 - DNA, 74 bp, Homo sapiens
agaagaagacaagcgggcagaaggctggtgacaagggcactccacagaaggatgttattatcaagtcagatgca

SEQ ID NO: 794295 - DNA, 50 bp, Homo sapiens
tccgtccgcagtaccgacgcctgcagaaaatcgagagccttggttacaac

SEQ ID NO: 794296 - DNA, 75 bp, Homo sapiens
tgcaccttctccatcaggtgcagaagctgagatctgtatctgtggacctgaatgttgatccctcgcttcagattg

SEQ ID NO: 794297 - DNA, 50 bp, Homo sapiens
cagaaacgtcactatcaagaagggtgtccgcaatgttgccagtgtctgtc

SEQ ID NO: 794298 - DNA, 76 bp, Homo sapiens
gtttttatctggtaaaatgttacacttactcggttgtaactgaagatatgctcttggagcagttccatctcctatt

SEQ ID NO: 794299 - DNA, 99 bp, Homo sapiens
acagggcgtcggacctgcacgagctgtctggtgctggagaatctggtaaaagcaccattgtgaagcagatgaggatcctgcatgttaatgggtttaatg

SEQ ID NO: 794300 - DNA, 98 bp, Homo sapiens
aatcaggaggatggtcctgatcagcagcagaatcttactgaacagttccttaataggcggcttacagggagaacacagttggcctccaccgtttctgc

SEQ ID NO: 794301 - DNA, 74 bp, Homo sapiens
aacaggcctgcgtggaaattgaatgagattaagcctaaagaaactgttccaactcttgctccaaaaactctttc

SEQ ID NO: 794302 - DNA, 100 bp, Homo sapiens
ctgcctgctccacaagcggcgccgcgccctcggcctgcacggccatgaatcatcttaatggacagaaaatgtatggaaaaattattcgtgttactctgtc

SEQ ID NO: 794303 - DNA, 114 bp, Homo sapiens
cgcccgcggtatcgtcacagtgatccgggagctggactacgagaccacacaggcctaccagctcacggtcaacgccacatgtcagagatggctttggattccccgttctgtgtg

SEQ ID NO: 794304 - DNA, 82 bp, Homo sapiens
cttgtttgtggatcgctgtgatcgtcacttggattgtcagtggcttcgccccgaggagagctgactgccctgggctgctgcc

SEQ ID NO: 794305 - DNA, 90 bp, Homo sapiens
gtggtggatatggtggcagtggggatggctataatggatttggtaatgatgaggagcccaaggtgggcatcaagaccatcaaggtgtact

SEQ ID NO: 794306 - DNA, 82 bp, Homo sapiens
gagcgggcggcttcctggcctgggcgctccggtggcggcggaggattatatctgtccaagatgcgagtctggttttatcgag

SEQ ID NO: 794307 - DNA, 90 bp, Homo sapiens
cctgagaggtcccagaactctgcaaagtgagtccagcgctgattgtcactgctgttccaagggcacacgcagagggatttggaattcctg

SEQ ID NO: 794308 - DNA, 155 bp, Homo sapiens
gggccttgtaatagtacctcttagggctgctgtgaaggaaggataacatggaagcaacatgcctatcatagtgctttgtgtatgtggaagccgctgaacatcccgaggaactggcacgctgggggctctgggcttgtggccggtagaggattccc

SEQ ID NO: 794309 - DNA, 83 bp, Homo sapiens
cacacaaagaacaaattgcagttgtttgaggtgttggagagcacaatggctgaacaagtccttcctcaggctttgtatttgag

SEQ ID NO: 794310 - DNA, 90 bp, Homo sapiens
ctgggtgttgctgtccaccgtggccgcggtggtgctagagaccatcatgcagacatcagagactgggtcggacacaggctcgacagtgac

SEQ ID NO: 794311 - DNA, 98 bp, Homo sapiens
tcctggactatggagtggaggaggacctgagccccgaggaggcagagcacaaggagatggattacagaatgtctgaaggggacagtgtgggagaatcc

SEQ ID NO: 794312 - DNA, 82 bp, Homo sapiens
ggtaacacccttccagatgatttttgagctttgtttgctagcaaaatgctttaagcctgcccttccatatcttgacgtggat

SEQ ID NO: 794313 - DNA, 99 bp, Homo sapiens
ggattccgccttgttggtctgaaattcatgcaagtcaaggtcagcatctcctcgacgatcaagatctatctctcttcgtagatcaagatcagcttcact

SEQ ID NO: 794314 - DNA, 74 bp, Homo sapiens
gtcctattgagttttttcatggctagagtattcatgagaatgaaactgccgctgcagtgcagtggcgtgatctc

SEQ ID NO: 794315 - DNA, 83 bp, Homo sapiens
ctgggagcaacgggagtgtcctggacccagctgagcgggcggtcattcgcatcgcaggtcaaaatgcagatcttcgtgaaaac

SEQ ID NO: 794316 - DNA, 82 bp, Homo sapiens
aacaagaccgaaatccagactctttttaagaggcttcgcgcagttccaaccaacaagatcaatgtccgagttaccaccatgg

SEQ ID NO: 794317 - DNA, 100 bp, Homo sapiens
gctccgccgcgctccagcctcgctctccgccgcccgcaccgccgcccgcgccctcaccagggctcctcgcacctaccccagcaactcaaattcaccacct

SEQ ID NO: 794318 - DNA, 82 bp, Homo sapiens
cgcacacaagtcccgcatcgtggagaacctgcagtcctttaacgagatcactgctatgaaccaaaaacttttgctagaaaat

SEQ ID NO: 794319 - DNA, 75 bp, Homo sapiens
catggtatgacactgaaatctgtaacggactcagcccaggagagtgttattactcgagatattcatcgtacattt

SEQ ID NO: 794320 - DNA, 98 bp, Homo sapiens
aggaattgtggatggttcggggagcattggagctgcagtgggccagatcatggaagggaagtggttgctgtgtatgttactggtgcttggaactgcta

SEQ ID NO: 794321 - DNA, 90 bp, Homo sapiens
ctctgtcgctcttgtgccctagcaccccgagaaccgtcagtttgagccagatgtgctggacccaaaggagacaacatttatgaatggagg

SEQ ID NO: 794322 - DNA, 96 bp, Homo sapiens
gtgaggggatccgacttgccggcagaacttacgctgcgggaccccgggcactgttgctgctgcgggaggctcgattccttttgtccaaagtgaacc

SEQ ID NO: 794323 - DNA, 75 bp, Homo sapiens
ccagccttggtggctgccattgctaatctgaaagctgaccgtggctgagcatggagctgtccccccgcagtcctc

SEQ ID NO: 794324 - DNA, 100 bp, Homo sapiens
gcgccgggaggccgagccagcgactaagaggaccgagaggtggcgtggacagagcctgtcaaagaagcacctggaaaacgaaagaaggaaatggccaaac

SEQ ID NO: 794325 - DNA, 50 bp, Homo sapiens
agcctcagagtcagatgcaggaaatgcactcggtgatggaaagagagcca

SEQ ID NO: 794326 - DNA, 98 bp, Homo sapiens
ttaaaagagcgtcttgcagctttttatggtgtttaatctaatacacttaagctgcagtcccaaaattagggtcgtcattgaattttgagaagcattct

SEQ ID NO: 794327 - DNA, 75 bp, Homo sapiens
agctcaaagacattgaacacgcgttgtctgtgtcggttttcaataacaagaacataattttcaggttggtagcac

SEQ ID NO: 794328 - DNA, 75 bp, Homo sapiens
agcaccgagaacatctactctttcaactacaccagccagcccgaccagaatatgaagagagtggattgttggaaa

SEQ ID NO: 794329 - DNA, 90 bp, Homo sapiens
gttggtgggagacgggtgaggtacaggctcagtctgcggccaagactccgtcctgcaaggcgcagcccagcctcgaaatgcagaacgacg

SEQ ID NO: 794330 - DNA, 100 bp, Homo sapiens
tgaagatggcgccaggacgaaggccctactgggcaaggtggatctttaactcaagactagcatgaagagttgccttctggcctgccctgagtctcctcaa

SEQ ID NO: 794331 - DNA, 100 bp, Homo sapiens
gaacaaagacaacattgttcctggaacgccctctttttaaaaaagtattctaccttgtaaatactgttatttgtatatactgtaaatgatgacatcggtg

SEQ ID NO: 794332 - DNA, 100 bp, Homo sapiens
caatgaccagcctcctgactactccttctccaagagagcagcccgacggccatggaggctgaagagacgatggaatgccttcaggagttccctgaacatc

SEQ ID NO: 794333 - DNA, 74 bp, Homo sapiens
tgccctgggcactcaggagtgagctgcgaggaaggtttggcatgagagggagtgaaggatgtgcctacctcagc

SEQ ID NO: 794334 - DNA, 82 bp, Homo sapiens
tgttaacatctttaaggcaggagctgatgaagagagagcagagacagctcgtctggtgaatatgaccatctcccagaacagg

SEQ ID NO: 794335 - DNA, 100 bp, Homo sapiens
tgctggaccagttgatgggcacctcccgggacggaacctagaaagattgtacaatgaatggtgattctcgtgctgcggtggtgacctcaccacccccgac

SEQ ID NO: 794336 - DNA, 97 bp, Homo sapiens
agggacctacggcacctgctggaccacctcgccttctccatcgaagcagggaagtgggagcctcgagccctcgggagggtatacaaggaaaggttag

SEQ ID NO: 794337 - DNA, 75 bp, Homo sapiens
ccgctcgctgggagagaggtacctctccttttccctctccctttccctaagatcttgtagaaaatttcagctgta

SEQ ID NO: 794338 - DNA, 83 bp, Homo sapiens
ggcgcctgtgggcacagacaaggagctcagtgacctcctggacttcagcatggggttgcagatggtgtaggaggctggagaga

SEQ ID NO: 794339 - DNA, 100 bp, Homo sapiens
tcagaagactttaacatgggctcttcctctagcagccagtatactttctgtcagccagaaactgaggactattttaacaaagggaaaaatgagcctgagg

SEQ ID NO: 794340 - DNA, 90 bp, Homo sapiens
tcctgtcaacttcgcacttctccagttagttggagcccagctatgctgggactcatgtatgtctactggactcagctcaacatgttccag

SEQ ID NO: 794341 - DNA, 80 bp, Homo sapiens
ggctcccactgattctacattatgctgctctgttaaaagcgaaaatgaaacaattgcctgcggcaacagttcgactcctt

SEQ ID NO: 794342 - DNA, 100 bp, Homo sapiens
gaaagtgcgtcatcctaaggaacatcgaccaaattgtggctactaatttgccccctgaagatcaagatggctctggggatgactctgacaacttctccgg

SEQ ID NO: 794343 - DNA, 100 bp, Homo sapiens
cgggaagtcactcataagcgcgctcaagattggtagctggcagtgttgtgatggcttttgaagaagtatgcccggacagaatagatctgattcataaaaa

SEQ ID NO: 794344 - DNA, 96 bp, Homo sapiens
aagagaaggaggccggaactacaccagcaaaaggtggatccataaagaacccagccaacccgcagagggaggggaggggctgagctgtgaggagag

SEQ ID NO: 794345 - DNA, 100 bp, Homo sapiens
agcaccagcaggtccctggccctcatgtacgagtccgagaaggttggggtcgcctcttccgaggaagacagagatgtcaatgaccccatgcccaaccgag

SEQ ID NO: 794346 - DNA, 100 bp, Homo sapiens
gagtggtgctcctggctgctgtccgtggctgagggtgaaatgacaatggatgctctgttggctcgattgaaacttctgaatccagatgaccttagagaag

SEQ ID NO: 794347 - DNA, 88 bp, Homo sapiens
tgatcatttgggaaactggcagtttcaagaatttgaagcctacattaatgcttctggagaacatggaattgtggttttctctttggga

SEQ ID NO: 794348 - DNA, 100 bp, Homo sapiens
tgcatcagtggtttatgccaaatatctcccggggccaattcagcatctctacctggccatcctaacaaggtgatttgtgaaagggtgagacttcagagcc

SEQ ID NO: 794349 - DNA, 101 bp, Homo sapiens
gcgctgggaaacatggcgaccgagggaatgatccttactaaccacgaccatcaaatccgtgtcggagtccttacagatttctgcctggcagattaaccaac

SEQ ID NO: 794350 - DNA, 100 bp, Homo sapiens
agccgggccgccgccgtctctgcagcccgcgggtaactgggccgttgccgccgtccgcgctcggcccccgcggagagaatcctcactatggatgggctca

SEQ ID NO: 794351 - DNA, 100 bp, Homo sapiens
cccgctcacctgcgctgtgatgcctgcagagctgtggcttaccaggaggatacgaagcgttttcggcttcctgcccggagctgtgcagcaaacagtcgac

SEQ ID NO: 794352 - DNA, 97 bp, Homo sapiens
gccaggaagtcggagtttgagccccggaggcagagcggctgccatggaaggatgataaagactatgctttaaaacaaatagaaggaactgggatctc

SEQ ID NO: 794353 - DNA, 75 bp, Homo sapiens
aagcagtacaaagataaatatttggcaaagcacaatgcaggaattcttgtgaaatcatgggcacaaatctttgcc

SEQ ID NO: 794354 - DNA, 97 bp, Homo sapiens
aatgtgggatcgatgtttcaatattggaagcgatttgatctacggcgactccagggttttggccaaattgggcgagggcacaaaataaccacttacc

SEQ ID NO: 794355 - DNA, 74 bp, Homo sapiens
cgcggagcccggctcccgcaccatggaggaggacgacagctacgtagagacagggattcaccatgttggccagg

SEQ ID NO: 794356 - DNA, 74 bp, Homo sapiens
caaattcgcctccatctgtaccatgtgattcgcctttgccagtctcatctcgtgtctgctttgttaagttccat

SEQ ID NO: 794357 - DNA, 100 bp, Homo sapiens
aagaagaaggtgtactcctttctattttaaagagccaagcctcagagaacaattccaagctcgagtgtctcggcaaactctgttggcacttgagaaagaa

SEQ ID NO: 794358 - DNA, 120 bp, Homo sapiens
cgagcccagagctccgatccctgcgcgggctcgagagctcgccccgaacgggggtcttcctcctccgccgttgacaggaccaagaatcgccttcagccctgtctggtgcatccttggcag

SEQ ID NO: 794359 - DNA, 75 bp, Homo sapiens
aatccacagcaagctcccttatatcccatgactgaagagttgctgaaacaacaaaagctgaattcacatgagacc

SEQ ID NO: 794360 - DNA, 90 bp, Homo sapiens
cggtgagggaaagatgagcgaggagacggcgacttctgacaacgaaatggcagcaaagacaactctctggacatgctgggcacggacatc

SEQ ID NO: 794361 - DNA, 100 bp, Homo sapiens
ttcgtctcttacgtctgcggaagtgcagctgcctcagttcttagcgcagtgatcgtaaacttgttgataaagaagatatcgacactagcagcaaaggagg

SEQ ID NO: 794362 - DNA, 51 bp, Homo sapiens
tgaagggggactacaggttcgagagggttggctgtgttccggccgcagagc

SEQ ID NO: 794363 - DNA, 100 bp, Homo sapiens
ccaccaccgccgctgccccggctgcctcctccctgagaaatacaggtatcaggatgaagatacacctcctcaagagcatatttccccacaaatcacaaat

SEQ ID NO: 794364 - DNA, 96 bp, Homo sapiens
tccgcctcctgcctcccgtcgcagccgcgcagccgccgcagagtccgcggcgccaccgctcgccctccagatttggaagtcaaaccagaaacttca

SEQ ID NO: 794365 - DNA, 50 bp, Homo sapiens
ctcactgcaacctctacctcccaggttcaagctattctcatgcctcagcc

SEQ ID NO: 794366 - DNA, 75 bp, Homo sapiens
gagaggggctgcggccggagcgggcggctgagacaaaggcgacgtctgtaggtatattgttagagccatgcagtg

SEQ ID NO: 794367 - DNA, 100 bp, Homo sapiens
aggagtgggttaaattcctcaggagagttgctggcacaccctgtggaggaatgcttctagtcacaacagacacccttggccatgactttcatgtcttcca

SEQ ID NO: 794368 - DNA, 100 bp, Homo sapiens
gatgaactggtaaaaagcttgaattttgcacggcatgtgagcagcagtgacagagtgggcaagccttaccgtggcgtaaagcctgttttcagcattgggg

SEQ ID NO: 794369 - DNA, 100 bp, Homo sapiens
attatggctcattgtagcctcaaactcccaggctcaagcagtcctaccatgtcagccttcccagtagctgggaccacagattggcccggatcctcgttcg

SEQ ID NO: 794370 - DNA, 75 bp, Homo sapiens
ctcagagcgcctctgtcgctgggacccttcaggaggcaggtggaagtcatcataaagtttctgtttcacccgtcg

SEQ ID NO: 794371 - DNA, 76 bp, Homo sapiens
tttctctcaggctttcctacaactcatgcccagcagcagcaagcagagtgaagtcaccctgctgagaaatgaagtg

SEQ ID NO: 794372 - DNA, 100 bp, Homo sapiens
gtcccggttggtagagggtttgagtccgcatcgccacagctgaaggctgcgagggactaagagcagaggtgaaaatcctatttataagagtgccgtaaca

SEQ ID NO: 794373 - DNA, 50 bp, Homo sapiens
gtgaagctgcagaccttcgcggatctttaatgacttgctactgtgggaac

SEQ ID NO: 794374 - DNA, 87 bp, Homo sapiens
atgttggcagccacttcaaaatcagacctctgtggcagcattttttccagaacacaaaaggtgaggcaggcgactaatcagattgtg

SEQ ID NO: 794375 - DNA, 101 bp, Homo sapiens
tcacctgtgcgggatggaacaaaaggacccagatgatgtggtaccagttggccaaagaagagcctggtgttggtgcatgtgctttggactagcatttatgc

SEQ ID NO: 794376 - DNA, 100 bp, Homo sapiens
tagcttcagaaatcagaaaaacatttgggaggtgtctagcccagtggaccttctgaagtcagagcaccataacatggtgtgggaagtgaagacaaatcag

SEQ ID NO: 794377 - DNA, 100 bp, Homo sapiens
caactctggtatggacacagcttctagtgttgctttggatcttgtggaaagtcagagcatgctgaggtgatgaagaaaatcattgagactgttgcagaag

SEQ ID NO: 794378 - DNA, 100 bp, Homo sapiens
acttgagctgaaagcgaaaaactatgctgaccagatgacaacactgcagctgaaggaggagttgctggatggagaggattataatttccttcaaggagcg

SEQ ID NO: 794379 - DNA, 75 bp, Homo sapiens
gcccgggccatggccgccgccgatgccgaggatcttcatcatctgggccatcagcagttggttccgccgagggcc

SEQ ID NO: 794380 - DNA, 75 bp, Homo sapiens
gtagatcactgattcacaggggagcaggcggaggcaaggattcttggtgccaccattgagaactccaggattgtc

SEQ ID NO: 794381 - DNA, 82 bp, Homo sapiens
gccggctaccactgcggctactgcgattccaaggagggcaaagcgtcctgcgaacatgaaaggctcccggagcagcgctgac

SEQ ID NO: 794382 - DNA, 83 bp, Homo sapiens
atcgcatctccccgacaaacaccacgagaattccgcagcccacacgcaattctgtggtgttcttggtcacacatttatggagt

SEQ ID NO: 794383 - DNA, 99 bp, Homo sapiens
aagagatggctcagcaccacctatggatcttgctcctttgcctgcaaacctaggtccagttccggccgtaccgcacagacgacttcatcacgcgcctgt

SEQ ID NO: 794384 - DNA, 75 bp, Homo sapiens
gtcgcgggagccccgccgtgcagtcggagacctgtcaccatggcccaccgatttccagccctcacccaggagcag

SEQ ID NO: 794385 - DNA, 155 bp, Homo sapiens
ttgcctgtatgatcgggtaccgaccttgcccctggatgaaatggtgctggtccttcttcaccccgctggtctgcatgaagaaaacaccagcagccccagcaaagaaaaccagcactaccttcaacatcgtggggaccacctatcccatcaacctg

SEQ ID NO: 794386 - DNA, 75 bp, Homo sapiens
cccagccctgaagagaaactgcaccttatcacccggaacctgcagtctccatctgctgctgcctcttcatcctct

SEQ ID NO: 794387 - DNA, 82 bp, Homo sapiens
cctgaccttgcagtacaacatctacaatgttggctcaaggctggacggcagtctggaaacgaccaatgagatcttggactct

SEQ ID NO: 794388 - DNA, 80 bp, Homo sapiens
atgtctgactctgactctcggactgagaaacgcaagcgagcagctgatgcagctgtacagtgcgcgccagcggcggcggc

SEQ ID NO: 794389 - DNA, 90 bp, Homo sapiens
gtttacagttcattttttgcttggtttggaaaaatttcattagaggttcagtaccttgaaatagttccagaaaccagaaggtaccctgtg

SEQ ID NO: 794390 - DNA, 100 bp, Homo sapiens
tggattgtagccataagtggactttttacgtttaataagaaggagacctgtaagcttgtttgtacaaaaacataccatacagagaaagctgaagacaaac

SEQ ID NO: 794391 - DNA, 100 bp, Homo sapiens
ggtcattgtcatcgtggggcatgtggcaaaacacacagctgaggttttgctgttactgctcagtgtagtcacaccttgaataagaaatggaaaaccttgg

SEQ ID NO: 794392 - DNA, 83 bp, Homo sapiens
cggcgccctgaagaagtgcaagagcagaggccttctctagaccttgccaagatggcacagacgaagcttcacaaaagatgtct

SEQ ID NO: 794393 - DNA, 50 bp, Homo sapiens
aaaaatgctggacaaattgagatatggttcacaggcaccagccagacccc

SEQ ID NO: 794394 - DNA, 100 bp, Homo sapiens
gggcaaggaagttccaggttacattgtgacttctgacagctctctccatggaaggaggcggcggccgcgatgagccttcagcctgccgggcaggggacgt

SEQ ID NO: 794395 - DNA, 100 bp, Homo sapiens
tatttctctagctattgccttattttttctcatggatgttcttcttcgagtatttgtagaaggtacagctattggaatcagatgcaaagatggtgttgtc

SEQ ID NO: 794396 - DNA, 90 bp, Homo sapiens
ctgtacatgaggatggtttaagcctcttagaatacaactccatgtgaaactctctgggaaattgcaaaagctgaagtggaaaaaagggga

SEQ ID NO: 794397 - DNA, 100 bp, Homo sapiens
gcgcgagggctacgagcgtctcctgaagatgcaaaaccagcgtggcggccgcgctctcttccaggacatcaaggtgcgaggaagaagatgtggagatgag

SEQ ID NO: 794398 - DNA, 51 bp, Homo sapiens
atggcttcgacgtgtggaaaaccatcaggtggcatttttctgaagttgttc

SEQ ID NO: 794399 - DNA, 100 bp, Homo sapiens
gacgccttctaagatgatcgcccggctgggcaaggagatcaacaacccagagtccgtgtattactgggcccagaagtttgtcccgctggctggaagcctg

SEQ ID NO: 794400 - DNA, 100 bp, Homo sapiens
cagctgccgcgactgggaggagcgccggaacgccgaggcccagatcatcaatgctgtggtactgttgattttattgagtgccctggctgatccggatcag

SEQ ID NO: 794401 - DNA, 90 bp, Homo sapiens
gggaaaagatgaggcagtctcttcctatgcaggaacattttagtggacaaaccaaatgaccaatcttcaagatggtcttcagagagcaac

SEQ ID NO: 794402 - DNA, 78 bp, Homo sapiens
cacagaaggagaggaaatgtatcttcaagaacctgagccagcagaagagtacactgagcaaagtgaagttgaatcaac

SEQ ID NO: 794403 - DNA, 90 bp, Homo sapiens
atggtggttggacagtcagcatttgcagactttggccatggcgagtgtcactgcggggaatgcaagtgccatgcaggttacatcggggac

SEQ ID NO: 794404 - DNA, 80 bp, Homo sapiens
tgtaccccaagctgtacttgtcacctcgaattgagcagaggcaggtggaagtcatcataaagtttctgtttcacccgtcg

SEQ ID NO: 794405 - DNA, 83 bp, Homo sapiens
cccttcagcgaggaagctacacttttcaccaaggaactggtgctgcagcgagagatgcctgaggaaacccagacccaagacca

SEQ ID NO: 794406 - DNA, 112 bp, Homo sapiens
ctggtctgggccatgtctggctgtgatgctcgggagggagactgttgttcccggagatgcggcgcgcagatttgaatataacctgccgctttgcaggtgtattccacgtgga

SEQ ID NO: 794407 - DNA, 100 bp, Homo sapiens
tgaactgaatgagtttcttactcgggagctggctgaagatggctactctggagttgagacaaattcctgtcccttgtgccgctatgagctgcccactgat

SEQ ID NO: 794408 - DNA, 83 bp, Homo sapiens
caaccaagcaatcatcaagcacctcctcgcttaaagcttttcaagccaggccaagaagctgtgaagtaccagggtcctcggga

SEQ ID NO: 794409 - DNA, 74 bp, Homo sapiens
cgccgtgtggcacgacacaaaaatcagagtgtgaacatggctacgcctcttcattcccgtccatgccgagcccc

SEQ ID NO: 794410 - DNA, 100 bp, Homo sapiens
agcctgcactatggagaagtgggacggtaatgagggcacctcagcttttcacatgcctgagtggatgcatcgagagtaaacatgaggttacgatcctggg

SEQ ID NO: 794411 - DNA, 100 bp, Homo sapiens
gaggaacatctgtctgtcatgtatgagagactgagacaagaggggctgacgtttaccctacgtcctggtgaggtgacggcgctggtgggacccaatgggt

SEQ ID NO: 794412 - DNA, 50 bp, Homo sapiens
caggaacgtgacagtcttatgtgtttgaccttcacggcatggtgcaactc

SEQ ID NO: 794413 - DNA, 100 bp, Homo sapiens
ggagtacattgcgcccatgacggagaagctctaccccggctactacaccaggacagcacccaagaaaacctcatttggctcgctgaaggatgaagaccgg

SEQ ID NO: 794414 - DNA, 75 bp, Homo sapiens
cattggccgccgcgatgtcagctcagtgctgtgcgggccagctctttcaccatgcctggatcacttcctttgaat

SEQ ID NO: 794415 - DNA, 100 bp, Homo sapiens
agccagtataaaaacacagctcgacagtacgcctacttctataaagtcatccaggctactgttggattgattcgaaatcttgccctttgtcccgcaaatc

SEQ ID NO: 794416 - DNA, 50 bp, Homo sapiens
aaagtttccccgccagggctccccaggggttttggccaaattgggcgagg

SEQ ID NO: 794417 - DNA, 100 bp, Homo sapiens
cagatatcttgaaaagctgccagaaagcctcgtgcaagccgaatactggcatgaccccataaaggaggatgtgtatcgcaaccacagcatcttcttggca

SEQ ID NO: 794418 - DNA, 95 bp, Homo sapiens
tcgccgccgccccgagtcccgaatagcctaacatggcagaccagagacagcgctcactgtctacctctggggagtcattgtaccacgtccttggg

SEQ ID NO: 794419 - DNA, 82 bp, Homo sapiens
ctggaagtgttggcggaggaagcggccctccaggcactgaagcgtaagaagaggtatgagaagcagctggcgcagatcgacg

SEQ ID NO: 794420 - DNA, 74 bp, Homo sapiens
gaggccgagggcggcgacaagaaccgaaaccaccatcatgggttcgggtcccatagaccccaaagaacttctca

SEQ ID NO: 794421 - DNA, 100 bp, Homo sapiens
ggggcttggcggcttttctcctcagttttctggagtgctttggaggagagacctattcaggcctgttctgtgtggtcatcaatccttacaagaacctgcc

SEQ ID NO: 794422 - DNA, 100 bp, Homo sapiens
cagaaccatgttggacttcgcgatcttcgccgttaccttcttgctggcgttggtgggagccgtgctctacctctatccgagccccccaagatgaacccag

SEQ ID NO: 794423 - DNA, 74 bp, Homo sapiens
ttgcagaatttttgactggagactatagtaggaggagatgttaaagtaacccatcttgcaggacgacattgaag

SEQ ID NO: 794424 - DNA, 75 bp, Homo sapiens
cttcaagcagtggccagacctggaggagaggatggagatgaagatgaggaagctgagtcagctacgggcaagcgg

SEQ ID NO: 794425 - DNA, 96 bp, Homo sapiens
tctacatcgatctgcggggcatcgtgtctcgaccgcgtcttctgagtcagctcgtttgatcccttccaactgataccttgtaatttttttagtgaa

SEQ ID NO: 794426 - DNA, 75 bp, Homo sapiens
cagctacggtccgcggctggggttccctcctccgtttctgtatccccacgaggagaccaagacacattccacccc

SEQ ID NO: 794427 - DNA, 90 bp, Homo sapiens
gcagctccagcaggcgctggctcctgctcagatcctgataacttaagtgactctctcttttccggtgatgaagaaaatgctgggactgag

SEQ ID NO: 794428 - DNA, 100 bp, Homo sapiens
gcctgggggcctttagaaggaagtttattcaggagagcctgccacgcttccaggcggagttagaagaaagccacaggcaccagctggaagcgctggagtc

SEQ ID NO: 794429 - DNA, 101 bp, Homo sapiens
atgtctccatccccgaccgccctcttctgtcttgatcaactcccttctcctgacctggaccttgtggatcctgaggcagaggctttccagtgttaatgccg

SEQ ID NO: 794430 - DNA, 100 bp, Homo sapiens
aagaagctgagcaggtggccagagtgcaatgccctttcccggcgcctcttactaaaaaagctgctgaatgaaaattcatatgtccctcgtgaggctggat

SEQ ID NO: 794431 - DNA, 100 bp, Homo sapiens
tcggagctcgcacatcccgagagattcatgttcaagctgcattttagacatagctggcaagagtattttcgtggatgtacagttacccagcacgtgtacc

SEQ ID NO: 794432 - DNA, 51 bp, Homo sapiens
cttggcttcctcgcttctgctcctcagaactgttctcaggaagaactgagc

SEQ ID NO: 794433 - DNA, 82 bp, Homo sapiens
gcaaaaatctcaagaaagaggtgggcaagatcctgtgcactgactgcgtcctatgacaatggactggcacagggagctggac

SEQ ID NO: 794434 - DNA, 82 bp, Homo sapiens
taagggcaacaattttctgtacaccaatggaaagtgcgtcatcctaaggaacatcgacgtcgcaatggaagaagagatcgcc

SEQ ID NO: 794435 - DNA, 100 bp, Homo sapiens
gagtggccggctgaggatcactgcaaagggacagatggcctacatcaagctggaggacaggacgtcagcaagtgagaaacagatggtggtggtgtgcaag

SEQ ID NO: 794436 - DNA, 50 bp, Homo sapiens
gtctgggaccttaacagggagccatgagcccccctccatgcgcctgaagg

SEQ ID NO: 794437 - DNA, 114 bp, Homo sapiens
tgggagcccggaccccgccccctgcggcccagcgcccccaggtgctggagaatctggtaaaagcaccattgtgaagcagatgaggatcctgcatgttaatgggtttaatggaga

SEQ ID NO: 794438 - DNA, 73 bp, Homo sapiens
agaacttgccggtgccagctgaggccaagaagcttgagagaagaaaaatttcagaaaaattgtctcaatttga

SEQ ID NO: 794439 - DNA, 98 bp, Homo sapiens
cgcaaggccggagaaggccgccgggcccgggcatggtggtctggggcaacgcggaaggaaatgaaaccaatttctacaacataggaatgatttcggca

SEQ ID NO: 794440 - DNA, 76 bp, Homo sapiens
ccggcagaacacagcagggcggaggaaagtgcagtttgaaaaagtaccagaaggtcctatccctccatctacacca

SEQ ID NO: 794441 - DNA, 134 bp, Homo sapiens
ggcggccgtggaaggcgacccggcggctgtggaggccacgctcagctcgccaggcggcgcagggacacaactcagatgggaagttcatcgcccgggcacagcggatagagtacgactgtgaactagttccccgg

SEQ ID NO: 794442 - DNA, 101 bp, Homo sapiens
gtggttgggaaagatggacttacgggagcttggaaacccagcgtttgctggcagaaccagttcctggcatcaaagccgaaccagatgagagcaacgcccgt

SEQ ID NO: 794443 - DNA, 75 bp, Homo sapiens
ttctctctcctcgattgttgcgcgctcatcttcctctcggtctacttcgcactgggggccacagtgctgatctca

SEQ ID NO: 794444 - DNA, 115 bp, Homo sapiens
atcgctgcccgccgccagcatgttgggcgccccggacgagagctccgtgcgggtggctgtcagcaaagtgtgggatgctgtctcaggagatgaattgatgaccctggctcataaa

SEQ ID NO: 794445 - DNA, 87 bp, Homo sapiens
ggtggcgcccgtcttcctcctgggggagtcatccgtcgaggttcccgtccgcaccctctcagacctgaggctgagcttgcagtgagg

SEQ ID NO: 794446 - DNA, 100 bp, Homo sapiens
tgctgctctgcctgctccacaagcggcgccgcgccctcggcctgcacgggatttcagtttcccaaacctgagatgatctgtcagctggagaactgggacg

SEQ ID NO: 794447 - DNA, 74 bp, Homo sapiens
ctggtggggagatgaacccaacctagtgggtgtaatacatcatgaactgcaggctgagtcagtgctgattctct

SEQ ID NO: 794448 - DNA, 100 bp, Homo sapiens
agaggaagttggacaacatcggctgttttagtgctttttatttttccccaattcagcagagaatattttcaaggggggatgaccgagtgggagacagcag

SEQ ID NO: 794449 - DNA, 50 bp, Homo sapiens
ttcctgtacagcctgcagaaccgggccagtgtcattcaaagatgtggctg

SEQ ID NO: 794450 - DNA, 88 bp, Homo sapiens
ctcccgagtggctgggattacaggtctccagaaatgctttgggttcatctttcattgctgcaaggaacttccatgcctctaacactca

SEQ ID NO: 794451 - DNA, 49 bp, Homo sapiens
aaggattccaagtaactcttatttgacccctgtaaaagagcccaacagt

SEQ ID NO: 794452 - DNA, 100 bp, Homo sapiens
gagagagggatggacagccagaagctggctggtgaggataaagattcagaaccggcaggccgaccagtgcacgggtctccagggcttcttggttttccac

SEQ ID NO: 794453 - DNA, 100 bp, Homo sapiens
aggacttcgtgcgcgccttggaccccgcctccctcccgcgcgtgctgcgggtctgctcgggggtctacttcgagggggtgtcttcatgacaagaacagcg

SEQ ID NO: 794454 - DNA, 91 bp, Homo sapiens
cctctgcccggccgagaccccgtctgggagatgtttggaggccatgattaagtacctcacactgtggaagaaagaggagcaggaggagccc

SEQ ID NO: 794455 - DNA, 97 bp, Homo sapiens
accgaacagagagccccatgggggccctgcagccaggtgtgcgactgctgcgacaagaccccatcgaatgccttttctcttttatctgttcctccaa

SEQ ID NO: 794456 - DNA, 100 bp, Homo sapiens
ggagaacctgaacaagtcccagctgaagctgggcatctggggcggaaacctcgacctgtctcccagttggttgcacagcaggttactcagcagtttgtgc

SEQ ID NO: 794457 - DNA, 90 bp, Homo sapiens
gcaggtgacagtctgcatgtgcagttttcaggcgtgcaatggaattgagttttgccctggtaaatgggaataatatccgaggcatgatga

SEQ ID NO: 794458 - DNA, 49 bp, Homo sapiens
ctcgcctcctcgcagcagcgccatgctccgctctgcaccgaaggggatg

SEQ ID NO: 794459 - DNA, 75 bp, Homo sapiens
gaaactatatgccaccatggagaagcataaagaggtgtttgacttgctaaacaggaaaacaaaattaagagttct

SEQ ID NO: 794460 - DNA, 100 bp, Homo sapiens
tatgtgaatcctgccaatacccaccagtttgcagtgggtggacgagatcagtttgtaagaaagaactctgcaacatgatacttgattgctgtgcccaaca

SEQ ID NO: 794461 - DNA, 96 bp, Homo sapiens
cctccgcgggcgtgaaggcggcgctcctactccctccccggactccgcggagaatgtgatcaatgggcaggactacgaagtgatgatgcagattga

SEQ ID NO: 794462 - DNA, 100 bp, Homo sapiens
ctgaagttgagatcctagagaagtctcaaattgaagccattgcttcctcgttagagacagggcagggcattgttcatgcactgaccgacctcagcagccc

SEQ ID NO: 794463 - DNA, 75 bp, Homo sapiens
gccctctccaacggggcctttggaggcctgggcagccccacattcaacatgccaagtgatcaacgacactgccat

SEQ ID NO: 794464 - DNA, 100 bp, Homo sapiens
ctcgcgggggcgcggagaagaggatccaggaaaggcaaagaggccatgctgcgacagaaggactatgagaccgccaccctctcggagatcaaggccctgc

SEQ ID NO: 794465 - DNA, 100 bp, Homo sapiens
gccagcatgccccagtccaaagtggaaggaggcaaaaccggaagaccttatggattcaaaacttagatgtgtgtttgaattgccagcagagaatgataaa

SEQ ID NO: 794466 - DNA, 75 bp, Homo sapiens
gatctgaagagctatggtgaaacaccactgaagcattgccaagggtaagaaggtggatggctctgtaaatgccta

SEQ ID NO: 794467 - DNA, 96 bp, Homo sapiens
gaccattgagcagcagattggaaaagtgaatggtgtgcatcacattaagtcagtccagagggaactccggtcttgaagtaatcttctgctggggag

SEQ ID NO: 794468 - DNA, 90 bp, Homo sapiens
tagggcccggccgacccgcggcccgggtgaatttggaagtgaaaagaaaactgctttgcatgaaaaagaggagacacttcggcttcagag

SEQ ID NO: 794469 - DNA, 83 bp, Homo sapiens
attggcttctttgagactgaaatggcaggaaacccagcgtttgctggcagaaccagttcctggcatcaaagccgaaccagatg

SEQ ID NO: 794470 - DNA, 100 bp, Homo sapiens
accatatgcaggggctgctggatttgccccagccattggatttcctcaagctacagctctacctacaaggactccaacactctgcacctccctacggagc

SEQ ID NO: 794471 - DNA, 101 bp, Homo sapiens
ttttgatgatcatgatacagttgataaaattgttggatacatgtgctgcccttttgttctggacaaagatggagtcagtgccgctgtcataagtgcagagt

SEQ ID NO: 794472 - DNA, 49 bp, Homo sapiens
cggaccatgggcgacaaagggacccggtacttctgtcagctgattgacg

SEQ ID NO: 794473 - DNA, 82 bp, Homo sapiens
ttagctgtgctcgcgctactctctctttctggcctggaggctatccagccgggagatacagatgacccaccaagaattactc

SEQ ID NO: 794474 - DNA, 90 bp, Homo sapiens
gtggaaccggatatttaagtacaatggtgggcttaattttagtgctgctgcagcacggagctgacccaaacattcggaacactgatggga

SEQ ID NO: 794475 - DNA, 97 bp, Homo sapiens
tgtggcccagctggcttccagatggtgacatgagccacccacagccggagctgttcctctttcccaaagctcagtttgttgaagttgaaggacagat

SEQ ID NO: 794476 - DNA, 101 bp, Homo sapiens
ccactgctggggtggtggttccaatgagacagggcacaccaaactccatctggtcagtcattggcaccatgaactggaataaaggtggtcctggcactaag

SEQ ID NO: 794477 - DNA, 100 bp, Homo sapiens
ctgtgacatgtctgatcccttgctcccatccctgcagcatgaacaagaaaaagcttgtggtgaaggggggcaaaaaaaagaagcaagttctgaagttcac

SEQ ID NO: 794478 - DNA, 82 bp, Homo sapiens
gacttaggtgccagtccttctaggcagaagggccctcttggatggcccactgcgtgaccttggttcagctgtccatttcctg

SEQ ID NO: 794479 - DNA, 90 bp, Homo sapiens
atgagtggaaaaatacccatggtgggcaggaagagtgtaaacaggaacatcgataagtagtgtaaaaacttgcacaatgaaatccgaagc

SEQ ID NO: 794480 - DNA, 90 bp, Homo sapiens
gttgcacatccccacatcaatgcactgccaatgctgccgggcgctgctgatgaccgtggctgggctgaagctgctgcgctcagccttctg

SEQ ID NO: 794481 - DNA, 83 bp, Homo sapiens
gcactgactagaactgaacttgaaacacttcaaagtatttataacagcaatgatgtagcagtatcgtttccaaatgtagtatc

SEQ ID NO: 794482 - DNA, 75 bp, Homo sapiens
acttcactccagtgcctccgacgcctcctgatgagtgtgaacatggctacgcctcttcattcccgtccatgccga

SEQ ID NO: 794483 - DNA, 99 bp, Homo sapiens
taagagaaggaagaaaaggcgcaatgaaagaaaacaagtttaagatagtagaaaagcattcaaagacggcaacctgagtgagctctttcacctaggagg

SEQ ID NO: 794484 - DNA, 59 bp, Homo sapiens
tatattgctgcttttctcagtcactttggcacaattcttccatctctatgacaacaagc

SEQ ID NO: 794485 - DNA, 82 bp, Homo sapiens
gggtaagatggcggccccgcggcgagattttgctggaggagcttgccaacagcgatcccaagttagccctcactggagttcc

SEQ ID NO: 794486 - DNA, 98 bp, Homo sapiens
agcgacgcgtggcccacctgggctgccattcaggttccacttccaaacatgagttccaggccgagacaaagaagcttttggacattgttgcccggtcc

SEQ ID NO: 794487 - DNA, 100 bp, Homo sapiens
tacgaaagcctggtccacgccgtggccggagccgtgtgcaccaattccagctggacatcactgtgaaaatgggacgggataaagtccgagaaatgtttat

SEQ ID NO: 794488 - DNA, 96 bp, Homo sapiens
aggatcatgcagagttcagctatgttctcaatgggatactcaacttgattccatcaaccagcggagtttaagagagctgtgaaagtagcaacagga

SEQ ID NO: 794489 - DNA, 98 bp, Homo sapiens
agatggtcaggtctggagctcgaccgggccaggttatcctaaaagttgggatgtttgtagccagttaggacaatcagaaggttaccaggacttggcca

SEQ ID NO: 794490 - DNA, 100 bp, Homo sapiens
gagcagtgcagaaaattccttgtctggaagctgccaatccttggacaggttcatgtagtattgaaactctggaagagtggattcagcctggataatggag

SEQ ID NO: 794491 - DNA, 75 bp, Homo sapiens
ggatgagagctgcaccgcgcgggacaagtcgccggcggcgcccgacggagcagatttaagcgagtggtattgcag

SEQ ID NO: 794492 - DNA, 75 bp, Homo sapiens
aaggacctctccagcaatgattacttcagaattaccagtgttacaagcagtatagctgtgactatggatctggca

SEQ ID NO: 794493 - DNA, 100 bp, Homo sapiens
ggcagggctctaggaaacatatgttacgatagccaactgataaatttcaaacggaagagagtggcagcatttagaaagaatctaattgaaatgtctgaac

SEQ ID NO: 794494 - DNA, 101 bp, Homo sapiens
gccaccatcctgggttgacaattctacacaaggagaagaaaaagtcagcactttttgaagtgtctgaggttataccagtcatgacaaataattatgaagaa

SEQ ID NO: 794495 - DNA, 82 bp, Homo sapiens
catggtctacaagactctcttcgctctttgcatcttaactgcagatgatatcatcaagttgaatcgaaaggaagggaagaag

SEQ ID NO: 794496 - DNA, 82 bp, Homo sapiens
cccagatgtcctcatcatcccgtcagagctgaggtacttcgtgaagacaatgcagatcttcgtgaagactctgactggtaag

SEQ ID NO: 794497 - DNA, 74 bp, Homo sapiens
agaaacacaaagcagcccaaccaaaggatttctctatgaatcatcatcaagaactctgggagaacttttgaatt

SEQ ID NO: 794498 - DNA, 82 bp, Homo sapiens
aagaagaagaaccggaagaaactgtccgagaagcccaaaatctgccttctggagactgcgccgtcctcccgggagagccaga

SEQ ID NO: 794499 - DNA, 101 bp, Homo sapiens
gttcggaatcctataattgaaaaacagtaaagatggaaaaccagttattgaatatcaagaggaggagttgttggacagagcgggatgccaccagcttgtcc

SEQ ID NO: 794500 - DNA, 75 bp, Homo sapiens
tatcaagcagcccttctgggtcacccttgcatgatcctgacattgatgctgccagtgccatgatgcttttgaata

SEQ ID NO: 794501 - DNA, 83 bp, Homo sapiens
ctgaatcaattttgcatgagaggattgaacaagagattgagatggaaatgaaagctcaaggagaaattgaagccatagtcgtg

SEQ ID NO: 794502 - DNA, 75 bp, Homo sapiens
cgtaaagacccatttctctatgagaagcaaaacggacaagtcggtttttaagtggcattatcaactttattcact

SEQ ID NO: 794503 - DNA, 87 bp, Homo sapiens
ggaagtggatgagttccacctcattttagagtatcaagcagggcagcacccatgtttttcgtgtaaagtgtctggtaaagatgtgaa

SEQ ID NO: 794504 - DNA, 100 bp, Homo sapiens
cgacgctgacacctcccaccatggacagcttcgacttagccctgctccaggaatgggacctcgagtcactgtggtgtcccgcgatgggggcgctgcctcc

SEQ ID NO: 794505 - DNA, 101 bp, Homo sapiens
ttatgctatgaggatgacaaactctggagtaattggagccaagaaatgagtatagcagactgagaactatgagcagagaatacgtgaacaacaggaacagc

SEQ ID NO: 794506 - DNA, 75 bp, Homo sapiens
aagcatcttttcttctgcatggtgggtacccccatgctgtggcacggcttcaggctgaagggtatgtgattggca

SEQ ID NO: 794507 - DNA, 98 bp, Homo sapiens
aacagttttgcctcagcccttcgtaacattaaccaggtggtatttgttggaaatttcttgagaattaatacgatcgccatgcggcttttggcatatgc

SEQ ID NO: 794508 - DNA, 50 bp, Homo sapiens
ttggaggagttgctgtggtttatcaagatggagttaccatgtggattgac

SEQ ID NO: 794509 - DNA, 74 bp, Homo sapiens
cggaggagtcagctgtgtgtccagaacgtgccatggagacgcttaacgttgtttttcagaggcaccaaataatg

SEQ ID NO: 794510 - DNA, 87 bp, Homo sapiens
cgggagcagtatgtggaccgagcccggtactcagccttttaaaaactggagggctgtatactttgcatgttactccaaagccaaaga

SEQ ID NO: 794511 - DNA, 100 bp, Homo sapiens
tggtggggagatgaacccaacctagtgggtgtaatacatcatgaactgcaggaggcgtagatcccccaccatgtgacgctgggacagaccaggactccag

SEQ ID NO: 794512 - DNA, 98 bp, Homo sapiens
cccctgtacagcctgatcactccccagacgtggtcagcaacgcacagctatcttgacccacccttgaaccccatgcatcccagctcaaggtggtcaga

SEQ ID NO: 794513 - DNA, 76 bp, Homo sapiens
cagcacctttacccagagctgtcagggttcgctgagtgaggcccggggccagagggggcaagaatgagcccgaacc

SEQ ID NO: 794514 - DNA, 100 bp, Homo sapiens
ggcagcgcacgctgcagtccaggaaggaagccatgctgaagcaccgggactacgagacggccacactatcggacatcaaagccctcattcgcaagcacga

SEQ ID NO: 794515 - DNA, 106 bp, Homo sapiens
atcctgccgtccttctccactttcgccagcccgtgccgcgagcgcggcctgcaggagaattcagaaggagctggcggacatcactttagaccctccacctaattgc

SEQ ID NO: 794516 - DNA, 127 bp, Homo sapiens
gcctggatagagctggagaccatttaactgctgtatgaataatagataagcgtcttgaataacatctgaatttcctagttggcaacaccatcatgacatcacaacctgttcccaatgagaccatcat

SEQ ID NO: 794517 - DNA, 100 bp, Homo sapiens
gaggcctttcaccaagtccatggaatatgatgaagaatgggctaagaaaattcagagtgaaaagtttcgctggcataactctcagtggctggagatggta

SEQ ID NO: 794518 - DNA, 100 bp, Homo sapiens
gatgtgctctgcgtgttgctggtcgtgagatggagaataaagaaactctcaaagggttgcacaagatggatgatcgtccagaggaacgaatgatcaggga

SEQ ID NO: 794519 - DNA, 115 bp, Homo sapiens
aaagcccagccaaagtatgaatctccagaacttgaatcccaacaggagcaaggctgcgatggatagtgctcggcttagtgctgccaaatcttctccaatgatggaaacaatcaac

SEQ ID NO: 794520 - DNA, 83 bp, Homo sapiens
caacatctctcagagacgaaagttgcacctggacttgatatgaaagtaaccatcagaaaatcaacagagatcttaaacttgcc

SEQ ID NO: 794521 - DNA, 76 bp, Homo sapiens
ggaggcctgggaagccaacgaccacacgcagagcagtgctttctgggcctctgtagccagagctggccctgctgca

SEQ ID NO: 794522 - DNA, 83 bp, Homo sapiens
ccggacggcgcgggcgccggcgaggagagcccgcggctgcaggggagtacatcaagacctggcggccacgctacttcctcctc

SEQ ID NO: 794523 - DNA, 85 bp, Homo sapiens
agtcttgcagcctggtgggaatgaaggttctacagaaagtcaccagaggaaggtagacgttacatccaagaggaaataatccagg

SEQ ID NO: 794524 - DNA, 100 bp, Homo sapiens
gaattcgggaccgactgacggccggccggcttcccggaactggaagagactaggcattgaaaagactgaccctaccacactgacagatgaagagataaac

SEQ ID NO: 794525 - DNA, 100 bp, Homo sapiens
cgcgtacggcctttcacgagtcttcaagccttcagatcatactggtcccaagtttgacatcgatatgatggtttcacttctgaggcaagaaaatgcaaga

SEQ ID NO: 794526 - DNA, 100 bp, Homo sapiens
ggtttacacttgtcaacttcctcttcagtcatcagtggaccgagtggggtcaatcttctggtgctgcctctccaggtctcttccaggccggtcatagacg

SEQ ID NO: 794527 - DNA, 75 bp, Homo sapiens
gagaactcctcatgctcttctgggcacaccccacccacctgtggccagggtgaaggtcacagagctgcaactgac

SEQ ID NO: 794528 - DNA, 100 bp, Homo sapiens
gcaaagcacccagctttcttcactcttccgatcttttagagaaatctcgggttgttaaacagccaagaggtgaaagaaacttccatgtgttctatcagct

SEQ ID NO: 794529 - DNA, 50 bp, Homo sapiens
caagaagcagatgcgcattttgatggtgcctccggagccagcgtggtggc

SEQ ID NO: 794530 - DNA, 90 bp, Homo sapiens
cgaaggaagattatttcaagtggaatatgccattgaggctatcaaggatcagagtgacagttgatggcgaatttctgcattacattttcc

SEQ ID NO: 794531 - DNA, 100 bp, Homo sapiens
ggttgctgctggatgtgttgtgttcctggcttccctctggatgctgacagaaacaaggaaatgcactcggtgatggaaagagagccactattctgaagaa

SEQ ID NO: 794532 - DNA, 76 bp, Homo sapiens
gtgatcgtgctgggcaccggcctgacgccgattacacctcaacaagaaggcaactgacaaacagccttatagcaag

SEQ ID NO: 794533 - DNA, 146 bp, Homo sapiens
gaggaagcggcctgaaagtggtggcgctggccagactgacacccataccttttgggcttcagaatgcagtgttttcgcggagctcccacctccatatacagccattgccagtccagacgccagtggtattccagtaataaactgcc

SEQ ID NO: 794534 - DNA, 83 bp, Homo sapiens
caacgatggtgaaaagggtcctcctgctcacagtgtgaataacagacaatgcagatcttcgtgaagactctgactggtaagac

SEQ ID NO: 794535 - DNA, 98 bp, Homo sapiens
cacgtccctcactttgagaagatgctctatgaccaggcacagctcgctgtggcctattcgcaggccttccagctccatacaacgctccgccgccgctg

SEQ ID NO: 794536 - DNA, 100 bp, Homo sapiens
cctgactttgcatatctggcatccaaatatccagattttaagcagcatgttcagataaatctgaatggaagagtgaggcgtttagagaaaatggcagacg

SEQ ID NO: 794537 - DNA, 75 bp, Homo sapiens
tgcagcttcagcagaggctgcagggccagcagccaatggagatcttcgtggatgatgagacgaagttgacgctgc

SEQ ID NO: 794538 - DNA, 100 bp, Homo sapiens
tgggatcacactgagcttgccacatccccaaggcggccgaaccctccgcaaccaccagcccagagaagctgctgctggcttggactgcggtggggctgcc

SEQ ID NO: 794539 - DNA, 75 bp, Homo sapiens
aagaggtgacacttcccaaaacagagtgtcaatccatatctacaaggacagagactggataatgttgttgcaaag

SEQ ID NO: 794540 - DNA, 100 bp, Homo sapiens
ggagagccctgagaatgcctttgggctgcctgaggatgagttcctggtggtgctgcgctgtgtggggagggggcaaggaaggagccattggccgtggtgg

SEQ ID NO: 794541 - DNA, 100 bp, Homo sapiens
atccttcagaaaaagcatccccgaggaggaagacgaatcgttaaacatcttaggtcagggatacttgactttcagagatgtggctatagagttctctttg

SEQ ID NO: 794542 - DNA, 104 bp, Homo sapiens
ctgaagtgaaccgcggcgacaagtacatcgccaagtttcagggagaagacacggtcgtgatcgcggtttaaatgtgatactggtgtagatctccttgttctaag

SEQ ID NO: 794543 - DNA, 100 bp, Homo sapiens
agagaggcgctgctgacaccgccgccacaccgccgccacaccgccgctgcctcagtcatgccggtatctgtgggagctaatcctgtccaggtggaagtag

SEQ ID NO: 794544 - DNA, 75 bp, Homo sapiens
ctgaccaccgtgaacggacagtcccccccaggtcaaaatgcagatcttcgtgaaaacccttaccggcaagaccat

SEQ ID NO: 794545 - DNA, 98 bp, Homo sapiens
gatgatcagactcagaaaattttggaaagagaagatgctcggctgatggagctgactgctgggcaggaacgtctctcaggagaaagagtggaagagaa

SEQ ID NO: 794546 - DNA, 75 bp, Homo sapiens
ggcgacgctaagttgctgatcgtggcggattatatctgtccaagatgcgagtctggttttatcgaggagcttccg

SEQ ID NO: 794547 - DNA, 83 bp, Homo sapiens
gaggctgggagccgcggcggcctgggaagctttgcatcgtccctatggttgtgatgttgaaccccaggcactaaatgaggcta

SEQ ID NO: 794548 - DNA, 75 bp, Homo sapiens
cagagctagttcctctccagctcagccgcgtaggggagcttttggaagagtcccagatggaagcgaccaggctcc

SEQ ID NO: 794549 - DNA, 82 bp, Homo sapiens
tggattgaagccgcctctgtattacttaccaggtgtaccttccggtttcccagcacggccatcaagatccagttcacgtcgc

SEQ ID NO: 794550 - DNA, 100 bp, Homo sapiens
tcccgagccctggaggtggggagaaaaggtcctcagccagcagagccacgttccttatgagcaccgtgggtttatttcattttcctacaccactgacccg

SEQ ID NO: 794551 - DNA, 100 bp, Homo sapiens
gacgaggcggtgcaggcgttgaagcgcgcgggcaaggaagtgctgctggaaggtctggatgtaccgactgcttttggaataaaaagattcccaggatgtg

SEQ ID NO: 794552 - DNA, 100 bp, Homo sapiens
attttaatttcagtgactgaattaaaaggtgtcaagaagctcagaatgaacattctagtatgccagtagaaaaaaatatcactttagaaaggccttctaa

SEQ ID NO: 794553 - DNA, 101 bp, Homo sapiens
ctggagagccctgagaatgcctttgggctgcctgaggatgagttcctggtggtgctgcgctgtgtggagaatttccgctgcctgtgcactcatgaaaaggg

SEQ ID NO: 794554 - DNA, 75 bp, Homo sapiens
cagcacctcctcgccagcagccgtccggagccagccaacgagcggtgaatacttgtaatgaagtttatgaattaa

SEQ ID NO: 794555 - DNA, 83 bp, Homo sapiens
gagctggagctgcccggctcggcagcgggaagacaatgcagatcttcgtgaagactctgactggtaagaccatcaccctcgag

SEQ ID NO: 794556 - DNA, 101 bp, Homo sapiens
tgaacttgactactctagacacctcatgtgctggagaatctggtaaaagcaccattgtgaagcagatgaggatcctgcatgttaatgggtttaatggagag

SEQ ID NO: 794557 - DNA, 75 bp, Homo sapiens
gcgcctcgacctgctgctggagacctggatctcgcgccacaaggagatgcttcggaaccaaaaagaagcttccca

SEQ ID NO: 794558 - DNA, 75 bp, Homo sapiens
ttccttctctgcagagccggctctggtctcttctcttgaagcagatgcgaagaaatacaaacctggtcgatgtga

SEQ ID NO: 794559 - DNA, 75 bp, Homo sapiens
tcacccaagtgcattgcctttggaaacgagaacaaagaactttgagtctggcaaggcttataagacaacatgggg

SEQ ID NO: 794560 - DNA, 100 bp, Homo sapiens
gctgagcagaggacccggcgggcggcctcgcgggtcaggtgaccctggcaaagatgagagtgcacatttcgtcctgcctgaaggtccaggagcagatggc

SEQ ID NO: 794561 - DNA, 115 bp, Homo sapiens
gagccgcggaactcggcggccgccatggcgtccaacatggaccgggagatgatcctggcggattttcagattgttctctggggccggactgagaaatgcctgaaggagacgacgg

SEQ ID NO: 794562 - DNA, 83 bp, Homo sapiens
gacattatagagcacctgaagttattttagatgataacaccctatgcccattgtcctgatctgaaaattcttggaaattgttc

SEQ ID NO: 794563 - DNA, 100 bp, Homo sapiens
cagggttccttgaaaagggaggaacggcgacatcctgacctagagcccatcctaagacagctgattttacttctagagttatatagtcccagagatgttt

SEQ ID NO: 794564 - DNA, 87 bp, Homo sapiens
tggctactggcccacaagatccagtctccgcaagagaaggaagctctttatgccttaacggtatcaacttgaactgaaggatgacta

SEQ ID NO: 794565 - DNA, 90 bp, Homo sapiens
agcgtgaccgagagcgcgaatatcgtcatcgttagaaggaaggaactgcaggagctgcagaatctttacaaacagaacagtacacataca

SEQ ID NO: 794566 - DNA, 90 bp, Homo sapiens
atcatggattcccagcgcgggacagccagatattaataaggcagcggaaagaagaaatatgaatacggctccatcaagacccagccccac

SEQ ID NO: 794567 - DNA, 88 bp, Homo sapiens
agaagctggatttgccctttgatggtggccctcttgatccccggcttgctgaagtcaaagtggacgacccaccggagcccgtgtacgc

SEQ ID NO: 794568 - DNA, 100 bp, Homo sapiens
gttccttcctggtggactgcagcaaagctggttcgggtcttagggggatggggaaaggggccccctccccctagtgaatcacgctgtcctctcagcagcc

SEQ ID NO: 794569 - DNA, 100 bp, Homo sapiens
taacgccttttggaggtgcatcttcctcattttcagtggtgccaagttcatatcctgctggtttaacagatcgcaccccctccctccctggcggagcccc

SEQ ID NO: 794570 - DNA, 75 bp, Homo sapiens
tgggctcccttgcaggattcagaagtgtatttagcatctctagatgtatcggcaagcagtgtaaacggaggactt

SEQ ID NO: 794571 - DNA, 73 bp, Homo sapiens
tggatcctgagaattgatctatgttggatcaatgccttcaattaagttgcagagttctgatggagagatattt

SEQ ID NO: 794572 - DNA, 115 bp, Homo sapiens
tagaaaatggaaagaccatccaatttggagaagagatgatgaagagagcacttcagtattctccgagtgctggacctcgaagtagggggaaaactgcagtggaagatgaggacag

SEQ ID NO: 794573 - DNA, 101 bp, Homo sapiens
ggcggcctcacggacgaggccgccctcagttgctgctccgacgcggaccccagtaccaaggttgcttgggagaccctacaagaagaattttcccgctttat

SEQ ID NO: 794574 - DNA, 100 bp, Homo sapiens
ttatggaagtaacacatgaccttagactacgactcaagaactatatgatgccagctaaagggaagctatccgtcagtccatctccaaagccctggtggcc

SEQ ID NO: 794575 - DNA, 100 bp, Homo sapiens
aaggtgtatgagatccaggacatctatgagaacagtcagatgtccaatttgatgaatcaagcgagactcaaagtcctcagagcaagagatgaccttatca

SEQ ID NO: 794576 - DNA, 75 bp, Homo sapiens
agcgccagagaggacgtttccaactcaaagactctccttcagcaactccagaagcttcagactttggtgatgggc

SEQ ID NO: 794577 - DNA, 100 bp, Homo sapiens
tgaagcaagagaatctgaacctcgtctgtattcccacttccttccagtgaatggtagtgtctagaaagggtatgtcccttcaagagagaggtgccaatgt

SEQ ID NO: 794578 - DNA, 100 bp, Homo sapiens
atcatcagcaatgaaatcctgctttcttttcctcagaactactatattcagtggctaaatggctccctgattcatgaattcagatcaggaaggaggtgga

SEQ ID NO: 794579 - DNA, 95 bp, Homo sapiens
ccaggaacctcgccatccagaagtgacttaagagattaaaattaatttggttgctgttggttctgaacaaataatgagttcttttatttgaggta

SEQ ID NO: 794580 - DNA, 76 bp, Homo sapiens
ttacaactgtagtagaaaaattgcagttatgccttcctggggcacaagttgaccagtctgtcttcgaggagctcat

SEQ ID NO: 794581 - DNA, 75 bp, Homo sapiens
gcccagacaagtccccagggaatgccacagcatcctccagcacctcaggcatctaataggattcaggaatcaaag

SEQ ID NO: 794582 - DNA, 132 bp, Homo sapiens
gtggccgaggggcttcataccagctgaagagcgacaagccgctggcagccgcggatctcaccgccgctcaggagtggtggacatgacaacagagtcaactgcatacagtggcatcaagacagtggctgttta

SEQ ID NO: 794583 - DNA, 98 bp, Homo sapiens
aacacaccattcttcatctgcctgaaaagaacagagagtacctgattgagaagctgcttacaagaacaccagacatagcccaaagagccaaaaaggta

SEQ ID NO: 794584 - DNA, 75 bp, Homo sapiens
cacagaagcaaaagccttgatagcatggatttctgtgagctcactagcatggatcattttgatgacattggtccc

SEQ ID NO: 794585 - DNA, 100 bp, Homo sapiens
gccaaggagactcaaacccagcagctattccgcatgcagcagaagatattcaaggagatgaccgatggatgtctcaggaggagatgttaaagtaacccat

SEQ ID NO: 794586 - DNA, 75 bp, Homo sapiens
ttgaaggtttacacttgtcaacttcctcttcagtcatcagtgttttgggatttgagattgacgcggtgaactctg

SEQ ID NO: 794587 - DNA, 101 bp, Homo sapiens
cgacaagaccatgctggcaagtctgaaggtcaatgtctgcgagattaatctctcatggccgctgcacaagaacctggcttttagctgaactaaggagaaag

SEQ ID NO: 794588 - DNA, 133 bp, Homo sapiens
aagggcgccgcttcctccggggagggggataaagatcccccgccgccggcccatgaggatattgccgtgaaagctcatcgaggacttgcggaaggagctggagcacctgcagatgtacaagctggactgcgag

SEQ ID NO: 794589 - DNA, 75 bp, Homo sapiens
gaagacttgggtccttgggtcgcaggtgggagccgacggatttctccacccaggtgaactcctccctcacctccc

SEQ ID NO: 794590 - DNA, 99 bp, Homo sapiens
agcaaaggctgctctgaagcgcacgacctccgactactttctccttcaaggccggaaggtggtggtcgtacgctgtgaaggcatcaacatttctggcaa

SEQ ID NO: 794591 - DNA, 76 bp, Homo sapiens
ggaccagaccatgggcctgagcatcagtgccggtggtggtgtgcacattgagccccggtatagacagttcccccag

SEQ ID NO: 794592 - DNA, 49 bp, Homo sapiens
ggcagcattaaaacttaagcaggctgatgcacctaatccaggactcatt

SEQ ID NO: 794593 - DNA, 100 bp, Homo sapiens
tggagatattgggaaagaaagatatagagacaacgactatgtccaattttcatgctcaggtacagcagggaagaactggaaactcagagaaagaaactgc

SEQ ID NO: 794594 - DNA, 90 bp, Homo sapiens
aaggaatcctctccatctggttcgaagtctcagcggtattctggtgcttatggtgcctcaggaaatgctccctctgatcctgatgctgtg

SEQ ID NO: 794595 - DNA, 98 bp, Homo sapiens
ctagatctcggtgcacaaacttgttggcagcaagcgctctgtgcccaggagtgtgtccatggccgttgtgtggcacccaatcagtgccaatgtgtgcc

SEQ ID NO: 794596 - DNA, 90 bp, Homo sapiens
ctccaataccccacagctattctagtgataggattcacagcttgagctcaaataaggatccatccaacctacaaggaaaagtacagaagc

SEQ ID NO: 794597 - DNA, 50 bp, Homo sapiens
aattggagccaagaaatgagtatagctgcagaaccttggcctgaaaatgc

SEQ ID NO: 794598 - DNA, 90 bp, Homo sapiens
ggacatctgtagctgtcgtttggtttgatcttgttgactatgaggaagttctagatttcaaatccaacttcagagctgctcctatcaggt

SEQ ID NO: 794599 - DNA, 50 bp, Homo sapiens
ccagttttccagccaccagtgggatgatgatccaagttgatgaagtcaga

SEQ ID NO: 794600 - DNA, 60 bp, Homo sapiens
gttgactgctgcaaggaccaagtgcatctgggggaggtgttgtagccattgacaacaaaa

SEQ ID NO: 794601 - DNA, 100 bp, Homo sapiens
taaaagataatgacaaagaagatggctgcttctatttcaggtgattgaaatctctgaatatcgaacccagctctatgaatatctacaaaatcgaatgatg

SEQ ID NO: 794602 - DNA, 51 bp, Homo sapiens
gtcaacgcaagacgaaatcaaccagggcaacagatgtgtgttcagcctgtg

SEQ ID NO: 794603 - DNA, 100 bp, Homo sapiens
ttaggccgtaatgccttggctgctctcagcccccaagctggttcccgctgtagcaaacgtccgcggcctctcagatgaaactggagcgagcagagtgggg

SEQ ID NO: 794604 - DNA, 95 bp, Homo sapiens
tgtaaacaagatggacagctaagagtctttggtgctggcttactttcttctatcagtgaactcaaaaattcagcggggtgccaagtcgttttctg

SEQ ID NO: 794605 - DNA, 95 bp, Homo sapiens
cgccgcctcgggaccggctgtatgattaggccacaatcttcaatgagtaaacatattcctcgtatctggtgcaggccgtgagagcagcgggcaag

SEQ ID NO: 794606 - DNA, 101 bp, Homo sapiens
atcctgtttatagtcctggatcttctggggttccctatgcaaatgccaaaggaattggttatccaggaacagtggaggccatgtgtcttttggcagtcagt

SEQ ID NO: 794607 - DNA, 76 bp, Homo sapiens
tttgctacagcatcccacattaagtcaacgatcggcttcaccaccgaccctcggatggcccgctcctccccctacc

SEQ ID NO: 794608 - DNA, 75 bp, Homo sapiens
ccgcggtggagcgggacacgaacgtggtatgatctcgtgaaaccttgagagaaactgaatgacgaatgaaactat

SEQ ID NO: 794609 - DNA, 100 bp, Homo sapiens
ccggaagctgccccgcctggagatctcagacctcccagatggaactagaaattcaggctcgtactcatggtctgccaaccctggcttcacttggcacggt

SEQ ID NO: 794610 - DNA, 89 bp, Homo sapiens
ggccctgcgaccccagtcatgggccagacctcggtgtccacgctgtccccgcagcccggcagcggcaaagccaaagctaattgagccac

SEQ ID NO: 794611 - DNA, 100 bp, Homo sapiens
ccaaggtgcgcgaggggctgcacgtgctgaccggggagaagaccctacagcttggggcctgggctcctctgaccatcctcattgagaaaggaaagtgagt

SEQ ID NO: 794612 - DNA, 78 bp, Homo sapiens
agttagtcacccacctacatgttgagcatttaaatcaaacggtattgagatggattgggttatgaaacataatggtcc

SEQ ID NO: 794613 - DNA, 99 bp, Homo sapiens
ggtcacctacgtggccatgctggccaagcagtctaccagcaataatgacgatgaggacctgacaccagagcagaaggcagagcgtgagaaggagcggag

SEQ ID NO: 794614 - DNA, 82 bp, Homo sapiens
cacaatcaataatggcactcagcagcaagcacagagtatgaccaccactattaagccttcaggccccagcaaggctttaaaa

SEQ ID NO: 794615 - DNA, 90 bp, Homo sapiens
ggctgcagtacctgctggagaagggagactacaaggacagcagcgactttggggcccgtcaccctcagatcccagaaatttccatcagcc

SEQ ID NO: 794616 - DNA, 126 bp, Homo sapiens
ccagtcaccaagacaggcatctcaaatcggctgattctgcatctggaaactgccttcatcttgaaagaaaagatccagacatttaatgtggatgcaccatgccagaccgtggaagatttaacgaat

SEQ ID NO: 794617 - DNA, 75 bp, Homo sapiens
actggctgcgctcctttctggccggaggtggtgccaccaccacaacagaatgatcttgagattcctgaaagtcct

SEQ ID NO: 794618 - DNA, 96 bp, Homo sapiens
ttcctttccgacttagtcctcgggaagaagtttcagactacaaggcttaccttacaaatttgaagtacagcagatgttagaagaacctcagtgggg

SEQ ID NO: 794619 - DNA, 99 bp, Homo sapiens
gtgttaccggaacggcggcgacaagggtgttcccgaactagagtggatacactgaagagatggtgccttggcacccttgcctggaactcgttagcaact

SEQ ID NO: 794620 - DNA, 83 bp, Homo sapiens
caagaaggaggtcagccgggtgctgtgcaagcggtgcggagcagtgaggagaatgaataccttccaagaccagagtggcagct

SEQ ID NO: 794621 - DNA, 82 bp, Homo sapiens
gccgaggcaccgaggcactcagaggagccgcggcgagtcctttgcacatgttggcaacacacgcatccgcatcggcctccct

SEQ ID NO: 794622 - DNA, 87 bp, Homo sapiens
gacagctgtgtactttgccctcagcatctcccttcatgtctgggtcatgcccgagggaagaatgcgtctctgcccaaaccctgcttc

SEQ ID NO: 794623 - DNA, 82 bp, Homo sapiens
ggatctcggtgctgcagacggcgagacctcctgcacagggcgaactttctgaccaagtatacaactacccagagggcctagg

SEQ ID NO: 794624 - DNA, 100 bp, Homo sapiens
tttgtaacagataccttgtggttttgtactataatgccaacaggctgactttggcatctcggcccagattggggctacactggccagacgcctctctttc

SEQ ID NO: 794625 - DNA, 75 bp, Homo sapiens
gcgatatggctcaaggactgccgaagcggttattgagcattcgctgtgtaccaagtgctgtccttgacaagaaga

SEQ ID NO: 794626 - DNA, 50 bp, Homo sapiens
cagtttcaagcagtattaagagtaaatgggctgttttgctgcagcttctg

SEQ ID NO: 794627 - DNA, 50 bp, Homo sapiens
tggacgctgactcggaagtgcagggtcccctggcgatggcagaaatggac

SEQ ID NO: 794628 - DNA, 99 bp, Homo sapiens
cggagactgagggacaacaaaaatggcggaggggagccagtcggcgcctgaggcagttaacaagcacaagccctggctggagcccacctaccacggcat

SEQ ID NO: 794629 - DNA, 87 bp, Homo sapiens
cacattaagaagtacaatagcattcgcgataaatttgcgcctcattttggtaagcggaaaaacaaaagagttcctgttttctcctaa

SEQ ID NO: 794630 - DNA, 83 bp, Homo sapiens
aggatatcgacgtcgtgatccagaagtccagagctgaggactgcctgtttgcaggcttcagtttcacattcttggtacctcct

SEQ ID NO: 794631 - DNA, 100 bp, Homo sapiens
gggcctgtgcgggaggcgacagtgaaaccctttgccatcgacatatttcctgtcaccaacaaagatttcaggtgaatatgcaggttttgatgagacgcag

SEQ ID NO: 794632 - DNA, 75 bp, Homo sapiens
gtcgagggcatcctcaagcggcctcctgacgagcagcggctgtacaaggctaactcaggtgagatggagccgcta

SEQ ID NO: 794633 - DNA, 82 bp, Homo sapiens
caagatgcggaggctgcctcggcggagcagaggaaccacacgctgatcatggagtccaaaactacttacctggaagaccttc

SEQ ID NO: 794634 - DNA, 50 bp, Homo sapiens
cgaggaagagcgggagaaagggaaggcgtggaagtgcgagtggccagaat

SEQ ID NO: 794635 - DNA, 75 bp, Homo sapiens
ttttatggtgtttaatctaatacacttaagctgcagtcccaaaattagggatcgtcagtatttaaacagatcaca

SEQ ID NO: 794636 - DNA, 83 bp, Homo sapiens
ctaaaagaagaaaactgatggctaagtttgcatgaaaactgcactttattgcaacttaaagcttttcaagccaggccaagaag

SEQ ID NO: 794637 - DNA, 50 bp, Homo sapiens
tggctccttctacctgcagtcaaagatatacgagaacgccatgattgctg

SEQ ID NO: 794638 - DNA, 83 bp, Homo sapiens
caccaacgcggtgcgcgaccgggagctggacctccgggatgagactgatcgtggggttgaccaacaagatggaaagaaccacg

SEQ ID NO: 794639 - DNA, 88 bp, Homo sapiens
gagagcctgtgagagctgctatgcatttgatgaatacagaaatatcagccaaaaggacattgtggacagcataaaaggagaattatct

SEQ ID NO: 794640 - DNA, 82 bp, Homo sapiens
cggcgccgcggctcttttctaaaagtactctcagcgttctcatctctcttccttcaccatgaagctgatggacaaattccac

SEQ ID NO: 794641 - DNA, 100 bp, Homo sapiens
aagaaccccttcttgtccttggctgcctgtgtcatgccctctaggctcaaggctttgggctttttcctggtgagtggggtctttgacctggagcccatcg

SEQ ID NO: 794642 - DNA, 75 bp, Homo sapiens
agacaatgccggtggaggaatttgtggctggctggatctctgccaagacaatgcaaactccagtgaacattcccg

SEQ ID NO: 794643 - DNA, 83 bp, Homo sapiens
attacatgctgcaaagcagatagatgattcctccccggggctgtgcttatgtctgcatggttcatcgacaagatgcatttcga

SEQ ID NO: 794644 - DNA, 113 bp, Homo sapiens
aaactcaggaccatgatggctcagtttcccacagctatgaatgaaagttgaagttgatggtagtttaagtgatagccacgtatctcctccagccaaacgcactttgaaacaac

SEQ ID NO: 794645 - DNA, 107 bp, Homo sapiens
gagaggatctggtgtaccaggcgaagctggccgagcaggctgagcgatacgacgcagcccctgtcaaagggaacaggaagcagtccacggagggtgacgccctagac

SEQ ID NO: 794646 - DNA, 100 bp, Homo sapiens
gagacgctctgaactgactgccccgcatcaccggagcgtcccagctgcgaggagtgcacttacatttcaatcgaccaagttccaaggacctatgccataa

SEQ ID NO: 794647 - DNA, 75 bp, Homo sapiens
gtggccgacaacctggccatccagcttgctggagccatttgtgcaggccaagctgcggcccgaggacggcctgta

SEQ ID NO: 794648 - DNA, 100 bp, Homo sapiens
ctccaagttcagcatccccaagcagggggagtggaagatagatgataagcctgtaaaaattgacaagtgggatggatcagctgtgaaaaactctttggat

SEQ ID NO: 794649 - DNA, 121 bp, Homo sapiens
cagaaaggaactcccaagcgactgcaggcagaagctgagacggctaaggttccagcaacagatagaaatgctttaagttcactctggggaaagctggcctctgaaatcttaatgcagaatt

SEQ ID NO: 794650 - DNA, 82 bp, Homo sapiens
ctcggagtcttcgccgccgccgccgcggccccgccagtgggcgacagatgcgaaagaaacgagttccagtgccaagacggga

SEQ ID NO: 794651 - DNA, 75 bp, Homo sapiens
tgcctgctggaacctgctgtatctactcaagagtggaagttttcacaggttcatgtactggacagactggggaga

SEQ ID NO: 794652 - DNA, 49 bp, Homo sapiens
cgcgcgaggtcaagctgctgctgctcgggtttccaggcctgaggtgccc

SEQ ID NO: 794653 - DNA, 83 bp, Homo sapiens
aggcgcttcccctttccagagagccagaaagaaggaactctaatgatccaggacaaagaagttaccctggagtatgtatcaag

SEQ ID NO: 794654 - DNA, 74 bp, Homo sapiens
ctctctcctctggcaggatgaggcgtgcaggcctggaaggacagaataacgggctcccagattcacaagcccca

SEQ ID NO: 794655 - DNA, 97 bp, Homo sapiens
ctgccactgcacaagaaatgtgtccccacagggatagaagatgaagatgctctcattgctgatgtaaagcctctctacatatgacatcgtgatcact

SEQ ID NO: 794656 - DNA, 124 bp, Homo sapiens
atttgtaaaggatgttcatgaagattcaataacagttgcatttgaaaacaagtgtgttctactccctcttctgggaatgaagcctccccagcaaagcctatacctgcttgttgattctgttgat

SEQ ID NO: 794657 - DNA, 100 bp, Homo sapiens
ttggattcagacgccgattcgcccagacacgatgaggcgagtggtacgacagagcaagtttcggcatgtatttgggcaagcggtgaaaaatgaccagtgc

SEQ ID NO: 794658 - DNA, 100 bp, Homo sapiens
ccggcccccgccggcgagcctggctacagctgcacctgccccgccgggatctccggcgccaactgccagggagagcctggggatgtacaggagatgcctg

SEQ ID NO: 794659 - DNA, 101 bp, Homo sapiens
aggagttcgagcagatcgacaagtccgggagctgggcggccatttaccagcacttgcacctcctgcgccgccgccccccatccaaggatatgccttcaagc

SEQ ID NO: 794660 - DNA, 75 bp, Homo sapiens
cctcccagagaggggagccggcgaggatcaaaatcttcgaaggaggattaatactgaggaacacgtggatgcagc

SEQ ID NO: 794661 - DNA, 100 bp, Homo sapiens
ctttgcagtcgacatactcggataccagcgctcagcccacctgtgattatgaaacctctgcgccatgagagccaaggtgagcggttcctggtagtaagct

SEQ ID NO: 794662 - DNA, 51 bp, Homo sapiens
ccccctggagctggtggtgacaggagcctacagtaaacccaccctttcagc

SEQ ID NO: 794663 - DNA, 73 bp, Homo sapiens
ctgaattccaaaagaggggataatgagaggttgacggatatattcagacgttacgacacggatcaggacggct

SEQ ID NO: 794664 - DNA, 74 bp, Homo sapiens
cttgaaaaccctgtactcctcaacaagttcctcctcttgacatttgcagaacaagactgccaatggagactgcc

SEQ ID NO: 794665 - DNA, 100 bp, Homo sapiens
gttaccaccatggatgcagagctggagtttgcaatccagccaaatacaactggaaaacagctttttgatcaggtctttagtggccttgtcattaatactg

SEQ ID NO: 794666 - DNA, 90 bp, Homo sapiens
tccggctacatgagcgacagtgacctcatgggcaagaccatgacggaggatgatgacatcactaccggaaacctctgcgccatgagagcc

SEQ ID NO: 794667 - DNA, 75 bp, Homo sapiens
tgcatctgcctcagagcccgagtacatggaggagattcttggtgccaccattgagaactccaggattgtcctgca

SEQ ID NO: 794668 - DNA, 98 bp, Homo sapiens
ctgtggtcaaacccacccggcccaactcactgtggcagcacaccctgggccccccactccccgccgcaagtcctgaggatggccagcagagaaacaag

SEQ ID NO: 794669 - DNA, 98 bp, Homo sapiens
ccacaataaaagagacctctacttagctcagcaattcttaccttcccgtggccacccaggagcccgatgtgcaaggcaggtgtgagtgccaggacggc

SEQ ID NO: 794670 - DNA, 100 bp, Homo sapiens
gaattcttttaccatcttattaattcactctgtactaaggctcgtacgtctgcatcgattatcttacgtggggcaaatgatttcatgtgtgatgagatgg

SEQ ID NO: 794671 - DNA, 83 bp, Homo sapiens
aaatggcgcgggtgctgaaggctgcagccgcgaatgccgtaggtgacaccacctctccctcgaggccaccaggaggccccatc

SEQ ID NO: 794672 - DNA, 82 bp, Homo sapiens
aaaacttctttccattgtcctgcccgtttctgcggacttgttctgaggccgaggaatctgtctgccatccaggaccgagaga

SEQ ID NO: 794673 - DNA, 75 bp, Homo sapiens
gccaaagtcactgctgttaacaaggatgcacaagtgcatacaccttgatagcaccaaatataaaccggagaaatg

SEQ ID NO: 794674 - DNA, 83 bp, Homo sapiens
tgagccgtcgcggagccgcgcagccctcggagcacggtgtggacactgccagcggctgcagccgacttggaatgacctgggag

SEQ ID NO: 794675 - DNA, 90 bp, Homo sapiens
agaatcgtttggtctcctgccgtgcccggaagggatgagaccatgcagcctgcgaaaccatcctttcttgaatattttgaacaaaaagaa

SEQ ID NO: 794676 - DNA, 83 bp, Homo sapiens
ccttccgtatctgcctaggcattttgctgtctcctcctaatacggaatgcaatggaaaaacttcatagtatggatgatgcctt

SEQ ID NO: 794677 - DNA, 100 bp, Homo sapiens
tcccatccgtccgcgggtccgtggagctggagcagatcccccagccggctgagacagaaggcagacggtaacaagtactccttgctggattgaacttcat

SEQ ID NO: 794678 - DNA, 83 bp, Homo sapiens
tgggtttcccgggagatcccaggcggtgacagagtggagccatggctagagtgagagggtccaagcctggtaagaatgtccag

SEQ ID NO: 794679 - DNA, 100 bp, Homo sapiens
tgtggccccgtgtcctgcaggtattgggagatccacagctaagacaccgggacctcctggaagccaaaaatggtcaatgtgacggtggactacattagac

SEQ ID NO: 794680 - DNA, 100 bp, Homo sapiens
ccaacatcgtcaactctgtgaagcagcggcctctccaggcctacaagccggggctggagaaaattgaacaacttcaaaatcatgaaaatgaagacatcta

SEQ ID NO: 794681 - DNA, 119 bp, Homo sapiens
ttttaaatcaagatttaacattccaacacataaaaattatttatccaacagctcctcccagttgccgaacaagcaaccggaaaagcttaataggcaatgggcagtcaccagcattgcct

SEQ ID NO: 794682 - DNA, 74 bp, Homo sapiens
ggaagacttgcttcgagaaaggaaacctgtgagactccccatccccaggatgtcaacctcagtccctcaaggcc

SEQ ID NO: 794683 - DNA, 75 bp, Homo sapiens
tttgggaagcatgtcaccaacccggccttcaccaaactccctgtctcctctgagcctccggcctccataagaccc

SEQ ID NO: 794684 - DNA, 82 bp, Homo sapiens
cgcaggggccgcgcctggcacgatcgcccgtcggggacctggagccccggacagagaggaggagaaatgtctgaagtaagac

SEQ ID NO: 794685 - DNA, 150 bp, Homo sapiens
atggcagaaatgaaaactgaagatggcaaagtagaaaaacactatctcttctatgacggagaatccgtttcaggaaagatttggtataaggggaaagaagttacatttttcatcttcttatgctcataaagcatcttccattgccaaatc

SEQ ID NO: 794686 - DNA, 100 bp, Homo sapiens
agcttccttctgaaaaggcgatcttcctgtttgtggataagacagtcccacagtccaggattactacagcatcccatttcccacacccactactccgctg

SEQ ID NO: 794687 - DNA, 104 bp, Homo sapiens
ctagcccctttccttactggatcctcaaaccagaagaaaacctgaatctctgagacttaattcagtgcacaaatgagatgaatgtgaacatcccacagttggca

SEQ ID NO: 794688 - DNA, 50 bp, Homo sapiens
tgcctgctttgattccctaaagttagaacctggcccattagatgaaaccc

SEQ ID NO: 794689 - DNA, 75 bp, Homo sapiens
cctcctgagtggctgggactacagcatggcggacaccgacctgttcatggaatgtgaggaggaggagttggagcc

SEQ ID NO: 794690 - DNA, 96 bp, Homo sapiens
gctggacagacagtgacgattatagcacaatatcaacctgaagctaccgcctgtgtgatccttctgagagggaattgtacaagttgtctccacttt

SEQ ID NO: 794691 - DNA, 83 bp, Homo sapiens
atgggctgtgccatcttgccacatcttagaagtttagttgaaatcattgaacatgatgataacaccctatgcccattgtcctg

SEQ ID NO: 794692 - DNA, 83 bp, Homo sapiens
gaaagatctaccttctggaagctactactacgtggtgcttggaaaggaatagccaggccagaagaaggaaggcctgtggtgag

SEQ ID NO: 794693 - DNA, 88 bp, Homo sapiens
tagactccatctatccatatgagattacataccggttacggcacctccttcgtgcaaggtgtgatgcatccccagtgaccaacaacac

SEQ ID NO: 794694 - DNA, 75 bp, Homo sapiens
tatggacagacgcacagacacctgcagcagagaccacgcagaggctgcctttggatcaagtccaggaagtgcttc

SEQ ID NO: 794695 - DNA, 82 bp, Homo sapiens
agtgacgagcggccgaagcagctttgcgttcttccctgtggaacagtagagacctagtctgccttctttcacaagataatcc

SEQ ID NO: 794696 - DNA, 74 bp, Homo sapiens
tggatgagctgggccgcaaataccaagtggacctgtccaaggtctgtgcagacttttgcagacaaatcaaaaca

SEQ ID NO: 794697 - DNA, 100 bp, Homo sapiens
tattgatttaacatacaccacaagatattatgaagttaagtgcctggatcaaagtggaacagctgaagccatatcatgctcataaagaggaaatgataaa

SEQ ID NO: 794698 - DNA, 101 bp, Homo sapiens
gggagagcaaggcgcgcggcgactccggtgtggatgaggtcaccattgtcaacattttgaccaaccgcagcaatgcacagagacaggatattgccttcgcc

SEQ ID NO: 794699 - DNA, 82 bp, Homo sapiens
gggaacttctggaaagaagacaagcccacacttccagaaatttcaggttatcaatactctggctgaccatcatcatcgtggg

SEQ ID NO: 794700 - DNA, 100 bp, Homo sapiens
aaggggacgggacggacggtgatggtggtcgccgcggcggcgtgtgcgcccctcagcttcagtatcagacacagcacagcagccatctgaagagcaaagc

SEQ ID NO: 794701 - DNA, 97 bp, Homo sapiens
ttccagctacctgaaggtgggaaatgacagtgatcacacctctgctttagcaaggaaagtctttgggttcggaggattccagaaacatgaaggagaa

SEQ ID NO: 794702 - DNA, 50 bp, Homo sapiens
gtgctcggccttcagtgaagttttaatagacggggtttcgccatgttggc

SEQ ID NO: 794703 - DNA, 99 bp, Homo sapiens
cctcagtgcgaagaagctgcagccgcacctggccaaggacacctggatttcattagcatcatgacctacgattttcatggagcctggcgtgggaccaca

SEQ ID NO: 794704 - DNA, 83 bp, Homo sapiens
ctttctgctgctgaagtaatgcaatggtctcaatctctggaaaaacttcttgccaaccaaagcactacaagggcccccaggga

SEQ ID NO: 794705 - DNA, 100 bp, Homo sapiens
ctggcacagctcagtgaggagaagaactcggctgtacttcgcagccgtgacctgcagctggcggtccacaatgtgtccttcgcctttgagctgatgctgg

SEQ ID NO: 794706 - DNA, 75 bp, Homo sapiens
catgggccgggatcacattctgattgcgaccactttatcaagttcttcgctccgtggtgtggtcactgcaaagcc

SEQ ID NO: 794707 - DNA, 100 bp, Homo sapiens
atttctctagctattgccttattttttctcatggatgttcttcttcgagtatttgtagaaggtgtctcatcattggggctggcccctgtggtctccgtac

SEQ ID NO: 794708 - DNA, 103 bp, Homo sapiens
gggttagggcagacgctgtgctcgctggcaccccgaacgggttgcttcccccgctgcgagctcaccatggatgatgatatcgccgcgctcgtcgtcgacaacg

SEQ ID NO: 794709 - DNA, 88 bp, Homo sapiens
ggattttcgtctaaaaataacaagaatgggaggagaaggtgttagatgatgaagatagcaacaacatcacagtaggatccttagttac

SEQ ID NO: 794710 - DNA, 76 bp, Homo sapiens
cggctctctggaccttgtctcgctcgggagcggaaacagcggcagccagagggtcgaccccatcccatatgacact

SEQ ID NO: 794711 - DNA, 100 bp, Homo sapiens
cgacgggcgcctggaggagctgtaccgcggcatggagctgcgggagcgagtactcagagggaagtaccgggtccctttctacatgtcaacagactgtgag

SEQ ID NO: 794712 - DNA, 60 bp, Homo sapiens
agagtctacatgcaaagccaagccaatcaggctcattggtgggcagtattacttatggga

SEQ ID NO: 794713 - DNA, 98 bp, Homo sapiens
ataggacggaaacgccgaggaacccggctgaggcggcaggaccccagcaaaatacccagctggttgaaggtcaacaagatctactatcctgacttcat

SEQ ID NO: 794714 - DNA, 101 bp, Homo sapiens
aacatcgagatcctgcggctccccaaggctctgcgcgagatgaactggcttgactacttcggttggatggcaagcatgtggtgtttggcaaagtgaaagaa

SEQ ID NO: 794715 - DNA, 100 bp, Homo sapiens
cgatgctcaagagtgagctgcggaagcaaaaggcagactttttgatattcagagccttggaagtcaacactgtcattggttaccaaggaagaccccaaag

SEQ ID NO: 794716 - DNA, 90 bp, Homo sapiens
catgtctttctgtaaatgacatctcactacagtctctacctgaaaatattggcaagttctgcaccagtattgtggctcaagactccagag

SEQ ID NO: 794717 - DNA, 90 bp, Homo sapiens
acgagagatcccgagtacgtctacagtcagccttacggggcaagattcttgccaagagaattaatgtgcgtattgagcacattaagcact

SEQ ID NO: 794718 - DNA, 75 bp, Homo sapiens
gggacacctgcaccggcattggatttggccccgcaacatcttaaaggagccagcaccgctctttgaccttgccat

SEQ ID NO: 794719 - DNA, 97 bp, Homo sapiens
caaattctagcaatgtaattcagttgatcattgatgcatacaatcatgccaatgaagatgtggaaagaatgttactaggaaacaagtgtgatatgga

SEQ ID NO: 794720 - DNA, 83 bp, Homo sapiens
atggatgctgatggtggtgatgatgatgatcaagggatcatagacggtatttctatgtaaacgaacagtcgggcgagtctcag

SEQ ID NO: 794721 - DNA, 75 bp, Homo sapiens
tgccttggaaaatgccaacgccgtgtctgaagagcacctgttccttcaggccttctggcagaccatgaatcgcga

SEQ ID NO: 794722 - DNA, 75 bp, Homo sapiens
gaaagcatggcgtcggtggtgttggcgctgaggacccggacagccggtattttgacagagatgttaaatgcatta

SEQ ID NO: 794723 - DNA, 82 bp, Homo sapiens
tctggagctgacagcgcgcacttcacccgcagttggtcgcgtggggcaggcagtggcgctgcgggccaaggccttcggcttc

SEQ ID NO: 794724 - DNA, 100 bp, Homo sapiens
tgaaccaaaaccaactgttatcaagagggtttgaaaaccttgtaccttatacttcaactgttaggagctgtgaaattagttgtaactgaaaatgtctgac

SEQ ID NO: 794725 - DNA, 75 bp, Homo sapiens
ggagaggcgcccccgccggccgccgcgccgcccggcagcctcggcagatgaaggatttgggggcagagcacttgg

SEQ ID NO: 794726 - DNA, 50 bp, Homo sapiens
cccagaagttcccagaggccctccgagatacaaactggactctcaggaca

SEQ ID NO: 794727 - DNA, 99 bp, Homo sapiens
cttcggtggactccttcggcagtccacccaccgccgccgcctcccaggttcgagaacttgtcttggacaattgcaaatcaaatgatggaaaaattgagg

SEQ ID NO: 794728 - DNA, 82 bp, Homo sapiens
gagcccacgtgggaccgcttgcgcaaacgccgggagtagccgaaggggacgccgggaacagaagaagcctgtgaggaggaga

SEQ ID NO: 794729 - DNA, 100 bp, Homo sapiens
cggccacagtccgcagggatgaacctcgagttgctggatccagaggctgcggcaggccctgcaggcatcccaggctgagcgggacacagcccggctggac

SEQ ID NO: 794730 - DNA, 80 bp, Homo sapiens
caaccctgtggaatcttttaactcccaaggtctttcaggactgattttggtggaagaagacagcaggcggtgggcattca

SEQ ID NO: 794731 - DNA, 99 bp, Homo sapiens
cgagtttggatctttgctcctgcgccgcgttctagagcaagtacctggagtagaacagaaaaattattatgtctgtgttcccttgggactcattggaaa

SEQ ID NO: 794732 - DNA, 100 bp, Homo sapiens
ttccccgctgctcaacgccatacagcaggctagcatcccattctctgtggttggatccaatcagttgattgaagccaaaggaaagaaggtcagaggccgc

SEQ ID NO: 794733 - DNA, 82 bp, Homo sapiens
ggacaccagcgacctgttcgccagctgcaggaagggggatgtgggccgagtgcggaggatcccttttcccccagaaattact

SEQ ID NO: 794734 - DNA, 74 bp, Homo sapiens
acagcggcatacagaatgcctatgaccggcgtcgagaatttcaactggcttattcaaacctccttagagctaac

SEQ ID NO: 794735 - DNA, 127 bp, Homo sapiens
cgctatcacagctgctgcaatcgcttgggagagctcctgggccacccctcctttcaggtcaaggacctgaaggagaagaaggagaaggtggaggagaaggcaagccggaaagagcgaaagaaagaag

SEQ ID NO: 794736 - DNA, 82 bp, Homo sapiens
gcgaatatcgtcatcgttagaagagaaccatggagtctggcagtaccgccgccagtgaggaggcacgcagccttcgagaatg

SEQ ID NO: 794737 - DNA, 90 bp, Homo sapiens
gacagtccctggatcaccgacagcacagacagaatccctgctaccaatggaatggggcgagtccttgctcaagatgtatatgcaaaagac

SEQ ID NO: 794738 - DNA, 100 bp, Homo sapiens
tttcaaccagatgatgaagtagttgtctcacaccattttgctggtacagcctaccaagaggccagaaggcagaacttatgctgactacgaatctgtgaat

SEQ ID NO: 794739 - DNA, 90 bp, Homo sapiens
gcgaggcagctgtactaggactgggaacgggcagtgaaatcaactgtgcagaccatcactgttggaggagtgagcacatcacagtttaag

SEQ ID NO: 794740 - DNA, 83 bp, Homo sapiens
aactggaccgtggggaaactaaaaacgcatctatctaacgtttaccctagcaaaccaggaaatcctcattgacgattcaattt

SEQ ID NO: 794741 - DNA, 100 bp, Homo sapiens
aaaaacacattctgggatgtggatggaagcatggtgcctcctgaatggcgaacagctgcttggagaactacaagtgaagaaaagaaagcattagatcagg

SEQ ID NO: 794742 - DNA, 100 bp, Homo sapiens
tcattactaacaggatattcctcatgacattgctgtctgatgctaatactggagaccgtggacagaccaataatgctgcttctgcatcagcttccaactc

SEQ ID NO: 794743 - DNA, 74 bp, Homo sapiens
gtcgcggcggccgaggctcgggaaacttgaagggtcaaagtgcaaagggcagcttttgatttttggggcaacca

SEQ ID NO: 794744 - DNA, 118 bp, Homo sapiens
ctttgaaacaactgatgagagcctgaggagccattttgagcaatggggaacgctcacggactgtgtgctgaccacgtatcccacttggagaatgtgtcagaggatgagataaaccgac

SEQ ID NO: 794745 - DNA, 98 bp, Homo sapiens
tgacggggggctggtgctgcgggacctcaagctgcggaaattcatctttaaggacgaagagaggtaccagatccccaggggctgcagggctcaccagc

SEQ ID NO: 794746 - DNA, 90 bp, Homo sapiens
atctccgcggtccggcccggggccccgggatctcggctgtccttcctcccgccaagttctatagaaattttagagtattcatcagatagt

SEQ ID NO: 794747 - DNA, 100 bp, Homo sapiens
atccggctggtcacttgcctggagaggatcctgcatgctgatagtgctgaggcacctgccagctaaggaaatgctgtctatgatttcttcattggccgtg

SEQ ID NO: 794748 - DNA, 80 bp, Homo sapiens
tgaaaagtgtaatgaaaacaaatgacattgttcgatacagggtgtatgaggaagaggagttgtacgcatgtcagagaggt

SEQ ID NO: 794749 - DNA, 75 bp, Homo sapiens
aaggagatacattaaatgcaatagcccttcagtactgttgtacgattttgactaaaggagaagttcaagtatcag

SEQ ID NO: 794750 - DNA, 90 bp, Homo sapiens
ccaagatgtctgacatggaggatgatttcatgtgcgatgatgaggaggactacgacctgttaccggtattgtaagaacaagccgtaccca

SEQ ID NO: 794751 - DNA, 100 bp, Homo sapiens
agacaatatcatgcaagtgtggcaaatgctgaatgcaatatccatacatctccttctccgggaattcaagtaaggcatgtctacaccccctctacaacaa

SEQ ID NO: 794752 - DNA, 100 bp, Homo sapiens
ccagagacttcacagtttctgctctggctatagaaagcgcaattggtggtaacgcttatcaacacagcaaagtgaaccagtggaccacaaatgtagtaga

SEQ ID NO: 794753 - DNA, 100 bp, Homo sapiens
gatgtcgtcagtaatgcctggaatgatgatgtctcatatgtctcaggcttccatgcagcctgccttaccggatctgtgtcgtgaatttcgaagcatgcag

SEQ ID NO: 794754 - DNA, 88 bp, Homo sapiens
gattcgcagtggtcgcttcttctccttgagccccccaagatgaacccagtggtggagccactgtcctggatgctgggcacctggctgt

SEQ ID NO: 794755 - DNA, 75 bp, Homo sapiens
cctggttgccggctgaaataacctggtcagcaagtcctgggcttggtggagaaccagagtgactggtaccttgga

SEQ ID NO: 794756 - DNA, 50 bp, Homo sapiens
cgtttgttcaggaaccaccagtgacagaatttggagcaagaggtggtggt

SEQ ID NO: 794757 - DNA, 115 bp, Homo sapiens
gccaccgagtccggaccggagactttggggcctaactaggtatggcatttcaaatatagatacaaccattgaaggaacgtcagatgacctgactgttgtagatgcagcttcacta

SEQ ID NO: 794758 - DNA, 98 bp, Homo sapiens
actatggcagttgcaaaatattcaggagaccgtcgttgccttgtatttccagagaacaggtccttattccttaaatggatacagagtgagagtatata

SEQ ID NO: 794759 - DNA, 83 bp, Homo sapiens
tcccaggctgttccctaagaaggtctgcccaggactcaggagcatcagatccatgctgctgctgactcggagccccacagctt

SEQ ID NO: 794760 - DNA, 90 bp, Homo sapiens
ttgcacactgggttgcagcctatggcctgttatttgtctcaacaaaagagtattatacctgaagaaccttagccctcgggtgactgaaag

SEQ ID NO: 794761 - DNA, 50 bp, Homo sapiens
tgggaaatccaggaagacagtagggagacgttgatccagcagcacgtgtc

SEQ ID NO: 794762 - DNA, 100 bp, Homo sapiens
ctgacctatgagccaacccagaggccatcattccgcaccatcctgcgtgacctcacccggctgcagccccacatactcccctgccctcaacaagatgttt

SEQ ID NO: 794763 - DNA, 75 bp, Homo sapiens
ccaagacaggagcaagggggacagtgaccccaaacccggctccccaaagctgttcatcaaagaaaaagggttctt

SEQ ID NO: 794764 - DNA, 89 bp, Homo sapiens
aggacagcttttttcctgcaaggttggacgtgataagtatgagcctgcagctgtttcagaacaaggtgataaaaagggcaaaaagggca

SEQ ID NO: 794765 - DNA, 100 bp, Homo sapiens
ggtgaggaccatcctgcccaagaacaacccacccaccatcgtgcatgacaaagtgctcaacctcatccagggaactgtccaggtttattgctgccgggag

SEQ ID NO: 794766 - DNA, 75 bp, Homo sapiens
actatttccccacccttgcggaaaaacgttcgagaacttgtcttggacaattgcaaatcaaatgatggaaaaatt

SEQ ID NO: 794767 - DNA, 85 bp, Homo sapiens
agaagatatggaagctgtggacttgaggatttacacttaaggaaggatggggaaaatgtgggactcagtctcctttgaggatgtg

SEQ ID NO: 794768 - DNA, 101 bp, Homo sapiens
cgcactttttggatcggcatctagtctttccgcttcttgaatttctctctgtaaaggagaagatcaaattcccaggggcttccctaccattgacatgggcc

SEQ ID NO: 794769 - DNA, 100 bp, Homo sapiens
aaaagaaattctgttttacagaaaaactattgggtacaaggttcaaaccttgtactactcagctgatcacaagctgcttgatgggaacctactagatgga

SEQ ID NO: 794770 - DNA, 75 bp, Homo sapiens
gtcacctctcaactgtgtgccaaagagtgaagatagtccaagtcctaagagacagcgcctctctcattcagtctt

SEQ ID NO: 794771 - DNA, 86 bp, Homo sapiens
ctactcttggaatcaaagataaatccaaatactgcatatcagaaacaacaggaagaaatgttggctatttggcgatgagaggtggt

SEQ ID NO: 794772 - DNA, 100 bp, Homo sapiens
ttctttgtggtttatctaaaaaccaaaggttgattcttcaccacactgaaaccattaggaaaaatccttgtggttaacagcagaggcttcagagtgtaac

SEQ ID NO: 794773 - DNA, 75 bp, Homo sapiens
aattgagtagacacttaacaaggaaggtgggagtcaatcattttgacaagtctcctgaaaggaacagctagcagg

SEQ ID NO: 794774 - DNA, 100 bp, Homo sapiens
cgtgattagaggtcttttgctggaggttgactgtgctgtctggtatggatggcagaacagaaaatatcatatgataagaagaaacaagaagaattgatgc

SEQ ID NO: 794775 - DNA, 75 bp, Homo sapiens
gcccattattgtacctttaattccaccacctttcataaagccaccagcagttggaactgataatgggagagaagc

SEQ ID NO: 794776 - DNA, 74 bp, Homo sapiens
gagccctcttcgagagaaattggaagaacagtttaaggtggcggtggcatgagggtcggaccccagtaccaggc

SEQ ID NO: 794777 - DNA, 82 bp, Homo sapiens
tcccgagcagcgtcatgtacccctgaaagtgactattttaccccacagggagaattccgtgtagacaaagcaggatccccta

SEQ ID NO: 794778 - DNA, 105 bp, Homo sapiens
caacgaatcatccacgcacctgcagctctgctgagagagtgcaagccgtgggaaatacactttcgggaaatggcctctaaatcctggctgaattttttaaccttc

SEQ ID NO: 794779 - DNA, 101 bp, Homo sapiens
agtccaagtactcagacatcaccatcatgtttgaggtggtctgagctcggcctatgggggcctcacaagccccggcctcagctacagcctgggctccagct

SEQ ID NO: 794780 - DNA, 87 bp, Homo sapiens
gccctcgctctgaccaccgtgatgagcccctgtggaggtgaagacattgtgggattcctgagctgaaatgcagatgaccacattcaa

SEQ ID NO: 794781 - DNA, 75 bp, Homo sapiens
agagcgccgcgcacttcgtcatgttcttcgcgccctgatgccatggacaatattaccaggcagaaccaattctac

SEQ ID NO: 794782 - DNA, 100 bp, Homo sapiens
ctctcctttccctttgagaccgtgaagagaaagatgcagggtctgcaagtggatgatgagattgtggagttcggctctgtgaacacccagaacttccagt

SEQ ID NO: 794783 - DNA, 98 bp, Homo sapiens
tgccaccctcaaggagttcacgttcatgggcgagggaacagatgagaaacccggcaatgaaaagcactggcctcaggggaagctagtatggaggatct

SEQ ID NO: 794784 - DNA, 82 bp, Homo sapiens
cgacgacgtgcggacgcagcggcgggggcgccttgtcagcttcaaggctttaattgaagaatctgaaatgaagaaattccca

SEQ ID NO: 794785 - DNA, 100 bp, Homo sapiens
agctcttcagcatctacgggaggcaaacttgtaaaacctggaacagcagcatcattgtcaaaggaaagaccacagcaagattctttcattcgtctcctcc

SEQ ID NO: 794786 - DNA, 74 bp, Homo sapiens
agcaagtgaacaccttgactaaaccgacttctgatccatggatgccatcagttggtgagtttgtaagtgatgcc

SEQ ID NO: 794787 - DNA, 50 bp, Homo sapiens
gcctgggggaccagaagcaagaggagatgaacaccttgcgtactcagtgt

SEQ ID NO: 794788 - DNA, 90 bp, Homo sapiens
ccgccttgctgctgctcaaagctgctgccgccccttgggctaaaaggtgtaatggataggtaacagagaagacctcgtcccttcctagtc

SEQ ID NO: 794789 - DNA, 101 bp, Homo sapiens
ggccacgcacctcgtcaccaaggccaagattgatggcggggctggtggtgattcgggcacgttactgaccgcacaaaccatcacatctgagtccgtgtcaa

SEQ ID NO: 794790 - DNA, 75 bp, Homo sapiens
ctatccaaggacatgagcagtttacacatctcacccaattcaggcaatttgaatcaacccatagaagtgacagcg

SEQ ID NO: 794791 - DNA, 100 bp, Homo sapiens
atccaaaggtgaatcttttggttggtgattttgatgatagccacaaagcaagcagggtactccaaagattcaggtttactcacgtcatccagcagagaat

SEQ ID NO: 794792 - DNA, 98 bp, Homo sapiens
tgacttggaagcaatgtttgaacaaactcgaagaacagctgtggaaagaagttgcaaaacactgggttggatggcaagcatgtggtgtttggcaaagt

SEQ ID NO: 794793 - DNA, 98 bp, Homo sapiens
gcactacctatagtgagacttttggcaaagacatgcgcaagaggggcttctgaacaatgccagggatacaagtgtcatggatactctaccactgaatg

SEQ ID NO: 794794 - DNA, 95 bp, Homo sapiens
ctgtggcgacatgtcgacctgacgctctacacggggttacccccagcagtgtgtgagaatgaagagtgtgggccactgtgtctctgttgacctgc

SEQ ID NO: 794795 - DNA, 75 bp, Homo sapiens
tcagtgactcacaaatcagcaacacagaatttctgcaagtaattggagccagcacgtcgtgtctcaagatctagc

SEQ ID NO: 794796 - DNA, 75 bp, Homo sapiens
aacccgtgtgactttgactgggtgggagatgccatcccagcagtggaggtgtttgaaggggagccagggaacaag

SEQ ID NO: 794797 - DNA, 74 bp, Homo sapiens
cccagacggctcacctgtgcgggatggaacaaaagatccgagctggatccagagttgcatacagaccaatttct

SEQ ID NO: 794798 - DNA, 95 bp, Homo sapiens
tggagcgaggggcgcccaacaaggaggagacccctgcgactgagagtcccagctccaggcccggattcgaacttacaatcagcattacaacaacc

SEQ ID NO: 794799 - DNA, 74 bp, Homo sapiens
aggtcttccagtttctgaacctaggaagcactaagtaatatggatgattatgacaaaacctgcttggagtctgc

SEQ ID NO: 794800 - DNA, 100 bp, Homo sapiens
tgaggactgactggggttctgagactccctgtcccggaccgcagttggaggtaatgcttgaagataatgtttgcttgcccagcaatggcaaattatatac

SEQ ID NO: 794801 - DNA, 83 bp, Homo sapiens
tccaaccctacatgcgcagaatggtggccacctggatgctggagacggctgcgacgaggagctggtgggtcccctgtatgcac

SEQ ID NO: 794802 - DNA, 98 bp, Homo sapiens
cgacccggcctcctagggggtcgtcgtggtccagacagtttagcagaacagcctccgcggctccggggagaagtgaatggtagtgtctagaaagggta

SEQ ID NO: 794803 - DNA, 100 bp, Homo sapiens
tggattcccagcgcgggacagccaggtgactctgttttgagaagtgcaaccagatctctcctggaattcaacacaacagtgagctgtgaccagcaaggca

SEQ ID NO: 794804 - DNA, 75 bp, Homo sapiens
ggagcgacgcggcctgggaggataagaaactggcgatggaatatgagaggagccctctggaaagaaaaggacaga

SEQ ID NO: 794805 - DNA, 100 bp, Homo sapiens
ctggtgttcgtgattgggatcaaccagacggaaaacccggtgggagatgccatcccagcagtggaggtgtttgaaggggagccagggaacaaggtgaacc

SEQ ID NO: 794806 - DNA, 96 bp, Homo sapiens
cgggaactgactgctgtagttcagaagaggttgatctttgccggaaaacagctggaagatggtcgtaccctgtctgactacaacatccagaaagag

SEQ ID NO: 794807 - DNA, 75 bp, Homo sapiens
ctccatcaggaaaacaagcctggttcagttaaacctactcaaactattgttacattacttcgttcagaaccattt

SEQ ID NO: 794808 - DNA, 51 bp, Homo sapiens
aaccaacggctggaaatgcaaatgaacagctctgcgctttttgttactgtg

SEQ ID NO: 794809 - DNA, 100 bp, Homo sapiens
gttccatggtgcaatctcaagagagagccgggtgtgggctgagccctgcctgattgatgctgccaaggaggagtacaacggggtgatagaagaatttttg

SEQ ID NO: 794810 - DNA, 82 bp, Homo sapiens
ttctgccactgctgctccgtggagatcgtcccgcgcctgccggcgcgcctcaagttccccatcgactacccatactctccac

SEQ ID NO: 794811 - DNA, 75 bp, Homo sapiens
accgcgggccctgccctgggctggaacgaccctgaaaaagcttgtggtgaaggggggcaaaaaaaagaagcaagt

SEQ ID NO: 794812 - DNA, 82 bp, Homo sapiens
tggactccttcggcagtccacccaccgccgccgcctcccagagacagggcagggcattgttcatgcactgaccgacctcagc

SEQ ID NO: 794813 - DNA, 90 bp, Homo sapiens
ggatatgaaaagaagaggtcaaagttaattggagcctaccttccgcagcctccgagctcctgggtagaactgcacttcagcaataatggg

SEQ ID NO: 794814 - DNA, 75 bp, Homo sapiens
cagagcagctaccctcagctctagctgatactacagacagtacaacagaatccacattcatctcaatggaaggat

SEQ ID NO: 794815 - DNA, 82 bp, Homo sapiens
ctcctgcccagcgtggtggggcagcagaagctccagagcccagacttgcagcagaaaaatatggctcaggagactaaccaga

SEQ ID NO: 794816 - DNA, 100 bp, Homo sapiens
gtctactctgtcgctcttgtgccctagcaccccgagaaccgtcagtttgagccagatgcttaagatctccttcagcgagacagccctggagaccacgtac

SEQ ID NO: 794817 - DNA, 83 bp, Homo sapiens
cgggatattctcttctgtgctgtcaaggggcaagcgacttggtaatgaaggtggatgctcttctgtcagcgcaaccaaaagga

SEQ ID NO: 794818 - DNA, 75 bp, Homo sapiens
atcaattttgtcagtcctgttcgaaaccaaggtaaagagtgtgtacaacagttagctgaaaacaccaggtatttc

SEQ ID NO: 794819 - DNA, 100 bp, Homo sapiens
gcagcagctatcgacaacatgtgtggaaccatcagagaatctacaatccctgatggagaagaatcagtccctggtagaggagaatgaaaaattaagtcgt

SEQ ID NO: 794820 - DNA, 100 bp, Homo sapiens
tgggatcatcggtaaagcacctaaaaccagccatgttagaaggttccccacagctgaatatggttggcctctttcgacgaattatttccaaagaaggaat

SEQ ID NO: 794821 - DNA, 75 bp, Homo sapiens
gtgatccgccattacggggagcacgtgtgcactgctaaggccggctgcgtgcacttttcctacaaagcatcgtgt

SEQ ID NO: 794822 - DNA, 75 bp, Homo sapiens
cgctgcccgcactcctggtcctgctcggggctctgttcccaggcggaaggtgctctaccagcgtgcacccaggaa

SEQ ID NO: 794823 - DNA, 76 bp, Homo sapiens
gcgggacttcagtcctagtggcattttcggagcgtttcaaagaggcaagccgattttttcagttgatattcaccct

SEQ ID NO: 794824 - DNA, 98 bp, Homo sapiens
caaatagtacttcaagagcacagtcttatgtaaggagagaagcctcatcagtgccaagtctgtgggaagaccttctctcagagtggaagcaggaatgt

SEQ ID NO: 794825 - DNA, 76 bp, Homo sapiens
tcgtggttcacccgctgccgggcaccgaggaccagctcaatgacagaggcgtggagctatttcctatgacagttct

SEQ ID NO: 794826 - DNA, 100 bp, Homo sapiens
acgcgggctgcgcgcgcgggaccccggagcccaaacccggggcaggcgggcagctgtgcccgggcggcacggccagaaaacctcggatcaattctcagct

SEQ ID NO: 794827 - DNA, 96 bp, Homo sapiens
cagtggcttctgctcaccaacagatgaagacagatgcaccaacgagccgtcatggaaatgatgagtcagaagattcagcagctcacagccctgggg

SEQ ID NO: 794828 - DNA, 90 bp, Homo sapiens
cagggccgcaggaagacgcagggtctgctgcgagttgccttagagcgcaagggccaggccctggaggaggatgaagacacagagacaagg

SEQ ID NO: 794829 - DNA, 98 bp, Homo sapiens
gacaactccgcagcaaacaactccgcaaacgaaaaagaacgacatgatgcaatcttcaggaaagtaagaggatatgagggaaggcaccattggagata

SEQ ID NO: 794830 - DNA, 90 bp, Homo sapiens
aaagtttctgattctagatccacattataccggtgctgaagacctgcaagttattttggaaaaggctgagggtaaaaagctgggattggt

SEQ ID NO: 794831 - DNA, 98 bp, Homo sapiens
cttctttcgatcagagatcggcggagaccctcgaagtgcgcaaacttgacactcaccctgaccggacctcagcaatggagaatatccccatcatcaca

SEQ ID NO: 794832 - DNA, 98 bp, Homo sapiens
cttcctcctccttataaagctctgactgatgacagtgatgaaaatgaagaagaagatgcctttaccgaccgttgactatagtcaatggggccaatgga

SEQ ID NO: 794833 - DNA, 100 bp, Homo sapiens
gcgagggcgcggagttccaggtcgagcagttaggccgcgagcgactgcggcgccgagccggcatcaacatttatgagccagcaccccctactggtcccac

SEQ ID NO: 794834 - DNA, 80 bp, Homo sapiens
taaggtcttcagcggggcgctccaggaggcactcacaggggaaagcaagatagtttcatttggatttggaagtagcacag

SEQ ID NO: 794835 - DNA, 101 bp, Homo sapiens
ttcgctacacagcaatgcatcgaggcaacagttaatgcccgggcaaaccaggatcttgcccttctgtgtgaggtccgtgacagcaatagacgggcacataa

SEQ ID NO: 794836 - DNA, 97 bp, Homo sapiens
caggcttgttcaagacacaccggaggcgacggccatggccacaggtagcaaaccatgtgatttcttctgactctatttcctcttctgccagtagttt

SEQ ID NO: 794837 - DNA, 85 bp, Homo sapiens
ggcgggcgctgcgggttggagctcgggacgtgatcgtggatacttccgggtcatcctcctcctcctcctggccctgactctgctc

SEQ ID NO: 794838 - DNA, 75 bp, Homo sapiens
ttgatcctggggagtctgattcagatgacaactgtacagatgtcactggtgggatgtgtgtgggctgaaattccg

SEQ ID NO: 794839 - DNA, 80 bp, Homo sapiens
ccggtcctcgtttgtaccgtccctcttcaggtctaggcgttttacactgagattctccactgccaccctttctactcaag

SEQ ID NO: 794840 - DNA, 100 bp, Homo sapiens
cttttccggcctgacaacttcatctttgatgggcttccccaaggatttattgacattgctacttgagtgtgaacagttacctggaaatactgatgataac

SEQ ID NO: 794841 - DNA, 100 bp, Homo sapiens
gaacaccctcactggcccgggccggcgcgggagggctgtgtgatggcctcggagcgcccggagccggaggaaagaccacagcaagattctttcattcgtc

SEQ ID NO: 794842 - DNA, 131 bp, Homo sapiens
attaattcttccactgatatctcaaaaggtgatctggacaaaggaacaggtatctcaggtactaggttttgacaagcttgcatcatgcgtgagtataagctagtcgttcttggctcaggaggcgttggaaa

SEQ ID NO: 794843 - DNA, 118 bp, Homo sapiens
gtctgcgaaggccgggacccggttccccggcccacagtgggggtgtgcaaacccgagagaactggctccttcgagaactcatagaacggaagaccagctccttggatcccaacgatca

SEQ ID NO: 794844 - DNA, 100 bp, Homo sapiens
cttctcctcatcaactggggatgattacagttcttcctaaaaaaggggacaaaacatggatgatgtcatggttttggtggattcagaagaggaagaggag

SEQ ID NO: 794845 - DNA, 75 bp, Homo sapiens
gttgcacaataaaccgacgtttagccagtactaaggctcgtacgtctgcatcgattatcttacgtggggcaaatg

SEQ ID NO: 794846 - DNA, 90 bp, Homo sapiens
agtacctccttttcagctacaacatcatcttctggatctgactgcagccatgagcagcaatgagtgcttcaagtgtggacgatctggcca

SEQ ID NO: 794847 - DNA, 89 bp, Homo sapiens
gaccacttgctgtaggagaagttccaacgtgtcctacaaatactcaaagatgctttccctcgaagaggatgtcaccgaaaagctgagcc

SEQ ID NO: 794848 - DNA, 100 bp, Homo sapiens
ggggctgctcccatcattgatgtggtgcgatcggtttctggcatttgaagtcaaagagtattcagcgttggatgaattacaaaaggaatttgaaactgca

SEQ ID NO: 794849 - DNA, 129 bp, Homo sapiens
gctgccatctccaggtcaggaagagaggtctcaccagaaaccaacttggacttctagcatctagaactcattgtttacaataaccaagatatgaaatcaacctatgtcttcattgatggaagaatacac

SEQ ID NO: 794850 - DNA, 109 bp, Homo sapiens
ttaccagcagcaacagtattattcacctcaagcccaaactccagatcagcaaccaaataggaccaatggagaataactgaagtgaagtgatggactccgatttggagag

SEQ ID NO: 794851 - DNA, 83 bp, Homo sapiens
cgacaagccgctggcagccgcggatctcaccgccgctcagggtgccacacctccctggatgatccaagatgaagaatacattg

SEQ ID NO: 794852 - DNA, 100 bp, Homo sapiens
ctgcccctcgaggctcaggaactgtatcctagaaggaaaacatcaccatggctacagaaattggttctcctcctcgttttttccatatgccaaggttcca

SEQ ID NO: 794853 - DNA, 75 bp, Homo sapiens
ctcaggcagctgggcctgcccaccgccctcaagagaggtgttggagagcacaatggctgaacaagtccttcctca

SEQ ID NO: 794854 - DNA, 80 bp, Homo sapiens
ttcgcagtggtcgcttcttctccttgttggagtgcctcaagcttattgcctctcaaaaatttacagacaaacgcattggc

SEQ ID NO: 794855 - DNA, 106 bp, Homo sapiens
gaaggagaaggcctaaaaaatgtcatttttaccaactgtgtaaaggatgaaaatgtcaagcaggatgaccggaaagaagggatgaccgcgtttgtggaaaagagaa

SEQ ID NO: 794856 - DNA, 98 bp, Homo sapiens
ctgcacgtgctcgagggcctcttccgcaccgaccccgaggccaagatttggagtccaggaatgagactaagcatttatctgtaggaaaagatattatt

SEQ ID NO: 794857 - DNA, 71 bp, Homo sapiens
aagtgatccacccaccgtggcctcccaaagtgctgagattaaaggacgcacaagaccagccactgctaccg

SEQ ID NO: 794858 - DNA, 82 bp, Homo sapiens
ctcaggaacagggacagcacctcatcccctggatgggggaccacaagatcctcatcgacagactgattcttgctattccaaa

SEQ ID NO: 794859 - DNA, 100 bp, Homo sapiens
gggtgcgcctgcagggatcggaagccggttggggtgtgagaggttttctcgctctaggctcttgcagccaatgccggaacaggatttgctgttgctgagc

SEQ ID NO: 794860 - DNA, 100 bp, Homo sapiens
gaattttttggcagcagaagggcgactgagtactcaacatattgactgtatttgggctgcagcacagggaagagacttccaccttaggatagtgttgcct

SEQ ID NO: 794861 - DNA, 100 bp, Homo sapiens
ccactgagaacctgaagcaccagccgggaggcgggaagattgtccccttggggcggaaagaagccaaggccaaggagctggtgcggcagctgcagctgga

SEQ ID NO: 794862 - DNA, 83 bp, Homo sapiens
tacctctggccccgagatcagaatgccgatatccttggtggatgaattaaaaacctggtgcatgttaaagattcagaatctgg

SEQ ID NO: 794863 - DNA, 75 bp, Homo sapiens
ggcaaagtgggaaaaataaagtgttgagtaaacagaccaagttgggtttcattttctggcaggagagcccagagg

SEQ ID NO: 794864 - DNA, 90 bp, Homo sapiens
ctgggggccacaaatgctccttctcctggagacgcaactcaagacggaatcagtccccaatgcctggaaattcctcattggattactgtg

SEQ ID NO: 794865 - DNA, 100 bp, Homo sapiens
ctgagcctgagcggccggaaactgagggagtttccccggggagcggccaaccacgacctgacggacaccacccgggcggctcctgcccctcctaaagctg

SEQ ID NO: 794866 - DNA, 75 bp, Homo sapiens
aagatttattggcagcccacgaacacctgtcaggactccctccccagctcggtcattagtgccatcagtggacag

SEQ ID NO: 794867 - DNA, 75 bp, Homo sapiens
cgaggagagtcagcccgaggccaagcgtctgcttctgcgctttgcctgggagaggccctggtggcctcgttcctg

SEQ ID NO: 794868 - DNA, 100 bp, Homo sapiens
cgggggagacccaggaaatgtgaccctgttcggccagtcggcgggggccatgagcatctcaggactgcttaatgcagataccgaaagagaagaaggcgaa

SEQ ID NO: 794869 - DNA, 50 bp, Homo sapiens
cgctgactggcccggctgggcagggagtgcgccggtctcggggaaatgcc

SEQ ID NO: 794870 - DNA, 74 bp, Homo sapiens
cggggagccggccttggacacggtaatttgtgaaagaagcaaaaataaatctgtggaactgaaggagcggatca

SEQ ID NO: 794871 - DNA, 80 bp, Homo sapiens
ctgggacttgattggtcgaaaagaagtgcctaaacagcaaggagaacaacatgaagtactgggagaagaaccagtccatc

SEQ ID NO: 794872 - DNA, 82 bp, Homo sapiens
gaaggtgcatctgcagtacaggatatgaagaaattgagggttcttgccatggaattacatgaacgacagccttcgcaccgac

SEQ ID NO: 794873 - DNA, 95 bp, Homo sapiens
cttctcggagctgcgcagcgtcgaggggctgcaggagggctctgtgctgcgtgtggtggaagagatggagtctcactctgtagacaaggctggtc

SEQ ID NO: 794874 - DNA, 75 bp, Homo sapiens
gcggagccgcggcggagccggaggaagctgatggtcatcttttccaaacatccttcaaagttgagcccttttttt

SEQ ID NO: 794875 - DNA, 82 bp, Homo sapiens
gtttgacttcttggggagcttgctcactatgtgctcctctgacgtgccgttactcagaggcttgggcctggaacaggacagg

SEQ ID NO: 794876 - DNA, 99 bp, Homo sapiens
ttatcaccggcggcagagggaggaaagactcagggagcaggaaatggagcgattggttgaatataagctgggattccaagtggacaatgttttggcaat

SEQ ID NO: 794877 - DNA, 100 bp, Homo sapiens
aaggtccggggcttgccctggtcttgctcggccgatgaagtgcagaggtttttttctgttgaaaatcgagttcgtccgttagtgctggtgattaagaagt

SEQ ID NO: 794878 - DNA, 98 bp, Homo sapiens
ctccttgaagtatttggctgaggagttttcaatcccagagtgaagtgcaaccagtggtctgaggaggcttctatggtgtttcgaaatcatgtggagaa

SEQ ID NO: 794879 - DNA, 98 bp, Homo sapiens
cgcgcacctcagccgcctcctagcggcgcggcgctcgctcctacgtgactgagatgctggtaaatgtcctcaacatctgctcagatgatgaactaggg

SEQ ID NO: 794880 - DNA, 83 bp, Homo sapiens
caccgaggctcggccgccccgccgcgagattgtgttcagtgtggacccctccgagggcagccctggttccccagcagggctgg

SEQ ID NO: 794881 - DNA, 94 bp, Homo sapiens
aattttttttcaagaactgccgtcttctttgcctgcactaatgcaatggctgccatccggaagaaactggtgattgttggtgatggagcctgtg

SEQ ID NO: 794882 - DNA, 82 bp, Homo sapiens
ctgcagcacgtggacgctgactcggaagtgcaggtactggctgtgatcgaacttctcaaccctcagagacttagatcttcca

SEQ ID NO: 794883 - DNA, 97 bp, Homo sapiens
tcgttacttgtccttgcatgacaacaaatacatcagatactttcctggacatagcaaaagtgccacccagatagcctcacaaaactttgacccagcc

SEQ ID NO: 794884 - DNA, 74 bp, Homo sapiens
gtctgcgagccaggattcccggtgaaaccagcccagagaagttacgggatttgcccccggggctcctgcccagc

SEQ ID NO: 794885 - DNA, 100 bp, Homo sapiens
cgagtatccacagaagtagacgcaagcgcgttccttcacctcgggcagaataactttgcagaagcccacaggttcttcacagagatcttaaggatggatc

SEQ ID NO: 794886 - DNA, 100 bp, Homo sapiens
ttgtgaccctgcagctcctcaaaggtggctttgtccactatggtgaagtgaccaatgactttgtcatgctgaaaggctgtgtggtgggaaccaagaagcg

SEQ ID NO: 794887 - DNA, 119 bp, Homo sapiens
tgaggatgggcactggacgggtgattatggtggcccacttttcctcctgccagaaatgcctccacggctgtgtacgcctgttgcaaccccatccaggagacatatttccagcagctggc

SEQ ID NO: 794888 - DNA, 100 bp, Homo sapiens
cttccggaagatcaactgcagactgtcctattgcatctcaagccacgaagttatacggaagcgtctcctcattgatggagatggtgctggagatgatcgg

SEQ ID NO: 794889 - DNA, 87 bp, Homo sapiens
ccggccccggggaactagggagcgtctccggctgcacagcgctcaggcctgatcttttggccagaaggagattaaaaagatgcccct

SEQ ID NO: 794890 - DNA, 91 bp, Homo sapiens
caccgatggagccgtccggaggggagcaagagcccggagccgtcaggttgggtggcccagaccccttggactatgttagcatgtacaggaa

SEQ ID NO: 794891 - DNA, 75 bp, Homo sapiens
ggacaagaaactagagcaaataaccgttttgaaattgttgggagccacgtgtaccagtgtgtgttgatcttggct

SEQ ID NO: 794892 - DNA, 90 bp, Homo sapiens
gttctgccgcttatcttcaggagcgaagagctgcttctgtatcttaaggaggaagaaggcacctacgatcaaactctggagttccgtagg

SEQ ID NO: 794893 - DNA, 90 bp, Homo sapiens
ggtgtcccttggcggcgcgagcaggaagctccttgcccgacttgaaggtagaagttccttgaaagaaatagaaccaaatctgtttgctga

SEQ ID NO: 794894 - DNA, 99 bp, Homo sapiens
atggcggagaaggatgacaccggagtttgacgaagaggtggtttttgagactcctgggagagttggctctcaaggttctgatttagattcatcagcaac

SEQ ID NO: 794895 - DNA, 100 bp, Homo sapiens
agaagagttccaggtgcttccctgcagatcctgcgcccccaaccaggtcaaagtggcaggctgaccggttccctgatgtgttacctgcttctgctactga

SEQ ID NO: 794896 - DNA, 83 bp, Homo sapiens
tggacgtgggcgtggtgggcgcccaaaccgtggcagcaggaccgacaaggaagctgtgctgaatggtttggtggccactgagg

SEQ ID NO: 794897 - DNA, 100 bp, Homo sapiens
caagtgctggtgtccatattgtgatgcctggttattacaggaggtacttcatcgattccaccaacctgaagacccacttccgatccaaagaccacaagaa

SEQ ID NO: 794898 - DNA, 83 bp, Homo sapiens
ggtctgctccggatggctccgcaagtcccccccggagaaaaagttgaagcgttatcatcagacaacagtcagcgctttcgaga

SEQ ID NO: 794899 - DNA, 98 bp, Homo sapiens
cctcggagcgcggtccctgtattggtctcctgctcctagaggtttggtgcacctcgatttggaggaagtagggcagggcccttatctggaaagaagtt

SEQ ID NO: 794900 - DNA, 75 bp, Homo sapiens
ttcaggatagtatcttggccagggaactcaaacagcagatgcaggcccttgatgagcctccctatttgacagtgg

SEQ ID NO: 794901 - DNA, 100 bp, Homo sapiens
tccttagcagagcaccctggagtctgcaaagtgttaatccaggcctaaagacaagtatgccattgcattggccttaagggaaaagcagcgtgtaatattt

SEQ ID NO: 794902 - DNA, 100 bp, Homo sapiens
ggggctgctcccatcattgatgtggtgcgatcgcaactattggatgattatccgaaatgtttcattgtgggagcagacaatgtgggctccaagcagatgc

SEQ ID NO: 794903 - DNA, 83 bp, Homo sapiens
ggtcgccctcaaggccatgatcaaaacaccaaatacacgctgatcgatgagcaggacatcccgctggtggagagctactcctt

SEQ ID NO: 794904 - DNA, 83 bp, Homo sapiens
gggcaaaggatccgtctgaggcggcgacgagtggtcaaaatgcagatcttcgtgaaaacccttaccggcaagaccatcaccct

SEQ ID NO: 794905 - DNA, 101 bp, Homo sapiens
ggggagaagaggattggaggtgtcagtgttaaaggaacctctacaacgaaggtgaagccacggaagataaggtttggctcagaagaaggcggccccaacag

SEQ ID NO: 794906 - DNA, 109 bp, Homo sapiens
ccgcaaccattgacgccatgtcgggttattcgagtgaccgagaccgcggccgggaccgaggtgcctccggagccagcgtggtggccatagacaacaagatcgaacaggc

SEQ ID NO: 794907 - DNA, 100 bp, Homo sapiens
caagaaagatcacctaactgtggaagaactggctcagtttttgaaggtggagcaaaagctggagaatgctggaggagaccttaaggatggccaccaccac

SEQ ID NO: 794908 - DNA, 98 bp, Homo sapiens
agaagggatggaaatacttcaacaaggcaagagcagctaaactgtctgagggcagccaacctgctgaggaggaagaggatcaagaaacaccttccaga

SEQ ID NO: 794909 - DNA, 100 bp, Homo sapiens
gtcaagggtcttccgaagaaagcgagaaaggaacaggcgccttcaaaagcccacttggcgatgggttacagtaagagcccgtgggtgctggctgccaagt

SEQ ID NO: 794910 - DNA, 90 bp, Homo sapiens
gtccattatttcctctggcttcctcaaattcatattcacagaattaactcctgaggagagagcccaaaagattgccaaagccatgcgcaa

SEQ ID NO: 794911 - DNA, 100 bp, Homo sapiens
gcgcggcggaggacgaggaagagttgtggcgaggcagatcctgccccgtggccgcggccgtctcgtaggtgaccaaaagccagccccactgtgagttgaa

SEQ ID NO: 794912 - DNA, 75 bp, Homo sapiens
ccaggcttcagctgatagcaagtctgagatggggcattctcttctcccaccctcgggactttaccccagtgtgca

SEQ ID NO: 794913 - DNA, 74 bp, Homo sapiens
ggaccgagcgcgggcaggcgggaggcaacggagctaccagccgcattctgaagtccatggagtttgcaccgtcc

SEQ ID NO: 794914 - DNA, 82 bp, Homo sapiens
ccatctttcagccctctgaaaccgtgtccagcacaggtaccgaggagaaggcattgtatatgggacactagaggaggtgtgg

SEQ ID NO: 794915 - DNA, 100 bp, Homo sapiens
cgggggccaactctgaggagtccactgcagcagattgatgacattgtaaaagctgttggtaactgcagctacaaccaactagtggagaagatcatctctt

SEQ ID NO: 794916 - DNA, 50 bp, Homo sapiens
ctcagatgctcccttctgctcctgatcccagatgcagtgactggttacta

SEQ ID NO: 794917 - DNA, 75 bp, Homo sapiens
gccaaggcccaaactgcactgcacatgtgaactggcacaaaggttaatctcaagatgccgctagtgaaaagaaac

SEQ ID NO: 794918 - DNA, 75 bp, Homo sapiens
gtaatggaggagaagctgaatgcaacaaacattgagacactgggtttggcacaatctttacctcagatgatcgag

SEQ ID NO: 794919 - DNA, 82 bp, Homo sapiens
cttgttcccccaaatgtctgactctgactctcggactgagaaacgcaagctggtaggtgagtgctgtcctcggctcactttc

SEQ ID NO: 794920 - DNA, 46 bp, Homo sapiens
cctccggggccacaatagcgaggctgaactcacgggaatcaaatgg

SEQ ID NO: 794921 - DNA, 97 bp, Homo sapiens
actcgggccctggaggcaaccacagaacacatacggcaggagctggcggctgaggcagatgtggcctccctgaaccgccgcattcagctggttgagg

SEQ ID NO: 794922 - DNA, 100 bp, Homo sapiens
tttctgtgtcctactccttgcagagacctacagagttgaaacagtgaaacctggaaagattgtctggcaggaagaccctcgtttacaagacagcagttca

SEQ ID NO: 794923 - DNA, 101 bp, Homo sapiens
cacggctcagccctgctctatgcggccggatggtcacctgaaaagcaggcccagcacctgcccctcagctcatggggcattcagaatgggaccacaaacga

SEQ ID NO: 794924 - DNA, 100 bp, Homo sapiens
ttactttcccatcaggtttcctgatgtgagcaggcagtggagctactgctgtggttcaggcagccctatgcaaacccaggcaagaacgtgtagcaataaa

SEQ ID NO: 794925 - DNA, 98 bp, Homo sapiens
cagattacagtgggacaaagaattggatctggatcatttggaacagtctacaagggaaagtggcatgcaacacggaggtagtcacgtttcccggaaat

SEQ ID NO: 794926 - DNA, 100 bp, Homo sapiens
cggagagctcgccttggagagcccaggagcaggggagacatggtgtctcccagtctgctaaagccctaaggccatcaccatggacttccagcatcgcccc

SEQ ID NO: 794927 - DNA, 100 bp, Homo sapiens
atcacgccggagatccgcgcgctctacaacgtgctggccaaggtgaagcgcgagcgcgacgagtataagcggagatgttcctcctgctgatcaagagaag

SEQ ID NO: 794928 - DNA, 50 bp, Homo sapiens
ctccaagaccatccctggctgctgccattatttggaaagcaggtctataa

SEQ ID NO: 794929 - DNA, 96 bp, Homo sapiens
gcacccggtgctgcggctgttgccatgtccgcaccgggacgatcatcctggggacctggtacatgggcctgctatggtgtgctgcggttcatcatg

SEQ ID NO: 794930 - DNA, 74 bp, Homo sapiens
accagccgctccgactccagggctcctgtctacgaccagggtgtgttcgtgtagttcgaggtgaagggatgccg

SEQ ID NO: 794931 - DNA, 82 bp, Homo sapiens
tcgcgctactctctctttctggcctggaggctatccagctgtcacaccatgtctgaccggaaggcagtgatcaagaacgcag

SEQ ID NO: 794932 - DNA, 75 bp, Homo sapiens
atctttttaccttttgtgctgagccaactcgagccaggctgcaaaaaggttaccacattctcatctggagccagg

SEQ ID NO: 794933 - DNA, 111 bp, Homo sapiens
cggcgctgccccgtgggctcgctggggagccacggcggagacccccgccctcaactgagtaagagttccctatttcattgatttgaaaaaaccacaggatcaaggtttgaa

SEQ ID NO: 794934 - DNA, 97 bp, Homo sapiens
atgcacgtctctcttcagctcactgaccatctgcctacctcccgttaatggaaccgcgactcacaggcagtcatggatcaggtaatgcagtttgttg

SEQ ID NO: 794935 - DNA, 82 bp, Homo sapiens
cccgtccgcgtgacgctcctgcctgcgcgcggccaagccatgctcggccccagggactggtgattgcagctggaagtgccca

SEQ ID NO: 794936 - DNA, 95 bp, Homo sapiens
aaggaggaggcggcgaatcacttataaatggcgccgaagcaggacccgaagcctaaattccaggaggctccactcgcgccggacacagggagcag

SEQ ID NO: 794937 - DNA, 75 bp, Homo sapiens
ccaaaacgctggggccaagtcagcgaggcctacgtgagcctcctagagagcccggtgcacatcctgagcccccag

SEQ ID NO: 794938 - DNA, 100 bp, Homo sapiens
ccctggtgaagatgggggagctggccagcgagagccagggctccaaagaactcgatcccagcatggtgagtgcctacatgtacccagcaggggccactgg

SEQ ID NO: 794939 - DNA, 100 bp, Homo sapiens
tgacgttctcttctacccactgagaccagagttagtggaatccacatatctcctctaccagcggggatctgatgagcttctttcttctggcatcattaac

SEQ ID NO: 794940 - DNA, 101 bp, Homo sapiens
tcaagattaaaagagcgaataaagtttatcacgccgggacttaattcagtgcacaaatgagatgaatgtgaacatcccacagttggcagacagtttatttg

SEQ ID NO: 794941 - DNA, 95 bp, Homo sapiens
tcaactggggtcagaaggacctctaccgagatgtgatgttggagaactacaggaacatggtcttgctggggtcagcacatgtccatcatctatga

SEQ ID NO: 794942 - DNA, 49 bp, Homo sapiens
ttttgtcagtcctgttcgaaaccaagaatgctcaggcccactgggaatt

SEQ ID NO: 794943 - DNA, 50 bp, Homo sapiens
ctccctgcagggggccttccagcccaaggcctccggtgtggctgtctctg

SEQ ID NO: 794944 - DNA, 74 bp, Homo sapiens
ttgtcaaggtggcctaccaggaggccaggggtgtcgccatggatgaggagaacaatccccttgagacagaatat

SEQ ID NO: 794945 - DNA, 100 bp, Homo sapiens
gatgaacattgccaatgggcctcaccatcctaacccaccccccgagaatgtccagctggtgaataatgtccgtctgtctgcccaggctggagtggcacga

SEQ ID NO: 794946 - DNA, 100 bp, Homo sapiens
cagggaccatttacctgtggaactggaatgacaagatcatcatttctgatattgatgggacaataaccaagttcttgacttacaaatagccatcgaaaac

SEQ ID NO: 794947 - DNA, 74 bp, Homo sapiens
ggaaaagggaagtgaaaagagatctgttttcagattactctcgtggctttggtggccggtacggggtggagaag

SEQ ID NO: 794948 - DNA, 100 bp, Homo sapiens
acgagatggtgtctggagtgtacaagtccgcggagcagggggaggtgtggctttgaagcgtatgttgaatttcaatgtgcctcatattaaaaacagcaca

SEQ ID NO: 794949 - DNA, 104 bp, Homo sapiens
ggaaactggatgcagcaaggaaataggatttaaccgctctctgcctcccaggttttgggatttgagattgacgcggtgaactctgtccagttttcaaaccacac

SEQ ID NO: 794950 - DNA, 83 bp, Homo sapiens
cgacaagccgctggcagccgcggatctcaccgccgctcaggatgcgagccacccctctggctgctcctgcgggttccctgtcc

SEQ ID NO: 794951 - DNA, 100 bp, Homo sapiens
caggagtgtctgtccatctcagcgtggaggaggaagccaagaatctggtgagcgaagccatcgcagctggcatcttcaacgacctgggctccggaagcaa

SEQ ID NO: 794952 - DNA, 99 bp, Homo sapiens
tggatttaaaagacagtcctcgtcagcactgactttcagctatggaatcgaaaaagcttgtggtgaaggggggcaaaaaaaagaagcaagttctgaagt

SEQ ID NO: 794953 - DNA, 95 bp, Homo sapiens
gccggtagcggacggtccttgcattggcctccggcaggcgccccccgggggcgggaagctggatttaagaggggtgcagatcccggaatgcctga

SEQ ID NO: 794954 - DNA, 75 bp, Homo sapiens
ggtagctcagaaatgtggcttgtcttacaagctctgtgcctcagacaaaattctggagtttgatcgagattttcg

SEQ ID NO: 794955 - DNA, 90 bp, Homo sapiens
ctatcctcctggccgtcctcctcacggtcctcctggctgtgctcatatacacctgaaaacataccgtttcatttactgctccgacaccgg

SEQ ID NO: 794956 - DNA, 100 bp, Homo sapiens
acgatccagacggcagggagtgcatcaaaggtgtgaacacagggacagagcagaatgggctgatatagatccggtgccgcagaatgatggccccaatccc

SEQ ID NO: 794957 - DNA, 50 bp, Homo sapiens
cccacggctgtttcttgaaatctgggcttgaacatgacaagcagatttgg

SEQ ID NO: 794958 - DNA, 82 bp, Homo sapiens
tccggacaacggctgcggcgacaattttgttattcagcttctcaaggctggaaaagcgaaggaagtttcctacaatgcacta

SEQ ID NO: 794959 - DNA, 75 bp, Homo sapiens
tggggcaggctgcagcaaagtgttactcaccaaagaaactggcgatggaatatgagaggagccctctggaaagaa

SEQ ID NO: 794960 - DNA, 75 bp, Homo sapiens
gagctgaggagaacgactgggttcgcctgcccagcaaatgcgaagccaggagtaaatagtatggatgtagcagca

SEQ ID NO: 794961 - DNA, 75 bp, Homo sapiens
cagcgaccacgcaggcactttcccggtccccaggcaatgaatcgctccctggctaatgtgattcttggaggctat

SEQ ID NO: 794962 - DNA, 100 bp, Homo sapiens
cgaggcgttctgcgagagcgaattcgagcccataggcagcatgtcatccatggaagtgaacgtggacatgctggagcagatggacctgatggacatatcg

SEQ ID NO: 794963 - DNA, 75 bp, Homo sapiens
gcgggctggagcctgacgagctggcgggtacatgtcccagagcaagcacacggaggcccgggagctcatgtactc

SEQ ID NO: 794964 - DNA, 90 bp, Homo sapiens
catgaatggagcaaaatggcggatcatgtgcagtcctaccctggtccaagcctggaaagtgaagacttcaacattccaccaattactcct

SEQ ID NO: 794965 - DNA, 88 bp, Homo sapiens
cgaagacaatgttctccaaagataagccctttgaggtggacctttctcacgtgtatcttgcctatactgaggagagtctgcgtcagtc

SEQ ID NO: 794966 - DNA, 98 bp, Homo sapiens
aggactctgaccctgcccctgccttcagcaaggcccccggcagcgccggccactacgaactgccgtgcaatggccaatgtacatggtggactatgccg

SEQ ID NO: 794967 - DNA, 82 bp, Homo sapiens
tcgcctttgccgatccgccgcccgtccacacccgccgccagcgtctgttcctcacacaccccgcccaaggacgtgcctggca

SEQ ID NO: 794968 - DNA, 73 bp, Homo sapiens
acggccagatctgccctccagcacgtctgagaatggtggatgtggtggagaaagaagatgtgaatgaagccat

SEQ ID NO: 794969 - DNA, 80 bp, Homo sapiens
aataggtgtatcaagtaatggtgcaaagcctgaacttttttacctgtgtgcagaagtttatcagcaggcaagccccaagg

SEQ ID NO: 794970 - DNA, 75 bp, Homo sapiens
gacaagtggaggcgccgctctagcggccgggactctgaactatggcggtactccaaagattcaggtttactcacg

SEQ ID NO: 794971 - DNA, 89 bp, Homo sapiens
ggaagctggaccagaggccgggaggcgaggaaaccgtgtcgtgcattgaggcccatgagaaggacatggagctctcatttgccgtgcag

SEQ ID NO: 794972 - DNA, 75 bp, Homo sapiens
gcaggattgctgtgtgaaaaccgagctgctgggagaagaattcgacaccaaattttggaacttaaaaagaagatt

SEQ ID NO: 794973 - DNA, 74 bp, Homo sapiens
gagactgctgagcccgtccgtccgccgccaccacccactccggacacagactattgcccagaagaaaagatgtt

SEQ ID NO: 794974 - DNA, 100 bp, Homo sapiens
gtaatcccagcactttggaaggccaaggtatatgttgtcggtggctatgatgggcaaaacagacttagcagcgtagaatgttatgattccttttcaaatc

SEQ ID NO: 794975 - DNA, 75 bp, Homo sapiens
gctgccttgggctctgttgcttctctgggtcccagatagggccagatttgagtgtgtgaatttttgagtgaaacc

SEQ ID NO: 794976 - DNA, 83 bp, Homo sapiens
cgacgaggaagaggaggtttctgagggtcgacatgttaaaacgggtcagttggcagccatcaaagttatggatgtcactgagg

SEQ ID NO: 794977 - DNA, 80 bp, Homo sapiens
ctgaattatggcagcccagtcaaggtggacatcttcaataaggagctactgctaatccccatccacctggaggtgcattg

SEQ ID NO: 794978 - DNA, 75 bp, Homo sapiens
aaccacccacccttccgagacatgaagaaagtgctggatgcccaaagcctggcacagagtttctttaaccgcctt

SEQ ID NO: 794979 - DNA, 100 bp, Homo sapiens
tctcaaactttactttgcctcatttgaggagtgggaacaggcttcggcgaacacaaagagttgtctgctggttctcagcttgaagaagattctgcagtcc

SEQ ID NO: 794980 - DNA, 100 bp, Homo sapiens
acaaagcaaaaccagttaccactaatcttaagaagctgacaatggcaccatgcatctttgggactggagaactggctacaattttcagagagttcacgca

SEQ ID NO: 794981 - DNA, 100 bp, Homo sapiens
gagccctctgccggctgctcctgctgaccctcgcgcactattcctgatcagagaactccagttgcttcaacacacagtatcagtagtgcagccaccccag

SEQ ID NO: 794982 - DNA, 74 bp, Homo sapiens
gcaggacttccaaggagagcatgtcggaggctgatcgcgcccagaaggtggcccacaaactctttaacaacttg

SEQ ID NO: 794983 - DNA, 100 bp, Homo sapiens
tgggctcagcagttaaccctcctggaaggcaagaacacggatgaggagatagtggaatgctggcacaaaggacaacttggatttacactgggcaacgtgg

SEQ ID NO: 794984 - DNA, 90 bp, Homo sapiens
cttcttcgagtatttgtagaagggatcccttgacaagattgctgtggtaactgctgacgggaagcttgctttaaaccagattagccagat

SEQ ID NO: 794985 - DNA, 100 bp, Homo sapiens
attcgacgcctgcgcttggctgctttctactcgcagggaaaatttgttggcagattgtttgcagggttgttttgtggtgacgtgcacactgtgtgcattc

SEQ ID NO: 794986 - DNA, 90 bp, Homo sapiens
gtgaggagttgctaaatgctcaggaagaaggtagataatgactataatgcccttcgagaaagactcagcaccttgcctgataaattgtct

SEQ ID NO: 794987 - DNA, 88 bp, Homo sapiens
gcggatcaggatcggaagcctgcgtaactttctcccttgatccgggagtctttccactggcgttgggccggagcactagcctcacgga

SEQ ID NO: 794988 - DNA, 76 bp, Homo sapiens
ggccggtggcgcccgtgtcggagaccccgcgccggaccctgaggcagcgagtttattgttggccaaaaccaggctt

SEQ ID NO: 794989 - DNA, 90 bp, Homo sapiens
gctttggaaaagagaattctagtctactggcatctgtcccttcctgtgtggaagacctcagtcaccctgtggcagagcccagctcgagcc

SEQ ID NO: 794990 - DNA, 75 bp, Homo sapiens
gaagctgggattggagattccacccaaacttgctggtcactgggagaaaaagcttgtggtgaaggggggcaaaaa

SEQ ID NO: 794991 - DNA, 50 bp, Homo sapiens
ttcgacttgagcgaagttttatgcaaggggctttgttatgcacctaaagc

SEQ ID NO: 794992 - DNA, 95 bp, Homo sapiens
tagctcataaagactgcccagtcactgcactacagaaaaagactcaaggctatttaggtcttcgatgccaagaacatgatggctgcctgtgaccc

SEQ ID NO: 794993 - DNA, 100 bp, Homo sapiens
gcctctgagcgctccctgggccgctacaccgatgtggacacagcttcctcctagcactgggacatttcaagaagctcagagccggttgaatgaagctgct

SEQ ID NO: 794994 - DNA, 100 bp, Homo sapiens
ctaacccagactcacataagaggaaaggatcgccatgtgacacactggcatcaagcattcagcctgtatatggagcacagcatcctcctcttgacccacg

SEQ ID NO: 794995 - DNA, 50 bp, Homo sapiens
caccttaagaattctcaggaaaaatgtgttcagagcaacattgttttgtt

SEQ ID NO: 794996 - DNA, 104 bp, Homo sapiens
tctgtcttcggtggactccttcggcagtccacccaccgccgccgcctcccagaaactatgttccaacttcctgtcaacaatcttggcagtttaagaaaagcccg

SEQ ID NO: 794997 - DNA, 100 bp, Homo sapiens
agaccattcagatgggatctttccggatcaatccagatggcagccagtcagtggtggaggtgaggtcccagcttgaagagaaagaaaacaagaagttccc

SEQ ID NO: 794998 - DNA, 82 bp, Homo sapiens
aggaaggtctcacctgaggtgaaccttcgaccttggacttctcagcctccagaatgcccagacacatggccccaggccaagc

SEQ ID NO: 794999 - DNA, 75 bp, Homo sapiens
tgtgcggcgagacaattgcttatcgccaagcactatttgaatgacttggacagaatagctcaaccaaattacatc

SEQ ID NO: 795000 - DNA, 75 bp, Homo sapiens
cctggatccaggataacggaggctgggagtcttttagtcctgctatacagctgcaccttgtacatcaagctccat

SEQ ID NO: 795001 - DNA, 100 bp, Homo sapiens
gcctccccagccacatggaactaagaagcgctgcaagtacaaaattgaaaaaattgagaccataaagcctgaagaaccattgcaccccatagccaatggc

SEQ ID NO: 795002 - DNA, 90 bp, Homo sapiens
gtcctgtccaccatgccctcagactcagaaagcagcagctccctcagcagtgtggcactgccccccaggtgttgagtaccagctctccag

SEQ ID NO: 795003 - DNA, 75 bp, Homo sapiens
acagacatgagttcttatgctgaagcacttcgagagaaccggggtctttttctgtcgctcaggaaggggtgcagt

SEQ ID NO: 795004 - DNA, 83 bp, Homo sapiens
tcagactccagcagccaagatggtgaagcagatcgagagcaagtttaaggaagaaatctctaaacgttttaaatcacatactg

SEQ ID NO: 795005 - DNA, 88 bp, Homo sapiens
catggaggagaaggtccgcttcaattggttaccaaggaagaccccaaagcactggctgttgccttgaactgggacataaagaagacgg

SEQ ID NO: 795006 - DNA, 82 bp, Homo sapiens
gcgcggctgcgacggcccaggagcgcgtctcggcgggagcctcagacaatgcagatcttcgtgaagactctgactggtaaga

SEQ ID NO: 795007 - DNA, 100 bp, Homo sapiens
tcggagcttatggtgttgacggaccttactatactggcaattgctggagaagattttgcaattgttgcttctgatactcgattgagtgaagggttttcaa

SEQ ID NO: 795008 - DNA, 98 bp, Homo sapiens
cgctgctggagttccgcgacaccatcttcgacaacatcctcaagatcccaagcactgcaagtccagatgcaacgggagcctggctcaagggacgacaa

SEQ ID NO: 795009 - DNA, 75 bp, Homo sapiens
caaggtttactctgaatcccaatcctacaggagttcaaaacccacacatccgtgtggttttgccatgttctgttc

SEQ ID NO: 795010 - DNA, 100 bp, Homo sapiens
gtgcgattcaaggatggtgctttcctggcggggaccttcatctccaccgtaggcattgacttccgggtgactcgaaaagccctgtttcctggtgactctg

SEQ ID NO: 795011 - DNA, 100 bp, Homo sapiens
ggctcatcgtgatcccggcgacatactacctctggccccgagatcagaatgccgctgtggaaatacaaagaactctgaatcaacttggaacacctcaaga

SEQ ID NO: 795012 - DNA, 74 bp, Homo sapiens
cttaaccgctgacacaattaaacactgcagtgtaccaaatatgccccaacagcggcaagaccagcatcatcaga

SEQ ID NO: 795013 - DNA, 50 bp, Homo sapiens
cgggaatgtcgacgaggagctgagctccaggtcccttctccagccaccca

SEQ ID NO: 795014 - DNA, 75 bp, Homo sapiens
gcagaattcacaagatccaatcccttgtccttaaaagatttgaggcttaagcaacttcttccggggaagagtgcc

SEQ ID NO: 795015 - DNA, 76 bp, Homo sapiens
cccaggtgtaagcgcagaaagcaggcgaacccgcggcgcaataacgaccatgggggatgtgaagctggttgcctcg

SEQ ID NO: 795016 - DNA, 51 bp, Homo sapiens
gcctctgcccagaaggaacgtgccggccaaaaggaagctggatctggaggg

SEQ ID NO: 795017 - DNA, 83 bp, Homo sapiens
tgaaaatcaggatcgctacattaaggtatatttgcttacttaaactaccatgttcctcgaacgagacgagaaatcctggagac

SEQ ID NO: 795018 - DNA, 98 bp, Homo sapiens
atctgcccacccctcctgtaacccagcctgtttcacttcttgccaacaacatctgcttctacggcgagtgttcctactactgctccacggagcacgcc

SEQ ID NO: 795019 - DNA, 90 bp, Homo sapiens
cgcggatttttggcctcatactctgttatagataaacaagcctccaatatcgataatgttgtcctggatgaagatcgttctggggctcgc

SEQ ID NO: 795020 - DNA, 98 bp, Homo sapiens
ggagaggccaacagatgagggaagccatttttctgcaatggaattaaatggccaacttcggaaggagtatggggccaatgtgcttcctgcattccccc

SEQ ID NO: 795021 - DNA, 83 bp, Homo sapiens
ggctccccatactagtcgccggtttaactatagatcaacacatcatcttgcatctcatgggttctatgaatttttaaattggt

SEQ ID NO: 795022 - DNA, 90 bp, Homo sapiens
ctcaactctctacgctttgcctccaagcactgccctgggaagaactaggatgaggtattgacttgctgttgccacataacaaaccctgcc

SEQ ID NO: 795023 - DNA, 90 bp, Homo sapiens
aaacggttaaacccccagtgcataccctacaccctgcagaatcactattaccgcaacaatagacctcccagtgccaagtgtataagcgtg

SEQ ID NO: 795024 - DNA, 100 bp, Homo sapiens
cgtgaaaatccgcagcaggaagcttggggtattgttgcagcatctggcagtgagactgaggatgaggacagcatggacattcccttggacctttcttcat

SEQ ID NO: 795025 - DNA, 100 bp, Homo sapiens
aagaagctcatgaagacaaagagagagcacggcggctagaagcccttaggaaacaggaccctaataggagtattcataccagcagcagcagcagcagcag

SEQ ID NO: 795026 - DNA, 101 bp, Homo sapiens
agacttgtctcttatttagttctggggagcgcctcgtcgacatgagtgatgtggaggaaaacaacttcgagggcagagcacgtggactccctttaatccag

SEQ ID NO: 795027 - DNA, 74 bp, Homo sapiens
tctatgcacgcagatgctggagaagtccccttatgaccagatctgttacctaaagcaataaaaaatggccagag

SEQ ID NO: 795028 - DNA, 100 bp, Homo sapiens
tgttcattgagaggggtcctggtgtgttgtgctctccgaccccttgaaggactcttctcgaactcaggaatcctggaatgccttcctgaccaaactcagg

SEQ ID NO: 795029 - DNA, 75 bp, Homo sapiens
ggccccgccatgggctgctgcagctccgcctcctccgccgcgcagaatggagctggtttgtcaaaatccaaagga

SEQ ID NO: 795030 - DNA, 75 bp, Homo sapiens
tcgaagtggctgagaaatacctcgacatccccaagatgctggatgcagagggctgaactccagtgcacccagtta

SEQ ID NO: 795031 - DNA, 74 bp, Homo sapiens
agtttaacgacaagcacatcaccactctgcagattagagagaactcccctgcagtctctcctaccacaaacagc

SEQ ID NO: 795032 - DNA, 74 bp, Homo sapiens
cgagggctacgtggtggtggtgaagaatgctggggcagtgattggaaaaggaggcaagaatattaaggctctcc

SEQ ID NO: 795033 - DNA, 90 bp, Homo sapiens
ttattggccagtctgtggaagaagctatcaggcagaatccagagaccacatttgaagtatatgttgaagtggcctatcccaggacaggtg

SEQ ID NO: 795034 - DNA, 87 bp, Homo sapiens
caaaaggtgatctggacaaaggaacaggtatctcagtgatgagctactcctgggtcatgagaaggcccctgccttcagagactatgt

SEQ ID NO: 795035 - DNA, 82 bp, Homo sapiens
gttctcccggcagcagcccgacgcaaaccaaggatctggggatcttcgcactatcccaagataccgaaactggcaacaccca

SEQ ID NO: 795036 - DNA, 100 bp, Homo sapiens
cagcagagaacccagtcaagtgtgtccagacgtccaacctacagaactgatggatggtcacaataccactttgtagcctcgtcttcaaccatcgagaggg

SEQ ID NO: 795037 - DNA, 100 bp, Homo sapiens
cagcaaaatgatgatgacttactgaaggcccagatgatggttagcagtttttggcaatcacgtattttcaaagtgccgctcagtggaattggatctcaac

SEQ ID NO: 795038 - DNA, 100 bp, Homo sapiens
cccccaaagagcaactgaagattcatacgcagctggcagatattatcatagttgctgcagataaacctctcataatgaaggcccccgctgtgcttgcacc

SEQ ID NO: 795039 - DNA, 75 bp, Homo sapiens
gaagcatgctaagaacaacagtcaggccaagccttctgcctgtgatgtgcagagcagagcgggcggaggaccccg

SEQ ID NO: 795040 - DNA, 80 bp, Homo sapiens
ggaggaaatcttcaatccagatattgggtcatgatcagagttcgactcttgcccaacactctgttgaactgactttaccc

SEQ ID NO: 795041 - DNA, 83 bp, Homo sapiens
cccccgcagcccgtcacccacctcatctttgacatggacggacttcttctggggagtgcatccgccccaacccttttccccct

SEQ ID NO: 795042 - DNA, 82 bp, Homo sapiens
gattcagatgacaactgtacagatgtcactgggtgtccgcaatgttgccagtgtctgtctgcagattggctacccaactgtt

SEQ ID NO: 795043 - DNA, 75 bp, Homo sapiens
ggactggttgaccaactggtggaacccctgggaggtgttgcccatggcccccggggccccacaagttactactac

SEQ ID NO: 795044 - DNA, 90 bp, Homo sapiens
gattggacaagtatgctgcaagtgagaacatatttaacagctttggacatcagacagtgcaggagaagaatgtgatgcggcagaaggggc

SEQ ID NO: 795045 - DNA, 100 bp, Homo sapiens
acagcagcacccgagcaaaccccagcaagatgcggaggctgcctcggcggagcagaggaaccacacgctgatcatggtcagttcaccgggacctggaggc

SEQ ID NO: 795046 - DNA, 106 bp, Homo sapiens
cctgcttgtgagaaatccaattcagctttttgtgctgccagcaagaaatgatcagtagcaccagtgtttatgacctgtcatttactccatcctttatagtgatgct

SEQ ID NO: 795047 - DNA, 82 bp, Homo sapiens
gatctgcccgcttcccaggaaaggtccgaggaggaagaacgtgcaaaacgtgaggagctagagcgaatactggaagagaata

SEQ ID NO: 795048 - DNA, 75 bp, Homo sapiens
gactctatccaacctattatatgtggagctgatcagaataatgttcagcatcaaccccctggagaacctgaaggt

SEQ ID NO: 795049 - DNA, 83 bp, Homo sapiens
atgttacaagaaccagataggacaaggccaactggaattacatgaacgacagccttcgcaccgacgtcttcgtgcggttccag

SEQ ID NO: 795050 - DNA, 75 bp, Homo sapiens
cggcgacgtctcctcccgcctcaccacagggggatatgagactttctactcggaatatcctgagtgttgcgtgga

SEQ ID NO: 795051 - DNA, 83 bp, Homo sapiens
gatgatcctgccatgcaggcaggccctgagcacgctgctgtgtgagcagcagttcaaatctgaacatcaatgatgtactaggg

SEQ ID NO: 795052 - DNA, 100 bp, Homo sapiens
ctgaagggcgacggcccagtgcagggcatcatcaatttcgagcagaagctcatcctgccccacgtggacatccagctaaagtattttgacctcgggctcc

SEQ ID NO: 795053 - DNA, 75 bp, Homo sapiens
acatacatcagtctgttacacagagatcgcggattcaggtgtggctctatgagcaagtgaatatgcggatagaag

SEQ ID NO: 795054 - DNA, 100 bp, Homo sapiens
gtcactgagattgcttgtggacgcctgccctcaagtatgtgttgtatacattggttggctttgtgggttttgtaacccattatgtgctgcctcaagttag

SEQ ID NO: 795055 - DNA, 100 bp, Homo sapiens
tttgagacttcttgcctaaaagagacctacctccggatcaagaagaatgaatacagtattcccaagagcagcccgacggccatggaggctgaagagacga

SEQ ID NO: 795056 - DNA, 100 bp, Homo sapiens
gggaaacgtcctagtcaggaagaggacacacagagtattggtcctaaagtccagagacagagcactaattagcctgaagaaagttcgtggcaaagtctgg

SEQ ID NO: 795057 - DNA, 100 bp, Homo sapiens
cttctgccactgctgctccgtggagatcgtcccgcgcctgccgcttcatggcggctgaagagatgcattggcctgtccctatgaaggccattggtgccca

SEQ ID NO: 795058 - DNA, 100 bp, Homo sapiens
ccagtggctgagcaccgtctcccagtacgaccgggacaagtactggaaccgctttcgagacgactcagcccaaaaccatgtttgcccaagttgaatctga

SEQ ID NO: 795059 - DNA, 98 bp, Homo sapiens
tgacatctgcctgagagatctccaagaattacaggtagagttggctttgtgggacacagctgggcaggaagattatgatcgcctgaggcccctctcct

SEQ ID NO: 795060 - DNA, 97 bp, Homo sapiens
tgatcccatgaccacctccagagctaatcagaaacctctgtagaggagcaggatgcaaccgacaggctgtggccggacagctgctgcccagcacatg

SEQ ID NO: 795061 - DNA, 111 bp, Homo sapiens
ctgggttacaagcagcaagtgcgcggttggggccactgcgaggccgttttagacaatgcagatcttcgtgaagactctgactggtaagaccatcaccctcgaggttgagcc

SEQ ID NO: 795062 - DNA, 96 bp, Homo sapiens
cccgggcattgccgacaggatgcagaaggagatcaccgccctggcgcccagcaccatgaagatcaagcaactttcatcctttgaaacgtgtgctga

SEQ ID NO: 795063 - DNA, 100 bp, Homo sapiens
cagctaccgggcactccccaaaacctaccagcagcccaagtgcagtgggaggacagccatctgcaaggaggaggagatgttaaagtaacccatcttgcag

SEQ ID NO: 795064 - DNA, 83 bp, Homo sapiens
acagcgcgcacttcacccgcagttggtctcggcgcggaagatggccggcggcgtggacggccccatcgggatcccgttccccg

SEQ ID NO: 795065 - DNA, 82 bp, Homo sapiens
ggtggactccttcggcagtccacccaccgccgccgcctcccaggccagtactaaagtggaagtggacatggagaaagcagaa

SEQ ID NO: 795066 - DNA, 75 bp, Homo sapiens
gctgatctcgtatctcaggaacctcaggccctgcttgacagtgcttagcagtgtctgcaaaaacgaatcttttcc

SEQ ID NO: 795067 - DNA, 90 bp, Homo sapiens
cgaacccccaatgctgaccaaggaggagcctgttccagaactgctggaagctgaggattactacagcatcccatttcccacacccactac

SEQ ID NO: 795068 - DNA, 89 bp, Homo sapiens
gccacaaagtgaccaagaacgtgagcaagcccaggcacagccgacgccgcggggcttgggcactgtttaaaggaaagttccgagaaggc

SEQ ID NO: 795069 - DNA, 83 bp, Homo sapiens
gtgaatttccatgtcaacatagtccagtcaagtctctatttatgaggtggacaagcaagattgtcgcaaattttgcactactg

SEQ ID NO: 795070 - DNA, 100 bp, Homo sapiens
ctgcctccgagcgccgcgccttcgcgcacaagatcaacaggcctcccagaagttcctgccgaatcgtcttcgtcacccccggggtccgaggtagcctccc

SEQ ID NO: 795071 - DNA, 75 bp, Homo sapiens
gccctctccagccaggtacctgtgcttgtgagtgaggattctgacagtgatggcattgtggcccacttccctgcc

SEQ ID NO: 795072 - DNA, 74 bp, Homo sapiens
aatgactccgattcgtgaccctcagcgccggtgcatgtcgatcaactttcatcctttgaaacgtgtgctgaaaa

SEQ ID NO: 795073 - DNA, 85 bp, Homo sapiens
gctttgaatcagcagatcctgaaagccgtgcggatgaggaccggagcggaaaaccttctgaagtgaaaggtgtagcagtcactcg

SEQ ID NO: 795074 - DNA, 100 bp, Homo sapiens
atgggacacccaccatgtccctcgagagaccccccagggtgcctccgagagctgcctcacagagaccatcatcaaagaggggatgctgaccaaacagaac

SEQ ID NO: 795075 - DNA, 100 bp, Homo sapiens
gggttgcaaggagcgtgcgtgcgtctgatcatggaagggaagtggttgctgtgtatgttactggtgcttggaactgctattgttgaggctcatgatggac

SEQ ID NO: 795076 - DNA, 74 bp, Homo sapiens
gtggaccggcagaggacggtggagggccgctccgttagggatggcacctttcgccgggcacagcgtcgaagctt

SEQ ID NO: 795077 - DNA, 100 bp, Homo sapiens
aggccgacaagatacctctcgcatgtccacctcacagactgattcttgctattccaaatcctcttccacgttgacagcccttcagatatttcaacactcc

SEQ ID NO: 795078 - DNA, 89 bp, Homo sapiens
tcagctttctgagcagctaagactacagccccacaccagtgagaagcatcagcaccgtgaacttgtctgagaatagcagtgttgtcatc

SEQ ID NO: 795079 - DNA, 87 bp, Homo sapiens
tgacctggaccacggcgcagacgcgggcgagctgcggctcggacgccagcggacacgcgggcgagttggagtcattcgttgcccagt

SEQ ID NO: 795080 - DNA, 86 bp, Homo sapiens
tcggtggactccttcggcagtccacccaccgccgccgcctcccagagctagagccggtgcaggccacgcagaacaagacagggaag

SEQ ID NO: 795081 - DNA, 100 bp, Homo sapiens
cacagagcctatttacccagaagtagtccatatggccagaggcattgatgtgcagcaggtttctttagtcatcaactatgaccttcccaccaacagggaa

SEQ ID NO: 795082 - DNA, 75 bp, Homo sapiens
caggagaagagcgccaggcgccgcgggggccagctacagatgcatgcatattgtgaaaacccagatatagtgctg

SEQ ID NO: 795083 - DNA, 112 bp, Homo sapiens
cagaactaactgatgacgaacatgagaatgaatcgaaacatgaagaactggcaggccaggagacaagcttctcaagtctttacagccgagaagattccttgaagaatcaagc

SEQ ID NO: 795084 - DNA, 82 bp, Homo sapiens
gaagagttggatactcagcgtcgctggcagccgctgtacttggttttgggatttgagattgacgcggtgaactctgtccagt

SEQ ID NO: 795085 - DNA, 75 bp, Homo sapiens
gctggaatgttcggccgaggagattgcgggggttcggacaagtggacctccctagaaagaaaactgtttaacaaa

SEQ ID NO: 795086 - DNA, 75 bp, Homo sapiens
ggagcgcgccagccggggtcctcggatctggcccaggtcttcaaagcttcacctttctccaaaggcagatgtgaa

SEQ ID NO: 795087 - DNA, 100 bp, Homo sapiens
catgagcgacagcggcgagcagaactacggcgagcgggctttatgaaggcaaagaacagatggagtttgaagaatccatgagacggctctttgaatccat

SEQ ID NO: 795088 - DNA, 98 bp, Homo sapiens
attgatgataagctgaaaaagggagtcaaagggcttcttggacacttaatgattgttggcaagaaatgtgctgctgatctgggcctgaataagggtta

SEQ ID NO: 795089 - DNA, 82 bp, Homo sapiens
ctgagacccggacagtggcagtgaaacaggttggtgttcgaggaagagacattgttgttcttggtgtggagaagaagtcagt

SEQ ID NO: 795090 - DNA, 100 bp, Homo sapiens
gaagaatgaagaagtaatgacccattcggggctgtggaggacctgctgcctagaaggtttgcagtaagcattggctactggcatgacccttacatacagc

SEQ ID NO: 795091 - DNA, 75 bp, Homo sapiens
ggccagagggctcccgggctgggcagtctgctcctctgacaaacgaattgcctgtgaggaagagttctccgattc

SEQ ID NO: 795092 - DNA, 50 bp, Homo sapiens
tgcaacatggggcttgagaaaggggcttctatttcgaccgcgatgatgtg

SEQ ID NO: 795093 - DNA, 90 bp, Homo sapiens
gctgcattgcccttggtcctgggcctgcctgccccctggggaacacagtggacagtttgcggttgtgaagaaatgccgtgagaaaagcac

SEQ ID NO: 795094 - DNA, 75 bp, Homo sapiens
ctttgctggcttcagtgcagagtccttggctgggaggatcaatgatgatgtgatgtttactgggacagcagatgg

SEQ ID NO: 795095 - DNA, 74 bp, Homo sapiens
cgagactctagaagaaatgccctccgggtcacaggataagccctaccacttatgtcttggatgaagatgaacct

SEQ ID NO: 795096 - DNA, 100 bp, Homo sapiens
gttctgaagcccgagaggagccacaatggagacgccgccgctgcctcccgctgtaaacaggaacatcgataagtagtgtaaaaacttgcacaatgaaatc

SEQ ID NO: 795097 - DNA, 75 bp, Homo sapiens
acaatggtgggcttaattttagacacgaatgcagagtttgagtccagatcccaaagcccagtacacaagtatcta

SEQ ID NO: 795098 - DNA, 98 bp, Homo sapiens
agaggactaattttggcagttctaaatttgaatttgaggtaaatggtcttaaaatggttgatgagccaatggaagagggagaagcagattcttgtcat

SEQ ID NO: 795099 - DNA, 121 bp, Homo sapiens
cagagagttaacttctgtttacatggaactcagacatctgcaaatcatggtgttcttcaacggtgccaacgtccggcaggtggacgtgcccacgctgaccggagccttcggcatcctggcg

SEQ ID NO: 795100 - DNA, 74 bp, Homo sapiens
tggttccgcgttccctgcacaccctgtcatttcagccctgacaccaaggcaggaggctaggaggtctacaaata

SEQ ID NO: 795101 - DNA, 100 bp, Homo sapiens
caggatcctgggaagcagagtgtctggatggaacctgagctgggtctctgactcacttctgactttaggtgactctcctattccatctgtttcttcggga

SEQ ID NO: 795102 - DNA, 82 bp, Homo sapiens
tgccaggtgtccatccccgtgctgaggttattcagcttctcaaggctggaaaagcgaaggaagtttcctacaatgcactagc

SEQ ID NO: 795103 - DNA, 83 bp, Homo sapiens
tgaagaacgagcttcgtagcccacggagctgaggaatgggtaccacagaccatgtcatcgtcctggcgtccacgaaccgagct

SEQ ID NO: 795104 - DNA, 80 bp, Homo sapiens
aggacctccaggggaacaatgaggcctacgcagagctcatcgtccttgggtctgttcctggtttcccagatgcataaagg

SEQ ID NO: 795105 - DNA, 87 bp, Homo sapiens
catcttcatggaaacgtctgctaagactgcttccaatgtagaagaggcttgcttccggcgtcatggctcaaagggccttcccgaatc

SEQ ID NO: 795106 - DNA, 90 bp, Homo sapiens
gggcaacctagaaagccagttgatgccacttgctattggagttgtggtgatcaggaacctccctattcaatgataacattacacgaaatg

SEQ ID NO: 795107 - DNA, 83 bp, Homo sapiens
attagcgacatccgagtgcagaacctgcaagcattttgaaagcgaagcagaagccgtagaatcagcggcgagcctgttgaaag

SEQ ID NO: 795108 - DNA, 87 bp, Homo sapiens
cctcttcactcaggctctgcccagaactcaagataacatagatcatcagtagaaaacttcttgaagttgttcaagaaaaatttgaaa

SEQ ID NO: 795109 - DNA, 76 bp, Homo sapiens
ctggggaagaaggtccgcgttaaatgggtcatcctgtatatcctcctggtgggctatcctcccttctgggatgagg

SEQ ID NO: 795110 - DNA, 80 bp, Homo sapiens
cacccgagttcagcgccacgcaaggcgtctacggtgacgtgcagcgcgtgaagatcctgttcaataagaaggagaacgcc

SEQ ID NO: 795111 - DNA, 100 bp, Homo sapiens
tcttgatctcatgatccaccgcctcaccctcccaaagtgctgggattacaggcatgaggtaccggtggcctcgtggtttgacaacatgagtgacacagag

SEQ ID NO: 795112 - DNA, 75 bp, Homo sapiens
tgggattataggcgtgagccaccgtgcctggctgaagatatttccccccgagtccttcgcagacacagaggcagg

SEQ ID NO: 795113 - DNA, 100 bp, Homo sapiens
ccagatgctggacacactgtctctctaccagggcctgctctccaacttccctgacatcatccatctacaaaaaggcctgaaccccaccctcgcatcctgc

SEQ ID NO: 795114 - DNA, 82 bp, Homo sapiens
ctcccgcccacgtcccatttcgcccctcgcgtccggagtccccgtggccagacagaaccaagttgtattgttagacacactg

SEQ ID NO: 795115 - DNA, 100 bp, Homo sapiens
tttaattccttttcgaccttcaatccagttccaaggactccacggggaaggatatggagtaatagtactaaatcccaatgaaaactatattgaagtagaa

SEQ ID NO: 795116 - DNA, 75 bp, Homo sapiens
ttaacctatgtcttacaaaggcccaaatattcaggaaccaacactgggaatgtgcatattattgctgatttatat

SEQ ID NO: 795117 - DNA, 100 bp, Homo sapiens
gctcatcaaggagagcgaagtcaaggccctgtgcgctaaggccagctgcctcaagggctacgtcaaccacagcctgtccgtcttccacaccaaggacttc

SEQ ID NO: 795118 - DNA, 75 bp, Homo sapiens
ccctgctgaaagaccggcatgccctattctgtgggcttccgcgaagcataagatgcacatttttctgctctggag

SEQ ID NO: 795119 - DNA, 50 bp, Homo sapiens
ccttgcttctaggagataaaaaggtatgtgaggagcagcgctgtgaggag

SEQ ID NO: 795120 - DNA, 75 bp, Homo sapiens
gcaaagctcaccctcccgagttgaaaaagacttgatagacgacctgaagtcagaactgagtggcaacttcgagca

SEQ ID NO: 795121 - DNA, 100 bp, Homo sapiens
ctcccctggcagtgtgacggctgggcgacttgcgaggatgagagcgacgaagccaactgtccagatctacgaactgcgtgtgatggagaccaaacccgac

SEQ ID NO: 795122 - DNA, 75 bp, Homo sapiens
agctcccgtagggagccgtgggcgctcggtgcccgggccgggcagggaaagtttaaaggaagaggaaatgatcgc

SEQ ID NO: 795123 - DNA, 100 bp, Homo sapiens
caaggtggtggatatggtggaggtggaggatatgatggttacaatgaaggaggaaattttggcggtgctctggtagctgaagaacatctcacagtggacg

SEQ ID NO: 795124 - DNA, 80 bp, Homo sapiens
ccatcagagaatgtgtgtttctgcatagaaacagatttcttgtgtttcccattaaacactaccaggacaaaatcaggcct

SEQ ID NO: 795125 - DNA, 100 bp, Homo sapiens
acaataagagcagaggatggaacacttcagtgcattcaaggttttggagccctctcttaagtcagaactctgtcccaaaaatcttctgagtgtcatctca

SEQ ID NO: 795126 - DNA, 75 bp, Homo sapiens
taagccattaaacctgagtcaagttgaaggtctgattctctggcctttgtgtccctgggaagttactctgccaga

SEQ ID NO: 795127 - DNA, 100 bp, Homo sapiens
tgctcctggatgaatccaagttaacccttaccacccagcagcagggcatcaaggttgttgatcattatgaaaatcctagaaacgtggggtcccttgacaa

SEQ ID NO: 795128 - DNA, 75 bp, Homo sapiens
cctggtggaagacttgcagaaagaacctggaagacagaggctggaggaattgcattttgtgaaaaaagaacaaga

SEQ ID NO: 795129 - DNA, 75 bp, Homo sapiens
ctggagaacgcagtgctcttcgaagtggcctgggaggtggctaacaagggtggtgttcccactgatgaagagcag

SEQ ID NO: 795130 - DNA, 85 bp, Homo sapiens
tcctcacctatgcaaagaaagggaagctattgctgggattttgaggagggccacaacacacagtgatcttgttctaagagcaaca

SEQ ID NO: 795131 - DNA, 98 bp, Homo sapiens
acaaaaagcataggcggaccatgataatttccccagagcgtcttgatccttttgcagatgggtgtcgtagtcattcttcagcacaattcttaattgga

SEQ ID NO: 795132 - DNA, 98 bp, Homo sapiens
cgaggacacattcaccgtcacatccctgtagtgccaactgaagtgccgactggaccgcgaggttttgttcctggggacctccaggtgcatggattggt

SEQ ID NO: 795133 - DNA, 75 bp, Homo sapiens
gcaggaccgtggagaaggaggagaggcatggcggccttgaccagccagtggctttggacgtggaccggatggttc

SEQ ID NO: 795134 - DNA, 100 bp, Homo sapiens
tgccgagggtaaaaaccccggaagggcggacacctccacatcgccttttgccacctttccctttatttccggagcaaagtgtgggatgctgtctcaggag

SEQ ID NO: 795135 - DNA, 100 bp, Homo sapiens
catacgacgtctatctcagatttggaattttcatcagattttaccctgaaaatcacaaggacatccatgtgcacgattgatgatcttacagcagaactgg

SEQ ID NO: 795136 - DNA, 98 bp, Homo sapiens
ctatcagagtgaccctagtggaaattacgggggatggaaggccacatgcattggaaataatagcgctacctgcaatgcttcttttgccacccgagacc

SEQ ID NO: 795137 - DNA, 100 bp, Homo sapiens
cggagtgtgcgacggattgggagaggagaaatgtctgaagtaagacccctctccagagacatcttgatggagaccctcctgtatgagcagctcctggaac

SEQ ID NO: 795138 - DNA, 100 bp, Homo sapiens
cgggcgcatcgtcaagatggaggtggactacagcgccacggtggatcagcgcctacccgagtgtgcgaagctagccaagaaacgcctagctcaatctgtc

SEQ ID NO: 795139 - DNA, 100 bp, Homo sapiens
catcaggcaactggagagcaaagtgaggctgctggagggtgacaagctcctcgcacagctcggcaagatgtcggtgaaggagggcgcacagcgcaagtgg

SEQ ID NO: 795140 - DNA, 75 bp, Homo sapiens
ggccagttgggtaccgggaggggcgaaggcgggcggcagaggcgatcaggcaccgtctgcgtcctgctgtccttc

SEQ ID NO: 795141 - DNA, 83 bp, Homo sapiens
ctgagcctccaggccggggaggtggtggatgtcatcgagaagaacgagagcggataaggaagcctgtgtgggtaccaacaatc

SEQ ID NO: 795142 - DNA, 100 bp, Homo sapiens
ctaaggcactgatagcggacagtggacttaaaatacttgcttgtgatgacttggatgaagctgctagaatgttggaggacgagtaagtcgtgaattaaat

SEQ ID NO: 795143 - DNA, 73 bp, Homo sapiens
tcaagtgcagggagttcccgttacaatcactagtgttgcaggataaacatcacgatgctgctcatgaaatcat

SEQ ID NO: 795144 - DNA, 83 bp, Homo sapiens
tgctgggcttcgtccagatcgggaaggttggagagaggcgatttcctctcagaagagtggagggagcgaatcgccaacacgag

SEQ ID NO: 795145 - DNA, 74 bp, Homo sapiens
cctaccaggtggacggcacggacgacagaagcgactttggtgagactctggagatgctgaaggacgaggtgcgc

SEQ ID NO: 795146 - DNA, 116 bp, Homo sapiens
ctcgccatgccggcccggcggctgctgctgctgctgacgctgctgctgcccggcctcgggcttgagagtttttccagcagtaccagctccagccaggatcaccctctctactctgg

SEQ ID NO: 795147 - DNA, 74 bp, Homo sapiens
tgtaaataccacggacagtgctgtccggatagttcatcttccaacagcacaaacggcggcgtattgctctgaag

SEQ ID NO: 795148 - DNA, 130 bp, Homo sapiens
acagataaagaagacaatgctgaggacaaagtagatggcctccagaaacaaacgatgctgaagagtttctggcagaaggtttgcggaatgagaacctcagcgctgttgcaagggatcacagagaccatat

SEQ ID NO: 795149 - DNA, 80 bp, Homo sapiens
ggcgacttcctccccgcgccccctccccctcgccatgaaggattttttatcaagcagaaatgcatcgaacaacgagaatc

SEQ ID NO: 795150 - DNA, 100 bp, Homo sapiens
catatagctgccctcagctgcactgtggcaaggcttttgcttccaaatacaagctgtatagcttggagaacagccatctctggaagaagccatcagaata

SEQ ID NO: 795151 - DNA, 100 bp, Homo sapiens
aagacatcacaatcccattattcagagcgcgtatggagtggaaacgcttgtagggcttcaccagtacctggagtagaacagaaaaattattatgtctgtg

SEQ ID NO: 795152 - DNA, 75 bp, Homo sapiens
aagctgtggaaggctctggataaggaccagtacctgcccaggaaactggaaatggtgttcacactggccctgaat

SEQ ID NO: 795153 - DNA, 75 bp, Homo sapiens
atgaaggcgaacccactctcctggatccagaaagtgtgcttctataaagataacgaaggaggcccaacttcattc

SEQ ID NO: 795154 - DNA, 100 bp, Homo sapiens
tgtcacggtccctggatgaacgtttgtggaactggattgaattaaacaagacgtgcaaagcaagtggttcacgagaatctcattttcagcttctgccaga

SEQ ID NO: 795155 - DNA, 82 bp, Homo sapiens
aggctacagcatcatcggatcgcccaggcaaccaagaatcccttctacctccatgtaggaatggatattctgcagagtctgg

SEQ ID NO: 795156 - DNA, 51 bp, Homo sapiens
accaagacctgggaacaagtcaagttgcttcatgtgcgaaatggaaactgc

SEQ ID NO: 795157 - DNA, 100 bp, Homo sapiens
cagctaaggagtacttcaaggagaattcccaccactggagctgggctgtgcagtggctacagaagaagccagtctaatttacctcattcaaacagcaata

SEQ ID NO: 795158 - DNA, 105 bp, Homo sapiens
ggatattgcagttattgccgtgtgcagtataataacctggaacagatcgtcagtatttaaacagatcacatcatgcgtgagtacaagctagtggtccttggttca

SEQ ID NO: 795159 - DNA, 98 bp, Homo sapiens
tgactgcctgttcatgcagagagatgtgtacatatcccacgtgaggaaggagcacgggaaggcagggccagcatttctgcggggggtctctagtgaag

SEQ ID NO: 795160 - DNA, 78 bp, Homo sapiens
ccccgtcgtcctggtgctgcagcgtgaccatgaaagacaccaggttgacagcactggaaactgaagtaccagttgtcg

SEQ ID NO: 795161 - DNA, 100 bp, Homo sapiens
tcccatagctgtgagtggcgatcacgagaacaataagaaacttgaactggatcgatttatgctgtatgctcacgggcctgacctttgtagagaatcggac

SEQ ID NO: 795162 - DNA, 75 bp, Homo sapiens
cctcagtgcgaagaagctgcagccgcacctggccaaggcaaacggggattcagcgtccgatcctttggaacaggg

SEQ ID NO: 795163 - DNA, 82 bp, Homo sapiens
cctccttatgctgatatacatccaatgaggatctgctcactttagcactctggcaattaaacagaacccccttctggcagaa

SEQ ID NO: 795164 - DNA, 100 bp, Homo sapiens
tgtctaatggctagccttcctcaaaagtctgatgctagtcatctcggaaggcctcagaaaaagccttaaaggaatgtatcctgtcaggtataatgtcagt

SEQ ID NO: 795165 - DNA, 89 bp, Homo sapiens
tccggggaaagccgtggccccgagggcggatccgaggaaagaccacagcaagattctttcattcgtctcctcctagcctgggggaccag

SEQ ID NO: 795166 - DNA, 75 bp, Homo sapiens
aatttaagaaacatccacagcagcgactggcccaagttctttgaaaaggccatttccagcagtttaaaaggtttc

SEQ ID NO: 795167 - DNA, 100 bp, Homo sapiens
cccgtttccttcaagagttttcatggattctaatggaatcaggcagttttgtgtccatgtgaacaactgccctcgggaccaaggatcacgtcatgactcc

SEQ ID NO: 795168 - DNA, 74 bp, Homo sapiens
gaacaaccgcaggtcgaattgttcgtgaaggtttggataaatacatcagacattatattggttggtctacggga

SEQ ID NO: 795169 - DNA, 100 bp, Homo sapiens
gaccgagagcgtgaccgagagcgcgaatatcgtcatcgttagaagaatcggtcgaggtggacggtttggccgtaaaggtgtggctattaacatggtgaca

SEQ ID NO: 795170 - DNA, 100 bp, Homo sapiens
caaaagaaagtagaacggcaggcagagttaaaacggaaatttgaacagttgaaacaggagagaattagtcgatatcagataaatttccgctgtaagccgt

SEQ ID NO: 795171 - DNA, 100 bp, Homo sapiens
cacttggcgcctcggggaggggaccgcgcccgcctcatttgcgccttgcagcactgctggaccaggtgctggagaatctggtaaaagcaccattgtgaag

SEQ ID NO: 795172 - DNA, 76 bp, Homo sapiens
aagtttccatcaataaatcatgactgatcttgtagcttctttaaggaaaaacagtagtgctctgcatagtttactg

SEQ ID NO: 795173 - DNA, 97 bp, Homo sapiens
ctgtaactcttttaaagtatatgtatgacttttaaaagagagagcttgtgaaactgagggaatagataacagacgagtacctttggaaaggtcacgc

SEQ ID NO: 795174 - DNA, 83 bp, Homo sapiens
cgtcggggcgccctctccactgcgcgcggatttttagactctgaggagcagttggagctaatccacattatggaaatggaaac

SEQ ID NO: 795175 - DNA, 75 bp, Homo sapiens
tgtagagaggaccccggtacatctgaaagccgggaaatggaatgtttacccttgcggaagttgcatcacttaatg

SEQ ID NO: 795176 - DNA, 75 bp, Homo sapiens
atgagcgacgtggctattgtgaaggagggttggctgcacaaacgaggggaacgcccttttgcttgtgactggcag

SEQ ID NO: 795177 - DNA, 100 bp, Homo sapiens
cagacctgaagaatgtcaaatccaaaatcggatcaacagacaacatcaaataccagcctaaaggggggcaggcaccacctacctatgatgccgtggtaca

SEQ ID NO: 795178 - DNA, 90 bp, Homo sapiens
aagacgtcgctggtgctgcgctactgcgagaacaagtttaacgacaagcacatcaccactctgcaggaagagcaaccgaggtttcaatct

SEQ ID NO: 795179 - DNA, 82 bp, Homo sapiens
gcggagcccggcttccgacgtgcagcctggcagtgcagtggttgatgataattagaagcatgctttccactgaacttcccga

SEQ ID NO: 795180 - DNA, 100 bp, Homo sapiens
gactgtgggccatgagtgaccttcaaaggaaagccgggtatctgtggtctttaagatgtggcattattggagaccatgtttggtgtaaaagtgattataa

SEQ ID NO: 795181 - DNA, 100 bp, Homo sapiens
tgccgacgccgaggccttcaccgcctacctgttcctgttcccgacatccggacgtgccacttctgcctcgtagaagacccttctgtaggatgcatttcag

SEQ ID NO: 795182 - DNA, 51 bp, Homo sapiens
atggagactgttcaatcaccagggtggaatgcaagctttaggacttcacct

SEQ ID NO: 795183 - DNA, 90 bp, Homo sapiens
tatgaaatatgggagacgacagaccgtttgtgtgcaatgccccgggctgtggacagatgcagtggcagaacgtggagcacgttggtgacc

SEQ ID NO: 795184 - DNA, 100 bp, Homo sapiens
ggtgtgggtactgctgtctgtggtgtggctgtgggacccgtgagcaagcagcgacgccagcggcggagaaccgacgaaagacaccaatgggaatcccaat

SEQ ID NO: 795185 - DNA, 82 bp, Homo sapiens
aaggattggagcacagaggctcagaagcaagtccaggtcaaaatgcagatcttcgtgaaaacccttaccggcaagaccatca

SEQ ID NO: 795186 - DNA, 90 bp, Homo sapiens
ctcgcgggaagacttcgagtgggtctacaccgaccagccgcacgccgaccggcgccgggagatcctgggagtccccagagccaggcaggg

SEQ ID NO: 795187 - DNA, 98 bp, Homo sapiens
actaagcaccgttggtatcctcatggacgcactgctcagcacgcaggcatgtgaggaagctgggcttaaaggagactccagcaaatggagagacagac

SEQ ID NO: 795188 - DNA, 86 bp, Homo sapiens
gagccctgggcgcgggggcggcgtgtcaggtggttgcggagctgggacagagcagaatgggctgatatagatccggtgccgcagaa

SEQ ID NO: 795189 - DNA, 48 bp, Homo sapiens
tagaaatcctacaaaggaccttgctgaggctgaggtggcctccttgaa

SEQ ID NO: 795190 - DNA, 75 bp, Homo sapiens
aataaagccaagagagaccttggagtaattcgtcgacaggtgacttaagagattaaaattaatttggttgctgtt

SEQ ID NO: 795191 - DNA, 83 bp, Homo sapiens
ctggacgccacaaagacaccaggaggaattccaggctgaattccttgtgtggatatcagatccggatggaatctcgagcttgt

SEQ ID NO: 795192 - DNA, 80 bp, Homo sapiens
cctgccgtgtaaccctcacggcaacgggctgctctacgccggcttcaaccaggaccacgacaatgcagatcttcgtgaag

SEQ ID NO: 795193 - DNA, 109 bp, Homo sapiens
atgttctggctttctttgcagcaagcgatggcatagtaaatgaaaacttgatcaccggcgtaatcaacccagcgttggacaaatactttccgtcagactctggagtgag

SEQ ID NO: 795194 - DNA, 75 bp, Homo sapiens
accccgcggctgggcgttcatctaccacgctttcgtgccaactacacagacccccagagcaaactgcggttcagc

SEQ ID NO: 795195 - DNA, 100 bp, Homo sapiens
acaagccgctggcagccgcggatctcaccgccgctcaggactgattcttgctattccaaatcctcttccacgttgacagcccttcagatatttcaacact

SEQ ID NO: 795196 - DNA, 121 bp, Homo sapiens
gatccagatcgggatttacgtggagatcaagcgcagcgatgattgggaaaatgaggtacgttagtgttcgcgattttaaaggcaaagtgctaattgatattagagaatattggatggatcc

SEQ ID NO: 795197 - DNA, 50 bp, Homo sapiens
cgagcgcctcgacctcggtctgagtggagcccacagtgaccatctcccca

SEQ ID NO: 795198 - DNA, 74 bp, Homo sapiens
gcctagcggcgaggcgacccgcacagcatgctacaagtgaaaactgatgagaaactgaatgtgtctgatgagaa

SEQ ID NO: 795199 - DNA, 90 bp, Homo sapiens
tgcctctaacactcatcttcaaaagactggttttgattggaacttggtattcaagtgggattacatgacgcctgagcagagaaggtcccg

SEQ ID NO: 795200 - DNA, 98 bp, Homo sapiens
ttcggcggcggcagcgtccaccatcttcctcttgctgccagtggtagcgctcgtctggcggagctgggttgggcccgaaggcatcctgcagaacgggg

SEQ ID NO: 795201 - DNA, 117 bp, Homo sapiens
gaacaagcagaagcccttggtgttgaagtataccctggttatgcagctgctgagttgtgcgttattgcagaatgtggagaattgaaggaaggagatgacgggggaatattcccaaaa

SEQ ID NO: 795202 - DNA, 100 bp, Homo sapiens
ccagcgctcattgggaatttagttaagggttattttggagctgttggagcactccttgagctgttgaagatcccgtgatcattacctggggaggggttcc

SEQ ID NO: 795203 - DNA, 100 bp, Homo sapiens
cttcggaagcggcggcggcgcgatgaccacgctacgggcctttacctgcgacgacctgttccgcttcaacaacattctatgcagatggtagtatatgtct

SEQ ID NO: 795204 - DNA, 82 bp, Homo sapiens
ctaagccagaatcctgaccttgctgcacaggcttagaagacaatacgtcaggaaatatgaaggagaagctgaggaacgaaag

SEQ ID NO: 795205 - DNA, 75 bp, Homo sapiens
ccccgccgctgagccgtcgcggagccgcgcagccctcggagcacgaattcagaaggagctggcggacatcacttt

SEQ ID NO: 795206 - DNA, 96 bp, Homo sapiens
cgcgagcgtctgggcgggtggtagagatcctcaccatggagaaggaagtggcccagagccttctcaatgcgaaggagcaggtgcaccagggaggcg

SEQ ID NO: 795207 - DNA, 75 bp, Homo sapiens
gtgatgttggagaactacagaaacctggtctccctagatttggtgcttccagatgtgagttatcaggtggaatcc

SEQ ID NO: 795208 - DNA, 50 bp, Homo sapiens
aaggacatgaagactaccacatgatggacaaggagcatccaagatacctg

SEQ ID NO: 795209 - DNA, 100 bp, Homo sapiens
agaacacatcttcccagctttggttggaagacctattatcagatcaaccaccaaagtgggaaacattgaaatcaaggccatccgggatggtgtcattgag

SEQ ID NO: 795210 - DNA, 100 bp, Homo sapiens
cttggtctcactgacttcaagaatgaagccacggacccttgcggtggagctggccctgctacagcgctcctaccaggacctggcctcgcagatcaacctc

SEQ ID NO: 795211 - DNA, 75 bp, Homo sapiens
gggactcacagctgatgacctgctgctcgtgctgatctcagattccagcaagattatggaagagcatagctacat

SEQ ID NO: 795212 - DNA, 100 bp, Homo sapiens
gtcaaagcttttggacattcctgggaatgttcgcatcttaccacatacagttctttacatggctgattcagaaactttcattagtctggaagagtgtcgt

SEQ ID NO: 795213 - DNA, 74 bp, Homo sapiens
gagtggaccaccccatgaacctcgtgcctggctctctggctatgaaaatcctgtggtgtctcgaattaatatga

SEQ ID NO: 795214 - DNA, 75 bp, Homo sapiens
cggggtcatcctagggaaaacactatcctctgagatcccagatcatgaggtgcttgaggaatccaaagccctcgt

SEQ ID NO: 795215 - DNA, 72 bp, Homo sapiens
caagatggagactttgactttgtatgattatcgggaaatgctgcacaatgccactttctgtctggttcctcg

SEQ ID NO: 795216 - DNA, 75 bp, Homo sapiens
tgagcagcagctagccaggcaaagagcatggtagaatcaattaaacactgcattgtgttgctgcagattgccaaa

SEQ ID NO: 795217 - DNA, 83 bp, Homo sapiens
agcaccgcagccttgggcctcgcgccggctatggccgtgccctggggctgagccctcagcagcccctgtcaaagggaacagga

SEQ ID NO: 795218 - DNA, 101 bp, Homo sapiens
gaaggaagccaagacttaaagtttcctagatcccagcttgagttgatccctgaattttattatctccctgagatgtttgtcaacttcaataattataatct

SEQ ID NO: 795219 - DNA, 75 bp, Homo sapiens
ggatccaagccatgattcccaaggtcatcgacatcctgagggggaaggccacccggcctgcttccacctcccagc

SEQ ID NO: 795220 - DNA, 82 bp, Homo sapiens
ctggaatttagcgctcgcccagctagccgcaggtactccaaagattcaggtttactcacgtcatccagcagagaatggaaag

SEQ ID NO: 795221 - DNA, 82 bp, Homo sapiens
cagacgggccggcccagagctcccgggtcgtctttcgtgtggccgcgaggacatggatttgattgacatactttggaggcaa

SEQ ID NO: 795222 - DNA, 75 bp, Homo sapiens
tatgctggcgttccttctgctgctattggatcctttcctaatgagtcctcgaatgccaccttgctgaccaatgca

SEQ ID NO: 795223 - DNA, 75 bp, Homo sapiens
ctctccgccgcctggaccaaccacgtcttcctgggctgcaggaatgcttccggatcccaagaacactcacatcgt

SEQ ID NO: 795224 - DNA, 100 bp, Homo sapiens
cacgccaactcttcgttcgattattagctttagtgaaatgggctaataatgctggcaaagtggaaaaatgtgcggtggatgggaagagagtcccaaggga

SEQ ID NO: 795225 - DNA, 75 bp, Homo sapiens
gttggagctttgtctatcttcttccttaggaaaccaagtcgggcgctgctgtctgtgaattctttttgaaagctg

SEQ ID NO: 795226 - DNA, 51 bp, Homo sapiens
tacaggcacgcgccaccactcccaggggtagtaaaaagaatcattcctgca

SEQ ID NO: 795227 - DNA, 90 bp, Homo sapiens
cagaagaccaagtacctgcagatcctgacctctctgatgagatggatcgcgggctgacgcacgaggcacacaggaaggaggtggagcagg

SEQ ID NO: 795228 - DNA, 97 bp, Homo sapiens
gtggaaacgcttgtagggtttcaccaggatgtccttggtgaggattttgaaaatttgatcttcacaagagttgcctggatcatttgaaatttctggg

SEQ ID NO: 795229 - DNA, 74 bp, Homo sapiens
cctgttctcgggctgtttggcgggtgcgtctaatgctagtgttggcacctgttatgtgcattctctctggcatt

SEQ ID NO: 795230 - DNA, 100 bp, Homo sapiens
gcctgcgaccccagtcggtgctccggggaggtcacctgacgaggagtttgtgaatagcacaatggaagaagctggactttgtgggttaagagagaaagca

SEQ ID NO: 795231 - DNA, 90 bp, Homo sapiens
cctgaatctggactctaaactgttgcagatgaatacatgttttccctagaagagaataagaagtccaagggacgccgtcagcctttaagc

SEQ ID NO: 795232 - DNA, 80 bp, Homo sapiens
tggaggccggggaagagagatctctcgagattttgccaaggcgtgtgctcgcccactgatatcggtgtactccgaaaagg

SEQ ID NO: 795233 - DNA, 90 bp, Homo sapiens
gagcagcgtatattaatgaagagtgtccggacccggctgaggacacccatgaaccttcccaaatcttctcattcacaggttaaggctacc

SEQ ID NO: 795234 - DNA, 101 bp, Homo sapiens
gcggatctcatatcttcacttggcaaactcaacaagttggttgaatctggcgatgtggaacccatggatatggagggctgactatatacaccatgtttttt

SEQ ID NO: 795235 - DNA, 82 bp, Homo sapiens
tgagctgacagaggcagagctggttactgcggaggctgtgcggggcaaacttgaagataaatcttttgactccagctcttta

SEQ ID NO: 795236 - DNA, 97 bp, Homo sapiens
aaaggagagttattccagtttaggaggaagatgcaagcggtttgggaccttgaacaaggcaaatatggttttggttctggctccttggcagcaatgg

SEQ ID NO: 795237 - DNA, 75 bp, Homo sapiens
cctattccactggattgggaaagaccatggcaggctcatctggggacaggtgacccttacacacctggattccct

SEQ ID NO: 795238 - DNA, 74 bp, Homo sapiens
ttaaggctctgttccttagagatccaaaggtccctatcactgttcagtccatcgtcattcagtctctaaataaa

SEQ ID NO: 795239 - DNA, 75 bp, Homo sapiens
agagaagcagctgttgctattggaggagaactcccccactggaaaggattctgaaagaaatgaagtcagccctca

SEQ ID NO: 795240 - DNA, 97 bp, Homo sapiens
tttgttgtgtttgatgattctgagcctgttcagaaagtccttagcaacagggttttttgtgacatcgtaaacatgagccccacacagtgggacttcc

SEQ ID NO: 795241 - DNA, 75 bp, Homo sapiens
ccgccccggcctcggcccgccgggcccgcagtgtggttctggaggacacgtgccggcggcaggacttcaacccct

SEQ ID NO: 795242 - DNA, 100 bp, Homo sapiens
gagcggaagaatggcagtgctcaaactcaccgaccagaagttttcatgggctgagctgctgagttcagcctgggaactgaggccaacaagggagtctcct

SEQ ID NO: 795243 - DNA, 75 bp, Homo sapiens
cggggggacagcggagaggaagggccttggtgtaccttgttgtagtgtttgaaaacatctgaggctgcatccatc

SEQ ID NO: 795244 - DNA, 75 bp, Homo sapiens
ccgagcccggagcccggagcccgggcaagagctgggtcatcatcagatttgaaatatttaaagtggatacaaaac

SEQ ID NO: 795245 - DNA, 82 bp, Homo sapiens
ctgcgggtgcctttgaaaatcaacgacaacttgagcacaggtagctacagcaagctgggtagcaggcagatccaaaggatat

SEQ ID NO: 795246 - DNA, 89 bp, Homo sapiens
gatgaagcacctggtcaccatgaccttggactatgggatggaccagaatgtctacacaaggaagtacaggatttggcttttctagatgt

SEQ ID NO: 795247 - DNA, 83 bp, Homo sapiens
cgggaagtggacagactgggcgtcatgacccttgtggataagcacaaggagaacctagcagctatcatgattacatacccatc

SEQ ID NO: 795248 - DNA, 90 bp, Homo sapiens
gtctgggaccttaacagggagccatgttgctgatgattcctctgatcatgtcagtactttatgtctgggcccagctgaacagagacatga

SEQ ID NO: 795249 - DNA, 75 bp, Homo sapiens
ccgaccaggcctggctcgcgcctctcccaggacccgcctggctgcgagatatgcgcatattaaatttcctattga

SEQ ID NO: 795250 - DNA, 83 bp, Homo sapiens
cttcggactgcgcaacgctgcgctctgggctgacagaaaatgctgctcaaattccagtggctactccacaggtctctcctaac

SEQ ID NO: 795251 - DNA, 100 bp, Homo sapiens
gctctccctcgagaagctccagatggcgtcttccgtgggcaacgtggccgacagcacaggtgtcatggagaaactccagctgggcccagagattctgcag

SEQ ID NO: 795252 - DNA, 75 bp, Homo sapiens
ctaaactgcccttgaaatgaagctggacttggaggtattatagctgcaaatgtccttgtattctgtttatggaga

SEQ ID NO: 795253 - DNA, 88 bp, Homo sapiens
tttctgcccagatagtgtctgcagctctgtgccgaagcgagtgccacttgtctgcagggccgtaccgcggaaccctctttgccgacca

SEQ ID NO: 795254 - DNA, 83 bp, Homo sapiens
ctttgcagaaatgactacattaggctactgcagcactggggtgtcagttgttggtccgacccagaacgcttcagttctgctct

SEQ ID NO: 795255 - DNA, 50 bp, Homo sapiens
ggcaccggtccgtactccagcgagattcaagatggaaaaggtgatgtaac

SEQ ID NO: 795256 - DNA, 90 bp, Homo sapiens
agcccgtctcgtgggcgccgcagcctcccggggccctacggccgcccgccaccaggagaggagaggcagcagcatggcgagtgtcctgtc

SEQ ID NO: 795257 - DNA, 100 bp, Homo sapiens
gcgcgcccgcgccctccgcgcgacgccaggctctgacgcccgctctgcggcttcggtgtttgaacaggccacagtccaggagcgcttacattcaggagct

SEQ ID NO: 795258 - DNA, 100 bp, Homo sapiens
gctgggagagaggtacctctccttttccctctccctttccctaagatgctactatcattcacgatggccatgaggagaagatggaaaatggtcagatcac

SEQ ID NO: 795259 - DNA, 100 bp, Homo sapiens
tggcagatgttcaaatcacttgcaagatcccaaaatggctgggcgaaaacttgctctaaaaaccattgactgggtagcttttgcagagatcataccccag

SEQ ID NO: 795260 - DNA, 82 bp, Homo sapiens
tgctggcagcacttccctgagccactctccaggctgctccagtactcaagggaacgggctgttgtacagtggcctgattata

SEQ ID NO: 795261 - DNA, 100 bp, Homo sapiens
atcctgatattaagccatcaaatgtggaacctatggaaaagactctgttccagcctcagacaggtgcctatcagaccctggccaaagagtgtgtggccca

SEQ ID NO: 795262 - DNA, 85 bp, Homo sapiens
caaggtgctggtggagaaatgctttgtcactccaagagatggccctgggactgagaagtggatggcagctgtgacagcaggagag

SEQ ID NO: 795263 - DNA, 71 bp, Homo sapiens
cagcacagacagaatccctgctaccagtggaggcaatgcccagagctgtggcagccaccttgcagccgtga

SEQ ID NO: 795264 - DNA, 90 bp, Homo sapiens
ggagcgggagggcctggactgggacctcataccgagacatgggtgcccggcaccgcgcccgagcccactccattcagatcatgaaggtgg

SEQ ID NO: 795265 - DNA, 101 bp, Homo sapiens
aactgttagacaaagtgaacaatccagataaccacgcacattacactgaagcagatgacgatgactttgagactgtgaatgaaagctggaatgccttagca

SEQ ID NO: 795266 - DNA, 95 bp, Homo sapiens
ctccttggagcggagccttcagtccttagggacaccgagtgacacgcaggagcttcgggacagcctctggtaggtgagtgctgtcctcggctcac

SEQ ID NO: 795267 - DNA, 83 bp, Homo sapiens
ctgaaaggccagagcatcttcttcactgggagtgcagatctcaggaaacaggctcgacagctggaaaatgaacttgacctgaa

SEQ ID NO: 795268 - DNA, 100 bp, Homo sapiens
ccaagatgcagttttttgatgctgaggagctcctggtcgatgaagaggatgatgtttttggtgaagaacccttaggagaaatcttgagagtggacagcaa

SEQ ID NO: 795269 - DNA, 101 bp, Homo sapiens
gggctttatccctcttgtgatttacctgggagagaagatgactgaggaggaggtggagaccgttctggcaggacacgaggacagcaacggctgcatcaact

SEQ ID NO: 795270 - DNA, 75 bp, Homo sapiens
aggcagcggcaggctcaggtgcagccgctgtgccggtggtggtgtgcacattgagccccggtatagacagttccc

SEQ ID NO: 795271 - DNA, 75 bp, Homo sapiens
tcaattgaccgagaaatgctagaaaaattgactgtatcctatgatgaagcagtggccaacagtgttgcaaacagg

SEQ ID NO: 795272 - DNA, 73 bp, Homo sapiens
cgcccttggagtaccgttcgggttggctgatcaagatgacactgagtaacccttcagaactagatgaacttat

SEQ ID NO: 795273 - DNA, 98 bp, Homo sapiens
ggcaccagcagtaacaacagcgaggaagaagaggacgacgacgacgaggaagaggaggtttctgaggtctcctctgagcctccggcctccataagacc

SEQ ID NO: 795274 - DNA, 75 bp, Homo sapiens
aaagatatcaggtggctggttataagtcttttggaggacgaacaactggagatgtgttcagagcaacattgtttt

SEQ ID NO: 795275 - DNA, 101 bp, Homo sapiens
cgagtaatcgcctgctttgattcattgaaacttccctctgtgtgttgcagtcctgtggcattatgcatgccccctcccagtgaccccaggctttttatggc

SEQ ID NO: 795276 - DNA, 75 bp, Homo sapiens
tcaccggagtcaagaccgtgctcatctcccgactcaagcagggttcttgaagcttttgagattaacaatggcagg

SEQ ID NO: 795277 - DNA, 100 bp, Homo sapiens
gggagagaaaaaggagagcctctgagctcaacggaggattgtgcctgagaagaacccacagagggatatcagtatgaacaacattactcagttgccagaa

SEQ ID NO: 795278 - DNA, 83 bp, Homo sapiens
gccgagtgcagaagatctgggtgcccgtggaccacaggccctcgttgcccagatgtgatctgtgaaaatggttcgctattcac

SEQ ID NO: 795279 - DNA, 82 bp, Homo sapiens
ctgaagcaacccaattagcatctgaacaattgcaagcagaaaaatgccagctgtgggacaaggagtgcaggccgcacaacct

SEQ ID NO: 795280 - DNA, 75 bp, Homo sapiens
cagacctctacgagcaggagcagtacaggtcaagtaacctggtttggttatgaaagtcctcgtagcttctgggac

SEQ ID NO: 795281 - DNA, 113 bp, Homo sapiens
tctgcttcagtgtgaaaggccacgtgaagatgctgcggctggacctcttcaacgacctgattgcttgtgcgttccttgtgggagccgtggtctttgctgtgagaagtcggcga

SEQ ID NO: 795282 - DNA, 98 bp, Homo sapiens
attcagtgttggcccagaaactacaggctgaaaagcatgacgtaccaaacaggcacgagataagctttttcctgaaaccaagtacctctggtgacagt

SEQ ID NO: 795283 - DNA, 100 bp, Homo sapiens
cgaggacagagaagccaagaggaagaaggaggaggaagacatgcgtcgggatgtccaggaaatttttcgcatgaccccccacgagaagcaggtcatgatg

SEQ ID NO: 795284 - DNA, 83 bp, Homo sapiens
ccatcactaggagttttgctcgagagtcgttcttccctctttccaatagatgatggcttgcttgatgatggtcacagtgatca

SEQ ID NO: 795285 - DNA, 100 bp, Homo sapiens
ctctgctgcggcgcggggaccgctgtgctctcgccacccctttgctgtgaagttgcttgcgctctgtaagaaagaaatcaagaattcaaaagatatccag

SEQ ID NO: 795286 - DNA, 75 bp, Homo sapiens
cccgagggccgagggtttggaactcgcagagcttatgtccctgatgccaaaaatgcacctactctttcctctaac

SEQ ID NO: 795287 - DNA, 83 bp, Homo sapiens
caggaggagctgctggcgcccgcagatggttctgcggggagtgtctccagccctgcctgcaggtgccatccccgctgtgccca

SEQ ID NO: 795288 - DNA, 87 bp, Homo sapiens
catggtggacaagaaactggtggtggttttcggaggcacaggaagttagaagactccgtgaagaatgtcttcaagaagaaagtagat

SEQ ID NO: 795289 - DNA, 97 bp, Homo sapiens
gtttaatgacatgtttaataagttactgggtaacattgaggaaacctagccctgtctattcatttggtttacggagaactgtggaagacaggaatgt

SEQ ID NO: 795290 - DNA, 82 bp, Homo sapiens
tggctctgctgctgccgccggcgaaggaggaggcgttgccgggctgctgagcttcgtgcttatctgaaatctaaaggagctg

SEQ ID NO: 795291 - DNA, 75 bp, Homo sapiens
ctgagcgatctgctagaaaaacttaaatgggcgaaagatcacgatgaagagattctacttgacacacctggcatt

SEQ ID NO: 795292 - DNA, 51 bp, Homo sapiens
ccttcatcatctagtcatgctggccactgtagtctgcagatcaaagctctg

SEQ ID NO: 795293 - DNA, 98 bp, Homo sapiens
tttagtaaggatgggaccttgtttgcctggggcaatggagaaaagtcgcatcctgagtctcagctggcatccctctggtacccacattgcagctggtt

SEQ ID NO: 795294 - DNA, 82 bp, Homo sapiens
cttggttaacttgggagaaagtttcatctgtggatggagtattgtggaagtatgcgagacttaagagctcaagtgactagtg

SEQ ID NO: 795295 - DNA, 100 bp, Homo sapiens
ctcgacctctggttctacttcacactgcagaactgggttctggactttgggcgtcccattgccatgtccacagacaaacgaatttaaaggagcaaccgag

SEQ ID NO: 795296 - DNA, 75 bp, Homo sapiens
tggaaagcaagcttcttggtacattcacaaatacgtacaggggttggtgtgtgctggattggctgatatggccag

SEQ ID NO: 795297 - DNA, 100 bp, Homo sapiens
cgtagcgtcggtgctggaagacgaggccacagacacttctgatagtgaagaatttcagaaactgtggaggagtgtcactgtagattccatggacgaggag

SEQ ID NO: 795298 - DNA, 100 bp, Homo sapiens
cgactggctgttgaccctgttcaggcctcggtgaagttatgtcacgcatctgatgaagcgaattcagagaggcccagtaagaggtatctccatcaagctg

SEQ ID NO: 795299 - DNA, 100 bp, Homo sapiens
agaacccgggagtaggagactcagaatcgaatctcttctccctccccttcttggtgatctgtgaaaatggttcgctattcacttgacccggagaacccca

SEQ ID NO: 795300 - DNA, 74 bp, Homo sapiens
cgaagttggaagtgtctcttagcagcgcgcggagaagaacggggagccaggtggtgggcacatcaaagaggtca

SEQ ID NO: 795301 - DNA, 82 bp, Homo sapiens
cacgaaggggacagcgcagccggcccagagctcgggtctccggggaccgaggaatactcccccagttgcaagaggcgcagga

SEQ ID NO: 795302 - DNA, 87 bp, Homo sapiens
tgtactggactgcatcaggccgcgtctcctcagggctgagtcatcactagagagtgggaagggcagcagcagcagagaatccaaacc

SEQ ID NO: 795303 - DNA, 82 bp, Homo sapiens
gttcagaattcttctctacatgatattcaacatgcccctaagctctcagctttgaaacaaaatgtactcaagactgatcttc

SEQ ID NO: 795304 - DNA, 80 bp, Homo sapiens
ctgtttggggagacgtccgccaagttggaggacgagtaagtcgtgaattaaattatactcgccagaagattggagaagag

SEQ ID NO: 795305 - DNA, 95 bp, Homo sapiens
gcaggggtgcagtgtgtctggtcttatgagttctccaaggagaggcacatcatggacaggacccccgagaaactgaagaaggagctggaggagga

SEQ ID NO: 795306 - DNA, 82 bp, Homo sapiens
ggagttctacgtgtcccccgaggatctggaggcacagctgcagtctgacgagagggggaggagattggacaggctggactcc

SEQ ID NO: 795307 - DNA, 83 bp, Homo sapiens
tggacattcagacttcagaatggtccctccttgtggtccatttctgggcaccatgggctccacagtgtgcacagatgaacgaa

SEQ ID NO: 795308 - DNA, 97 bp, Homo sapiens
ctggcgagcgccaccgcatggagtttccctacgtataccctggtggttcaagctgctgaccttcaaggtgaggggttaagcacaacagcaacagctg

SEQ ID NO: 795309 - DNA, 122 bp, Homo sapiens
tgaaaagaagatatttttcaacctgaacttgcagtagctagtggagaggcaggtcgctacccacaggagaacaagggaacctacatcccagtgcctatagtctcagagttacaaagtggaaa

SEQ ID NO: 795310 - DNA, 100 bp, Homo sapiens
gctcatctatctggacctctctggctgcacccaggtgaagcccaacactcctgtcttaatgtgctctgtgcctggttatgatgccagtggacatgtcgag

SEQ ID NO: 795311 - DNA, 75 bp, Homo sapiens
gcacataccatatgctggagagacattaaagttaggtgatttcaaatcggagaagtccaacggggagctaagtga

SEQ ID NO: 795312 - DNA, 51 bp, Homo sapiens
agagtctaaatcccatcccgccaactgcatagccacccatgaatccaatgg

SEQ ID NO: 795313 - DNA, 83 bp, Homo sapiens
ctctccagcagctgggattacagctggtggagctgtctaaggctcaagatatagaagcaggagatggcaccacatcagtagtc

SEQ ID NO: 795314 - DNA, 100 bp, Homo sapiens
cctcgctctgagctgcgcctggacctggttctgccttctggacaatctttccgtcccgcatggtccagaatgagatcccctacttcatctggaccactcg

SEQ ID NO: 795315 - DNA, 75 bp, Homo sapiens
cgctggcagccgcggatctcaccgccgctcagggttatggaaacaaaggacatgctttacatcgtcactgaattt

SEQ ID NO: 795316 - DNA, 99 bp, Homo sapiens
gtatctttaagaaattttatcttttgaaacacgttctgattaaccaaggcacttttccagccattaactccaggctctcgagaatttgaagatgttgta

SEQ ID NO: 795317 - DNA, 82 bp, Homo sapiens
cagctgcagccgcctgaccacggcgactggacttacgaggagcagtttaagcagatcatgatgctgccgccaccgccgccac

SEQ ID NO: 795318 - DNA, 148 bp, Homo sapiens
ggaggtgtcactggccccggcctttgccccaatcttgtgtgggcactgaagggggactacaggttcgagagctccggtagattgcaaatgacctgctttctttctgttcccgggcgtttggacccctgtcttggaccgctgtcggata

SEQ ID NO: 795319 - DNA, 100 bp, Homo sapiens
ctggaggaagcagtcccgcaggaaggaagaggagttgtacgcatgtcagagaggttgcaggctgttttcaatttgtcagtttgtggatgatggaattgac

SEQ ID NO: 795320 - DNA, 90 bp, Homo sapiens
acaccgagggggaggacattttcaccggcgccgcggtggtcatggcgggtgaaaaagttgagaagccagatactaaagagaagaaacccg

SEQ ID NO: 795321 - DNA, 75 bp, Homo sapiens
ttcgcagtctggaaagctttaggagttcacagtggcttccgttacaagatgaggtctgtgtatgctcacttcccc

SEQ ID NO: 795322 - DNA, 75 bp, Homo sapiens
ctggggcctctggtcaagcaaagagcaatgtgcaggttctatctgtgagaaatatggcttagaggagtgtacgtg

SEQ ID NO: 795323 - DNA, 87 bp, Homo sapiens
ccaagaaggcggagaaggactccaaggcggagcaggccaaagtgaagaaggaatatgaaaacgggggccactgccttggctcaacag

SEQ ID NO: 795324 - DNA, 83 bp, Homo sapiens
accagatcttccaggacgagacgggcaagaaccgttacagaatgtctgaaggggacagtgtgggagaatccgtccatgggaaa

SEQ ID NO: 795325 - DNA, 50 bp, Homo sapiens
gtcgccctcaaggccatgatcaaaacctcagcccacccttcaagccccag

SEQ ID NO: 795326 - DNA, 98 bp, Homo sapiens
catcacctcagctaaccagaccgaagaagagaattggacggccgatggtggcctctcctaaccagagtgacaaatggcctacagctgtgagagcaaat

SEQ ID NO: 795327 - DNA, 98 bp, Homo sapiens
ggagaggtttggaattgatgatcaagatttccagccagagactgctgctactttgaaacgtacgatagaggccctgatggacagaggagcaatagtga

SEQ ID NO: 795328 - DNA, 100 bp, Homo sapiens
gctcctccaagtctacatccccgattactcggtgcgagccctttcggatctgcagtttgttaagggtgaagttgaacaaattgctatgatgaaaccaaaa

SEQ ID NO: 795329 - DNA, 100 bp, Homo sapiens
gggaaagggcagcagcagccaggtgtggcagtgacagggaggagaataaaggcagccccgttgatgactgaaaatgacaaagcatccacctaacagacga

SEQ ID NO: 795330 - DNA, 83 bp, Homo sapiens
acgggactttgcagaaatgtgtgcagactacatggcatctaccatagggatataacgtcgaggtcaagcacattaaaatcatg

SEQ ID NO: 795331 - DNA, 75 bp, Homo sapiens
ccatgaagtatgtggagctttacctcgtggctgattatttagagaatccacattcatctcaatggaaggatcctg

SEQ ID NO: 795332 - DNA, 100 bp, Homo sapiens
cggcagcaacctgctgacagagaggatccacctccgaaacccctcggcggcgttcttctgtgtggcccgcctgcagcactgctgaagctgtacttcaaaa

SEQ ID NO: 795333 - DNA, 100 bp, Homo sapiens
acagacagagaagaaaagtacaatcaagctaaggagaaactgcagcgagctgcaattgcccagaaaaagatatgaatgccacaatacgaaggattgacca

SEQ ID NO: 795334 - DNA, 97 bp, Homo sapiens
tccgaactgggactcatggactgcttgtgaagcaggaagacagtggaggttctgtacgaggacgagccactgaaggaatactacaccctcatggaca

SEQ ID NO: 795335 - DNA, 75 bp, Homo sapiens
gccagtggctgaatttaacacggagaccaccccagctacgaacagattcaggtatagcctgtcgtacatcccata

SEQ ID NO: 795336 - DNA, 74 bp, Homo sapiens
gggccgctctgggatcccggccaccagcaattgtccggtgttactgcggaaatgcaaaacttagtccatcggcg

SEQ ID NO: 795337 - DNA, 80 bp, Homo sapiens
tggtggcgggcccgggctgcggcgtgtgcgcgcccgccagctgctccggagatacggctttcaaggatatgctgtattca

SEQ ID NO: 795338 - DNA, 75 bp, Homo sapiens
cttaacgccagtctttgaagggcttgccttcaaggttaatgcgagatgatacaatatacgaggatgaagatgtaa

SEQ ID NO: 795339 - DNA, 98 bp, Homo sapiens
cgatattgatattgaagcaatgcttgaggctccttacaagaaggtgaaatgacaatggatgctctgttggctcgattgaaacttctgaatccagatga

SEQ ID NO: 795340 - DNA, 88 bp, Homo sapiens
ccacccccatcaagatcgccctgcgctgattccacctgctcctacgaagcccgactttgatggtcctcgagagaagatgcagaaactg

SEQ ID NO: 795341 - DNA, 50 bp, Homo sapiens
ccacttctcagcacaatacaatgctcttcacagatggaatcacaaataaa

SEQ ID NO: 795342 - DNA, 75 bp, Homo sapiens
gaaagtgctcctgcggctgtatggagcgattttgcagatggttacaggaggttccagtggcatcgggaagtgcat

SEQ ID NO: 795343 - DNA, 74 bp, Homo sapiens
tggactgatctccatgtcctgttgtggggcttttacagcctttgggtggagaaagtggagaaagtagagtgacg

SEQ ID NO: 795344 - DNA, 51 bp, Homo sapiens
tggtcccagagtcatcatgaaggcacccgacaggaggatcctttattcgtc

SEQ ID NO: 795345 - DNA, 75 bp, Homo sapiens
tcaatttaagcctgatctaacccctagaaacagatacgtaggtaacctttccagagatgtgacagaagtccttat

SEQ ID NO: 795346 - DNA, 80 bp, Homo sapiens
aattcttcgttctgtgcggcgacctcatccacgccatgccagccatggcaatgacaggctcaacaccttgctcatccatg

SEQ ID NO: 795347 - DNA, 51 bp, Homo sapiens
cgacaacttttctcctgatttgaggccgcccatgccaacttccgttcccat

SEQ ID NO: 795348 - DNA, 101 bp, Homo sapiens
aagagggtctggaggagccttctcaagaacagaggtactccaaagattcaggtttactcacgtcatccagcagagaatggaaagtcaaatttcctgaattg

SEQ ID NO: 795349 - DNA, 75 bp, Homo sapiens
aagccttcgtctcccagattgcagaatcgaattctctgggttgatgagaacaatttgacagctcatgtagaggct

SEQ ID NO: 795350 - DNA, 83 bp, Homo sapiens
gcctgccctctccgctggccacctgctgccgcccgcgccatgttacagaatgtctgaaggggacagtgtgggagaatccgtcc

SEQ ID NO: 795351 - DNA, 51 bp, Homo sapiens
ccaacacagatgtccaagctgccaaatatggtttggagtgcctttttcgat

SEQ ID NO: 795352 - DNA, 74 bp, Homo sapiens
gctgggcagagcttcctggccatctgtccagcaggccttggccagcatgagtctcaacacccagcccatcctca

SEQ ID NO: 795353 - DNA, 100 bp, Homo sapiens
tgcaggggcctcaattaatgtatctgcccgacggccatggaggctgaagagacgatggaatgccttcaggagttccctgaacatcataaaatgatcctcg

SEQ ID NO: 795354 - DNA, 75 bp, Homo sapiens
caagcccaggcacagccgacgccgcgggattgcagccaaaattggaggcgatgctgccacgacagtgaataacag

SEQ ID NO: 795355 - DNA, 83 bp, Homo sapiens
ttgcagtggctggactggtgggtgctgtcaaccaccaccaagtcctgctgttctttatgtggcccggccagataagatttcag

SEQ ID NO: 795356 - DNA, 98 bp, Homo sapiens
ggtgacactgcaaatgaaattggacagactaccaaaaggaagcgtggctacattaaaaataagctggtttttaagaaaggcaagaaaatatctaagaa

SEQ ID NO: 795357 - DNA, 95 bp, Homo sapiens
cgagactggagcagagccgctgggcgccggagccgaggcgagcgccgcgcgcaccactgggacagacgtttgcttcagcctgcccaggtgtgtga

SEQ ID NO: 795358 - DNA, 90 bp, Homo sapiens
cgaaggtaccacaaccccgattgctttcgtgaagtactatactggcaattgctggagaagattttgcaattgttgcttctgatactcgat

SEQ ID NO: 795359 - DNA, 50 bp, Homo sapiens
cccggccgaggtggcggcggctcctcagatgccatggacaatattaccag

SEQ ID NO: 795360 - DNA, 75 bp, Homo sapiens
gagagcaatggacatcttttcagcagaacatccagtcatggataaaaatgagctggttcagaaggccaaactggc

SEQ ID NO: 795361 - DNA, 100 bp, Homo sapiens
ttcgtctcttacgtctgcggaagtgcagctgcctcagttcttagcgcaggaagccagttgagggaagttctccatgaatgtacgtcacaatgatgatgac

SEQ ID NO: 795362 - DNA, 100 bp, Homo sapiens
aactctgattatagaacataaattcatccattcctgtgctaagaaaggcagctgtgagagagatgctcaatatgccccaggctatgacaaagtcaaggac

SEQ ID NO: 795363 - DNA, 50 bp, Homo sapiens
cgcagagcaaacatctttcaaaggccaagctataacatcagaaatggtga

SEQ ID NO: 795364 - DNA, 100 bp, Homo sapiens
gctaatgaagtatacaagtataattttcctcacacacagttacttgccaagacgattgaagatatggctttagttgcccctgaagctccttcagaacaag

SEQ ID NO: 795365 - DNA, 83 bp, Homo sapiens
cggggccgggcgacctgggcaccagcaggacccgaggccaggagccaggggcccagaaggccccccggacagaccacccagcc

SEQ ID NO: 795366 - DNA, 83 bp, Homo sapiens
ggaagacagggcgacctggaagtccaactacttccttaagatcatcgagcttactccacgggaacagcctctagataatctga

SEQ ID NO: 795367 - DNA, 75 bp, Homo sapiens
caccgacaagatcaccacggacgagatgatcaaacgcctgaaggtgctggtctgaggttggtgaccaacatgtgg

SEQ ID NO: 795368 - DNA, 95 bp, Homo sapiens
gcagggggacggggaccagcagctgtcgccgccgctctcagacatatgtagagtgtgtcggtcagaaggaacacctgagaaaccgctttatcatc

SEQ ID NO: 795369 - DNA, 51 bp, Homo sapiens
tctggaaccgggctcagtcctgtccaacaatgtccctgggccagctgcagt

SEQ ID NO: 795370 - DNA, 83 bp, Homo sapiens
gcagccgatccagcctgcggagcctgtggggcaggctctgtgtgctccgggatggagcaggtgtgcagagggtgagaacccag

SEQ ID NO: 795371 - DNA, 136 bp, Homo sapiens
ccccaacacacggtccacagctcatcatgatggacttggagctgccgccgccgggactcccgtcccagcaggcaagaagttatgaaatggaatggatggggatataatgattctaaattcatcttcaataagaagg

SEQ ID NO: 795372 - DNA, 82 bp, Homo sapiens
gggaacccttgccgctgctgtcctgcgaccccaagcagctgcatcttcctcccgtgaggctggccgagctccacgctgatct

SEQ ID NO: 795373 - DNA, 97 bp, Homo sapiens
gcccggcggtcgcgcctcaaccggctgtacggaatccaagttgatgtagaacattctcatgttcgatttctgggaaacctggtattgaacctgtggg

SEQ ID NO: 795374 - DNA, 74 bp, Homo sapiens
cagaacccaagaagattccgataagaaacacggttgcctgtgatttgcttcggaggattattcgtatcttgaat

SEQ ID NO: 795375 - DNA, 98 bp, Homo sapiens
cggcggccgtaaggtgcatgggtagaggttcttgggtgtctctggggagtccctgggccagaccttcctccagactccagcccacctcttcggagcag

SEQ ID NO: 795376 - DNA, 82 bp, Homo sapiens
tcttgtggcggtgggagaccatgcaagcaagcagatggttaaatttgctgccaagattttcagtcaatgcatcatcggagcg

SEQ ID NO: 795377 - DNA, 90 bp, Homo sapiens
gtcgcaagcagcttcattgacttcctgcccctaaaatggattgtagaaggcatgaaacaaaaaatgtggagtattgaaaatattgccttc

SEQ ID NO: 795378 - DNA, 113 bp, Homo sapiens
cactgaagaagtagagtatttcaaccataaagacatcttaattgggcacgaaagagacctgcctagagctggaacgttacctccagagcgagccctgctatgtttcagcctca

SEQ ID NO: 795379 - DNA, 75 bp, Homo sapiens
gcgcctgggctgccggcacttcgcggcagttgtatcacggactgattcaccgagcccaaccgtactcaactcaca

SEQ ID NO: 795380 - DNA, 98 bp, Homo sapiens
ttcatgaagccggggaccctgtacgtgtacatcatttacggcatgtacttctgcatgaacatctccagccagggtcacggtctagatcacattctcga

SEQ ID NO: 795381 - DNA, 75 bp, Homo sapiens
cggatcatgtctggtggctccgcggattataacaggtgcatatgtactccaggtcaaggccacagatgcagatga

SEQ ID NO: 795382 - DNA, 51 bp, Homo sapiens
aagagagggacctggtgaaccgactgaagatttattactgtagtcggacac

SEQ ID NO: 795383 - DNA, 100 bp, Homo sapiens
ccagactatctaccggaggtacagcaagttctttgacctgcaggcattgaacctggccacatcccaggtaccgtgaacatccccttcacagacttcctga

SEQ ID NO: 795384 - DNA, 98 bp, Homo sapiens
tgaagccctacgagattcacaccgtcttcggtctcctggggtcggcgccgagtgggaggatggcggaaacaatgcagatcttcgtgaagactctgact

SEQ ID NO: 795385 - DNA, 87 bp, Homo sapiens
ggtggaaccagaaccattatttggtgggccagccaagtctcgggatggtgaacgtactgtctattgcaacgtacacaagcatgaacc

SEQ ID NO: 795386 - DNA, 100 bp, Homo sapiens
ctttccccgcaagatggacggtttcgccggcagtctcgagacaaagcatggaggacacaagaatgggaggaaaggcggactctcaggaacttcattcttc

SEQ ID NO: 795387 - DNA, 74 bp, Homo sapiens
ggccggcctgcagcacccgccaccgtcgccggccgcccgcacgtccgtccggttagctttatacgtctacgaat

SEQ ID NO: 795388 - DNA, 51 bp, Homo sapiens
cttcagggtttccaccgttcgttcaagattttaccaaatgttgcaagaact

SEQ ID NO: 795389 - DNA, 100 bp, Homo sapiens
ccttgaggcaacattggatattattgagctggaagagtggtggctgaatgttgcctatctggatgttcgtataccatcacaattgaatgtcaactttgcg

SEQ ID NO: 795390 - DNA, 75 bp, Homo sapiens
gtatgagtatcctgaatactttttggatgttcctgacttggacaataacaagattaaagtcgttgcattgaaaat

SEQ ID NO: 795391 - DNA, 88 bp, Homo sapiens
agtaaccctggagacttcacactttccgttagcaacagccaactcagtttataaatccagaaacacctggctatgttggatttgcaaa

SEQ ID NO: 795392 - DNA, 80 bp, Homo sapiens
cacctggagaagggatggaaatacttcaacaagattcgacacctcttagaggctgcaatcccagagagagttgaagagat

SEQ ID NO: 795393 - DNA, 88 bp, Homo sapiens
tgtattaaacaccgtgctgaggcggcttcctatgctatctctcttccgaggttctcacagagttcagaacaacacagctaaactggtg

SEQ ID NO: 795394 - DNA, 50 bp, Homo sapiens
caggacttacggcagtgggggctgacagaagaagcgcacgctgaaggggt

SEQ ID NO: 795395 - DNA, 96 bp, Homo sapiens
cttagatgactctgtggtgggtccctcagcccttctgagctctgtgctgaacaaggtacagagtgaagacagtgtcctcctgtttgttattgcatg

SEQ ID NO: 795396 - DNA, 100 bp, Homo sapiens
gaaagatggcggcggcgtctgtctctgcggcttctggttctcacttgtcgggttggtcttgctgtaagagaagaacaactgatttttctgatttcttaag

SEQ ID NO: 795397 - DNA, 100 bp, Homo sapiens
cgacagggacgtcctcattgtcctcgttgatacaccaaaatcggcaagctatcttaaaccagtttgcagcaactgctcctgttggcatcaatatgagatc

SEQ ID NO: 795398 - DNA, 50 bp, Homo sapiens
gagctagctggatcctctaggcagggccctcatctttgtgtcccatggag

SEQ ID NO: 795399 - DNA, 78 bp, Homo sapiens
gtggagacctcacgtctggtgcaggcaccagtgcaggctgagagcagtttcagtgaagaagaggaagaaaaacttcaa

SEQ ID NO: 795400 - DNA, 82 bp, Homo sapiens
gacgaggagggagaagacgaggatgatgcggaaattaaccccaaggttcaaggtgtttgcagactatgaagcctacatgcag

SEQ ID NO: 795401 - DNA, 75 bp, Homo sapiens
gacttggccgagcggatcctaataaggggaaaatgggaatgaaagctactggttgattttaaagtgcctgggcct

SEQ ID NO: 795402 - DNA, 82 bp, Homo sapiens
gaccaaggtggagatcaaacgcctccccatggccacccatggaccagtcggcattcacttcctcccttctgcggcccataaa

SEQ ID NO: 795403 - DNA, 75 bp, Homo sapiens
taatctctttagtaaattaacttcaaaactcacaaggagagcctttgtggaattctcacgaaatccaacagagag

SEQ ID NO: 795404 - DNA, 109 bp, Homo sapiens
agaaaacggcgagagtgggcgagaacgtccactgcgggccggcgaaagctggtgtcgtgaaaactacccctaaaagccaaaatgggaaaggaaaagactcatatcaaca

SEQ ID NO: 795405 - DNA, 87 bp, Homo sapiens
tcagaggagcagctagagaagaaagctgtccagggtgctgagctgtcagaagcaggcaatttactaaaagatgtaactgaactgcag

SEQ ID NO: 795406 - DNA, 98 bp, Homo sapiens
agcatccggggacagctgagctggcatcagaagacctacgccttcagtacttggaccatgagactgtttcagccactttcatcgacagcagtggacag

SEQ ID NO: 795407 - DNA, 100 bp, Homo sapiens
ggccaggggagagcttcatcaccccctacctcctggggcccgacaagaacttcacgcgggagcaggtgtccccaggtgtcattgccaacccctttgcggc

SEQ ID NO: 795408 - DNA, 75 bp, Homo sapiens
ttacaaaccctgaatttataactgagtaccaggatcatctatgaccggaaattcctgatggagtgtcggaactca

SEQ ID NO: 795409 - DNA, 90 bp, Homo sapiens
gatgctcctgcctcccagagaggggagccggcgaggatcaaaatcttcgaaggaggtgtcgctcttgcaatatattatcacatcaaaaac

SEQ ID NO: 795410 - DNA, 99 bp, Homo sapiens
taggagtgacttaaattctcccagtcggtggaggtataaataactacatgtaaaattaatgcagttcccggatgtggccttcacctgtgaccatgaggc

SEQ ID NO: 795411 - DNA, 83 bp, Homo sapiens
gggagatcccaggcggtgacagagtggagccatggctagaggagtacgaccccagcaaagcgacctttgtgaaggtggtgcca

SEQ ID NO: 795412 - DNA, 82 bp, Homo sapiens
tcagcaagaacgggaacaaaactctgtgtaaacaggaacatcgataagtagtgtaaaaacttgcacaatgaaatccgaagcc

SEQ ID NO: 795413 - DNA, 99 bp, Homo sapiens
gcaaaatttgccgaacgagggttcgcagaaaggtggggcagagctcatctgacgtggcatcaggaagtgactttggtccagagacttctccagtcctgc

SEQ ID NO: 795414 - DNA, 75 bp, Homo sapiens
agatgaacagggttcctggggcatcgacgatctccatatttcattgcaaggatgtacagttacccagcacgtgta

SEQ ID NO: 795415 - DNA, 100 bp, Homo sapiens
acgacttttaactttcattgtcttttccgcccgcttcgatcgcctcgcgccggctgctctttccggatgaaggatttgggggcagagcacttggcaggtc

SEQ ID NO: 795416 - DNA, 82 bp, Homo sapiens
ggggatccctgctcttcgctctcttcctggctgcgtccctaggttattcacagtcctatggtggttatgagaatcaaaagca

SEQ ID NO: 795417 - DNA, 83 bp, Homo sapiens
tggaaattgcgctggaccgtcgccttgctcctcgccgcggcggggactgcagactgtgccctgtccacggtgcctcctgcatg

SEQ ID NO: 795418 - DNA, 100 bp, Homo sapiens
cctacactttgaccatgctgtccggatggcaaacggggattcagcgtccgatcctttggaacagggactcacgtgaagcttccaggaccagctcccgaca

SEQ ID NO: 795419 - DNA, 75 bp, Homo sapiens
ccgtgggcatctcctacattagcgtctacgaccaccaaggatctttcgaagatggtttggctgccttggagattt

SEQ ID NO: 795420 - DNA, 75 bp, Homo sapiens
gagcgctgcactaacgcaggatccggctgccgaaggtcctcgccagcaagagtgagccatggagctacgtgtggg

SEQ ID NO: 795421 - DNA, 115 bp, Homo sapiens
tcccggcagcagcccgacgcaaaccaaggatctggggatcttcgcactatcccaagttctttatagctccaagctctacagattcttcaaatatattgagaatagggatgttgca

SEQ ID NO: 795422 - DNA, 88 bp, Homo sapiens
ctgatcagacgaactacgaacccctggacgggagagtctgccggcggagaatataaggggtcgctgtgatgaaattcaagaacccccc

SEQ ID NO: 795423 - DNA, 82 bp, Homo sapiens
aaggagcaggattaccaaagggctctgccagaccatgaggatgagatcccggagacagtgcgaaccgtacagctcattaaag

SEQ ID NO: 795424 - DNA, 90 bp, Homo sapiens
caccgggggcgccctggaggagtccctgaagatctatgctcctctgtacttggtcttatatccagatggccaggctcagatgattcaccc

SEQ ID NO: 795425 - DNA, 107 bp, Homo sapiens
ccgcaaccattgacgccatgtcgggttattcgagtgaccgagaccgcggccgggaccgagggctcttgtcaggatggtgaagctgttcatcggaaacctgccccggg

SEQ ID NO: 795426 - DNA, 80 bp, Homo sapiens
gcgcccgctggcgtcctcttgttctcttccagataaacattgacgatcttgaggatgaccctgtggtgaacggggagagg

SEQ ID NO: 795427 - DNA, 75 bp, Homo sapiens
agcgagcgagaaggcacggagtcgccgcggagcgcagctgaccatactccctggagccttctcccgaggtgcgcg

SEQ ID NO: 795428 - DNA, 82 bp, Homo sapiens
gcgactactacgaggcgcaccagatgtaccggaccctgttcttcagcttccccgggcgctgcctggacaggcctgcctgcgt

SEQ ID NO: 795429 - DNA, 83 bp, Homo sapiens
gctgcccacgattcgcttctgaggtcaaaatgcagatcttcgtgaaaacccttaccggcaagaccatcacccttgaggtggag

SEQ ID NO: 795430 - DNA, 100 bp, Homo sapiens
tgcacttcaatttggaactgtctaaggccatggttttcatggatgtaaggatgcccaagcatcagtgtcattcaaggacgtgactatagaattcacccag

SEQ ID NO: 795431 - DNA, 94 bp, Homo sapiens
ttgaactcgagttggaagaggcgagtccggtctcaaaatggagccgccgccatgatcctgctggaggtgaacaaccgcatcatcgaggagacgc

SEQ ID NO: 795432 - DNA, 98 bp, Homo sapiens
gaagaagcagttctacaaggcgagccaggccagcggaagcctgccacctcctatgtgcggaccaccatcaacaagaatgctcgcgccacgctcagcag

SEQ ID NO: 795433 - DNA, 100 bp, Homo sapiens
cgtggctgacaccgtagtgttttcaaaactggatatggccaggatgctatagcattgtcagtaatggaatcactagttccccttgtacagagtttgaaaa

SEQ ID NO: 795434 - DNA, 100 bp, Homo sapiens
gggggacctgccggcacgcgactccccccgggcccaaaattgtaaaccatggctgtgtggatacaagctcagcagctccaaggagaagcccttcatcaga

SEQ ID NO: 795435 - DNA, 83 bp, Homo sapiens
aacaagttatagttgtggcttctggaaagggtggagtcggaaaatctactacagcagatgccttcaattaagttgcagagttc

SEQ ID NO: 795436 - DNA, 83 bp, Homo sapiens
aagttggtgacaccccaaaagaccgagctctcttcaacggagcccaaaagtgtgccaatttgctaattgacagcactggtcag

SEQ ID NO: 795437 - DNA, 90 bp, Homo sapiens
ctgagcatcgttgggggttcagacacgctgctggtacaagaatattccacagatgtcctttgatgatacagaaagggagccagatcagac

SEQ ID NO: 795438 - DNA, 99 bp, Homo sapiens
gcgccccccagctctaatctgcgcgctgacaggagcatgatctgtgcccaggccagggctgccaaggtgaccttgggaaaggtgttgaaagtgatcgtc

SEQ ID NO: 795439 - DNA, 80 bp, Homo sapiens
ggccctcgtgtcaccgctctgaagtcaaggagattgtctaaagccccaggaaaaatggtggaaaattcaccgtcgccatt

SEQ ID NO: 795440 - DNA, 75 bp, Homo sapiens
gcagcgtcgtcgcttcactgtggctcatacatggcagctctgtggccatggatatgttccagaaggtagagaaga

SEQ ID NO: 795441 - DNA, 100 bp, Homo sapiens
ccagaagatatcaccgaggctctgagagccactgacaagactttaagcaagagacggagagttaacatctaatctggaggaagaccctggaaggagccag

SEQ ID NO: 795442 - DNA, 75 bp, Homo sapiens
caaaagttgtgcattggcccgatcaagcctgacttctagccaaggtgagcgagtgctgtgctttcatgggcctct

SEQ ID NO: 795443 - DNA, 74 bp, Homo sapiens
tgaactcctcttttctttaacacagcgtgtgctcgcccactgatatcggtgtactccgaaaagggggagtcatc

SEQ ID NO: 795444 - DNA, 90 bp, Homo sapiens
caactattcgcggagctggaatgactggcaacccaggagttccccttggccattctcaggggctgggaatgctactgtgcttaccctacc

SEQ ID NO: 795445 - DNA, 76 bp, Homo sapiens
gatgtgatgttggagaactacagaaacctcgtctccctgggtaatctttggtaaatctagctgttcagaattttca

SEQ ID NO: 795446 - DNA, 82 bp, Homo sapiens
cagacatgtcatcaactcagctggtgagaagccctaccactgcaactgggacggctgcggctggaagtttgcgcgctcagac

SEQ ID NO: 795447 - DNA, 74 bp, Homo sapiens
ccgcggcccggaaggaatccgggcagcctccgcggagcaaattgtggctactaatttgccccctgaagatcaag

SEQ ID NO: 795448 - DNA, 82 bp, Homo sapiens
agcagactggcatctgtaaggtgcggccgccgccggatgatgaggatgataatgcaggcacggagatgaagatactgcgggg

SEQ ID NO: 795449 - DNA, 97 bp, Homo sapiens
ggtggaggtctgcgttgctcttgcttttcctcgctggggtgtacggaaaagaagcccatctgtgtccagagatcagaatagaagatacgaccaaagg

SEQ ID NO: 795450 - DNA, 50 bp, Homo sapiens
gaaagggacccacctcctgaagacatccacgacagcgatggcagttccag

SEQ ID NO: 795451 - DNA, 80 bp, Homo sapiens
cgcggacccagtggatgtaaaccccttccaggttcagcagactgtacaggatctttttggcagagccccaagtaaagctg

SEQ ID NO: 795452 - DNA, 72 bp, Homo sapiens
ccataagggataacctttaccgccatgctgtgccttggtatttgaagtataccatacaactgttttgaaaat

SEQ ID NO: 795453 - DNA, 100 bp, Homo sapiens
cggcatctgggtgctggcggagctgcggatccagccgggcaaccccagctgcacgactactctgccctcccagggcccactgcagagacccagccggctg

SEQ ID NO: 795454 - DNA, 50 bp, Homo sapiens
ggcaagaagaacatcccgcggatcacgaaccttggccattctgatgttta

SEQ ID NO: 795455 - DNA, 76 bp, Homo sapiens
agtgcagctgcctcagttcttagcgcagattagtgatgatgaaccaggttatgaccttgatttattttgcatacct

SEQ ID NO: 795456 - DNA, 100 bp, Homo sapiens
attaaattcttgaagaagcttcagaagcttttgctagccagaaacaacattggagttttgccggaggaaaagaaagctgcattggaaaaggagcgagaag

SEQ ID NO: 795457 - DNA, 100 bp, Homo sapiens
gataagtatgagcctgcagctgtttcagaacaaggcaaactcagctttcaccagacccaggtgtcccagcgcctggccaccgacctgctatccctcatgc

SEQ ID NO: 795458 - DNA, 100 bp, Homo sapiens
gttccggcagagaattctggctccctgtaagagatcctgaactttcaactgtttgccggaagtctggtacattaatattatatccaggggctgaagctgc

SEQ ID NO: 795459 - DNA, 137 bp, Homo sapiens
tttcttgattccacacaaagacaaaatgtggtaaaacccattgataatccaccgcatcctggatcaactagggatcgtgatctggaactcgctgctcgaattggacaagctctcttaaagcggaaccatgtcttatc

SEQ ID NO: 795460 - DNA, 105 bp, Homo sapiens
tgaggtggctcctttcacccttcacgtggtctgccaggtatggaaactgttccttggtttccaaagaagatttctgacctggaccattgtgccaacagagttctg

SEQ ID NO: 795461 - DNA, 83 bp, Homo sapiens
cgacaagccgctggcagccgcggatctcaccgccgctcaggttcaaaaggtgatgacctatcaacagccattctcaaacagaa

SEQ ID NO: 795462 - DNA, 100 bp, Homo sapiens
gtagggaccaccagctttgacgacctcattgcgtgtgtgtcggcgcccgacagtctgcaatgataccaagaagaagcaggggatgaagaagaggagcaac

SEQ ID NO: 795463 - DNA, 80 bp, Homo sapiens
attcagtgggtccagaaggaagttataagtgttggggctggagagtatgccttcaagacagtgtgttggctttctggaaa

SEQ ID NO: 795464 - DNA, 100 bp, Homo sapiens
ctgcgaaggccgggacccggttccccggcccacagtgggggtgtgcaaacccgagagaactggtaccatgcggagaccatcaagaatgtgcgcacagcca

SEQ ID NO: 795465 - DNA, 85 bp, Homo sapiens
tggccggcagcgtcccggacgaggagagaattttctctacatgtgcacccatttaaaggactcggcttcaagggaagcagcttcc

SEQ ID NO: 795466 - DNA, 80 bp, Homo sapiens
agccggagctgggcgcggattcgccgaggcaccgaggcactcagaggagggacctcaggatggaaaccagcagcctgcac

SEQ ID NO: 795467 - DNA, 121 bp, Homo sapiens
cgagatgtctcgctccgtggccttagctgtgctcgcgctactctctctttctggcctggaggctatccagcgtaactaggatttctacctcaaccgcgagacctatgcaaggacggtgtgg

SEQ ID NO: 795468 - DNA, 100 bp, Homo sapiens
tacgaaataatgggcaatcaggggacaatgtagtaaagttttccaagagataacttcaccaagatgtccagtgataggcaaaggtccgatgatgagagcc

SEQ ID NO: 795469 - DNA, 99 bp, Homo sapiens
ttcacatccatgtgaaaggccagccaccagttcaggagcacttgggagtgatctaggaaaaaatggtaatccagtggcagagaatttccgaatggaaga

SEQ ID NO: 795470 - DNA, 106 bp, Homo sapiens
ctgaatccagtaccaaaaacgtcaacaacagttttacgccctggtacctgacagtgtaaagaaggagctcctacaaagaataagaacattccttgctcagcatgcc

SEQ ID NO: 795471 - DNA, 94 bp, Homo sapiens
cgcttgcctacccgccggcccgcgggtctacttcctcaaaggaacaagatcactcaaggtgaaggataatctactaataccagcactttgaatg

SEQ ID NO: 795472 - DNA, 51 bp, Homo sapiens
gtgatacaggtggttcagtcaggtaccatctacctgttcatgtaattggac

SEQ ID NO: 795473 - DNA, 82 bp, Homo sapiens
ccctgaaaagctaccccccaaagtcctggagctgtgagacaaggtctcaccatgttgcccagaatggacccgaactcctgag

SEQ ID NO: 795474 - DNA, 100 bp, Homo sapiens
cttgctctcaatttttccgtattctactacgaaattcttaattcccctgaccgtgcctgcagatgatttgtcattaattcggaagaacagaatggctctc

SEQ ID NO: 795475 - DNA, 96 bp, Homo sapiens
taggcagcagcagccgcggagcagtagccgccgtgggagggagccatgaagcattacgaggccgctttgtagttcagaatgtttctgcacagaaag

SEQ ID NO: 795476 - DNA, 100 bp, Homo sapiens
aacctcctctggcccccggaaaacctaaccatgaagacttgaacttaatacagcaagaaagaccatcaagtttaccagacatgaacaagctgagtggagg

SEQ ID NO: 795477 - DNA, 107 bp, Homo sapiens
ttggacttgttttgtgggaagtggccaggcggatggtgagcaatggatttgaatttgttgaaatgagcagtcgtaaatcaaagagtaacagcttaattcacacagag

SEQ ID NO: 795478 - DNA, 51 bp, Homo sapiens
gcctggagaacctcggagaccagcagcctggcccttcccagatgtgctgga

SEQ ID NO: 795479 - DNA, 96 bp, Homo sapiens
ccgcaagccccgctgccttgctacggctactacccctgcttgtgtgaagtttttcaacatgagtggcctcggggacagttcatccgaccctgctaa

SEQ ID NO: 795480 - DNA, 100 bp, Homo sapiens
ctgacggcaacctctacaaggccaagttcatctcctccgtcaccagccacatctaccagcttccccaactcataaatgccaattttccagtggatcccca

SEQ ID NO: 795481 - DNA, 51 bp, Homo sapiens
ggacggtcactcagcctatggaggactatgatgatggatatggcactgctt

SEQ ID NO: 795482 - DNA, 100 bp, Homo sapiens
ggcgagaagctgccgccgaacgacaggacgttggggcggcctggctccctcaggaatcatgggtaaagaaggaagacaggctgcaagaaacagtgactat

SEQ ID NO: 795483 - DNA, 100 bp, Homo sapiens
ggctttatctgagtgtgcagtgacactgaaaacaattcatctcaaacggtataacaagaggattgcctgatccagccaagatgcagagcacttctaatca

SEQ ID NO: 795484 - DNA, 82 bp, Homo sapiens
caaatactatgaagacaacaagcaattttttggggtttgtgaccatgactctggaaagcctagaggaaatacaggatgtcag

SEQ ID NO: 795485 - DNA, 98 bp, Homo sapiens
ggagatccgtgatgtaacaaggattgagcgaatcggcatgatgggcccacctcctggtatgagacctcctatgggtcccccaatggggatcccccctg

SEQ ID NO: 795486 - DNA, 51 bp, Homo sapiens
agaagacagagggttttcttttgaggtgattctcctaggtcactggctgct

SEQ ID NO: 795487 - DNA, 100 bp, Homo sapiens
ccccgctggacagcgccgacgtccgggtgcacgtgccacgcacggtcatcatcagatttgaaatatttaaagtggatacaaaactatttcagcaatgcag

SEQ ID NO: 795488 - DNA, 82 bp, Homo sapiens
cttaaaatacccgcaacagccccttcgtcccaaatcgaagccgcggtcaaggccgccagagaagcctttcccagctggtcat

SEQ ID NO: 795489 - DNA, 90 bp, Homo sapiens
ctgcaagatcatcaactcttactgaaatgagccgtcagactgctacagcattacctaccggtacctcgaagtgtccaccatcccagaggg

SEQ ID NO: 795490 - DNA, 100 bp, Homo sapiens
gtgtggcttatgtggtccaggagccaggtagacggagtgcaccacccttgaacctcactggcctccctggcacagagaagctgaatgaaaaagaaaagga

SEQ ID NO: 795491 - DNA, 49 bp, Homo sapiens
gaactggtgagccaagggatcatgccgcaattagagcccattgggaacg

SEQ ID NO: 795492 - DNA, 74 bp, Homo sapiens
gtgaaggggaagaggcccaccctggagtaaccctcactggagaatccagaggtcattaatagcatctgggctct

SEQ ID NO: 795493 - DNA, 87 bp, Homo sapiens
tggaggaggatcgcactgctcatcttggccatcactatacacaacgttccagaacccagcccttgctgacatctacacagagcacgc

SEQ ID NO: 795494 - DNA, 83 bp, Homo sapiens
atttacatgaacacaaaattgtttatagctccaaatgagaagatgaagcaagtgttaaagaagactatagaagaagccaaagc

SEQ ID NO: 795495 - DNA, 97 bp, Homo sapiens
tttttcaagaattggtagaaggtgtgttttacatacataacatgggaattgtgcaccgagatctgaagatccgtgattctaactgcaactatgaggc

SEQ ID NO: 795496 - DNA, 75 bp, Homo sapiens
gtatctttttacaggacttaaattgctactatctgaaaacccccccgatggagaaagattttcaaagatggtaga

SEQ ID NO: 795497 - DNA, 98 bp, Homo sapiens
aggaacagggacagcacctcatcccctggatgggggaccacaagatcctcatcgacagatttggtcgtattgggcgcctggtcaccagggctgctttt

SEQ ID NO: 795498 - DNA, 50 bp, Homo sapiens
ccgcccgtccacacccgccgccagctccagctcaaggtccctgctgaagg

SEQ ID NO: 795499 - DNA, 100 bp, Homo sapiens
ccgaagtcagttccttgtggagccggagctgggcgcggattcgccgaggcaccgaggcactcagaggagagctccacgcaggagatcggtgaggagctga

SEQ ID NO: 795500 - DNA, 98 bp, Homo sapiens
gctaccacggccgagctcttcgagtggaaggaacaagcagtggcgccctccagctttttgttgatgctggtgttcctgtgaactcaaatgtgattaaa

SEQ ID NO: 795501 - DNA, 75 bp, Homo sapiens
cttcactccagtgcctccgacgcctcctgatgtgcaagaagaaacacacgctgctgtgccccgactttgcccgca

SEQ ID NO: 795502 - DNA, 100 bp, Homo sapiens
cccacgaagcttttaaaaaaacattctacccaagtctacctgggaccttcttcagccaatcctgttccttgctggtgcgcctggtgccggtcctctccag

SEQ ID NO: 795503 - DNA, 100 bp, Homo sapiens
tggatcgacaccctctacagcagtgtcatggagaaactccagctgggcccagagattctgcagcgggaaaatccaaggcttatttatgccaggctgagtg

SEQ ID NO: 795504 - DNA, 83 bp, Homo sapiens
ggaagactcatcggagcgtgtggatttgagccgccgcattttttaaccctagatctcgactgaaatcgccaagagattgaata

SEQ ID NO: 795505 - DNA, 98 bp, Homo sapiens
gttacaacaaactctctgagattgaccctgctggttttgaggacttgccgaacctacaggaagtgctcgcttctcatatgtgcggatgaaatatcttt

SEQ ID NO: 795506 - DNA, 99 bp, Homo sapiens
ttccattgtggccaccacagctgggaatggtatcattggaacatttcaagatcatcaaatcaaattccacagggattggtgaccaaccagaaggctcag

SEQ ID NO: 795507 - DNA, 50 bp, Homo sapiens
gaagctctacccactgccctcggcccgcgcttgctagagaagttttggat

SEQ ID NO: 795508 - DNA, 82 bp, Homo sapiens
gggccatttccgagaactcccatcagtttctgtatagtgtaaaagcatcctggtggggaagaagttttaagggaacaagctg

SEQ ID NO: 795509 - DNA, 96 bp, Homo sapiens
ggaaggggcagtacaagcttacgtctctgctcttcagtacaatcctatttcctcgtcctgtgactgtggagcccatggaccagttagatgatgaag

SEQ ID NO: 795510 - DNA, 75 bp, Homo sapiens
tcttcggctgccccaatccccggcagctctctcaggaattcgaatttagagtttaatttctcagagcattctctc

SEQ ID NO: 795511 - DNA, 75 bp, Homo sapiens
tccagaatgcacagatgtctgaggacaaccacctgagcaatactgtaaaaggtccaggagttgggctgcttggaa

SEQ ID NO: 795512 - DNA, 50 bp, Homo sapiens
agcaacctgacaattctgtcgtgtcccgcgtcatgccctatcacttttcc

SEQ ID NO: 795513 - DNA, 98 bp, Homo sapiens
gcgcggccgcggggagggacgagagggcctgacgtacagatcttcctctgatggcgctgcctccatgccatgccctctgccagttctatgtggtgaac

SEQ ID NO: 795514 - DNA, 82 bp, Homo sapiens
tcgcagactacggacctgtctgggtctcagccgccaaagaccccgtccggtaggtgtggacactgccagcggctgcagccga

SEQ ID NO: 795515 - DNA, 100 bp, Homo sapiens
agcctggggctgctcactaccaagttcgtgtcgctgctgcaggaggccaaggacggcgttctggatctcaaagcgttccagaaagctgagtctgatctgg

SEQ ID NO: 795516 - DNA, 82 bp, Homo sapiens
agcaaaggcaagaaggcaacgacgttccatctgtggaaggacctaccaaccagaccgacaaggagcagctgacagcagaggc

SEQ ID NO: 795517 - DNA, 75 bp, Homo sapiens
ggcaagatcaagcactggaaccgcttccgagacgtggccagacaagcacaaacctctcaggagccctaccacgac

SEQ ID NO: 795518 - DNA, 100 bp, Homo sapiens
cctgaagaaatttctgccatggttctcactaaaatgaaagaaaccgctgaggcttatttgggaaagaagaaccaggctttagcaaagatggatatattgg

SEQ ID NO: 795519 - DNA, 100 bp, Homo sapiens
cagcgctctggggctcgccttgtatctcaacaccctgagtgcggatttctgctatgatgacaggtcctctggatgtcagcatggcagccacaaacctgga

SEQ ID NO: 795520 - DNA, 75 bp, Homo sapiens
cagtatcctaatgaaaatcttcacagtgctgttactaaagcctgcctttccagcttccaattgaagacttgtgca

SEQ ID NO: 795521 - DNA, 74 bp, Homo sapiens
aacttcaggagctccgcaaagtgtgtctccaggaggcggtcccaggtcgctggccggctctgcacctgtcgcca

SEQ ID NO: 795522 - DNA, 78 bp, Homo sapiens
ttgggtgatttgttctgtatcagaagacaatatcatgcaagtgtggcaaatggctggagtgcaatggcgcaatctcgg

SEQ ID NO: 795523 - DNA, 99 bp, Homo sapiens
aaatttttggagaataaatccccttggaggaaaatggtgctgctggtgagtagcagccggtacccagaccagtggattgtcccaggaggaggaatggaa

SEQ ID NO: 795524 - DNA, 83 bp, Homo sapiens
agaagggcgactactacgaggcgcaccagatgtaccggaccctgttcttcagaacatccagtcatggataaaaatgagctggt

SEQ ID NO: 795525 - DNA, 98 bp, Homo sapiens
tgcaggactgggcacagcatgagatccaaaggcagggcaaggaaactggccacaaagtaacctgatccactacctgggactgagccatcacctgctgg

SEQ ID NO: 795526 - DNA, 75 bp, Homo sapiens
cagtgactttgatttgcttaacaacagcttacaggttggatggcaagcatgtggtgtttggcaaagtgaaagaag

SEQ ID NO: 795527 - DNA, 50 bp, Homo sapiens
cagtgatgcagaaattcagaagcgaatgctggaagatgaccttaagctaa

SEQ ID NO: 795528 - DNA, 87 bp, Homo sapiens
aggagctggcatgacgtgcaggtctctagcgcctttgtgtccctggtgatgttggaacattaatgatggaacatggccaaacttcag

SEQ ID NO: 795529 - DNA, 98 bp, Homo sapiens
gccaggatggctttgagctcacagctgatgggaagaactgtgtggattttgactaaaggagaagttcaagtatcagataaagacacacacaactggag

SEQ ID NO: 795530 - DNA, 100 bp, Homo sapiens
tccacccatcaccccagaacaccccgcagaaagtgcctgtgcatcaggacttaaagagagatctacttcagagccagcagtcccgccagaagaggctgag

SEQ ID NO: 795531 - DNA, 98 bp, Homo sapiens
caaacaaccgcagccgctgttcccaggatggtgatccgtgtatatattgcatcttcctctggctctacagcggaaactgggtcccttgaagaatctac

SEQ ID NO: 795532 - DNA, 82 bp, Homo sapiens
gaacgaccaagagggtgttcgactgctagagccgagcgaagcggctgggttacgacccctacaaccctgagctgcccaagcc

SEQ ID NO: 795533 - DNA, 96 bp, Homo sapiens
gcctctgtctccgagctcgcctgcatctactcggccctcattctgcacgacgatgaggtgacagtcacggaagtgcattttcagctgagcacctca

SEQ ID NO: 795534 - DNA, 82 bp, Homo sapiens
gccgaggagcgcaaagtggaaatcgccttctaccggaaagatggtcaaaatgcagatcttcgtgaaaacccttaccggcaag

SEQ ID NO: 795535 - DNA, 98 bp, Homo sapiens
gaggagccgagaggagctgagcgagcgcggaaggaagatgaagtcctcagtacattctgaagaagatgattttgttccagagctacatagaaatgtac

SEQ ID NO: 795536 - DNA, 100 bp, Homo sapiens
tctcccggcgaaagtgagcgaggtttgcccggagcgcgcacgagggtatggagtatcttggtacaaaaaggtatatccacagggatctggcaacgagaaa

SEQ ID NO: 795537 - DNA, 100 bp, Homo sapiens
gggtcgccgttgcatcggtgcagggcaagcagtggtctcggaaagagggtcgtggtcccgcacggatgcgcttgttgggagaaaccttggagattcacgg

SEQ ID NO: 795538 - DNA, 74 bp, Homo sapiens
ccggtctatggactttccgaagacgaggccttgaaccggggcattgctgctgtcaaggaggatgcagtcgagat

SEQ ID NO: 795539 - DNA, 95 bp, Homo sapiens
tgagcctgtggtgaccgatgcgttcctggccgtggctggccacatcttctctgcagctgagctgactgctgcccactttggaggaggcggtgggc

SEQ ID NO: 795540 - DNA, 76 bp, Homo sapiens
ctgccccagtggaggacatggctcggaggaatcactgtattttggaaagagttgattgacccaagactgattattg

SEQ ID NO: 795541 - DNA, 87 bp, Homo sapiens
aggtccaaaagaagaacttattccagagaaactggccaaggcatggaagaggagatggttcgtgttacgcagtggccgtttaactgg

SEQ ID NO: 795542 - DNA, 71 bp, Homo sapiens
ttctcgctggccatgcactggcaactgcagcccgaggacaagcggctattgtgcttcaagaagaccatagg

SEQ ID NO: 795543 - DNA, 100 bp, Homo sapiens
gaactggctatctttgatctcttcctccaggttatcaatactctggctgaccatcatcatcgtgggactgactttggtggaagtccttggttacatgtca

SEQ ID NO: 795544 - DNA, 90 bp, Homo sapiens
ctacatcatcatgcgtggcgaggagggcctggactatgggggcatcgccaggaaagaccacagcaagattctttcattcgtctcctccta

SEQ ID NO: 795545 - DNA, 96 bp, Homo sapiens
ccaggagaaactaagttgctgaacggctttaccaacagggacgcttatgtcaactgggcagtgaattttgtgaattggaagtttttgctaaagtac

SEQ ID NO: 795546 - DNA, 98 bp, Homo sapiens
cgtcggcagcaagaacagagagagaggtggacagatctgagagatactgaggtttaaggggctcaagccgactgttatccttctctcccgaggaattt

SEQ ID NO: 795547 - DNA, 100 bp, Homo sapiens
tggacacgaagacggcttcagtgcccgggagctcatgatccacgcgccaactgtcagtgggtggcggtcacctagggccaattcctgtccccccagcagc

SEQ ID NO: 795548 - DNA, 75 bp, Homo sapiens
tctgcttcttcaaaattctgctggcagatacttcaggctaccgttaaaaacaaggagaggggcaccctcttgacc

SEQ ID NO: 795549 - DNA, 100 bp, Homo sapiens
ctcttcatgattctttggctcaaaggagttgtatttagtgtgacgactgttgacctgaaaagtacctgtttgaaaatggtagaatagataacatttttac

SEQ ID NO: 795550 - DNA, 100 bp, Homo sapiens
tgcgaacagtggcagcgcgacctggccagctgccgcgactgggaggagcgccggaacgccgaggcccaggccctagactggagctggttacagacggaag

SEQ ID NO: 795551 - DNA, 82 bp, Homo sapiens
cgagtccctgaagagagaaggcaaagaacctctggtgttgaaagaatgttgtaccatctttgggtaggcagacttccctgac

SEQ ID NO: 795552 - DNA, 75 bp, Homo sapiens
actgcatgatgaaacgcttacttatttgaaccaagatgatgaaacatgcttggaataattataaaggttatgcct

SEQ ID NO: 795553 - DNA, 74 bp, Homo sapiens
gggcagagcgcggcggcgcgggaaacccagcgtttgctggcagaaccagttcctggcatcaaagccgaaccaga

SEQ ID NO: 795554 - DNA, 100 bp, Homo sapiens
gaaggactgggatgatacaccttttccacagggaattgagttggttatgggtgctacatgtgtgctttcagagcagtagtgtgaggaagcttggagtggg

SEQ ID NO: 795555 - DNA, 100 bp, Homo sapiens
cagaaaatacgtggttggagagctcatctggaattttgccgatttcatgactaaccagtttctagacctggaaggcctcctaagaggactcaaagtgtca

SEQ ID NO: 795556 - DNA, 50 bp, Homo sapiens
gtctttgctacgtacagcaaaaggctcaagcaagatttaatgaatcaagt

SEQ ID NO: 795557 - DNA, 98 bp, Homo sapiens
cccgccgattctcccacagctccccacatctacgcagtcttcacctcccagtggggagtttgaagaggaatcaaagcagccaggggtgtctgagcagc

SEQ ID NO: 795558 - DNA, 51 bp, Homo sapiens
gggccctcagactggggagtgtgaggctgaacatcttcatcttgagagagg

SEQ ID NO: 795559 - DNA, 83 bp, Homo sapiens
cttggcagaaagtgaggaggaaaacacccccattggaggaggtacaggagaactgtgtgcggtggcgaaagaggttcaccttc

SEQ ID NO: 795560 - DNA, 72 bp, Homo sapiens
cgttacaaactcctaggagggcttgctgtgcggaggagttggaacaaaaattgaccccactttgtgccgggc

SEQ ID NO: 795561 - DNA, 75 bp, Homo sapiens
ggctgctggtgctgtgcgcgaggctcctcactgcagcgaaggaaatcaacgaccgggagcagaagttgcatgccc

SEQ ID NO: 795562 - DNA, 51 bp, Homo sapiens
ttgctgaagagactttccgttacatgacctcctgacaaggtgatccgggcg

SEQ ID NO: 795563 - DNA, 100 bp, Homo sapiens
tttaccatggcaatggggatttatactggggttgacaatggtctccaggatggtctctaccatgctatctggcctactgttttggctggcatctggatgg

SEQ ID NO: 795564 - DNA, 50 bp, Homo sapiens
tgactcggtggcctcaagtgtgtagtggaggagataatgcctgttgtgta

SEQ ID NO: 795565 - DNA, 82 bp, Homo sapiens
tgagaagaaagatcttgccattcaaaagagaatcagctactgatagtctttataaactttctctgcaaaccctcaacgcaga

SEQ ID NO: 795566 - DNA, 100 bp, Homo sapiens
ctgaggaggagaggacagaggtgcctggggcaacctccaccttgacggttccaggttactttccgcaccagaatctatcactgcaacatcaacagtcagg

SEQ ID NO: 795567 - DNA, 100 bp, Homo sapiens
cccccgtcgttgctgccgggattttggaggccggggccgcgctgagggcgcccagctgaaaagcctgccattgctccgcccgtctttgtgtttcagaagg

SEQ ID NO: 795568 - DNA, 100 bp, Homo sapiens
gaactggacaaatactctgaggctctcaaagatgcccaggagaagctggagctggcagagaaaaaggccaccgatagcatctgctgcacccaagcctgag

SEQ ID NO: 795569 - DNA, 100 bp, Homo sapiens
agctgtggatgaatttgcttttctggaagaaattatggatccggatgagcaattggaaacccttcatgaagcactgaaactactgccacctgctcactgc

SEQ ID NO: 795570 - DNA, 74 bp, Homo sapiens
gctggccaagaagatcatcattaaggacggaggcacgaagctccaccatgaggcgaggtggatggaggaagcga

SEQ ID NO: 795571 - DNA, 82 bp, Homo sapiens
acccagggctgagccgtgaccatgagggccatcccgaaactgtgattgttttctgactccccagacaggccctggaaccccc

SEQ ID NO: 795572 - DNA, 75 bp, Homo sapiens
cccaactggccccagtacaaaggggaaattgagggctttcgccttagcgcccactgctcctgtgacagcagggat

SEQ ID NO: 795573 - DNA, 75 bp, Homo sapiens
agaattcagaaggagctggcggacatcactttagaccctccacctaattgcagcacctacgccccagtgaagtcc

SEQ ID NO: 795574 - DNA, 97 bp, Homo sapiens
ttccagatgggcagtgagtgggcatccacatccagggccagatcctaacccatttgggaaggatcgagatcgagaccgggatcgtgaagatcggtct

SEQ ID NO: 795575 - DNA, 147 bp, Homo sapiens
agcgtattcctgggttcagagatctctctcagcatgaccaggtcaaccttttaaaggctgggacttttgaggtagcaattgtggtattaggaaacaaaatcgacctttctgagcagagacaagtggacgctgaagtggcacagcagt

SEQ ID NO: 795576 - DNA, 98 bp, Homo sapiens
aatgttccatggtattttcaacggaatacactttgaaaggagtctcaggagcaggggctgcggcagaggctgctggacgagcagttcgcagtgttgcg

SEQ ID NO: 795577 - DNA, 50 bp, Homo sapiens
ctcaatctgctgttttgatggctacaggtcctgcacccttcttaattttc

SEQ ID NO: 795578 - DNA, 75 bp, Homo sapiens
cgtttccaaagctgtgtgctcaacctacttacagtcacgttactacagatcacacgccgctatgcagagttctcc

SEQ ID NO: 795579 - DNA, 82 bp, Homo sapiens
ggcaaagttgaccagatccgagccagagtggagcgtaacgcagtggttttaaaatcaaagatgggaaaatcggagaaaattg

SEQ ID NO: 795580 - DNA, 100 bp, Homo sapiens
gtttggctgactggggagtcggcaggcggcagcccctgcagatcaagtcagtagtggcaccagagcatgtgaagggctacatctacgtggaggcctacaa

SEQ ID NO: 795581 - DNA, 83 bp, Homo sapiens
ctggctctgctgctgccgccggcgaaggaggaggcgttgccgggttagcatggcctcattgaaagaactagatcaaagactct

SEQ ID NO: 795582 - DNA, 75 bp, Homo sapiens
cacaactgctcgcgtgacgaccgcattcgtggcaggtgtggccgacgacgatgccctcgctgaggagcgcatgcg

SEQ ID NO: 795583 - DNA, 99 bp, Homo sapiens
gctgtactccagacacaacccggccatcgaggccctgctgcacgacctcagctcccagaggatcaccagcgtgggttgaaatcacaaagattagacacc

SEQ ID NO: 795584 - DNA, 90 bp, Homo sapiens
gctgctgtacttcgtctatgtggcgcccggcataggggagtttatcaaagctttgtatgagtccgatgagaactgtgaagtggatcccag

SEQ ID NO: 795585 - DNA, 80 bp, Homo sapiens
caaatcccacagaggcatctgaggactgtgtgctgaagaggttcatttgtgtggagaacctgctgctattgacctggtga

SEQ ID NO: 795586 - DNA, 97 bp, Homo sapiens
tgaccctcaggaaagagcatgatctttaatctcatgaagtacgacagctacagccgcttcttaaagtctgacttgtttttaaaacacaagcgaaccg

SEQ ID NO: 795587 - DNA, 82 bp, Homo sapiens
catctggctgttagaagaattcatgctcatccgggtcacctggcggtagacccattcataagaggaaaagacagaattcaca

SEQ ID NO: 795588 - DNA, 83 bp, Homo sapiens
agaggcggcgagaggcgggctgaggcggcccagcggcggcagatggagaaggaggagacaacccgggagctgctgctgcccaa

SEQ ID NO: 795589 - DNA, 100 bp, Homo sapiens
aggcttgttcaagacacaccggaggcgacggccatggccacaggaaaggcagactacaagttactgagcacctccctgagaaaattgaaagtagtttaca

SEQ ID NO: 795590 - DNA, 75 bp, Homo sapiens
tgcagttcgaaaactggataacactaagtttagatctcatgagacttcacagagaatgcagttgtcttgacttca

SEQ ID NO: 795591 - DNA, 96 bp, Homo sapiens
acaagattctgaaagctgaacagagaattctggcactgcactgggtaggaaaaagggattttgcttatgtagcaagagataaagatacaagaattt

SEQ ID NO: 795592 - DNA, 100 bp, Homo sapiens
acatcccggagcagctgccacaatgggacatgtgcaagaacactgcctcatggggatcaaaggaactgtgaagcgtagcacagacggggacttcattcat

SEQ ID NO: 795593 - DNA, 87 bp, Homo sapiens
gcagaagaatattttgcctgctggaacctgctgtatctactcaagagtggaagttttcacaggatgggaaggccattgtgactatgt

SEQ ID NO: 795594 - DNA, 88 bp, Homo sapiens
cctgtgtccctgaccatggctccctgcagtaccctttaacggtggttggaggcaaagtaaagaagcccggtaaacgtggtcggaagcc

SEQ ID NO: 795595 - DNA, 50 bp, Homo sapiens
ttccagccttgtgacagtgatactgtttttgactaaaggccagaatgcat

SEQ ID NO: 795596 - DNA, 97 bp, Homo sapiens
ttcaaccacctcgagcggctgctggacgaagatttctcgaatgctggcagccaaaaccgttttggctatccgttatgatgcttttggtgaggattca

SEQ ID NO: 795597 - DNA, 75 bp, Homo sapiens
agaaaaggcctaagaattttggcattgctctgtatgaaaaagctgatatcaaggggcctgaagacaagaagaaac

SEQ ID NO: 795598 - DNA, 75 bp, Homo sapiens
tatccggccaattgagattcggagttaaaacaggattattgtgcaacaaagtggtccattttgcgggaacgcttt

SEQ ID NO: 795599 - DNA, 90 bp, Homo sapiens
cggtaacaaacgagggttcccgggattggaccgacgcagccatggatcccaggagggcactcatggtggtttatgggactctggactcct

SEQ ID NO: 795600 - DNA, 89 bp, Homo sapiens
cttaaatgaagccactgattagcaatttaaagatcctctccaaggaagctgaatatggtgggcatgatcagatagatttgtatgacgat

SEQ ID NO: 795601 - DNA, 50 bp, Homo sapiens
gttttgtgcagattgccagtctaaagaagtctggaacgttttttcttaga

SEQ ID NO: 795602 - DNA, 88 bp, Homo sapiens
gcgttaacttattgacccatggggaggagggtcacttcccgtgaaaaggatttctatgatgactggattttgaattttgtggaacgct

SEQ ID NO: 795603 - DNA, 100 bp, Homo sapiens
cggaagtgccccttagcgggtgggggaagctggtaggcacgggcggctccgcagtgaccggactcgggggaggtggttaccctaacagctaatgataaga

SEQ ID NO: 795604 - DNA, 100 bp, Homo sapiens
caagaacaaggagggcatggatgctaagtcactaactgcctggtcccggtccacaggtcctggctaccctgggaagagacaagaagtaaatgaagaaaga

SEQ ID NO: 795605 - DNA, 97 bp, Homo sapiens
agaggtagtcggacctttcccgctggcgcgcagcctcagctaggcttgctatgggtgttctccaggatcaaagtgtgactgcagtggcataaaaggg

SEQ ID NO: 795606 - DNA, 100 bp, Homo sapiens
gtggtaccagtgccgctgggcacactggcttcacgccggctccgcctcaccagcaagcgcattcccagtttcccagcgaggtggtcattcagagcctaca

SEQ ID NO: 795607 - DNA, 82 bp, Homo sapiens
gcaacccactggagtgagcattgctgcatttggagagtcagatgccattttgacctgcctagagctggaacgttacctccag

SEQ ID NO: 795608 - DNA, 97 bp, Homo sapiens
tgaggttacgatcctgggaggacttaatgaatttgtagtgaagttttatggaccacaaggaagattcaagttcgaaatatggcaactttgaaagata

SEQ ID NO: 795609 - DNA, 100 bp, Homo sapiens
tcattgctccactggagggctacactcggagtcgccagatcgtttttatcctgctcaggcggggtttctctatgttgcccaggctgatcttgaacttctg

SEQ ID NO: 795610 - DNA, 100 bp, Homo sapiens
tgttagaaacagtagtggagaatcaagatctttgtagaatttgatggctgtaactggaagcaacactcctgggtaaaagttcatgctgaggaagttatcg

SEQ ID NO: 795611 - DNA, 100 bp, Homo sapiens
tgcgtaaactggatgacaccaaattccgctctcatgagaatgttgtaccatctttgggtaggcagacttccctgacgacatcagtgatacccaaagctga

SEQ ID NO: 795612 - DNA, 90 bp, Homo sapiens
caacatccgcgagttcctgcgcggctgcggggcttccctgcggctggaggaacggaaaacagttcttccttcaaagcatgcagtacctga

SEQ ID NO: 795613 - DNA, 100 bp, Homo sapiens
gagagaagccaccactttggcaaatggatccgagctggatccagagttgcatacagaccaatttctgcatcagtgttatctcgaccagaggctagtagga

SEQ ID NO: 795614 - DNA, 100 bp, Homo sapiens
agcctcccaacctcaccgggcagcacaaggtcatgctcaaaagccaaaagtctctgagaacgactttgaagatctgttgtccaatcaaggcttctcctcc

SEQ ID NO: 795615 - DNA, 51 bp, Homo sapiens
ggacccctactattgcaacaagggtgccaagtaccggggctccatccatga

SEQ ID NO: 795616 - DNA, 96 bp, Homo sapiens
ccgggacggggcgcgaagccggaggctccgggacgtggatacagtgttatccaagataaattctgtgggattataaacatttcagtagaaggcctg

SEQ ID NO: 795617 - DNA, 75 bp, Homo sapiens
gagaccctagaggcctgcggcctgcggtattgttgcagcatctggcagtgagactgaggatgaggacagcatgga

SEQ ID NO: 795618 - DNA, 82 bp, Homo sapiens
accaactcagtgccaaaaccagattcctacgagaagcaacaggcacaaggctctggtcggaaaaaattactgtcttctactc

SEQ ID NO: 795619 - DNA, 75 bp, Homo sapiens
agtctttggaggatgcggctttgatggcagcagcgtgcagggtcaaagacagccggccccccatgtcagtggtct

SEQ ID NO: 795620 - DNA, 100 bp, Homo sapiens
gagaaaatgaaaccagcagacagaatttgtcaggtgataacgtggtgctggaccagacctacctgtggcagggtgttcgagtggcggctggagcacagat

SEQ ID NO: 795621 - DNA, 100 bp, Homo sapiens
gagctgccgaatcattgagcagctagaatgggtactaggaaaaaagttcatgcatttgtccgtgtcaaacccaccgatgactttgctcatgaaatgatca

SEQ ID NO: 795622 - DNA, 82 bp, Homo sapiens
tggggactgcacgtagcccggcgctcggcatggctctcctggtgctcggttttgacacaagggcgcatatcttcaaagcacc

SEQ ID NO: 795623 - DNA, 50 bp, Homo sapiens
cctacttctataaagtcatccagtttcagaagctatctcctgagcagtgt

SEQ ID NO: 795624 - DNA, 101 bp, Homo sapiens
ttggaggtgtcagtgttaaaggaacctctacaacgaaggtgaagccacggaagataaggtgtacgtgaacggagagtgggtgaccaacatcagcgagggag

SEQ ID NO: 795625 - DNA, 75 bp, Homo sapiens
ggcgctgtgtgtacatcacccccatggaggccctggcagagcagatggagctaacacccattatggagattaacc

SEQ ID NO: 795626 - DNA, 75 bp, Homo sapiens
ggagactcccggtaacccccaacttgccgagatttttgctgtgagaattaattaccagtaacagttcaatatggg

SEQ ID NO: 795627 - DNA, 74 bp, Homo sapiens
tgcagcagctgagaaaggagctcggggactcccccaaagacaaggttgactatagtcaatggggccaatggagc

SEQ ID NO: 795628 - DNA, 98 bp, Homo sapiens
atcggtgccaaggaccacgcatccatccagatgaacgtggccgaggtcctggctataagtcaccatggcacagcaagctgccgataagtatctctatg

SEQ ID NO: 795629 - DNA, 82 bp, Homo sapiens
ccgcgtccgccgattcctcctccttggtcgccgcgtccttggctggcgtatcgcaccccctccctccctggcggagcccctg

SEQ ID NO: 795630 - DNA, 98 bp, Homo sapiens
tggtcagtacatggattcttcacttgttaagatggaagatggtaccccaaagcatatcatccagatgacaggatttaagatggaagaaaaagaagcgc

SEQ ID NO: 795631 - DNA, 90 bp, Homo sapiens
aacttctgggagaggaccccctggccgctgggtccaggaagagtcactcaagctgaaaaactggagttgcagctctcctgtcttccccgg

SEQ ID NO: 795632 - DNA, 90 bp, Homo sapiens
aatgttcatagtccctatgaatctactatttttggctttcacccccaaccagtgaccaaagacttgaccactcaaagtccagctccccag

SEQ ID NO: 795633 - DNA, 100 bp, Homo sapiens
cacgcagctggctggcttcagtggaccagtttgaagatgccgcatttggattggatgaattccaaattctgcttgcttgctttttaatattgatatgctt

SEQ ID NO: 795634 - DNA, 101 bp, Homo sapiens
gcccgtgggcgagccgcccgcccgccgagcagccatgaggacatgtcatccagtgacagtgactcggactgggatggaggcagccgtctttcaccatttct

SEQ ID NO: 795635 - DNA, 83 bp, Homo sapiens
agaggggaaaaccacgctcctcggaccaagcctcgggagctaaggtctctcagccagggtagtacaaatgcaacagtgctaga

SEQ ID NO: 795636 - DNA, 83 bp, Homo sapiens
gtcctatgactcagacctgggcacagcaaatgctgaggactcagaccagtctctgcaagagccaagtttcttcctaacagtgg

SEQ ID NO: 795637 - DNA, 99 bp, Homo sapiens
atacttgacctacgcaagagacaatgtcatgtgattcagcctaatatctcagattggagaatccatgttgaccaaatgcaccagcacagaagtggaatt

SEQ ID NO: 795638 - DNA, 101 bp, Homo sapiens
ggaccgcaagctgagcgagctgtcagagcccggggacggcgaggccctcatgtaccacacggtgctgatagtctgcagcacaggtttagctgggattatgc

SEQ ID NO: 795639 - DNA, 74 bp, Homo sapiens
ggggacctggaggtggagctgtccttccgcaagtgctacactgaagaatggagttcaaacatgtctaaacccag

SEQ ID NO: 795640 - DNA, 83 bp, Homo sapiens
gtagataacagcttccgccaggcggtgatgaagaatccccccgaaaggaccccccagtgtgccccctaccaccggagccagag

SEQ ID NO: 795641 - DNA, 96 bp, Homo sapiens
tttgagtcctcgagtgaatgggcggatctcatatcttcacttggcaaactcaacaaggcctttggcacaaaccaagaagattatgcaagttacatt

SEQ ID NO: 795642 - DNA, 90 bp, Homo sapiens
catgaagagtacatgaagaatcttctcaaagtgggagggatccttgtcatgccactggaagagaaggtctctgtcgtgtctccagaccac

SEQ ID NO: 795643 - DNA, 98 bp, Homo sapiens
tgcaacagcaagcacatgcagaagaatcccccagggcccagaggtgctggagaatgccgaaggtgccagaaccaccccttcagttgtggcctttacag

SEQ ID NO: 795644 - DNA, 74 bp, Homo sapiens
gtaggccaggctgatggagagctgaacattactcttccagaagaggtctgcactacagagcttacacaaggctt

SEQ ID NO: 795645 - DNA, 98 bp, Homo sapiens
gcatggcttggagcacttcctattccactggattgggaaagaccatggcagatcatcaatttctacatgaatatgctgatggagcgaagtaaagagaa

SEQ ID NO: 795646 - DNA, 82 bp, Homo sapiens
cacctactgcaggactgagtaccagcaggagagactgaaactgttgaggagcccatggaggaagaagaagcagccaaagaag

SEQ ID NO: 795647 - DNA, 83 bp, Homo sapiens
atgagctctcagcaagcaactttgagctgcacgttgcacaagttatctccagaagaagaagagaaaaggagaatccgaaggga

SEQ ID NO: 795648 - DNA, 87 bp, Homo sapiens
tggctcgagaatacagagagaaaattgagacggagctaagagatatctgcaatgatgtactggaaaaaagtaatcctcttggaaagc

SEQ ID NO: 795649 - DNA, 50 bp, Homo sapiens
gccctcaaggccatgatcaaaaccgaccccgataacgtggtgttgtgcct

SEQ ID NO: 795650 - DNA, 82 bp, Homo sapiens
cagtggacaaccagaaagaaagtttatgcaaacctttgttctggctcctgaatttaaacatttcattccatcatcgtgttcc

SEQ ID NO: 795651 - DNA, 99 bp, Homo sapiens
ctccagcgggcctggactgtgggctggtgtgtggaactggatatgctgcaggctgctagtcattatcgccaaaatagaaactctttgtatagaagagaa

SEQ ID NO: 795652 - DNA, 100 bp, Homo sapiens
tcctcactcagcatcgaggagactaagttgtgtgcctttcttggagcagcctgcagcagccttcgtgcgtctgaatgaggctgtactcctggagtctgtg

SEQ ID NO: 795653 - DNA, 100 bp, Homo sapiens
acttcaaggtcaagatggtggacgagcttaagagaggacatgaacaagctgagtggaggcggcgggcgcaggactcgggtggaagggggccagcttgggg

SEQ ID NO: 795654 - DNA, 75 bp, Homo sapiens
ggccagcaccgccttcaacctgcaggtggccacccctgggacaatgcagatcttcgtgaagactctgactggtaa

SEQ ID NO: 795655 - DNA, 74 bp, Homo sapiens
gaggggctccggctggtctgtggtgaggagaccagtatgatgtctgtgccatttgcctggatgaatatgaggat

SEQ ID NO: 795656 - DNA, 100 bp, Homo sapiens
atgtgtgaatgtccaccaggcttcagtggtatggactgtgaggaggacattgatgactgccttgccagttccctctcccagcctgtgctgactcagccat

SEQ ID NO: 795657 - DNA, 100 bp, Homo sapiens
ggcaagcgcagggggacggggaccagcagctgtcgccgccgctctcaggttagcactctacgtatatgaatatctgctccatgtaggagctcagaaatca

SEQ ID NO: 795658 - DNA, 50 bp, Homo sapiens
aatgctgctgaagagatgcttcaacaggaaatggccagtgatgaactgag

SEQ ID NO: 795659 - DNA, 98 bp, Homo sapiens
cgtctgggagcacaccacggtcctgctgacctgcactgtccaggcctcaccaccaccccaggtcacctgttgggatgctgtctatgagagagaactgc

SEQ ID NO: 795660 - DNA, 94 bp, Homo sapiens
gaaggattctgtgtgctgtcggacccagagggtgacggcgccgctaggatgaagctcgtgagagcttctttgaagggcagtctgcaccatggga

SEQ ID NO: 795661 - DNA, 75 bp, Homo sapiens
cccacccctcctgtaacccagcctgtttcacttcttgttcctgggatgcctaagaaaagtgttcaagaagaaaaa

SEQ ID NO: 795662 - DNA, 76 bp, Homo sapiens
ggactgacttttcttatgctgggatgtgccttagaggattatggatcatgagcgtcttgttgttcatcgagcactc

SEQ ID NO: 795663 - DNA, 100 bp, Homo sapiens
tattcatctgtccagcatgactcatccccgggagtgttgacccgcctcaagcattagaactacagacaaaccctgatgcgacctctccagattgtcccaa

SEQ ID NO: 795664 - DNA, 50 bp, Homo sapiens
caagttctcgtggagtcagacaatgagattctgcatatacagactcatga

SEQ ID NO: 795665 - DNA, 130 bp, Homo sapiens
cacccagcggtctgacatcgcgacgctgctcaaaacctcgctccggaaaggggacacctgagtatctgactgtcttctctcagatgattgcatttcatgatccagagctgagtaatcatctcaatgagat

SEQ ID NO: 795666 - DNA, 51 bp, Homo sapiens
cgtttgtgttagcaagtgaacataatgtgttcagagcaacattgttttgtt

SEQ ID NO: 795667 - DNA, 73 bp, Homo sapiens
tttaatggaaaatcgcttggttaaaacctgacacttttaacaggggaagtattacaaatggaagatgatctgg

SEQ ID NO: 795668 - DNA, 75 bp, Homo sapiens
ggagacgtggtactcagcaagctcgagttaaagttggatgtgctggaacagcacagtttaatggcaacgagaagc

SEQ ID NO: 795669 - DNA, 90 bp, Homo sapiens
ctgagggtgagtgccgggagctctgaggtatcctaagaaatccggtaaccaataagaagcattacagattgtatgtgatttataaagttc

SEQ ID NO: 795670 - DNA, 83 bp, Homo sapiens
cctctgatggcaggacctgccaagcaacctgggctggctgagttatggggctttgaagggagacgggatcctcatcgtcgtca

SEQ ID NO: 795671 - DNA, 101 bp, Homo sapiens
actgaaatcactgcaccttaaaaacaaaagattgagctgcactgtattcctgatgcacttgcagccttggaaactccaggacgtcccagccaacagaaaag

SEQ ID NO: 795672 - DNA, 85 bp, Homo sapiens
ttaacctggcaaacctggaagtggaagctgctttgtattacaagggtgcagtagacattgttgcaatcatgatcggcaatctgaa

SEQ ID NO: 795673 - DNA, 98 bp, Homo sapiens
tgatgaagccgaggtagaagaagatgaacccacagatttggatattggtgctggaaaaggcaaatactatgctgtcaattttccaatgagagatggta

SEQ ID NO: 795674 - DNA, 95 bp, Homo sapiens
accagctgaagagcgacaagccgctggcagccgcggatctcaccgccgctcaggcttcgagagctgtgcccaggagtgaacaaccagccctacct

SEQ ID NO: 795675 - DNA, 95 bp, Homo sapiens
ccttttggaagctcagataagatggagggacagaaaatgaagcagtgttttatcatgtgtatttcagcaggtcttcttgaaatttaactaaaaat

SEQ ID NO: 795676 - DNA, 100 bp, Homo sapiens
caagagtgagatcttgtacattcgcaccaatgcttcagaaactaatctggattcactccctctggttgatacccactcaaaaaggacacttctgattaag

SEQ ID NO: 795677 - DNA, 75 bp, Homo sapiens
catggagaaacggtcaacattcctgatgcctaccaggtacaagaaaattccccaggacacagagctggtttggag

SEQ ID NO: 795678 - DNA, 74 bp, Homo sapiens
ctggagagcttcatcaaaaatagtgatagctttgataagtcccaggtcaagttcatggacctgagatgctcgca

SEQ ID NO: 795679 - DNA, 78 bp, Homo sapiens
aaagacaaagacccagtgaacaaatccgggggcaaggccaaaaagaagaggatggagatgaagatgaggaagctgagt

SEQ ID NO: 795680 - DNA, 100 bp, Homo sapiens
cgcgaacgcacaggatgaccaccaccctcgtgtctgccaccatcttcgacttgagcgaagttttatgcaaggaagtggtcctgtactgcttagagaacaa

SEQ ID NO: 795681 - DNA, 74 bp, Homo sapiens
cggaggcgttcagctgcttcaagatgaaggaggtcaggagaaccactactacatttctacttcggagaataccc

SEQ ID NO: 795682 - DNA, 101 bp, Homo sapiens
gaaaagttggcccctgagccagagctccagcagccttgttagggcgtggcctgaggcttggataagtgggggcaagttaaagtcttcagagccctgtatac

SEQ ID NO: 795683 - DNA, 90 bp, Homo sapiens
cctcatcccaggttgccttggaaaatgccaacgccgtgtctgaagggaacgcagctgttgttctccggagtcggctgaaggtcagggtgg

SEQ ID NO: 795684 - DNA, 101 bp, Homo sapiens
caagaagttgtgacccaggggaaaaattagactcaaaaattggagtccttataggaaaaggatattccccgagtccctccggtggctaatggccacccagc

SEQ ID NO: 795685 - DNA, 83 bp, Homo sapiens
ttttgtggcacctatctatggtgcagatattaatgggagcatatatgatgaggttgaagatgacagcgatgcagagacctatg

SEQ ID NO: 795686 - DNA, 82 bp, Homo sapiens
gtaattccagtgaattgacttcccatcaggacacattcagctaacgtattttagcaggtggagtgaggttgaagattcctgt

SEQ ID NO: 795687 - DNA, 100 bp, Homo sapiens
tggaacagaatcaacccagaacggatagctccctcctggaaaagttttacaatgagttgactgaaatcctggtcaggttccagaacaaatgcagcgatat

SEQ ID NO: 795688 - DNA, 98 bp, Homo sapiens
gggcagacggtggaactgggcgagctgcggctgcgggtgcggcgggtcctggccgaagaccttcacggcatggtgcaactcccacctgcggaaggcag

SEQ ID NO: 795689 - DNA, 100 bp, Homo sapiens
acacatcaagttaaatttggtcaacaaaatccacgtcagggctctacggtatttaatggggcccagaatggtgtgtctcagctaatccaaagggagtttc

SEQ ID NO: 795690 - DNA, 90 bp, Homo sapiens
gcgaccatggaccggccggggttcgtggcagcgctggtggatgctcgtcagaagttccgctctgttctggttgaagcaacggtgaaactg

SEQ ID NO: 795691 - DNA, 83 bp, Homo sapiens
tccagcctgcggagcctgtggggcaggacgagattgaggagctgcgggccgagatgctggagatgcgggacgtctatatggag

SEQ ID NO: 795692 - DNA, 100 bp, Homo sapiens
ccccacgcggcacctggccatgctctcagctctcccgccgcgcctgcctgctccgcttcagcggactctcgctggtctacctgctcttcctgctgctgct

SEQ ID NO: 795693 - DNA, 99 bp, Homo sapiens
ggaaccaggggaaatgcagaaaacagaaacacttcttttattttcctgtaatatatctgtatcatcggagtgatgatctaaccacaacagggactgata

SEQ ID NO: 795694 - DNA, 100 bp, Homo sapiens
cggaagaaaatacaaatcacacgcataatggatgaaaggaaccgacaggttttacccagccccctataacatcacccccaacaggatgcttgctcagtct

SEQ ID NO: 795695 - DNA, 71 bp, Homo sapiens
gaagagcagaaaatagcagccaggaaccaagaaaacttggacattagctgtcagcacgcagccctgctgag

SEQ ID NO: 795696 - DNA, 84 bp, Homo sapiens
gcctcggttggatgcgaaggagctgcagcatccagccgagtcgtccggaaatccattgcccgtgttctcacagttattaaccag

SEQ ID NO: 795697 - DNA, 75 bp, Homo sapiens
gcagaatgtgatttgcttgaagatatgaggtggttttttggcaaaatccccagagccaaggcagaagaaatgctt

SEQ ID NO: 795698 - DNA, 100 bp, Homo sapiens
cgcgccctggcgggtccggaccaaggagtgattggggcagatgtgagagggcacggcctcatctgtgaggggcagccagtgacgtcacggctggctgtca

SEQ ID NO: 795699 - DNA, 100 bp, Homo sapiens
tgcccaggctcgcctcgactccaaatggttgaaaacagatatacagttgctctaggtcgtaaccagcctttgaaaaaggagaaaccaaaatggaaaagcg

SEQ ID NO: 795700 - DNA, 82 bp, Homo sapiens
gcgaggggtgcacggcggccacctgagtggcgcggcggtgtcaggtggacgcggatctgtcaacatgggtaaaggagacccc

SEQ ID NO: 795701 - DNA, 51 bp, Homo sapiens
tgcaggaccacggggaaattgccaagagacctgacatgaaacgcagatcta

SEQ ID NO: 795702 - DNA, 100 bp, Homo sapiens
cagttctgtctgcagaagcccattatggctgtaactggagatgacacaggaagcaaaaggagggtaattttgatattgtctctggaactcgctacaaagg

SEQ ID NO: 795703 - DNA, 97 bp, Homo sapiens
aaattatatttgttttaaaagcagtcagtactcttattgattcacttaagaaaactcagcctgagaatgattggcggcagtaagcacacaatgaatg

SEQ ID NO: 795704 - DNA, 100 bp, Homo sapiens
gacggagcaatgttcttccactggcgacgtgcagcggaggagggcaaggactacccctttgccaggttcaataagattatgtttgagaccttcaacaccc

SEQ ID NO: 795705 - DNA, 82 bp, Homo sapiens
gaagctctagaaatgaatgtttccatctcttcagagatgaaccaggtgttgacttcaaaatcaaaactgtagagctaagagg

SEQ ID NO: 795706 - DNA, 74 bp, Homo sapiens
tggcctctgggcaccggcggcccctctgcctcgcggaaaagaatggctattcaagtggacaagttcaactttga

SEQ ID NO: 795707 - DNA, 75 bp, Homo sapiens
agtctttccgcttcttgaatttctctctgtaaaggagaaaaagcttgtggtgaaggggggcaaaaaaaagaagca

SEQ ID NO: 795708 - DNA, 102 bp, Homo sapiens
gcggtggcagtcgcgaccgcgggtgcatccagtttctgcgcccagcttcgcagaatcaagaacggctatgtgcgtttaaagatccgtatcagcaagaccttg

SEQ ID NO: 795709 - DNA, 82 bp, Homo sapiens
agagtttgaaagtgcgattgtggaagctgctcgggacataagcagctctatgaccaatagcacagctgccagtagacccccg

SEQ ID NO: 795710 - DNA, 100 bp, Homo sapiens
catatgcagcacgaggggctgcaagagcccctcaccctgagctggggccgctgcctgctccccaggcccaagtcccttgcgggcagctgcccctccaccc

SEQ ID NO: 795711 - DNA, 83 bp, Homo sapiens
acatgcttcatagtccttgcgtctctctgtttttagaacttcagccataaaaatgggcagaattttccttgatcatatcggtg

SEQ ID NO: 795712 - DNA, 100 bp, Homo sapiens
agttagtggtgctcaacgtgtacgacatgatggagtttcgctccgtcgcccaggctgaagtgcagtggcgtgatcttggctcgttgcaacctccacctcc

SEQ ID NO: 795713 - DNA, 80 bp, Homo sapiens
gacgaggctgcggtgtctgctgctattctccgagcttcgcaatgaatccacattcatctcaatggaaggatcctgcctta

SEQ ID NO: 795714 - DNA, 83 bp, Homo sapiens
ccccggcccgcgcccttgcccctcggccgggcggacgttaataaaggtatccatggagaacactgaaaactcagtggattcaa

SEQ ID NO: 795715 - DNA, 83 bp, Homo sapiens
tgagcttgaccagttacggcaggaggccgagcaacttaagaaccagattcgataatagttatgcacgagtgcgagctgtggtg

SEQ ID NO: 795716 - DNA, 100 bp, Homo sapiens
ggagagctagtctacatggtggagagccaaccaccatcattagacaaggccgccatggcatcagatgaaggcaaactttttgttggagggctgagttttg

SEQ ID NO: 795717 - DNA, 75 bp, Homo sapiens
cgtgtaccggcagaaggcccgggtctcccaagagctcaagctgaagaaatcaggggagaaacccctgcttggtgg

SEQ ID NO: 795718 - DNA, 88 bp, Homo sapiens
ctacttcgagttcttcgccgccgacctgaggtggatcatccatgccatggagtatgaacttcagatccgtggcggagacaagccagcc

SEQ ID NO: 795719 - DNA, 100 bp, Homo sapiens
gttaatgggccgggaccgaaacctagccccggacgagaagcgcagcaacgtgcggtgggaccacgagagcagtgagcacaaatggatcagatgaccctga

SEQ ID NO: 795720 - DNA, 89 bp, Homo sapiens
ggcctatctctgcagagagtgccatcatgaatccagcctctaaggtgatagctctgaaagatgatgaccactggatcgtcgacacagac

SEQ ID NO: 795721 - DNA, 98 bp, Homo sapiens
tatttaggccccagcacactcagagacaggcttatgtacataaaagcgtgatggaggaactgaagagaataattgacgacagtgaaattaccaaagag

SEQ ID NO: 795722 - DNA, 75 bp, Homo sapiens
gcggcggtcggggccgaggcgcgaggaggtgcgagaagatgtactaaattcattgaataacaactttcttcaaac

SEQ ID NO: 795723 - DNA, 82 bp, Homo sapiens
gcgccctctactcagcatggatatccaggtgctgagccaggagcagcagcctttctctctattaccaggttttaaacttcgc

SEQ ID NO: 795724 - DNA, 90 bp, Homo sapiens
cggcttcggagcgggagtgttcgttgtgccagcgactaaaaagaggttctgattggaactgattccatcccgaacctgcataagctggag

SEQ ID NO: 795725 - DNA, 75 bp, Homo sapiens
ttctgaactcaggacttggcaacacatgcagatgacaatccaggctctccaggatgaattgcggatccagaggga

SEQ ID NO: 795726 - DNA, 50 bp, Homo sapiens
gtgaagcaaaagcctttcatgattatttacagaatgtctgaaggggacag

SEQ ID NO: 795727 - DNA, 75 bp, Homo sapiens
tgcgggcgggcggtgagcgcccatatgggggttctggagagcggggtgtggggtctcggcgcggaagatggccgg

SEQ ID NO: 795728 - DNA, 100 bp, Homo sapiens
cgcctgagcccagcccccagaaaggattgtgacatatcgttggacccagaattgaggaatactcccccagttgcaagaggcgcaggaccgtggaagactt

SEQ ID NO: 795729 - DNA, 82 bp, Homo sapiens
gtgatattagtgaagggactgttgttccagaggatcgctgcaaatctccaacctctgaagactcagcctggatttcaaaact

SEQ ID NO: 795730 - DNA, 90 bp, Homo sapiens
gaggaaacttgatgcttctgggccaccatttgccagggcctcgctcgagggccaattcctgtccccccagcagcatggcatcgtgtgctg

SEQ ID NO: 795731 - DNA, 101 bp, Homo sapiens
ctcctcctctccttcccaggatactgcagagaccccctgccctctgacgatggtctcctgatcctggctgataagctccagggccccttttcctttgagct

SEQ ID NO: 795732 - DNA, 90 bp, Homo sapiens
gaatttcttacattttagagatggaggaagaaacttcaactcagattgatggacaacttttcttaattaagcaccttttgatacttcgtg

SEQ ID NO: 795733 - DNA, 83 bp, Homo sapiens
cagctgctgcctcgcgcccgggagcaggaggagctgctggcgcccgcagatgaacatccagtcatggataaaaatgagctggt

SEQ ID NO: 795734 - DNA, 88 bp, Homo sapiens
caccccgactgccgaggaacgagagcgcgaagctaagcctacaacacagcagtcccctcaggatgagcaggaaaagctcttggatgaa

SEQ ID NO: 795735 - DNA, 88 bp, Homo sapiens
agcgctcccaggagaaacaaggaaaagaagatctcccggagcagtgccctgaaagtgctggaccatgccatgattggccccgaaggca

SEQ ID NO: 795736 - DNA, 100 bp, Homo sapiens
gatgggcctgtgaccatagagctggaatcgccagctcccggcactgctacctctgacccaaagcagatgccttcaattaagttgcagagttctgatggag

SEQ ID NO: 795737 - DNA, 100 bp, Homo sapiens
cagcttcaccaactctgacatgcagaactgctggaactgtggccgcaaagccagcgagacatgcagtggctgcaatatcgcgcgatactgtggctctttc

SEQ ID NO: 795738 - DNA, 100 bp, Homo sapiens
tctttcagttcaagtgacaaacgtacctgtggtccctggatccagtgctactgctacaaataagaaatgcacagcggtattgatgagtagatccttggat

SEQ ID NO: 795739 - DNA, 121 bp, Homo sapiens
ggcgactacgacggcgttgatatcggtggtaacgacggcctcagcaggcggggaagatgaaagggttcctattactgtaaccatgccagaaatgacagagaatgagacgcctacaaaaaag

SEQ ID NO: 795740 - DNA, 82 bp, Homo sapiens
aagctgaggacacacccaggaaaagactcaggacggacaagcacagtcttcggaaggctcacagaacatttcctgcctgttg

SEQ ID NO: 795741 - DNA, 101 bp, Homo sapiens
tgcctgcctggcttctatgaacatggcgatggctgcgtgtcctgccccacagtccctggcacctggagaatctgccactgctgtaatgggcattaatttct

SEQ ID NO: 795742 - DNA, 100 bp, Homo sapiens
gcacatactgcacggccttggctggactctgcgggactatgtccgaggatacatccttcaggaaaaggggaagatagtgatgtactcagtataaatgcag

SEQ ID NO: 795743 - DNA, 98 bp, Homo sapiens
tgctgctggtaacagggccttgcctagtgggccttccttcccaggttcgatacaagaggctgttttcctagcgtggcttgctgcctttggtaagaaca

SEQ ID NO: 795744 - DNA, 74 bp, Homo sapiens
cctatcagtacctgtgccggctggaggaggccaagcgagcctgtggggcccggatagtcagccgaccagaggaa

SEQ ID NO: 795745 - DNA, 50 bp, Homo sapiens
tatttacccagaagtagtccatatggtagcacaggcggagtgcagcggag

SEQ ID NO: 795746 - DNA, 90 bp, Homo sapiens
cggtctacagctcccagcgtgagcgacgcagaagacgggtgatttctgcatttccatctgaggaagaaccggaactatggtttgtgcctg

SEQ ID NO: 795747 - DNA, 100 bp, Homo sapiens
cggcatctttgctcagaataggccagaggcttacacagcttacctctcaggaatgctacgttttgaacatcaagaatggaaagctgccattgaggctttt

SEQ ID NO: 795748 - DNA, 83 bp, Homo sapiens
cgctctgggatcccggccaccagcaattgtccgaacactgatatttgcatttaatggggaacaaaagatgaagaaggaaaagg

SEQ ID NO: 795749 - DNA, 98 bp, Homo sapiens
aaaattggacccaacaaagaccactctcctcaagtcagctgtcggccacgaatatcagtcgaaactttccaagcactgctcgcaggtggactcggtcc

SEQ ID NO: 795750 - DNA, 82 bp, Homo sapiens
gactggtgaatgaacagaaagagcttgctcagatacaagaaacccactgactttaaaagaaagaaattgcaattattgacca

SEQ ID NO: 795751 - DNA, 96 bp, Homo sapiens
acttcgtctatgtggcgcccggcataggggacaaggaccacatgtgcagtgtcaaaagtcgcctgtggaagctgctatccccagccaggctggcca

SEQ ID NO: 795752 - DNA, 90 bp, Homo sapiens
gcaggaaggtctcacctgaggtgaaccttcgaccttggacttctcagcctccagaatgctcctggagtggatccggcgcaccatcccctg

SEQ ID NO: 795753 - DNA, 127 bp, Homo sapiens
gggcatggccctccggagtgcgcagggcgacggccccacctccggccactgggacggcggcgcggagaaggcagaataccctctaccatctgctttggtcagggtgccgctcgaggatttaaaagca

SEQ ID NO: 795754 - DNA, 97 bp, Homo sapiens
cgctgggaaacatggcgaccgagggaatgatccttactaaccacgaccatcaaatccgtgtcggagtccttacagctattgacctgttgtattggcg

SEQ ID NO: 795755 - DNA, 100 bp, Homo sapiens
caatatcgttccttggaagttctaatcggatctggctataatacccctgctgacatttggagcacggcatgcatgaattggcagagggggtcgatttggg

SEQ ID NO: 795756 - DNA, 99 bp, Homo sapiens
cgcttggttaaaacctgacacttttaacagagtatcacaaagattaatgttacttcaacaaatggagaataaattgggtgatcaacacacagaaaaggc

SEQ ID NO: 795757 - DNA, 99 bp, Homo sapiens
gaaagatcctaactatgatgatgaccaggattggctaaaagatgtgtgtgaaaagaataagtggagtcacaagaattcccctatcatctggagagagct

SEQ ID NO: 795758 - DNA, 100 bp, Homo sapiens
tgatctgtctcatgaattttccttagttgctccaaatactgagttgaaatggatgcagtcagaactgaatgttgaagaagtggtaaatgacaggagctgg

SEQ ID NO: 795759 - DNA, 98 bp, Homo sapiens
gagatggtagccaaacccccaggctgcctttaatattggttgggaacaaatctgatctggtggaatatagtagtatggagaccatccttcctattatg

SEQ ID NO: 795760 - DNA, 80 bp, Homo sapiens
ggcagaggatccagtgttcaccatcctggccccggaagaattaaatgtgagggagtctgacgtaagagtttgtgatgagt

SEQ ID NO: 795761 - DNA, 98 bp, Homo sapiens
agggctccctctgacactgggtctctgtcacctccatgggaccaggaccgtaggatgatgtttcctccgccagctaatcacatatggctctgatagaa

SEQ ID NO: 795762 - DNA, 75 bp, Homo sapiens
caaacacattcaatgcagttagaaggaaaaggtcaactcgatccaatacagacccatgggcattaaccatgacaa

SEQ ID NO: 795763 - DNA, 100 bp, Homo sapiens
agacaggcggcgccatcttcgaacttagacttccggaaggactttggcgaggaagaggaggaggcagaagaggccgccgcggaaccagagtcctacctgg

SEQ ID NO: 795764 - DNA, 83 bp, Homo sapiens
cgccaaacgaagtcgtggaggtggcgaaacgaggaggagataacgcggccttgggctctgcttcctgcctgacacagctcact

SEQ ID NO: 795765 - DNA, 80 bp, Homo sapiens
atcgcaggctccctgcctactcccccaccggggatttcagatgtgaagttcatttccaatccgccctccatggtggcagc

SEQ ID NO: 795766 - DNA, 88 bp, Homo sapiens
tcagagaccaataaaaataaactgcttgaacatcctttgactggttagccagcttcaccagcctccaccaagacgggacaagcaggga

SEQ ID NO: 795767 - DNA, 83 bp, Homo sapiens
atctttgaccccagaacaaagccgcgggcctctcagacctgcctagagctggaacgttacctccagagcgagccctgctatgt

SEQ ID NO: 795768 - DNA, 51 bp, Homo sapiens
aaccggttcctcccaggcggcaagggcagcaaggcgaaccccatccctact

SEQ ID NO: 795769 - DNA, 83 bp, Homo sapiens
ctcacctcgctactcgcttgcctacccgccggcccgcgggtctacttcctcaaagataacgaaggaggcccaacttcattcaa

SEQ ID NO: 795770 - DNA, 88 bp, Homo sapiens
tggggtctcctgcagccctaccagcacctgatctgcgggaagaacgccagcggcattgaatgccccagaggagcccgaaacctcccag

SEQ ID NO: 795771 - DNA, 100 bp, Homo sapiens
catggacatattaactcttacctgaagcccatgttgcagcgggactttattaccgctttaccagtgttttacctcaatcatatatccacacaagtgcttc

SEQ ID NO: 795772 - DNA, 72 bp, Homo sapiens
caatgatgggagaccaccgggatgggcaggaatggaagttggatacactttgtgacttgtacgagacactga

SEQ ID NO: 795773 - DNA, 82 bp, Homo sapiens
gcgcagcctcttcgagcgccgcggacgcgtcatcgagtgtgacgtggtgaaaggaatgtgggtgccggcaggacaggcgatt

SEQ ID NO: 795774 - DNA, 98 bp, Homo sapiens
cagaaaatctctgtcagaactgagtatcgagatcgttatgattcagaccggtatcgggatgggtatcgggatgggtatcgggatggcccacgccggga

SEQ ID NO: 795775 - DNA, 82 bp, Homo sapiens
caggaggccaggggtgtcgccatgcccctgcagatcaagtcagtagtggcaccagagcatgtgaagggctacatctacgtgg

SEQ ID NO: 795776 - DNA, 83 bp, Homo sapiens
cttggactgagtcctgcaggacacagggttggatgtgtccagagcctgcatcagaaagggaggacttggtatattttgaacat

SEQ ID NO: 795777 - DNA, 100 bp, Homo sapiens
gtgcagggcaacacctctacaaggatctgcagccatttatattgcttaggctactgggatccctcggtgaagaggactctctgtcgaggctgctcttccc

SEQ ID NO: 795778 - DNA, 90 bp, Homo sapiens
ctgttatgttgcctgagggagaggatctcaatgaatggattgctgtgaacagtggaaccgtcccaaaatgtcccttgctcagaagaagga

SEQ ID NO: 795779 - DNA, 82 bp, Homo sapiens
cgtgtcgcctccggggggcgtagcaagctatttgaactgctgggacctgaaggacttgaacttattgagaaactcctccaga

SEQ ID NO: 795780 - DNA, 83 bp, Homo sapiens
caagaatgtgcatgctgctgtggcccgagggaggcagatggtacgtttcagcccaaacctggactcctatggatggctggtat

SEQ ID NO: 795781 - DNA, 82 bp, Homo sapiens
ggcgattgcgggggcctgggctagcaagtttatttctgatcgtgaaagtagaagaagtctcacaaacagccatttggaaaaa

SEQ ID NO: 795782 - DNA, 90 bp, Homo sapiens
tttacctccagtgtcccttcttccacatgaaaaggataaggagttccaggaagcgctcgcccctggccgaggatatgtccttgcaaaaca

SEQ ID NO: 795783 - DNA, 100 bp, Homo sapiens
aaaccagaagaggaggttgcccagaagaaaaagctcttagaacaagctctggtgattgaggaacagctgcgccgggctgcttacttgaacatgtcagaag

SEQ ID NO: 795784 - DNA, 75 bp, Homo sapiens
gaaacatagagaggaactggagcaattgaagctgactactaaggagaataagcaccttctagccaccatggcaac

SEQ ID NO: 795785 - DNA, 50 bp, Homo sapiens
atgtcgccgagatcgtggggcggcaaggtcgggaaagaggttaaagaaga

SEQ ID NO: 795786 - DNA, 146 bp, Homo sapiens
gttagacttgtttcttatatgtgatgccattccagcactggactcatggaggctgagcatttattcaggattctaccatcagaaaagaggccaaacttctatcatcatggtggatgtgaagtgtctgagtgactgtaaattgcaga

SEQ ID NO: 795787 - DNA, 50 bp, Homo sapiens
atcgctaccctccgaagtccgcccgtgatgctgatgagcgagagaagtgg

SEQ ID NO: 795788 - DNA, 103 bp, Homo sapiens
cgggatctcaggtcctcgggggcggcggccacgccaaggacggtttgcctgagaatacagatcaacccacagaacaaagcggatttccaaggcatctccccag

SEQ ID NO: 795789 - DNA, 100 bp, Homo sapiens
cctttcctcaggagtcatttctgttccgcacaggcctgctgaactgggtgctttatataggacctggctatgcaaataaatatggggatgtatgaataca

SEQ ID NO: 795790 - DNA, 98 bp, Homo sapiens
gagcctgggctggaggagcgggcggaggggacggtcaacgagggacgcccagaatcggacgcggcaggattcggaaacttcagatacgaaatatcccg

SEQ ID NO: 795791 - DNA, 80 bp, Homo sapiens
tagctaattaaaacatttttcagggacgtagccatccagagggatccatatggctttggagacagtcgagattcaaggcg

SEQ ID NO: 795792 - DNA, 51 bp, Homo sapiens
gaatccggaagggacacgctgaacaggatgtacagttacccagcacgtgta

SEQ ID NO: 795793 - DNA, 90 bp, Homo sapiens
ctcagcaaagatggtacaaaagagtctttggaggatgcggctttgatggaatctatgtactttcatcagcgcggccagtaagtttgcaca

SEQ ID NO: 795794 - DNA, 100 bp, Homo sapiens
gatcgagcgctactcgcgcttttcgccgtcgccgctctccatcaaacaattcctggacttcggagaatggtgttgaacgcgtgtgtcctgagagcctgct

SEQ ID NO: 795795 - DNA, 100 bp, Homo sapiens
gtggtgcttttgaaccactggaaagtgaggaattttgaagtacaccgtggtgacattgtatcattggtaccaactgccagagttttctctgggtgttaac

SEQ ID NO: 795796 - DNA, 73 bp, Homo sapiens
acagagaaacatgagaagcagcagtgaagtttacagcttcctgagcactgtttccacacctgtgatctcattt

SEQ ID NO: 795797 - DNA, 101 bp, Homo sapiens
cttcgcgtctgcccggccaagaggcaaaggggaggttacgcagcaaaccatccagaaggactttaatttttggaagtgaataaaacttgttttagaagacg

SEQ ID NO: 795798 - DNA, 75 bp, Homo sapiens
cagcaccttcacaataactgttgatcagaaaaccttccatttccaggctctgcccggatggccctagtcttcgtg

SEQ ID NO: 795799 - DNA, 120 bp, Homo sapiens
aggtgtacacacggcagagcatggccaagtccagatatatggagctctacacgtatcctcctgcctagcgcaggaattgtcttagaagaaagaaggcaagccaccattttacccacgtaa

SEQ ID NO: 795800 - DNA, 117 bp, Homo sapiens
cctcatgcaaatagcgggaagaacaaaggaaggggagcccgggacccccgggggcgcagcggctggactctattacctggcagaactgatagaagaatacacagtggccaccagcag

SEQ ID NO: 795801 - DNA, 100 bp, Homo sapiens
gtgcaagaggcgcaaacaagccaatcccaggaggaaaaacgaacaagcgggagcctgtgtcaggaaagcatgtcagagcagagctgccagatgtccgaac

SEQ ID NO: 795802 - DNA, 80 bp, Homo sapiens
ggcgcctgcccgccccgcgcctccgtctcccacgggggggccctcagcctcttggccttgaacgggctgttcatcttgat

SEQ ID NO: 795803 - DNA, 100 bp, Homo sapiens
ccgtggctgtgctgagggtggcggccggatagtcattgaagtcaacaagagagacatagtcttcctggtggatggctcatctgcactgggactggccaac

SEQ ID NO: 795804 - DNA, 100 bp, Homo sapiens
gggcgacgctggctgcagggacccggtgacagcgtgagaggatgatgactttgagttcactggcagccacctgacagtaaggaatggctactcgtgtgtg

SEQ ID NO: 795805 - DNA, 96 bp, Homo sapiens
gctgcgccacggcggccggacggtggagaacatgaggtggaagatggatgcctgaagtgtagactgctgctagctgaataccatctgggagcataa

SEQ ID NO: 795806 - DNA, 90 bp, Homo sapiens
gaagcctcctgcctccaaatgcccccatcgctatacaaaagtgacagagctgaatgaacctctctccaatgaagatcgaaatctcctctc

SEQ ID NO: 795807 - DNA, 76 bp, Homo sapiens
cacacctagctgaaactgatcttcttgcgtgccatttgaagccctccaagccacaaaactgtggtgaatggaaaag

SEQ ID NO: 795808 - DNA, 82 bp, Homo sapiens
gaagacccacctttgtttcctagtgagaaccgagtcagtgctcttacccagctcgccctcccctacctgcggaagagtcaag

SEQ ID NO: 795809 - DNA, 75 bp, Homo sapiens
tagtgctgaggcacctgccagctaaggctcaagttggcttaccagaagttacactgggacttctccctggtgcaa

SEQ ID NO: 795810 - DNA, 98 bp, Homo sapiens
tttgaagccttcatgaaggcaatcgcattatgccagtacatacaggcttctaaagccagggatggtgccagccctttcatttcaagtacgactgaagg

SEQ ID NO: 795811 - DNA, 100 bp, Homo sapiens
gactcacaatgactctgttgtgacagaccccgtgcggctgacacagctgtatgagcaggcccggtgggacctgctgctggaggagattgactgcaccgag

SEQ ID NO: 795812 - DNA, 100 bp, Homo sapiens
gttccagaccaagttccctgcggagctggagaaccggtgccggatggagtgctgtgatgtgccagccgagacactctacgacgtcctacacgacattgag

SEQ ID NO: 795813 - DNA, 100 bp, Homo sapiens
aggccaatgtcagagaaatctttgacaagcctgggttactaggtgtctttcagaagctgattgcatccaaagcaaatgaccaccaaggtttttatcttct

SEQ ID NO: 795814 - DNA, 100 bp, Homo sapiens
gaagatgcaatgctgatgtttgataaaactaccaacaggcacagaggtgttgacttcaaaatcaaaactgtagagctaagaggaaagaaaattagattac

SEQ ID NO: 795815 - DNA, 100 bp, Homo sapiens
cttccacagttgtcatttcagcagcgctccacaagtggaaatgtgccatgaatttcaggcatttatgaaaaatggaaaactgttctgtccccaggataag

SEQ ID NO: 795816 - DNA, 90 bp, Homo sapiens
gtgggctccaccctgtacactaaagctaatcttatcctttgtcgcagagactatctgagctggcggagatccacggtgtgccccgtggac

SEQ ID NO: 795817 - DNA, 100 bp, Homo sapiens
ataaagatgatgatatccttctcaaccttgtgggatgtgaaaactctgttactgaagaaataggaaggttgttgattactcacagtttcaggaatctgat

SEQ ID NO: 795818 - DNA, 100 bp, Homo sapiens
cagcatggagtcgcccgcctcgagccagcccgccagcatgccccagtccaaagtgtgcaccggcacagacatgaagctgcggctccctgccagtcccgag

SEQ ID NO: 795819 - DNA, 90 bp, Homo sapiens
ccgggctggctgcggccgccctgggccgggccccaccggacgaacccttaggagaaatcttgagagtggacagcaattgtgaagatcgcc

SEQ ID NO: 795820 - DNA, 100 bp, Homo sapiens
gaacagattaaggtgctggaggtgacggagggcagtgttcctctttacatgatatcctccaagatgatgagttctaatcctgaggaagaccctttggaca

SEQ ID NO: 795821 - DNA, 75 bp, Homo sapiens
cctacgtagcctggcttctggatcctggattagaaattctgaatatggcttcttgtgaccttgacagaaactcgc

SEQ ID NO: 795822 - DNA, 96 bp, Homo sapiens
tgacacggacaaggatagttttggctgatgttaatctatgccagcaattatgacaatgttagcagaccatgcagctcgtcagctgcttgatttcag

SEQ ID NO: 795823 - DNA, 98 bp, Homo sapiens
ggaagggctcagatagcagtataccagatgaagagaagatgaaggaggaaaaatatgattatatatcacgaggaggtgtaggagctgcacgatctggg

SEQ ID NO: 795824 - DNA, 82 bp, Homo sapiens
gtcatgaccactagacccacagctgttaaagcaacaggctaccaagcagtttctcgaagagattaacaagtggacagttcag

SEQ ID NO: 795825 - DNA, 50 bp, Homo sapiens
cgcccggggcagggctcgggagagcggagacctgtcggccatggagccta

SEQ ID NO: 795826 - DNA, 75 bp, Homo sapiens
cgacggtccctcagcccagccaccatgagcaccaagcagatcacttgcagctggaaaggcagctcatcatgcaga

SEQ ID NO: 795827 - DNA, 100 bp, Homo sapiens
cacctctctaagcctatggaaaagcttctgggacttggaccctctgtggaacacccgagtacctagcccccgaagtcattcagagcaagggccacggaag

SEQ ID NO: 795828 - DNA, 75 bp, Homo sapiens
aaatttgatgaagtgcaaagttcaggcggtatgattttgagtgtctgcaaaggtcaacggcagagacttatccag

SEQ ID NO: 795829 - DNA, 83 bp, Homo sapiens
tatattggtggtcatcagaagtaggtgataggaagaaatacttctcaaggtgcagcttcaagcttaggaccacccaccatgcc

SEQ ID NO: 795830 - DNA, 99 bp, Homo sapiens
tggaaacttgggctgagtaccgcggcgggcgcgagcgaggcgccctagacatcttctccctcccttgcctcagggaatgaaggatggcagcatgccgtg

SEQ ID NO: 795831 - DNA, 82 bp, Homo sapiens
cttcaaagagaaaaggcaacatcctgtcacaggccatgctctggcaaaaacgtgcatgtgagggaaccctggcttgttcaac

SEQ ID NO: 795832 - DNA, 100 bp, Homo sapiens
ctggaaggtgcgtgtggggctgggtctcggagtgggagacgtggagtgcaggtgatctacatgggccgcaacccccgggacgttgtggtctccctctatc

SEQ ID NO: 795833 - DNA, 100 bp, Homo sapiens
atctccatcacccaccaacaacaccacaataatccacagccaagcatgctacaagtgaaaactgatgagaaactgaatgtgtctgatgagaatacagcaa

SEQ ID NO: 795834 - DNA, 90 bp, Homo sapiens
gtggaggttgctagacctgggatccagcccttctggtgtcacctcccagggtgactcaactccaggtcaccatggctgttattggctccc

SEQ ID NO: 795835 - DNA, 100 bp, Homo sapiens
gcgcagcccaccaaacccgcactcaagtcagaggagaagaccccccaagcccactggtgaaacagctgagtgaagtatttgaaactgaagactctaaatc

SEQ ID NO: 795836 - DNA, 74 bp, Homo sapiens
tgtcaaattgagaaccaggtagatccccaccacctacagtaaaaaggaccctgacctggaggccaagcgcaagg

SEQ ID NO: 795837 - DNA, 100 bp, Homo sapiens
ccgcggctctccaagttctaccagccctactactatactggcaattgctggagaagattttgcaattgttgcttctgatactcgattgagtgaagggttt

SEQ ID NO: 795838 - DNA, 96 bp, Homo sapiens
gaatcatggcggctgcgctgttcgtgctgctgggattcgcgctgctgggcacccacggagcctccggggctggggccttcctgctgtgctggacgc

SEQ ID NO: 795839 - DNA, 74 bp, Homo sapiens
ttgggaatcaggtctggaatactcctaaccaagaagttgcccagatttggagcaagaggtggtggtggccttcc

SEQ ID NO: 795840 - DNA, 100 bp, Homo sapiens
ttggatattcgcatgcctggggttacacctaaacaggttcacaatggtccgtagtggaaaaaatggtgaccttcatcttaaacagattgcatattacaaa

SEQ ID NO: 795841 - DNA, 101 bp, Homo sapiens
ctgtaaggtgctggctgtcaaccaagagaacgagcacctgatggaggactacgagaagctggccagcgacacagccagctaaaggtgtggatgagcaaata

SEQ ID NO: 795842 - DNA, 100 bp, Homo sapiens
agcctcctgaggagctgggattacaggggactttcccatgcctttcatatctgccaaatcgagtcctgtgattcccttggatggatctgtgaaaatccag

SEQ ID NO: 795843 - DNA, 82 bp, Homo sapiens
tgaccgagagcgtgaccgagagcgcgaatatcgtcatcgttagaagggaatgtgaagttttctgtaagaaccatcctgcccc

SEQ ID NO: 795844 - DNA, 50 bp, Homo sapiens
ccaaactctccatcacccagggacacagcattgttggttttgccatgtac

SEQ ID NO: 795845 - DNA, 80 bp, Homo sapiens
cacactgaagctgggaggcaaaggctacaagctgtccccagaggactacacgctcaagactcggtgaaatacctggagtg

SEQ ID NO: 795846 - DNA, 95 bp, Homo sapiens
gtggaaagaaaccatgtgctgaaatgtttgacgacactgatggtttggtgatcttattcctgataatgttggttatgcgcaaacgtgttgctctt

SEQ ID NO: 795847 - DNA, 100 bp, Homo sapiens
gctactggacctcgttcagcagtcatgtaactataagcagcttcggaaaggagccaatgaggctggtcttatttgggctaagtaaccagatggtggtagc

SEQ ID NO: 795848 - DNA, 100 bp, Homo sapiens
gcccctgagcgccggcagcggccgcggtgggttcttcagtttaaatgctgcggtttggtcaatggagctgctgattggggaaataattttcaacactatc

SEQ ID NO: 795849 - DNA, 82 bp, Homo sapiens
gattggagattccacccaaacttgctggtcactgggagggtatttgtggtgcagcagattcccaacagtaacctcctcctcc

SEQ ID NO: 795850 - DNA, 83 bp, Homo sapiens
cccgcgcccccgcggctggagggtgcacacttccaccctgggcagcgtgtttggggacgcgtactatgagcagcagatggcgg

SEQ ID NO: 795851 - DNA, 100 bp, Homo sapiens
tggtgtgggccggctagaggaagaggcgttgcggcgaaaggaacggctgaaggccctacgggagaaaaccgggcgcaagttttttgctccactcaagcct

SEQ ID NO: 795852 - DNA, 80 bp, Homo sapiens
gagctaacctcggggaccgagatgcagataaagcccccaccctctgctgtcacacagcgcaacaaacagccttggcatcc

SEQ ID NO: 795853 - DNA, 50 bp, Homo sapiens
ccagatccatttacactttacagaagtgtttggattgtgagctatttcag

SEQ ID NO: 795854 - DNA, 51 bp, Homo sapiens
cggcgagcggttccttgtgggctagaattaaacaaccaccatgtcgagcaa

SEQ ID NO: 795855 - DNA, 100 bp, Homo sapiens
gccgcatgattcttgaaatcatgcagaaagaggcagatgagaccaaacttgggccgaattcattttgttttcctgcctcctgctggtgatctgcctgatc

SEQ ID NO: 795856 - DNA, 83 bp, Homo sapiens
atcgttttgaagagttctgcgttttgccagtcacctctcaactgtgtgccaaagatcggtttgggcttggccagccaggaaga

SEQ ID NO: 795857 - DNA, 73 bp, Homo sapiens
gccccgcgcagcccccggccgcagcgcaggcagcccagcagaacccagcgggtgccgcttctccacccgaggc

SEQ ID NO: 795858 - DNA, 98 bp, Homo sapiens
ctgctgcagcggcagcaccaggcctcagaggagggaatttcaaaggtctgtgcaagcaaattgatcacttcccagaggatgcagattacgaagctgac

SEQ ID NO: 795859 - DNA, 100 bp, Homo sapiens
cccactccagaagtagcatggaaatggagggcatcttcaaccacaaagggaagtctgttagaactgctgtgctgatcaacgggacgctccgtctttgaag

SEQ ID NO: 795860 - DNA, 75 bp, Homo sapiens
atccacacatcataaagctttaccaggttttaaaatcaaagatgggaaaatcggagaaaattgcccttccccatg

SEQ ID NO: 795861 - DNA, 95 bp, Homo sapiens
atggccttgctgtgctacaaccggggctgcggtcagcgcttcgatcctgagaccaattccgacggcctccggaacctgtttacagcactgtgaac

SEQ ID NO: 795862 - DNA, 83 bp, Homo sapiens
tgctggtgtcgccaggctctggagcagttccatcagctcagccaggtcttggggatatgagactttctactcggaatatcctg

SEQ ID NO: 795863 - DNA, 87 bp, Homo sapiens
atggtatttgcaagtcatcagactgcataaaatcaggttatcaatagtctggctgtctatcgtcatcgtgagactgactttggtgta

SEQ ID NO: 795864 - DNA, 97 bp, Homo sapiens
tgaaaaagttgaagatatcaatggatgtcctagaagtcagtctcagatggacactgcccatctctaagataagaacctggaaaggggactctgttgg

SEQ ID NO: 795865 - DNA, 100 bp, Homo sapiens
gtgctgtaaccacctcacagattccagcttcggaacaagagaccctgaaagatccagattacctgaagctgtggttggacacttttgtttctagctatga

SEQ ID NO: 795866 - DNA, 96 bp, Homo sapiens
tttgaagtaaatatacgctttgttggtggactactctcagcctactatctgtctggagaagagagtgaagatagtccaagtcctaagagacagcgc

SEQ ID NO: 795867 - DNA, 95 bp, Homo sapiens
cctgctggggttgcttgtcagtagcgggcaaggtgcagcacttggacagagtcatgaagccagagcgacatttaaaataacatccggagttacat

SEQ ID NO: 795868 - DNA, 90 bp, Homo sapiens
cccaaggcctgagtgcagctctgtgctaagccaacaacaacgacgtccctacagatgaagaagatgaaatggaggagtccacaaatcgac

SEQ ID NO: 795869 - DNA, 75 bp, Homo sapiens
gccaaagaaacaagccgtggaataggtgtatcaagtaatggtgcaaagcctgaacggttcctggctcagagtttg

SEQ ID NO: 795870 - DNA, 78 bp, Homo sapiens
aggggacagaggcaccaaggacctccaagacagagagacaagagagacacctccaacttcgacaaagagttcaccaga

SEQ ID NO: 795871 - DNA, 90 bp, Homo sapiens
tggtggccaacattttgcggatactcttctgggctgaagaagatgcagagcagcctgaagctggtggactgtatcatcgaggtccacgat

SEQ ID NO: 795872 - DNA, 83 bp, Homo sapiens
attcatgttcaagctgcattttagacatagctggcaagagtattttcgtgtcctcctccgcctcctcctctctgcatgcgcgt

SEQ ID NO: 795873 - DNA, 100 bp, Homo sapiens
atcctaatggctttgttagaagtcctgtctgggcggaatctggttcctaaaagtaaagctctagaggccgtcaaattggcaatagaagccgggttccacc

SEQ ID NO: 795874 - DNA, 83 bp, Homo sapiens
cacgacccctccctgccatgtatccgcagggcagacatccgtgcagagcagagcgggcggaggaccccgggcgcgggcgcgga

SEQ ID NO: 795875 - DNA, 96 bp, Homo sapiens
gtgtttgctcatgggctccacgatccaggcagagggctgctgaagtatcaaactaatttagatacccaccctcccggctgcatcagtcttaaccga

SEQ ID NO: 795876 - DNA, 100 bp, Homo sapiens
caaggatgcccaggctgggaaggagccaggggggagcagggctcactccagggctttgtgaaggatgtccatgaagactctgtcaccatcttctttgaaa

SEQ ID NO: 795877 - DNA, 96 bp, Homo sapiens
gatagtgaaagtgaaagcaattggaagacaaaggttcaaagtccttgagctaagaacacagtcagatggacctgaagattatcggctataagagaa

SEQ ID NO: 795878 - DNA, 108 bp, Homo sapiens
ttcaagaagctttgaagctggataggagtctccagtcttcctcttgatccatatgtttcagaccctcaaactgacacaagacctacagagaaaaccctttgccaaatc

SEQ ID NO: 795879 - DNA, 98 bp, Homo sapiens
ggaaaggtggcatcttggccatagaaggaaaacgtcagtgttggccaggccgccgtgcggtcatggccggatggccgacgcctgcagggacgaggccg

SEQ ID NO: 795880 - DNA, 78 bp, Homo sapiens
tgagagagtccgggagcccgagcttgaggtaagaatgattgatgttggctgatattggagtgctcattcacatgaagt

SEQ ID NO: 795881 - DNA, 98 bp, Homo sapiens
gaaaagaagtctaactatgaagtattagaaatgccgggtctaagttgtagattttatcaacacaaatttcctgaggtggaagatgtagtgatggtgaa

SEQ ID NO: 795882 - DNA, 83 bp, Homo sapiens
actttgagccagtccagaccctgctgctgtcttcaaagaagaaaccaggcgatgcggaagaagctaatcttgtacttcaagag

SEQ ID NO: 795883 - DNA, 76 bp, Homo sapiens
ccgagggcccccaagtgacggccacgaggcactggagaaggaggtataaacttcgacccaagcggatcgaaggttc

SEQ ID NO: 795884 - DNA, 75 bp, Homo sapiens
gggtttgtgagcctggactcgccctcctatgtcctgtacagggtcagtttgaaaaggaggatcgagctcactgtg

SEQ ID NO: 795885 - DNA, 75 bp, Homo sapiens
actttatgaagctcctccaagacaacagatctcggcccctttccaaacactcctgatgcctcatttgcctctcgc

SEQ ID NO: 795886 - DNA, 80 bp, Homo sapiens
acaatgccggtggaggaatttgtggctggctggatctctgggggaagacgttttcatcccgctaatcttgggaataagag

SEQ ID NO: 795887 - DNA, 101 bp, Homo sapiens
ctacagaacagcacgtaccagaggtggaagtccaagtcaaacgcagaaggactgcctcactgagcaaccaagagacacagcaggccaggaaagatacagga

SEQ ID NO: 795888 - DNA, 100 bp, Homo sapiens
ggcggaggcggctttggaagccgtgcggagcgagttacgagaattcccggccgctgcaagggatattcagtctaaaagcagcaaggccgtggtgcatggc

SEQ ID NO: 795889 - DNA, 88 bp, Homo sapiens
gctgagaaaacagacagatttgtcatgaagaaactcaatgatcgtgtcatgagaatgctgagggttggaaaagcaaaagcagatgtgt

SEQ ID NO: 795890 - DNA, 100 bp, Homo sapiens
ggaaagtctgtcattctggactgcacccctacgggaacccacgaccattatatgctggaatggttccttggtgttgattgcctttgctcagtatcttcag

SEQ ID NO: 795891 - DNA, 79 bp, Homo sapiens
ttggggcatcctcagcacccgcccaaggctttgttggtgttgcacctttcggatcggcggccccttcattttccattgg

SEQ ID NO: 795892 - DNA, 98 bp, Homo sapiens
ggcgtcttcgtttgggacgaggagaggatccaggaggaggagttgcagaggatttcttcaagaagttcttatatgagccattgccagtagaatctcac

SEQ ID NO: 795893 - DNA, 90 bp, Homo sapiens
aggacctctaccgagatgtgatgttggagaactacaggaacatggtcttgctggcagcagccgctcttctaaaacattcaaaccaaagaa

SEQ ID NO: 795894 - DNA, 75 bp, Homo sapiens
ctggttctggaatcctcagttcaaggccaggtcagagcagcccaccatgggatggggagggggtggaggctgcac

SEQ ID NO: 795895 - DNA, 96 bp, Homo sapiens
caccgacctcccgttagcccctgagagccgggtggaccctgaggtccttcacagcctgcagatttctcgaatgctggcagccaaaaccgttttggc

SEQ ID NO: 795896 - DNA, 76 bp, Homo sapiens
ctcttccccagaactacaggggctctggccatcttcgtgggcaaactctttgattctacaatagctgatgagggaa

SEQ ID NO: 795897 - DNA, 129 bp, Homo sapiens
tgcaggcccggcgccgccactgccgcagccaggagatggttcgggcctagcggagccgggactggagatatttgatcaagttccttgcaaagcttgctcagaccagcgatgtgaataaaatgactccca

SEQ ID NO: 795898 - DNA, 101 bp, Homo sapiens
ggcagaagcttcaccacaaaagcgaaatgggcacaccacagagactttagaagacagctttccatcgacactaggccctttagaccagcctctgaagggaa

SEQ ID NO: 795899 - DNA, 83 bp, Homo sapiens
ctcgcctcgggtctcgggggccgctctgggatcccggccaccagcaattgtccggtaaagtgttgagagaggagaaccagtgc

SEQ ID NO: 795900 - DNA, 100 bp, Homo sapiens
caggacctctaaaaaaggcacctgctgctaaggagtccttcaataatgttaaacagtggctgcaggaaatagatcgttatgccagtgaaaatgtcaacaa

SEQ ID NO: 795901 - DNA, 100 bp, Homo sapiens
tcagcttatagttcttttgtaaatctctttcgttttaacaaagggcaagtgtccagagaatggctgggatgaaagtacacttgaactctttttacatgaa

SEQ ID NO: 795902 - DNA, 75 bp, Homo sapiens
gtatgtcagtgaggagacttgtcacatgcatcaggaccagaggccctcgggaccaaggatcacgtcatgactccg

SEQ ID NO: 795903 - DNA, 100 bp, Homo sapiens
gcagcttacgtagttgaggcagggtacaggtttgcagattccgccagcagcacagcaagctctacagatgagtggctctttggcatttggtgctgtggca

SEQ ID NO: 795904 - DNA, 76 bp, Homo sapiens
tccagatctatgagaagatcgtctctgggaagatttctcaaggggaagataaaatgactaagaggaagaagctgcg

SEQ ID NO: 795905 - DNA, 48 bp, Homo sapiens
gcttgtgaccctgcagctcctcaaagaattgaatgatctggcacggga

SEQ ID NO: 795906 - DNA, 82 bp, Homo sapiens
catggctgaggtcttggtcaccggggaacagctacgggcgaactttctgaccaagtatacaactacccagagggcctaggag

SEQ ID NO: 795907 - DNA, 75 bp, Homo sapiens
ctaatacccagttcattgagaatgcttactgtggatttctccgtcctggagtttcttcagagaatctttctgcag

SEQ ID NO: 795908 - DNA, 82 bp, Homo sapiens
ttggactgagtcctgcaggacacaggatttttagactctgaggagcagttggagctaatccacattatggaaatggaaacca

SEQ ID NO: 795909 - DNA, 74 bp, Homo sapiens
gagacgagccggccgtcccgggccgggggacccgcccgccatggccaccaagctgtccgtacctggcggtgaaa

SEQ ID NO: 795910 - DNA, 73 bp, Homo sapiens
gaaaggactgaccatgctggatcacgaacagatgacctgagaattaatttatggcacttagaaatcacagata

SEQ ID NO: 795911 - DNA, 100 bp, Homo sapiens
aagaaatgaagaattggaggaacagtgtgtccagcatgggagagtacatgagacgatgaagcaaagctgggaagttatcaattccaaaccagatgaaaga

SEQ ID NO: 795912 - DNA, 100 bp, Homo sapiens
gaagactctggacctcatgaccatgtatattccagagggggatctaaagagccccagaaattcacaaagcaaggaccagactggcttgagctctctgaga

SEQ ID NO: 795913 - DNA, 82 bp, Homo sapiens
cccccgacggcggaggcgcccgcgggtcccctacagccaagagctagagccggtgcaggccacgcagaacaagacagggaag

SEQ ID NO: 795914 - DNA, 76 bp, Homo sapiens
catttctcggccgaagggccatttgcttttgcggagagtatctgactgtcttctctcagatgattgcatttcatga

SEQ ID NO: 795915 - DNA, 75 bp, Homo sapiens
cctcgctggagatcgagtaccaaccaatggtaatgatagtaaaaaatttaaaggagaagataaaatggatggtgc

SEQ ID NO: 795916 - DNA, 75 bp, Homo sapiens
actattttgatagatgttactttgctgaaaatagaactgaattataaggctgtctgcagagatttgaaaaatggc

SEQ ID NO: 795917 - DNA, 75 bp, Homo sapiens
agcagcagcagatgcttcaaatgagtgctggttgccgaggagaacgtggacttccgcatccacgtggagaaccag

SEQ ID NO: 795918 - DNA, 100 bp, Homo sapiens
tctcttttgccaatacccgggaaaaactttgtgaggttatatatccgcagcaatccagatctctatggtatttgccttatccacacatccttatggctgc

SEQ ID NO: 795919 - DNA, 100 bp, Homo sapiens
ccaagatcctgatggacagccccgaagacgccgacctcttccactccgaggaaatcaaggaattgaatgatctggcacgggaccctccagcacagtgttc

SEQ ID NO: 795920 - DNA, 74 bp, Homo sapiens
agaaggacgcactgactcgcctcaagcacctgcgcatcgtcatcggctgtattcatcaccaaagaaaaaactta

SEQ ID NO: 795921 - DNA, 100 bp, Homo sapiens
tctgctgcatccaaatcttctccctggacctcgtgcatacgatttgaagaacccaagtgattcagcagtgcacagcccctttacaaagcgccaggctttt

SEQ ID NO: 795922 - DNA, 100 bp, Homo sapiens
aagaagaagaagttgcgaaggatccccaacggggaggccaacgtgaagaataagactttgaccccgacgcaggcttcagtgattgccgcggatcagaagc

SEQ ID NO: 795923 - DNA, 82 bp, Homo sapiens
gccatgtcgggttattcgagtgaccgagaccgcggccgggaccgaggaaaactttagaaactgttcctttggagaggaaaaa

SEQ ID NO: 795924 - DNA, 85 bp, Homo sapiens
cgttctgaatctgtgcacctaccatcaccctgaaaacatccagctcccaccggggtcccaggtgtgacaccttcagcaggtctca

SEQ ID NO: 795925 - DNA, 100 bp, Homo sapiens
ctcgtggcctgcctctgcgtgcagctcccagctcctccagcagccgacaggaggcccgtcaagatgcaggcaggcattgccaccccagggatgaagacag

SEQ ID NO: 795926 - DNA, 100 bp, Homo sapiens
tgagcatccagtggaaaacacgccagcttcaaagcaaggacctaatgcactgcacagcatttgcaacggcagatgagtatcatctgggaaatctgtctca

SEQ ID NO: 795927 - DNA, 83 bp, Homo sapiens
cgcgaattggagaaaaagttcagtgggaagcatgtcgtctttatcgctcagtctgccatagcaactcaagtaatgcaacttta

SEQ ID NO: 795928 - DNA, 99 bp, Homo sapiens
atagcaaaagatttgatgaaagtacttcagggagtcaacggtgaggaatctccgtatgttatgatgaagaaaaatcatgaaatgcttgaaggcaatgag

SEQ ID NO: 795929 - DNA, 82 bp, Homo sapiens
gaccattttcttcagcctccttgtcctaggaagggaaaaggccgaggcatcagcgtgtgaagaccgcaaagacgatcccgag

SEQ ID NO: 795930 - DNA, 100 bp, Homo sapiens
caaaccggaaactgagacccaaagcaaggaagggacttggccaagattctatggtgtcagtaaagaggaaggctgagaacattgcttctgtggaggaagc

SEQ ID NO: 795931 - DNA, 96 bp, Homo sapiens
gtggaagcaggactgcgccgcgtcttcctcaaggggcctcatccacatgctcacccacttggccgaggctctgcaccaggcccggctgctggccct

SEQ ID NO: 795932 - DNA, 98 bp, Homo sapiens
tcttgggcaccgagagggactacgtgggcaccttgcgcttcttgcagtcgataatgctcggaatatttttcaatgtccattccgctgtgttgattgag

SEQ ID NO: 795933 - DNA, 100 bp, Homo sapiens
tttccacccacaaagattgaacgacatgccatgtactgcaatggtctgatggaggaagatacaggtttgagacatttgaggtaaacagctttgagcagtt

SEQ ID NO: 795934 - DNA, 100 bp, Homo sapiens
cggattttgcggggttcgtcgggcctgtggaagaagcgccgcgcacggacttcggcagagatgggcaccaacaagtttgccagccagcagggcatgacgg

SEQ ID NO: 795935 - DNA, 75 bp, Homo sapiens
gcaatgctgacctcggtttcctggacccattccgactcaggacgattactgagagccaatcagattagtttcaac

SEQ ID NO: 795936 - DNA, 83 bp, Homo sapiens
ccatgatagactttcacaaattctaacagatttccccaaattggatgatttgaacttctcgaagagctaccaacacccaagtt

SEQ ID NO: 795937 - DNA, 75 bp, Homo sapiens
ctgccctgaacaatataaccttagttggcataaactactcatacaggagttttgagagcaaaatgacaacaccca

SEQ ID NO: 795938 - DNA, 82 bp, Homo sapiens
agtacaattctattgcacatcaatgatatcatcccagacatcgatgaatgtggaaatgagctcaatggaggctgtgtccatg

SEQ ID NO: 795939 - DNA, 51 bp, Homo sapiens
catatactcaggggtcctcataaacaggataaaagaatcagagtgtctcaa

SEQ ID NO: 795940 - DNA, 86 bp, Homo sapiens
agaaccccaggactgcgcccccgggagcgggcgcccagagcaaaatgatgcttcaacacccaggccaggtctctgcctcggaagtg

SEQ ID NO: 795941 - DNA, 75 bp, Homo sapiens
agataggatcaagatggccatgtggcaggttataggtgcacagcgaaggagaagccccagtgcactagccattga

SEQ ID NO: 795942 - DNA, 80 bp, Homo sapiens
gctgcgatctctgtggtaggcccaggagaagtttcggtgtccgacatccctgtctgttgttaaagacagaaacctaactg

SEQ ID NO: 795943 - DNA, 75 bp, Homo sapiens
ggtggcggccggagacgtggatttgcctcaggaactacttccagtagcaatacaatggtagctcccacagatggc

SEQ ID NO: 795944 - DNA, 128 bp, Homo sapiens
gcggcggcgcctcccgggctccggctccggcttctgctgttgctcttctccgccgcggcactgatccccacagtttctctgcaggtggatattgttcccagccagggggagatcagcgttggagagtc

SEQ ID NO: 795945 - DNA, 75 bp, Homo sapiens
gtctcaagtccacaggaggcccccctgttgctattggtccagaaaagggcgtggtgcacctggcgacagcggccg

SEQ ID NO: 795946 - DNA, 90 bp, Homo sapiens
atctgcacagcactgaagaacctgggaatcagaccctgagaccctgagcaagatcaagcaccccaacattgtagccctggatgacatcta

SEQ ID NO: 795947 - DNA, 75 bp, Homo sapiens
gctacctgcaagctctatttttaccagatgctcttggctgtgcagcgatttgcataaccaaatgatcaagagcat

SEQ ID NO: 795948 - DNA, 100 bp, Homo sapiens
cagtggatgtaaaccccttccagctggaagtagcagtggtcacaactgagagagccaaacatttctacagcccccaggacattcctgtcaccctctacag

SEQ ID NO: 795949 - DNA, 80 bp, Homo sapiens
taggaagcccctatcgccgagctcgttggagcttgaacccattgtcacccctccggtgtcttcaaaaacaaacatattta

SEQ ID NO: 795950 - DNA, 75 bp, Homo sapiens
tgagcatgacccccatgtgctcctggccgtggccaagcaatgtggagaggtggaaaagtcacaagctttgagtca

SEQ ID NO: 795951 - DNA, 101 bp, Homo sapiens
tccagaacgtgccatggagacgcttaacggtcacttttacaaagagaaagtttggattaatgaagaaagcctatgaacttagtgtgctctgtgactgtgaa

SEQ ID NO: 795952 - DNA, 95 bp, Homo sapiens
cttgagctagagcaagctaaggcacagttggtggacccccaaaagtacaagggcatatttaacggattctcagttacacttaaagaggatggtgt

SEQ ID NO: 795953 - DNA, 100 bp, Homo sapiens
gcagcagcagacagcagtacagacagctcaggctgcccagatggtggctcccggagtccagacggggcgggcaccatgaacaagttacggcagagcctgc

SEQ ID NO: 795954 - DNA, 88 bp, Homo sapiens
cccgagttcaccaaaattcagacattggtcaacagttgtcaccgacagatggctgagattgctgtgaatgccgtcctcactgtagcag

SEQ ID NO: 795955 - DNA, 51 bp, Homo sapiens
ataaccttgaatggcgactagatgtacaggccatcgaagacggcaatttgg

SEQ ID NO: 795956 - DNA, 75 bp, Homo sapiens
ctcactcagattccctcattgatacctttcctgagtgtagtacggaaggtgctggagaatctggtaaaagcacca

SEQ ID NO: 795957 - DNA, 100 bp, Homo sapiens
aggatcagttggctttagcaattgggtcttactacatattgcaacagaagataatattggaggtgaagagggtaacatgaagtttggcactaccctgaag

SEQ ID NO: 795958 - DNA, 100 bp, Homo sapiens
acactaagggcttcagtcttgaaagttttagagccaaagttgtctgagggaagtcaaaagcatgcaagcctacagaaaagcattgagaaagctaaaattg

SEQ ID NO: 795959 - DNA, 90 bp, Homo sapiens
cagacatctacaaccttcgatctcctgacgagatgagtctgaatgtacttcagatgaggaaatctttatctcacaagatgaaatacagtc

SEQ ID NO: 795960 - DNA, 95 bp, Homo sapiens
acccacggagcctccggggctgcgagacggtcatctgttccagccgggccactgtgatgctttatgatgatggcaacaagcgatggctccctgct

SEQ ID NO: 795961 - DNA, 109 bp, Homo sapiens
ctcggcagcatggcgtccgtgacgctgagcgaggcggagaaggtgtacatcgtgcatggcgtccaggctcaaactgtccaggttgctgaagttgaaccacagtcacagc

SEQ ID NO: 795962 - DNA, 100 bp, Homo sapiens
gatgcgaggaaagtctgtcattctggactgcacccctacgggaacccacgaccattatatgctggaatggttccttatgaatagacctagtgctgccaac

SEQ ID NO: 795963 - DNA, 75 bp, Homo sapiens
tctggtgccggcgtttgggctacggttgttgttggcgactgtgcttcaagcggcaagaaataatggcggcagcta

SEQ ID NO: 795964 - DNA, 100 bp, Homo sapiens
gagtggatcaagtccatccagggtagctcctcccgggacaaggaccgaagtgcgacggtcagtagttcagtgcccatgcctgctggagggaaaggaagcc

SEQ ID NO: 795965 - DNA, 100 bp, Homo sapiens
ttggagaactacaggaacctgctttctctcgatgaggataacatccctccagaagatgggaaaaggacttggaggccaagttcattattcagatggagaa

SEQ ID NO: 795966 - DNA, 50 bp, Homo sapiens
agatggctactctggagttgaggaaggaaaatcacctcggcagtgtttga

SEQ ID NO: 795967 - DNA, 75 bp, Homo sapiens
atgattaaacaggaacccagagattttgcatatgactcaggggatggagtgttagatctctctacaaagaaaacc

SEQ ID NO: 795968 - DNA, 75 bp, Homo sapiens
tgggttttttgtggcttccttcgttattggagccaggcctacaccccaggttcgtgctggccgtgggcagcgccg

SEQ ID NO: 795969 - DNA, 100 bp, Homo sapiens
gtggatcctctggccagctgactgcacttcttttttgagaaaggaaggaatatatcctgactgattgcatcagaacacaccatgatggctgtgacctaag

SEQ ID NO: 795970 - DNA, 83 bp, Homo sapiens
ttgcagacgagggggagactggcatgttctccttgagcaccatccggggtcaccagcctcattacgtcccagacaactacaag

SEQ ID NO: 795971 - DNA, 73 bp, Homo sapiens
cgcccttctctcgcttcggactgcgcaacgctgcgctctgggctgacaggcagcagctatgggctgcaggtgc

SEQ ID NO: 795972 - DNA, 85 bp, Homo sapiens
cccacctgctttgagaagagcaatgacattgggggcctgtggaaattttcagagtccaatgtgctgattgctgctaacagtcagg

SEQ ID NO: 795973 - DNA, 100 bp, Homo sapiens
tgtcttttagcaacattaatggaggctgcctaccacaaggactttagcttactttttaaagattgaagaaaaaaaagaagacagaaaaagaagaactcaa

SEQ ID NO: 795974 - DNA, 82 bp, Homo sapiens
cctctggtgtccggggtgctttcggagcccgaagttttgctcccgattggagctggagtgagccttccaggaattttggctg

SEQ ID NO: 795975 - DNA, 100 bp, Homo sapiens
gtgatatttgcctttagtgcactcttctccttcacagtaaagtggctggttgtttgcattcgctccacttggaatgctctctctccaaagctgagttgtg

SEQ ID NO: 795976 - DNA, 76 bp, Homo sapiens
caggaatttatggtcgcctttttgaatgaggcacggatgggcagaagcctttgcaggtatcagaagttcacatatc

SEQ ID NO: 795977 - DNA, 80 bp, Homo sapiens
tcctgatgaagttcgagcactaatatttaagaaagaagatgttaactttcagttcaaatctgaacatcaatgatgtacta

SEQ ID NO: 795978 - DNA, 50 bp, Homo sapiens
cccctatcctatccgcaaacagcctcaggcccaggcccaaggccaagtga

SEQ ID NO: 795979 - DNA, 100 bp, Homo sapiens
catctgcgtgtgcggggtgcgtgggtgcctggagatgaagctggaaaggttcaagtgctggggccggcagtggagagttccacgtgtacagacatctgcg

SEQ ID NO: 795980 - DNA, 82 bp, Homo sapiens
attccccccgcaccaaattgcatcgtttcccagcctctcaacattgcctacagccacatctacagctcctacaggaatttcg

SEQ ID NO: 795981 - DNA, 83 bp, Homo sapiens
caaagattacaccaagatctgtgctgaccacaggaattggatctactagtgcagggagaagcatgacactggccaacactgcg

SEQ ID NO: 795982 - DNA, 100 bp, Homo sapiens
cagttgcagcccatggagatccagttcaattatgaatctcaggaacaccaccttctgtcagagctagcgctgaacacagcccagtttgcaaagagtctag

SEQ ID NO: 795983 - DNA, 76 bp, Homo sapiens
ctcaaacgtggagatcaactcctctctgttaatggagtggttattttgtccacaaatattgctgaaacaagcatta

SEQ ID NO: 795984 - DNA, 75 bp, Homo sapiens
ttgtccatgtcactgatctttctggcaaaacaccaatcagggtcttcaggcctggaagattgaagacattccagc

SEQ ID NO: 795985 - DNA, 100 bp, Homo sapiens
gttgctattggaccatgtagaatgttgcaatattgtttacaggctgacaaacgggctcatcataatgcactggaacgaaaacgtagggaccacatcaaag

SEQ ID NO: 795986 - DNA, 82 bp, Homo sapiens
tttctggcctggaggctatccagcggggggccctcagcctcttggccttgaacgggctgttcatcttgattcacaaacacaa

SEQ ID NO: 795987 - DNA, 87 bp, Homo sapiens
gtcagcactgactttcagctatggaatcggggacggcaaaacagaacagaaaggcggagataaaaagaggggtgttaaaagaccacg

SEQ ID NO: 795988 - DNA, 98 bp, Homo sapiens
tcaagccgactctcaccatcatcaagacggaaaaagtcgatctggagcttttcccctccccggttcctccaactcctctgccaaccaatgatgttgat

SEQ ID NO: 795989 - DNA, 83 bp, Homo sapiens
caggaggccgagcgcagagcattggcaggaggggcaaggtggaacagatgccagaattccagaaaagttcagttcgaatcaag

SEQ ID NO: 795990 - DNA, 98 bp, Homo sapiens
ttcaagagaaatggagcccttctccaagaggcacagagctttggcctgctggatcccaaactctgctacctgctggatggaatcctcttcatctatgg

SEQ ID NO: 795991 - DNA, 90 bp, Homo sapiens
cggctgccttacgatgtgacccgcttcatgatcgagtgtgacatgtgccaggactggtttcatggcagatggggcattctcttctcccac

SEQ ID NO: 795992 - DNA, 100 bp, Homo sapiens
ggcctcggcgattatggacccggccgaggcggtgctgcaagagaaggcactcaagtttatgctgatgaccaaacacccaggcaaacgtctgggttgtgga

SEQ ID NO: 795993 - DNA, 100 bp, Homo sapiens
aattatcaacaccaaaaagctttctgctagggggttaagtttagagcaagttgacatcttatggcattgtttagtagaagattctgaatgttatgatgat

SEQ ID NO: 795994 - DNA, 100 bp, Homo sapiens
ttacaacatgttgggggtggacagcgatggacacagggaaccggaaggctgcggataagctcatccagaacctggatgccaatcatgatgggcgcatcag

SEQ ID NO: 795995 - DNA, 96 bp, Homo sapiens
aagagaaagccagttatccacggactggaagatcaaaagagggaggagacatcacagctttcccagatcgggaggaaaaatatggaatgtgtttta

SEQ ID NO: 795996 - DNA, 100 bp, Homo sapiens
ccgcagatgttgtcaaggtggcctaccaggaggccaggggtgtcgccatggtcacaaacatgtcagacaaaagtgaattaaaggctgagttggaacgtaa

SEQ ID NO: 795997 - DNA, 100 bp, Homo sapiens
gcagcacttgttccccaaacaagtgctcctacattctggaaggatcagaatgttctctctccagtcaactgctggaatctcctcttaaaccaggtgaagc

SEQ ID NO: 795998 - DNA, 100 bp, Homo sapiens
gtgggagactcggcgctgcagctggagagaatcaacgtctactacaatgagtcatcgtgtctccagaaatgctttgggttcatctttcattgctgcaagg

SEQ ID NO: 795999 - DNA, 75 bp, Homo sapiens
acttggtccagaacatccactagcctcactaaagtaaagaagaagcggacctggcacaaacacggcccggggcaa

SEQ ID NO: 796000 - DNA, 82 bp, Homo sapiens
gttgcctccagcccacccacctccaggtgccagaaccctgtggagcatcatgaactgggaagagtagctgagccccagagcc

SEQ ID NO: 796001 - DNA, 98 bp, Homo sapiens
tcagatgtctaacgataaggagcggtttgccagggtcccgggattcttgagctgtgcccagctgacgagcttttgaagatggcacaataaccgtccag

SEQ ID NO: 796002 - DNA, 75 bp, Homo sapiens
aaccacagagtacttaaaaacatcatggatcaatctcaaacaaagaaatacactttcgggaaatggcctctaaat

SEQ ID NO: 796003 - DNA, 75 bp, Homo sapiens
tggtaggaatgggatcctggtgcttccacatgactctgaaatatgaaatgcagtggatccggattggtgccaatg

SEQ ID NO: 796004 - DNA, 90 bp, Homo sapiens
cagaggttgtgcagagcagttaatgctgggacatctgctgcactgacccaggcggtctccaaactctgggtccccaacacggacttcgac

SEQ ID NO: 796005 - DNA, 75 bp, Homo sapiens
gccctgtgggtgctgggcctctgctgcgtcctgctgaccttcggccatccacggcttccgagagacagagaagtc

SEQ ID NO: 796006 - DNA, 101 bp, Homo sapiens
cggaaaggctacagtgatgacagaccgacttaagttcggattcggcttccaccgcttcttagtgcacatccaaatccataatggctgctgctggagtacct

SEQ ID NO: 796007 - DNA, 87 bp, Homo sapiens
tgccttatttaaacaggttcattttggaaaaggcaagaaattatagagcagcttctatcaaatattttccacaaggagaaaaatgag

SEQ ID NO: 796008 - DNA, 71 bp, Homo sapiens
cagggtcctgggccgcgacctggttctcccggagtctacacttcccatcgacggtcagtgcgcacgttgta

SEQ ID NO: 796009 - DNA, 50 bp, Homo sapiens
ccatgatttaaatatcggcgttaaggagcagtgaggagaatgaatacctt

SEQ ID NO: 796010 - DNA, 80 bp, Homo sapiens
ggctatggagtccccatgttgaacacagatatgtagaactcttcttgaattctacagcaggagcaagcggtggtgcttat

SEQ ID NO: 796011 - DNA, 89 bp, Homo sapiens
cttctgtcggttggtcctggagcggcgcagccggagtggggccgtgagcctgcaggatgtttcctcaatgaggggaaggctgctgcaca

SEQ ID NO: 796012 - DNA, 89 bp, Homo sapiens
ccagcatggacgtcttccacctggagggcatgactacatctgtcatgttttctggatatgccgcagaaggatccgtgccagaagcaagc

SEQ ID NO: 796013 - DNA, 75 bp, Homo sapiens
aaacagacagatttgtcatgaagaaactcaatgatcgtgtcatgagacacccaccctggagccatggtccacgcc

SEQ ID NO: 796014 - DNA, 75 bp, Homo sapiens
cgccaacccgccttccagggcctctttctgctctataacctggaaatgactgctgtccatgcaggcaacataaac

SEQ ID NO: 796015 - DNA, 99 bp, Homo sapiens
ggccctgccgggaaggaggaagcgcagtgcgttcggctccgcgcccgccgcgccgggagcagcaccgcggggccagctgccttcctatttcaaggaaag

SEQ ID NO: 796016 - DNA, 100 bp, Homo sapiens
ggaagattgagtcgctggaggaggagatccggttcttgaggaagatccacgaggaggagtttgagatcgagctggagggctcccagtccctgaggatcct

SEQ ID NO: 796017 - DNA, 101 bp, Homo sapiens
aagcggcgccgcgccctcggcctgcacggggaggaggtaaatgacaaattgcgggatatgccagatgggaccttcttggtccgagatgcctcaacaaaaat

SEQ ID NO: 796018 - DNA, 100 bp, Homo sapiens
aaaaaaaccacaaatgtttttctgttttgcctgaatacatgatttaaacaagagatttccacagaaggtgtttacacttcctgctgctgtgcttccaggt

SEQ ID NO: 796019 - DNA, 74 bp, Homo sapiens
tgagcaaaataaacaattagagaaagatattaaagacctagaatctcgcacagactgcaaagctgtcattagca

SEQ ID NO: 796020 - DNA, 107 bp, Homo sapiens
agatcaccaagatgctggaccgaggcctggatcccaatttccacgacccggagaccggagggggatatgagactttctactcggaatatcctgagtgttgcgtggat

SEQ ID NO: 796021 - DNA, 144 bp, Homo sapiens
ccgagccttcagcagaggcggcagcctggagagtcgaagcagcagctctcgctccagaagcttcactttgatctttaatctcatgaagtacgacagctacagccgcttcttaaagtctgacttgtttttaaaacacaagcgaac

SEQ ID NO: 796022 - DNA, 83 bp, Homo sapiens
gcgaaggccgccgaacctgcctggctagccggcgacttgagtgacgagtgaaagaaaatggcccgaaccaagcagactgctcg

SEQ ID NO: 796023 - DNA, 83 bp, Homo sapiens
gaagaacctctacgccgacatcgacgccgcgtggcaggcgctgcgcacccgacaggtgatttggcttctgcacagttaggagg

SEQ ID NO: 796024 - DNA, 98 bp, Homo sapiens
ctgcaacagcaagcacatgcagaagaatcccccagggcccagagagttatatgaaattcccgtcatcggagtgaccctgcccatcatgtggttctacc

SEQ ID NO: 796025 - DNA, 100 bp, Homo sapiens
gtctttccagaattagaccagcagctacaggtaaacactacacgtgaagagtggtgaaagggaacattgattactgaagtgccctggagagggaaagcac

SEQ ID NO: 796026 - DNA, 96 bp, Homo sapiens
caagacttatcgatgcggtatgaaaccaaatactgctattaaggctcgggttatgtatgattttgctgctgaacctggaaataatgaactgacggt

SEQ ID NO: 796027 - DNA, 75 bp, Homo sapiens
agcgcaaccacgagacggccttccaagcgagtgatagacagccaagcagagaaactgaaggagcttgacaaggag

SEQ ID NO: 796028 - DNA, 82 bp, Homo sapiens
gttaacttctgtttacatggaactcagacatctgcaaatcatgggtatttgaagtataccatacaactgttttgaaaatcca

SEQ ID NO: 796029 - DNA, 75 bp, Homo sapiens
gaacatgatcaagggtgttacactggaaagtgactattttaccccacagggagaattccgtgtagacaaagcagg

SEQ ID NO: 796030 - DNA, 100 bp, Homo sapiens
caagaacctggcttttagctgaactaaggagaaagtcctacaacagtttggcgtgcaacatggggcttgagaaagggaagggaaaaggccgaggcatcag

SEQ ID NO: 796031 - DNA, 75 bp, Homo sapiens
aagaggtcagaggtgccctgatgtctgctttcagtcctgaaaagctgaacgagccgcggcccatggagcccgccg

SEQ ID NO: 796032 - DNA, 100 bp, Homo sapiens
gatcatgccccagcaccaaaggcaaggatttggacggtttctcattgatttcaggtgtcaaattgagaaccaggtagatccccaccacctacagtaaaaa

SEQ ID NO: 796033 - DNA, 75 bp, Homo sapiens
gaagctgctgcggttcctgagccggagctcaagaggtttggatatggaccttcttcaattcctggccttcctctt

SEQ ID NO: 796034 - DNA, 98 bp, Homo sapiens
ggatacggagtacaaaaacggcccttggatgatggagatttggagcaagaggtggtggtggccttcccccgaagaaatttggtaatcctggggagcgt

SEQ ID NO: 796035 - DNA, 90 bp, Homo sapiens
cggagcggccgccggagcagcgccggagatggggtactccaaagattcaggtttactcacgtcatccagcagagaatggaaagtcaaatt

SEQ ID NO: 796036 - DNA, 74 bp, Homo sapiens
tgctcggtgtcgtggcctcgcagatggcagcttcaaaagatggtccatgatattaaaaacaatgaaggtggaat

SEQ ID NO: 796037 - DNA, 75 bp, Homo sapiens
aatgcgactcaaagctgcacggcagtctgtttatgagcccccattcactggggagaatagaaagaaaacaattga

SEQ ID NO: 796038 - DNA, 89 bp, Homo sapiens
aagttggaagtactcctaatggctaataagcacaagtgggtaccactccacttagatgttgtaagatcagagagtcaagaaagacctgg

SEQ ID NO: 796039 - DNA, 82 bp, Homo sapiens
cgccgtcggcagcaagaacagagagagaggtggacagatctgagagatactgaggaaactccgggacgttttacagcagagg

SEQ ID NO: 796040 - DNA, 100 bp, Homo sapiens
ggaggacctgcaggaggacgcagacggattctcaaaccatgaattatgtgggacagctggctgggcaggtgattgtcactgtgaaggaactctacaaggg

SEQ ID NO: 796041 - DNA, 100 bp, Homo sapiens
agaatcctcccagggccttgaaagtccatctctgacccaaaacaatccaattttcatggagtgataatgaaaggagcagcagccgcattaatatcccaga

SEQ ID NO: 796042 - DNA, 100 bp, Homo sapiens
cagaaacagaggagttggagttgctactaaaaagagaggtgcctttatctgatgatgatgaaagttacacaggtacatccaagcagaagtccagttccct

SEQ ID NO: 796043 - DNA, 50 bp, Homo sapiens
agacggaggacggggagttctggatgtcattccgagacttcatgcgggag

SEQ ID NO: 796044 - DNA, 102 bp, Homo sapiens
tggatacagcctcatgttttcaccagtcacatctcttactactgctagtcgctgcaacactcctctacagtttgagcatccgcacttccactaatagccaag

SEQ ID NO: 796045 - DNA, 99 bp, Homo sapiens
ctcaagcgccaaacctgtaccctagcgagtgtcctactccgcatccgtaatggaaggaaatgccattgccgaaatctaaaaaaacttgtagcaaaggca

SEQ ID NO: 796046 - DNA, 98 bp, Homo sapiens
gaagaaatttgtgtggagcgaggaaaggtgtgctgtgcctgaggccaggactactatggaattccctttgctgcacccacagcgcttgccagccgaga

SEQ ID NO: 796047 - DNA, 95 bp, Homo sapiens
ccggggccgtggctgacatggagcagcggagcgtgctttggacaccatgaattttgatgttataaagggcaagccagtacgcatcatgtggtctc

SEQ ID NO: 796048 - DNA, 96 bp, Homo sapiens
tcaatgtacatcttatttcattgaacctgtacagtggatggaatctgctttgttgggagtgatggatggacagtagagacgggggttcaccatgtt

SEQ ID NO: 796049 - DNA, 100 bp, Homo sapiens
tgattagtgtcatttctatgctggcagaccctaatggagactcacctgctaatgttgatgctgcgctggttatattctgggcactaaatgaaggcgtttc

SEQ ID NO: 796050 - DNA, 83 bp, Homo sapiens
caccgtttcctccaggacagcacctagtcgtggccggaggagtctcagagctgtcagaaagcagaagatggctgtgccaccca

SEQ ID NO: 796051 - DNA, 82 bp, Homo sapiens
gtgaagctgcagaccttcgcggttgctgtttgatcaagacgcatctcttaaatctgagttcagtctgcatcctgatacaaga

SEQ ID NO: 796052 - DNA, 82 bp, Homo sapiens
cagaaattctggaacacctatatgataaacattgacgatcttgaggatgaccctgtggtgaacggggagaggtctggctgtg

SEQ ID NO: 796053 - DNA, 74 bp, Homo sapiens
atggctttgtccccacccagcactgatgatattataaatctctagtgatccctgaaaagttccagcatattttg

SEQ ID NO: 796054 - DNA, 98 bp, Homo sapiens
ggaggagtcagctgtgtgtccagaacgtgccatggagacgcttaacgactacacttgctgctttgaaggatgaagttgtatctgttgaaaatgaactc

SEQ ID NO: 796055 - DNA, 107 bp, Homo sapiens
aaagaatgccacagaatcaggggaggcatgcttcaggatgcacgctatttttctacgagagcgacggcaggtctgggatagaccacaacagcatccccaaacacgcc

SEQ ID NO: 796056 - DNA, 100 bp, Homo sapiens
cttcctgccgcgggcggcgcgccgcagctgcccaggccggaccgggccgggcgcccgcagggcgaagctgtgctcaggcccgggctggacgcagagccag

SEQ ID NO: 796057 - DNA, 96 bp, Homo sapiens
ctcagggccgcctccaagaccaaggacaaccctggcagcatcgggaaggtcatcatcagatttgaaatatttaaagtggatacaaaactatttcag

SEQ ID NO: 796058 - DNA, 100 bp, Homo sapiens
tggtgctaaaaagatgccttcttcatttggctgtgataggtgctttgctggctgtgggggctacaaaagggtgaggtggctttgaccccgggttgcccgg

SEQ ID NO: 796059 - DNA, 100 bp, Homo sapiens
gacataaatggaagcaggggatgtggtccaaggaagaaattgatattttgatgaacaatattgaacgctatcttaagttggaatcaactggactcggcct

SEQ ID NO: 796060 - DNA, 80 bp, Homo sapiens
tttgaaaatgctgcacatcccttaatagtcatctacatagatatgcacccaatgtccagggagcgtgcaaaatttgtcaa

SEQ ID NO: 796061 - DNA, 100 bp, Homo sapiens
attggctctagcgttgaatttgactggtgtgctgtaggctgcatccagcagctccgaaagcgccctgcccacccttggagccaggcacacagtgacgact

SEQ ID NO: 796062 - DNA, 100 bp, Homo sapiens
cctgtattagtgcggggtgccggccacatcactgtttaatcagctgtgttcagcgaatacttatgaacagaaggctccagcagcagtacaatcagcagca

SEQ ID NO: 796063 - DNA, 75 bp, Homo sapiens
cttaacgatagaggtgtctgacaaaggctttgaagacaagattcccaaaaggagattctctgagatgcaaaatga

SEQ ID NO: 796064 - DNA, 98 bp, Homo sapiens
ggatcagaaagacagaagaaaaccaaggctgaaggggatcgtctaaaagaggttaaaagatgttgatactcggaaaatcataaaagcaatgctttctt

SEQ ID NO: 796065 - DNA, 88 bp, Homo sapiens
ctgtcttcggtggactccttcggcagtccacccaccgccgccgcctcccagctgagcgggctttggacaccatgaactttgatgtgat

SEQ ID NO: 796066 - DNA, 100 bp, Homo sapiens
caaaatggctgatgatttgctggcagctgctgacaagaacacactgttgcagcagctaggagtggctcctttttctgagggcccttggcccttgtacatt

SEQ ID NO: 796067 - DNA, 75 bp, Homo sapiens
gtctgtctcagctgccgacgatcatcgaggaaggcactgcgtttcggttgattcgatgtcatcagtcccgtggtg

SEQ ID NO: 796068 - DNA, 98 bp, Homo sapiens
tgcgttccccgatgcccggagtggtggtggccgtctctgtcaagcctggagacgcgtatgcagatctcaatcgccacgtggatgccttgaatgcgtgg

SEQ ID NO: 796069 - DNA, 51 bp, Homo sapiens
caccgatgtcgggaaggtcactgaaccttttgctggcctagacctgaactc

SEQ ID NO: 796070 - DNA, 100 bp, Homo sapiens
ttgcaaaggatgaaaatattacaaaaggcggtgaagtgacagatcattctgtgcgtgaccaagatcatcccgatggtaagaatgattgatgttggctgat

SEQ ID NO: 796071 - DNA, 82 bp, Homo sapiens
tcttcctcctcctcccgcgacgagtattgggaaagggtcgttgtggtgcatagacccagagtatagacaaaatctaattcag

SEQ ID NO: 796072 - DNA, 100 bp, Homo sapiens
tcaaggagctgtcaggggagtcggatgagcttggcatttcccaggatgagcagctatccaagtcaagttattggaggattcttgaatttgattatgagat

SEQ ID NO: 796073 - DNA, 75 bp, Homo sapiens
atcagcatcatgtttggcagctgagtattggagccaggagcctgccatgaggttgctatgacccgagagaagttt

SEQ ID NO: 796074 - DNA, 98 bp, Homo sapiens
accctgtgcacctctcagcaggcctttgctggacagatgaagagtgacttgtttctggatgattctaagaggactccctggaggaaaagcggaagcgg

SEQ ID NO: 796075 - DNA, 90 bp, Homo sapiens
caggaactgcgcagcctcttcgagcgccgcggacgcgtcatcgagtgtgacgtggtgaaagagcctgagcccttgtgaagccggcaatga

SEQ ID NO: 796076 - DNA, 75 bp, Homo sapiens
accaaataagctatatactttggttacctatgtacctgttaccactttcaaaattgctgattgttggaggttctt

SEQ ID NO: 796077 - DNA, 127 bp, Homo sapiens
tcaaatgctgagaaccccaagctgatatcagcaatgctgtgtgctgctttgtatccaaatgtagtgcagtattgtccttgtgaacttccttgaagatggcagcatgtctgtgaccggaattatggga

SEQ ID NO: 796078 - DNA, 82 bp, Homo sapiens
ccgcgcacgagttcaccgtgtaccgcatgcagcagtacgacctgcagggccagccctacgagaggtggagaagagcgagtac

SEQ ID NO: 796079 - DNA, 90 bp, Homo sapiens
catgaaaaaactggatcttattagtgaacttagagaacggggagagaatgtagaagatgccttccttgaggctgccaagaaaatctatca

SEQ ID NO: 796080 - DNA, 98 bp, Homo sapiens
agcctaagccctggcggggctttgggctgtaggttatgaaaaccaggctggctgtaggcaaaactgggcagtactctggaatatatgattgtgccaag

SEQ ID NO: 796081 - DNA, 78 bp, Homo sapiens
atgaccacaacaagcaagcatgcagcttactgcttgaaaggaaaactgtggtatgtctgtgtgtaatggtaaaatata

SEQ ID NO: 796082 - DNA, 100 bp, Homo sapiens
ctaagggagctgaggaacaagcgggaattccgccgcaacctccccatgcacctccgaagggcctacatgagtgtcaagatgcaaaaaggtgagcgccaga

SEQ ID NO: 796083 - DNA, 83 bp, Homo sapiens
ggagaagctgcacgacgtggacttctacaaggcccgcatggagacgccgcaccaggctgcaggccagcccttcaagttcacta

SEQ ID NO: 796084 - DNA, 75 bp, Homo sapiens
gccagagccctggatgtcatttggaaaaacactagagacagacggctggcagtaatctatgccagcaattatgac

SEQ ID NO: 796085 - DNA, 74 bp, Homo sapiens
caatatggaatattttgtgccacacacaaaaagggtgtgtccgcagccggccaggtggtatccctgaaggtgtg

SEQ ID NO: 796086 - DNA, 51 bp, Homo sapiens
gctggaggaggagccgccgccgccagagaccgtccaggctggacttgaact

SEQ ID NO: 796087 - DNA, 97 bp, Homo sapiens
aggcgggggcggcttcgaccccccgcccgcctaccacgaggtggtggacgcggaggcaagaaaactgatcagtgattttgccattatcttgtccatt

SEQ ID NO: 796088 - DNA, 101 bp, Homo sapiens
gatttaacattccaacacataaaaattatttatccaacagctcctcccagaacccgagcaacttcccgagaagagaagaacctccaaggctttctggaaca

SEQ ID NO: 796089 - DNA, 100 bp, Homo sapiens
gagtctatcttcacactttggcagagagtatttgcaaactgattttcccagagaaaagaggcacagttagatgaagaaggacagtttcttgtcagaataa

SEQ ID NO: 796090 - DNA, 100 bp, Homo sapiens
ctgtgcaggagcagctccgggtgacacgaggggactgaagatactcccacaggggctcagcagctgcagaaccttggcctgaaaatgctacattatatca

SEQ ID NO: 796091 - DNA, 100 bp, Homo sapiens
gaaagcaaggactcagggaaccggcagacacaagcaggctgtaggttccatgaggacaggccttgagtctgtcctggtctctggaatcacggtgtctagt

SEQ ID NO: 796092 - DNA, 89 bp, Homo sapiens
aaatgggaagatgatcttaaaaaaaatagctcagttaatgaaggatcaacgtatcataaaaggactccctggaggaaaagcggaagcgg

SEQ ID NO: 796093 - DNA, 82 bp, Homo sapiens
ggagagctggcctggggggcagcatgagagggtgttttaaatagcatttccaggaaaggaaggctggaaggctgctgtcaac

SEQ ID NO: 796094 - DNA, 75 bp, Homo sapiens
ctcagcccggggctgcactgccaccctgggcaacttcggctggaggacacacctaaacatgtggaatcccaatgc

SEQ ID NO: 796095 - DNA, 83 bp, Homo sapiens
ccgggctccgggaaaactacactggccagggttgtgagtcccggcccagcccctccacccccctgcccccccgatgcgaccat

SEQ ID NO: 796096 - DNA, 110 bp, Homo sapiens
acctggcggccatcgtcatcctgctgctgaagatctggaagacgcgctcctgcgccggtgtccctggccagtgtccttccacctgtccacaagcatggggaacatcttcg

SEQ ID NO: 796097 - DNA, 100 bp, Homo sapiens
aaaaaagcatcttttgatcattctccggatagccttcctttgaggagctccggtaggcagactttcctgtcaatgtggccaggcaactcccagcaattcg

SEQ ID NO: 796098 - DNA, 74 bp, Homo sapiens
cacaataaaagagacctctacttagctcagcaattcttaccttgaggaaactccaggaactcctaaaaagaagg

SEQ ID NO: 796099 - DNA, 73 bp, Homo sapiens
acggatgttagcctgctgcctgccttcgatgctgtgggttggatggcaagcatgtggtgtttggcaaagtgaa

SEQ ID NO: 796100 - DNA, 51 bp, Homo sapiens
tttgtatgtttcatctcgacataaccaagactgacttccttttggtagtac

SEQ ID NO: 796101 - DNA, 75 bp, Homo sapiens
gaaaatggacgagtaatcgcctgctttgattcattgaaagtctacttccccagcaggacagcatcattctcctat

SEQ ID NO: 796102 - DNA, 90 bp, Homo sapiens
gaagaagcactgcccaattcccagaaagctgtcaagatccagacatttaatgtggatgcaccatgccagaccgtggaagatttaacgaat

SEQ ID NO: 796103 - DNA, 90 bp, Homo sapiens
acagaaacaaaatgtcaacaaattgatggcaagtctggaaaagtttgaaattccagtaaaaattcgtttgagtcctgaaccgtggacccc

SEQ ID NO: 796104 - DNA, 100 bp, Homo sapiens
aggaggccaaaacatgagggaccgggccaccatccggcgcctgaatatgtataggcaaaaggagcgcagagaaagggtgttgcgctgtcacccaggctgg

SEQ ID NO: 796105 - DNA, 100 bp, Homo sapiens
gtgtggggttggtgtgattagcttcgcagtctggaaagctttaggagttcacagtacatggttagcaaaagactgtcctgctctccgaattatatctgtg

SEQ ID NO: 796106 - DNA, 100 bp, Homo sapiens
caaggcattcttcaagaggacaattcaaggctcgcttctcatatgtgcggatgaaatatcttttcttttcctggttagtggtttttgttggaagctggat

SEQ ID NO: 796107 - DNA, 75 bp, Homo sapiens
cccgaggctgaagaaatagaagctgaatatgctgcattagacaaacgagagagctggagtggaccagagaaattg

SEQ ID NO: 796108 - DNA, 50 bp, Homo sapiens
tgagactcctgctcagtgtagcattaagtgccggtggtggtgtgcacatt

SEQ ID NO: 796109 - DNA, 100 bp, Homo sapiens
cagaaacacttcttttattttcctgtaatatatctgtatcatcggagcacaatgacagatttcctcaaggaccaccatctcagatgggttcacctatggg

SEQ ID NO: 796110 - DNA, 100 bp, Homo sapiens
gaagatggacagctgggaattgctgaattagaactgcagaggttcctctacagcaagattgcattcatggcttctctggcaacccacttcagcaatcaga

SEQ ID NO: 796111 - DNA, 95 bp, Homo sapiens
gcagcagcaacagcttcgaaggcgaccttccttgctttcagaatttcacccaggttctgacaggcctccatgaagaagtggactattctgagaaa

SEQ ID NO: 796112 - DNA, 103 bp, Homo sapiens
attgtttacaaaatagatgacatgacagctgcacccatggacgttcgccagtgggttgacacagatgttcttcagatagatcctgaagttacagatgaagaaa

SEQ ID NO: 796113 - DNA, 100 bp, Homo sapiens
gccgcctttccagcatgcaggggctgctcaggctaccctgtcatgatcaaggcctcagcaggtggtggtgggaaaggcatgcgcattgcttgggatgatg

SEQ ID NO: 796114 - DNA, 100 bp, Homo sapiens
ctcagatgttgttgatgaagtaatacagaactgccccatcgatgtgcggcgcccgctgtataagctaaaagatggcggcaaggcagcccaggcaaatgta

SEQ ID NO: 796115 - DNA, 80 bp, Homo sapiens
tgggatcgtaataatggcaaaagacctcaccaagaatttggcatttcaaggatcaaaatggtttcaatcccagaatacta

SEQ ID NO: 796116 - DNA, 90 bp, Homo sapiens
gattcgcagtggtcgcttcttctccttggccaactgtgcaggaagatggaggggatgtaatctacaaaggctttgaagatggcattgtac

SEQ ID NO: 796117 - DNA, 96 bp, Homo sapiens
ctgtttccatctccagaaattccactgaagatcgcttcacgttgaggtgccagatgtgacatccagatgacccagtctccatcctccctgtctgca

SEQ ID NO: 796118 - DNA, 74 bp, Homo sapiens
atttgctggaaaaaatgacatccagcgacaaggactttaggatatgttcaaggaatgagtgatttactttcccc

SEQ ID NO: 796119 - DNA, 100 bp, Homo sapiens
tgaaacagagtatggctgcagaggatccatctgtcttagcaaggctgtcatcacacaggaacgaatgcaggaatttgggaactgagctgtgcaagtgctg

SEQ ID NO: 796120 - DNA, 100 bp, Homo sapiens
gtaggattcaagaactggaggaaaaggtcgcctctttgctgcaccaggtgtcctggagacaggccctactgaagatggactgccagggcctggtggtcag

SEQ ID NO: 796121 - DNA, 75 bp, Homo sapiens
atttcctgcaaggactccaaagtggtgagtgccggtggtggtgtgcacattgagccccggtatagacagttcccc

SEQ ID NO: 796122 - DNA, 90 bp, Homo sapiens
gttcagcgtagagtcgctggagcgggcggagctgtgcgagagcctcctcacttggagcgccgccctgtgctgggctgccgggagctcgtc

SEQ ID NO: 796123 - DNA, 50 bp, Homo sapiens
gggggttggcttgcccatttcctctgctggagtacaatggcacgatctcg

SEQ ID NO: 796124 - DNA, 100 bp, Homo sapiens
tttactacctctgcatcttattgaaagatccagtggaaccacatgggatatcccaagtagtacccgtcttccaggatttccagatgtgacttgcactcag

SEQ ID NO: 796125 - DNA, 83 bp, Homo sapiens
ctcgaggaggatgcctgggcccagttgcatgctgagaatttgaaaaatgaagatgatgtagacactggactattaggtatgga

SEQ ID NO: 796126 - DNA, 83 bp, Homo sapiens
ctgtgaagaacagcaaatcaatctctgaggttggggtgagaactctgtctcagtcgacgggaagtgcagtgactccacgctac

SEQ ID NO: 796127 - DNA, 102 bp, Homo sapiens
cttcacccatttctcgtctctcatctacatcgccttcatcctgggcagggatcctgtggaacctttcatccagcgaccacctgaaggaccgcctggccagag

SEQ ID NO: 796128 - DNA, 76 bp, Homo sapiens
catcttatctacgaaatgattcagtgtgcccagctggctggaaacctggcagtgataccatcaagcctgatgtcca

SEQ ID NO: 796129 - DNA, 90 bp, Homo sapiens
ggaacagccacagcagcctcccaaggagtctgcaagttggtcccaggtgtgacaccttcagcaggtctcagggaagatggcagccctagg

SEQ ID NO: 796130 - DNA, 100 bp, Homo sapiens
aagggaaggaaatcatgtcaagcgaagccttgaaaaagctgccctgagacggtgtcccgccgaaagaggaagaagcccctccagatggtgctgttgccga

SEQ ID NO: 796131 - DNA, 101 bp, Homo sapiens
caaagccaaaggcaccccgattgtcgatgggctcgctccagaggacatgagcaaggagcaggtcggcttcttcaagcggaaccggccacccctggaagaag

SEQ ID NO: 796132 - DNA, 100 bp, Homo sapiens
agggagttaaggacattccaggcagaggcaagaggcttcgtgacggagttatcagagacattgagaggcaaattcggaaaaaagaaaacattcgtctttt

SEQ ID NO: 796133 - DNA, 75 bp, Homo sapiens
ccggcggccttgagcgctgagcaagcaaagggtagggaagacatatgagctactcaactgtgacaagcacaagtc

SEQ ID NO: 796134 - DNA, 90 bp, Homo sapiens
gtagattccttggtggaaatgttggtggaaacatcagatctctccatattttgaatggcctgaagcaatgtttggcagaattcaagcggg

SEQ ID NO: 796135 - DNA, 51 bp, Homo sapiens
cacggcttcccccaaggaatatacagagagagtctacaaggagattgaaca

SEQ ID NO: 796136 - DNA, 100 bp, Homo sapiens
acctgcggctgatctccaagtttgatactgttgaagacttttgggcacttttcccaggtccctcgtatcaaaacattaagagtataatggaagatagcac

SEQ ID NO: 796137 - DNA, 82 bp, Homo sapiens
gcattgaggaactcaatcaaaccagtattcttttcacacaggccacacgtgtctacacttagcctctatccatggctacctg

SEQ ID NO: 796138 - DNA, 97 bp, Homo sapiens
ccgggtttggtagagtgacttctattcactaaaaccatgtgtctgaactgaagaagcttgggctcacttccacaaatattcacaatgacatcctttc

SEQ ID NO: 796139 - DNA, 83 bp, Homo sapiens
ctgtttgctgggccaccagtcactgcacagatgtatgtccctgggaagctgcatgatgtggaacacgtgctcatcgatgtggg

SEQ ID NO: 796140 - DNA, 97 bp, Homo sapiens
tttcctcaggctattaaagcccttcctagccttaaagagctaaattccagtgtagaagttggcataagtagccaggaaaagatgcaatctgtgcaga

SEQ ID NO: 796141 - DNA, 80 bp, Homo sapiens
gaaaattatactcagtggctgcaaaaagtggattctccacagttttcctcgtgcgtactcacggtggaatccgatgtgca

SEQ ID NO: 796142 - DNA, 98 bp, Homo sapiens
tgaccaagcgcctctactacctctggatgtgcattgatctggagaacattgtgtactacaaggacgacacccactactttgtgatgacagccaagaag

SEQ ID NO: 796143 - DNA, 89 bp, Homo sapiens
ggcagatgtatgggtgaagatccaagatgttctacagctcaaagcttggattctgccgtgccactcacgaatggcgacacagaagacga

SEQ ID NO: 796144 - DNA, 75 bp, Homo sapiens
ccgtaaagtggttggttgcagttgtgtagtagttaaggactatgagctcttcgtggaggctgtggaacaaaacac

SEQ ID NO: 796145 - DNA, 75 bp, Homo sapiens
ggcaactatacagtgttacaagttgtggaagcccttggatttcagaagaaagtggtagcttcctttccaagaaca

SEQ ID NO: 796146 - DNA, 80 bp, Homo sapiens
atgccaagcagaaaattacctaaatgcactctttcgaaagaaaggttaaagtattgcacaatcagctggtccttttccac

SEQ ID NO: 796147 - DNA, 51 bp, Homo sapiens
atggctggggaagttagtgccatggttgggcagagcggcttgggtaaatcc

SEQ ID NO: 796148 - DNA, 101 bp, Homo sapiens
gtgatcttggtgccatagagagtctccgggtccctggaaagaatgtgaaagatgttgcagaagtgttccagaagtggctgaagatagaaggaaaaaagtgc

SEQ ID NO: 796149 - DNA, 100 bp, Homo sapiens
gtgaaccttcgcattcagaatttgaccatcttggtgagaaacattaagacctactaccagcagaagatggctgtgccacccacgtatgccgatcttggca

SEQ ID NO: 796150 - DNA, 74 bp, Homo sapiens
catcccccttaggatctccttccacacccccagcactcaatggcaaggggatcaggcgagtgaagccgaagcgc

SEQ ID NO: 796151 - DNA, 100 bp, Homo sapiens
gcctcccattctcccagacatggggaacagggtcacagctctcacccaggtccttgctgcgaaagtgctcaaccttgtgctgccaaacttgtccctcggg

SEQ ID NO: 796152 - DNA, 101 bp, Homo sapiens
gcagcgaagaagatcgaaaattaaacctcagcatgaacaggctgaacactttgccacgaggcttcggctccctgccagctcttgaggttctggacttgacg

SEQ ID NO: 796153 - DNA, 83 bp, Homo sapiens
gaggatcgcaagctggatgagcttctaggcaaggaccacacgcaggtgggaagcccgtcagcctgagctacagatgcccatgc

SEQ ID NO: 796154 - DNA, 100 bp, Homo sapiens
ggaacaggacgccctctgatgttctcccctggacccggcctccaccaccgccccagctccatgggccgcagccttggctcctggtaataggccgctttcc

SEQ ID NO: 796155 - DNA, 100 bp, Homo sapiens
tgagggcaacttctgaagacttcaacaagattgcccaaggactccagatactccaaataatgaccctcgttgttctactagcaacaatagattgaaggcc

SEQ ID NO: 796156 - DNA, 95 bp, Homo sapiens
gagctgcccgggagcacccttccctggaactgctacacaaaagctgatgaagcattgaaagccaaagaaagaaatgaggaagaagcaaagagaag

SEQ ID NO: 796157 - DNA, 75 bp, Homo sapiens
catgtttggattgaagccgcctctgtattacttaccagaggctgtggccaggccagctgggctcggggagcgcca

SEQ ID NO: 796158 - DNA, 83 bp, Homo sapiens
gtaccgggcgatgctgagagagagcaagcgtttcagcgcctacaattacaggcctgtcccctcagttcccaggtgccatgagg

SEQ ID NO: 796159 - DNA, 82 bp, Homo sapiens
tcacggaggtagtcatgatctatgacgccgagaagcagaggccccgagatgatatcatcaagttgaatcgaaaggaagggaa

SEQ ID NO: 796160 - DNA, 83 bp, Homo sapiens
aaccgttcctagggatgcccgcgcccctcggctacgtgccggggctgggccggggagagacacgggctcaaggaacccaagag

SEQ ID NO: 796161 - DNA, 90 bp, Homo sapiens
tgaaggccgagggcttcgtggatgccctgcaccgggtccggcaggaaattcggcgccttcatcagtatgtgaaatttgctgtccaagatg

SEQ ID NO: 796162 - DNA, 73 bp, Homo sapiens
tctcaaccttgtgggatgtgaaaactctgttactgaagcacagtttaatggcaacgagaagcggcagtcatcc

SEQ ID NO: 796163 - DNA, 92 bp, Homo sapiens
ctgtcgtacgtgggacaggccacgctgtccgtccgcagtaccgacgcctgcaggagagctcaaaggatggctactgacatgcagaggaagag

SEQ ID NO: 796164 - DNA, 98 bp, Homo sapiens
gtgccagaaagtgaagctattccgggccagcgagccgatcctcagcgtcctgatgtggggggtgaaccacacgcctgacactattagaagcaatcttc

SEQ ID NO: 796165 - DNA, 50 bp, Homo sapiens
actgctaggaaaggatccaaacagttatttctcaaactctgaggctgcgg

SEQ ID NO: 796166 - DNA, 75 bp, Homo sapiens
ctttggttacctatgtacctgttaccactttcaaaaatcaggatcctcatgaccagccaaagagaagaagaatta

SEQ ID NO: 796167 - DNA, 100 bp, Homo sapiens
atttacgcgcacgttggaaccgaagagagctctgttgttgcacaactacactgcgctgcatcggactcgacgcccgctggtgacgcacacgctgcgccgg

SEQ ID NO: 796168 - DNA, 75 bp, Homo sapiens
gttcctcgtccactacgggcatcggtacactgaggaggggacggctccgtcttcacattgtgcacagatctgagg

SEQ ID NO: 796169 - DNA, 90 bp, Homo sapiens
aaaggatcggaaaagaattttgatgagacaccaattattgcggtgatggtggccctgtcctctctgctagtgatcgtgtttattatcata

SEQ ID NO: 796170 - DNA, 82 bp, Homo sapiens
cccaggcggtgacagagtggagccatggctagaggcctcaggagtgcaagtagctgatgaagtatgtcgcattttttatgac

SEQ ID NO: 796171 - DNA, 104 bp, Homo sapiens
cgaccctcctcccaccccctcccactcaccctctgggccgcgactgcgcagggcggggccggccgaaccatgggccgcgctggactcggaagatgctgaaccaa

SEQ ID NO: 796172 - DNA, 100 bp, Homo sapiens
aggtcctccatgcgcagtcatgagtcgcttcaagtttatcgatcatggaagggaagtggttgctgtgtatgttactggtgcttggaactgctattgttga

SEQ ID NO: 796173 - DNA, 83 bp, Homo sapiens
cgccgctctccagcccgcttgaacggccatttgcatcccactgtccttgtgttcggagccaggccacaccgtcctcagcagtg

SEQ ID NO: 796174 - DNA, 100 bp, Homo sapiens
agtactgctttgaatgtgactgtttccgttgccaaacccaggacaagctaaggcaggaacggatccaaattcagcagcttgggctgcttattacgctcac

SEQ ID NO: 796175 - DNA, 74 bp, Homo sapiens
aagtttattcaagtaaattaccaggaaacaggcactgtacttggagttcgcagtatgtgcagtgcgtggccggg

SEQ ID NO: 796176 - DNA, 75 bp, Homo sapiens
agcacgcacgcactcctagctcactccaacatagcgaagcaattaccagctctggctgggtcgccacaacttgtt

SEQ ID NO: 796177 - DNA, 82 bp, Homo sapiens
gcgtggtggcccagtactaccggcccctgcataaagaagcttccggttctgaggtcctggaggtgccatttccctctctgtt

SEQ ID NO: 796178 - DNA, 111 bp, Homo sapiens
tcagcttcagctccagctccgctctcttcggctgccccaatccccggcagctctctcagattagaagcccaggacccaggaaggagacacaggaaatttattcaaagtccc

SEQ ID NO: 796179 - DNA, 100 bp, Homo sapiens
gccgcgccaccgagtccggaccggagactttggggcctaactagagcattggggagtcagcaatgtccgttgtgttaaatcagctgctgcccatgattaa

SEQ ID NO: 796180 - DNA, 90 bp, Homo sapiens
ggaggatgtcgggacaccccggaagctgggaaatggctgctctttggcgtaaattgcaatcgattagggatcgtttctcagaatcaagtt

SEQ ID NO: 796181 - DNA, 100 bp, Homo sapiens
ctgatttccattctgggtgatgccagaaaacctttccaacctatgagagaaagagatgtgaagaaagaagacgggtcatagagatgctacattgctgatt

SEQ ID NO: 796182 - DNA, 97 bp, Homo sapiens
ccgaccacatcgcccgccccatcctcatcctcaaggagactcggcggctgccctgggccactggctacgcagagtcatattgaacattccagatacc

SEQ ID NO: 796183 - DNA, 97 bp, Homo sapiens
aatggatgtagccgactcattattgcggcgggattaaggacactgcatgacattgggccagaaatccggcgtgctatatcgtgtgatttgcaagatg

SEQ ID NO: 796184 - DNA, 75 bp, Homo sapiens
tgaagagccttcaggcgctgggcgagattacaggctgtgccagccctggaaaaacagttacaattgttgttcgtg

SEQ ID NO: 796185 - DNA, 100 bp, Homo sapiens
ctggaggtggcagcagaaatcctactccacccataggaagacccacgtccacacctactcctcctcagtggaagtatgcgagacttaagagctcaagtga

SEQ ID NO: 796186 - DNA, 100 bp, Homo sapiens
tctccagtttccatatgttgagattctacttattcatcagtttgttgtgcttgtcaagatcagtttcatgttagggtcttacagtgtgaatgacggtgcg

SEQ ID NO: 796187 - DNA, 98 bp, Homo sapiens
ccgtggggacgccggagaactgtgcccattacttctgcctggactgcattgtcgaatggtccaagttactccacaggatccgctgaacataggatgtt

SEQ ID NO: 796188 - DNA, 75 bp, Homo sapiens
cttcgcctggaggaggagcagaaggtaattgaacggcgcattcggcaagagctgcctttcatggccacagagaac

SEQ ID NO: 796189 - DNA, 101 bp, Homo sapiens
ttaatcctgttacagacattgaggaaattatccgtttctggaaacattctacaatgagtgatgtgtctgcaggaggagccactgtttttcctgaagttgga

SEQ ID NO: 796190 - DNA, 98 bp, Homo sapiens
aagctttgtcaggaagctctggatataagtttggtgttcttgctaagattgtgaattacatgaaggtgcactacatcctccaggaggtggtgatgggt

SEQ ID NO: 796191 - DNA, 90 bp, Homo sapiens
gaaatttcggaccaggaccaggaagtaactttagaggaggatctgaggccagtaatagtagccatgagtctcgtattggtctagctgagg

SEQ ID NO: 796192 - DNA, 82 bp, Homo sapiens
tggggccagggaaccctggtcaccgtctcctcagaggaggagtatgatgaagatgctcaggtagtggaagacgaggaggacg

SEQ ID NO: 796193 - DNA, 100 bp, Homo sapiens
gaatacaaaagctacttgtgagtgcaagagtggttacatctctgtccagggagactctgcctactgtgaagatgacatgtgaaaaagtccttgatttgat

SEQ ID NO: 796194 - DNA, 80 bp, Homo sapiens
acctttgaccatgaagagaaatgagatgatagccaaaccctcagatattaacctggctgcagagccaaaagtgaaccgag

SEQ ID NO: 796195 - DNA, 75 bp, Homo sapiens
gattttgaggacacttgtggagagctcgaattccagaatgatgaaattgtgatgcagcagtctcggccctggctg

SEQ ID NO: 796196 - DNA, 101 bp, Homo sapiens
agaacctctgcaagctcatgaaagaaatcttagataagaaggttgagaaggtgattcccaaggactacaaaaccatgactgcgctggccaaggccatctcc

SEQ ID NO: 796197 - DNA, 96 bp, Homo sapiens
catggccccctggtttagggagggtgacacttaactccgccatctgcgttttgagcactgttctcataatggagtttcctgatttggggaagcatt

SEQ ID NO: 796198 - DNA, 96 bp, Homo sapiens
ggactttgtttttcctgggaactgcagggttttggctgaagcggagcagctacgaggagcagccgaccgtgcgcttccaacaccaggtgctgctcg

SEQ ID NO: 796199 - DNA, 83 bp, Homo sapiens
ggagacagggacagcgacttccttgcagcctcttctccggattggctcacagtggttgattgatcaaccccattggacgttgg

SEQ ID NO: 796200 - DNA, 49 bp, Homo sapiens
taaggattccaagtaactcttatttggtcatgctttcagaacgaaaagg

SEQ ID NO: 796201 - DNA, 99 bp, Homo sapiens
ctggcagcagcatctcagcccaagagaaggcagctgctggaggaggtgaagtggcatcgatgtcatctttgaaaagtttctactttgtcccttaatgcc

SEQ ID NO: 796202 - DNA, 100 bp, Homo sapiens
tgatgaccgaccccccaagaaaccccgccatggaggcttcattctggacgaggctgggcttttaaattttgacacagaattgtcaactaaagaaatgagg

SEQ ID NO: 796203 - DNA, 100 bp, Homo sapiens
atcatgcaccttcgtcccatgggtgacctgggccagcttctgtttctgtttttcagaagaagtgaagtcaagatgaagaaccatttgcttttctggggag

SEQ ID NO: 796204 - DNA, 75 bp, Homo sapiens
ggattccaagtaactcttatttgcctgaacagaaacagatggtggcccagcaggaatctatcagagaagggtttc

SEQ ID NO: 796205 - DNA, 51 bp, Homo sapiens
ttcagacccatttccagtcatgaaggaggaagatgactatctctttgatga

SEQ ID NO: 796206 - DNA, 99 bp, Homo sapiens
ataaagttgacagcagaggcagagggaggaaataatgctggccatacagttgttgtggattctgtggaatatgattttcatctcttacccagtggaata

SEQ ID NO: 796207 - DNA, 90 bp, Homo sapiens
ggacaattccatttggggaccagagatggacggtcactcagcctatggaggtgttggtaaatcatgcttattgctacagtttacagacaa

SEQ ID NO: 796208 - DNA, 100 bp, Homo sapiens
agacgaagcgagccccctggtggaagccagcagaaccagtttgcagagaaattccaggaggtgaaagaagctgccaagatagccaaagacaagacgcagg

SEQ ID NO: 796209 - DNA, 101 bp, Homo sapiens
aaaggacagcattcctgtgacctctgcctaccatccataaaatactcattcccctctcagaacagagagtacctgattgagaagctgcttacaagaacacc

SEQ ID NO: 796210 - DNA, 75 bp, Homo sapiens
cctccaacaacatccgcgagatcgagacaacgactgaaagacctttcattcagaagctgtttcgtcctgtggctg

SEQ ID NO: 796211 - DNA, 100 bp, Homo sapiens
gaagtctccctcaggatcagaccgtagcccttccggaaacctccatggctggaatgagctgctcatcgcctccttctcccaccgctccatcgccgtgaag

SEQ ID NO: 796212 - DNA, 101 bp, Homo sapiens
accgggcccactatgagacagaaggcagccgaggggctgtcaaagctccaactggaggccaccctgtggttcagctgtcccatagttttaatacagccatc

SEQ ID NO: 796213 - DNA, 75 bp, Homo sapiens
tatggtgacagactatggggcctttatcaaaatcccaggctgtcggaagcaagatcatgagcgtcttgttgttca

SEQ ID NO: 796214 - DNA, 83 bp, Homo sapiens
gttttgacacaagaacagttggccaatactggtgcccaagcctggattaaaaagcaatggtgaactagacccctggtcaggag

SEQ ID NO: 796215 - DNA, 87 bp, Homo sapiens
cgtggccaccgcctccagcttgccaccaaagacctgcgactttgctcagcccgcgggaggactcagactccagcacttccagcagcg

SEQ ID NO: 796216 - DNA, 76 bp, Homo sapiens
ataaagaaagcaaagcgcagaaatgttggatttgaaggcctggagcaggatgtcctccaggccattgaccgggcca

SEQ ID NO: 796217 - DNA, 82 bp, Homo sapiens
tcaaatagtgatgaagctgtaatcaataaaaaacttcccaaagaactcctgttacgatggctcaatcacaaaggagtgagac

SEQ ID NO: 796218 - DNA, 83 bp, Homo sapiens
ctgctttccactcggctcctgtcgtccgttctctcaggctcccgttcaggtggcagtagagaagagcatcacagaagttgctc

SEQ ID NO: 796219 - DNA, 75 bp, Homo sapiens
tgccgaagatggcggaggtgcagggaagaaggagaaagggccaacccctgaagaagcaatacagaaactgaagga

SEQ ID NO: 796220 - DNA, 95 bp, Homo sapiens
atggagcacgtccaggctgaccacgagcttttcctccaggcctttgagagtgaccaagaatatggcccaggtgaccaaagccctggacaaggccc

SEQ ID NO: 796221 - DNA, 90 bp, Homo sapiens
gacctgcatggccaggcagagtcagcagctgcagtgtggaaggtaaagagaaatgtgtatgaccttacaagtatccccgttcgccaccaa

SEQ ID NO: 796222 - DNA, 74 bp, Homo sapiens
aaggagttatatttggctaaagagggaagatctgctaccaggaagtgtcccagtgtttcggggtcctctccagc

SEQ ID NO: 796223 - DNA, 100 bp, Homo sapiens
gtcctgagatcaaatggcacttcattggccacctacagaaacaaaatgtcaacaaattgatggagtcacctaaggtcctgcgagtacaagggtcgacccc

SEQ ID NO: 796224 - DNA, 75 bp, Homo sapiens
gagacctgccatttccaggccttctgggttcctggtagagttacacagttgtgccgccagtatagcgacatgcct

SEQ ID NO: 796225 - DNA, 100 bp, Homo sapiens
tggaacaatcattagttcagtgcagtgtctgacttgtgacagggacatgatgagctacattgggcccaagaggacagcagtggtgcgggggataatgcac

SEQ ID NO: 796226 - DNA, 75 bp, Homo sapiens
aacccctagaccggtttttagtccattgactatgcagcctaatggagatgggtctcactctgtcacccagactgg

SEQ ID NO: 796227 - DNA, 90 bp, Homo sapiens
gcaaactttccgagaatatggagatacaggtgaaatctggccataggaaaaggatacagagtagagtttcatgaacctgaaacttggtgg

SEQ ID NO: 796228 - DNA, 90 bp, Homo sapiens
gcagctgtgactgaggcagtgcgggccctgctggtggttgaagatggatatgaattttttgcaaagaggcagttggtcactctgttttct

SEQ ID NO: 796229 - DNA, 75 bp, Homo sapiens
ggccggccctgcccgggctgggtgaggggcgcccgcctcaagctagaggtgctggagaatctggtaaaagcacca

SEQ ID NO: 796230 - DNA, 100 bp, Homo sapiens
ctgctcagcctctatgcccaccgctaccgggctgactttgctgacatcagcatcctcagcgatttctgacccaggggagctgaactgcccgaaaggccag

SEQ ID NO: 796231 - DNA, 100 bp, Homo sapiens
gggccaggaggcctgaggcagccaaagaggaagcagcttgggcttccagctcagcagggaaccctgcagtcgtccctcatggaccttgctgacgtcttca

SEQ ID NO: 796232 - DNA, 100 bp, Homo sapiens
gtgtcttgaaatgtctaagacgcatgtcagaaatgcagctgccactgcagagccccgccatggaagacacgccgttggtgatatcgaagcagaagacgga

SEQ ID NO: 796233 - DNA, 82 bp, Homo sapiens
tgagggcagcgccggttccttgcggtcaagatgctgcaaaacgtgactccccacaataatgctttaagcagtggcttaaagg

SEQ ID NO: 796234 - DNA, 127 bp, Homo sapiens
cgagtccttccctggactccagtcccttgtgggaaacaatccctcgcctccggaggcggcgaggagcggcggttacagaatgtctgaaggggacagtgtgggagaatccgtccatgggaaaccttcg

SEQ ID NO: 796235 - DNA, 98 bp, Homo sapiens
agccctgcctctccctgggctctgttgggcagatgtacagagtcagctcaggcacatagaagcagcatttgaccaggaggctgcggcagtgttgatgg

SEQ ID NO: 796236 - DNA, 98 bp, Homo sapiens
cgacactctgcaagattctctcctgaagtcccagattgggaaaatgaggtacgttagtgttcgcgattttaaaggcaaagtgctaattgatattagag

SEQ ID NO: 796237 - DNA, 93 bp, Homo sapiens
cgaggaggcgcgggaggtgttcgagaacgaccccgagacgacctcctgccccccgaggtctgcagtctcctgaacccagcagccatctacgcc

SEQ ID NO: 796238 - DNA, 75 bp, Homo sapiens
gttcctgctgccctcaaggtcgtgcgtctgaagcctacaagaaagaaaaagtcgctggagtcgatcaactctagg

SEQ ID NO: 796239 - DNA, 50 bp, Homo sapiens
agaacattctcgaatacctagaatggggttaaaaggactactgactcaaa

SEQ ID NO: 796240 - DNA, 96 bp, Homo sapiens
atgagaagccctgtacagtcttgtcaagaaataccctgagccagtctctgagacgcttcggagatgtaatcagtgtagagaaaaccgtgaagagat

SEQ ID NO: 796241 - DNA, 100 bp, Homo sapiens
ttctttttatgtgcgaacatgtaacaagaatccaaagaaaacaaaatggtggtatcatgccaaaagaatgcaatggtgtaaagattccagttgatgccag

SEQ ID NO: 796242 - DNA, 101 bp, Homo sapiens
ccggtgtaccgcggcgagaagccccagctgcactacgcggatgtgatcttcgtggtggaaagctaaattttaaaaccaccccaatggatgcagacagtgat

SEQ ID NO: 796243 - DNA, 78 bp, Homo sapiens
tctttaccaaacttattaataggaataccactattccaaccaagaagagccaggaggagatgttaaagtaacccatct

SEQ ID NO: 796244 - DNA, 96 bp, Homo sapiens
tgtgccttggacctaatgaggcgcctgcctccccagcaaatcgagaaaaacctcagcgacctgatcgacctggctggaggctcccaggtgattttc

SEQ ID NO: 796245 - DNA, 48 bp, Homo sapiens
cttccaaaggattcaaatttacactggcactactgcagtcttcagtta

SEQ ID NO: 796246 - DNA, 50 bp, Homo sapiens
gaatcttggattataatcatgagggggtcctgatgacaacttaattgaag

SEQ ID NO: 796247 - DNA, 82 bp, Homo sapiens
cttggacagatgatgccagttaattactttgaatgaaaatgtttataggaggccttagctgggacactacaaagaaagatct

SEQ ID NO: 796248 - DNA, 75 bp, Homo sapiens
aaggatgaccaggaatgggaaagccccagtatatttaaagttggagttcgttgctaaagatggcagacccagatg

SEQ ID NO: 796249 - DNA, 74 bp, Homo sapiens
aagtgcagctgcctcagttcttagcgcaggatacagacgtccctcaccagtgccagcttggggtctgcagatga

SEQ ID NO: 796250 - DNA, 100 bp, Homo sapiens
agtggcttggtccagtaccagatggcacagctgctccgggaccgtggtggacccaagtggagagattgtggaactggcgaaaggtgcatgtccctggaag

SEQ ID NO: 796251 - DNA, 75 bp, Homo sapiens
ctggtgaagacaaggggggatatgtgatcaaagcatcagaaggttttgacacaagggcgcatatcttcaaagcac

SEQ ID NO: 796252 - DNA, 100 bp, Homo sapiens
ctgccatcctgaactcaagagtggttactactggattgaccctaaccaaggatgcactatggatgctatcaaagtatactgtgatttctctactggcgaa

SEQ ID NO: 796253 - DNA, 75 bp, Homo sapiens
ctgggtctagagtgcggagctgctccgtggccacgaggacgtcaccatgggcaccatgccggtggaaaggatgcg

SEQ ID NO: 796254 - DNA, 82 bp, Homo sapiens
ctcggctgcagacttggccaaatggacgggactattaagaccaagatcactccatggatgaaatgacagctgtggtgaaaat

SEQ ID NO: 796255 - DNA, 101 bp, Homo sapiens
cgcctcccctcacccccggccgccttccctccatccgttccagggacctcaccctcgggggagtcaagaagcaaacagctaccggacatccagcatcatat

SEQ ID NO: 796256 - DNA, 50 bp, Homo sapiens
gccgcaacgtaaaatccttggaaaagggtttctagagaggaaggatctcc

SEQ ID NO: 796257 - DNA, 73 bp, Homo sapiens
ctctccaggatgtctacaaaattggtggtattggcaagcttgccagtgtacctgctggtggggctgtagccgt

SEQ ID NO: 796258 - DNA, 90 bp, Homo sapiens
ggataggagaaggatgtggactgcagtgctgcagtgccagtggagctgggcaagaagtaggaagatcatgtattattctcgagttcaaag

SEQ ID NO: 796259 - DNA, 101 bp, Homo sapiens
gcgatgcctgtgatgatgacgatgacaatgacggtgtgaccgatgagaaggtgctgggcctgtcccagggcagcgtcagcgacatgctgtcccgaccgaag

SEQ ID NO: 796260 - DNA, 50 bp, Homo sapiens
aatgtgatgcatgtctcagtggtgactattatatggttaaaaagattttg

SEQ ID NO: 796261 - DNA, 96 bp, Homo sapiens
cctcctcctgctgctactgtgtccagcgcaggtcaaaatgcagatcttcgtgaaaacccttaccggcaagaccatcacccttgaggtggagcccag

SEQ ID NO: 796262 - DNA, 87 bp, Homo sapiens
tgatgatatgttatcaaaagtagagaaaatgaaaggagagcaagaatctcatagccctgctgctgaggccgcgccctccccgccctg

SEQ ID NO: 796263 - DNA, 90 bp, Homo sapiens
ggcaaagccggctgttaccctgcacagccgtcaccctcaactttcccttcagggcatgtcagagacctttgagacattacacaacctggt

SEQ ID NO: 796264 - DNA, 98 bp, Homo sapiens
ccgattgtcaaagaggacagggcctccatgctttgagtggacatactggaaaaccaattctgtgtcctcggaggaccacagcccagttgggccccagg

SEQ ID NO: 796265 - DNA, 75 bp, Homo sapiens
ttagataagatcatctatatcccacctccagatcacaaggattcctcttcgtgctgctgggggtgggaagcatgg

SEQ ID NO: 796266 - DNA, 51 bp, Homo sapiens
gtccacaaaatgcttcatctcttgtaataatagacgtggatggaatacaac

SEQ ID NO: 796267 - DNA, 75 bp, Homo sapiens
ctgggccatccgcgccatcgagaccctctcggggccgttgctccagggagaactgcaaatatcttcatccacccc

SEQ ID NO: 796268 - DNA, 100 bp, Homo sapiens
acccaggggaagttacacgaggttggtcatgaaagagattccttgcagagacagctcaacacggcacttccacagaaaactgtcgctgaaaagcaggaga

SEQ ID NO: 796269 - DNA, 75 bp, Homo sapiens
caatgacaaactgacggaaaaggagagagatttctcttcagcaacgggtagcagaattggaaaaaattaatgcag

SEQ ID NO: 796270 - DNA, 98 bp, Homo sapiens
ttgaaagagcctctacttacatttcatctttttgatgcttttgtcagtgtactggccactgaagatcctggtgtcgccatgggccgccgccccgcccg

SEQ ID NO: 796271 - DNA, 101 bp, Homo sapiens
cagagatcaatggaaccatgaacgtgtatgaaaacattatagactggtattttcaattttcatttgcaagaaaatgatcagtggaatgaaataactgaagt

SEQ ID NO: 796272 - DNA, 50 bp, Homo sapiens
ccagtgccgcactgcctgtctaccagcatggagatatggaccaaaaggaa

SEQ ID NO: 796273 - DNA, 51 bp, Homo sapiens
cctgaccaagtccagccccagcatggcatccatgctgctcctggccccaaa

SEQ ID NO: 796274 - DNA, 88 bp, Homo sapiens
tcgccagcgccggcctcctccgtgcggagaagaagctgcggccgcacctggccaaggtatttgaaatatctcaccaaaaaatatttga

SEQ ID NO: 796275 - DNA, 96 bp, Homo sapiens
ttggatcgtttcatactttacgcttgtgtgataaaactgggggatatagctagtgcaataaaagaacttcttgatacagtgaataatgtcttcaag

SEQ ID NO: 796276 - DNA, 90 bp, Homo sapiens
agccataaagaaagcaaagcgcagaaatgttggatttgaaatgatgtctttctacctaaagatattgacctagacagtgtggatatggat

SEQ ID NO: 796277 - DNA, 101 bp, Homo sapiens
cgccaaggaggtttacaaaatagacatgccgcccttcttcccctccgaaacacccagaggcctccattcaggctgttttttcagatgcccaaatgcatatt

SEQ ID NO: 796278 - DNA, 46 bp, Homo sapiens
ttcctgtacagcctgcagaactgtggattcttgctctgtcacccag

SEQ ID NO: 796279 - DNA, 75 bp, Homo sapiens
ggctttggcaaagctggggattggccagctgactgctcaggaagtaaaatcggtgaacaactttgtgatctttga

SEQ ID NO: 796280 - DNA, 100 bp, Homo sapiens
ggagacgcgctgccgaggagaacccagcgggtaaagatgagccttccagctacatttgcacaacatgcaagcagcccttcaacagcgcgtggttcctgct

SEQ ID NO: 796281 - DNA, 100 bp, Homo sapiens
ctagaggcagggtcatccttgcccttgtcctcccctttcatccctatgtggaaaacgagaaagtggctcatgccaaagaagaaaaccttagtatgcatca

SEQ ID NO: 796282 - DNA, 74 bp, Homo sapiens
ggatctcatatcttcacttggcaaactcaacaaggtggatgaaaatactaggaaaagtttatttaagttacgtt

SEQ ID NO: 796283 - DNA, 100 bp, Homo sapiens
aagacgaattaaagggagattacacagaagcaaaagccttgatagcatggatttctgtgagctcactacttataagctagcaattacagatttaactaca

SEQ ID NO: 796284 - DNA, 100 bp, Homo sapiens
gtcttcactccttcctgcgagccctgaggaagccttgatgatcaggatggtgctttcacaaaatggagagtggagaattcatggggtgaagaccatggcc

SEQ ID NO: 796285 - DNA, 75 bp, Homo sapiens
cggagaggagcagaggccaggctgctgctctgggaggttggcagtggcaatgacccctggtcagcctggagtgcc

SEQ ID NO: 796286 - DNA, 80 bp, Homo sapiens
aacagagctaaaccggttcacctggtgcccagacggctagatctgactgcagccatgagcagcaatgagtgcttcaagtg

SEQ ID NO: 796287 - DNA, 90 bp, Homo sapiens
aaattcaagccctaaatatgagcagctgtccactcgattccaagggtaaagtctgttcgggccatgggatggaacagattaaacgtgcaa

SEQ ID NO: 796288 - DNA, 100 bp, Homo sapiens
gacagtaacagtacttgggatcccccagttccaaagtgtcttaaaggccgcattgacaggaagattgagttccccctgcctgatgaaaagacgaagaagc

SEQ ID NO: 796289 - DNA, 51 bp, Homo sapiens
ctcccttcatgtctgggtcatgggtgataaaagaaaatgtggctgaagtta

SEQ ID NO: 796290 - DNA, 83 bp, Homo sapiens
ccgcttcggccgaaggcccgagcgcccgaggcgtctgggatggtgtgggaccgggtatgatgccgggcgggacggcttcatcg

SEQ ID NO: 796291 - DNA, 80 bp, Homo sapiens
gcggaggacgaagagcgggacccgagccctgattacaacagcagtgaattgaaaacagcctgcaggaagcatgagctgta

SEQ ID NO: 796292 - DNA, 82 bp, Homo sapiens
ggctttcctggtcagcagcgacttggaaattgggatggcggttcttgttaagctcccctatgccgcccagcaggaaaccagt

SEQ ID NO: 796293 - DNA, 100 bp, Homo sapiens
cgcaaggatgagtgctgccagagagtctcacccgcatggggtgaagcgttcagcctccccagacgacgatactaaaatccacggagtcgggtttgtgaaa

SEQ ID NO: 796294 - DNA, 82 bp, Homo sapiens
ggcacccctgccagtcctgctctgccgcctgccaccgctgcccgagcccgctacccagccttcatgctgttttggaacatgt

SEQ ID NO: 796295 - DNA, 75 bp, Homo sapiens
gtcttcggtggactccttcggcagtccacccaccgccgccgcctcccagggagccccagactctggtaaatgctc

SEQ ID NO: 796296 - DNA, 100 bp, Homo sapiens
gaaattcttcagtgcatcttccagggtcggatcaaagaagggtttattcttcagtccaaggaagcaattcacagtcagctgttagagaagcagaaaatag

SEQ ID NO: 796297 - DNA, 97 bp, Homo sapiens
ctcggggcctgctgctggccacaaagaactcccacctgcgacacatcgagcacatggaggttggtgaccgttgttatgatgaaaaaatgtatgatgc

SEQ ID NO: 796298 - DNA, 101 bp, Homo sapiens
tggcacgtctagaaggggataaggagtccctcatattgcagggtgtgaacaaagactcctatctgatcctggagacgctgcccacagagtatgactcgcgg

SEQ ID NO: 796299 - DNA, 100 bp, Homo sapiens
atgggggatttctacgacccggagcacccgacccctgaggccaattcctgtccccccagcagcatggcatcgtgtgctgaaccctctgagccctctgccc

SEQ ID NO: 796300 - DNA, 117 bp, Homo sapiens
ggagcctatgaggagacatgaaatggtagccaaacccccaggtcctagcagaagatgtgactcagactgcctctgggtggggctggctggcccacagatcctgccaccatgccgcag

SEQ ID NO: 796301 - DNA, 101 bp, Homo sapiens
gcggcggatctggacacccagcggtctgacatcgcgacgctgctcaaaacctcgctccggaaaggggacacctgatgtgaactatgaagactttactttca

SEQ ID NO: 796302 - DNA, 50 bp, Homo sapiens
ggcttcggcttcatccgcttggtgaggaaaatagcagctgaatactatga

SEQ ID NO: 796303 - DNA, 96 bp, Homo sapiens
ttgaaggtgatcatcatggacacagttttgacagtaattcttttgggccgggggtcctgatgacaacttaattgaaggtggaggaacaaaatttgt

SEQ ID NO: 796304 - DNA, 100 bp, Homo sapiens
ttggcctaccctccaaagaaaagaactcttcatcttggcttatacctatactgcctgatatgctccgacacatttttcagttctgtgttttggaaagcag

SEQ ID NO: 796305 - DNA, 100 bp, Homo sapiens
gctccagagcctgctggtggaggagttaagtgggcagaccaacatccacctcagcaaaaacttcttcctgacgaatcgcgccagggagcgctcagacacc

SEQ ID NO: 796306 - DNA, 83 bp, Homo sapiens
attccactctccagtgtaatgattattgacaacaggagccggtgaaacctgaagaaggcagagatatggcaaacaggattggc

SEQ ID NO: 796307 - DNA, 100 bp, Homo sapiens
gggagataactttcgtatcacaaaagcagatgctgctgaattctggagaaagttttttggagacaagaggtggtataacagacagaaatctacaaaggat

SEQ ID NO: 796308 - DNA, 87 bp, Homo sapiens
ccggcccaagggcgacttctccagccgggcccgcgaagtgatgagtgtgggtcagagagccaaactgactatatctccagattatgc

SEQ ID NO: 796309 - DNA, 100 bp, Homo sapiens
ttaaggaattctttcgaggattaaatgccctagactacttggccattggcatccatgaacttgctgcaatcagtgagagaagaatcgagcggctctgcaa

SEQ ID NO: 796310 - DNA, 100 bp, Homo sapiens
gtaagttttgaaccagacagagaaaagaaatggtggcaatctgaaaatgcgatggcaagccggcaggtggatattgcaactcagggctggttcattggtc

SEQ ID NO: 796311 - DNA, 101 bp, Homo sapiens
agtcaggagagacttgtgaatgaaacccgagagtgtcaaagcttgcggcttgagctagagaaactcaaaaacatcggttgtgaagagaaagccaaaaagaa

SEQ ID NO: 796312 - DNA, 83 bp, Homo sapiens
cgatagtgccaggcctatgttggagcgcgagcccagcattgacctgctgcaggccttcgtggagcactggaagggcatcacgc

SEQ ID NO: 796313 - DNA, 100 bp, Homo sapiens
cttcgggcggaggaggaagtaggggtgcacctcagcactatcccaagactgctggcaacaggtaatattttcatatctcgaacctcaatcccaaatgctg

SEQ ID NO: 796314 - DNA, 90 bp, Homo sapiens
ctgcggcagacggcgacagtggcggcggcgccatggcagggcttgcagtgccaaacccaagtctgaaatccacgtgtctatggccactcc

SEQ ID NO: 796315 - DNA, 46 bp, Homo sapiens
tgaagcagtccctgccccccgttcctcagcactttgtttgccccct

SEQ ID NO: 796316 - DNA, 115 bp, Homo sapiens
gattcagctaaacgtgggtttcttactaaggacgagctgatcaagtatatgactgaagaaggtgatctgcaactctttcaccatctgtaatgcggagatgcaggaagttggtgtt

SEQ ID NO: 796317 - DNA, 100 bp, Homo sapiens
gattcttgctgtttcttttgctcctctgatccagccctgccattcagagtcaggaaaatcaagacttgtccagttactgaataaccctataccttccaat

SEQ ID NO: 796318 - DNA, 100 bp, Homo sapiens
gccgctgccaccatccgcgaggcaggagagaggaggaggagtgcggcgcggcggccccgggaccaaggagcaccacacactggaagcagacgctgttcat

SEQ ID NO: 796319 - DNA, 97 bp, Homo sapiens
ggccgaggccgggaggccgtgcccggaggtgtcatggagaaactccagctgggcccagagattctgcagcgggaaaatccaaggcttatttatgcca

SEQ ID NO: 796320 - DNA, 76 bp, Homo sapiens
catcgtcgcggttctgctgccgaaaaagcttgtggtgaaggggggcaaaaaaaagaagcaagttctgaagttcact

SEQ ID NO: 796321 - DNA, 101 bp, Homo sapiens
tcaccctccccggagattacctcctggcaggcctgttccctctccattctggctgtctgcagccagaagatcagctgccatgttacttgactcacaccaac

SEQ ID NO: 796322 - DNA, 87 bp, Homo sapiens
aatggaaagcaaagaagaaagcttctaatggggaatgcccagaaagaggatcgtgttccagtgcttgaggagtacagagagtacaag

SEQ ID NO: 796323 - DNA, 75 bp, Homo sapiens
gcgaagcctgcagccctgggcgtggacactgaagaggatcgggggagctctgtgtgtcgtctgagcagtcgcgag

SEQ ID NO: 796324 - DNA, 96 bp, Homo sapiens
caggctttaaactgttgtgccagtgcttaggctttggaagtggtcatttcagatgtgattcatctagtttttctattgggaaagctactgatcgga

SEQ ID NO: 796325 - DNA, 95 bp, Homo sapiens
tactacccaggccactacccacccaacattgactgcacatggaacattgaggatctaggggtgtttattcctgctcctatggctcaagggatgag

SEQ ID NO: 796326 - DNA, 83 bp, Homo sapiens
caagaggtggaagaggacgggctttaggctggaagcgccttagaggagccatttttccagataccagcgggcaagcagaaaac

SEQ ID NO: 796327 - DNA, 71 bp, Homo sapiens
agtcctgccaatgagaacggagacaggcatctacagcagggtgctaaagtgttatgtggtggagatatata

SEQ ID NO: 796328 - DNA, 100 bp, Homo sapiens
gcatgagggttatgtacacttcgggaccatcagagctgataccccaatgtccttctttgactttgtggttgatcctcattctttcccccgtacagtggaa

SEQ ID NO: 796329 - DNA, 88 bp, Homo sapiens
ccttcacccagcatttcatccctcgtcgaaaggattggattggcatctttagacacccaactggtcagctaactttgatgtcccaatg

SEQ ID NO: 796330 - DNA, 87 bp, Homo sapiens
accggactggacgcatttttatacataggatggcagtcttgggcacgtccatctgtaaacctgctgagagctctggtgacaagaaag

SEQ ID NO: 796331 - DNA, 100 bp, Homo sapiens
gtgcctagcagcaagtcatctggtgaccttgttgatctgtttgatggcaccagccagtcaacagataactgttcccaggaaaaaaaggaggaaatcctgg

SEQ ID NO: 796332 - DNA, 100 bp, Homo sapiens
tcctccactgccactacagggaagtgcatcacatgtcagtgtttctgaaagatctatccagcactccgatggccagcaacaacaccgccagcatagcaca

SEQ ID NO: 796333 - DNA, 96 bp, Homo sapiens
gagaactatagcaacttggtatcactagattttgatggatcatcaaaatctgtcagaacatgtactctgcatggttttatatctgattgaattagg

SEQ ID NO: 796334 - DNA, 80 bp, Homo sapiens
aaccattccaaaatctctttcaggtttttagaacttcagccataaaaatgggcagaattttccttgatcatatcggtggt

SEQ ID NO: 796335 - DNA, 99 bp, Homo sapiens
caagaagatcatcattaaggacggaggcacggtattattaacccaaagaatccaaaggaagctccaaagtccttcagcttcgactattcctactggtct

SEQ ID NO: 796336 - DNA, 100 bp, Homo sapiens
ccaacatgagccaagtgctgttccaccaactagtcccgttgcaggtgaaatgcaaagactgtgaggagaggaaatgcttccagactgcacacttttactt

SEQ ID NO: 796337 - DNA, 100 bp, Homo sapiens
tcaagcagtcctaccatgtcagccttcccagtagctgggaccacaggctcccagccccattgccaataccttcctccactatcgaaccagcaaggtgagg

SEQ ID NO: 796338 - DNA, 90 bp, Homo sapiens
atatcctgctcacagtttgtaccagcattgaaaataggctatctctacacctactgggctcctctgaccatatgatgtcctgaaaattct

SEQ ID NO: 796339 - DNA, 82 bp, Homo sapiens
ggaagaactagtttcccaaacagatgttaagacattcttggaagccttaccggtcaataactgggagatggacaaactagag

SEQ ID NO: 796340 - DNA, 100 bp, Homo sapiens
agatgataaagatgatgatatccttctcaaccttgtgggatgtgaaaactctgttactgaagttgatggagaaccttgtgacctgtctttgaatataacc

SEQ ID NO: 796341 - DNA, 82 bp, Homo sapiens
tgactcaacaatcaggcaatggtttgaataccttactacatttgttccagatggagatcttataacaatttttgatagttct

SEQ ID NO: 796342 - DNA, 90 bp, Homo sapiens
cggaaatattcttcaacagagaggggacactttgctgagttgctgagttattggcagtttgttggcaaagacaaaagtgcaatggcaaca

SEQ ID NO: 796343 - DNA, 96 bp, Homo sapiens
cgtcgcggccctgggcgggcgccgcgagccggttttccaagagataacttcaccaagatgtccagtgataggcaaaggtccgatgatgagagcccc

SEQ ID NO: 796344 - DNA, 104 bp, Homo sapiens
tgcagtcggcttgtcctggctcttgccctcatcctggttctggaatcctcagttcaagcaaattgtggctactaatttgccccctgaagatcaagatggctctg

SEQ ID NO: 796345 - DNA, 82 bp, Homo sapiens
tcggcagtccacccaccgccgccgcctcccagacaggccgacggtcgcaaggtcctacggtcaagcatccgggagtttctat

SEQ ID NO: 796346 - DNA, 75 bp, Homo sapiens
agtttctttgctgggatggctgtcctttctggaccacctatagcagataacctcaaaatctcagactttggcttg

SEQ ID NO: 796347 - DNA, 74 bp, Homo sapiens
ggctcccgccggctctgggtctggagtgaaacaaagagtcctcttcgtggaaaagaaaaaaatacgctcccttt

SEQ ID NO: 796348 - DNA, 100 bp, Homo sapiens
acgacaggaagaattaagacgcatggaagaacttcacaatcaagaaatgcagaaacgtaaagaaatgcaattgaggggatgatcaaaaagttatgactgc

SEQ ID NO: 796349 - DNA, 82 bp, Homo sapiens
tccgcagtccccccgttccctggaggtcctgtggaatggataccgaagtgtataaagctacagtaaaagatgacctcaccaa

SEQ ID NO: 796350 - DNA, 75 bp, Homo sapiens
cccggggcgcgcccaccgcgccgcatccatgttcgagagatgcgctctgtgctgcggaaggcgggctccccgcgc

SEQ ID NO: 796351 - DNA, 75 bp, Homo sapiens
attttagaagttcatattgacaaaggcgtaaagacagacatgaagcaagtgggtttgcaaggagaccagatccag

SEQ ID NO: 796352 - DNA, 100 bp, Homo sapiens
cccgcccagagtcatggcggcagcagccgctctgagggcgcctgctcaggttaagaaggcttttttgctctgtagcctggacgtactttgaagcccctcc

SEQ ID NO: 796353 - DNA, 100 bp, Homo sapiens
ccgggaggctggaaaaggaggatctggggacccggatcagccgcctgacccggcgggtggaggagatcaagagtgtcaatccatatctacaaggacagag

SEQ ID NO: 796354 - DNA, 99 bp, Homo sapiens
gccagttcccaccccagcctttcctacgcccaccccagttctgacacatagagagttcaagtggatggccttgaggacttgaaaagctgagatatgatg

SEQ ID NO: 796355 - DNA, 83 bp, Homo sapiens
agagcctccccggcggccgggcgggtgcggacggcgggagttttccgtctgatgaaggttggccatttgcaaagtatcttgga

SEQ ID NO: 796356 - DNA, 48 bp, Homo sapiens
tcggcgagcccccgcggcgacagagatggaaaataatgtcctgcaaga

SEQ ID NO: 796357 - DNA, 100 bp, Homo sapiens
ctcaagagagatgatgccagtatggaccgagatgataaccagttcatcaatggtgctaaggaaatttgctatgctcttcgagctgagggttattgggctg

SEQ ID NO: 796358 - DNA, 100 bp, Homo sapiens
actggaaacaatggcatttacagaaagagtcaacagcagtggcaacaggatgttttgaataatttgggatcttgtgaactggatgaagatgatctaatgc

SEQ ID NO: 796359 - DNA, 83 bp, Homo sapiens
ggctccagttgtccgcggttcctcctcctgtcgctgcccgtgtgattactgagactcaggcccggattgcatttctacaaggc

SEQ ID NO: 796360 - DNA, 71 bp, Homo sapiens
ggcttcgagttcaacatcatggtggtcgtaaacggagttccctctcgaagtccaagattagttgcttctgg

SEQ ID NO: 796361 - DNA, 90 bp, Homo sapiens
cacttctctgtcgtcacagttagatttatcatagaatccccgactcagacccatcttctagcaaaacaaggcagatcatctccaccatcc

SEQ ID NO: 796362 - DNA, 50 bp, Homo sapiens
ggatttcctggaagcagagaaatgactcagattgatggacaacttttctt

SEQ ID NO: 796363 - DNA, 96 bp, Homo sapiens
cgccgcagccatgaccgtggagttcgaggagtgcgtcaaggactccccgcgcttcaggaaagaccacagcaagattctttcattcgtctcctccta

SEQ ID NO: 796364 - DNA, 98 bp, Homo sapiens
aggagccattatttatgtcatcaagaagaatgacgatgcctggctttctccggaccccctgtttctggaacagaggagggtcagagaagcaaagaccg

SEQ ID NO: 796365 - DNA, 74 bp, Homo sapiens
gaactaggaggatgtgtgattcccactggtcgcctgcagattcgtattttacatggagaagtgaacaaagtgaa

SEQ ID NO: 796366 - DNA, 82 bp, Homo sapiens
tgaagacgtctgcgtgagaatagagaccaccgaggttttaaaatcaaagatgggaaaatcggagaaaattgcccttccccat

SEQ ID NO: 796367 - DNA, 50 bp, Homo sapiens
taaaccagtacagacaatcactccacatgctgtggaaatacaaagaactc

SEQ ID NO: 796368 - DNA, 75 bp, Homo sapiens
aagcactgccttgatgatccgtatggggaactgcggagtacgtccagcttgttactgaacttcgaatgacaagag

SEQ ID NO: 796369 - DNA, 100 bp, Homo sapiens
attttggcattgacatttaattttagggtcctttatatagaagggagagtagacatgagcttctgaattcaacacgtgaagatttacagcttgataagcc

SEQ ID NO: 796370 - DNA, 75 bp, Homo sapiens
ggatcgctgtgatcgtcacttgaacctgtctccagagaagattttccacgtcattgtggccccttgttatgacaa

SEQ ID NO: 796371 - DNA, 83 bp, Homo sapiens
cggggaaacgcgccggcggcgaaggagccgagccccgcgtccgacctccgatcatgaacgggcccctgcacccgcggcccctg

SEQ ID NO: 796372 - DNA, 100 bp, Homo sapiens
actggatgaactgataaaacccaccagtctagggaagtcgagataacatgagtattgtactagtttgcttttcaaatgctcccaaggtctcagatgaagc

SEQ ID NO: 796373 - DNA, 107 bp, Homo sapiens
aacagagagcagcatttcagaaccaggttctccttcgaggaacagagaaaatgaaaccagcagacagaatttgtcaggatctcgaggacctggaagaagcagaggag

SEQ ID NO: 796374 - DNA, 83 bp, Homo sapiens
ctggaagccgtggctgcgctctcttccctctgctgggcgtcctgttcttccaggattgttaaaggaaatgggctggcaggaag

SEQ ID NO: 796375 - DNA, 50 bp, Homo sapiens
ggagccccggcagcaggagcgtcgcagtaatagctcttcaagtctgcaat

SEQ ID NO: 796376 - DNA, 120 bp, Homo sapiens
atcccgagaccctccctagatcaccatcagcagagttctctcctgctgctcctcctggaaccaacccgtgtgcggacaggaacggggggtgcagccacctgtgcttcttcacaccccacg

SEQ ID NO: 796377 - DNA, 101 bp, Homo sapiens
ttgatcgccagcttggctctgggagacctgctgcacatcgtcattgacatccctatcaatgtctacaagaataacaagcctttgtattcatttgaagataa

SEQ ID NO: 796378 - DNA, 100 bp, Homo sapiens
cacagctgttcgacttcgatgatttactgaaatttgatgacctagatggaacacatgctctgatgctttggagtttaacccttctgccaatccagaggca

SEQ ID NO: 796379 - DNA, 100 bp, Homo sapiens
caagaccaaaatttgaacaggttaatctgttggattctaatgcagttcatcacatcattcatgattttcagttttccacctatttccctggatattttga

SEQ ID NO: 796380 - DNA, 82 bp, Homo sapiens
tcagtggctcaacaggctgaagggagatatgaatatcactgggcagatggtactaatattaaaaagccaatcaaatgttctg

SEQ ID NO: 796381 - DNA, 101 bp, Homo sapiens
caaatcttttgatgttaagggaagcctgaaaattattgtcctccaaaagctggggaaagctgatgagacaaaagacgaacagttcgaagaatatgtccaga

SEQ ID NO: 796382 - DNA, 100 bp, Homo sapiens
gggttgagcgggctttttggaagtttgtggcggaggtgaggccgagcgtgtgaaggcaaagaagaatgctgctccattcagaagtgaagtctgctttggg

SEQ ID NO: 796383 - DNA, 82 bp, Homo sapiens
ctactgcatgctttataacccttattggacagctcttccaagtaccctagaaaatgcatacgaattggagcaatgttggctt

SEQ ID NO: 796384 - DNA, 101 bp, Homo sapiens
tgggatgggagcgcactagagtttaactggcacccagtgctcatggtcaccggcttcgtcttcatccagggcatcgggcatgctgttgaagcgaagtggca

SEQ ID NO: 796385 - DNA, 88 bp, Homo sapiens
gttgtggagctggaaatagtgtgtttccaattttgaacactttggagggaggagttgtgtggggtaatgacaatctcggactctccaa

SEQ ID NO: 796386 - DNA, 98 bp, Homo sapiens
tggactgctccgggaaggggctgacggccgtgcccgaggggctcagcgccttcacccaagcgctatgctgaagaaggaagaagcaattccatggcctg

SEQ ID NO: 796387 - DNA, 60 bp, Homo sapiens
gtaaaacaggagcttgcagatttggagataggacgaatgccttagtttccactttccagc

SEQ ID NO: 796388 - DNA, 98 bp, Homo sapiens
acagtttgtggcaagacaagctcagaactgagaagctgtcaccacagcccgtgttcccaagaaaatcctcaagtgcaaggcagtgtctcgagaactta

SEQ ID NO: 796389 - DNA, 75 bp, Homo sapiens
tcctgaggagcctcctggcctgcagcttctgtgtgctcctgagagtggaacatgacaaggaattcttccacccac

SEQ ID NO: 796390 - DNA, 78 bp, Homo sapiens
cgaggagccccgggaggtgcttctgcggctgtacggagccatcttgcagggaaatgtttcaacgtgcgcaagcgttgc

SEQ ID NO: 796391 - DNA, 75 bp, Homo sapiens
agaggactttcttccagcttctgctgtccttctttgtggagagcaagatgatgaggagtctgatgaggaagctgt

SEQ ID NO: 796392 - DNA, 75 bp, Homo sapiens
ggcagctggagcctcaggcggcagcgcttctagagattgagaatttatcacaagttgatggtcctcaagtggaag

SEQ ID NO: 796393 - DNA, 99 bp, Homo sapiens
gcggaacaacttgcacttgcaggaaaagagacgaagtttcatcatgttgtccaggctggtgtcaaactcctgacttcaggtgatccacccaccttggcc

SEQ ID NO: 796394 - DNA, 100 bp, Homo sapiens
cggagaaggactccctggacccctccttcacgcacgccctgcgcctggtgaaccaaggcaacagcattattgagaaaagcccttacagaagagtgtggcc

SEQ ID NO: 796395 - DNA, 100 bp, Homo sapiens
gaaattccacttacttggatgaccatggaccacctcctagtaaggaaggaccatcgagacctgttcttgaatacatcgatctggtctgtggtgatgatga

SEQ ID NO: 796396 - DNA, 99 bp, Homo sapiens
atcaatcttaccagagggccctcaggttcgatacaagaggctgttttcctagcgtggcttgctgcctttggtaagaacatgtcgtccatcttgccattc

SEQ ID NO: 796397 - DNA, 100 bp, Homo sapiens
ttccggagcttctcagaagacagagggttttcttttgaggtgcagtaggggcaggagagtttgtgagcccctgtgagagtggagacaacaccggtgaacc

SEQ ID NO: 796398 - DNA, 100 bp, Homo sapiens
gcattctggaacacacactctttaagggcacttacttccctacctgggaggggcttttctgctacatccgatactcccagatctgtgcaaaagcagtgag

SEQ ID NO: 796399 - DNA, 75 bp, Homo sapiens
cggcgggctcctgcgagaagcaagcggaacttcctgagaaatctccgagaagcaagggataatgctgtggctgaa

SEQ ID NO: 796400 - DNA, 82 bp, Homo sapiens
gctgagcttggcctcggcgtcctcggaacctagaagtcggaatccggaagaagatcgaacatgacgtggtgatgaaagccag

SEQ ID NO: 796401 - DNA, 75 bp, Homo sapiens
cctagccgaagcctcctctgtggcgctcagcaactgcgatgggctgcgtcgtctcggagatgcagccaagaaagc

SEQ ID NO: 796402 - DNA, 75 bp, Homo sapiens
ctcctagcggatgggtgctattgtgaggcggttgtagaagggaactactggagaccacgtgccgcctggccaaca

SEQ ID NO: 796403 - DNA, 75 bp, Homo sapiens
cgccaaccggctggacctgttcgagatcagccagccgaccgaggtggtgcccaggcaacatgggtgactggagcg

SEQ ID NO: 796404 - DNA, 74 bp, Homo sapiens
gccacatctggacactccaatgacaatagagctgcttatcatccagactttccaacagttctgacagctttaga

SEQ ID NO: 796405 - DNA, 76 bp, Homo sapiens
gtcgaaggagttacacctgcagatttcagaggctgggcgatcctcagaaggtgcgtcagcaatttcctgctcctct

SEQ ID NO: 796406 - DNA, 95 bp, Homo sapiens
ggggccatgccaaggactatgtggagaaaaagcttgtggtgaaggggggcaaaaaaaagaagcaagttctgaagttcactcttgattgcacccac

SEQ ID NO: 796407 - DNA, 96 bp, Homo sapiens
tccagcagccaagatggtgaagcagatcgagagcaaggaaaaatgccagctgtgggacaaggagtgcaggccgcacaacctcggcaggcaccgggg

SEQ ID NO: 796408 - DNA, 50 bp, Homo sapiens
ctggcgccgggggccggggagcgccaggtctagatgttgatggaatatat

SEQ ID NO: 796409 - DNA, 128 bp, Homo sapiens
ggacttgccacggttttgacttacatctgcaactccaaggctacaggcaggaagtattatacctgaagaaccttagccctcgggtgactgaaagagatcttgtgtcattgttcgctcggttccaggag

SEQ ID NO: 796410 - DNA, 83 bp, Homo sapiens
gaccaaatttacgccatgaaagtggtgaagaaagagctggtgcatgatgacgagccatccagtccaatggatcagatgggcaa

SEQ ID NO: 796411 - DNA, 83 bp, Homo sapiens
tgaagatcctggtgtcgccatgggccgccgccccgcccgttgaaatcctaagtaatgcactgaagagaggagagatcattgca

SEQ ID NO: 796412 - DNA, 100 bp, Homo sapiens
cagcagcccctccccaacccggtaaaatgtgggcgataattcctttcttacaagaaagtttcctacactactgaggtttaggggcactgtgaagcaaaag

SEQ ID NO: 796413 - DNA, 100 bp, Homo sapiens
ccagttcaaagcttgttgtctttgatactacattacaagttttttgccctgacatctcttcgtcttgtgtttttacttgcatttggcttgatgatcattg

SEQ ID NO: 796414 - DNA, 98 bp, Homo sapiens
ttccaaagtgcccggacccaaaacaggaaaagtctcaggggatccagaactgcagccagtccttgctgggctgttcctgtccatgtgcctggtcacgg

SEQ ID NO: 796415 - DNA, 51 bp, Homo sapiens
aggaggccaggggtgtcgccatgaaatttctgaataaattggcagaagaac

SEQ ID NO: 796416 - DNA, 80 bp, Homo sapiens
ccacctgctgcggatgcccctgtgacacaggtagctacagcaagctgggtagcaggcagatccaaaggatatcatgaagt

SEQ ID NO: 796417 - DNA, 100 bp, Homo sapiens
tgtctggagcaaggaagaaaacctttgaccatgaagagaaatgagatgatagccaaaccctcaggtgccccacctcaaccagaatgcctggaacaacctg

SEQ ID NO: 796418 - DNA, 74 bp, Homo sapiens
cagaaggacaaaaactctttgagtttcggagaggagtaaagagcttcaagtccgttgagaagaaaatgacagac

SEQ ID NO: 796419 - DNA, 89 bp, Homo sapiens
tgcgactcgcggaccggcgtccccggcgcgaagaggctggactcggattcgttgcctgaggccgggtgagagcaaaactttcagcacca

SEQ ID NO: 796420 - DNA, 96 bp, Homo sapiens
ctaccaccgccgacggtcttcagggtcacgagatgagcgctatcggtcaggtgctggagaatctggtaaaagcaccattgtgaagcagatgaggat

SEQ ID NO: 796421 - DNA, 100 bp, Homo sapiens
gcgagagtgggcgagaacgtccactgcgggccggcgaaagctgcctgaactctttgcttccggaatccgggattgttgctgacatagaattagaaaacgt

SEQ ID NO: 796422 - DNA, 82 bp, Homo sapiens
aacagaatttatatagagatgtgatgttggagaactacagaaacctcgtctccctggggttcagaatctcccatgatgattg

SEQ ID NO: 796423 - DNA, 97 bp, Homo sapiens
tactcttcatttgccagtctcaacaacattatcagatgttcttgacagagtgtcaggaaggtgcttttgcacttgtgtttaaaagtgttcattttcc

SEQ ID NO: 796424 - DNA, 83 bp, Homo sapiens
cctaactgcaccagtagcttttctgagaatacttgctgaaaaggaagttttctggaatggcacaagcagcgctgccctgtgct

SEQ ID NO: 796425 - DNA, 100 bp, Homo sapiens
gttggacaagaagccactgagaaatttttggtatcgaaggatgatcgcagtgatgtggagagcagctcagaggaagaagatgtgaccacctgcacaaaaa

SEQ ID NO: 796426 - DNA, 90 bp, Homo sapiens
gcaaagaagagctcacgggcgtgcggttcaaggctcagctgaaggacccgcagggccccgggccagtttgcctgagaatacagatcaacc

SEQ ID NO: 796427 - DNA, 100 bp, Homo sapiens
atggcagatttgaaaattcacccttgtagagtcattcctgcctttgagcggactcccttttaagttaccattggaatgacatactgcatcctatagttat

SEQ ID NO: 796428 - DNA, 100 bp, Homo sapiens
cgatcctctccgtgggagccagcgagcctctctccctgatcttacgtgctcaagccattgatcttatcaacaatttgctgcaagtaaaaatgagaaagcg

SEQ ID NO: 796429 - DNA, 83 bp, Homo sapiens
cgcggatctcaccgccgctcagggtcttctcgtgggcaccctggacgtggtgctggactccagtgcccgcgtggccccttacc

SEQ ID NO: 796430 - DNA, 90 bp, Homo sapiens
ctggaccatagctcctgggagaagctcagtgtccgcagtcctggaccggatcaaaggctcactgctgccccggcctggccacaactttgt

SEQ ID NO: 796431 - DNA, 97 bp, Homo sapiens
cgggcccagcacagccagcaccgcacgccctgcaagggagggtgaaaatcctatttataagagtgccgtaacaactgtggtcaatccgaagtatgag

SEQ ID NO: 796432 - DNA, 99 bp, Homo sapiens
tggaggactattcggcagagtacatcattcagcaaggtggctgggatccaatgagttccacctacatagaggaattgggtaaaagagaagtcacaattc

SEQ ID NO: 796433 - DNA, 82 bp, Homo sapiens
gcgcagggcctgcagcgggagctggacggcgagcgcgagcggcgcgagaaaagacctgtcggccatggagcctaatgatagt

SEQ ID NO: 796434 - DNA, 51 bp, Homo sapiens
ggaggtcaacctcactctgatctggccatcatgaggaagccacgagcagcc

SEQ ID NO: 796435 - DNA, 75 bp, Homo sapiens
caaagaccatgcgccggaacaccattcttcgccaggccaggaatactaagaaaaatggctttgtcagcccaacag

SEQ ID NO: 796436 - DNA, 100 bp, Homo sapiens
cgcagcccgggcccaggccccggcagcgcctgggacaaggtggtggctaatgccgtagcggcattatctgaaatcagtgagtctcacccaaacagcaact

SEQ ID NO: 796437 - DNA, 132 bp, Homo sapiens
aaaacaggaagagggttggaggcaaagttccgaatagggatgaggcatacgtggtttaagtttttgaaactgaagtaggcctacacagtaggaactcatgtcatttcttgtaagtaaaccagagcgaatcag

SEQ ID NO: 796438 - DNA, 80 bp, Homo sapiens
gtgggcacggacgcacgccactttttctctgctgatccagcatgtagagcgcatgaagtacaggacaataaagcttccta

SEQ ID NO: 796439 - DNA, 80 bp, Homo sapiens
cgcccgggaggtgttcaagacccagggggtgatcaagtacatggggccggcaggcctccggtgtggctgtctctgatggt

SEQ ID NO: 796440 - DNA, 75 bp, Homo sapiens
ccaatctttgtcttgtaaggagcacctgactacggtactcgataaggatgcacttgcagccttggaaactccagg

SEQ ID NO: 796441 - DNA, 88 bp, Homo sapiens
gacccggaggaggttcgaagctgagtatgtgacaggttttttgcatgtctgacacccatgactccacctggaccttatggctccaccc

SEQ ID NO: 796442 - DNA, 76 bp, Homo sapiens
tccctctggatccttctggcctgcctcatgaagatagaacatgaacgattggatgcccatcgccaaggagtatgat

SEQ ID NO: 796443 - DNA, 88 bp, Homo sapiens
atctcttctccctccccttcttgagtatgcggttgaaattgattgcaaataatacaacagtggaacggaggtttagctcatggattgg

SEQ ID NO: 796444 - DNA, 100 bp, Homo sapiens
agcggtagcacgagtgcgggcagcagcagccccggggcccggagaggatacattaattgtttggtcagaagcagagaactatgatttggctctgagtttt

SEQ ID NO: 796445 - DNA, 75 bp, Homo sapiens
tggcagcattttttccagaacacaaaagtaaacggagttccctctcgaagtccaagattagttgcttctggggat

SEQ ID NO: 796446 - DNA, 50 bp, Homo sapiens
cctcctgagtagcagagactacagtagagacggggtttcaccgtgttagc

SEQ ID NO: 796447 - DNA, 102 bp, Homo sapiens
cgctgttcgacgtgcggcccgaatgccagcgcctcttctaccggggcaagcaggaatgctgtctctgcaatttgagaggaggtgctcttaagcaaacgaaga

SEQ ID NO: 796448 - DNA, 90 bp, Homo sapiens
tccccagttctccccgctgcccgcagctgccaggcggcggcgcccagggtgtggatgaatggaacatagctcgcctcaatacagtcttgg

SEQ ID NO: 796449 - DNA, 83 bp, Homo sapiens
ccgccatgctgtctctagactttttggacgatgtgcggcggatgaacaagcggcaggtttccatgctgagctcctgcccatct

SEQ ID NO: 796450 - DNA, 101 bp, Homo sapiens
actaataacactaaaaggatgatggacagcagcctgagagacacaatctgacggtgtctgacttccagcaactgctggcctgtgccagggtgcaagctgag

SEQ ID NO: 796451 - DNA, 83 bp, Homo sapiens
ccggaagcggatcgggtggagtgtaggtcatatcgccgcggtggtacagaagttggtcctgccctttgggcgactgaactacc

SEQ ID NO: 796452 - DNA, 51 bp, Homo sapiens
tcttaatggatttaacactcaaaggcggaactttccgctgtactttttgcc

SEQ ID NO: 796453 - DNA, 134 bp, Homo sapiens
tgccgttggaactgacgcagagccgagtgcagaagatctgggtgcccgtggaccacaggccctcgttgcccagatacttcccaagtaagaagcggaagaggagccgctggaaccaagacacaatggaacagaag

SEQ ID NO: 796454 - DNA, 100 bp, Homo sapiens
atttggacttcaaattggacccaggagccaaacattcccaacctatccctaaagtcttatgatgtaatcagcgcgatttcacttcctgaatttcgatgaa

SEQ ID NO: 796455 - DNA, 50 bp, Homo sapiens
tcgattgttgcaacatcccttgcgagatcactggccatcaacctgaccaa

SEQ ID NO: 796456 - DNA, 100 bp, Homo sapiens
ctcgaccactaggacagggaccaagcagattcatcccagaaaaggaggcatgagccatgagcccaagtccccttcgctagggatgctttccaccgcgacc

SEQ ID NO: 796457 - DNA, 88 bp, Homo sapiens
aaatgtcactgtaagatcacaagcctgtatgtggaatgtaggaaagcagatggtggagctgaatatgccacttaccagactaaatcaa

SEQ ID NO: 796458 - DNA, 100 bp, Homo sapiens
gaaacagtgccgacttgcaaacggctgaaaggttccctgagtcgaggtgactggtacaagacaaaggagatcctgctgaaggggcccgactggatcctgg

SEQ ID NO: 796459 - DNA, 87 bp, Homo sapiens
ttacattaactatgagaattaagcagggtaagatgatcatgcaggataaactggagaaggagcggaatgatgctaagaacgcagtgg

SEQ ID NO: 796460 - DNA, 82 bp, Homo sapiens
cgtagacgcagtggcctccaaggtgcagacagctgtgactatgaaggggtttgtcccgctggctggaagcctggcagtgaca

SEQ ID NO: 796461 - DNA, 98 bp, Homo sapiens
cgcggccggacgacccaagcccgctgagcaggatgaggggccgttgctccagggagaactgcaaatatcttcatccacccccacatttaaaaacgcag

SEQ ID NO: 796462 - DNA, 100 bp, Homo sapiens
acaatgctctatcattacagttgagtaataaacagactgaacttatccagaaggatatggatattaccctggtcagagtctccaaaaagcctagggaaat

SEQ ID NO: 796463 - DNA, 75 bp, Homo sapiens
ctacaggatttctggactccactgttggataagcatggattcctggttcattcttgttctgctcggcagtggtct

SEQ ID NO: 796464 - DNA, 82 bp, Homo sapiens
cggaaccttgtttactaattgagccttcacgtaaatgggtccagtcatgcctcccagtaagaagccagaaagctcaggaatt

SEQ ID NO: 796465 - DNA, 82 bp, Homo sapiens
agaagatatgtatgacgagattattgagttaaagaagggtgagaactctgtctcagtcgacgggaagtgcagtgactccacg

SEQ ID NO: 796466 - DNA, 100 bp, Homo sapiens
ccaattaaccagatcttgccctggtgcagacaagacttaatcccgactgggcctcctacactctgggcgtcttcatctgcctgagctgctcgggaatcca

SEQ ID NO: 796467 - DNA, 76 bp, Homo sapiens
tactacgacactgaacgcatcggagggactcggagatcatgcagcagaagcagaaaaaggcaaacgagaagaagga

SEQ ID NO: 796468 - DNA, 100 bp, Homo sapiens
gtgcagatcaccactttataaaggctgaagagatcactttaacaattggccaagcatttgacctggcatacaggaaatttctagaatcaggaggaaaaga

SEQ ID NO: 796469 - DNA, 100 bp, Homo sapiens
ctctgaagacctactgggaggataacaaaaactccctcattagctaccttgagcagtatttctctgaacagccattgaagaatcttctgctttcaacttc

SEQ ID NO: 796470 - DNA, 100 bp, Homo sapiens
gtcgagaacgacgaggacgcgttgctgcggcgtctgcgaggcccgagggtcctttctgaaatggtatctatgattcagctattcaaaacctaatgaagtt

SEQ ID NO: 796471 - DNA, 90 bp, Homo sapiens
gggaaaaggacgccgcggtcttcccaggcgtcgcggagagcaggcctgctggtgggtacccttgatgttgtgttggactccagcgcccgg

SEQ ID NO: 796472 - DNA, 75 bp, Homo sapiens
agtgaagagagaattcgtgtcacttttgaaagattcagcagctttccaaaaaggaaatagaagatctgcttcgaa

SEQ ID NO: 796473 - DNA, 82 bp, Homo sapiens
caaagacgctaaacgtgccctactctgccccgggggagaggtacctggactatgccagagtccccaatagcaatccccctga

SEQ ID NO: 796474 - DNA, 83 bp, Homo sapiens
ggccactgactcatgggccctggcggtggacgagcaggaagctgcggctgagtcgttggattggatgctgctggcaagacaac

SEQ ID NO: 796475 - DNA, 75 bp, Homo sapiens
aagaatctgaggtggctcacgttgaccaactctttgatgatgcatccagggccaaggagattaagatcaagttgg

SEQ ID NO: 796476 - DNA, 75 bp, Homo sapiens
cagctggatgggatcatttcggacttcgaaggaagctattttgccagccacttcattatgggaggagagaagttt

SEQ ID NO: 796477 - DNA, 82 bp, Homo sapiens
ggggtcgctgggtccctcctccggcttcccgcaatgaggagggcccttcacagaaccgggggcttccgagtggacctgccaa

SEQ ID NO: 796478 - DNA, 100 bp, Homo sapiens
cctgctgtgtacccctgaagtgagtcaggagctgtatgaccttaacgtggagctctccaaggcgttcgtggcattcagggatgtggctgtgtacttcacc

SEQ ID NO: 796479 - DNA, 100 bp, Homo sapiens
aggaaatgcagctttaattggacagaaatttgcagccaactcagatttaaaggggccattgcaatttagagatgtggccatagaattctctctggaggag

SEQ ID NO: 796480 - DNA, 50 bp, Homo sapiens
cacctgattcccaaggcaagacagctcttccaggtggtgagggagtaaac

SEQ ID NO: 796481 - DNA, 100 bp, Homo sapiens
cgcgctgcgcggactgcggcgccccggggacccagacatggagctgcgggaagaagcctggtctccggggccgctggattctgaggaccagcagatggcc

SEQ ID NO: 796482 - DNA, 100 bp, Homo sapiens
gaatgacatgggagacacgccgcttcatcgagctgcctttacaggacgaaaggtacctgtggaaaagtgaaaagccactctactactcatttgtcgacaa

SEQ ID NO: 796483 - DNA, 75 bp, Homo sapiens
cagaaccatggctcagtttccaacaccttttggtgttttaacttctagtcatggcgaatgatcgcaggagagcac

SEQ ID NO: 796484 - DNA, 99 bp, Homo sapiens
tagatgaaggagaatcagaagaaatgcccaagttactgccttatgatacagaaggtgtgaaagctgtggagccgttttccattctgaatgcaaagaaaa

SEQ ID NO: 796485 - DNA, 90 bp, Homo sapiens
gattaagagacttaatagacaattagcccaggtaaagaagcttcttaataaagtagtgctccgtgaatcttgcttttaccggaaattaac

SEQ ID NO: 796486 - DNA, 105 bp, Homo sapiens
caaaacagcagatttcccaagagcagcggaaaatgatccagtcacagtcaagctacaacttcaagcagaagagagaggagttgtgtctatcaaaggagtgtgtgc

SEQ ID NO: 796487 - DNA, 83 bp, Homo sapiens
caagccttgtttattttcctcaccactgaatctacagctgagatctgtatctgtggacctgaatgttgatccctcgcttcaga

SEQ ID NO: 796488 - DNA, 87 bp, Homo sapiens
caaaaagagaaccaagaagttcatccggcaccagtcagaccgatatgtcaaaattaagcgtaactggtggaaacccagaggcattga

SEQ ID NO: 796489 - DNA, 76 bp, Homo sapiens
ggtgaagaccacgccctgtgcacgcttggaatgctggatcgatgtgctggtggacggacagccatgtgaccgcgag

SEQ ID NO: 796490 - DNA, 100 bp, Homo sapiens
caacaataccttagttgacccttgtgtgacacccagggcagctacactcagaagccacaaggaatgctagtggagcccctcatccctcccagcttctctt

SEQ ID NO: 796491 - DNA, 100 bp, Homo sapiens
gacattttggaccagggagccctacagcgtctcttcaaaaagtgctacaaggtgagctgcctggaaatccctgggccctctggccccaagggctaccgtg

SEQ ID NO: 796492 - DNA, 75 bp, Homo sapiens
agagtgctagttcttatggcctcgaagcatgctttcttggcattataaaaatatggtgttatccctaagaaatgc

SEQ ID NO: 796493 - DNA, 90 bp, Homo sapiens
gggctctgtgcccgtgccctgtacgactaccaggcagacctcctgccccccgaggtctgcagtctcctgaacccagcagccatctacgcc

SEQ ID NO: 796494 - DNA, 82 bp, Homo sapiens
actccttcggcagtccacccaccgccgccgcctcccagatctggtggctggacccagagctgacctatggctgcgccaagcc

SEQ ID NO: 796495 - DNA, 100 bp, Homo sapiens
aaccctctactccaacgccctcttccagctcatcccggaggaattacatgaacgacagccttcgcaccgacgtcttcgtgcggttccagccagagagcat

SEQ ID NO: 796496 - DNA, 115 bp, Homo sapiens
gttcaaagtggaccccaggggagaagtcggagcaaagaacttaccaccaagcaggtcctgggaactccaacaagggagcaaatcagagaaatgaacccaaactacacagaattta

SEQ ID NO: 796497 - DNA, 83 bp, Homo sapiens
gaggagtagtcgctggagtccgcgcctccctgggcatgctgaggtgatgaagaaaatcattgagactgttgcagaaggagggg

SEQ ID NO: 796498 - DNA, 90 bp, Homo sapiens
ggcggctgctggtagttccatgctgtctgttcagacttcagcttggtatcttaccaatatatttgagtccttcctgcctcagttattggc

SEQ ID NO: 796499 - DNA, 90 bp, Homo sapiens
ggaaaggatgttggcggtccctgtgacctgtggagacacggccagatctgccctccaaacaaatcacctgctgcagtaacagaaccagag

SEQ ID NO: 796500 - DNA, 100 bp, Homo sapiens
atgatgaagaggtttcagggagcagcaagacaatcactgcagagataccaggatgaagatataacacttcagataactgagagtgaagacaacgaagaag

SEQ ID NO: 796501 - DNA, 51 bp, Homo sapiens
cctgacagctctgcggctcgggccctgaggctcccgctgctcctctccctg

SEQ ID NO: 796502 - DNA, 82 bp, Homo sapiens
gtgtcggaactagatctttctgacaacaaactcgaagactggcatgagatcaacaggcacttgcatctatcctaagaacata

SEQ ID NO: 796503 - DNA, 100 bp, Homo sapiens
atggcgaaggcgacgtccggtgccgcggggctgcgtctgctgttgctgctgctgctgccgctgctaggcaaagaccacaccaccccagagccaagtgcac

SEQ ID NO: 796504 - DNA, 100 bp, Homo sapiens
ggccatattttcaaaagtgatggttattacaaaattctgcttggtcagaatcgtgatggcattgtgttcagcactgatgactattttcaccatcaagatg

SEQ ID NO: 796505 - DNA, 99 bp, Homo sapiens
catgagtggaatccatgtttctggacgcggatttttggcctcatactctgttatagataaacaagatactgtggatggtagggaagaaaagtctgcttc

SEQ ID NO: 796506 - DNA, 75 bp, Homo sapiens
cagaggctcccgggctggactcaggcttctcaggtatccgcccccagatcatgaacggccccctgcacccccgcc

SEQ ID NO: 796507 - DNA, 100 bp, Homo sapiens
ataccaagaggctctgttcacattgaagttagagaagttgccatgtcaaagaactatattgacaaagaaacagccttggtataatagcacgttagcatca

SEQ ID NO: 796508 - DNA, 75 bp, Homo sapiens
gcacagaggcaacaaatggcaactttctgagtgtggacactgccagcggctgcagccgacttggaatgacctggg

SEQ ID NO: 796509 - DNA, 83 bp, Homo sapiens
gggggattctcgacctgctaacagaactggaccttttcggtttacccaaggtccagcctagcccctaggcaccatgtcggaca

SEQ ID NO: 796510 - DNA, 148 bp, Homo sapiens
tggacagccagtggcgccagatagaaaacggcgagagtgggcgagaacgtccactgcgggccggcgaaagctggtgagaagccctaccactgcaactgggacggctgcggctggaagtttgcgcgctcagacgagctcacgcgccact

SEQ ID NO: 796511 - DNA, 100 bp, Homo sapiens
ggatcattaatatacagttcatctgtgttatcagctactgcagccgtggaactaagtgttgctaatgaattgtgaatggaagtgatcattcatctccagt

SEQ ID NO: 796512 - DNA, 97 bp, Homo sapiens
actccgccgcccaccatggcttccgaggagctgtacgaggtgttcctggctctatgccaaatgcatcctggactggaaacctcagagctataaagtg

SEQ ID NO: 796513 - DNA, 96 bp, Homo sapiens
ctgaaggtttccaacttgctcatgaccgacaagggttgtgtgaagacagggcagttgggtgagaagcagcttccatcttcaacctcggatgatcgg

SEQ ID NO: 796514 - DNA, 90 bp, Homo sapiens
gcaacctcgccccttgcaacaaaggcagactgagcgccagagaggacgtttccaactcaaaattgggctaatggatactacagacaacag

SEQ ID NO: 796515 - DNA, 98 bp, Homo sapiens
aagagttctgcgttttgccagtcacctctcaactgtgtgccaaagagttttccgtctgatgaaggttggccatttgcaaagtatcttggagcttgtgg

SEQ ID NO: 796516 - DNA, 100 bp, Homo sapiens
tgctgatgtggggactgctcacgttcatcatggtgcctggctgccaggcaggttatgatgtgattgctcaagcccaatctgggactgggaaaacggccac

SEQ ID NO: 796517 - DNA, 87 bp, Homo sapiens
tccgtccgcagtaccgacgcctgcaggatggccgagcctcgatttaacaacccctacttctggccccctcctcccaccatgcccagc

SEQ ID NO: 796518 - DNA, 100 bp, Homo sapiens
atgaagtattaattcttccactgatatctcaaaaggtgatctggacaaaggaacaggtatctcaggctggctacagcaaacatcattcaagatgtccagc

SEQ ID NO: 796519 - DNA, 100 bp, Homo sapiens
cgggaccatgttcaccagcaccggctccagtgggctctccttggggctctattttgcggaattggaatttcttagctgtgacacatccaggttacatggc

SEQ ID NO: 796520 - DNA, 141 bp, Homo sapiens
ggaaattgaaggaatttccccgtaccgcagcccccgggcacgacctctcggacacggtgcaggcagattaactgctgaagtactgatcgagttctgcatttcttcaatgaggaactacaggctgatcttctgccataatct

SEQ ID NO: 796521 - DNA, 100 bp, Homo sapiens
agagacaggaggcagtagccaaacacccaggaagagagaatggattctgcaagaccatgtctacacagacaacaccatcttctgaatgacagaggatcag

SEQ ID NO: 796522 - DNA, 75 bp, Homo sapiens
cttgtctgcctcgctttctccttggccaccctggtccagcgagtcaattcagatttggaaaactaaaaagcagca

SEQ ID NO: 796523 - DNA, 100 bp, Homo sapiens
agattgaccatgctgagatggagctgcgccgaggccagatcctctggttccggggcctgaaccgtatccagactcagggtctcctatggacagaagtgcg

SEQ ID NO: 796524 - DNA, 100 bp, Homo sapiens
gttaccagcatccattgcaaaccttattaatctcagggaactggatgtcagcaagaatggaaacctgtgatctggggaagataaaacctgaggccagacg

SEQ ID NO: 796525 - DNA, 100 bp, Homo sapiens
tcaaagatctcgtacaagatccttctttagagtgataatgaactctcaagtggaacaggtgatgtgtctaaggattgtcctgagaagatcctgtattctt

SEQ ID NO: 796526 - DNA, 89 bp, Homo sapiens
gggccttcatcacagctggagggtccctccgaagtattcagcgcagcctcttgtatttagtggttgaaggactgcgatgtgtagttttg

SEQ ID NO: 796527 - DNA, 101 bp, Homo sapiens
aggctgccttccctgacccccagttacgcctggaatatgaaggcttccccgtcccggagttgatccctgaattttattatctccctgagatgtttgtcaac

SEQ ID NO: 796528 - DNA, 96 bp, Homo sapiens
gtgaaccccgaatgcatctaggtaccaatggagccaactgtggtgggtataacccggaaaaatcccagaacacctctttctgatctccagggcatg

SEQ ID NO: 796529 - DNA, 75 bp, Homo sapiens
cccagatgtctgacagccctgtgtgacaccaagataagtaacgtttgaagactgcttcattctgcctctagtacc

SEQ ID NO: 796530 - DNA, 90 bp, Homo sapiens
cggaaactccagcgtgtctccagccgtgatgtggacgagtgctcactagcagaaaaaacctgtgtgaggaaaaacgaaaactgctacaat

SEQ ID NO: 796531 - DNA, 100 bp, Homo sapiens
cttgaaagaagctgcagcggaggaaggcgaggtaatgattgatgaatccctttcatccgatgaccctgattcatatgtgacattgacggttgtccggtcc

SEQ ID NO: 796532 - DNA, 75 bp, Homo sapiens
gccgagtgctggcgaggcgcgcatacctgttcctgacttttccacggattgtcttcatgctgggctttgtcgtgg

SEQ ID NO: 796533 - DNA, 75 bp, Homo sapiens
ggccaccggctggagcggatcccacacctccggaccgagggacgcgggaaattgacaatggcccttcagctatgc

SEQ ID NO: 796534 - DNA, 97 bp, Homo sapiens
gcagcgtgtagtgcgagtggggcggacgcgcgcagcccgcccgcccggcgaccagcaagatcaatgtccgagttaccaccatggatgcagagctgga

SEQ ID NO: 796535 - DNA, 82 bp, Homo sapiens
gccaaggaaaaactggagagcttcatcaaaaatagtgatagctttgataatttcactgttacatgccttgaagtgatgagga

SEQ ID NO: 796536 - DNA, 50 bp, Homo sapiens
cagagatcccagactgcgtggagcaggatcaagaggaccacactccagcc

SEQ ID NO: 796537 - DNA, 75 bp, Homo sapiens
agctgaacaagaagagagccatccccaatcaggacagagcgggatgccaccagcttgtccaaagggaagttccag

SEQ ID NO: 796538 - DNA, 96 bp, Homo sapiens
agattgaaaggaagatccttgacagccaagagagagcgttctgggacgtgcacaggcccgtgtactatactggcaattgctggagaagattttgca

SEQ ID NO: 796539 - DNA, 83 bp, Homo sapiens
ttgagtgcagcagcgaggagcagtgtcaggagtggatggaggctctgcgtcgggccaggatgaatttcatcctttcatcgaag

SEQ ID NO: 796540 - DNA, 90 bp, Homo sapiens
ttcctgcacctataacagtgccacctccacagtggttggatttcatcccttactggtctcaaccaaaatattcctgttggaatcatgatg

SEQ ID NO: 796541 - DNA, 87 bp, Homo sapiens
cctcttacccgccaggtgccaagaactatgaacaggcacaataagagctaactgccatcaagagccatcagtatgtcttcaagctgc

SEQ ID NO: 796542 - DNA, 75 bp, Homo sapiens
gctgcctgctatgctgaaaacccctggaaacttgctaaagagctgtggaaacgggattatgaaggttatttatgc

SEQ ID NO: 796543 - DNA, 82 bp, Homo sapiens
acgccgcagagcgccgaggaggctttcctgctggtggcaaccgcctacgagacactcaagtgcacttgcaggaaagacatgg

SEQ ID NO: 796544 - DNA, 75 bp, Homo sapiens
cagcctgctgcgcaggataaaaggcaaactcttcacctgggactggtgattgcagctggaagtgcccatgaccga

SEQ ID NO: 796545 - DNA, 98 bp, Homo sapiens
actgccctgtggggcaaggtgaacgtggatgaagttggtggtgctgggtaggccaggtttcagcatcgcagacaagaagcgcaggacaggctgcattg

SEQ ID NO: 796546 - DNA, 82 bp, Homo sapiens
tctgcggaagtgcagctgcctcagttcttagcgcagggtaaatgggaagttggtagctctgaaggtgatcaggctgcaggaa

SEQ ID NO: 796547 - DNA, 97 bp, Homo sapiens
ttggagccccggagtggggtgtcggcgcctcattcgggtggagctgagccggagacagtacggcaagaagaagctgaaatacctgccctacaatcac

SEQ ID NO: 796548 - DNA, 75 bp, Homo sapiens
catagcattcgcctactccgtgaagaaaactgcctggagcagttggagatgggatttccacggggagcccagcca

SEQ ID NO: 796549 - DNA, 100 bp, Homo sapiens
ccaaatggatgatgttgaagttgtttatacaattggaactgtggctgcaccatctgtcttcatcttcccgccatctgatgagcagttgaaatctggaact

SEQ ID NO: 796550 - DNA, 50 bp, Homo sapiens
gtcacatgtggtggaatggggaaactggcgatggaatatgagaggagccc

SEQ ID NO: 796551 - DNA, 92 bp, Homo sapiens
tcgccagcccgtgccgcgagcgcggcctgcaggagaagtccattggaatattaagcccaggagttgctttggggatggctggaagtgcaatg

SEQ ID NO: 796552 - DNA, 101 bp, Homo sapiens
tcgcggtgagatacctgggagtcacgggtgctcgcagacgcagctgaccccagaggcacaggaagctcttcgtgggcggtcttgactggagcacgacccaa

SEQ ID NO: 796553 - DNA, 100 bp, Homo sapiens
ctgaagttaaagagacagcaatgattgccttctcaaaagtgaaataagaagattggaaaggaatcaagagcgagagaagtctgcagctaacctggaatac

SEQ ID NO: 796554 - DNA, 90 bp, Homo sapiens
ccggggacccttccgtatctgcctaggcattttgctgtctcctcctaatacggctcaaggatgtccaatcaatggatgagctgaaagatg

SEQ ID NO: 796555 - DNA, 100 bp, Homo sapiens
ctggcattgaatgatttatagctaagactccaggacacccctgaagccgagaaatggtctcggcgcggaagatggccggcggcgtggacggccccatcgg

SEQ ID NO: 796556 - DNA, 90 bp, Homo sapiens
aatggcttgtgctgagttttcttttcatgtaccaagtcttgaagagcttgctggagttcgaagcattcagcaaacaatggcaaggcagag

SEQ ID NO: 796557 - DNA, 48 bp, Homo sapiens
atggggaacgctcacggactgtgtgatgtgtatccgccttctatccag

SEQ ID NO: 796558 - DNA, 100 bp, Homo sapiens
agctgataggctgcgctaccggaatgtcatccagcgagtgattagataccagcgggcaagcagaaaacaagaggctcaagaggggcagcccccgcataga

SEQ ID NO: 796559 - DNA, 90 bp, Homo sapiens
cccgggagcgtccgggacgcggagcccggagctggggcgacgaggcgattgcgggggcctgggctaggatgttttagaagaatgtatgtc

SEQ ID NO: 796560 - DNA, 74 bp, Homo sapiens
tcgcgctactctctctttctggcctggaggctatccagcaaatcctaagtaatgcactgaagagaggagagatc

SEQ ID NO: 796561 - DNA, 98 bp, Homo sapiens
accggattgcctcaaggatgtcatatctatgagtaccgcgagagcaacaatttgaaagatgatgacagtggggaccatgatcagaatgaagaaaacag

SEQ ID NO: 796562 - DNA, 75 bp, Homo sapiens
tagacacccttcattgcaagttcttatttgtaagatagaaaatgctgctgaagaacctagagtcttatgtattat

SEQ ID NO: 796563 - DNA, 109 bp, Homo sapiens
gattgctgcaaggctgagggacgagaacgagtcatatttgatcagaaattggatgaaccttcgggatgctgagacagggaagatactctggcaaggaacagaagacctg

SEQ ID NO: 796564 - DNA, 82 bp, Homo sapiens
cactgctggctgcttccagtgttcgccgagaggcaagtgaaccggagcaaacgacttccgatccagtctgcgctgttgcggc

SEQ ID NO: 796565 - DNA, 89 bp, Homo sapiens
ctaacccggcctctggacaagagaactcgaatcatttatgacagaaagtttctgttggatcgtcgcaattctcccatggctcagacccc

SEQ ID NO: 796566 - DNA, 100 bp, Homo sapiens
atggagggcctggcagtgcggttgctgcgcggcagcaggctgtgcagaatacagaaactgcagccatgaccacgcacgtcaccctggaagatgccctgtc

SEQ ID NO: 796567 - DNA, 101 bp, Homo sapiens
cagagtgcggcgcagcgcagctcctgagggccgttgctccagggagaactgcaaatatcttcatccacccccacatttaaaaacgcagttggagataaatg

SEQ ID NO: 796568 - DNA, 130 bp, Homo sapiens
tggaagtaaccccttccgggagcctagatcctgtgctttactctgaagactcgtcacaaagcctactgcctgctaatcggcaagtggacctgtttctctaacaatggcccgaaacttcacaacatcaaag

SEQ ID NO: 796569 - DNA, 100 bp, Homo sapiens
tcagacagagccaaggtgcagggcaacacctctacaaggatctgcagccatttatattgcttaggctactgtgagacggtttaagcggaagcatcttact

SEQ ID NO: 796570 - DNA, 82 bp, Homo sapiens
gaaacttacactgctgcataatggagaacctctctacattccagtaacccaggatgcccaacaaaccacattgatgaatatg

SEQ ID NO: 796571 - DNA, 90 bp, Homo sapiens
cgtccgccgcctccggaactaaacggggtgaggtcacattcggttatctctaacgttggaaaacggtactttgatggaaacctggagaag

SEQ ID NO: 796572 - DNA, 85 bp, Homo sapiens
tccacaatatattgactactgccacaattccgcatcagacaacagtcagcgctttcgagaaacctgttttgcatttgccttgaca

SEQ ID NO: 796573 - DNA, 100 bp, Homo sapiens
acaggacctggaacatccagggagcgtctgggctgcagattaacgtcttcaaggacccagttgctgatcccaacaaaaggtccaaaaagggccgattatc

SEQ ID NO: 796574 - DNA, 74 bp, Homo sapiens
cggaagtgtaacgttgaggcccttcttgtgtatctggagaaaatagagacatatgtagagtgtgtcggtcagaa

SEQ ID NO: 796575 - DNA, 74 bp, Homo sapiens
cctattgcaagaggagagctaccggagaggagagaacacgtcttacaggatggaagagaaaagtgatttcatgc

SEQ ID NO: 796576 - DNA, 75 bp, Homo sapiens
gataatccagatcagcagcacttggaagaagctgtcacagtcctctttgcaggacagcacatctccaagagccca

SEQ ID NO: 796577 - DNA, 75 bp, Homo sapiens
gagtcctcactgaactggcctcagagatcacaaaatggctcttcttcagatggcaacagtggaagaagctattca

SEQ ID NO: 796578 - DNA, 74 bp, Homo sapiens
actctctatggacctctactaaatgcctttttgtgtataaagtgtggaaccatcagagaatctacaatccctga

SEQ ID NO: 796579 - DNA, 74 bp, Homo sapiens
tgatcctcatcttttatacactcttagtgctgtccagttggactaaatgctcttccttcagaggattatccggg

SEQ ID NO: 796580 - DNA, 100 bp, Homo sapiens
cagtcgtggaatctgtgggttgaggcttccaaacttcctgggaaggacgacgaagttatacggaagcgtctcctcattgatggagatggtgctggagatg

SEQ ID NO: 796581 - DNA, 51 bp, Homo sapiens
cagtggtcgcttcttctccttggtctcttcagagctgctgtgcccagtggt

SEQ ID NO: 796582 - DNA, 97 bp, Homo sapiens
tgatctccatctgttatttcgagcaggagaatgactggtggatagatacttctcaagacatcacacagcgtgagtcaatcaaggagggaagccacaa

SEQ ID NO: 796583 - DNA, 87 bp, Homo sapiens
ccactgcccaaactgctgaagcagctcccgcgaggaccacccggtcagctggccgccggcacctgtgagattgtgaccttggaccgg

SEQ ID NO: 796584 - DNA, 75 bp, Homo sapiens
ctctctcaagagaagctgcaagagcaacatctttcctcaccccaagcaggagagcctgtcctgcctccagtccac

SEQ ID NO: 796585 - DNA, 101 bp, Homo sapiens
gccttgtacagggacgtgatgttggagaactacaggaacctgctttctctcgatgaggataacatccctccagaagatggggacaggcaaatggtatgaat

SEQ ID NO: 796586 - DNA, 87 bp, Homo sapiens
gcacccacacgggcgagaagccctacgagtgcaacatctgcaaggtccgcttcaccagatattgatgatgttaagaagttcaaaccg

SEQ ID NO: 796587 - DNA, 100 bp, Homo sapiens
caaactccacgaagccaacgcccaggtcccaaaggcaagcagttagaaggaactgaatgtccactccatgttgttcatccacccactggggaagagtttg

SEQ ID NO: 796588 - DNA, 109 bp, Homo sapiens
tggaacagaaaaatggcaaagaaagagtgcccatcctctggcatttcctgcagaaggttaacgaagcccttgtcatttgctgattgtgttggggatgagctgccgtggg

SEQ ID NO: 796589 - DNA, 75 bp, Homo sapiens
caccggcctggagcgcgccgccaaggcggcgcgcgagctggagcactcgcgtgtgaccatgaagctcatggatga

SEQ ID NO: 796590 - DNA, 82 bp, Homo sapiens
cttgattgtcagtgacaaggcccgagatgcagctgctgtccttgtgtccagatgatatcatcaagttgaatcgaaaggaagg

SEQ ID NO: 796591 - DNA, 75 bp, Homo sapiens
caacagtgatgaggaaagctgtgaaagttctcaaggacaaggagcatccaagatacctgatcccagaactttgca

SEQ ID NO: 796592 - DNA, 75 bp, Homo sapiens
gaaagtttcatctgtggatggagtattggttctgctccagacgagcccttaccacgttgactcactcctgcagct

SEQ ID NO: 796593 - DNA, 83 bp, Homo sapiens
aacatcgactccgagacctccgaaaagcgtttccgcagacagaagtggggagaagcggaggttcgtgctggccgtgggcagcg

SEQ ID NO: 796594 - DNA, 50 bp, Homo sapiens
ggacggtcgcgcggcggcaggcacaggtctagaattacggagtcaacaaa

SEQ ID NO: 796595 - DNA, 100 bp, Homo sapiens
aggagctcaagaagcagagactctacctgccctaggcgttcgtgaagagaagcagctgttgctattggaggaggtgcagtagacattgttgcaatcatga

SEQ ID NO: 796596 - DNA, 75 bp, Homo sapiens
ctggaaaaaatgacatccagcgacaaggactttagactcagcctgcctgcacccaggtgaaataaacagccatgt

SEQ ID NO: 796597 - DNA, 82 bp, Homo sapiens
atgattgtgaggcctccccagccatgtggaactgtgacgagctcatcttcttggaccctcatacaacccagacctttgttga

SEQ ID NO: 796598 - DNA, 82 bp, Homo sapiens
tgatgattagagacatactaatgtacatgtaaaggcatgacttcctggcaccacagggaaaatcgggtgcaagcccagaaac

SEQ ID NO: 796599 - DNA, 100 bp, Homo sapiens
gtcgcttgccggctgtctgatgaagagcagcgagaatggcgcggctcctgcttacattcgggagtgtgcgagattgcactatttgggatccagaactcag

SEQ ID NO: 796600 - DNA, 75 bp, Homo sapiens
ggagccaggagcgacgtcaccgccatggcaggcatcaaagaacaaaatccagtctcatagcagaggagaatataa

SEQ ID NO: 796601 - DNA, 75 bp, Homo sapiens
cagagctcccgggtcgtctttcgtgtggccgcgaggacccagatgatgtggtaccagttggccaaagaagagcct

SEQ ID NO: 796602 - DNA, 100 bp, Homo sapiens
atgggggctaaccagttagtggtgctcaacgtgtacgacatgatttggagcaagaggtggtggtggccttcccccgaagaaatttggtaatcctggggag

SEQ ID NO: 796603 - DNA, 82 bp, Homo sapiens
gctcagagaggttaaggaactcgtcctacgtaacacagccagttagacctgcctagagctggaacgttacctccagagcgag

SEQ ID NO: 796604 - DNA, 97 bp, Homo sapiens
gatacgcacaagccaaaacctttgggatattatgaactagatccttataaaagtctcctagacaatttgaggaacaaagtgatcattgagtatccaa

SEQ ID NO: 796605 - DNA, 75 bp, Homo sapiens
gggagggagccatgaagcattacgaggtctcagccacctttgcggctagtcttgtcagcagcccggccattggag

SEQ ID NO: 796606 - DNA, 101 bp, Homo sapiens
ctcccagaacactccatgccactggaactcaggagcgcaggtttttcgttggaatatacgttgcacatttatggcgattctgagtgtgagggcagacttct

SEQ ID NO: 796607 - DNA, 78 bp, Homo sapiens
tctaaggcaccaaaggggtctaaggtggaagtttagctgatgctataagtgaaaactacagaatcatgagttacttta

SEQ ID NO: 796608 - DNA, 76 bp, Homo sapiens
tccgtgcctgcgaggagtatctgcggcagcatgacaagcagacataaacgtgacccaaaaaagcttcaattttgcc

SEQ ID NO: 796609 - DNA, 75 bp, Homo sapiens
tgtgtctgcctccttcttgaatagcccagtgaattcatctaaacaggacctggccatgggcacagatgctgaggg

SEQ ID NO: 796610 - DNA, 75 bp, Homo sapiens
ccgcccggccaagctatcttctcgctagcagtctctgctttctatccgtcaagatgataaagtcgtgtgcccgag

SEQ ID NO: 796611 - DNA, 90 bp, Homo sapiens
cgtggtgaaggtccggggcttgccctggtcttgctcggccgatgaagtgcagaggtttttttctgggcaatggagatcttaaaagaaagt

SEQ ID NO: 796612 - DNA, 75 bp, Homo sapiens
aacaccttaataaccagcggagctgacacagccaaaggaagtttgctaactagaagtctagcagaaattgtgaag

SEQ ID NO: 796613 - DNA, 100 bp, Homo sapiens
cggagactcagaagtccgagcttggacccttaatgaggaccacactccaacgcggggcgcagtggagaagaacccttggttagattgagtcttactgaga

SEQ ID NO: 796614 - DNA, 101 bp, Homo sapiens
gtggctgtctcggaacccgtggtcctccgcttcatgtccagtggcattgcagagcacggatggttgcaggagccaacttttacattgttggacgagaccct

SEQ ID NO: 796615 - DNA, 98 bp, Homo sapiens
ctctacctgccctaggcgttcgtgaagagaagcagctgttgctattggaggagggagagctggtgacggcctccaaggccatcattgaaaaggagtac

SEQ ID NO: 796616 - DNA, 75 bp, Homo sapiens
gaaggatcaaggacggatgatgaagtagtacagaggtacctgtgtgacaaggtcgtccctgggaacagggttacc

SEQ ID NO: 796617 - DNA, 90 bp, Homo sapiens
ctcctcgccgccaccgcccaggaccgccggccgggggacgagctcggagcagcagccagcttggctgaagaggaaataaaaacagaacag

SEQ ID NO: 796618 - DNA, 75 bp, Homo sapiens
cgtgcaggagggtcgtggtctggctgtggcggaggagcataagaagatatttggagttcttacaacatggcagac

SEQ ID NO: 796619 - DNA, 100 bp, Homo sapiens
tatgtcaatagcttatcagaactcagtgggctgatcccaatggattgcatccacattccagagagcatcatcaacaatgaggtcttactgtgtagcccag

SEQ ID NO: 796620 - DNA, 75 bp, Homo sapiens
gctaagccagaccggtcctcgtttgtaccgtccctcttcagcctcaagtactacagccttccagcagccttccca

SEQ ID NO: 796621 - DNA, 101 bp, Homo sapiens
tttgccttaccatgtgcttctgggggaatctttgttcttaagctacctccttatgacatacctggtgtgatccctcacatccacaaatctctgattggaaa

SEQ ID NO: 796622 - DNA, 88 bp, Homo sapiens
atcaccaacatagccatcgacttcggggagcagatgctgcaatgtacaacaactctgaagccctgcccacctctcctatggcacccac

SEQ ID NO: 796623 - DNA, 100 bp, Homo sapiens
gagtgctcttctactttgatgaggtactggtgtggcatactcggacagagaagcccaagatgaagcaggaggagcagctgcagcggcagggccggggctc

SEQ ID NO: 796624 - DNA, 98 bp, Homo sapiens
agattcgcagtggtcgcttcttctccttgtcaagttcatccgagaagtaacaccatatatcaagaagccatcattagtatcagatctgccgtgggaag

SEQ ID NO: 796625 - DNA, 100 bp, Homo sapiens
tcaggtgcccagggaggtgctcaagatgaccgcacctcgagcaggagtggggatgccacgtctgcccccagcgcccggccctctgtccaccacggtcatt

SEQ ID NO: 796626 - DNA, 90 bp, Homo sapiens
gccaagaacctggacaccctccaccggtgacacagccatgtggaactcttagatggaaaccatttgagattccaaaagcatctcagaaga

SEQ ID NO: 796627 - DNA, 88 bp, Homo sapiens
gtggctgctcccagctctactccttctctgcctctcaggcctttccacgaagagtcctcagccttctccctccagccggaagagcccc

SEQ ID NO: 796628 - DNA, 75 bp, Homo sapiens
tcttctacacccgactggtcctctttcccacccagatattatggggatggattaaatgccattgttgtgtttgct

SEQ ID NO: 796629 - DNA, 76 bp, Homo sapiens
ttcagtacctctgtggtcagaccatttgccaagcttgtgagggatgaaaactttcggaagagaaagttgcctgtgg

SEQ ID NO: 796630 - DNA, 75 bp, Homo sapiens
ctgggtcccttgaagaatctacagatgagtctgaggagcatttcatactactgaagctgaagctagttctcagag

SEQ ID NO: 796631 - DNA, 88 bp, Homo sapiens
gcgtctctggccggccttggtgcggcgagccgagcgaggcagctctgagccgcgcgaaaatgacagatggcgagacctggacaggaaa

SEQ ID NO: 796632 - DNA, 83 bp, Homo sapiens
gttctaacgctgcctttgctttaaaacagtattacttgcggactcagtgacctttgaagatgtggctgtgaacttcacccagg

SEQ ID NO: 796633 - DNA, 50 bp, Homo sapiens
cctcagttgactcattcactcaggggatggcctttacccttgaagaaagg

SEQ ID NO: 796634 - DNA, 50 bp, Homo sapiens
ctttacgatgtcacttgggaaggttttgaacgaagaatgtgatcagaact

SEQ ID NO: 796635 - DNA, 100 bp, Homo sapiens
gacctgtctgacgatagtccaaaaactgaagaagatggtggataagcccacccaggtgcgcttcccttcccacttcagctctgacttgaaggacctgctg

SEQ ID NO: 796636 - DNA, 76 bp, Homo sapiens
taagttttgaaaaacttgaccgtgcctcaccagatctttggccagaacaattgaagccttctccttccaaaaagtt

SEQ ID NO: 796637 - DNA, 82 bp, Homo sapiens
accatgagcgtcccggccttcatcgacatcagtgaagaagatcaggagaactacgatgacccgcacaaaacccctgcctccc

SEQ ID NO: 796638 - DNA, 90 bp, Homo sapiens
tgaacctttggagtttaaaagggttctggacaacatcaaacatggcctgtatgagaagaaaaagacctcaagaaagcaacgaaaggaacg

SEQ ID NO: 796639 - DNA, 52 bp, Homo sapiens
acattatttgaagcaatgccagagacaccagagaagcctatgatgacaagca

SEQ ID NO: 796640 - DNA, 90 bp, Homo sapiens
tgcacgcggggcgcgggccccgaaggctctccatcgaaggcaacattgagacattttaaatccaaaggatgtgattagtgtccagctgga

SEQ ID NO: 796641 - DNA, 96 bp, Homo sapiens
ccaaagcgcctgaggaccggcaacatggtgcggtcggggaataaggttgccaagagggtgatcctgttgtcgggcacaccagccatgtcccggccc

SEQ ID NO: 796642 - DNA, 95 bp, Homo sapiens
gcggaggcagaggtggaggcgctttgaaagccaacacatatctctttatggtacaagctcgaggtataatgttgagagaaaatgtgaaaacaata

SEQ ID NO: 796643 - DNA, 101 bp, Homo sapiens
ccgaaggccctatcaggacatggagtatgaaagacgatacctgatcagagaagcagtttgatgtactaaaggcttctcgattgggagacaggaaacctggg

SEQ ID NO: 796644 - DNA, 80 bp, Homo sapiens
atggactctcagaataaaggaaagacctcagagtgttctcagctaacagagaccctgatgctggaattgatgaagctcaa

SEQ ID NO: 796645 - DNA, 79 bp, Homo sapiens
ggtttttcggatcatgtctggtggctccgcggattataacagtgtactaatggtcacttgatgtgcgctggctgtttta

SEQ ID NO: 796646 - DNA, 90 bp, Homo sapiens
tatccgtttgttcaggaaccaccagtgacagaagttcttggagtctctgcggagtccctgggccagatctcacagtgaaagctgcaggat

SEQ ID NO: 796647 - DNA, 95 bp, Homo sapiens
taatagcccttgaacagctatgcatgctgcttttgatgtctgacaacgtggatcgttgttttgaaacgcagaggtggaggagacactgaagcgac

SEQ ID NO: 796648 - DNA, 100 bp, Homo sapiens
tgctcttgtgacgttgtggagatggggagcgtcctggggctgtgctccatggcgagctgggacctcgactggattttgatcctgacattgttgcagctct

SEQ ID NO: 796649 - DNA, 102 bp, Homo sapiens
gaagctgaagcagtgcctggtggccgaccttgtccacacagtccatgatctggaaatagtatattcctatttacatggtatggaagccttatcaaacttgag

SEQ ID NO: 796650 - DNA, 82 bp, Homo sapiens
acgcccggcgcgagctcaagctgctgctgctcggtttctctactcggacgaggtgcagattggcccggagacggtgatgacc

SEQ ID NO: 796651 - DNA, 80 bp, Homo sapiens
cgggagccgtggccctgatccagacctgggcaggtgcaggagaacccggggaggaggcccaggctctgctggagggcttc

SEQ ID NO: 796652 - DNA, 100 bp, Homo sapiens
attcgcagtggtcgcttcttctccttgaacaaaaagagcctggtagcctttaagatcatgcccctggaggatatgaatgagttcaccacacatattctgg

SEQ ID NO: 796653 - DNA, 74 bp, Homo sapiens
gatgatgacattgacctctttggatctgatgatgaggaggacttatcaaactggtttcaaagcacagagctcaa

SEQ ID NO: 796654 - DNA, 90 bp, Homo sapiens
caccggctgggtgggttcgagcaactaccggaccagcatctcagacatgtcgaaaaagatgttttgatccctaaaataatgagagaaaag

SEQ ID NO: 796655 - DNA, 100 bp, Homo sapiens
gtcgacttcggcggggcccaggtgagaaaggcccacctgtgtcctggttgagggtctccagggttctttggggcccgagggaccagttactctccacaag

SEQ ID NO: 796656 - DNA, 96 bp, Homo sapiens
atgagacaaatgcgctcagcttcaattgggaaaatttgttggcagattgtttgcagggttgttttgtggtgacgtgcacactgtgtgcattcatca

SEQ ID NO: 796657 - DNA, 98 bp, Homo sapiens
gccggggacgcccgcgcgacgagcaggtggcggcggctgcaggctcttgtcaggatggtgaagctgttcatcggaaacctgccccgggaggctacaga

SEQ ID NO: 796658 - DNA, 83 bp, Homo sapiens
aaaacggcgagagtgggcgagaacgtccactgcgggccggcgaaagctggtgtggaaacaggaagagaactagaactggaagt

SEQ ID NO: 796659 - DNA, 99 bp, Homo sapiens
ataaaattagtgattactttgaggtgaggaaaatagcagctgaatactatgacaacctccctcactacaattcctggataaaagtactgtatgattttg

SEQ ID NO: 796660 - DNA, 100 bp, Homo sapiens
gtcatgatcgtgatggtgccgtcgctcatcaagcagcaggtccttaagggcaccctcatccagcatctgaaggagcacctgctgcacggcaacatgacca

SEQ ID NO: 796661 - DNA, 83 bp, Homo sapiens
gcaggacatcactttagatgatgtttttcagaagaagtgaagtcaagatgaagaaccatttgcttttctggggagtcctggcg

SEQ ID NO: 796662 - DNA, 76 bp, Homo sapiens
ggaaggcagtctttgctacgtacagcaaaagaagaaagtggatgatcagctcactaccacatcaaaggtgccaact

SEQ ID NO: 796663 - DNA, 92 bp, Homo sapiens
ggcagcagcagcggcgggaggagcctccgggacaatgcagatcttcgtgaagactctgactggtaagaccatcaccctcgaggttgagccca

SEQ ID NO: 796664 - DNA, 74 bp, Homo sapiens
attgtgaggcctccccagccacgtgaaactgtcattcctgtcccaatcagctgctctactactgatgacattaa

SEQ ID NO: 796665 - DNA, 100 bp, Homo sapiens
ccggaaagagcgaaagaaagaagtggtggaggaggaggagacggaggctgccattggagcccctcctactgccactgagggccctgagaccaaacctgtg

SEQ ID NO: 796666 - DNA, 50 bp, Homo sapiens
tatcaagtaatggtgcaaagcctgaacaacacggaggtagtcacgtttcc

SEQ ID NO: 796667 - DNA, 75 bp, Homo sapiens
atcaagcgggagttcaaggaggtgctgaagagcgaggaggaattttggagagtaaaaggctgaaccttgttaaag

SEQ ID NO: 796668 - DNA, 101 bp, Homo sapiens
ctctctcttacaagaatacatgtgatgacatttaggacccatccagataatccaggataaattcctcctctcaaggtcactgtggaatatagacccataat

SEQ ID NO: 796669 - DNA, 99 bp, Homo sapiens
ggccctggacacagcaatatctctgggctttcacagggactttgaatccaaagcaaaccatcttggtgattctggtgggactcctgtgaagacccggag

SEQ ID NO: 796670 - DNA, 91 bp, Homo sapiens
caccctgaccactatcatcaccatggaaaaagtgacttgagcaggtttgcgaggagcgatcgcatttgccttagctattcggaacacagaa

SEQ ID NO: 796671 - DNA, 97 bp, Homo sapiens
cccgggcctggcgggggcaggaaattctgtattgctggtcagcaacctcaacccagagggaaatgatggcgggaacacagcaaaggagaccatgtcc

SEQ ID NO: 796672 - DNA, 100 bp, Homo sapiens
cgcgagagatggagatgggcagacggattcatttagagctgcggaacaggacgccctctgattgtactaatggtcacttgatgtgcgctggctgttttat

SEQ ID NO: 796673 - DNA, 100 bp, Homo sapiens
acgtgatcctgctgaacatggacggcaaagagactctgcggtggagctgtggaagccaggcgcacaggatgcaagcagccaggcccagggaggcagcagc

SEQ ID NO: 796674 - DNA, 82 bp, Homo sapiens
caggagtattttacgcattttattgtaataacccctggtacctgacagtgtaaagaaggagctcctacaaagaataagaaca

SEQ ID NO: 796675 - DNA, 90 bp, Homo sapiens
aggcccccaagccctccttcgtgtcgtacgtacgccctgagtgatatggagaatgcagaaaacattctcacagtgatgagagatgccgga

SEQ ID NO: 796676 - DNA, 49 bp, Homo sapiens
cagcggtctgcgcctggcagcagtgtaaactggagttgctggtgggcag

SEQ ID NO: 796677 - DNA, 74 bp, Homo sapiens
aaaagcagcaaatctacttttgggttacaaaaatccagaccaggatacattaattgtttggtcagaagcagaga

SEQ ID NO: 796678 - DNA, 100 bp, Homo sapiens
gtgtctgaatcagagaccaccagaaaacccagacactgatggagcatgattgagcggatattagtgtcgtgcaacaaccagcaggatctgcaggaatggg

SEQ ID NO: 796679 - DNA, 53 bp, Homo sapiens
agcctccgaagtagctgggattacagatgacctgagaaccttgtgctccaggc

SEQ ID NO: 796680 - DNA, 75 bp, Homo sapiens
agaagacagccatcatttgaaaggtgccagtgacggggtggcccgtgagctgatgacgaggactggcttttaatc

SEQ ID NO: 796681 - DNA, 83 bp, Homo sapiens
atacagttgataaaattgttgtacctggagtagaacagaaaaattattatgtctgtgttcccttgggactcattggaaattgt

SEQ ID NO: 796682 - DNA, 75 bp, Homo sapiens
agaagattccactcgtggtatgagagtggataatataatcaactcctctgcctgttccagaagaaggcttcttat

SEQ ID NO: 796683 - DNA, 131 bp, Homo sapiens
tggcggggtgcagaactgagcccaggccacagtaccctattcacgctctgtgcttgtgccaaggtttaccaaagatgcaggtcattaggaactattctggaacaccacccccagctctgcatgaaggaccc

SEQ ID NO: 796684 - DNA, 75 bp, Homo sapiens
ggcgtgccaagcttctctgtgaaagagcacagaagacgtgaacgatcaagagagagggaccatagtagatcacga

SEQ ID NO: 796685 - DNA, 101 bp, Homo sapiens
aggaggtggtgaatatggccgtgatcgtgcccaaagaggagggcgtcatcagcgtctccgaggacagtttgaacgccatgaccctgtggatgggagaatta

SEQ ID NO: 796686 - DNA, 98 bp, Homo sapiens
gggctcacttttcttcagctccttctcatctcgtccttgccaagaggttgttatcgtcaggagctgtgcaaactgatgtgtgaacggctaaaactcag

SEQ ID NO: 796687 - DNA, 100 bp, Homo sapiens
tagctgtgatagctttgcttgctgtggggttgacccagaacaaagcattgccagaaaacgttaaggtctaggcgttttacactgagattctccactgcca

SEQ ID NO: 796688 - DNA, 75 bp, Homo sapiens
gcggccgaggcggcggtgtgggcgcgtcaggccgcgacgagggcgctgagcacctgtgattacagaggaaaccac

SEQ ID NO: 796689 - DNA, 83 bp, Homo sapiens
agagaggagaaagaagaaacgctagtaattccagtggataaattagatgcttcagaatcactgagaaaagaagaagaacaagc

SEQ ID NO: 796690 - DNA, 100 bp, Homo sapiens
gatcggcaggcgagattgcctgacccaggcctgctcggccctcacagggtcaaaatgcagatcttcgtgaaaacccttaccggcaagaccatcacccttg

SEQ ID NO: 796691 - DNA, 100 bp, Homo sapiens
ggaaattcaccaaaaggagttaagaattcagcaactgaacagcaacgacgaataacctttacagaaccaaatattcagaatgtgccaagagattttgaaa

SEQ ID NO: 796692 - DNA, 60 bp, Homo sapiens
gctccatatacttcccatgataaacttaaggcccgccaagctgccccctgtgtgctattc

SEQ ID NO: 796693 - DNA, 75 bp, Homo sapiens
gctgattataacaaatccctggccgaaggctactttgatgctgccgggagggtctatgttaacaatgaatgggca

SEQ ID NO: 796694 - DNA, 100 bp, Homo sapiens
aagtccgggagctgggcggccatttaccaggcctgcactgcccaaagtcttggaaacttgctggatatgatgtaccgggagccagcacgatggtcctaca

SEQ ID NO: 796695 - DNA, 74 bp, Homo sapiens
acccgaagaaggacgtgctgacccgcctgaagcacctgcgggcgctgctggggtatcagcatggaagccatgag

SEQ ID NO: 796696 - DNA, 91 bp, Homo sapiens
caacgtgtcggctatcatcaagccctaccctaaaggcgacgagagaaagaaggcttgtctgtcggccctgtctgaagtgacggtgcagcca

SEQ ID NO: 796697 - DNA, 50 bp, Homo sapiens
cgtgtcattagagtatgagaaaacagaagtgaattctggcgttttttaca

SEQ ID NO: 796698 - DNA, 71 bp, Homo sapiens
gtggaagccagggagaagaggagggacctcagcatgaacaacctcacagagcttcagcctggcctcttcca

SEQ ID NO: 796699 - DNA, 101 bp, Homo sapiens
tttggcactgctcctgctggccgcctggacggctcgggcgctggaggtactccaaagattcaggtttactcacgtcatccagcagagaatggaaagtcaaa

SEQ ID NO: 796700 - DNA, 50 bp, Homo sapiens
aggtcttccagtttctgaacctagatcttcagtgtctattggatttttcc

SEQ ID NO: 796701 - DNA, 87 bp, Homo sapiens
cgcctcccaccatggctctgaagagaatccacaagtactatactggcaattgctggagaagattttgcaattgttgcttctgatact

SEQ ID NO: 796702 - DNA, 82 bp, Homo sapiens
atacctcagatagggtccacagaatggtcagaaaccctccataacctgaagcggccctccaggcactgaagcgtaagaagag

SEQ ID NO: 796703 - DNA, 75 bp, Homo sapiens
tgacccctatgatgaagagggcgtccactggaggagcccaggatgtgcgagttcaagtgctacccgaggtgcgag

SEQ ID NO: 796704 - DNA, 51 bp, Homo sapiens
cagtggcaggtcaatcagatggaagaagccgaatacatcaagcaatggtaa

SEQ ID NO: 796705 - DNA, 95 bp, Homo sapiens
gtagcgctcgtctggcggagctggatcagtgtactgttacccggacatacctattccttcacaagttctggttcttcagtgctgcttactatttt

SEQ ID NO: 796706 - DNA, 83 bp, Homo sapiens
ccctttccgagtcaactggcccggcaccgagttctctctgaggaatgtttgctgggggattgaaggagatggaacaggaagag

SEQ ID NO: 796707 - DNA, 101 bp, Homo sapiens
gtatagtcttccgtcacttagctgaccatgggcaactttctgggatccagcgagcgacatggctgaaggggatgctaagggagataaagcaaaggtgaagg

SEQ ID NO: 796708 - DNA, 121 bp, Homo sapiens
ggcggagtatctggcctccatcttcggcaccgagaaagacaagaatctggtgaacagtaacaaactttggtgaaatttcaggaaccatagccattgaaatggatgagggaacctatataca

SEQ ID NO: 796709 - DNA, 100 bp, Homo sapiens
attgacttgcacagtccttctgagattgttaagcagattacttccatcagtattgagccaggagttgaggttggaagtcggatcgcagaccgtgtatatg

SEQ ID NO: 796710 - DNA, 95 bp, Homo sapiens
cgagccggcggggctgcggagggccagtggactcagtttgaagaaaacaggtctgaaacaaggtcttacccccagctgcttctgaacacagtgac

SEQ ID NO: 796711 - DNA, 87 bp, Homo sapiens
acagtggcacacagataccgtttattaaaagagctgtggctcccctgaagaagatggccgaccggatcaggaagtatcagatcttga

SEQ ID NO: 796712 - DNA, 80 bp, Homo sapiens
ttgccgtgacaacaccgttcccccagccgggctggttgtgaccgagattcccgacgagagagactgaggggaagagagga

SEQ ID NO: 796713 - DNA, 80 bp, Homo sapiens
taaaaacaagactggggctgctcccatcattgatgtggtgcgatcgcatgctacaagtgaaaactgatgagaaactgaat

SEQ ID NO: 796714 - DNA, 96 bp, Homo sapiens
tcaggtacctgacaatgatgagcagtttgtaccagactatcaggctgaaagttgattttttatcaagcagaaatgcatcgaacaacgagaatcaag

SEQ ID NO: 796715 - DNA, 82 bp, Homo sapiens
cccctcgtacgggctgtcggccgaggtcaagaaccggggggatatgagactttctactcggaatatcctgagtgttgcgtgg

SEQ ID NO: 796716 - DNA, 129 bp, Homo sapiens
gaacaatatcctggtattgctgtggagacggtgacagattctagccgctactttgtaatccggatccaggatggtactgatcccttcccactggaggcatgtgatgagaggaaatcaccgaaaacgtgg

SEQ ID NO: 796717 - DNA, 100 bp, Homo sapiens
acctgcaggtcattctgctggacagcaaccctctgcagagtccacctgcccagttctttattggtgaaaacatgaatccagatggcatggttgctctatt

SEQ ID NO: 796718 - DNA, 101 bp, Homo sapiens
atgggaagccctgctactgctggattagcgccagacttaattcagtgcacaaatgagatgaatgtgaacatcccacagttggcagacagtttatttgaaag

SEQ ID NO: 796719 - DNA, 100 bp, Homo sapiens
gaacaatctggggacatggatcgactggcagtacctacagaatgctgccaagctcttggccaagatagccctgggatctcctgaatttccaggttgggct

SEQ ID NO: 796720 - DNA, 96 bp, Homo sapiens
atcggctccgccgccgcgaaggacagcctttccgcgcgggactccggggcgccacgggggccatgtaagcaggcttcaacggaccacaccaaaatg

SEQ ID NO: 796721 - DNA, 100 bp, Homo sapiens
ctttcaccaatgtaagtctgccttatgttcctccagccaattgcaaaggaatacagattctgttcatcttgctctgaaattaaataattctgaactcatg

SEQ ID NO: 796722 - DNA, 75 bp, Homo sapiens
gggaacgcggcgaccgccaagaaaggcagcgaggtggagagcggtgtctgcttttggggcagagttttcatcgga

SEQ ID NO: 796723 - DNA, 73 bp, Homo sapiens
ccaggttgccttggaaaatgccaacgccgtgtctgaagctggcccgagataacttcttccgctgtggtgtgct

SEQ ID NO: 796724 - DNA, 108 bp, Homo sapiens
cgtccgacgaggatatcgtgtctggagcagtggagcccaaagacccctggagacatggttgccatcaagattatcgacaaaacccagctgaatcccagcagcctgcag

SEQ ID NO: 796725 - DNA, 50 bp, Homo sapiens
gcggcggcgccatggcagggcttgcagtaattcgccaaaatgacgaacac

SEQ ID NO: 796726 - DNA, 75 bp, Homo sapiens
atggcacgctgcatggagccaaaatcgggtctgagggcatatcgatgcatttacttcaaaactttttctactgga

SEQ ID NO: 796727 - DNA, 99 bp, Homo sapiens
cttcagaaaaagcatccccgaggaggaagacgaatcgttaaacatcttaggtcaggtatctcttccaaatgcacaatgaaggagttctcatcaacagca

SEQ ID NO: 796728 - DNA, 95 bp, Homo sapiens
aaaacggatgtaaataagattgaggaatttcttgaagaagtcttatgccctcccaacaacagccaactcagtttataaatccagaaacacctggc

SEQ ID NO: 796729 - DNA, 100 bp, Homo sapiens
gcgcccacggggacggattggttgttttttcctgtatgaagcggttggcaccactgaagtgaccgaatgagtctaaatgcccagccgaaagtgtcgacag

SEQ ID NO: 796730 - DNA, 82 bp, Homo sapiens
cttacgcagaaggacctggccacgaaagcgtggatacccatcaacgaagttttgatattggaattcagattggctatcagcg

SEQ ID NO: 796731 - DNA, 80 bp, Homo sapiens
tggatgttgtcaacatggccatcaccgagcaccctgagaacttcaagtcccctgacaagcccaccaggccccctgctgag

SEQ ID NO: 796732 - DNA, 74 bp, Homo sapiens
caacacataggccggccccacagcggcattgtctcgcccaagaacttcaaggtgaaaatgatcatgaagacatc

SEQ ID NO: 796733 - DNA, 74 bp, Homo sapiens
tgggattcgcgctgctgggcacccacggagcctccggggctgctgataccccaatgtccttctttgactttgtg

SEQ ID NO: 796734 - DNA, 75 bp, Homo sapiens
atggtaactttcttactcaacatgcttccagatcaagagtataaggaagataaggctttcaagcagaaacaaaaa

SEQ ID NO: 796735 - DNA, 96 bp, Homo sapiens
cttcctagtgagtcggcggctgatttagaaggaggttcaggctacggtgagccgaagggctgtgactccctgacgcagatccagtgcggccagctg

SEQ ID NO: 796736 - DNA, 49 bp, Homo sapiens
actaccacccccatgatggggatgagagctatgccaagaccaagacgag

SEQ ID NO: 796737 - DNA, 90 bp, Homo sapiens
ctcccttttcatcaggacgggaagctgcagaaccaggagttgctgagggcaatgatgaagaaggccgagctggaaatcagtggcaaagtg

SEQ ID NO: 796738 - DNA, 83 bp, Homo sapiens
ctgtgatctcagacttccagccttcagaactttgttgacctcctgtactggagagacattaagaagactggagtggtgtttgg

SEQ ID NO: 796739 - DNA, 100 bp, Homo sapiens
agtgtttgcagaaattacacgaggaccttaaaggatacaatatagaggcagaaggccttttttcaaaggaggaagcagagatccaggcagagctggagag

SEQ ID NO: 796740 - DNA, 74 bp, Homo sapiens
gcgagccctggtggaggaagaggatacatgaagaagatggccatctgcaaaccaggaagcaggtcatcatgaga

SEQ ID NO: 796741 - DNA, 90 bp, Homo sapiens
cgtactggctagacttatacttctcaaatcttaatttcctaaagccactgaggcggctcccagctgcgttggcgacatggccgacacccc

SEQ ID NO: 796742 - DNA, 100 bp, Homo sapiens
ggcacagccgggccctggccatgggaagaagttgggccatcgaggtgtggacgcatccggcgaaaccacctacaagaagagacgggggtttcaccatgtt

SEQ ID NO: 796743 - DNA, 74 bp, Homo sapiens
cgccctttccacctcgcggcagttcggttttgggatttgagattgacgcggtgaactctgtccagttttcaaac

SEQ ID NO: 796744 - DNA, 100 bp, Homo sapiens
cccggctccgctcggttcctggccaccccgcagcccctgcccaggtgccatggccgcattgtaccgccctggcctgcgccccgaaactacctcaacaccc

SEQ ID NO: 796745 - DNA, 75 bp, Homo sapiens
gcctcctaagtagctgggattacagtgtaaacaggaacatcgataagtagtgtaaaaacttgcacaatgaaatcc

SEQ ID NO: 796746 - DNA, 98 bp, Homo sapiens
gtggggcgggacagcggccccctggagggggcagtcccgggagaacctgcggcggccggagcggacgttttcgaagatgccttggaaaccatctcaat

SEQ ID NO: 796747 - DNA, 100 bp, Homo sapiens
gagaggcggcggcggcctcggctgaagaaagaaggtgggagcggagagcgcaggcgtgaggctcatccaaaatagaggaagcatgcgaaatctacgccag

SEQ ID NO: 796748 - DNA, 122 bp, Homo sapiens
caacatagtggggaacgcatgggaatggacttcagactggtggactgttcatcattctgttgaagaaacgcttaacccattcaaatctgaacatcaatgatgtactagggaactactcattg

SEQ ID NO: 796749 - DNA, 100 bp, Homo sapiens
tgtgattgcttgcagtgtttctttataatacattccatgggaggagatcatacatctgtcggtggcctgggagacagtttttatgaatacttactgaaag

SEQ ID NO: 796750 - DNA, 75 bp, Homo sapiens
ccgcgacgctatggcgcactggagtaccctgttcctggcagattgtcagctgacctctgtcctgtgtgcccagtg

SEQ ID NO: 796751 - DNA, 75 bp, Homo sapiens
gcttactgtacagcctgcagaactccacccagagcttcacggccccacggacaaaccaggacatccctgctcctg

SEQ ID NO: 796752 - DNA, 50 bp, Homo sapiens
gcggcgtttggtcccgggagcctcgccggatggagtctcgctgtgtcacc

SEQ ID NO: 796753 - DNA, 100 bp, Homo sapiens
tgcaggccgagtgtgaccagtaccgcagcatcctggcggagacggaacccaagacagaccaggatgaggagcattgccggaaagtcaacgagtatctgaa

SEQ ID NO: 796754 - DNA, 75 bp, Homo sapiens
gtcgtaggaggctgtcctgtctgcagagcttcttcgagacaccttcacttccctgggctatgaagtccagaaatt

SEQ ID NO: 796755 - DNA, 100 bp, Homo sapiens
ctgggcggaggccgccaagacggagagcttgtttcatatccatatcccactgtattcctgctaatctgctaatgcagtaaattggaggaaaactgttacc

SEQ ID NO: 796756 - DNA, 100 bp, Homo sapiens
aaaagttcaagctggtgcctatcctacagaaaagatttcctcctctgatgctcctcttcagcctttggtatcctctccttctctgcaagctgctgttgac

SEQ ID NO: 796757 - DNA, 101 bp, Homo sapiens
ggcctgtgtggactcgcatcttgcccgaagccgggcggaggagagctcaagctaagtaaatacaatcaagtggcatcttaaatttttgctggaagtggagt

SEQ ID NO: 796758 - DNA, 80 bp, Homo sapiens
aacagtaacgaaaaacagggctcaacatggccaacgccctggccagcgccacttgcgagcgctgcaagggcggctttgcg

SEQ ID NO: 796759 - DNA, 89 bp, Homo sapiens
attcagaaggagctggcggacatcactttagaccctccacctaattgcagaggagagaaatgactggatcagcatactattaaatgcac

SEQ ID NO: 796760 - DNA, 100 bp, Homo sapiens
gactttcattagaaggagagcgacagcccaagtcaccaggtgccgacgccaccgccgagcccatgatcctggaacagtacgtggtggtgtccaactataa

SEQ ID NO: 796761 - DNA, 100 bp, Homo sapiens
acagcagtcaagtatgtcccaaacgtctctgagatctgtatctgtggacctgaatgttgatccctcgcttcagattgacatacctgatgcgctcagtgag

SEQ ID NO: 796762 - DNA, 49 bp, Homo sapiens
gatcgaagcggatttccgattgaatggaccctgatgcttggtgtgacct

SEQ ID NO: 796763 - DNA, 74 bp, Homo sapiens
ctttgctccagcctggcttaatttccctactccaccatcatcaacaaaggagtttggatcataatacaagagaa

SEQ ID NO: 796764 - DNA, 83 bp, Homo sapiens
ctctctcatctcgctcggctgcgggaaatcgggctgaagcgactgagtccgcgatggagttctggagagtcttggcttctggg

SEQ ID NO: 796765 - DNA, 78 bp, Homo sapiens
aagaattgacccttgaaggaatcaaacagttttatattaatgttgagagagagaggcatttcatccttcatgaagcca

SEQ ID NO: 796766 - DNA, 51 bp, Homo sapiens
gatgataattgggcctccaagactagtgtcagcagtgggatacctgcgctt

SEQ ID NO: 796767 - DNA, 90 bp, Homo sapiens
cccaggaagcagggcggtccctcatcaagaagattcgtcactcatgctgctgcagatggcgggtgttggactgggttccctggctgttgt

SEQ ID NO: 796768 - DNA, 95 bp, Homo sapiens
caaaattgaaaaaatggttgacctcacccaggacatgacttgggacatcaaatataagaccgtccgctggagctttgtggaatctttagagccct

SEQ ID NO: 796769 - DNA, 101 bp, Homo sapiens
gtctatctgctgggacacagagaagagtaaagagtagatctacaggagcatgcaagacgacagcatagaagcttctacttccatatctcagcttctaagag

SEQ ID NO: 796770 - DNA, 100 bp, Homo sapiens
ggctggaagtcttacagctaaggtcacagcaccacaggtattcaaaacctttgaccacatggcccgtcaggatgatgagaagagaaggcaggaacttgaa

SEQ ID NO: 796771 - DNA, 75 bp, Homo sapiens
gcggaggccggggacgcggaggccgaggacgcggaggacgcggctctgccaggacaatgaaggccaaacagctct

SEQ ID NO: 796772 - DNA, 75 bp, Homo sapiens
ggagaataagcacatcacgtggtttggcatctctgacacgctgtgggccatcgagatgtgggaccctgcggccca

SEQ ID NO: 796773 - DNA, 75 bp, Homo sapiens
gatgatcgtgtgtcggatgaggagaaggtttgtgttgctagttaagctagcttgtattgttgtggcttccttcgt

SEQ ID NO: 796774 - DNA, 97 bp, Homo sapiens
cgggaagcgacgccccggggcgggggcgatggcggcggcggcggccggagcttctctcagccggcccagattgccttcctgcagggagaaaggaagg

SEQ ID NO: 796775 - DNA, 75 bp, Homo sapiens
caagctccaagtcaatatagccaacagagcagcagctacgggcagcagatcttcaggcagtgacagtggtgggag

SEQ ID NO: 796776 - DNA, 98 bp, Homo sapiens
atgcaaacagcagagtgagatacttgtggtgtcagaaggatcatgtgccacaggtgtcatggagaaactccagctgggcccagagattctgcagcggg

SEQ ID NO: 796777 - DNA, 126 bp, Homo sapiens
cagtgatgtcattgaccagaaggtgtatgagatccaggacatctatgagaacaggcttcaggtgagaccacaggagttgacatcactaaaattcaagtcaagagatgtgagaccatgagagagaag

SEQ ID NO: 796778 - DNA, 100 bp, Homo sapiens
accggacactttgttattggagaaacatgcagattatatcgcatcctatggctcaaagaaagatgattatttcctgagggaagacctcaattaccatgac

SEQ ID NO: 796779 - DNA, 90 bp, Homo sapiens
cgaacatggagaacccccagcttggagcgcaagcctgctcgcctggattttttaagtttgaggcatctgagagcccctgcttggagtgcc

SEQ ID NO: 796780 - DNA, 101 bp, Homo sapiens
agttgaaaaacgcttttcacgtcacctggagagatgcacagattcctggtcgggtggcttccagtggtcttcagtctgtcgtgcaccgatgagaactctcc

SEQ ID NO: 796781 - DNA, 75 bp, Homo sapiens
cgcccacgtcccatttcgcccctcgcgtccggagtccccgtggccagctacccgtacagtgaggacgcccgccag

SEQ ID NO: 796782 - DNA, 50 bp, Homo sapiens
aggggcttacgcagaaggacctggccacgagggagacgctgttgcggcag

SEQ ID NO: 796783 - DNA, 75 bp, Homo sapiens
ctcctagccaagatctcctcatcacaaagtgcagtagacattgttgcaatcatgatcggcaatctgaaaggcaca

SEQ ID NO: 796784 - DNA, 82 bp, Homo sapiens
aggcccacagctgcctacagaaccgtcccaaaatatggcaaagaaacctattctgagtacaatgcttgcacactgcacggtg

SEQ ID NO: 796785 - DNA, 82 bp, Homo sapiens
catggtggatcgggcagaggcgccacggcagagacaacgtgtgtaccccaagtgcacatggctgaccacccctaaaagcacc

SEQ ID NO: 796786 - DNA, 75 bp, Homo sapiens
caggaggagcagatctagaaaacaaggtgattacgattgagaggatccagaatccagatctctggaatagctacc

SEQ ID NO: 796787 - DNA, 97 bp, Homo sapiens
aggcatgttgtataaatgtacagtatatttgccttccctccatgatctccaacactatccgataaagtagaagcaactgaggtaccgtgaaagagaa

SEQ ID NO: 796788 - DNA, 102 bp, Homo sapiens
ctttgccaagaagatggacaagatggtgcagaagaagaacgcgggtcctatcggtggtgctaatagagatatttctattctccagtgccacggggattgtga

SEQ ID NO: 796789 - DNA, 80 bp, Homo sapiens
tgctgccctggatgttcttcagtccccacagcagttaagttgcttttacagagttaacaggtctccaagaaattttaaaa

SEQ ID NO: 796790 - DNA, 100 bp, Homo sapiens
tggtcacttcatttaccaaccctggaaccgcagacctctgggcttcctgtatatgactctcaacccttctactaagaggaagaatactggatccccagac

SEQ ID NO: 796791 - DNA, 75 bp, Homo sapiens
atgtaaccacaacctccaccaggattggcaagtttgaggccaggccttcccttcttcttggtggtgttcttgagt

SEQ ID NO: 796792 - DNA, 75 bp, Homo sapiens
ctaaggaccaacctggggcccaagggcaccatgaagatacaagaagctccgccacgcccgcagtggggcccccgc

SEQ ID NO: 796793 - DNA, 87 bp, Homo sapiens
tgcagaattcacatatttgctcaacaaaatgatcaggcatgttacatggaattggaaaatttatagttgaaataatttgctgtcgtt

SEQ ID NO: 796794 - DNA, 50 bp, Homo sapiens
cctgagcctactgatcggcgtagtcaagtgcctccggagccagcgtggtg

SEQ ID NO: 796795 - DNA, 100 bp, Homo sapiens
tcttgaaagagaagctcttcctgtgaggagagcacacagctgctacaaatgccgtcagtgcagttttacagctgccgatactcagtcactactggagcac

SEQ ID NO: 796796 - DNA, 82 bp, Homo sapiens
ggctgctgctgctgctgacgctgctgctgcccggcctcgggttttctggatatgccgcagaaggatccgtgccagaagcaag

SEQ ID NO: 796797 - DNA, 100 bp, Homo sapiens
cctggatatgcccgttcagtttacagttcattttttgcttggtttggaaaaatttcattagaggttgaatgatcctaaaatgtctgaaacggagcgccag

SEQ ID NO: 796798 - DNA, 100 bp, Homo sapiens
gcatgttcaagaagtggccggagagttctgcatgttgattcgcctgcctcgtcccctcagctttcacacgatgatactcattcacgcattgaacattatg

SEQ ID NO: 796799 - DNA, 100 bp, Homo sapiens
ggagaagattcgtgggctgatggaagacaccacccaggaaatggaagttccagtattaccgaaaatctctctaccgatcaccagttcttcactgcctacc

SEQ ID NO: 796800 - DNA, 75 bp, Homo sapiens
gtggtctttgaagaataccttacacattgcggagcttatcaacaaacttaactttttggatgaagcagaaaagga

SEQ ID NO: 796801 - DNA, 90 bp, Homo sapiens
aaatggccagaggatcagtgtccgatgaggaaatgatggagctcagagaagcttttgccaaagttgggatagtaaagctctgaaggatga

SEQ ID NO: 796802 - DNA, 85 bp, Homo sapiens
cctgctgtagtcacaggagctgtagagaggaccccggtacatctgaaagccgggaaatggcatttatgtttgaatcatctttaag

SEQ ID NO: 796803 - DNA, 74 bp, Homo sapiens
tggccaaaattcaatccctgctttagctcagattactcgagtggatggaaggaagttgcttctttatagggagc

SEQ ID NO: 796804 - DNA, 75 bp, Homo sapiens
ctgaagaccagcaggaaagcagtgagcccttacaggttaaagactcagtctctgagaaaacaattggactgatgc

SEQ ID NO: 796805 - DNA, 51 bp, Homo sapiens
tacacaaacccttcacagactgctctgtgtggacgaatgtggaacctcgct

SEQ ID NO: 796806 - DNA, 82 bp, Homo sapiens
gtctgtgcggctgcgtggggctcggccgcgcggactgaaggagactgaaggggtttttctgtaagactgaagatgacttcaa

SEQ ID NO: 796807 - DNA, 100 bp, Homo sapiens
ctccctctcagcacctgggcggacggactgactgcattgcacagatgatggatatttacgtatgtttgaaacgaccatcctggatggtggacaataaaag

SEQ ID NO: 796808 - DNA, 75 bp, Homo sapiens
tttgcaatcatgagattcaaaagccacactgtggaattgtcaagccgctgctgcaggtgagccggcaggaggagg

SEQ ID NO: 796809 - DNA, 83 bp, Homo sapiens
gggagagacgctctgaactgactgccccgcatcaccggagcgtcccagctgcgaggagctcagagtcaagatctccactgaag

SEQ ID NO: 796810 - DNA, 75 bp, Homo sapiens
tgccagcacctttcggcttctgagacggcggcagcagcggcattcagatcgagacgctccctccggagctcttcc

SEQ ID NO: 796811 - DNA, 82 bp, Homo sapiens
cagccctgcagtcccaccagcccgtggccaggcccgtctccgtggggctttccagaacaatgcccagcgccttggggtctcc

SEQ ID NO: 796812 - DNA, 133 bp, Homo sapiens
ctgagaagcattttgcttttaaaatggcaagtggagcagccaacgtggtgggacccaaaatctgcctggaagataatgtaaacattgctgaggctcttgtcagcaaaggtctagccacagtgatcagataccg

SEQ ID NO: 796813 - DNA, 90 bp, Homo sapiens
ggagccggtgctgcagaaccagatccgggagcacgtcatcgccatcgaaggattttgcaggttaattcctcacacacgttcaccaggtac

SEQ ID NO: 796814 - DNA, 100 bp, Homo sapiens
ggagaaagtcctacaacagtttggcgtgcaacatggggcttgagaaagggtactgggcctaatcgctacgtgcctctttggctatgatgcctatgtcacc

SEQ ID NO: 796815 - DNA, 74 bp, Homo sapiens
ggaaaaacatcaaattcttgaccaatctaggtgatgtcttggcattgcccattttcaagcaggaagattccagc

SEQ ID NO: 796816 - DNA, 106 bp, Homo sapiens
gccgtgcttgccctgtcatcccacctgagaaccatgctcaccgaccctaatttcgctaaggagtttgtgatcagtgatcggaaggagctggaggaagatttcatca

SEQ ID NO: 796817 - DNA, 100 bp, Homo sapiens
gacagggagacccggctgggaagtgcaggcaaagccggctgttaccctgcacagccgtcaccctcaactttcccttcagagggagaccaagacatcattg

SEQ ID NO: 796818 - DNA, 75 bp, Homo sapiens
ctgctgtcttcgtgggaggcgccgtgagttcgccgctggtggctccggacacgaagatcgattgagaagttatta

SEQ ID NO: 796819 - DNA, 74 bp, Homo sapiens
agcttttcaggcatcctcatataattaaactctatagaatgtgctgtccatacacaagaagagcttcaaaatcc

SEQ ID NO: 796820 - DNA, 100 bp, Homo sapiens
tttcccggccggcggccgagggggcatcatgaagcgggctggcggcgctgccgctcccgggcggccgcgggcggaggtggggctggtgtccgagcacttc

SEQ ID NO: 796821 - DNA, 98 bp, Homo sapiens
taatgctgtccgccaggccctgcaggacctgctttcggagtacatgggcaatatcggcttcagctccccaggaatatgattgaaaacagcatgtttga

SEQ ID NO: 796822 - DNA, 75 bp, Homo sapiens
cccccccgttgatcgtccacaacatacagaatggctgtcatggtccaatctggtacgtgaacacactcctgaaac

SEQ ID NO: 796823 - DNA, 75 bp, Homo sapiens
agcgatgaaaagagcaccttgaaggcccttgcttgtgattggtggttcctctgaaagaaaccaagaaacaatggg

SEQ ID NO: 796824 - DNA, 75 bp, Homo sapiens
cgaagatccggactctgggtgttttgctaccgtgaccgtttagggattttttaacctggccctgctaatcgagga

SEQ ID NO: 796825 - DNA, 98 bp, Homo sapiens
gctgggacgcctactccaaagcggccgggagtcgcgcttcttccccactcccgagacagggaaatgaggcaagttatcctttggaaatgtgctcacac

SEQ ID NO: 796826 - DNA, 87 bp, Homo sapiens
gcagccagtactctatatgaacaatccgtctggatcacggatgtaggaagtgtacttgcctatggtgccactggtgctgggaagacc

SEQ ID NO: 796827 - DNA, 100 bp, Homo sapiens
tgttaaggattccaagtaactcttatttgactacacttgctgctttgaaggatgaagttgtatctgttgaaaatgaactctcagaattgcaagaagtaga

SEQ ID NO: 796828 - DNA, 74 bp, Homo sapiens
gtgaggcctccccagccacgtggaactatgttttcacctcctgtgagcagtgggaaaaatggaccaacttcttt

SEQ ID NO: 796829 - DNA, 97 bp, Homo sapiens
aagggctatctggtatctgtagatggctacatgaacatgcagagcctattgtgaagaatggcaggcctccaacgtctcacagtatgcattccttcct

SEQ ID NO: 796830 - DNA, 100 bp, Homo sapiens
cctggcctccctcaccttggacacctcgcttgggctcgtggaggagttcatgctcttggccaacatggcagtggcccacaagatccaccgcgccttcccc

SEQ ID NO: 796831 - DNA, 100 bp, Homo sapiens
ggtgcctctggcagtgacgaggacgaagtgtccgagaacctaaaggcagacccagaagagctttttacaaaactagagaaaattgggaagggctcctttg

SEQ ID NO: 796832 - DNA, 90 bp, Homo sapiens
tctgagctcaacggaggattgtgcctgagaagaacccacagagctgcagaaccttggcctgaaaatgctacattatatcagcaattgaaa

SEQ ID NO: 796833 - DNA, 90 bp, Homo sapiens
gaatgggcagaaggaggtgccacaaagggcaaagagttggaagtgttgctgtggaagaccagccagatgtcagtgccgtgttgtcagcct

SEQ ID NO: 796834 - DNA, 101 bp, Homo sapiens
tgtgtccctgaccatggctccctgcagtaccctttaacggacttaaccaccaccatgtcgagcaaaagaacaaagaccaagaccaagaagcgccctcagcg

SEQ ID NO: 796835 - DNA, 90 bp, Homo sapiens
catcgatgtgcggcgcccgctgtataagggaaatcctcattgacgattcaatttgttgaaggccaatttgtggactcctacgatccaacc

SEQ ID NO: 796836 - DNA, 100 bp, Homo sapiens
cttgtgccctttttgctagctggttttggaacagtttcagctggcatggtactggatatagtacagatgtcatcattgccaagaagagcgaaagtacagg

SEQ ID NO: 796837 - DNA, 98 bp, Homo sapiens
gaggcctccctcgtgagttgggcttggtaccgtgctgcccagaatgcccttcgggagaattatatccagatcgagagacagaagattctgaaagggtt

SEQ ID NO: 796838 - DNA, 50 bp, Homo sapiens
ctagaagatgcccaaaggaatctggaattttgcccctggactctgaagac

SEQ ID NO: 796839 - DNA, 98 bp, Homo sapiens
atgacaagaccaaggtcaacaaggacaacaatgagatcgtggacaagatcatgggcaaaggacagatccaggccaagactaaggggctgcagagcggg

SEQ ID NO: 796840 - DNA, 100 bp, Homo sapiens
gagtgcgcgaagatgcgaaaggtggttttgatcaccggggctagcaggtgtctgatgatttgtgagcctcaagtgactactctgtggaatcatctgtcct

SEQ ID NO: 796841 - DNA, 100 bp, Homo sapiens
actccaaatcacacatctctgagcattctggggaaaagaaactacagtcatcacaatggtctggatggtttgggtacccagaccccacctacctgacccg

SEQ ID NO: 796842 - DNA, 100 bp, Homo sapiens
ccgaggggaagggatccgaggcagtggatgacgtagtagatgaaagtgatgacaacgatgatattgatgtagaagctgaaaacgaaactgagaatgaaga

SEQ ID NO: 796843 - DNA, 90 bp, Homo sapiens
ttcttacaaagtggaggtttgtggcagccctgcatggagcaagtctgtcagcaccatctttctaacattgtattccctgaatgactataa

SEQ ID NO: 796844 - DNA, 76 bp, Homo sapiens
cagcgtttccagtcaccgcttctttggacccaatgctgaaataaggcacaagctggctgaccagcggaccaggaaa

SEQ ID NO: 796845 - DNA, 96 bp, Homo sapiens
tccggagtagctgggattacagcgatggggtcttgctgtgttgcctaggctggccttaaactcctgggctcaaatgatcctcctgcctcagtctcc

SEQ ID NO: 796846 - DNA, 100 bp, Homo sapiens
gccgcggagccgccaagatggggaagtcctgagtatgggatgccctcagtgacctttggcagtgtccacccctctgatgtgttggatatgcctgtggatc

SEQ ID NO: 796847 - DNA, 50 bp, Homo sapiens
cagcagcggcgggaggagcctccgggaaagtgccagcgatgccgcccctc

SEQ ID NO: 796848 - DNA, 100 bp, Homo sapiens
ttgacatggaaaacaaggaaaatggctctgtcggtgtaaaaaagtacatcaggaacgtctctatcaagaatacaatttcagcaaggctgagggccatctg

SEQ ID NO: 796849 - DNA, 90 bp, Homo sapiens
ccgctcaccaggagccccttgccaggagtgttcaagatgctctctctggaccgatcccactgatcgaatcatcaatttagttgttggcag

SEQ ID NO: 796850 - DNA, 75 bp, Homo sapiens
ggcaaggagagccgagacctcagttcccggcggctcttgcggggcacaggatcttttgccagaaatgagggcata

SEQ ID NO: 796851 - DNA, 75 bp, Homo sapiens
gcagcctcatttgttttctggtgtcatcgtaggtggccacctatggcttttgggcagcatctggaatcaagagac

SEQ ID NO: 796852 - DNA, 149 bp, Homo sapiens
attgatattttgaccacagctgactattttgccgtcggtaacagatccaactgtttcctggttataaggtgaaatgacaatggatgctctgttggctcgattgaaacttctgaatccagatgaccttagagaagaaatcgtcaaagccg

SEQ ID NO: 796853 - DNA, 75 bp, Homo sapiens
ttcgagtttaaccagcgcgacgagggcgccgccgcggccgccccagagcggttctggtgaggttggaaggatgca

SEQ ID NO: 796854 - DNA, 100 bp, Homo sapiens
cttcgcctcagaaaaagggtgcgggacccctcctcaccgtgcggtcacggtacatgtcccagagcaagcacacggaggcccgggagctcatgtactcggg

SEQ ID NO: 796855 - DNA, 82 bp, Homo sapiens
catctggaaccttcagacgaaagagattgtacagaaactacaaggccacacaggattttttatcaagcagaaatgcatcgaa

SEQ ID NO: 796856 - DNA, 50 bp, Homo sapiens
ctagaaggagtcatgactgaaagggttccgagtctgaggaagacataacc

SEQ ID NO: 796857 - DNA, 50 bp, Homo sapiens
gagattggactgggagactcagcaggtgccatgcctctgcaactcctcct

SEQ ID NO: 796858 - DNA, 100 bp, Homo sapiens
ctttcgctgagatggacgaggtcagcaagaaacgcatcttctccaccatcctgggcaactggttgggctgtgggtgagcgtggaggatgctcagatgcac

SEQ ID NO: 796859 - DNA, 100 bp, Homo sapiens
agcaactccagcagctcctggcctccccgcagctgaccccgggttccccactgaaggacttggtccagctgtctggcagggaggagagacagaagctctg

SEQ ID NO: 796860 - DNA, 97 bp, Homo sapiens
agtttggagccccggagtggggtgtcggcgcctcattcgggtggagctgagccggagacaggtagaattagaagatcatgtgatgttggagtaggag

SEQ ID NO: 796861 - DNA, 100 bp, Homo sapiens
tgcggttaaaaaggtgatgggtatctttaagagcagcttattccaagctttgctaggtacttaagagattatggcatcagaaacccacaatgttaaaaaa

SEQ ID NO: 796862 - DNA, 75 bp, Homo sapiens
ttgtatctcaacaccctgagtgcggatttctgctatgatgacagattttctcaactgaagggcctgaacttgtcc

SEQ ID NO: 796863 - DNA, 119 bp, Homo sapiens
cgcgtcatcacggacgagaactggagagaactgctggaaggagactggatgatagaattgaaataatgcaaaaggtgtcccaaggctcctgaccagtgaacaaagatttgagaaagaca

SEQ ID NO: 796864 - DNA, 117 bp, Homo sapiens
ggaccatcgtcgtgaggatcgtgtgcattacaggagtcctccacttgccactggtgagaaagatcagtctaaagaaaaggagaagaaagtgaaaaaaacaattccttcctgggctac

SEQ ID NO: 796865 - DNA, 100 bp, Homo sapiens
cggcggccgaggaggaggagggggaagcggcggcggcaaagggagttatggtacagcacctgtaaatcttaacatcaagacagggggaagagtttatgga

SEQ ID NO: 796866 - DNA, 100 bp, Homo sapiens
acgtgaagtcaagtaaaatcgcacactgcgtgaccgaattacaagttttagaaaatctactgtcaaaaaagaaaaacctcttattcaacatcctattgat

SEQ ID NO: 796867 - DNA, 100 bp, Homo sapiens
cttcactgctctgctgtctcctgcaagaactggctcaagaaatttgcctcgaaaaccaagcccctgacatttatgggatcacagactaagcgagtcctgt

SEQ ID NO: 796868 - DNA, 135 bp, Homo sapiens
ggcgtcttctgggcctgtggagtttcttggacaggggccgcggggctccaggacggcgcccttagcgacaccatggatccagtttgtgtgttctctgtgcaaataccggaccttctatgaggacgagatggccag

SEQ ID NO: 796869 - DNA, 100 bp, Homo sapiens
acagaaaactcaaaaaccatctggtgctgtggattgcaaccttgaattcattgaagtcaacaagagagacatagtcttcctggtggatggctcatctgca

SEQ ID NO: 796870 - DNA, 74 bp, Homo sapiens
ataagttcttcaatatcccatttttgcagcttcagatttgtgccaatgtaatggaatattgccagtcactcatg

SEQ ID NO: 796871 - DNA, 100 bp, Homo sapiens
gcccttcctgggcccgggcctcgggggcgattccggactttctgctgacccctctgtcacccactgccagtcagggcagtccctcattctgcgttgggag

SEQ ID NO: 796872 - DNA, 50 bp, Homo sapiens
tggacttcttcctgctcaagtgcgaaggagatacaactcgtcaacgaatc

SEQ ID NO: 796873 - DNA, 100 bp, Homo sapiens
cagccgaccttgaggctgccgccgcgagtctgccatcgtccaaggaggtggcagacaatgcagatcttcgtgaagactctgactggtaagaccatcaccc

SEQ ID NO: 796874 - DNA, 100 bp, Homo sapiens
ggggagccctgggtcactttcagtgagtcatcgctgacagctgaggaagtctgcatccacattgcacataaagttggtgtggatgaggtcaccattgtca

SEQ ID NO: 796875 - DNA, 82 bp, Homo sapiens
gcctgacgtccacgtctaccgcatccctccgcgggctaccaaccgtggctacagggagtgcatccgccccaacccttttccc

SEQ ID NO: 796876 - DNA, 83 bp, Homo sapiens
gacccctcggggctgctcatctctgtgatcagctacgtggtgaacatgggtctgattgacaaactgtgtgcctgcttcctctc

SEQ ID NO: 796877 - DNA, 100 bp, Homo sapiens
ttaagaagtgcaccatagcgggagttgcttatggtggccttcattggcatcaccagcactggagctattccagtgaggatttttgctgcggcacatcacg

SEQ ID NO: 796878 - DNA, 100 bp, Homo sapiens
gcctgttcccggggcagatccaggttcagatgtcaagccctccaacatcctagtcaactcccgtggggagatcaagctctgtgactttggggtcagcggg

SEQ ID NO: 796879 - DNA, 100 bp, Homo sapiens
tttttctcagaagagaattccacaagttgcagagcttgaagtgaaaaccagagaaaaattagaagctgctaagaaaaaaacaagctttgagattgcagag

SEQ ID NO: 796880 - DNA, 100 bp, Homo sapiens
ggaaaaccagttattgaatatcaagaggaggagttgttgattctggatgaaattgaagaacataacatcaaaatctatcacttacctgatgcagaatcag

SEQ ID NO: 796881 - DNA, 75 bp, Homo sapiens
tgctgcacagaaattaatgcgaacagacagacttgaggtacatcaagagagtgtacacatgattgaagtcacaag

SEQ ID NO: 796882 - DNA, 75 bp, Homo sapiens
gccctcaagacgggaatagtagccaagaagcagaagacggaggatgagacccttcgcaggtgttacagtcgggtg

SEQ ID NO: 796883 - DNA, 147 bp, Homo sapiens
aatgatgaagaagatccttcaaaattaaaagaggagcagcatggcatttcagtcactggtttgcagagtccagcttagcagtgtctgcaaaaacgaatcttttcctacaacctgttaactgactggactgttggtaacaaagtaatt

SEQ ID NO: 796884 - DNA, 74 bp, Homo sapiens
acagaccaacctgtcagtgctgcaagtgttggtgaaaatttgactgacccatctgtgataaaagcagaagaaaa

SEQ ID NO: 796885 - DNA, 152 bp, Homo sapiens
catccacgcgtgggcccagccagcaaggagaagtctaacaggcaggaggaggggagacacaaggagcccccgcagttctgggtctggtaatgaagtcatagaaggcccccaaaatgcaagagtcctgaagggctcccaggctcgcttcaact

SEQ ID NO: 796886 - DNA, 75 bp, Homo sapiens
accatttgccgtggccaggctagagatagtcaaagaggttggtcaactggcagaaacccaacgcttcgaatgcac

SEQ ID NO: 796887 - DNA, 85 bp, Homo sapiens
ccaaacttggtgtcttttctacaaactctgtgcctcaacaaccatttctaagtgcaccaaggatgacattgatcttgatgccttg

SEQ ID NO: 796888 - DNA, 50 bp, Homo sapiens
cacttggagtccagacatctaaaatttggctgctctttggcgtaaattgc

SEQ ID NO: 796889 - DNA, 75 bp, Homo sapiens
gtcccagtaactcggaatgcggagccgctcgtctcccgtcttttttaaggcaatggatcacttggagtcctttat

SEQ ID NO: 796890 - DNA, 75 bp, Homo sapiens
gccgaccggagatagctaagatgccgcgcaggaggtaagaatgattgatgttggctgatattggagtgctcattc

SEQ ID NO: 796891 - DNA, 88 bp, Homo sapiens
catgtctcggaactcctctgtggccagcgacctagttactgaaagctctcgaaattacggttacaatccttctcctgtgaagcctgaa

SEQ ID NO: 796892 - DNA, 98 bp, Homo sapiens
cagcctccaagtagcttgccaaaacttggaagcaaccatgatgtccttagtaggcatggcaaagatgtttgatctcaggacgaagatcatgatcggca

SEQ ID NO: 796893 - DNA, 90 bp, Homo sapiens
atgtcgtctcggcttggaatctttttgccataaattctaatggatcaatcttcctgtcctacaactgacaaaggatcccctaaagacccc

SEQ ID NO: 796894 - DNA, 74 bp, Homo sapiens
tgattcgctttccaaggacaatgtcttcgagaataaccgtttgcccaacagcatggtggtggaacaccccgagt

SEQ ID NO: 796895 - DNA, 100 bp, Homo sapiens
ctactgcatccggaactcctctaccaagtcggggaaggtcttggtatggtgactcctgtgaacgatcttagaggatctgattctattgcgtatgacaaag

SEQ ID NO: 796896 - DNA, 100 bp, Homo sapiens
gatctcgggcgggaaccgagcgcagagccgtgaaggcctcccccgtcgccgcgcggcttcccggagccgactgcagactccctcagcccggtgttccccg

SEQ ID NO: 796897 - DNA, 90 bp, Homo sapiens
acctgctcagtatgacgcttctgagctaaaagcttccatgaagggcgcgggaacaaacgaagatgccttgattgaaatcttaactaccag

SEQ ID NO: 796898 - DNA, 96 bp, Homo sapiens
ccggtcctgcgcctcgggagtcggcgtccaggctcggagcgcgacacggagactaggtggcagttatttgctggtataaaggatggagaaagcctg

SEQ ID NO: 796899 - DNA, 116 bp, Homo sapiens
tgaaaacagcctgaagttgatccgctgtatgcagttttatccttttctgtacaacatcacttcttctgtttgcagtggttctgttggtgcaactaatatgaacgaacatagttccc

SEQ ID NO: 796900 - DNA, 100 bp, Homo sapiens
attcagaggatttaatcctgaggttgaggcaaatcctgatcctaactgttgtcttggagtatttgggctgagcttgtacaccacagaaagagatctaaga

SEQ ID NO: 796901 - DNA, 90 bp, Homo sapiens
gggagttctggtctcaggcaaggtggggactgggcacatcatcaatacggactttatggacagcagcctgctaaccaagtcatcattcga

SEQ ID NO: 796902 - DNA, 98 bp, Homo sapiens
gctcactctgaggaagaagcaggacttgtccagcctagggtgaatgtttccccctccaagaaggggcccttgcagcaccacaacctgcttgtctgcca

SEQ ID NO: 796903 - DNA, 75 bp, Homo sapiens
atctggctggagccctgcattcgcggcgtgtgcagtactgtcaagatgataagcatggaataaagcttcagaagg

SEQ ID NO: 796904 - DNA, 50 bp, Homo sapiens
cgattctataacaatagctgaggaagttggtgaaccatctaaagaagaga

SEQ ID NO: 796905 - DNA, 96 bp, Homo sapiens
atttttggagaaagccagcctaatccaaagactgtggaacttttaagtggagtggtggatcagaccaaagatggtttcatgatcaacatgggagac

SEQ ID NO: 796906 - DNA, 51 bp, Homo sapiens
ggacggtgtggggcggtcccggccccgcagcaatgaggtcttactgtgtag

SEQ ID NO: 796907 - DNA, 90 bp, Homo sapiens
cagggaagtctataagctttgcaacagaattacagagtatgatctaagatatcaacatggactagggactccagacttgcggcaaaccct

SEQ ID NO: 796908 - DNA, 88 bp, Homo sapiens
aggagttcgagcagatcgacaagtccgggagctgggcggccatttaccaggtttgtccgatatgtgcctcgatgccctggggagaccc

SEQ ID NO: 796909 - DNA, 97 bp, Homo sapiens
ccgggcacgcctccctcatccggaccatcatcggcggagacaaggacggcagcaaggtgacaacagtggtggcaactcctgggcagggtccagacag

SEQ ID NO: 796910 - DNA, 100 bp, Homo sapiens
gatgaccggtacgaaatggaagatgggaaagttattgaacggctgggccagagcgtggttgctgaccagttgaaagagtgttgcggagataggaacatgg

SEQ ID NO: 796911 - DNA, 50 bp, Homo sapiens
ccggccggtcagggcaagagccaggcaaacatgagacagttggagggcag

SEQ ID NO: 796912 - DNA, 75 bp, Homo sapiens
cctgggccgccgctgctacctgcagcgccgtgtggcacgacacaaaaatcaggcatcatggaccgatctaaagaa

SEQ ID NO: 796913 - DNA, 87 bp, Homo sapiens
atgatgctttgcaagaacttgtggaactcatctatcaacagagggttgcttttacccaaagtagtggaagatcgtggtgtgcaaaga

SEQ ID NO: 796914 - DNA, 90 bp, Homo sapiens
ctttaagttgctgatgactcacaaggaccctgatgctcccataagacagaaaatgccccttgatgatctggatagagaagatgaagttag

SEQ ID NO: 796915 - DNA, 51 bp, Homo sapiens
ctccgctacgcacaccacctccgaagatgagaatgtgcctactgctcctga

SEQ ID NO: 796916 - DNA, 74 bp, Homo sapiens
ggccctgtcagtggctctcttggccctcctgaaatgagaatggatcttggagaatgtctgaaagtccatgacct

SEQ ID NO: 796917 - DNA, 82 bp, Homo sapiens
gatttgggtcgcagttcttgtttgtggatcgctgtgatcgtcacttgcaacagtatcaaagtgctctattttgggcagataa

SEQ ID NO: 796918 - DNA, 117 bp, Homo sapiens
tggtcccaagggaacatcagttctacgagaccctccctgctgagatgcgcaaattcactccccagtacaaagacacgatgaggcgagtggtacgacagagcaagtttcggcatgtat

SEQ ID NO: 796919 - DNA, 98 bp, Homo sapiens
tctatcttttgttctctggcatggaaggggtcctcagagttactgggatctctgagctgcccagcatagtccaagacctagccaatggcaacatcaca

SEQ ID NO: 796920 - DNA, 90 bp, Homo sapiens
tggagagtgataagcttcgaatggacagagccatccctgacacccggcatgaccaatgatgaggagtctgatgaggaagctgtgaagaaa

SEQ ID NO: 796921 - DNA, 51 bp, Homo sapiens
cgcccgtcggtctgcagcgcggctgaggaaatcatcgagttccccatccta

SEQ ID NO: 796922 - DNA, 98 bp, Homo sapiens
acttcttcagaattagaaaggagctgcttcccaataaggaaacagtcatcatcagatttgaaatatttaaagtggatacaaaactatttcagcaatgc

SEQ ID NO: 796923 - DNA, 90 bp, Homo sapiens
cgaggaggttgggatcttcttcactgcctctggcatggatgagcaggtgtctcctgcacctgcgccagctcctgcaagtgcaaagagtgc

SEQ ID NO: 796924 - DNA, 76 bp, Homo sapiens
agaagagagaagaacattctcgaatacctagaatgggatgccacttcaaatgaacaacaagagcttttctgtcaga

SEQ ID NO: 796925 - DNA, 96 bp, Homo sapiens
caagtgaacaccttgactaaaccgacttctgatccatggatgccatcagagggtctcgctgttggagttggatttggggctatagaaaagacggca

SEQ ID NO: 796926 - DNA, 82 bp, Homo sapiens
atctctgtgaccaagatcactaaaccagatgggtctaccctgatgggagagtctgcatttccatcctccacgcgccaggcga

SEQ ID NO: 796927 - DNA, 104 bp, Homo sapiens
tggagccggagctgggcgcggattcgccgaggcaccgaggcactcagaggagcaaacggggattcagcgtccgatcctttggaacagggactcacgtgaagctt

SEQ ID NO: 796928 - DNA, 127 bp, Homo sapiens
tcttccggaagctgcctccccgggtgtgcgtgtccctcaagaacattgtggatgaggacttcctctatgcaggacacgccgctttttggatgcctcctatgcctggcgggagtcttgtctgagctgg

SEQ ID NO: 796929 - DNA, 75 bp, Homo sapiens
tgtttatgaagcactgaatcacccatggcttaagggccgttgctccagggagaactgcaaatatcttcatccacc

SEQ ID NO: 796930 - DNA, 135 bp, Homo sapiens
tagggtgaacaacccgttcttgcctcaggccagtcgcctccaggccaagagggatccttcacccgtgtctggcctacagattcctggaggagatgcggcggcggcttcccttggccaacatgtcctactacgtga

SEQ ID NO: 796931 - DNA, 82 bp, Homo sapiens
ggagatacattaaatgcaatagcccttcagtactgttgtacgatacttgttgctttgaggaatctgcattttaagaatattg

SEQ ID NO: 796932 - DNA, 51 bp, Homo sapiens
gcggcaaagccaggctctccccaggcccgacaacaagctcaaatacgtcac

SEQ ID NO: 796933 - DNA, 50 bp, Homo sapiens
ccagggtcggatcaaagaaggttcaaatctgaacatcaatgatgtactag

SEQ ID NO: 796934 - DNA, 50 bp, Homo sapiens
gaaaaatccactgccttccaaagaaagccttcgtcaagatggttggacac

SEQ ID NO: 796935 - DNA, 100 bp, Homo sapiens
cgaaagagcactggactccggaagactataatgtaactgcaaactccaagctggtcattatcacggctggggcacgtcagcaagagggagaaagccgtct

SEQ ID NO: 796936 - DNA, 98 bp, Homo sapiens
aaacaggagctggagcagctcaaagagaaaaacacaccttgactttagtcagatacatcactgtctgttaaaggaaaccaagcgtgaagtggaagtct

SEQ ID NO: 796937 - DNA, 75 bp, Homo sapiens
gaaaactcaaatctttggcaaccaagaatcatgtcaaccctgccatggacttcacgcagactccacctgggatgt

SEQ ID NO: 796938 - DNA, 87 bp, Homo sapiens
ggattgtgggagtctccgcgtcccgctcgctgggagagaggtgctggagaatctggtaaaagcaccattgtgaagcagatgaggatc

SEQ ID NO: 796939 - DNA, 100 bp, Homo sapiens
ccgtagggacacagacccttccacatagcagttctggcttcctcgattctgcatgttaggaaaaccctggatgccaccatgcagacattacaggacatgc

SEQ ID NO: 796940 - DNA, 100 bp, Homo sapiens
tttgaggtcaatgggcatttcttcaaaaaatatgaaacacaggcctccttgtcaggcccctacttaacctccgtgatggggaaagcggccggagaaaggg

SEQ ID NO: 796941 - DNA, 100 bp, Homo sapiens
gttcgccacctgggaggtggacggctccagccccagctgcgtgcccaggtgtagtcgccgccgccagccgccatgggcaaacagaacagcaagctgcggc

SEQ ID NO: 796942 - DNA, 90 bp, Homo sapiens
gagcctctgagctcaacggaggattgtgcctgagaagaacccacagagtgagtctgccaaaaaagaggtggttgctgaagtggtaaaagc

SEQ ID NO: 796943 - DNA, 83 bp, Homo sapiens
cacctgcaagagcctgcagcagtcgcttctccgcagatcattgagaagcagccaggccacattcggagcagggttttcaggga

SEQ ID NO: 796944 - DNA, 100 bp, Homo sapiens
atcgcttgaaccccggaggtggaggctacactcatctttgggtgaaaaattgtcgggatcttctgcagtccagctacaacaaacagcgctttgatcaacc

SEQ ID NO: 796945 - DNA, 98 bp, Homo sapiens
gaggcgacatggggcacccggtgtaccgcggcgagaagccccagctgcactacgcgaacttcagtgaagatttcatacattggcctcatgacccagag

SEQ ID NO: 796946 - DNA, 100 bp, Homo sapiens
agcagtagcagctcagaagttcagcctggcccactccatgttggccatcagtggtcacctagacagcgacgatgatagccagagcagctgagttccagat

SEQ ID NO: 796947 - DNA, 75 bp, Homo sapiens
agcgcggagttaccccagacccctcagcgtctggcatctacacagaatgttcagcttaacaaagaaatgacactt

SEQ ID NO: 796948 - DNA, 50 bp, Homo sapiens
gagacggcggcagcagcggcattcaggctggagtgcaatggctcgatctc

SEQ ID NO: 796949 - DNA, 50 bp, Homo sapiens
agacaaaagaaacgggccccgactgtcactcagcctctgaagaagcttcg

SEQ ID NO: 796950 - DNA, 96 bp, Homo sapiens
ccctgcctatgaccagcaagaggatggggccctggatgagggggaagggcctcaaagccagaagcgggtattcccctacatctcagccatggtgaa

SEQ ID NO: 796951 - DNA, 100 bp, Homo sapiens
atttgcccattatgtcaacagcatctgtggaaatcgatgatgcattgtatagaaactatgttccaacttcctgtcaacaatcttggcagtttaagaaaag

SEQ ID NO: 796952 - DNA, 98 bp, Homo sapiens
aagaagcgaaatgtgctcattggccattcctacgggctctggctccgctactgcatcgtgtgcttctgtccaagaggcagagagactgaaactatctg

SEQ ID NO: 796953 - DNA, 83 bp, Homo sapiens
ccgcagccccgggcacggcggaggcagcggagccctgggccatcggttgtgaccgagattcccgacgagagagactgagggga

SEQ ID NO: 796954 - DNA, 90 bp, Homo sapiens
gaggtcatgctgaaagtacgtctaatagacagctacgagagtacaaggtagtgggtcgctgcctgcccacccccaaatgccacacgccgc

SEQ ID NO: 796955 - DNA, 101 bp, Homo sapiens
ggccggccccggcctggtcctggccccggagctgttgctggacccctggcagggaactggtgctcctatgtggtgacccgcaccatctcatgccatgtgca

SEQ ID NO: 796956 - DNA, 82 bp, Homo sapiens
ccctacctcggccctggcctgaccccggcggccctgcccgcccctccctccaggctgaccccgcactacatctacccaccag

SEQ ID NO: 796957 - DNA, 98 bp, Homo sapiens
cagcgttggggatgccagcaggccgtgcaagtctggaaaagtttgaaattccagtaaaaattcgtttgagtcctgaaccgtggacccctgaaactggt

SEQ ID NO: 796958 - DNA, 116 bp, Homo sapiens
tgagggccctgtgggtgctgggcctctgctgcgtcctgctgaccttcgacaatgcagatcttcgtgaagactctgactggtaagaccatcaccctcgaggttgagcccagtgacac

SEQ ID NO: 796959 - DNA, 50 bp, Homo sapiens
atatgtcctaaagtaaggtttcaggttatcaatactctggctgaccatca

SEQ ID NO: 796960 - DNA, 96 bp, Homo sapiens
ccgtcttcttcgcgctcgggctggctttaacaacaccgagagaacatgtgataaagagtttattatacggagaacggctaccaatcgagttctgaa

SEQ ID NO: 796961 - DNA, 100 bp, Homo sapiens
cgcagcgctgcagtgaattttccccccaaactgcaataagccgccttccaagtttggtgccctggttgtcagatgttggaaagcagtaggacggaacata

SEQ ID NO: 796962 - DNA, 83 bp, Homo sapiens
gcgggaagactcatcggagcgtgtggatttgagccgccgcattttttaaccctagatctcgaccttcacggcatggtgcaact

SEQ ID NO: 796963 - DNA, 100 bp, Homo sapiens
atattccatctactgtctttttcttcaatgggcagcatatgaaagtggattatggtttgtcagaggaatggctgtgaatggatgcctggaaggaccatcc

SEQ ID NO: 796964 - DNA, 100 bp, Homo sapiens
gcttgctctcactagtgccaacctcagctcccaggccagttctctgaatgtcgagcacgaaaggtaatacaggtagatgaaatgatagtggaagaggaag

SEQ ID NO: 796965 - DNA, 83 bp, Homo sapiens
atgaagcacaatacaaagaagtaaaagtggtggctaatgagaaaatgtccaccttggttctggtgatgggcagtcaaaagatt

SEQ ID NO: 796966 - DNA, 75 bp, Homo sapiens
cgacctcgacgtcttgcctgtgtcccacttgttcgcggcctatagcaggttacgggcaggacttgagtggcttcg

SEQ ID NO: 796967 - DNA, 100 bp, Homo sapiens
cctgctcagtatgacgcttctgagctaaaagcttccatgaaggccactcgctctggtgggaccctcgtgcttgtggggctgggctctgagatgaccaccg

SEQ ID NO: 796968 - DNA, 98 bp, Homo sapiens
agtgagcccagcagtgagcagcagctgtgcgcccttagcaagcaccccaccgtggcctttgaaggtactgtgagaatagagatgtttcgaaatatgca

SEQ ID NO: 796969 - DNA, 87 bp, Homo sapiens
gaacccaatcttgatgctttaatacagaaccagcatgtagaaaatctttatcctcaaattggctgggtagaaattgatcctgatgtt

SEQ ID NO: 796970 - DNA, 74 bp, Homo sapiens
acaaatatcccaggagaagtgatcatggagaccaaggagaacaggctgaaagtttagaagagaagaatatggct

SEQ ID NO: 796971 - DNA, 90 bp, Homo sapiens
ctcagaaacaataacactaaacagtggaacactacagacatttgagattcttcccgttataagccctgagaagtatgacataaaatgtgc

SEQ ID NO: 796972 - DNA, 100 bp, Homo sapiens
cggaccttttggccatcttctcgcagagtgctccctgctaacggggacaggaatgtttacccttgcggaagttgcatcacttaatgacattcagccaact

SEQ ID NO: 796973 - DNA, 100 bp, Homo sapiens
tcttatgctcagcaccaacaggtccgccaaatccggaagaagatgatggaaatcatgacccgagaggtgctgctgctgcctccactgtactcagacccag

SEQ ID NO: 796974 - DNA, 93 bp, Homo sapiens
atggcggatgccctgcagtacctgcagaaggtctctggagacatcttcagcaggtgacttaagagattaaaattaatttggttgctgttggtt

SEQ ID NO: 796975 - DNA, 90 bp, Homo sapiens
acggtcaagcgatctgctggcctcggcctctcaagaagaagcctgagaagatgatgcacagatagagaggcaccaggacttgagaggcac

SEQ ID NO: 796976 - DNA, 83 bp, Homo sapiens
agggtaaagtcgagtatctggtgaagtggaaaggatggcccccaaagcacaacgaggccctcttggaggaggcgaagatgatg

SEQ ID NO: 796977 - DNA, 75 bp, Homo sapiens
gttcaagacaggtgtttaagcaattatatccagatcgagagacagaagattctgaaagggttcaatgaaatgaga

SEQ ID NO: 796978 - DNA, 97 bp, Homo sapiens
ccggaggcgcctgcctaccgcctgcaggactgcgacgcgctggtcaccatggataacgaaggaggcccaacttcattcaataaggagcctgacggat

SEQ ID NO: 796979 - DNA, 100 bp, Homo sapiens
ttggctggtttcctggacagagaacatccaaggttccattaaatacatcatgcttaaccctagttcacgaatcaaggcagctgaaaaagttggatgaaga

SEQ ID NO: 796980 - DNA, 82 bp, Homo sapiens
aagaataaaggcaggaatcaatccattcaatggactttgaagaatatcctgaacatagaacgaactttttcttactacttca

SEQ ID NO: 796981 - DNA, 101 bp, Homo sapiens
gcgggccctggccgctcacccgtggaaagtacaggtcctgacagctgattctttaaacttctgatggaatccatcaaaaagaagaataataaagcatcagc

SEQ ID NO: 796982 - DNA, 74 bp, Homo sapiens
cgggcacacccggctccccggacgcctcgaactgcatgaacttgcccccagacaaggtccagctgctgagccag

SEQ ID NO: 796983 - DNA, 88 bp, Homo sapiens
aggcgacgccggggacgcccgcgcgacgagcaggtggcggcggctgcaggtgcagaggccaagaccgttttgcccaagaaggagaaaa

SEQ ID NO: 796984 - DNA, 75 bp, Homo sapiens
gcctgcagcgggagctggacggcgagcgcgagcggcgcgagaaagtacctgctggagcagcgagacgtggaggtg

SEQ ID NO: 796985 - DNA, 74 bp, Homo sapiens
gcatccgaggtggagagctctttctgacagtgctgcttaatccgatcgacgacatcgcggatggcgccgtgaag

SEQ ID NO: 796986 - DNA, 100 bp, Homo sapiens
ctgatggcccgcagcttcggtgacaaggctgaagccgacgtagcttctctgaacagacgcatccagctggttgaggaagagttggatcgtgcccaggagc

SEQ ID NO: 796987 - DNA, 100 bp, Homo sapiens
aattctaatagtctatgaaaatctggatataatgagatatgttcttcattgccaaggcacagaaggtattaaaactgccttcaccagaaaatgtggggag

SEQ ID NO: 796988 - DNA, 83 bp, Homo sapiens
cgtccactgcgggccggcgaaagctgccctgggcgctgcctatggcacagccaagagcggtaccggcattgcggccatgtctg

SEQ ID NO: 796989 - DNA, 75 bp, Homo sapiens
gatttggatttggcagcatctcacagaaagagaggtggtgaagcagtattttccaatttgaagattcatttgaag

SEQ ID NO: 796990 - DNA, 100 bp, Homo sapiens
tgcagcctcatcctacagccccctaggtatcactggacaggccatggctccacggtcccggcgacgaaggcacaagaaacctccctcatcagtggctccc

SEQ ID NO: 796991 - DNA, 82 bp, Homo sapiens
caccgaggaaaaggaatcgtatcgtatgtccgctatccagaacctccactctttcgataagatgctcccaagtcccttgcag

SEQ ID NO: 796992 - DNA, 96 bp, Homo sapiens
gcactgctccacctctgattccaccaccgggttggttaaatctagacttaagaggctctgctcctcagaagttggacttctgaaaaatgctgaacg

SEQ ID NO: 796993 - DNA, 75 bp, Homo sapiens
tgcccctcctccaccagaggactgggaggagcatgtcaacaggtgatgatgaacagtctacacagatggctgcaa

SEQ ID NO: 796994 - DNA, 100 bp, Homo sapiens
gaaaatggtgtgcacaggagccaagaggacagtcattttgtttactcattcagccctgttgcaggtcccaataaactcttcataaggttgacagaagcac

SEQ ID NO: 796995 - DNA, 85 bp, Homo sapiens
tgggatctttccggatcaatccagatggcagccagtcagtggtggaggcatcctctggtatcacgattccaaaacccccaaagcc

SEQ ID NO: 796996 - DNA, 97 bp, Homo sapiens
ttttttgatgaaatagatggattagctccagttcgctctagcagacaagatcagatccacaggctttttatggaaattctcaatgactgttctgatg

SEQ ID NO: 796997 - DNA, 143 bp, Homo sapiens
ttttaacttatttaaaactttttttgaaaatgtgaatctttgtgatcatcgattgaaaagacaaggagctcagttgtcctacaagattatcaattttgcccccagtttacttcggattatagtctctgaccatgtggaattcc

SEQ ID NO: 796998 - DNA, 100 bp, Homo sapiens
gctgaaagatggcggcggcgtctgtctctgcggcttctggttctcacttgtcggtggaaactaattctaagccagactgctggagatcaccctgttctag

SEQ ID NO: 796999 - DNA, 99 bp, Homo sapiens
cacattctgacctaaggagcactgagaataatccagaatggctactctgatctatgttgataaggaaaatggagaaccaggcacccgtgtggttgctaa

SEQ ID NO: 797000 - DNA, 107 bp, Homo sapiens
cagacgctggcgggcgcagtttctcacgacgggccgagcctgccactaaaccaaggtgtatgttggtaacctgggaactggcgctggcaaaggagagttagaaaggg

SEQ ID NO: 797001 - DNA, 98 bp, Homo sapiens
ttctcttgaccatgtgacatctgatgctgtggaacttgcaaatcgaagattttgaagacattttggctacaatatattttttgatgcacaagaatccc

SEQ ID NO: 797002 - DNA, 97 bp, Homo sapiens
gccaaatgacaatgatacagttagaggacagatagtagtctattatcctcccagtccacaacgctgaaccgtggctggacgaatgtttgaggtctgt

SEQ ID NO: 797003 - DNA, 100 bp, Homo sapiens
ccgccgcttagcctgatgctggaaggacgaagagtgcctggaagagctgggatgtctggttgagtcctatggcatgaatgtttgccaaccaaccccagga

SEQ ID NO: 797004 - DNA, 75 bp, Homo sapiens
agctggcgagagccctctccacctcggaagagctctcttcaagtctgcaataaaaaatggcctccaacaaaacta

SEQ ID NO: 797005 - DNA, 100 bp, Homo sapiens
aagatttaagaactgaatgtgcaacttgcaagggaactggagacaatgaaaatcttgtcaggatgggtcatcagttaaggaagttgaaacctaccaccgg

SEQ ID NO: 797006 - DNA, 100 bp, Homo sapiens
ggcggcccgcgcggaggctcgcgagatccgcatgaaggagctggagcggcagcagaaggagactgtcaagaacaagtatgccacatcgaagcatgctaag

SEQ ID NO: 797007 - DNA, 83 bp, Homo sapiens
cttgccttgagtcagtgcgccgctctccagcccgcttgaacggaactgtggctgcaccatctgtcttcatcttcccgccatct

SEQ ID NO: 797008 - DNA, 90 bp, Homo sapiens
ctgctctaccagcatttttcctgcaacataagaaacattcaccatcatcaggtcaatgtgacggtggactacattagaccagccagccca

SEQ ID NO: 797009 - DNA, 75 bp, Homo sapiens
gccggctgcgaagacgcggtgggccgcccctccgcatgtagagcgcatgaagtacaggacaataaagcttcctac

SEQ ID NO: 797010 - DNA, 90 bp, Homo sapiens
ttgatgacctagatggaacacatgctctgatggtgaaaggtgtagcagtcactcggcctacacccacagcatcgaccttgtgaacccagc

SEQ ID NO: 797011 - DNA, 82 bp, Homo sapiens
ctcccgggctccgggaaaactacactggccaggctggtccagggaccctcatcatggccacaggagtccaggactttaaccg

SEQ ID NO: 797012 - DNA, 80 bp, Homo sapiens
cccttccgggagcctagatcctgtgctttactctgaagactcattgtaaaccatggctgtgtggatacaagctcagcagc

SEQ ID NO: 797013 - DNA, 83 bp, Homo sapiens
tccttgtttgcacggagcagcaaacgcagagacaaaagaaacgggccccgactggggaggagtggggccagttaaaagctccc

SEQ ID NO: 797014 - DNA, 90 bp, Homo sapiens
gttctgggcaaggccctgggcctcattcgcttcccgctcatgaccatcgaggagttcgctgcaggcgtgcccctgtgctgtgccaccctg

SEQ ID NO: 797015 - DNA, 101 bp, Homo sapiens
agcacttgagccacgtgcatgaaccaaacccacttcgttcaagacaggtgtttaagcgactttttttatgaagacatggagtccttgacgcagatgcttag

SEQ ID NO: 797016 - DNA, 87 bp, Homo sapiens
acaactgtattcctgagctggacagtgagacagccatgttttctgtctacgatggacatggaggtttgctggtgaggcccatgaccc

SEQ ID NO: 797017 - DNA, 100 bp, Homo sapiens
gaggctcgcgcgctttttggaattcagttatcaagctttagagcctggctactcacagttgaagcctgattgcagagtcttgctctgttgcccaggccgg

SEQ ID NO: 797018 - DNA, 100 bp, Homo sapiens
gtcgaagaaactgtggaagtcattaggaacaatggtgcaaggatgtacagttacccagcacgtgtacctcctcctcctcctattgctcgggctgtagtgc

SEQ ID NO: 797019 - DNA, 74 bp, Homo sapiens
ctgatgtcagtgttatatcctccaggaatactggccaggaaaccagctgtcaggcctcccagatagtatcagaa

SEQ ID NO: 797020 - DNA, 75 bp, Homo sapiens
cttcaacgacaccaagctggacgctgtcctggaggaattcaagcgaggacagctggcctgaagctcagagccggg

SEQ ID NO: 797021 - DNA, 83 bp, Homo sapiens
caacaatagtccaattgctcgccagtaccacaatctgccgccggccgctccgacacagggtcttgctgtctcacccaggctgg

SEQ ID NO: 797022 - DNA, 50 bp, Homo sapiens
aggattctgacgacaatggcaatcagtacaatggaacatgaattttcaat

SEQ ID NO: 797023 - DNA, 80 bp, Homo sapiens
gactagaccccaaaacatcgagacgctgcagaacgcggggggatatgagactttctactcggaatatcctgagtgttgcg

SEQ ID NO: 797024 - DNA, 75 bp, Homo sapiens
gctggccatggtgccccactatggtggcatcaaccgagttcggctttcaccttgaccattcctcagttcagagag

SEQ ID NO: 797025 - DNA, 50 bp, Homo sapiens
aggaaaacaacttcgagggcagagcaaccccgtggccaactggattcacg

SEQ ID NO: 797026 - DNA, 111 bp, Homo sapiens
ctgcgcacggactgctggagatggtggagtccgtcattggagtcattcgttgcccagtttgcagccaagaatgtgcagagagacacatcatagataacttttttgtgaagg

SEQ ID NO: 797027 - DNA, 74 bp, Homo sapiens
agaagctagggctgctggtcttcccctacacacaccaggcttattaagggagatggcgaggtcctagaggaaat

SEQ ID NO: 797028 - DNA, 75 bp, Homo sapiens
tgaagcagctggtggggctctactgcgacaagtaagactttgaccccgacgcaggcttcagtgattgccgcggat

SEQ ID NO: 797029 - DNA, 50 bp, Homo sapiens
cactggctttggctggggacacccgacagaaccatggagtctggcagtac

SEQ ID NO: 797030 - DNA, 100 bp, Homo sapiens
aaactccagcgagatccgggccgtgaacgaaagcagtgacggaggagcttgtaccaccggtcttgggcgtctttggtactggcttttttaggggtctgcc

SEQ ID NO: 797031 - DNA, 100 bp, Homo sapiens
tggaaccatgctgttttttaaagatatggctcgtggacagcagaaaattcagtctcagcagaaaaatgccaaaaagcaagctggacaaaagaagaaacaa

SEQ ID NO: 797032 - DNA, 96 bp, Homo sapiens
tagatgagaccaaaatcattctgcaagatgatgaagtgacgactgttcaggttaaagagcaagaccagagcgtcctggtgctgaagaaagtgcagt

SEQ ID NO: 797033 - DNA, 83 bp, Homo sapiens
cagaccctctccagaaagcaccctcaccgtgaccttcagccagacaatgcagatcttcgtgaagactctgactggtaagacca

SEQ ID NO: 797034 - DNA, 100 bp, Homo sapiens
gtggcacctggtgtcacacgaattaaggttcgagaaggccgccttcgaggagctctctttctccctccaggtgccgtgagcgatgtggagatgcaggaac

SEQ ID NO: 797035 - DNA, 100 bp, Homo sapiens
atttcaaaaaagcatttaggcaggtggctcccaaattaccggaaaggactgttcttgaggtattcagggttatgtaccgaaggactctaccgtgtcagcg

SEQ ID NO: 797036 - DNA, 98 bp, Homo sapiens
tcagaattagaaaggagctgcttcccaataaggaaacatgtctaccatcagagggagatctctgccccctggggctgagagaccccaacctttcccca

SEQ ID NO: 797037 - DNA, 73 bp, Homo sapiens
agctgttagccaggctaggtgcctgcaggttgaagaactgagctctatctgcttttgaaatgacattaacaga

SEQ ID NO: 797038 - DNA, 100 bp, Homo sapiens
tccccggctgattggattcgttactgctttgcaacgcgcacctaactccaggctaactcaggtgagatggagccgctatagtcctgaattcaaggatccc

SEQ ID NO: 797039 - DNA, 100 bp, Homo sapiens
atgtgatgcctgctagccaaaaggatttggagcaagaggtggtggtggccttcccccgaagaaatttggtaatcctggggagcgtttgcgtaaaaaaaag

SEQ ID NO: 797040 - DNA, 101 bp, Homo sapiens
cacgcgtcctactacaaagatgctctgcggtttttgggctgtgttgacatcaaggatctaccaggtggcaattttggaggtagccccggttatggaggagg

SEQ ID NO: 797041 - DNA, 75 bp, Homo sapiens
tttctggcgctggcgcggctccaagaaggcggggaaatttgcagtggtgagaaaatgtataaagaaagattctgg

SEQ ID NO: 797042 - DNA, 82 bp, Homo sapiens
atgctatattgcaattggactggaggctataagtggtctacggctctggctctaaggttatacattggctcttcaaagacgt

SEQ ID NO: 797043 - DNA, 88 bp, Homo sapiens
gctggtcttgaaatttgcagaggtctactttgcacagtcccagcaaaaggtgtgctccatcctctggtctccccattacaaggagctc

SEQ ID NO: 797044 - DNA, 110 bp, Homo sapiens
cgaccggctcctgctcaagatctcagagaaggaggaggtgaccacgcgcgagacgggaggcgtgggcagcttcgacatcgccggcctgctgaacaaccctggcttcatga

SEQ ID NO: 797045 - DNA, 100 bp, Homo sapiens
gacagcaccatgtccaccaaagcggagcagtgaaatttgtacatagattctaggcaaaatctccctccttcagtgatgccaccccctggttatcctcata

SEQ ID NO: 797046 - DNA, 100 bp, Homo sapiens
tccagcatgtgtctagaggacagcagatacaactggtctttcattcactgtccagggagagcttatggatggagaccaaacatccagatctggagtgccg

SEQ ID NO: 797047 - DNA, 100 bp, Homo sapiens
tggagatatggcgcaactgcggcgcgtgtacacttaaagcgttctgggaatatgaatcccttctgcaccctggaatcaccagtccagccatgcatggagc

SEQ ID NO: 797048 - DNA, 82 bp, Homo sapiens
agaactgaaaactctgagtgatgttcagaagtttgcagagataaatggtgacatgtacagccatgatgggaatactgatgag

SEQ ID NO: 797049 - DNA, 83 bp, Homo sapiens
gagagctcacggaattcctctcggattttttatcaagcagaaatgcatcgaacaacgagaatcaagatcactgagctaaatcc

SEQ ID NO: 797050 - DNA, 75 bp, Homo sapiens
ggccaagtccagatatatggagctctacacacactatgataccctggcaactggaataatttattttcatcgctt

SEQ ID NO: 797051 - DNA, 75 bp, Homo sapiens
cggcagcatcctgaatcttaacctgggtcaaaatgcagatcttcgtgaaaacccttaccggcaagaccatcaccc

SEQ ID NO: 797052 - DNA, 75 bp, Homo sapiens
gcctgtacccttctgctcctttcctggcagcaggggtttcaatgggagggtaccagccagagcagcctaacctgg

SEQ ID NO: 797053 - DNA, 98 bp, Homo sapiens
gtatcataaaattcctctaaatgcaggtctgcggaagagggagctgctgaaggagctgctaccagtcatcgggcagaacctccgattccagcgcctct

SEQ ID NO: 797054 - DNA, 100 bp, Homo sapiens
tcgccttccgcagcgatgcatctgtgagcaatgctggcttcgtcattgactatacagaaatttcggagtgcttcagttggggctgaggagtacatgtatg

SEQ ID NO: 797055 - DNA, 76 bp, Homo sapiens
gaagtgtcacacagcagtcaagtatgtcccaaacgtctaatttcgctaaggagtttgtgatcagtgatcggaagga

SEQ ID NO: 797056 - DNA, 100 bp, Homo sapiens
tcaaatccatcaagctcatcaaaagacaatgcagatcttcgtgaagactctgactggtaagaccatcaccctcgaggttgagcccagtgacaccatcgag

SEQ ID NO: 797057 - DNA, 100 bp, Homo sapiens
tgcccaacagaatttatatagagatgtgatgttggagaactacagaaacctcgtctccctgggccgccagatcccacccttggacccccatgaaaatgga

SEQ ID NO: 797058 - DNA, 75 bp, Homo sapiens
atgggaatttacatcagcaccctcaaaacaggttatgatgtgattgctcaagcccaatctgggactgggaaaacg

SEQ ID NO: 797059 - DNA, 99 bp, Homo sapiens
cggggcaggtgccttacaactacaaccagctggaaggcagattcaagcagctgcaagatgttctcaaatagtgatgaagctgtaatcaataaaaaactt

SEQ ID NO: 797060 - DNA, 89 bp, Homo sapiens
tcgggccagacccaggactctgcgactttactgaaaatgcctcgtgtaaaagcagctcaagctggaagacagagctctgcaaagagaca

SEQ ID NO: 797061 - DNA, 100 bp, Homo sapiens
aatctgctctgagcctgtggcagcctcccctgcaccggcaggtgagaggcggatctacagacataggtacccactgatggtaatgctggcctgctggctg

SEQ ID NO: 797062 - DNA, 100 bp, Homo sapiens
ttgactgttcgtataataattatggctgcaatggaggctctactctcaatgctttgaactggttaaacaaggacatggatttgattgacatactttggag

SEQ ID NO: 797063 - DNA, 96 bp, Homo sapiens
tggctatccagacgctctggtcatactaaagaacacatctggaagacttgcttattatgaaattcgatatcagttctacaagagagatcagcttat

SEQ ID NO: 797064 - DNA, 73 bp, Homo sapiens
ttgtcaccctcatgaatcccaacaccctcatgtcccatggtgtgccagaaacccgaaccctagcggagattgc

SEQ ID NO: 797065 - DNA, 100 bp, Homo sapiens
cccagctcccagcccctccaaagatttactttcccatccgtgactcctggaatgcaggttcatgttgctgaggaggcagagggctgagttcttccatcca

SEQ ID NO: 797066 - DNA, 98 bp, Homo sapiens
aaggcaaatggcgtgcaggcacagatggctaagtcaggtcaattcagtgaagatatgatacccacagtgggcttcaacatgaggaaggtaactaaagg

SEQ ID NO: 797067 - DNA, 83 bp, Homo sapiens
gtggaattttggagatattcaaagattcaggcttcttcaggagaaagcaagtacactggtaccttggactgtgcaaagaagct

SEQ ID NO: 797068 - DNA, 83 bp, Homo sapiens
ccctgaaggagtgacagtctagggaggaaggcagactgcaggtattgggagagttgctgctacatctttaggaaatttgacta

SEQ ID NO: 797069 - DNA, 100 bp, Homo sapiens
tgagaagtacagggagcgagagctggagaagctgggattggagattccacccaaacttgctggtcactgggagctccatggctacatggaaaacaagcct

SEQ ID NO: 797070 - DNA, 75 bp, Homo sapiens
ctagaatcaactgagagagatgcttaaaaatcaccagttactttaatgatggtggtgaccgcggtggcttcaaaa

SEQ ID NO: 797071 - DNA, 51 bp, Homo sapiens
gggaatttacatcagcaccctcaaaacagctgtggatcggtccgtttcatc

SEQ ID NO: 797072 - DNA, 90 bp, Homo sapiens
tgcctgggtgacaatgccttggtttcaacactatcggaatgccattcaaactcctccccacgacactctgaagcagcgacggcacagcgg

SEQ ID NO: 797073 - DNA, 100 bp, Homo sapiens
agggtttgagtccgcatcgccacagctgaaggctgcgagggactaagagcagatatgtggagggatcttttgagaaatacctggaacggttgggagatcc

SEQ ID NO: 797074 - DNA, 75 bp, Homo sapiens
cagaccctgaacatcgccgagtttcggctcaacttgacgataatccctgtatcaaatcagtcacttttatcagaa

SEQ ID NO: 797075 - DNA, 87 bp, Homo sapiens
gccggctaccccgtgagcgccggtgaccagaggccagatctttgtagaatttgatggctgtaactggaagcaacactcctgggtaaa

SEQ ID NO: 797076 - DNA, 128 bp, Homo sapiens
ctttcagccaccattgctaggagtgagcatgagatttctgaaattattgatgggctctctgagcaggagttaattggccttggtcctcacagctccaaaaagaaacaggatctcgataagctctatga

SEQ ID NO: 797077 - DNA, 75 bp, Homo sapiens
ggtgaagcagccagcagaggtcagagagagacagctcacgttccgggttttgagcaaaattttggactgtgaagc

SEQ ID NO: 797078 - DNA, 100 bp, Homo sapiens
tgggattatgcctctgaccatggggaaaagaaacttatttctgttgacacattagaaatgatatttgccaaatttgatgaagtgcaaagttcaggcggta

SEQ ID NO: 797079 - DNA, 76 bp, Homo sapiens
gtccgaggtgccaccgtggaaggacagaatggtctctggacctctgactgacactgtgcctgcccaggtccctgta

SEQ ID NO: 797080 - DNA, 100 bp, Homo sapiens
cagttcttccacaccaccagtgaggcgcttggttccttacttctagagtctggaatatttaaaaaggtggaggccacaagcaggaaagaaaaggccaagc

SEQ ID NO: 797081 - DNA, 50 bp, Homo sapiens
ctgtggattgcaaccttgaatatcttcagtttagatcttggaggcatatc

SEQ ID NO: 797082 - DNA, 100 bp, Homo sapiens
ccttcctgcccttcacgctccaggagctaggggatgagctgaccaagatggaggacgaggatgagcagggctggtgcaagggacgcttggacaacgggca

SEQ ID NO: 797083 - DNA, 82 bp, Homo sapiens
cgggccctcgagacggggacgtgtcacaccatgtctgaccggaaggcagtgatcaagaacgcagacatgtctgaggacatgc

SEQ ID NO: 797084 - DNA, 82 bp, Homo sapiens
cgacaagccgctggcagccgcggatctcaccgccgctcaggagactggctccagctttccttgaaatcctgcagagccttca

SEQ ID NO: 797085 - DNA, 98 bp, Homo sapiens
agccccaggtccagaagtatgatgactcctttgacgacgttgaccgcacactggatgaatggaagctcgtcactgcggacgtcttctttgccataaat

SEQ ID NO: 797086 - DNA, 75 bp, Homo sapiens
atagattgcagcatctccagtgacaagttatgatgtgattgctcaagcccaatctgggactgggaaaacggccac

SEQ ID NO: 797087 - DNA, 100 bp, Homo sapiens
ttggaccttccggagcttctcagaagacagagggttttcttttgaggccaacaagctggcggagaagcggaaagcccacgatgaggcggtgaggtctgag

SEQ ID NO: 797088 - DNA, 50 bp, Homo sapiens
ctcttgttcttgaaaacttaagtacccagttgttgaatgttgggtcacga

SEQ ID NO: 797089 - DNA, 98 bp, Homo sapiens
gccaagcaagaagaaagacgtggcagcaagcgggagtcggggatagtgtcatcggttcgcaggagcgagaacccgagcagcgccatgagcaacactac

SEQ ID NO: 797090 - DNA, 75 bp, Homo sapiens
caataaagagaggcagcttggaagcctctaattgtggcattgtagaaagtatcctgaactgggtgaaatttaagg

SEQ ID NO: 797091 - DNA, 74 bp, Homo sapiens
ctggcccgggcatttctgggacagaatggcattgtgcccatcgtggagcctgagatcctccctgatggggacca

SEQ ID NO: 797092 - DNA, 80 bp, Homo sapiens
ccgccatcagtaccgggcgctcatcaactccgtccaacgtttgaactgatgcgcatgtgctggcagtataaccccaagat

SEQ ID NO: 797093 - DNA, 74 bp, Homo sapiens
gagaggcacccgatatatgttctctaggccttttagaaaacatgtccaaaattgaagacattagagcagaacaa

SEQ ID NO: 797094 - DNA, 74 bp, Homo sapiens
atctcctccatcctgctggccatgctctacgggacagatgccccttggtgtggccactgcaaggctctggcccc

SEQ ID NO: 797095 - DNA, 100 bp, Homo sapiens
ctcaaaagatctgcagagctcccagggcggacagcagcctcgggtgcaatcctggagccccccagtgagggtgaatgttggatgtgtacccaaaaaggta

SEQ ID NO: 797096 - DNA, 100 bp, Homo sapiens
tacgttattacaaaacatttctggaaagacctgtgtttcttggtcaccgggatgagcttgagggaacatacaagatttactgccagaatcatgatgaggc

SEQ ID NO: 797097 - DNA, 85 bp, Homo sapiens
gagaacctctgcaagctcatgaaagaaatcttagataagaaggttgagaaggtgtgcagcaatgacaacaagaccttcgactctt

SEQ ID NO: 797098 - DNA, 76 bp, Homo sapiens
ggcctcctccgcctcctcctctcccgcgggcaccgaggactccgctcctgcccagcttattgcaggagtgaccagg

SEQ ID NO: 797099 - DNA, 75 bp, Homo sapiens
cagtcactggtttgcagagtccagctctggagcctcccagctcaattgcctgggatttatacaagataaaattac

SEQ ID NO: 797100 - DNA, 83 bp, Homo sapiens
ccggcttctcccctacgcgctacacaagtggagctccttttcctccacctaccttcccgaatggactcaccctgtcacccagg

SEQ ID NO: 797101 - DNA, 100 bp, Homo sapiens
gttgacctgcttaaaaaggccaaggtgtttgatttcaccaccatagacttgacatctgagactgatgaaattccagatattatagctttggaagaggaga

SEQ ID NO: 797102 - DNA, 100 bp, Homo sapiens
acaataaaagagacctctacttagctcagcaattcttaccttacgaagggaacgtcatcgtttggaaagcgtcgcaataagacgcacacgttgtgccgcc

SEQ ID NO: 797103 - DNA, 82 bp, Homo sapiens
gtccacccaccgccgccgcctcccaggacttgaaagaggagattgatattcgactctccagggttcaggatatcaagtatga

SEQ ID NO: 797104 - DNA, 100 bp, Homo sapiens
agattaaaaagggagtagatttacttcagaatctgatcaaatactttcatgcccaatgcaacctgagaaatgccagtggcctgacagcagcagacattgc

SEQ ID NO: 797105 - DNA, 90 bp, Homo sapiens
ccattccgaagaataagactaaagaaaacattttggaagaattcagtaaagtcacaggactcagagaccagcagatgtgatatttgccac

SEQ ID NO: 797106 - DNA, 100 bp, Homo sapiens
cttctgggtcacagccaaaggggcttcagaagacagacctctatcatcttcagaagagctgtacgtctctgaccgagagggaagcgatgccacgggagat

SEQ ID NO: 797107 - DNA, 101 bp, Homo sapiens
agatttactggttgggaatccaaagttaatgccaagaagcagccgccagttgggatcaaatgtgagcctatggatcaagacggttacctggcacgctggcc

SEQ ID NO: 797108 - DNA, 82 bp, Homo sapiens
ctcattattaccatatggcccatggaaaagattttgcatctagaggaattgaaatgttatgtgccaagaaccttgcaaagaa

SEQ ID NO: 797109 - DNA, 98 bp, Homo sapiens
gcatggatgacctcattttagatgggcacaatattttagatggactgaggacccagagactgaccttgaagatctggcgcgagctcttctctcctctg

SEQ ID NO: 797110 - DNA, 73 bp, Homo sapiens
caagagcaagatcaccgtgacatccgaggtgcctttctccaaaaggaccatggccaacctggagcgcaccttc

SEQ ID NO: 797111 - DNA, 100 bp, Homo sapiens
tctttggccagaatgagtacctacgctatcaggaggccctgagtgagctggccactgctgtgattcttggagcaaatacccggccagacttggatctccg

SEQ ID NO: 797112 - DNA, 90 bp, Homo sapiens
ccggatcctggatgaggaggtgtttgagagtgcctggaagagctgggatgtctggttgagtcctatggcatgaatgtttgccaaccaacc

SEQ ID NO: 797113 - DNA, 90 bp, Homo sapiens
ctagaatcaactgagagagatgcttaaaaatcaccagttactttaatgaattgccttgggtccccagtgtttactcccatcaaggcagac

SEQ ID NO: 797114 - DNA, 83 bp, Homo sapiens
gttgagaagtttattcagaaagaagtagtcatgccccacaagatgtcagtttgtcatatccccaacatcatgttggaaattca

SEQ ID NO: 797115 - DNA, 100 bp, Homo sapiens
acaccctgagtggcttctccagagaaatgaaatcattgcagtacctcaacctgaggcgaggaggatggccgagaccagtccaggttggagacccaggtgt

SEQ ID NO: 797116 - DNA, 82 bp, Homo sapiens
tgcaatctactctgacatatcagggttacccatgcagttgttactgtaccagcctattttaatgatgcccaacgccaagcaa

SEQ ID NO: 797117 - DNA, 80 bp, Homo sapiens
agcccaaggctgtcagcctcccggcccagataacgaaggaggcccaacttcattcaataaggagcctgacggatttatcc

SEQ ID NO: 797118 - DNA, 100 bp, Homo sapiens
aagatgtggtacaacctcttaccctgcaagttcagagacccctggtctctgtgaccggccagtggtggccgaacttgctgcctcgccccctggaggcgtg

SEQ ID NO: 797119 - DNA, 82 bp, Homo sapiens
ctatgataagctgagcagagccctgcgatactattatgacaaggcattaaacgtcgtctttgaaaaaatcccggaaaacgag

SEQ ID NO: 797120 - DNA, 100 bp, Homo sapiens
ttcctcaatcctgagagagagaattaaagtctaactctccaaatattacctctctagtgacccttcagctgttaaccctggttggccatgacgatcagct

SEQ ID NO: 797121 - DNA, 88 bp, Homo sapiens
cactttccggggtgcacagcaagtgataatgagtgtgtatatggcaactaccctgaaatacctttggaagaaatgccagatgcagatg

SEQ ID NO: 797122 - DNA, 75 bp, Homo sapiens
aaagccttgatagcatggatttctgtgagctcactgtatggcgtgagtcccgagaacattatcctctatggtcag

SEQ ID NO: 797123 - DNA, 100 bp, Homo sapiens
agatgggtacatcacggcttctctcccacgttaagacttaataaaggtgaccatagccgatgactactcagatccctttgatgccaagaatgatctcaag

SEQ ID NO: 797124 - DNA, 75 bp, Homo sapiens
ggcggctccaacagcaatcacagaagcaggaacacagcctcagaagggtggagttttgggaatgcacttggaaac

SEQ ID NO: 797125 - DNA, 83 bp, Homo sapiens
ttccaaaaacagtggataattttgtggccttagctacaggagagggtccagtgtccatcaaagtccaggtgcccaacatgcag

SEQ ID NO: 797126 - DNA, 75 bp, Homo sapiens
agcacctggatgagacatttgctacagcatcccacattaagtcaacgataactgttcccaggaaaaaaaggagga

SEQ ID NO: 797127 - DNA, 100 bp, Homo sapiens
gttcgtccgcggagatctctctcatctcgctcggctgcgggaaatcgggctgaagcgactgagtccgcgatggaggccctgggcagtgacggggttcggg

SEQ ID NO: 797128 - DNA, 75 bp, Homo sapiens
tttcagagcgcagccatcggtgcgctgcagccaggcccagacatgtccgtccttgtaagttaaaagcttccatgg

SEQ ID NO: 797129 - DNA, 100 bp, Homo sapiens
cgttgacaaggcactgctttttcatgacgttccaggaaggatgttacctttgacgatgacagtgttaatcctgctgctgctccccacgggtcaggctgcc

SEQ ID NO: 797130 - DNA, 96 bp, Homo sapiens
cgccggaagcgccaggacaatggggacccgggacgacgagtacgactacctattcaaagacatgtccttcgataactccctgtttaccgtctccgc

SEQ ID NO: 797131 - DNA, 98 bp, Homo sapiens
gcagacccagctacgtggactagaggttgagcaatgtttaaagcgtttgaaaaacatgaatttggagggctcaattcaagacctgtttgagttgtttt

SEQ ID NO: 797132 - DNA, 100 bp, Homo sapiens
ccgaaaacggaagcgcagggagaaggaagaggtgtttgaaaaggacactgcccatctctaagataagaacctggaaaggggactctgttggccattggaa

SEQ ID NO: 797133 - DNA, 100 bp, Homo sapiens
ctgtggagagcccgtccgacagcgctgagggtcggtgtacccgagagaactgcaagtaccttcaccctcctccacacttaaaaacgcagctggagattaa

SEQ ID NO: 797134 - DNA, 82 bp, Homo sapiens
ggattcgccgaggcaccgaggcactcagaggaggaatggtcctcgtccgaagtgagaatgggcagttgttaatgattcctca

SEQ ID NO: 797135 - DNA, 75 bp, Homo sapiens
gcagcaaggacaaaaacctgatttggacttcagtactagtgctaataacatccagattgataaaaccaagccttt

SEQ ID NO: 797136 - DNA, 98 bp, Homo sapiens
ctaagtcccacagagacgggagtcgggtgggatcccaggctgggccccgcggcggactcacagatgaatgcttctcacccggaaacaaacttgccagt

SEQ ID NO: 797137 - DNA, 100 bp, Homo sapiens
cgccggtctccgcggaaatgttgtccaaagttcttccagtcctcctaggcatcttattgatcctccagtcgaggtctgagttcactgacaccatcctgtc

SEQ ID NO: 797138 - DNA, 75 bp, Homo sapiens
ctggagccatccaacatttagctgggatgaaagacagcaagatcatggaagggaagtggttgctgtgtatgttac

SEQ ID NO: 797139 - DNA, 88 bp, Homo sapiens
ctgctgctctgctgggacccgaggctgagccaagcaggaactcgaatcatttatgacagaaagtttctgttggatcgtcgcaattctc

SEQ ID NO: 797140 - DNA, 99 bp, Homo sapiens
gatgctgatggtgatggagattttgatgtggatgatgccaaagttttattagagtcgggccacaaaaagttaaaaagtaccatccagagaagcacagaa

SEQ ID NO: 797141 - DNA, 90 bp, Homo sapiens
atttcctgccggccggtcggtttccggatgaaacgaggagccaggagtggctgtaaggtgaagaagcatgaaactcagtctctcgccctg

SEQ ID NO: 797142 - DNA, 98 bp, Homo sapiens
ggagcagctgcgtgagtggagatgctttcagtggtggagaatggactggacccccaggctgccatcccggaagagagagaaaatccttcaaaacggag

SEQ ID NO: 797143 - DNA, 99 bp, Homo sapiens
gtggaattcattgaaaagtcagactccgagtggtcgttccaggatatcttgaaaagcccagatgacatgaagaatgcttacaagctgcatactttggat

SEQ ID NO: 797144 - DNA, 90 bp, Homo sapiens
taagaacttctgcactagagatacatgagtacagtatactgatctttctgggatagaggaccctgatgctcccataagacagaaaatgcc

SEQ ID NO: 797145 - DNA, 100 bp, Homo sapiens
cctccgcagagaccgtgcttatcacccagcagagccacgaggagctgaagaaggttctagatgctaacaaggtggtggctggattgaactttcgaattac

SEQ ID NO: 797146 - DNA, 76 bp, Homo sapiens
gaggcgttgtcatcaataagcccattgctcaccatctcttaaatcggatcatccagcagctcgtcaacggcatcat

SEQ ID NO: 797147 - DNA, 87 bp, Homo sapiens
gaacgaggcaaggagctaaagcagcgtgcgttcagccctggggctgcctgctgtttcccggggagatcatgaaacgaggtcgccttc

SEQ ID NO: 797148 - DNA, 83 bp, Homo sapiens
cccaggcagagatggtgatgtaggtcttccagtagagacaagagtttttccatgtaggcccggctggcctcgaactcctgacc

SEQ ID NO: 797149 - DNA, 100 bp, Homo sapiens
agagacatactaatgtacatgcttctgcagaaagccgtcattacacctgattttgaaaaaaaccactgtgttccaccatatagtgaatcaaagtatcaac

SEQ ID NO: 797150 - DNA, 73 bp, Homo sapiens
tcgaaatatggcaactttgaaagataccaagattctacattgctcatctgggcatctgagcctccttcgaagt

SEQ ID NO: 797151 - DNA, 75 bp, Homo sapiens
gaaagaaagagccctggactgtgaagagtgaggagaccatagctgcacagccagctcttggagcagtcggagtgg

SEQ ID NO: 797152 - DNA, 98 bp, Homo sapiens
cccgcgcagcgtctggtcactcgctctcctctggggactgcagagaagcaggacctcgggccatgggtcatggaaaatggaagatttgcaaaatacaa

SEQ ID NO: 797153 - DNA, 100 bp, Homo sapiens
tcaccatacaggcaacaacacattcagagtggtgggcaggaagattcaggaccatcagccccatctgtggggagtctctccccctcagcagtggctctgg

SEQ ID NO: 797154 - DNA, 100 bp, Homo sapiens
tatgatgctgatggtgatggagattttgatgtggatgatgccaaagttttattagagaatgtaactggtcactacatttccccctttcatgatattcctc

SEQ ID NO: 797155 - DNA, 74 bp, Homo sapiens
ttttgcaagccgaatctggactgtggatgattatcgattacggtcatatttgatcagaaattggatgaaccttc

SEQ ID NO: 797156 - DNA, 90 bp, Homo sapiens
gtctctgccaccccagcagccctacatcgcggggcagcagcccatgtaccagcagggcgccatgttttggaagtttgacctgcacacaag

SEQ ID NO: 797157 - DNA, 51 bp, Homo sapiens
atttattaagctggaaactaaagatgttaccagatgtatgctactcatggt

SEQ ID NO: 797158 - DNA, 78 bp, Homo sapiens
gggggtgaccattaaacaggagcagaacttggaccagacctacttggatgatggctgcagaagatgtcaatgttactt

SEQ ID NO: 797159 - DNA, 88 bp, Homo sapiens
gtttgcggttcagccctttgatgaccgcagcaggtggtctgtttttctggggggccaccaacacctcccgtgaatctaccatgtaccc

SEQ ID NO: 797160 - DNA, 100 bp, Homo sapiens
tagttctggaccccggcggaatcgggataccatgatgagtcttctgaagactgtggtcattgtgcttgatcagcttgaacgggtctttttacgacttggc

SEQ ID NO: 797161 - DNA, 83 bp, Homo sapiens
gggagacacatgcacaagacagccagaagcggactcctagaagaggggagcagcaaggatggaatgacagccgtgggccggag

SEQ ID NO: 797162 - DNA, 83 bp, Homo sapiens
ggcacgtgtcagagaatttgacgactgtacaatttgttcaaggaatttttgtagaaaaatacgatcctacgatagaagattct

SEQ ID NO: 797163 - DNA, 100 bp, Homo sapiens
gagattgtgaagaagaatttcgatctccgccctggggtcattgtcagggggattcccgaagtcttccgttttctgagaatgtgagtgctgttcaaaaatt

SEQ ID NO: 797164 - DNA, 82 bp, Homo sapiens
aggagctgtgcagccgcgaggaggcgcgggaggtgttcgagaacgaccccgagacgcatcaagatggtgctcatgtggacca

SEQ ID NO: 797165 - DNA, 83 bp, Homo sapiens
cttccccacctgcccggtgcccgaggaggcagccaagctcgtagcctgccactccgtgctaagactttgaccccgacgcaggc

SEQ ID NO: 797166 - DNA, 74 bp, Homo sapiens
ggattgtggcagccagatatcgggccatacggaggactgctgaacgtggtggctggcgcccatgcggctctaca

SEQ ID NO: 797167 - DNA, 90 bp, Homo sapiens
cgggccgtgaacgaaagcagtgacggaggagcttgtaccaccgagccattggaacatccgttaatcagcagcccttcctttttttccaaa

SEQ ID NO: 797168 - DNA, 90 bp, Homo sapiens
cttggggatcctctgtacgcccgttcactgctgtcttgtcgacggtctcactgatgcctcttctgcattcaaagttcctcgacccgggcc

SEQ ID NO: 797169 - DNA, 85 bp, Homo sapiens
cggaggcggaggcagaggtggaggcgctttgaaaggccttctctgactaccagatccagcagatgacagccaacttcgtggatca

SEQ ID NO: 797170 - DNA, 100 bp, Homo sapiens
agcactgactttcagctatggaatcggaggactgacaaatggtagtggtcgatatatctctgcagcacctggagcagaagcaaaatatcgaagtgcttca

SEQ ID NO: 797171 - DNA, 100 bp, Homo sapiens
catgatccaccggcctcggcctcccaaagtgctgggattataggcgtgagccaccgtgcctggctgaagatatttggagttcttacaacatggcagacat

SEQ ID NO: 797172 - DNA, 75 bp, Homo sapiens
tgggaacattcctcataaagcgagtcgtcaaggagttgcaggagagcgaagaggaactttactcctcctgtcgcc

SEQ ID NO: 797173 - DNA, 75 bp, Homo sapiens
tggagggtcaaagaaactcctggttgagctcaaagttattttacattctttcagcttatgtggagaagtcgctgt

SEQ ID NO: 797174 - DNA, 100 bp, Homo sapiens
cagaccttcaagatagacattgaccccgaggagacgttggcttcctgaggctcaggtagtccaaagagccctgaattctgcggctaacaacgtgtatcag

SEQ ID NO: 797175 - DNA, 75 bp, Homo sapiens
cggtactacccaaacgtcagtcgaatcacaggcaggagggtaagcttgatgattaccaggaacgaatgaacaaag

SEQ ID NO: 797176 - DNA, 101 bp, Homo sapiens
tggacttcacgaggcctgggacggctgagggtaaaaagctgggattggtaggctgggtccagaacactgaccggggcacagtgcaaggacaattgcaaggt

SEQ ID NO: 797177 - DNA, 82 bp, Homo sapiens
ctgcggcggagggaaaaaggaagaggagaaggaaattgtcccgaatccctgcagacaatgcagatcttcgtgaagactctga

SEQ ID NO: 797178 - DNA, 96 bp, Homo sapiens
tctgtggatgttcttgctttcgtggtccacacttacagccagctggcccaccccatccagcaggccaaggcactgggtctccagttccattctcgc

SEQ ID NO: 797179 - DNA, 100 bp, Homo sapiens
gtctgcagccctctgcccaagctctcatctacttccgggattccagcttcctcagatggagcaggcctttgcccgatacttgctggagcagactccagag

SEQ ID NO: 797180 - DNA, 88 bp, Homo sapiens
tctgcccattgatagaggccagattgtcttggaagttccaaagttgcaacgatttctgattaaactgcaaatatctcatgaagctgct

SEQ ID NO: 797181 - DNA, 50 bp, Homo sapiens
cgtggagatcgtcccgcgcctgccggattgacttggcctctacttcttgt

SEQ ID NO: 797182 - DNA, 83 bp, Homo sapiens
cgtcttcctcaaggtggggttcggggggccaccgaatcgctgtcacgccggcagctcatgatggagcagtccaagaagtcctc

SEQ ID NO: 797183 - DNA, 74 bp, Homo sapiens
ctcgggagcgacccgacctacagctccaggaccggtttaagttactgagccaggaggaaggcgagtacttcaat

SEQ ID NO: 797184 - DNA, 75 bp, Homo sapiens
cgtttgtgccaaagtggacgctgccaacagggtgccttcaaatctcttgacaaagatggcactggacaaatccag

SEQ ID NO: 797185 - DNA, 100 bp, Homo sapiens
gtggcgagaggtgcggcgaaggaggcagaggcacttatgcttgtcaggtgaccattgtgaggtagatattttgttctaattttccagatgaggaagctga

SEQ ID NO: 797186 - DNA, 100 bp, Homo sapiens
cagagtgctcctcattaagtgctgtctcccccagcgaatcggtggccatgatctctaggtttgactttacacataaaaaacaatcaggtggtgcaggcca

SEQ ID NO: 797187 - DNA, 82 bp, Homo sapiens
aaaaagaagattcgggacacacagaaatataaacctttcaagagtcaagtaaaggtaatggaactgctggtccatctgaata

SEQ ID NO: 797188 - DNA, 83 bp, Homo sapiens
aacgcctcccggctctcgtcagcctcccgccggccgtctccttaacaccgaacacccatcttcatgatacagttaagaggaat

SEQ ID NO: 797189 - DNA, 100 bp, Homo sapiens
gtggagtcggctgagggaaaagcgaggcaaggcaggcgggtcccccggcagagggcagtagagatggccggcccaaggcctcggtggcgcgaccagctgc

SEQ ID NO: 797190 - DNA, 90 bp, Homo sapiens
gttcagaaggcgctgggtgggagctcttgcctctgtaactatccccaataccacgaggaacccgaggcccggcgaggagaacggcaaagg

SEQ ID NO: 797191 - DNA, 100 bp, Homo sapiens
gtgatgaagagatgagtttgtttacagctgttgtcctggtatctgcagccagagactgctgctactttgaaacgtacgatagaggccctgatggacagag

SEQ ID NO: 797192 - DNA, 90 bp, Homo sapiens
cgaggcttgaggtatattcattcaatgtctttggttcacatggatataaaacctaaccatgctcgacagctgaccaaggccatgatgcga

SEQ ID NO: 797193 - DNA, 100 bp, Homo sapiens
atgaagtagtctatccaccacctgtggatcccaagaagctgattgattctttagagatttcaaatatgcgtgcattagagaatgattttttcaattctcc

SEQ ID NO: 797194 - DNA, 74 bp, Homo sapiens
agcccaaatatcctcggaagagcgctcccaggagaaacaagttgggggccgtcccgctcctaaggcaggaagat

SEQ ID NO: 797195 - DNA, 101 bp, Homo sapiens
aacttgcctgctctctacactattttccaaggagaggatacaatgtctctttgctatatgaccttgaaaatcttccggcatccaaggattccattgtgcat

SEQ ID NO: 797196 - DNA, 98 bp, Homo sapiens
gggcatgaagggctttaagggacagctgagccggcaggtggcagatcagcttggtttatggcagctccaggacctcgcaccccgagacggacatctta

SEQ ID NO: 797197 - DNA, 78 bp, Homo sapiens
cgaggaggcagccaagctcgtggcctgcctctgcgtgctggcccgttgccgacaagccctggtgccgcgtgccttcca

SEQ ID NO: 797198 - DNA, 50 bp, Homo sapiens
ctcagtgccagagtccatgacaattaaacctaaaggcagacccagaagag

SEQ ID NO: 797199 - DNA, 83 bp, Homo sapiens
cctgagcctcgcgttgcagcaagagagatgaaggagcatcagatccatgctgctgctgactcggagccccacagcttggcaca

SEQ ID NO: 797200 - DNA, 75 bp, Homo sapiens
atccaggatctcagccatgtgaccctgcccttctaccccaagagcccacagtatgggcactaggaaaagacttct

SEQ ID NO: 797201 - DNA, 75 bp, Homo sapiens
agactttctccttcaagtacttggcagatcactctcttagcagaaatggaatctatttggaatttgcagaagcaa

SEQ ID NO: 797202 - DNA, 50 bp, Homo sapiens
ctgaggatgacaaaaaagccttcatagactgcggcatgaatgtgcaccat

SEQ ID NO: 797203 - DNA, 100 bp, Homo sapiens
tccgtggagctaacagggatgtccgcaactacaacagccagacagccttccagtggcgagctttcctgcccggcctgaagttcgaggtcatcagctctgc

SEQ ID NO: 797204 - DNA, 74 bp, Homo sapiens
tttcccatccgtgactcctggaatgcagcaaacccgctggttcagaaccaacacctaagtcacgcattgcagac

SEQ ID NO: 797205 - DNA, 100 bp, Homo sapiens
tcattccaattgaagttgctatgaagaggtacttaggaaatttcgagcacatgagaccaacctgcttattgcaacaagtattgtagaagagggtgttgat

SEQ ID NO: 797206 - DNA, 99 bp, Homo sapiens
aggacgagctccgggatgctgtactccttgtctttgcaaacaaacagaatctggcagcagaaaagacctacaacaacctagatgtatctgtgactaaag

SEQ ID NO: 797207 - DNA, 50 bp, Homo sapiens
cgcaccgctgtcaagctcaacactggggactcgggtcaagctggaaagcc

SEQ ID NO: 797208 - DNA, 90 bp, Homo sapiens
ctcagtagtccgaactctaatatgagcagcatggtagttacagattgcagcaaaaattggaggtgatgcagggacatcactgaattcaaa

SEQ ID NO: 797209 - DNA, 83 bp, Homo sapiens
atgcaggccgccgccctccctgaggagatccgttggctcctggaaggatggacactccacagctgaccttgactgaactccgg

SEQ ID NO: 797210 - DNA, 75 bp, Homo sapiens
caaaataggaaaatggcagcaaactcttcaggacaagcggggatctgatgagcttctttcttctggcatcattaa

SEQ ID NO: 797211 - DNA, 82 bp, Homo sapiens
ctcttctacatatgaggcgcatctgcttggtgcaaatgtccaagcacctcttctgactcgggggatatgagactttctactc

SEQ ID NO: 797212 - DNA, 149 bp, Homo sapiens
gaggaaagtgacgcccttggagtgaggcgagcagcacagagacggctgaaagctgagctaggaattcccttggaagagatatttgttcagtcgaatcaaggtgaagaggaaacaacaagaatttcatattttacttttattggtactcc

SEQ ID NO: 797213 - DNA, 87 bp, Homo sapiens
agttactgcacggaaagcagcgtcaggagccatagtacctacagcagcactccagctgtgctgtcgtcatgcctcaaacccgatccc

SEQ ID NO: 797214 - DNA, 75 bp, Homo sapiens
ggccaggcagggaggagaccggcacccagacaggtggcgaaggcagaggaagttgtctgctggttctcagcttga

SEQ ID NO: 797215 - DNA, 75 bp, Homo sapiens
aacttatcagtagtgacttacagtaagatgagacaaacagatcgggatgtaataacagcattaactcacagacct

SEQ ID NO: 797216 - DNA, 100 bp, Homo sapiens
aggaagtaccaggacttgcacagagacggtaaagaacaggtccaagaaaagctcaaagaaagcaaataccagcagcagcagtagcaacagcagcaagttg

SEQ ID NO: 797217 - DNA, 75 bp, Homo sapiens
aaaggagctgcttcccaataaggaaacagtctccacctctgggcaggagagttgccgaccacctcgggggtgctt

SEQ ID NO: 797218 - DNA, 82 bp, Homo sapiens
gctgcggccgccctgggccgggccccaccggacgcggggatctgacgagcttttctctacttgtgtcactaacggaccgttt

SEQ ID NO: 797219 - DNA, 57 bp, Homo sapiens
catgacgcatggcaacaccggattcagtgaaagccccaaggaaagctcagagccaac

SEQ ID NO: 797220 - DNA, 50 bp, Homo sapiens
tataaccgccactggatctgcgctgtgcgatcgggaaaaagagctaatcc

SEQ ID NO: 797221 - DNA, 100 bp, Homo sapiens
tagggaggacggcggaacatctggaggctgggaaatgctcctttagcggcagagttttccgagtgaccttcttgatgctggctgtttctctcaccgttcc

SEQ ID NO: 797222 - DNA, 50 bp, Homo sapiens
aatgaaagcatctggtacaatggcaagaatttgccattttcagtggaaaa

SEQ ID NO: 797223 - DNA, 75 bp, Homo sapiens
gacttcggaatgcactacaacaggaaaatcatattatagatggagtaaaggtgatctttgcagagctgtttcaac

SEQ ID NO: 797224 - DNA, 89 bp, Homo sapiens
tcgcttggcgctgggcagcttcgtggaggagtacaacaacaagacttattctggactcttctgtgtagttataaacccttacaagaatc

SEQ ID NO: 797225 - DNA, 111 bp, Homo sapiens
ctttacccagaaaacaagaaaaattcactgtggtccagaagcagatatcggtgaggcgcctgtgtctggcagagctggtgtgagacgagacaatcctgccccgccgccggg

SEQ ID NO: 797226 - DNA, 101 bp, Homo sapiens
ctcgccaaactgcaggcacaagtgcgcattggtgggaaagaacagcatatgccatatatgagctggctgtggcttcatttcccaagaagcaggagtgactt

SEQ ID NO: 797227 - DNA, 100 bp, Homo sapiens
tctgccaccatggaagggctcctgtctccgatgaggacgaagtcagaaaaagtggacagggcagtgctgaaggaactgagtgaaaaactggaactggcag

SEQ ID NO: 797228 - DNA, 76 bp, Homo sapiens
gcctgtctggctcctttctctacacaggagacttcctctgctaaattacctcgctgccgacagggaggctgggcag

SEQ ID NO: 797229 - DNA, 90 bp, Homo sapiens
ggaaattatgaccaagtacctcaccccaaagaaactggcgatggaatatgagaggagccctctggaaagaaaaggacagaccctgtgctt

SEQ ID NO: 797230 - DNA, 88 bp, Homo sapiens
ggcgtcctggagccctcctcaggtgaccaaaagccagccccactgtgagttgaactctttcgtgttgaccggccactctccgtgctct

SEQ ID NO: 797231 - DNA, 95 bp, Homo sapiens
actgctggctgtgtgtgctgcaaaccgagacaagttcaccccgaagtctgccgtggtacaggagctgcagcaggccatctccaagctggaggccc

SEQ ID NO: 797232 - DNA, 82 bp, Homo sapiens
tgaaatcagagatccttcggaagcggcagctggtggaggacaggaacctgctggtgtttaagctatgaagaaggacatccct

SEQ ID NO: 797233 - DNA, 100 bp, Homo sapiens
ttgccggcaagagggagttaaggacattccaggcagaggcaagacaaaattgcttacccagtacatattaaatctcggcaagtatgatcaaaactacgac

SEQ ID NO: 797234 - DNA, 75 bp, Homo sapiens
cgtcttcagcagggcagtgaccgagtacaccttgcagggagacctgtcatttactccatcctttatagtgatgct

SEQ ID NO: 797235 - DNA, 89 bp, Homo sapiens
gccaatgaccgtggaggagtaccgcatcgcccagctgtacatgatacagatgacaagagcacctcaaaggcagcagcctcaaggagcag

SEQ ID NO: 797236 - DNA, 98 bp, Homo sapiens
ggcggccgagctgcggcagagcgtgtctgaggtggtgcgcggctccgtgctcctgagctcttcagtatccccatcagccagtttccgaggtgctgaga

SEQ ID NO: 797237 - DNA, 101 bp, Homo sapiens
ccctggcaaacactggaatcctactttttctaatacaaatggagagatttgcatgggatgcagaaatatggaagactaaccaagcagaccaggagagacca

SEQ ID NO: 797238 - DNA, 100 bp, Homo sapiens
aatatggaaacttggatgaataattttcatactctcttaacattggataataagcttttacaaactgatttatcaggaactgttgccgttattacatcag

SEQ ID NO: 797239 - DNA, 50 bp, Homo sapiens
tgctgacaatcgagcaaggaaacctggctttggcagcatgtaagcagctg

SEQ ID NO: 797240 - DNA, 74 bp, Homo sapiens
cgagatggtacaggttatcttcagtgtgtcttggcggatgagttggaacaggagtacagctgtgtagtaaagat

SEQ ID NO: 797241 - DNA, 90 bp, Homo sapiens
tgccctttactgcccctgcttaacacggtcaagttcctgctgcttttctacctgaagaagctttgcttgtgccatctgcccccatcgacc

SEQ ID NO: 797242 - DNA, 75 bp, Homo sapiens
tcctgaggcctccccagccacgctttctgtacagcctgcagaactgaaactcgaactatctaccagtttcattac

SEQ ID NO: 797243 - DNA, 74 bp, Homo sapiens
ctcgctcaagatggcggcgcagccaccccgcgggatacgcctcagcgcggccataaaattttgagtagaaaaat

SEQ ID NO: 797244 - DNA, 83 bp, Homo sapiens
gtgacaacaccgttcccccagccgggctgagtgaagacatttccacctggacacctgaccatgtgcctgccctgagcagcgag

SEQ ID NO: 797245 - DNA, 100 bp, Homo sapiens
aagtgatatcactgcctctgtggacaagacacctccaggagcccagctcacagccaccggtaccttcttccaggtttgttggagactgaaccgttgcaag

SEQ ID NO: 797246 - DNA, 75 bp, Homo sapiens
gggtcatccttcatccccggagagccttttccccacgactctgaaagaggacagcgttcccaatgtcccagttta

SEQ ID NO: 797247 - DNA, 83 bp, Homo sapiens
cgcggattcgccgaggcaccgaggcactcagaggagcttgcagatcagttttgtaatgccattggagtattgcagcaatgtgg

SEQ ID NO: 797248 - DNA, 99 bp, Homo sapiens
gctagctctgagcagatgcggactctcttcggtttcctaggcaagatcgacgaactgcgcctcttcccgccggactttaatgcaacggcagaagcttaa

SEQ ID NO: 797249 - DNA, 74 bp, Homo sapiens
tggggccagggaaccctggtcaccgtctcctcagatgtcagtattgaatatggtggtgaggcgtgaccctggca

SEQ ID NO: 797250 - DNA, 75 bp, Homo sapiens
gagtcaccttttagcccgggactctttcacaggctggatgaagattgggttcatagccctgatgaagcaagttac

SEQ ID NO: 797251 - DNA, 82 bp, Homo sapiens
cacctggagaccttcgagcaccccaacgtggtcagacagtactactggtatgacgagcgggggaagaaggtcaagtgcacgg

SEQ ID NO: 797252 - DNA, 75 bp, Homo sapiens
gaccattggatgatgcattagattcctctagtattctctatgctagaaagggtgccattattatccatgaagttt

SEQ ID NO: 797253 - DNA, 50 bp, Homo sapiens
gtcatggacaagagctattgatagaagaattctgcttggtcagaatcgtg

SEQ ID NO: 797254 - DNA, 98 bp, Homo sapiens
tggcagcccagaattttttctgtgccggctgtggaactccagtagagcctagagccatgtggctagaaatcctcctcacttcagtgctgggctttgcc

SEQ ID NO: 797255 - DNA, 83 bp, Homo sapiens
ggaataagaagcagcaacccacccaagcagcggacactgcccatctctaagataagaacctggaaaggggactctgttggcca

SEQ ID NO: 797256 - DNA, 100 bp, Homo sapiens
cccggagcacccgacccctgaccttcgttcagaaaaacctggtctatggcacaactaaaaaggtttgccgcagacccaaatacgtgtctccccaggatgt

SEQ ID NO: 797257 - DNA, 80 bp, Homo sapiens
gttttcttatgcttataagagtggaacaggtaatgagaatcttcgccttgcgtaatctcaggggcgatataatcaatgag

SEQ ID NO: 797258 - DNA, 51 bp, Homo sapiens
gatggagtgcctccaaaggttgctgagttggatttgatcacggatctgttg

SEQ ID NO: 797259 - DNA, 88 bp, Homo sapiens
cagaattacactgaagaagtagagtatttcaaccataaagacatcttaattgggcacgaaagaggccttccggagcagtactacagcc

SEQ ID NO: 797260 - DNA, 82 bp, Homo sapiens
caccatgtcagacgcagccgtagacaccagctccgaaatcaccaccaaggaacaagatcactcaaggtgaaggataatctac

SEQ ID NO: 797261 - DNA, 100 bp, Homo sapiens
tgcctaaatgaggaatgtctttcctaccatctaaaatacgaaggtttctggctggacctcagaatatattattcaagcttacaaatatggtgcatttgag

SEQ ID NO: 797262 - DNA, 51 bp, Homo sapiens
ggtcggaatcagatttgaaaatgaaagtgtcaaaatgcagatcttcgtgaa

SEQ ID NO: 797263 - DNA, 90 bp, Homo sapiens
agctatgacattgccaagatatcccatgactgtgaagtgctgaccacactcaccccagacactggccgtatcctgtccaagctacatact

SEQ ID NO: 797264 - DNA, 100 bp, Homo sapiens
tgtattttcaactctgggatcacctgatcatttcaacctgatggccaaaagaaaggaagaaaatttttcctctcctaaaaatgccaaaaggccaagacaa

SEQ ID NO: 797265 - DNA, 50 bp, Homo sapiens
ccagagacacctcagtggatcagaggagggcagtctgaagatggccaatt

SEQ ID NO: 797266 - DNA, 100 bp, Homo sapiens
ccgggaaaacaagacggccgtggttgtggggaccataactgatgatgtgcgggttcaggaggtacccaaactgaaggaggataagatcaatgccctcatt

SEQ ID NO: 797267 - DNA, 75 bp, Homo sapiens
tgcatctccgccagtccgcgcagcttaaagcttttcaagccaggccaagaagctgtgaagtaccagggtcctcgg

SEQ ID NO: 797268 - DNA, 83 bp, Homo sapiens
aagaaataaaaggacagatgcaaatgaaagctcttcttcccctgaaatcagagtcgggtttctccattcaaggacatgatttt

SEQ ID NO: 797269 - DNA, 74 bp, Homo sapiens
gaccccagatgtctgacagccctgtgtgacaccaagataagtaacgaggagatgttaaagtaacccatcttgca

SEQ ID NO: 797270 - DNA, 75 bp, Homo sapiens
caactttctggcttttgaaaggctccttcttcaggttgctgcagcaactggtcacacagtagtgttggtagacca

SEQ ID NO: 797271 - DNA, 73 bp, Homo sapiens
caaatgtggaacctatggaaaagatcaccggcgtaatcaacccagcgttggacaaatactttccgtcagactc

SEQ ID NO: 797272 - DNA, 96 bp, Homo sapiens
ctcggagggagcccggcggcttcgggaggaattttgttgtcagagaataaaaggaggttgtccataattgactttaagcagcaatcagtaaaacat

SEQ ID NO: 797273 - DNA, 99 bp, Homo sapiens
actcccttctgtgggttttgaaaaaagcaatattggcataagtatagagtccctgtcgcccaggctggagtgcaatggtgcgatctcggctcgctgcaa

SEQ ID NO: 797274 - DNA, 83 bp, Homo sapiens
ggaacagggacagcacctcatcccctggatgggggaccacaagatcctcatcgacaggttctgcggggagtgtctccagccct

SEQ ID NO: 797275 - DNA, 74 bp, Homo sapiens
ccagatgtgcaacaaagtgcgatggattgtctcaaagcttgccaggagcagattgaggcggtgctcctcaatag

SEQ ID NO: 797276 - DNA, 100 bp, Homo sapiens
gatcaaatagatgaaaacctgaagcaagctctgcagaaagacttaaacctcatggccccaggtctcactatacaggtccggtggcagccttcaaggtcgc

SEQ ID NO: 797277 - DNA, 98 bp, Homo sapiens
ggagctgcagcaagcgggagaccaggagctcctccaccaggccaaagacttcggcaacgcaaacatgcagatctttgtgaagaccctcactggcaaaa

SEQ ID NO: 797278 - DNA, 75 bp, Homo sapiens
gagctcttcctgcctggaatctgtccaagtggtaagaagttcagaagcaagcctcagttggcaaggtacctggga

SEQ ID NO: 797279 - DNA, 83 bp, Homo sapiens
ggatgagtcatgtggcagtggaaaatgcgctcgggctggaccagcagtaaaatgtttattggaggcttgagctgggatacaag

SEQ ID NO: 797280 - DNA, 50 bp, Homo sapiens
gtggactagggtcgccggggaagcggtgttggacaagtggtgaatatcaa

SEQ ID NO: 797281 - DNA, 96 bp, Homo sapiens
gggacatcagtggagccttctcagacccacagatgtctgatgatattgactggttacgcagccacaggggtgtgtgcaaggtagatctctacaacc

SEQ ID NO: 797282 - DNA, 75 bp, Homo sapiens
aagaatgtttttgaccagaaaaccgacaaccttcccagaaagtccaagctcgtgtggcctggtttgctttcgacc

SEQ ID NO: 797283 - DNA, 83 bp, Homo sapiens
aattgatttgctcttacgtatttgtgtgacttgactcttcaaacacaaaggatattagaaatggctactccccagtcaatttt

SEQ ID NO: 797284 - DNA, 75 bp, Homo sapiens
ggcaggggaggaagccacctcgaggtaccttgtggtctataatcctttagaacaagaccgaatctcgttggtctc

SEQ ID NO: 797285 - DNA, 90 bp, Homo sapiens
gccgccgccgcagagccggagcgggggccgccggcgccgctgacagcagccatggcgagcggcagtggagacagcgtcacccgtcggagc

SEQ ID NO: 797286 - DNA, 76 bp, Homo sapiens
cgcgtccgaggctcgcgggcggcgggcccggaatatatacagccctgctctgggacacacctccattggatttaaa

SEQ ID NO: 797287 - DNA, 82 bp, Homo sapiens
gaacatgtggaaggtgcgcgagctggtggacaaagcgcgttcccacagctgtgcagaacttagcgccacgcgctgctgttgc

SEQ ID NO: 797288 - DNA, 51 bp, Homo sapiens
gtttagccaacccaaattaccttaattaatcatgtcaaccctgccatggac

SEQ ID NO: 797289 - DNA, 49 bp, Homo sapiens
aggcagccggctacttcaccatgttcagaatgaccgaagaagcatgccg

SEQ ID NO: 797290 - DNA, 100 bp, Homo sapiens
tgacagctgcagttgctccccgcccccgagcagccgagggtgctggaaatgtaaacaagaatagactgttcattcctgatggcttttagtctatactaac

SEQ ID NO: 797291 - DNA, 75 bp, Homo sapiens
aatctgccaggcggagggggctttgctggtctttcttggactattccagagaggaatttaaactttgggataatg

SEQ ID NO: 797292 - DNA, 75 bp, Homo sapiens
gctgaatgcaaaatgggacagaattaatagaatgtacagtgatcggaaaggggattaatgaaaatcaagttccat

SEQ ID NO: 797293 - DNA, 82 bp, Homo sapiens
acgaggtgttcggaagagtgcaggtgtttgatgatggtgatgagcgaacattgagacgtacctcactttgtctgaaaggaga

SEQ ID NO: 797294 - DNA, 75 bp, Homo sapiens
tcctgctcggaaccttgtttactaattgcatcagaacacaccatgatggctgtgacctaagaccctcaggaagcc

SEQ ID NO: 797295 - DNA, 98 bp, Homo sapiens
acctttgggaactcccagaacataggagaacagggctactcctccacaaactccagtgacagcagtattcaagtcaaacaacgttgaaatggattggg

SEQ ID NO: 797296 - DNA, 96 bp, Homo sapiens
aatatgaaagaattccgagagaacgagcacctcctcgaagtcatcccagtctggattccaatggggaattactaatccgaaatgcgcagctgaaac

SEQ ID NO: 797297 - DNA, 151 bp, Homo sapiens
ccgacatgctgacatctctccaggagagaaactcacgctctctcaccagaactcagagtcttcctaatattaccagatggaaatcctgtatgaatgtggaagccattagcagagtaattgctgtctgttaccatgacaaccagccgctgca

SEQ ID NO: 797298 - DNA, 75 bp, Homo sapiens
cggcggaggcgcccgcgggtcccctacagccaagatggaaatcatattatgtagaatacttgggtgacatctgcc

SEQ ID NO: 797299 - DNA, 100 bp, Homo sapiens
ctgaccctgatggaggaagtgctcctgctgggcctcaaggaccgcgagtaaaattcagaagtactctccatctgaatctgcaaaagtatatgataaagcg

SEQ ID NO: 797300 - DNA, 75 bp, Homo sapiens
tacgggctcccttcgccaaactcttcattttctcttatcccttttactattcagcgactatgtgaattgttaaca

SEQ ID NO: 797301 - DNA, 74 bp, Homo sapiens
gccgcttgtcagtgtgatgaagattggcacccaggaggagatgaccgccgggttctgctatggcacatggaaca

SEQ ID NO: 797302 - DNA, 110 bp, Homo sapiens
gagacttatatgatgcaagatgtggcagaagaacaagaagttgagaccgagaatgtggaaacagcaaacatgtctgacaaagagctaaagaagctacgtaataaacaaag

SEQ ID NO: 797303 - DNA, 85 bp, Homo sapiens
aaagggaggcattgtccgaactgggactcatggactgcttgtgaagcaggaagacagagacctgtcttctggttacctggatgat

SEQ ID NO: 797304 - DNA, 112 bp, Homo sapiens
tttccctctaccttaaggatgtgcaggatcttgatggtggcaaggaggccaagaccagcttcaagtctccatggtaccagaaaacaacaacctcacagcacctgaacctcaa

SEQ ID NO: 797305 - DNA, 74 bp, Homo sapiens
atgcagctcactgatttcatcctcaagtttccgcacagtagcgtttccattccccaaacctgctctgatctccc

SEQ ID NO: 797306 - DNA, 50 bp, Homo sapiens
atgaaattggatactggcattgatagggcacagtcttttgctgagcgcct

SEQ ID NO: 797307 - DNA, 75 bp, Homo sapiens
gagctccagcagccttgttagggcgtggcctgaggcttggataagtgggatcatggaagggaagtggttgctgtg

SEQ ID NO: 797308 - DNA, 90 bp, Homo sapiens
gcgcaccccgactgccgaggaacgagagcgcgaagctaaggattttttatcaagcagaaatgcatcgaacaacgagaatcaagatcactg

SEQ ID NO: 797309 - DNA, 83 bp, Homo sapiens
gccaccgaaggaagcatcccagacaccgggaaggtctttatcaccagtacctagaaatgctgaacactacaagcaaagacatt

SEQ ID NO: 797310 - DNA, 83 bp, Homo sapiens
caggagggactccaggtcgatgggaaaagattgcccacgaattgggtcgatctgtgacagattttaatggatcgagaagtggc

SEQ ID NO: 797311 - DNA, 83 bp, Homo sapiens
agagccggatcgcaggctccctgcctactcccccaccggggatttcagccgcttacaaacacgcagatggcaagaagattgat

SEQ ID NO: 797312 - DNA, 74 bp, Homo sapiens
cggagcaacgagcgcagcgccggtgtgggccatgtttgaggattgccccagcattcagttctatgagtaataaa

SEQ ID NO: 797313 - DNA, 83 bp, Homo sapiens
cccgcgtccgccgattcctcctccttggtcgccgcgtccttggctggcgtcctgtgggccaaagctgaccaactcccccaccg

SEQ ID NO: 797314 - DNA, 82 bp, Homo sapiens
ggacgagttcgatgacttcgtcacctatgagcaaaatgatgcttcaacacccaggccaggtctctgcctcggaagtgagtgc

SEQ ID NO: 797315 - DNA, 98 bp, Homo sapiens
ggcccgaccccctggacccgactgatctgaacggggcgcacttcgacccggaagtttacctagacaagatttcctttgacctcgctgagtacactgcg

SEQ ID NO: 797316 - DNA, 82 bp, Homo sapiens
gcctggaggaggacgaggcgggcgagacaatgcagatcttcgtgaagactctgactggtaagaccatcaccctcgaggttga

SEQ ID NO: 797317 - DNA, 75 bp, Homo sapiens
gaagagaagggaaatggcaagggagcattccaggagagaaagatttctagaagctctcaatcactttgagaaagc

SEQ ID NO: 797318 - DNA, 75 bp, Homo sapiens
aatgctgtgtatgataccttacttaatactcccatgcatgatgactatgacttaagacaagaacagttgaacaaa

SEQ ID NO: 797319 - DNA, 90 bp, Homo sapiens
tttgtttgtcagcagccaaggtgtttccaggaagttcagagagaacaggtgtggatgaggtcaccattgtcaacattttgaccaaccgca

SEQ ID NO: 797320 - DNA, 100 bp, Homo sapiens
ggcgccgaaatcaaagcgagagcgcctcggcctctccagctgtccgcggtagctacagcaagctgggtagcaggcagatccaaaggatatcatgaagttt

SEQ ID NO: 797321 - DNA, 100 bp, Homo sapiens
agccaggaagggaaccctcaccaggaaccaaaccatgatctcggacgtcccagcctctaggaacagagttctactgtttcgaaccatggttaccaaggag

SEQ ID NO: 797322 - DNA, 101 bp, Homo sapiens
caatatctgtcttcggtggactccttcggcagtccacccaccgccgccgcctcccagagctgttgcgcagccattggtacctgtattggggaaacatagca

SEQ ID NO: 797323 - DNA, 96 bp, Homo sapiens
ccgctataccgcaagatgaagctgcgctatcccatcaacgaggaggcactggagaagattggcacagctaggcatttcatccttcatgaagccatt

SEQ ID NO: 797324 - DNA, 100 bp, Homo sapiens
ctctcctccccatcagtgaggaccagacaccactgattgcaggaatgtgttccctccccatggcaagatactacatgaaagaccacagcaagattctttc

SEQ ID NO: 797325 - DNA, 51 bp, Homo sapiens
cgtacgtggtggagctctgcgtgtcttccagctgatcttaccaagatgcat

SEQ ID NO: 797326 - DNA, 100 bp, Homo sapiens
gtttgttggtggaggaggtggcaggcctcggcggctgaaggtgatgtggccgccctcaaccgacgcatccagctcgttgaggaggagttggacagggctc

SEQ ID NO: 797327 - DNA, 83 bp, Homo sapiens
ccagcctggagctgtgccagcctgacatgggcaccgtctgcgtcctgctgtccttccccttcatcttcagcccctgcctgggc

SEQ ID NO: 797328 - DNA, 49 bp, Homo sapiens
acatttgggagaaacacagccagaaggacatccataaaaattcatcaga

SEQ ID NO: 797329 - DNA, 80 bp, Homo sapiens
cgcgggtgtgacgttgaagatgtcggccttctgagccgactgcggtggtcaagaggcataatcaccagcaacacccggga

SEQ ID NO: 797330 - DNA, 101 bp, Homo sapiens
ttgctaatggctagcaaaaaagatgatccgggtataataatgaagttaaaagagcagcactccaaggaattgtgggaacgtattctgctccagttgttgta

SEQ ID NO: 797331 - DNA, 75 bp, Homo sapiens
gatccttgtgggcatgatccataatcggtttcaaggaagctcttcgtgggcggtcttgactggagcacgacccaa

SEQ ID NO: 797332 - DNA, 100 bp, Homo sapiens
atgttggagaactatagcaatctggttttcttggcacttctcagaacttctggatgagttttcccagaacgtcttgggtcagctcctgaatgatcctttc

SEQ ID NO: 797333 - DNA, 100 bp, Homo sapiens
gaaaaacaatcgcttcaatgatgggaaggtggatcccgccgggaggtactttgctggtctggtgccctatgtctcctgaattttaccgggaatatgtggc

SEQ ID NO: 797334 - DNA, 100 bp, Homo sapiens
ccagcagcccccgaaggccctatcaggacatggagtatgaaagacgcacgagtacacgagacaggattgagaaaggagagattcaaattgtgacttcaga

SEQ ID NO: 797335 - DNA, 98 bp, Homo sapiens
gcaaacttgctgctatggcatctataagacttcagggattacataaacctgtgtaccatgcactgagagacttggaagatgcagaactggatgactac

SEQ ID NO: 797336 - DNA, 98 bp, Homo sapiens
gaccaaaccaagcatgaatttttgacagatggctatcaagacttgggctcagctcccaacctctttgtctggaatgacatgaacgaaccatctgtgtt

SEQ ID NO: 797337 - DNA, 78 bp, Homo sapiens
aagtgttggaggacagacattaacagtatttactgagagctcatcagatggcaccgaaagcgaaggaagctcctgctc

SEQ ID NO: 797338 - DNA, 100 bp, Homo sapiens
gtgcgggtctggctgggcaagcactacaagaaggtactgctataaccagaatttggtagaaaaaggatttacttgttggggccctcttgataaaaagaga

SEQ ID NO: 797339 - DNA, 96 bp, Homo sapiens
aagcagagtggctatggtgggcaaactaagccgattttccggaaaaaggtggcacgcactacccttcttcctggcctcctgaagaccatagcagca

SEQ ID NO: 797340 - DNA, 100 bp, Homo sapiens
gggatttagcgttcgcgctccttcccttcccgtggtcgagccgacaggatggcccaatggaatcagctacagcagcttgacacacggtacctggagcagc

SEQ ID NO: 797341 - DNA, 52 bp, Homo sapiens
agaggacatccacctatttcaacagaccagcagaagtagacactgtggatgc

SEQ ID NO: 797342 - DNA, 100 bp, Homo sapiens
ggcgggtgatcgagccaccctgcccaggggcgcccagcactgggaatcctgcggggaaggcagcatgaaagtcctggaaaagaggctgaaggacatgggg

SEQ ID NO: 797343 - DNA, 75 bp, Homo sapiens
gtcatctcgcagaacgccatcaaccagctcaagtgcggaggcaagacacatcaaagcagagatgggaagtgaaag

SEQ ID NO: 797344 - DNA, 75 bp, Homo sapiens
cttcgatgtatctaaacttggcaccaagtgtttgatcagagtgcgctttcaactgaagctaaagaagaaatgtac

SEQ ID NO: 797345 - DNA, 87 bp, Homo sapiens
cctcccaagcagctgggtctacagaaaagtagcagctctgaatccttaagtgacaaaggctctgaattgaagaaaagctttgatgct

SEQ ID NO: 797346 - DNA, 100 bp, Homo sapiens
cgacaagcacacactatggcgctgaaacggattaataaggtccagtggcattgcagagcacggatggttgcaggagccaacttttacattgttggacgag

SEQ ID NO: 797347 - DNA, 101 bp, Homo sapiens
cagcagatgggcaaagagtaccgtgagaagatagaggcagaactgcaggacatctgcaatgatgttctgaaaaagttggtgattcaaggaaagcacattgc

SEQ ID NO: 797348 - DNA, 100 bp, Homo sapiens
aaaaatattcacagttcataaactttcctatttatgtatggagcagcaagatggcgggtgaaaaagttgagaagccagatactaaagagaagaaacccga

SEQ ID NO: 797349 - DNA, 87 bp, Homo sapiens
gatgaaagaacatttcctctagtttctggataatgagcaggcacacagtgagagaaccaccaccaatttgccttgatgttagacaaa

SEQ ID NO: 797350 - DNA, 100 bp, Homo sapiens
tggcaggcacagcacgagagccgcacctttgccgtgtacctcaatagcactggctaccggacaggttatgaagacagtatggagtttccagaccatagta

SEQ ID NO: 797351 - DNA, 100 bp, Homo sapiens
ggacaatatctgagattatatgaagcagttattgatgctaagaaacttttatctgagctttctaaccctgaaatttctacggacatctgagtaactgggg

SEQ ID NO: 797352 - DNA, 100 bp, Homo sapiens
ccggccggctgcgaagacgcggtgggccgcccctccggaattccagagacgctgtaacactctgatttcattgattgagaaagaaaatatggaaattgag

SEQ ID NO: 797353 - DNA, 101 bp, Homo sapiens
agctttagcacaagcactgtcagccagtgaggcagaataccagcggcagcaggcccagagcaagagaggcatcctcaccctgaagtaccccatcgagcacg

SEQ ID NO: 797354 - DNA, 113 bp, Homo sapiens
gagaactgtctcctggtgaccgagcacccgcctccgggcatcttcaacttgagatggaagattttcgaggtatagcagaagaatcatttccaagctttctcaccaattcatta

SEQ ID NO: 797355 - DNA, 100 bp, Homo sapiens
gagaaatgttggaaatggtttaaacacattatcagatgatggtggtgctaccccagtacaggatgaacgggattcagggtcagacggtgaggatgatgta

SEQ ID NO: 797356 - DNA, 89 bp, Homo sapiens
cactaataaaggagtattttttttgtcagcttatcaatcagactgatctaatgtgaaatccaggcccagacatgtccgtccttgtaagt

SEQ ID NO: 797357 - DNA, 100 bp, Homo sapiens
gccatttctagtcgttttcaaagcgcctcgcgctgattctcacgggcccggctgccggcccccgctctgccctggtcaccatggagtaacaagtatgacc

SEQ ID NO: 797358 - DNA, 109 bp, Homo sapiens
ctgtagtgggcggccagagcgccggcaagagctcggtgctggagaacttcgtgggccgtgtttaaatgggtgagaagaacattaattgccctcgttcaggtcacttttg

SEQ ID NO: 797359 - DNA, 82 bp, Homo sapiens
caaaatcaaccgggaccccagcttttcagaactgcagggaaacagccatcatgagacaatgcagatcttcgtgaagactctg

SEQ ID NO: 797360 - DNA, 74 bp, Homo sapiens
ttcacggagttcacagaggacgagattgatgaggacatgactgcccgaattagcatggctgatgtcaagttctc

SEQ ID NO: 797361 - DNA, 82 bp, Homo sapiens
ggcaaatgtagtcatgcaggaagctcagaagaagctcatctcacaaaggccacaagaggaagctgaatgaagaggacgccgc

SEQ ID NO: 797362 - DNA, 75 bp, Homo sapiens
gggaacttggagctttcgcttaaacataaggaatgattttttctcatcaacaagctacgaagtgaagagtgtcct

SEQ ID NO: 797363 - DNA, 82 bp, Homo sapiens
cccaagcaacttagaatgcagcttcagcagaggctgcagggccagcagatattggtgaatgaactttgctaagtatggattc

SEQ ID NO: 797364 - DNA, 100 bp, Homo sapiens
gcacactgccctccgaagtcggggacgcgggctcgacgaatatgatgacaagcagccactgaccagcaaagaggaagaggagaggcgcattgcagaaatg

SEQ ID NO: 797365 - DNA, 50 bp, Homo sapiens
gcgcgccccaccaccgccctcaccatggttgaaggggcccggccaggact

SEQ ID NO: 797366 - DNA, 82 bp, Homo sapiens
cgatttaaagctgagctgcgaggaaaatggcggcgggagctcttttgaaacagatggtcaccatgtttagatattagcagtc

SEQ ID NO: 797367 - DNA, 110 bp, Homo sapiens
agcagaatttgtatagagatgtgatgttggagaactacagaaacctggtctccctagggttatgtaccgaaggactctaccgtgtcagcgggaataaaactgaccaagac

SEQ ID NO: 797368 - DNA, 97 bp, Homo sapiens
gagagtttgcgctacgctgagtacttgcagccctcggccaaacggccagacgccgacgtcgaccagcagagactgtgctctggaactgaacccgcag

SEQ ID NO: 797369 - DNA, 100 bp, Homo sapiens
aaaatgtttccagctctaggatttggtgcaaaactgcctccagatggaaggatatctcacgaatttgctttgttgcatttgctggtctggcctttgcgtc

SEQ ID NO: 797370 - DNA, 100 bp, Homo sapiens
gcaagccaagtgcagaagcaaagaagcgctggcagtttcaaacgtggaaaaacttgtgaaatatttggatcccaacgacctggggagaatcaacttcaag

SEQ ID NO: 797371 - DNA, 100 bp, Homo sapiens
catctatccactccctgcgccgcctcctcccaccctgagcagagccgccgaggatgataaacacccaggacaggatggatagaatgacagaagatgctct

SEQ ID NO: 797372 - DNA, 98 bp, Homo sapiens
aggtgtgcgcggacgctggcgctcccggggggctcggacccgcccccgactcgccgagccagtaaacagctgttgtgtgacgtgatgattgtggcaga

SEQ ID NO: 797373 - DNA, 75 bp, Homo sapiens
agaatacagagatatggaatcagatcatgatcaggagcatttttttgtttctggatagaacttacgttcttcaga

SEQ ID NO: 797374 - DNA, 96 bp, Homo sapiens
gcgctcgtactggagcgaagagcggcctcctgaaggaggggaagggacgtgggggcggccacggcagggagcttagtgatgctgactgtgatggag

SEQ ID NO: 797375 - DNA, 100 bp, Homo sapiens
gcagttttacagggctctgttaacagtgcagcggaactgctgcctgacgctctgcaacttcagcatccccgaggagctggaattccagtaccgccgggtc

SEQ ID NO: 797376 - DNA, 83 bp, Homo sapiens
gtggagatatggcgcaactgcggcgcgtagctacagcaagctgggtagcaggcagatccaaaggatatcatgaagtttccagg

SEQ ID NO: 797377 - DNA, 73 bp, Homo sapiens
acaccaccattgtggccacccgtcactatcgcccgcctgaggtgatccttgctcggagtgaggatgccaggtc

SEQ ID NO: 797378 - DNA, 82 bp, Homo sapiens
caagaacctcttcccccgcagagaagagctgctcagtctggcatgcagcattaggtggtctcttcagtcagcctacacaagc

SEQ ID NO: 797379 - DNA, 83 bp, Homo sapiens
gctctgcgaaggactcctggacccccagtgccgcctggaaaagctgcagatcccatgacagattctgttgtcacgtctcctta

SEQ ID NO: 797380 - DNA, 90 bp, Homo sapiens
ctgtgcagctgatgacaagggccgcacagctctacactttgcctcatgcaatggcaatgaccagattggaattcttttagttggaccccc

SEQ ID NO: 797381 - DNA, 101 bp, Homo sapiens
gcagggacccggtgacagcgtgagaggttcgcagactactcccgagcccggagaggacccacgcgtgacccgggccaagtacttcattcgagatgagtttc

SEQ ID NO: 797382 - DNA, 98 bp, Homo sapiens
ggagaaaccatttaaaacaggtctaaagcttccaaactacaaaaactttaaaggcacgattcaagaacttggtcaaaaccagtatgcagtcagtggtg

SEQ ID NO: 797383 - DNA, 83 bp, Homo sapiens
cacaagagcgaggagaagcgagaaaagatgaaacggaccctgtgtttcccattaaacactaccaggacaaaatcaggccttac

SEQ ID NO: 797384 - DNA, 98 bp, Homo sapiens
aagaactgatccaggggacaaaagaggggaaactgagagttcccaattaataatgaagcaggctgccaaacgagggattctttcatctggtcggggca

SEQ ID NO: 797385 - DNA, 83 bp, Homo sapiens
cgccctcacgcccggcgagcccgcgagaatccacattcatctcaatggaaggatcctgccttaagtcaacttatttgtttttg

SEQ ID NO: 797386 - DNA, 74 bp, Homo sapiens
tgcgatgtgaggaaaggcacctccaccagcatcagatggtgaaggagaaggagacacagaagtgatgcagcagg

SEQ ID NO: 797387 - DNA, 100 bp, Homo sapiens
gattcttctgaattgtgctgccttggccaaaagagagtctcttctccttcaagtccgtggttctggtggagcccgactgagcactaaggatcctctgccc

SEQ ID NO: 797388 - DNA, 97 bp, Homo sapiens
ggaatagactccatctatccatatgagacatatctgaagagatggattaagaatgctttggattaaggattgtggagcacatttcaatcattttagg

SEQ ID NO: 797389 - DNA, 100 bp, Homo sapiens
gtcagcatgatccacagactgcgattcacaaccgacgtacagctaggaggaggaagccaagaatctggtgagcgaagccatcgcagctggcatcttcaac

SEQ ID NO: 797390 - DNA, 101 bp, Homo sapiens
ctgatggatggatggatgcctacatcaagatacatgcatagatggagagatggctggctacctcatgaatgctgggtgtgctggaccggttttctcaaatt

SEQ ID NO: 797391 - DNA, 50 bp, Homo sapiens
cggccagccagtcatcaaacggccgagatggacgaaaaaatgtggttcct

SEQ ID NO: 797392 - DNA, 75 bp, Homo sapiens
tggagccatgcgtgtgctgacagattgttcagattccattctgtggggaaattgactgtgaggactggatcaaaa

SEQ ID NO: 797393 - DNA, 100 bp, Homo sapiens
atctggcaagttaaccaaactgcatcaaatcctaaaccttatatggagcgctactacgtgctgtatatccggcccagtcacatccatcgccgtaaattcg

SEQ ID NO: 797394 - DNA, 100 bp, Homo sapiens
ctgcatactatcctcctagccaaattgctcaactaagaccaagtcctcgctggactgctcagggtgccagacctcatccagaaagactattctagttttc

SEQ ID NO: 797395 - DNA, 100 bp, Homo sapiens
ctgcactgcgtgtgtgtggtgggcttcgacctggagctgggccaggccgtggaggaatatattattcgagtgcaaagaggaatttctgtggaaaacagct

SEQ ID NO: 797396 - DNA, 101 bp, Homo sapiens
accactgaggatcagattttgaagagagatatgccaccagcatttattaagccaggagtggtggctcacacctgtaatcccagctctgggaggccaaggcc

SEQ ID NO: 797397 - DNA, 100 bp, Homo sapiens
accacaccctggcccagactgccagccctgacgggacagagccagggcactcaccaggctgcaagaacagtgctgggacgcaaacatgcagatctttgtg

SEQ ID NO: 797398 - DNA, 100 bp, Homo sapiens
cagaattggaaataacgggagggaggacctggtccagcttcccttcctcaaataaggaaattgacacctggcgtgggagacctgcaggaaaagtccctgg

SEQ ID NO: 797399 - DNA, 75 bp, Homo sapiens
gacgtgggagtcacctgaaagccaggaaatggagtccaaaactacttacctggaagaccttccaccaccccctga

SEQ ID NO: 797400 - DNA, 74 bp, Homo sapiens
gggtccacactgcaatgtttttgtggaacatgatcttatgccttcattcatccggcatggtccaacaattccaa

SEQ ID NO: 797401 - DNA, 100 bp, Homo sapiens
tggtgcgagtcttcggagcgaccccggcaggtgcagctaaatcaagtccagcagctaaaccaggatccacaccttctcgaccctcatcagccaaaagggc

SEQ ID NO: 797402 - DNA, 100 bp, Homo sapiens
gaggaacgccaggcacgcttccagaacgcctgccgcgacggccgctcggaaatcatgccacctcagtatggacagcaaggtgtgagtggttactgccagc

SEQ ID NO: 797403 - DNA, 73 bp, Homo sapiens
aaagactgaaagaaaaacgtattgagaggtgtcttccagaagatatcaaggctcaggggagagagaaagccca

SEQ ID NO: 797404 - DNA, 80 bp, Homo sapiens
cgcgccccccgggacccccacgccgccgccagggggatatgagactttctactcggaatatcctgagtgttgcgtggatg

SEQ ID NO: 797405 - DNA, 100 bp, Homo sapiens
ccgcgctcctggccccgcgcgggcggacggcggaggcgcctcccaggggttatggttttgtgaaattcacagatgaactggaacagaagcgagccctgac

SEQ ID NO: 797406 - DNA, 82 bp, Homo sapiens
cacgagcagatcctggtcctcgatccgcccacagacctcaaattcaaagatggagttttaacattgaatgcggagaacacta

SEQ ID NO: 797407 - DNA, 102 bp, Homo sapiens
ctacaaggtcgcctacgtgcagctggtactccaaagattcaggtttactcacgtcatccagcagagaatggaaagtcaaatttcctgaattgctatgtgtct

SEQ ID NO: 797408 - DNA, 75 bp, Homo sapiens
tattcggccatcttggctcctccacaagacggtgaactttgacataataaaatacttgtatgatttcttgtgaaa

SEQ ID NO: 797409 - DNA, 96 bp, Homo sapiens
agaggacctgtgcagggcagagcaggaggccccccgagggttgttacaagttgagttgaaaacaagaaaaacttgcttttggcgccatcaaaaagg

SEQ ID NO: 797410 - DNA, 75 bp, Homo sapiens
tctcgtcaaagtgggagatcgctgtggaaaccagctcctttagcggcagagttttccgagtgaccttcttgatgc

SEQ ID NO: 797411 - DNA, 82 bp, Homo sapiens
cacccaggaacctcgccatccagaaatgccatggacaatattaccaggcagaaccaattctacgatacccaagtcatcaaac

SEQ ID NO: 797412 - DNA, 80 bp, Homo sapiens
actactccatccgagaagagattcgtccgtctccaagagagtatgaagagagtgcgtctgtagggcagggaagatggcgg

SEQ ID NO: 797413 - DNA, 95 bp, Homo sapiens
cccagtcagacgcaggcagccccaaagcctgaacaggcagggccagacccagggcgccctgcgtccggcagaggaggcgagcatcccgctcaggt

SEQ ID NO: 797414 - DNA, 100 bp, Homo sapiens
gagaaccaaccagaacatcggatggcttgtgctccctttacgaggcagcattatgtctctttgaagaggtggcacaagaatggctcaactctccaaatag

SEQ ID NO: 797415 - DNA, 101 bp, Homo sapiens
gcggcctcctggcatctgccggctgctccgcaccccggggtcccaggaagggcggcccagttccagggtctccctccactgctgtagtaacccgggtccgg

SEQ ID NO: 797416 - DNA, 83 bp, Homo sapiens
aattgcctttgggactctgaaggctgaaggacaactcaaacttatacatggtcatggagtacgtgcccggcggggagatgttc

SEQ ID NO: 797417 - DNA, 75 bp, Homo sapiens
gaagccatattgaaagaagctgagagagaggtcctcatgctgataccgccagtggatgccagaatttgcagtgtg

SEQ ID NO: 797418 - DNA, 50 bp, Homo sapiens
aaagtcagtgacagccccattgccggtggtggtgtgcacattgagccccg

SEQ ID NO: 797419 - DNA, 75 bp, Homo sapiens
gccggagcgggcggctgagacaaaggcgacggtggtatggtcaggaaaaagactacaatgtactagtcatggatc

SEQ ID NO: 797420 - DNA, 121 bp, Homo sapiens
ctgcatcagtttttactagagccaatcacctgtcatgcctggaacagggatcgtactcgagaagcaagcattgtaggtgagaatgaaacttatcccagagctttgctacattggaacaggg

SEQ ID NO: 797421 - DNA, 100 bp, Homo sapiens
tgggactctccggccctgtgcagtgcactttccacacatgaggagaagaagagcttctgtttagaagacacgtgcccagagtcagaggccccttgcccac

SEQ ID NO: 797422 - DNA, 100 bp, Homo sapiens
ctgcctcacccagttccaggtagacatggaggccgtcggggagacgctgtggtgtgactggggcaggaccatcaggtaacctccgaggctatggcatggc

SEQ ID NO: 797423 - DNA, 101 bp, Homo sapiens
ccacaggctctgcctttggcttctcccttcgaggtgccgtagacatcgatgacaacggatacccagtgaatccctgttgttactatccatgccagcaccag

SEQ ID NO: 797424 - DNA, 98 bp, Homo sapiens
gatcccattgggggttgatacagcagagacgtcatacttggaaatggctgcaggttcagagggccagtgtcattcaaagatgtggctgtggatttcac

SEQ ID NO: 797425 - DNA, 100 bp, Homo sapiens
cgctggaggagctccccagctggtggctggagcgaccccttgttctttggtggcgctgctgcaggtggagctggagcaagaataccaagacaaattcaaa

SEQ ID NO: 797426 - DNA, 100 bp, Homo sapiens
atttcttcagatagctccccagctgtggaaaatgagcatcctcaagcaaattgaaccatctttgtatcctaagttgtttcagaaaaatctggatccagat

SEQ ID NO: 797427 - DNA, 83 bp, Homo sapiens
cggggaaccaaggagacgctcctggcactgcagcacctcaggcaagtaggagtggctggaaagtttgttgagttttttggaag

SEQ ID NO: 797428 - DNA, 75 bp, Homo sapiens
gacaaagatgaaggaaattgcagaagcctaccttgggaagacgacacccccgtggccaccgccaagaacatgccc

SEQ ID NO: 797429 - DNA, 100 bp, Homo sapiens
ctcagatgagcaactggattatactgtactgcccatgaaaaaggatgttgaccggacagctggattgccttttgcaattcttacttcaaggcataccccc

SEQ ID NO: 797430 - DNA, 80 bp, Homo sapiens
tgtcggcttcaaagagaaaaggcaacatcctgtcacaggccatgctctggcaaaaacaaaaagcttgtggtgaagggggg

SEQ ID NO: 797431 - DNA, 100 bp, Homo sapiens
gtcgccgcgtccttggctggcgtcgccatcatgaccgggtcctataacaacttcttcaggatgtttgatagagacacgcggagggatgtgaccctggagg

SEQ ID NO: 797432 - DNA, 100 bp, Homo sapiens
attcaaggggatggagtagatattaataccttacaagaggttaagtatacccaaggtggacttgaaaacctcgaactttcaagaaagtattttgcacagg

SEQ ID NO: 797433 - DNA, 75 bp, Homo sapiens
tctgaggcagagtgtggttcattcagacacttctggaaatgaagcaagtgaaatcgaatctgtaaaaattagtgc

SEQ ID NO: 797434 - DNA, 75 bp, Homo sapiens
gttggccaaacaactagcaaaacccaaagagaaaattcccatcattaatggtagctgagtggaggttgtctcgag

SEQ ID NO: 797435 - DNA, 100 bp, Homo sapiens
tcacgagggggaccttgagttcattagcatggacctgcacaagggatgcgggtgtcgtagtcattcttcagcacaattcttaattggagaccaagaaccc

SEQ ID NO: 797436 - DNA, 75 bp, Homo sapiens
attggaccatacactttctcagatcagcaaagtggaagatgctttctacaaaggtgaactcaggctgaatgagga

SEQ ID NO: 797437 - DNA, 101 bp, Homo sapiens
cgccttctcccctgatagccactacctcctctttggggccccaggaacctataattggaaggtgagtgagatcattggccgagacctgagtggcttccctg

SEQ ID NO: 797438 - DNA, 51 bp, Homo sapiens
atctcaggagagagcagccagagtggtactgggcctaatcgctacgtgcct

SEQ ID NO: 797439 - DNA, 101 bp, Homo sapiens
gcaggaatgcttactgttgcgtggttcgttattaacagatacccagaaagcggtactctagaaatgaatgtcaaggatcttagaccacgagctagaaccat

SEQ ID NO: 797440 - DNA, 90 bp, Homo sapiens
tccaggtacagattctgaaaaggaatccagcactacgccctgccctctactgactggaggcaggcctctgcctactttagaagttaaacc

SEQ ID NO: 797441 - DNA, 80 bp, Homo sapiens
ctgtggacatcagcgccatccccgagcagcggtggaagctggtaaggctggcctctctgcagtcagaggtctgagctctg

SEQ ID NO: 797442 - DNA, 82 bp, Homo sapiens
ggcggcagcggcggcgcggaggcggctgaggtgcgagccggactgcctccaagtggaagttggcaggatttaaaggatcaca

SEQ ID NO: 797443 - DNA, 99 bp, Homo sapiens
tgaccctcagcagagacggctgtgtccccttccctccagtgccccgcggtctcaacccagttaaccgaggtggggctggtgtccgagcacttctcgcag

SEQ ID NO: 797444 - DNA, 100 bp, Homo sapiens
ctcagggatcaaagagcaaacagattcagtggcctgcattggtccttatgtcgtcagaagatcgagaagctcaggaggatgaattgctggccctggcaag

SEQ ID NO: 797445 - DNA, 75 bp, Homo sapiens
cttccctggctcgttccgtggaagacatcccctcccaggctccgactcagtacagagcatgccagcgcctcagct

SEQ ID NO: 797446 - DNA, 98 bp, Homo sapiens
cgccacagcgacgccggcgccgagggacaccgcagtatgaggcagagaagctgcacacatacatgtaagagaagcaaaaatgtcagatgatatcagga

SEQ ID NO: 797447 - DNA, 83 bp, Homo sapiens
cttcatcctttcaaagacttagtgagaaaaaatgatccctatgctcttgcatccctggtgtcctttgaagttaagaagatgcc

SEQ ID NO: 797448 - DNA, 82 bp, Homo sapiens
acaggtgcctgccaccatgcccagcacctgaactcctggggggaccgtcagtcttcctcttccccccaaaacccaaggacac

SEQ ID NO: 797449 - DNA, 100 bp, Homo sapiens
gtcacggtgaagttgtcatggcaaccacccctggagccaaatggaattatcctttattacacagtttatgtctgatgaagatcagcttcgtgcaaagggt

SEQ ID NO: 797450 - DNA, 82 bp, Homo sapiens
aggaggcgcgggaggtgttcgagaacgaccccgagacggtttgtccagaggggttgcgtttatccggtttgacaaacggtcg

SEQ ID NO: 797451 - DNA, 74 bp, Homo sapiens
ccagggtccctgaagagggaagacacgcggaaacaggtattgacctgatggacatggcttcggacatcctgcag

SEQ ID NO: 797452 - DNA, 75 bp, Homo sapiens
actagacccacagctgttaaagcaacaggcgccaagcccatctttgtgtgcttgcatccaactgtgatgagccta

SEQ ID NO: 797453 - DNA, 125 bp, Homo sapiens
cggagcgggcggcccgggctgtagtgccggcgccgccgcgtcttcccggtctcctttcccggccgcacagggccatggtaggggaggagtgtgtaggtgccatcgtttgcaagttggatatgcac

SEQ ID NO: 797454 - DNA, 90 bp, Homo sapiens
tggcagggtggacctcaggagcctcctaaaaccacaggctggacgtaaagaaagaagtgatgcactcaattctgcaatagataaaatgac

SEQ ID NO: 797455 - DNA, 100 bp, Homo sapiens
aactccaccgtagcccttgccaaagaactgataaatttcaaacggaagagagtggcagcatttagaaagaatctaattgaaatgtctgaactggaaataa

SEQ ID NO: 797456 - DNA, 50 bp, Homo sapiens
ggtgaagtcttttgtacagtggttagtgctggagaagagcgagttcaggg

SEQ ID NO: 797457 - DNA, 88 bp, Homo sapiens
cgaaacctggcacggctcttgcttccgatccctgcagtgaagttgaacgagctgctcgagaacttttatgtcaccgtcaagaagagcg

SEQ ID NO: 797458 - DNA, 100 bp, Homo sapiens
aaaattatttatccaacagctcctcccaggctgtattcatcaccaaagaaaaaacttacaccaatgcagaaatcggttagtccattagtttggtgcaggc

SEQ ID NO: 797459 - DNA, 100 bp, Homo sapiens
acgttgacgtccatttaccagtcttccctggcaagattcttctgaattgtgctgccttggccaaaagagaaatcgtggatgggaatgtgaagatgaccct

SEQ ID NO: 797460 - DNA, 49 bp, Homo sapiens
tgaagcctaagaatatgatcagagtggaggtgcaacaaatgagaaattc

SEQ ID NO: 797461 - DNA, 90 bp, Homo sapiens
cagtggtggaggaacttccggcagcggcagctcaagtggccaaggcaagatgagtattgggaaagggtcgttgtggtgcatagacccaga

SEQ ID NO: 797462 - DNA, 74 bp, Homo sapiens
tcagcaagagctttctggaagaaaggaaatgttaggatcactttattctgacgctgttggaagctctgactgtg

SEQ ID NO: 797463 - DNA, 100 bp, Homo sapiens
cctttcttttaagagatctgctttcatctgaggagcttgctcaagtcttcagtcagtctgtgggaacctcagaacctgttctggatccacagcaaatcca

SEQ ID NO: 797464 - DNA, 109 bp, Homo sapiens
ccacggggacggattggttgttttttcctgtatgaagcggttggcaccactgaagtgaccgaatgaggtggctgtagctaccttctgcatatggatatccagttttccc

SEQ ID NO: 797465 - DNA, 97 bp, Homo sapiens
gttactgctgtgtggctgcactcactctacgtggagttgggccctgcaggaaggacggacttcaggggcagcactacctgttctgcaggcgggtcct

SEQ ID NO: 797466 - DNA, 80 bp, Homo sapiens
ccagccgcaccatgccgctcctaagcctgcacagccgcggcggcagcagcagtgagagcactgccagtgaaagatgtaga

SEQ ID NO: 797467 - DNA, 51 bp, Homo sapiens
taaaggaggttttaaacagtataacagggtgtttgtgaaccgaagtttagc

SEQ ID NO: 797468 - DNA, 100 bp, Homo sapiens
ggacaagtacctttatgaaccagtgtatcccaaatgtgactggagtgatttgcacccggatgcctagactcgccatctgctcaaagactgctcagaaagc

SEQ ID NO: 797469 - DNA, 98 bp, Homo sapiens
gtggacacctgtgtcagcatgtgggacctggttctctccatcgccttgtctgtggggtgcactgactgagcgggacgtgagcgtgcggcagcgggccg

SEQ ID NO: 797470 - DNA, 76 bp, Homo sapiens
agcgcagggatacggcgcccagcggggtgctggcaaaaccccgactctgggtggcggcttccacgtgaatctgggg

SEQ ID NO: 797471 - DNA, 100 bp, Homo sapiens
gcttggtgtgacggcggctgcggcggcggtggcggccgcgaccaggcatttgtctggccttcccttttactgctggctgggaaggaggagcatcagacca

SEQ ID NO: 797472 - DNA, 75 bp, Homo sapiens
gaaccggatatttaagtacaatggtgggcttaattttagtgaagttattgccagtggactgtgagagaaaaacag

SEQ ID NO: 797473 - DNA, 75 bp, Homo sapiens
gaaaacgaaaccttcgtgatgagattgactgtagccgaggatctcattcgtcggttcggatccaagccagttctg

SEQ ID NO: 797474 - DNA, 75 bp, Homo sapiens
ttcaatgatgtgtgcaataatgaatcattagtatcggacacagaaacatgcaatcttcttaccgcgaagaagcca

SEQ ID NO: 797475 - DNA, 82 bp, Homo sapiens
catggacacgctactttagctaaggcatgaccagcaatgaacagtagtaagcccatgcagaatgccaccaagtatggcaaca

SEQ ID NO: 797476 - DNA, 100 bp, Homo sapiens
ctggacctggttctgccttctggacaatctttccgtgcccaccagaagtatgtccgacaagcctggcagaaggcagacatcaatacaaaatgggcagcca

SEQ ID NO: 797477 - DNA, 74 bp, Homo sapiens
ttccctgtgagctgcctggtcctgctgcaggtggcaagctctggatgaccggaaagaagggatgaccgcgtttg

SEQ ID NO: 797478 - DNA, 78 bp, Homo sapiens
tttccagcccgtggtccttctccatattcgagggagagcctggggatgtacaggagatgcctgctccagaatctcctc

SEQ ID NO: 797479 - DNA, 75 bp, Homo sapiens
tagcgctatgcctgcggcggagactgcatcaggctctcggtaagaatgattgatgttggctgatattggagtgct

SEQ ID NO: 797480 - DNA, 100 bp, Homo sapiens
ctgacagctgcatggaagcccagacaccaggaaaccctcagattggaggctggtgtcccggagcagtgcaaggaaagatgaatgggagggctgattttcg

SEQ ID NO: 797481 - DNA, 82 bp, Homo sapiens
ggcggagctgtgcgagagcctcctcacttgggtcccgctcccggtcccctcggaggagagcccactcccctgagagacggag

SEQ ID NO: 797482 - DNA, 119 bp, Homo sapiens
ggatcacaacttggttcaatgggtagcctcaccatgaaatcacagcttcagatcactggtatgtgccagtcaaagatctactgggaatttatgagaaactgtatggtcgaaaagtcatc

SEQ ID NO: 797483 - DNA, 74 bp, Homo sapiens
gaagccaaaaagcattgctggtatttcgaaggactctatccaacctattatataaaaatatgtcgtaactgcaa

SEQ ID NO: 797484 - DNA, 50 bp, Homo sapiens
tgggagcttgctgcagcttcaggtgaccctggcaaagatgagagtgcaca

SEQ ID NO: 797485 - DNA, 140 bp, Homo sapiens
tggggccccacgacctccacgctggactggtgcgaggagaactactccgtgacctggtacatcgccgagttctatctttccctagatcattctgacctagttgcagagttgttgaaggagctgtctaaccataatgagcg

SEQ ID NO: 797486 - DNA, 101 bp, Homo sapiens
cgttggaataccggctctcagcggcttgattacagtggcgagatcttgaacaactgctgcgtcatggagtaccaccaagccacaggcacccttagtgccca

SEQ ID NO: 797487 - DNA, 82 bp, Homo sapiens
gaagacgacgaggactgctatggcaatgatacagacgtccctcaccagtgccagcttggggtctgcagatgagaactccgtg

SEQ ID NO: 797488 - DNA, 49 bp, Homo sapiens
gggtgctggtgcctatagcatgaggtgcccctgtagacaatggccctcg

SEQ ID NO: 797489 - DNA, 100 bp, Homo sapiens
cttggctcacgtatttaagagcctgaatattccagtacatggactggacctgcctggagcccagcccagagcatctcctcagtgctcatctctatccagt

SEQ ID NO: 797490 - DNA, 75 bp, Homo sapiens
gaaaagtgcgaccgttctcccaaggaatttccacgccctgggcgctgcctatggcacagccaagagcggtaccgg

SEQ ID NO: 797491 - DNA, 60 bp, Homo sapiens
cttcccttgaggtctctgaaccagggcacccatgcaggcgttggagaccagggccagccc

SEQ ID NO: 797492 - DNA, 87 bp, Homo sapiens
tcagttctctggagccccagattcaacccgtgtacgtgcctgtgcctaaaacgcaaacatgcagatctttgtgaagaccctcactgg

SEQ ID NO: 797493 - DNA, 75 bp, Homo sapiens
aaagaatgccacagaatcaggggaggcatgcttcagttgtcgagatgtccacagaaggaggatttggtggtacta

SEQ ID NO: 797494 - DNA, 75 bp, Homo sapiens
ggggaaccatggctgccccgagaggaggcgatcgagatcggatgacagcaaatcatgaaagctacctcctcatgg

SEQ ID NO: 797495 - DNA, 100 bp, Homo sapiens
ctccgccctgcacaggatcatcgaggtcgtcgacgccatcatgaccacggcccagagggcgagctgaggatcagtgtcctgcctgcctacctgtcctatg

SEQ ID NO: 797496 - DNA, 100 bp, Homo sapiens
ggacacagcaatatctctgggctttcacaggagtgaacaaccaaggcgatgggctgtaggatgttgatacatctgaggggccagatggccaccatatcag

SEQ ID NO: 797497 - DNA, 96 bp, Homo sapiens
ggattaaggaacagcgagctgtttgacccctttgacctcttcgatgtgcgagactttggaaagatcctctggaccttctccatctacctggagtca

SEQ ID NO: 797498 - DNA, 90 bp, Homo sapiens
tccttcgctaacgcctcccggctctcgtcagcctcccgccggccgtctccttaacaccgaacaccgtgccagtgacggggtggcccgtga

SEQ ID NO: 797499 - DNA, 100 bp, Homo sapiens
ggaaaaggaagtcaccaccgtggcctgcgacggcagattagctgatccaacccgaaggacaaactgtggctatgaatctggagatcatatgtgcatctct

SEQ ID NO: 797500 - DNA, 82 bp, Homo sapiens
gacagattggacgcacacccctcgggaggcgcgaaggtgacaaacagcatgtttggtgcttcaagaaagaagtttgtagagg

SEQ ID NO: 797501 - DNA, 75 bp, Homo sapiens
acaagagagacaactctgactttggtgttggagcgggccggagagaagtagagtgggctgcgaggagaaggaaac

SEQ ID NO: 797502 - DNA, 100 bp, Homo sapiens
tcgccttgtgtcaatggaggcacctgtcggcagactggtgacttcacttttgagtgcaactgccttccagccaacaagtcccaaatttggaaaagctgac

SEQ ID NO: 797503 - DNA, 75 bp, Homo sapiens
gattgacagtcacaattttgtaataagacatatctgaagagatggattaagaatgctttggattaaggattgtgg

SEQ ID NO: 797504 - DNA, 97 bp, Homo sapiens
aggatggcagcgcagcctagttgagttaccttcctaatgacactgtagaatctggcatccatccagtatatttttgcagcacccattatattgaaat

SEQ ID NO: 797505 - DNA, 115 bp, Homo sapiens
atttcgactggatcatatcagaaagatggcatatcagatatgcaagtctgtgaattcaactattttccagcaccattttcctgcagccatcgattcctttcaggatgctgtgaag

SEQ ID NO: 797506 - DNA, 75 bp, Homo sapiens
gagggctgtggtgcggcaccggcgagccagcatgtgttcagagcaacattgttttgttgacacaagcatttagaa

SEQ ID NO: 797507 - DNA, 100 bp, Homo sapiens
cctctacattctctcctgacggaagagtttttcaagttgaatatgctatgaaggctgtggaaaatagtagagagcacgttttcaatatcataggagcatt

SEQ ID NO: 797508 - DNA, 99 bp, Homo sapiens
aggcccccagcggtccccgggtccgcagcttctggcggttcgggcggtcggcgaagcggccggcagcagtaccatcccactgatatcacgggcccgctc

SEQ ID NO: 797509 - DNA, 80 bp, Homo sapiens
tccgatttaaagctgagctgcgaggaaaatggcggcgggagaaggtagaagatagcaccatgccgattcgtcgaactgtg

SEQ ID NO: 797510 - DNA, 100 bp, Homo sapiens
agctgtatgcaggagctattcttgaagtttgtggatgaaaattgggaaggttccctcaagtccaagaatgacatcttcgagtggtccagggaccaccgag

SEQ ID NO: 797511 - DNA, 82 bp, Homo sapiens
gccgaactcgggttctgacaagatggccgggctgccccgcaggatcatcaaggtcgcgtggggcaggcagtggcgctgcggg

SEQ ID NO: 797512 - DNA, 98 bp, Homo sapiens
tttcaagttaaggtccaaaaaaactccagctgtgaaagcaacataaatggttgaagatgaaagaggaagaatggcgagaagctcagagaggctttaac

SEQ ID NO: 797513 - DNA, 100 bp, Homo sapiens
caacaacctggaaacattctttgaattggattatcccaaagtctgtccagggttttggtggctggcgaagctgagggcgtgtcagcaggcctttcgatcc

SEQ ID NO: 797514 - DNA, 74 bp, Homo sapiens
agtttgagtgttgctggaacggttcggatagtgagacggtttaagcggaagcatcttactgccattgactgcca

SEQ ID NO: 797515 - DNA, 75 bp, Homo sapiens
ttctgccccaaggccaaccagtggcacttttccagccattaactccaggctctcgagaatttgaagatgttgtaa

SEQ ID NO: 797516 - DNA, 75 bp, Homo sapiens
gtcagaaagagctgaacactctgtgcagcgagttacatgttgagccatttcaggatacttatccgctttttcccc

SEQ ID NO: 797517 - DNA, 75 bp, Homo sapiens
gcgctacaaggatggggtggtgaccatcggctgtgtggatcctgataacttaagtgactctctcttttccggtga

SEQ ID NO: 797518 - DNA, 101 bp, Homo sapiens
gcatagccaatgaagccatcaacaccagagagccagctgccgagatagaagccttgctggggatggatctggtcaggacagtcattttgtttactcattca

SEQ ID NO: 797519 - DNA, 50 bp, Homo sapiens
ccggtttctcggcgaatgacagcacagaccaaagagaaccctgtacagta

SEQ ID NO: 797520 - DNA, 75 bp, Homo sapiens
gcgaatggggctcacgtcgaccgccttcgcccccggaccgctcaccgcaaccatggtctccaaatccgaccaatt

SEQ ID NO: 797521 - DNA, 90 bp, Homo sapiens
ggatcgaggctctgagaaagaccgtacgtccaacttcagccccagatgtcaccaaccacttccgagtggatccagttctttaaggaagcc

SEQ ID NO: 797522 - DNA, 100 bp, Homo sapiens
gatattcagtgaatttttgctcaagctaattcatatactttcaactgaaagatccagctatgggacacagcaggacaagaacgattcagaaagagcatgg

SEQ ID NO: 797523 - DNA, 100 bp, Homo sapiens
tattactcctcttctgtctgctgtctatgagggtcatgtttcctgtgtgaaattgcttctgtcaaaggtgtacccaggaaggatgtgggaaacactttgc

SEQ ID NO: 797524 - DNA, 83 bp, Homo sapiens
gatttaaaagacagtcctcgtcagcactgactttcagctatggaatcggctactgcagcactggggtgtcagttgttggtccg

SEQ ID NO: 797525 - DNA, 74 bp, Homo sapiens
accaaggaggagtacaaggacatcctgcgcaaggccgtgcagaaggtgatgtgtccaatctagatcccaacttc

SEQ ID NO: 797526 - DNA, 99 bp, Homo sapiens
ctccaaagtagcctggtgtggaaattgctggacgaaagggtggaagcagggaaaggcctggagatgaggaagctggttctctcggggttcttggccagc

SEQ ID NO: 797527 - DNA, 49 bp, Homo sapiens
ggcagttgcagtgttggagctaaagttgaagcactggacaatgccacat

SEQ ID NO: 797528 - DNA, 99 bp, Homo sapiens
gagaagacaagttggatattccaatgttctttgtgtttggaaagtaagcagaaattggcgtgaaattgttgttcaagataaaaatgcaaatcggaggag

SEQ ID NO: 797529 - DNA, 100 bp, Homo sapiens
ccagattatctacaacactgatgaggtcacttttacaaagagaaagtttggattaatgaagaaagcctatgaacttagtgtgctctgtgactgtgaaata

SEQ ID NO: 797530 - DNA, 100 bp, Homo sapiens
tgcagactcgggccgtggccgcctacagtgttctaagaacggaagcatctgggctggatggaatttagcatcaagcagagtcccctttctgttcagagtg

SEQ ID NO: 797531 - DNA, 90 bp, Homo sapiens
ggtgctgctgaagtccctagggaaccaccaattcttcccaggacaacttgcctttgatgattttcaagagagttgtgctatgatgtggca

SEQ ID NO: 797532 - DNA, 75 bp, Homo sapiens
ggcgcgtcgactgcccagagtccgcggccggggcgcgggagggggcagctggcattttatgctatgtgggagcct

SEQ ID NO: 797533 - DNA, 90 bp, Homo sapiens
ctggactcatctgcgccacttgtccgcttcacactccgccgccatcatggtgaagctcgcgaaggcaggcaatccatggaccttgtggaa

SEQ ID NO: 797534 - DNA, 75 bp, Homo sapiens
tggaaaggagatacgggattccccagggtgaaggcacgtgggcctggattggagaagacaggtgtggccgtcaac

SEQ ID NO: 797535 - DNA, 75 bp, Homo sapiens
ctcttaattcaacagaaccatattgggagtgtgattaagaaatcatgccaccctcaaagcctcatccacctgtcg

SEQ ID NO: 797536 - DNA, 100 bp, Homo sapiens
ggcgaactggaaggccacgcctcctcccgcctgccccctcagccctgtggctgggggcagagctcagatggaagatggtaccccaaagcatatcatccag

SEQ ID NO: 797537 - DNA, 105 bp, Homo sapiens
tgctgcagaaattggggaaagctgtagaaaccaaagatgaacgatttgaacaaagcgctagcaacttctaccaacaacagtagagacggggtttcgccatgttgg

SEQ ID NO: 797538 - DNA, 98 bp, Homo sapiens
gtttagttcagcgcagcgactcggggacctggagctgacgcctagtcatcatcagatttgaaatatttaaagtggatacaaaactatttcagcaatgc

SEQ ID NO: 797539 - DNA, 80 bp, Homo sapiens
ctgtggccgtgggggacatcgtctgggcccgtgttcctggccttccgaatcatgcccggggcaggtaaacctcatgccca

SEQ ID NO: 797540 - DNA, 90 bp, Homo sapiens
gtggggctcatcgtgatcccggcgacatactacctctggccccgagatcagaatgccgacaccatgaccacccttgatgataagttgctg

SEQ ID NO: 797541 - DNA, 83 bp, Homo sapiens
tctgcaacatggctagagactgccgggactggtcagatgaacccatcaaagagtgcgatacgtaggtaacctttccagagatg

SEQ ID NO: 797542 - DNA, 82 bp, Homo sapiens
ctcacctatgcaaagaaagggaagctattgctgggattttgaggagatgcttgggatttgctttacattctaagtggatttg

SEQ ID NO: 797543 - DNA, 98 bp, Homo sapiens
aaaatcttaaccttcaaccatctggggaaaaggcaaaaatcccatctaccgcaactctcagttcgagagtaaagaaaactttagaaactgttcctttg

SEQ ID NO: 797544 - DNA, 82 bp, Homo sapiens
aattacatccagaggattttcctgaagaaggagtacttgattcttcagaaaacctccaaagtagatgtggactcaagtggaa

SEQ ID NO: 797545 - DNA, 127 bp, Homo sapiens
tttttaggagagttagagaagtgccttgaagatccagaaaaactaggatccctttttgttaaacacgtgtcacgtcttgaaattttaaatgtcctcagtgactctctacctctggcagatgatgttg

SEQ ID NO: 797546 - DNA, 90 bp, Homo sapiens
agcagacagacaaactgaaggagctttatggacaagtgatttgtgctctacaaaaaattggaatgtctcgttttcagacgtatattacgt

SEQ ID NO: 797547 - DNA, 98 bp, Homo sapiens
tgggcaccagcaggacccgaggccaggagccaggggcccagaagcacaggagaaaacgacgctccacacctttaacttcttccacacttccttcacaa

SEQ ID NO: 797548 - DNA, 100 bp, Homo sapiens
tcatctgtcctgtatgtacaaagcaaactctgtttgctagtgctgacactgcttatgtcctagcgtattcaattattatgctgactacagacttgcacag

SEQ ID NO: 797549 - DNA, 100 bp, Homo sapiens
atcgaaggatgtgcatgaaggacagcctcttctcaatggacacagcattgttggttttgccatgtactattttacctatgacccgtggattggcaagtta

SEQ ID NO: 797550 - DNA, 89 bp, Homo sapiens
ggacaagatggtgcagaagaagaacgcggtctcggacagcccgggagacgagccctcggagtccccatacgaaagtgcagacgaaacac

SEQ ID NO: 797551 - DNA, 74 bp, Homo sapiens
taaagttcatgctgaactggctgatgtcttaacagagccgattccacgactcttctttgcgggagaacatacga

SEQ ID NO: 797552 - DNA, 101 bp, Homo sapiens
cgggtcgctccatttcgaattctgcttcaagttcccggctcccaggtttattctcccatagcatgtgggcctgctttcttccccgggcgatgtgcagagat

SEQ ID NO: 797553 - DNA, 100 bp, Homo sapiens
aaattatcagagactctactcccaaccaatatatggtgctgataaagtttcgtgcacagttccaagattatcccctaaaactcatagacccaggtctccc

SEQ ID NO: 797554 - DNA, 101 bp, Homo sapiens
cttgctcagtgagggtagctggtgcagaagccattttttaaacttaggtatttaagtactgaaagaaaaggcgacggcggattgacagaagtatgattgga

SEQ ID NO: 797555 - DNA, 82 bp, Homo sapiens
gtccactgcgggccggcgaaagctgatcctgggtttgagcagtttaaaatgtcagaaagattgcatgggaactggatcagac

SEQ ID NO: 797556 - DNA, 100 bp, Homo sapiens
tcaggccttacaccaagaagcgctctgctgtacaagttcaatggcagcccttctaaggtgtgttagaagaagcaagattttttggtattgactcattgat

SEQ ID NO: 797557 - DNA, 98 bp, Homo sapiens
gtagcccggcgctcggcatggctctcctggtgctcggagttggtgtcctgcctgcgctcaggatgagggggaatctggccctggtgggcgttctaatc

SEQ ID NO: 797558 - DNA, 101 bp, Homo sapiens
ggacaaaagccaagaggaggacagttcgctacacagcaatgcatcgaggttctggctactatccggatgaaagctacaatgaagtatatgcagaggaggtc

SEQ ID NO: 797559 - DNA, 95 bp, Homo sapiens
agcgtcagaaataagccgttttttgacatctgtacttcaagaaagaatttctctgcaaagaatgtccaaaaattcatattcacattgatcgtatc

SEQ ID NO: 797560 - DNA, 75 bp, Homo sapiens
agctactgcagacgacgagctgagcttcaaaaggggggacatcctcaaggattggggtgcccaacagaagaaagc

SEQ ID NO: 797561 - DNA, 90 bp, Homo sapiens
tcacatggtcgggatggacatgctggagaaaaaggggatccaggacctccagtatggcatttcaaatatagatacaaccattgaaggaac

SEQ ID NO: 797562 - DNA, 90 bp, Homo sapiens
tccaggccaagagggatccttcacccgtgtctggccacggcgtatgcctccgaggacggggtcctgaccgaggccatgatggacacccgc

SEQ ID NO: 797563 - DNA, 75 bp, Homo sapiens
gaccacttcctgtgtctgtgggagcactgtgagattttgaagatgtaactgagtttctggaagaggtcattgaag

SEQ ID NO: 797564 - DNA, 82 bp, Homo sapiens
taataacaccaggacaaagttaagggatcactactcaagcataaggttgtggaaaatgcccttaaagtgaacccaatactag

SEQ ID NO: 797565 - DNA, 75 bp, Homo sapiens
cagatatcatccgaacatgtttgggacccaagtccatgatgaaggtacatgtccagggccgccgggtccccttcc

SEQ ID NO: 797566 - DNA, 121 bp, Homo sapiens
tgcggaccgtggccatcaagggcgtgcacagcgtgcggtacctctgcatgggcgccgacggcaagatgcaggggctgtgctcaggagctgtcccaggaaatcaaggcttttctgactggcg

SEQ ID NO: 797567 - DNA, 100 bp, Homo sapiens
aagtgaccccgttgctcacatgattggagtaatatctgtggagcctcctggcatacccctttggtttgacatcactgaaattgcatctgatggtctcaag

SEQ ID NO: 797568 - DNA, 98 bp, Homo sapiens
accactgtcccatcaaatcgcgcaaaggggatgtcctgcacatgcactacacggcgctggggctgtggagatccggagtcgccacagctcctaccccg

SEQ ID NO: 797569 - DNA, 75 bp, Homo sapiens
ggaacagcagaaagtccttcatgaaaccattaaagttttagaagatcgctcgaattacatctttacaagaggagg

SEQ ID NO: 797570 - DNA, 90 bp, Homo sapiens
gagcgacgcagaagacgggtgatttctgcatttccatctgagagcttttgaggagaaacgaaaagaacaggaagaaaaagaacaccaaat

SEQ ID NO: 797571 - DNA, 90 bp, Homo sapiens
caagcggggcgctgtgtccccaagctccccgtcctcggggtcttactgaagtaacacaaagcttaaaaatggaaaatgaagagtttaaga

SEQ ID NO: 797572 - DNA, 96 bp, Homo sapiens
ctgggatgaactgatgaagacaaggccttccagtttggaatgtgtgctgtatttatggagtttaaagattaatcatcccaaaacattgtttctgct

SEQ ID NO: 797573 - DNA, 100 bp, Homo sapiens
accacatgattgatgacagtatgatctgtgcaggaaatcttcagaaacctgggcaagacacctgccagctgcactgggtgttcaacagccatcactcctt

SEQ ID NO: 797574 - DNA, 75 bp, Homo sapiens
tgtaattacagctactccagcaacatcttgtccataaggctgaaccggcaaacctaccgggacctgaaggatcgt

SEQ ID NO: 797575 - DNA, 98 bp, Homo sapiens
gagttcgtctcttacgtctgcggaagtgcagctgcctcagttcttagcgcagccggcccaggcctttgtggtgaagcggggcgtccacgtgtcaggag

SEQ ID NO: 797576 - DNA, 89 bp, Homo sapiens
tgcggggccgcagggcgacgaggacctgctcggggtcccggacgggcccgaggccccggaccacggaggggtgatcgtgaacatcactg

SEQ ID NO: 797577 - DNA, 151 bp, Homo sapiens
gctaacctagtctttgtagctgcttaggcagcaagtatgtcagtgaggagacttgtcacatgcatcaggaccagagttctagagccagtacaaaagcctcatgaaggtcctggagaaatggggaaaccagtcgtcattcctaaagaggatc

SEQ ID NO: 797578 - DNA, 100 bp, Homo sapiens
tataactcctgagaatagtggttcttaactctccccagacgaatagcaccaaaaacagtgcagccgccaccagccccaaagggacgcttcctcctgccgc

SEQ ID NO: 797579 - DNA, 100 bp, Homo sapiens
tggcgggcgtgggaacccaggccccgccgaggcggccagtccacattcttgagtctgatgacctccacggccagcgaggcagcgtcctatgagttcacca

SEQ ID NO: 797580 - DNA, 100 bp, Homo sapiens
taaagttggaacacagcagagggtgtgtaataaaatacaggaaactatgtcttcagttatgaccagtttttcagggacaagatcatggagaagaaacagg

SEQ ID NO: 797581 - DNA, 100 bp, Homo sapiens
gcgccccggcccgacatggcgccggagctgaccccggaggaggagcagggacaacaccttccatccacatatgggacgccatgaccaaacacaccctctc

SEQ ID NO: 797582 - DNA, 101 bp, Homo sapiens
ctttgcccccaatatcctggagaacagtgaaggcatccgtgtcattctggaccttactcccaactaccggggtgagaactcgtggttctccactcaggttg

SEQ ID NO: 797583 - DNA, 100 bp, Homo sapiens
gcagccgagtctgacggcgccggttcgctgcccggtccgcccgcggtgagagacatgaagaggagcatcggcggcgtgaggaagaaatgatccgacacag

SEQ ID NO: 797584 - DNA, 75 bp, Homo sapiens
aggccgtggtgtggagaggccccaagaaaaacggtggtcttttgggatcctgctatgggagatcttcaccctcgg

SEQ ID NO: 797585 - DNA, 101 bp, Homo sapiens
caacggggaagtcacccagcccccaaggattctgggggaggcctcaggaattttggagagtaaaaggctgaaccttgttaaagagaaaaccattaatcaga

SEQ ID NO: 797586 - DNA, 51 bp, Homo sapiens
gcactgccgcttcggtcactactgtgaggtggagcagtgggactcggatga

SEQ ID NO: 797587 - DNA, 74 bp, Homo sapiens
gccttcatcgacatcagtgaagaagatcagatgccatgaagtacaccattgtggtgtcggctacggcctcggat

SEQ ID NO: 797588 - DNA, 90 bp, Homo sapiens
aaactctatttgccaaaggaaacttgccttatcaccttcttgcttgcaggaggaagtgcttgaaacctcgtcagcaccacagaaaactgc

SEQ ID NO: 797589 - DNA, 99 bp, Homo sapiens
gcggcgctgttgctgggctcggcgtgctgcggggtcttgctcctcagaacaaaccagaattgcagaaggtgatggaaaaaagaaaacgagaccaagtaa

SEQ ID NO: 797590 - DNA, 101 bp, Homo sapiens
gcgcagcaaggctgacgtggagcggtacatcgcctcggtgcagggctccaccccgtcgcctcgacaggtgatttggatatctactctggagataaagttgg

SEQ ID NO: 797591 - DNA, 100 bp, Homo sapiens
aacaaggacgccggatgaagcgaatccatgctgtggctaacattggcacggcactcaagttcctcgaaggaagaaaggtgcactcagctaaacacaaaag

SEQ ID NO: 797592 - DNA, 100 bp, Homo sapiens
gctctgtcagcatgaacaccttctccgacagcagcacacccgtaaaaagatggcctatcagaaggtccatgcagatcaaagagctccaggacactcacag

SEQ ID NO: 797593 - DNA, 100 bp, Homo sapiens
gctcgataaatcagacagaacagttaatcctcaatttaagcctgatctaacccctagaaacaggttcttgatacatatttgccagacttcaagatttcag

SEQ ID NO: 797594 - DNA, 100 bp, Homo sapiens
gggcatccaaatcttgcggcaacgcccccgggacatgcatcgtcccctggactctctcaacacaagtgcatacaccttgatagcaccaaatataaaccgg

SEQ ID NO: 797595 - DNA, 82 bp, Homo sapiens
ggaggtggaccggagctcgtccagctgcgtgcctaggtcagcccaaggccaaccccactgtcactctgttcccgccctcctc

SEQ ID NO: 797596 - DNA, 100 bp, Homo sapiens
agcccgtggtgtccagcacgcctttggtggacttcttgatgcagctggaagattacacgcctacgaagacagcgacagctgtggcgcactgcaaacgcgg

SEQ ID NO: 797597 - DNA, 82 bp, Homo sapiens
tgcagccgcgaggaggcgcgggaggtgttcgagaacgaccccgagacgagaagaaatgttcccatgaagcctccagatgaag

SEQ ID NO: 797598 - DNA, 100 bp, Homo sapiens
tggttgtgtaatgaaaattacaaggtcgttgaacaaggtgggaaaggtttttattcctggactgccagctccctctctgacgatgtccaacacaatgcct

SEQ ID NO: 797599 - DNA, 50 bp, Homo sapiens
gaaagagttcaggaagcacggcatagacttcacagagaatgcagttgtct

SEQ ID NO: 797600 - DNA, 98 bp, Homo sapiens
ttcaatgagtaaacatattcctgttgaaaggattgttgacaaaaggaaaaataaaaaagggaagacagagtatttggttcggtggaaaggctatgaca

SEQ ID NO: 797601 - DNA, 100 bp, Homo sapiens
ggagccgctggctgcggcagcaggggactagcgtgagagcactattcctgatcagagaactccagttgcttcaacacacagtatcagtagtgcagccacc

SEQ ID NO: 797602 - DNA, 80 bp, Homo sapiens
ctggcaggtgttggtgtccagatggatcgccttcgcagggctaggtgaagctgtacttcacaaaaacagtagaggagccg

SEQ ID NO: 797603 - DNA, 60 bp, Homo sapiens
gcccaattacaggcacccacctttaccagtaccgaggtctgctggcgacggcgacagttc

SEQ ID NO: 797604 - DNA, 90 bp, Homo sapiens
ctcagcctcccgggtagctgggactacagagcaagatgagacaggccttaggatttgccaaggaagccagagagagccctgacacccaag

SEQ ID NO: 797605 - DNA, 75 bp, Homo sapiens
gcaaggactggttccacggcagtgcactgacaggcagaactcaccagtcacatcaccaggatcctctccccttgc

SEQ ID NO: 797606 - DNA, 100 bp, Homo sapiens
tcaacagatgcccctgataaaggatacgttggagatgttagaagctctcaaggcactttcaaccttttttgttgaaaatagtctgcggactcgaagaaat

SEQ ID NO: 797607 - DNA, 100 bp, Homo sapiens
acaaaggatgcctccacacctaccactacccgtgtgccagcgatgcaggagagccagaacctgttctgctgcctgtaccgctcctggtgccacaacccag

SEQ ID NO: 797608 - DNA, 90 bp, Homo sapiens
ggattatcttagaattttaagatacttcaggggccctggcctccagtctgagtgctgacctcgaagagcccctgagtgaggaggagacag

SEQ ID NO: 797609 - DNA, 82 bp, Homo sapiens
ccactttcgccagcccgtgccgcgagcgcggcctgcaggaggtgagccaccagctgggcagcatcatggacctcttcaccac

SEQ ID NO: 797610 - DNA, 80 bp, Homo sapiens
cttctttgccaggtggggacttaaagtgtcagcggccggagcggcagctcagcaagtggtggaccaggccacagaggcgg

SEQ ID NO: 797611 - DNA, 95 bp, Homo sapiens
gctgtcctgagtgaaacttttaggtgggcaagttacggaagcaatggctaaaggaaagtatctctgatgtcggctttgggatgctgaagtctgtc

SEQ ID NO: 797612 - DNA, 90 bp, Homo sapiens
cggtcagaagctcaaagagtccgtggggttcctcatcaagggaagtgtggctgggggcgccgtctacctggtgtacgaccaggagctgct

SEQ ID NO: 797613 - DNA, 75 bp, Homo sapiens
cctgcaaaggagtccctagagacacctagtaatgaagctaaaccagccccagaaatatttgaaaatgaagtcatg

SEQ ID NO: 797614 - DNA, 82 bp, Homo sapiens
atggtgttgggcgccgggcccgcctcgcctgtctcggggagcccagggtgaggtggctttgaccccgggttgcccggccagc

SEQ ID NO: 797615 - DNA, 80 bp, Homo sapiens
cggctgcacgtctcgcggatcatgctgtgtggacactgccagcggctgcagccgacttggaatgacctgggagacaaata

SEQ ID NO: 797616 - DNA, 98 bp, Homo sapiens
gcctcctcaacgaatacggcgacgacatgtatgggccagaaaaggacgtagacaagtttggcaacgagatcacccagctggcccggcccctgcctgtg

SEQ ID NO: 797617 - DNA, 75 bp, Homo sapiens
attttcggcaaccgctgctggcagttttgccaggtgtttgttaccttgtaggaggaatactgttggcgttcaaaa

SEQ ID NO: 797618 - DNA, 90 bp, Homo sapiens
taaacatcggggacctacaggttacaaagggtgtccgcaatgttgccagtgtctgtctgcagattggctacccaactgttgcatcagtac

SEQ ID NO: 797619 - DNA, 75 bp, Homo sapiens
gtggagccaccagcctctccttgttattcagggaccctctcccctggatttgaatacagaattaccttatcaaag

SEQ ID NO: 797620 - DNA, 96 bp, Homo sapiens
gctggatcacaatgaatgtctaattatcacagaggagaaggcagagcccccccaggctatgaatgccctgatgcggttgaaccagctgaagccagg

SEQ ID NO: 797621 - DNA, 75 bp, Homo sapiens
caaagaggcatttgaagtctttgaccatgagtcgaataatacagtggatgtgagacagtctcactctgttgccca

SEQ ID NO: 797622 - DNA, 100 bp, Homo sapiens
aaagggagcattccgatcatctgaggaacagcaggctccccaaaaaggccacaaagacagccccacctgccctgcctacaggttatgattcagaggagga

SEQ ID NO: 797623 - DNA, 80 bp, Homo sapiens
ggaaaagctcctattctgattgctacagatgtggcctccagagggctagcaataatgacgatgaggacctgacaccagag

SEQ ID NO: 797624 - DNA, 100 bp, Homo sapiens
ggatctttcagcgaataaaattgaagtgctttctcctgctcaagacagccacacgaacacggatctccccccagtgtcagagcagatcatgcagactctc

SEQ ID NO: 797625 - DNA, 100 bp, Homo sapiens
ccaaatacaactggaaaacagctttttgatcaggtggcaagtgggatgatactggtcatggctttctttctcatcacctacacctttcattcaacctggg

SEQ ID NO: 797626 - DNA, 100 bp, Homo sapiens
cgaagctggccgagcaggctgagcgatacgacggcgtcacctcctcctgtcgcctggccctcgccatgcagaccccgcgagcgtcccctccccgcccggc

SEQ ID NO: 797627 - DNA, 90 bp, Homo sapiens
gagaaatctcgtctcgaccaagagctgaagctgatcgtttgcctatctggggcgcctggctcacgaggttggctggaagtaccaggcagt

SEQ ID NO: 797628 - DNA, 90 bp, Homo sapiens
cgactagaaggacgactgcctggcgcgatacaaaaatgaaatgctgtctatgatttcttcattggccgtgaattaaaccctcgaattggt

SEQ ID NO: 797629 - DNA, 50 bp, Homo sapiens
gtccggactcccccgatcccaggtcaaaatgcagatcttcgtgaaaaccc

SEQ ID NO: 797630 - DNA, 51 bp, Homo sapiens
gtttccacagtgattgatgctgcctcagcctttaaatctacaagacagcag

SEQ ID NO: 797631 - DNA, 50 bp, Homo sapiens
gggaatacaagtgtcatgtctgtggaataatccagaatggctactctgat

SEQ ID NO: 797632 - DNA, 75 bp, Homo sapiens
agtccatgtacacgcgagattataagaagcttgggttcattggagatcttgtgcgaaaactcaaagaagataaag

SEQ ID NO: 797633 - DNA, 80 bp, Homo sapiens
acattctcctgccctggcgctgacaagggtccagcctccgatgccatcgaagacggcaatttggaggaaatggaagagga

SEQ ID NO: 797634 - DNA, 152 bp, Homo sapiens
tcttcagcgacatccactttgggaacatccaacagatcaacgacgatggctccaggaggatcaccattgtggaaaatgatctcaatgccacccaccaacactgtgttttggccggttcacaacctcggtttagttccacccaccgagtggca

SEQ ID NO: 797635 - DNA, 82 bp, Homo sapiens
caacgaaagaccctgaactagagtcccaggtcaacctgtaagttgcaaaagcttctcatttcagagagatgccaggatccta

SEQ ID NO: 797636 - DNA, 50 bp, Homo sapiens
gctggaggaagatgcagagctgctggtggtgatctttgtgaagtctgtgc

SEQ ID NO: 797637 - DNA, 75 bp, Homo sapiens
ccaggcctggctcgcgcctctcccaggacccgcctggctgcgagatatgtattatagctgcaaatgtccttgtat

SEQ ID NO: 797638 - DNA, 100 bp, Homo sapiens
ctaatggatatgtgctttttggaaaacccatggtggttcttccacgagttctgcatccgtggctggtgcatcgtgggaaagaagcaaacgtgtccctact

SEQ ID NO: 797639 - DNA, 82 bp, Homo sapiens
caagagcttagttgaactcctttgtggcaaaggagcagagaactttgacaagttcttcacacgaggacagcccgtcttaaca

SEQ ID NO: 797640 - DNA, 100 bp, Homo sapiens
cctttaagcagcagaggagcacgaggatcgtgggagctaagaaattctgaaggaagatttccattaggtaatttgtttaatcagtgcaagcgaaattaag

SEQ ID NO: 797641 - DNA, 126 bp, Homo sapiens
tgtggacgataattcaaaaacactatcccagggagtgcaagcttagagcgtctggccaagaatcagaggaagtgggtccttgaatgggcaagagggcacatgaagtacggcgtcctccacattcac

SEQ ID NO: 797642 - DNA, 97 bp, Homo sapiens
ttataaagttctgccgggaagcaagaggcaaagagaatcggttgacacagcaggatgccaatgcctcttccctcttagacatctatagcttctggct

SEQ ID NO: 797643 - DNA, 134 bp, Homo sapiens
tgcatgcagcggttcattaaaatcgatggcaaggtccgaactgatataacctaccctgctggattcatggattctggaagaagcaactgaagaagaaacagcacttcataatcgaattatgcccacagtggttc

SEQ ID NO: 797644 - DNA, 100 bp, Homo sapiens
gacgctgagaggaggccccgggagggcagccactccccgctggacagcgccgacgtccgggtgcacgtgccacgcacgaacgtgctggccaaagcgctct

SEQ ID NO: 797645 - DNA, 83 bp, Homo sapiens
aggaaccactcattcacttctagacgacaaaatgcaaaaaaggaggccaaagactttaatgaagagttgagtatcttatatcc

SEQ ID NO: 797646 - DNA, 50 bp, Homo sapiens
ccaccgccctggccatctaccatgtgagctgcagcagttctataacagcc

SEQ ID NO: 797647 - DNA, 75 bp, Homo sapiens
tgagagttggccccgatatccgctcagggtgctggagaatctggtaaaagcaccattgtgaagcagatgaggatc

SEQ ID NO: 797648 - DNA, 80 bp, Homo sapiens
gctctccagtgaaacaaactcatattgatattaattccaaaatcaggtgactgaacttgaatgtgttagtagccaagcaa

SEQ ID NO: 797649 - DNA, 50 bp, Homo sapiens
aggagtggattaagtgcattaacaaccatgtccaagggacctgcagttgg

SEQ ID NO: 797650 - DNA, 100 bp, Homo sapiens
aacaaggctgactataagaggggaagatgttgaaacatttgtagcagatatactgaaaggagaaaatttatccaagaaagcaaaggaaaagagagaatcc

SEQ ID NO: 797651 - DNA, 82 bp, Homo sapiens
gccagggaaccctggtcaccgtctcctcagctgcctgtggaggaaccgattgtgtccacagatgaggtcatcttcccactca

SEQ ID NO: 797652 - DNA, 100 bp, Homo sapiens
gctgcgagagtggcagaggagctggcggagagcggcctgcgggcgatcgggccgaggaccctttgaggatgccctgaagttgcatgagtgctcagtggcg

SEQ ID NO: 797653 - DNA, 99 bp, Homo sapiens
aaaatttcatggagaagaaggccttgactacggaggggttgccagtacaaaattggacagctgtacatgatcagcaaacacagccatgaacagagtgac

SEQ ID NO: 797654 - DNA, 98 bp, Homo sapiens
gctatcccctctgacgtctcccacttccgcttccatgagtttgggctttgcaaaactgagaacaaagccaagtcgggcaaacagaattcaaagaagct

SEQ ID NO: 797655 - DNA, 51 bp, Homo sapiens
attccaagtaactcttatttggccaccaccacctatcatgacagatggtga

SEQ ID NO: 797656 - DNA, 100 bp, Homo sapiens
tttggacatgcacaccaaaccctggattagagcaaggagtgacagttcatttagattctttgtattcttcttcgtctatatttgtcagtttgctgtacat

SEQ ID NO: 797657 - DNA, 88 bp, Homo sapiens
cagcatctaagtggccaaaagtggaggatcctatgcctgaatctaagggctgttgataatcaggtgtatgtggccacagcctctcctg

SEQ ID NO: 797658 - DNA, 97 bp, Homo sapiens
agcccattggtgtctgtggggccatcactccagacgcgtgggagagcctcttctccagggtgtcgctgcgcctggtgggcctgaagaagtccttcta

SEQ ID NO: 797659 - DNA, 88 bp, Homo sapiens
cgcgcacgggcgccacgcgcggcgcatcacggtgcgcgtggccgatgccatggacaatattaccaggcagaaccaattctacgatacc

SEQ ID NO: 797660 - DNA, 87 bp, Homo sapiens
aagctggaggagcggctgaagcgcgtgcgcatgaagaggccgtgaatgaggtgaagcggcaggccatgtcggagctgcagaaagccg

SEQ ID NO: 797661 - DNA, 100 bp, Homo sapiens
gagtccagcgtcgccgcagccccccaatgcggccgcgagaagcagcgggggggcaggcgatcgaaggctccgtccatgccacatcggtagcagcctcaag

SEQ ID NO: 797662 - DNA, 50 bp, Homo sapiens
ccagccagtcagcacaaaggaggacgtgattctgaagggagtggtaatgg

SEQ ID NO: 797663 - DNA, 88 bp, Homo sapiens
agataggaggtccaaaagaagaacttattccagagaaactggccaaggctctatctaatgttcctcctctccggaactactttctgga

SEQ ID NO: 797664 - DNA, 98 bp, Homo sapiens
cagcagcctggcagcagcccccggggcaagagcaggagcccggcaccccccgccgacaaggaggtctccaacctgtcccagtatttcagcccagcctc

SEQ ID NO: 797665 - DNA, 97 bp, Homo sapiens
cgccgccgccgccgctgccgctgccgctgccgcacctccgtagctgactcggtctatgaaggcctagacatcatcaccaacaaggtttctgcccaag

SEQ ID NO: 797666 - DNA, 97 bp, Homo sapiens
caaataccttgaagtccaatatgaatgtgtcccttacagtgtggatgaggtcaccattgtcaacattttgaccaaccgcagcaatgcacagagacag

SEQ ID NO: 797667 - DNA, 83 bp, Homo sapiens
aagcattcaaattgctcacagctgatcctaaggggcaaatcgaagtagagagcgaaaccatcttcaagttagcagcgtttatt

SEQ ID NO: 797668 - DNA, 82 bp, Homo sapiens
agggaaccctggtcaccgtctcctcagatcaatgtccgagttaccaccatggatgcagagctggagtttgcaatccagccaa

SEQ ID NO: 797669 - DNA, 88 bp, Homo sapiens
aggcagttggtggaggccttttatagtggtattcagttaagagaacaattatttcgtataagccacatcagagacgactgaagatgaa

SEQ ID NO: 797670 - DNA, 74 bp, Homo sapiens
agcagtggcttggtacaagcacttcttactgtgttaaacaatataaagtcagacctaaagccaaaaggaaagaa

SEQ ID NO: 797671 - DNA, 75 bp, Homo sapiens
gtcctacttccagaatgcacagatgtctgaggacaaccacctgagcaatactacccattttcaaagatactcaag

SEQ ID NO: 797672 - DNA, 78 bp, Homo sapiens
ttccatcgagccattactacagatgcctgtgaggagccaccaacatttgaagctatggagctcattggtaaaccaaaa

SEQ ID NO: 797673 - DNA, 50 bp, Homo sapiens
cgccatccagccaccattccaaggttgtccccccggcacgctccacagct

SEQ ID NO: 797674 - DNA, 75 bp, Homo sapiens
gcagaaggtctctggagacatcttcagcagctctccctgtccagccgcctgcagctgaccctgtaccagtacaag

SEQ ID NO: 797675 - DNA, 75 bp, Homo sapiens
tggatggacttgattctgatgagagaaatgcactcggtgatggaaagagagccactattctgaagaacacttggc

SEQ ID NO: 797676 - DNA, 75 bp, Homo sapiens
acctgcacccgctcagcgagctcctgggcatcccgctggaccagctatccaacttgataaagtcaatcttcaagt

SEQ ID NO: 797677 - DNA, 98 bp, Homo sapiens
ttttcagtgccagtccatccatcacgaccacatttgtcatgatgacagtgacaagataacgaaggaggcccaacttcattcaataaggagcctgacgg

SEQ ID NO: 797678 - DNA, 50 bp, Homo sapiens
gaaatagacatcacagatgcgctggatcagctcctttgtggcagtaaagc

SEQ ID NO: 797679 - DNA, 90 bp, Homo sapiens
caggaggcagtagccaaacacccagccaaaagaatgcaatggtgtaaagattccagttgatgccagtaaacctaatccaaatgatgtgga

SEQ ID NO: 797680 - DNA, 82 bp, Homo sapiens
ggcagacgcggtcctggatatacttcaggagaactgtgtttatgaaactgtagttttgcctttggatgaaagggcatttgag

SEQ ID NO: 797681 - DNA, 75 bp, Homo sapiens
ccaaaatggccacttacctgactggggaactgacggaactaaaattccagatggcaaactcaatgaatggcagaa

SEQ ID NO: 797682 - DNA, 75 bp, Homo sapiens
actgcaactgctggattgctgcaaggctgagggacgagaacgaggtgcaacacgcaggactacatctggcacaag

SEQ ID NO: 797683 - DNA, 100 bp, Homo sapiens
tgaaggaaagagctcaaagatttggtttgaatgtctcttcaatctccagaaaggagcttgtggtgctttgccacctccaccaccccagtttgatatcttt

SEQ ID NO: 797684 - DNA, 100 bp, Homo sapiens
caaggacttcctgctcacagcccgacgaaaggatgccaaatggaccagccaccactgttgccttttcaagaacgggggagtattttgcttctggaggctc

SEQ ID NO: 797685 - DNA, 75 bp, Homo sapiens
attagaaagacatcaactcactgaagtagataggaaccaaggctttagccttctcaactcattgactggaacaaa

SEQ ID NO: 797686 - DNA, 100 bp, Homo sapiens
ggacggcttgacagccctgcaccaggcagtgtcatcattaggctgtctttgtgccttaacagtattgatcaggtattgtaatagagattttgatgatgag

SEQ ID NO: 797687 - DNA, 75 bp, Homo sapiens
acgcctagtacaccacgaagggtcacacaagatcagctgtttcatgtattagccttgcacatgcggctttatagc

SEQ ID NO: 797688 - DNA, 101 bp, Homo sapiens
ccaaagtcttggaacagcgacgacaaggcttggaaacatacttacagatgcggtgatgggagccatatacacaaagatgaaggactggctacagctttcac

SEQ ID NO: 797689 - DNA, 50 bp, Homo sapiens
gccgcgcgcctttgtgcgcgcgccgagggatcgcttacacctgagacgaa

SEQ ID NO: 797690 - DNA, 100 bp, Homo sapiens
aaaacatgaagcagatgagttgagtggagatgcttctgtggaagatgatgcttttatcaagatctcactgatgaaaaggcctccaggtttttcacctttc

SEQ ID NO: 797691 - DNA, 100 bp, Homo sapiens
tcggcgccccgccaagggcgcagattctttctgtacggagaatggggtactaagagaaaagcacgaagctgtggatcatagttcccagcatgaggaaaat

SEQ ID NO: 797692 - DNA, 80 bp, Homo sapiens
gtggaggaaaacaacttcgagggcagaatgccttcaattaagttgcagagttctgatggagagatatttgaagttgatgt

SEQ ID NO: 797693 - DNA, 50 bp, Homo sapiens
cctcatgtgggaagaggaattcaccttgtcttgtccaataagcatgtggc

SEQ ID NO: 797694 - DNA, 100 bp, Homo sapiens
caagcacaaactgaccaagcacagagtcaccagtttccatatgtaatgcaaggtactatactggcaattgctggagaagattttgcaattgttgcttctg

SEQ ID NO: 797695 - DNA, 88 bp, Homo sapiens
tctaccagcccatgcccctgaaggcctcgctggagatcgagtaccaaaacttcgagaaaccaagacctctgaatacttcagcctttcc

SEQ ID NO: 797696 - DNA, 100 bp, Homo sapiens
cctggtcatcatagtcagtctgggatatggcatcgtcaagttttgatgatgatggttcagaatttcatgaacatatatttctggagaaacacctggagag

SEQ ID NO: 797697 - DNA, 96 bp, Homo sapiens
acccatggacaggagaagacacccctggagcatatctttagggccatcctcatcaagaaaaccgacagatccaggaggctgcaagccagggcctga

SEQ ID NO: 797698 - DNA, 83 bp, Homo sapiens
cttcggcagtccacccaccgccgccgcctcccaggcacaggctgcatgtgattgtggatgaggtctacatgctgtccgtgttt

SEQ ID NO: 797699 - DNA, 85 bp, Homo sapiens
cgggtcccgagcactctgtgccggaggatccagacacattagtcaagctgcagccaaagtcgacgttgaatttgattatgatggg

SEQ ID NO: 797700 - DNA, 80 bp, Homo sapiens
ctgaagggggactacaggttcgagaggccatgaagcccccaggaggagaatcgagcaatctttttggaagtccagaagaa

SEQ ID NO: 797701 - DNA, 123 bp, Homo sapiens
ttggaagagggagtcaccactggacctccaaggaagccacgtgcagacatctacaaccttcgatctcctgacgaaggagaggagacgccgtgagcgggacgaccagatgtaccgagagcggct

SEQ ID NO: 797702 - DNA, 90 bp, Homo sapiens
tgcagctatcgtggacgtcactggccctggtggggattgacagccacgggaaggaagctcttcgtgggcggtcttgactggagcacgacc

SEQ ID NO: 797703 - DNA, 83 bp, Homo sapiens
gtgaagaaactgtgttccccccttgggttgctatcggggatgaacgtagggcacttagcttcttccaccagaagggcctccag

SEQ ID NO: 797704 - DNA, 51 bp, Homo sapiens
gtcgggtcatgtatacaataatcagttactatactggcaattgctggagaa

SEQ ID NO: 797705 - DNA, 75 bp, Homo sapiens
aaggataaaaagggatattcaccccttggcacatctactatgcttcttactagaataaactgtgcagattggtct

SEQ ID NO: 797706 - DNA, 100 bp, Homo sapiens
actggccagagtgaccaggctgaccagcaccagccctgatccaggtcatgaatgaaaaacttcagcactgcatggaactaacagatctaatgcggaatca

SEQ ID NO: 797707 - DNA, 88 bp, Homo sapiens
gaattgtggccatttgatataattctggatggaagacctcttatttgtattacattgaattagagaaaaagcttgtggtgaagggggg

SEQ ID NO: 797708 - DNA, 100 bp, Homo sapiens
gcaagaaagaaaattagagtgaatgtagttgcaccagaacccacaatacattatatgcaccagaaatgctagccaaaatggcagagcctttcaccaaggc

SEQ ID NO: 797709 - DNA, 100 bp, Homo sapiens
ccgggctggagcctctggaagaaggatgagttagatgaactccgtgctgagatggaagagatgagagacagttatttagaggaagatgtttaccagctgc

SEQ ID NO: 797710 - DNA, 51 bp, Homo sapiens
gtgcctccgacgcctcctgatggttggagcaaaacgtcccactcactggag

SEQ ID NO: 797711 - DNA, 97 bp, Homo sapiens
attctacatcccagacaaatggaagtgttatgatgcccttcgaaaaatgatcaactattgaccatataggagctgactaaggctttggaacagaaac

SEQ ID NO: 797712 - DNA, 86 bp, Homo sapiens
cgaggacggagggccatgtgttgggtcagcaccatcagctgagctgactgctgcccactttggaggaggcggtgggctccttcaca

SEQ ID NO: 797713 - DNA, 74 bp, Homo sapiens
tggatgtgaaaatgaagccagaccgaggtgttggagagcacaatggctgaacaagtccttcctcaggctttgta

SEQ ID NO: 797714 - DNA, 88 bp, Homo sapiens
tcgaggccgctttggcgccaaatcctgaggctccaaccaggaatggagacgccattggatgttttgtccagggcagcatctctggtgc

SEQ ID NO: 797715 - DNA, 80 bp, Homo sapiens
ttcagcgccctggtcaagacgctgcagcgggactgcctggccctgggctgcatcttgtacctgctgtgcttccggcagca

SEQ ID NO: 797716 - DNA, 98 bp, Homo sapiens
gttctgaactttccttgaacagaggtcttgaggccagaaggaagaaggatcttaaagactcatttctctggaggttgcacgttttcaaaaaataccta

SEQ ID NO: 797717 - DNA, 90 bp, Homo sapiens
tggaagagtatgcctgggtcccgccgggtctgaagcctgaacagctcaaagttatgaagtttcaggatgaattggaatctgggaaaagac

SEQ ID NO: 797718 - DNA, 96 bp, Homo sapiens
gtctcacctgaggtgaaccttcgaccttggacttctcagcctccagaatggaatctgaacctgtgatgttaagaaatcagtaaatattaaaaagaa

SEQ ID NO: 797719 - DNA, 100 bp, Homo sapiens
aggagatcatgtccatcaccgagctgcagggaaccgcatcacagaggtggggctggagggcttcctcgccacggtgcagtatcagatgcagttctccaag

SEQ ID NO: 797720 - DNA, 75 bp, Homo sapiens
accctcttttccagtataagtatttggctcttaatatgcattatgtagaatggcttattcagaagagcataaagg

SEQ ID NO: 797721 - DNA, 90 bp, Homo sapiens
gtgcccttgtggcgaatggggctcacgtcgagcattgggatcccgtggcagttgcagcactgaagtggagaaggagacccaggagaagat

SEQ ID NO: 797722 - DNA, 100 bp, Homo sapiens
caaggggattgcctggcaggacgtgaaggggaagaggcccaccctggagtaaccctcactggagaatccagagcacctggctgcagtggaagaaagaaag

SEQ ID NO: 797723 - DNA, 110 bp, Homo sapiens
tttcaatattggaagcgctttgatttacagcagctgcagctggagatggagctgaagatgctgaagtctcagtccagctctgccgaacagagcttcctgttctccaggga

SEQ ID NO: 797724 - DNA, 83 bp, Homo sapiens
gccgtgccctggggctgagccctcaggtgggacagtcacttcctcctccctccccacccctgtcgcatccacgtgcgacctgg

SEQ ID NO: 797725 - DNA, 82 bp, Homo sapiens
ggaggttccttcactgtgcgtgctgaccatggtgagaagccctaccactgcaactgggacggctgcggctggaagtttgcgc

SEQ ID NO: 797726 - DNA, 119 bp, Homo sapiens
aaaacccttgggtgcagatcatgatgtttaagaacatgacgccgtcacccttcctgcgattctacttaggggtcgggccccggctcagtggtcccaggcagctcgggtgtcggaacccc

SEQ ID NO: 797727 - DNA, 60 bp, Homo sapiens
gccgcgctccaaccgcctcctcctcctcagtaacgcggccgctgttgtgacaagaaaagc

SEQ ID NO: 797728 - DNA, 100 bp, Homo sapiens
tgaaaatgcaactttagatggcggagatgttttattcacagaaaaggaacggctgtagtagatctctctgggaatggcgacccctcctcaatttgtactg

SEQ ID NO: 797729 - DNA, 100 bp, Homo sapiens
gctggtcccagcaggagcgccaactcaggcagcttggttcaccatctgccacaagacagaggttgtgaaaaacacgctgaatcctgtgtggcagcccttc

SEQ ID NO: 797730 - DNA, 75 bp, Homo sapiens
agaaatggaagcagctaggcatgaacaccaattaatgctaatgaggcaaggtattccaatgctgctagagttctt

SEQ ID NO: 797731 - DNA, 50 bp, Homo sapiens
ctgggatgccaacgcgcccaaggaagcctcccagtgcaacgtcagcttaa

SEQ ID NO: 797732 - DNA, 75 bp, Homo sapiens
gaagctgcccttcaccgcgggcgccaatggggagcagaaggactcggacacagttctgggaagtcatcagtgatg

SEQ ID NO: 797733 - DNA, 75 bp, Homo sapiens
tcggacctgtccagtctgctggagcagtttgagaaatcagaagttccttcctgtgtacagcccttctgaggagga

SEQ ID NO: 797734 - DNA, 100 bp, Homo sapiens
ttcaggctgcaacaaggagaagagccatggaaacaggaggaagaattcccaagccaaagctttccaggggttgtagaaggtgatttagctgccatagaag

SEQ ID NO: 797735 - DNA, 75 bp, Homo sapiens
tggcgcttcctgcgcatcgtctgcaagaccgcgaggcgagacctcttggtgtcaaattgagaaccaggtagatcc

SEQ ID NO: 797736 - DNA, 100 bp, Homo sapiens
ccaaaacatccatgagcaactggtagatttgatgttagaagccatccagggagcccctgataccccaatgtccttctttgactttgtggttgatcctcat

SEQ ID NO: 797737 - DNA, 80 bp, Homo sapiens
ccttaagttcgtcgtcttcatcgtcgcggttctgctgccgacctcctgccccccgaggtctgcagtctcctgaacccagc

SEQ ID NO: 797738 - DNA, 100 bp, Homo sapiens
cagctggatgaggaggagaggatgagaatggcagaaggaggagttactagtgaagattatcgcacgtttttacagcttgacaaaagtaagctgaagccag

SEQ ID NO: 797739 - DNA, 100 bp, Homo sapiens
agaagggctccctcgtgaagaacctgaaggacacactaggtgaaattgatcttcaaattctctccaaagttcaggctcaatacccaggagtttgtatcaa

SEQ ID NO: 797740 - DNA, 90 bp, Homo sapiens
cactccctgaaatctggagtgaagaacgccgccatccagccaccattccaaggcatctctgacacgctgtgggccatcgagatgtgggac

SEQ ID NO: 797741 - DNA, 98 bp, Homo sapiens
gtcaccttaccttaaaccttttaagcaaggaaattgaactaagaaatggagagacgttggacctctcgaacaaccagctgagcgagatccctgcagag

SEQ ID NO: 797742 - DNA, 100 bp, Homo sapiens
agagtggggtatttatctataccacaagcaaccacatcaaatatgctgtcaccactgggaggtatatcgaattccaaagaaaagtcaaactgaaaaggaa

SEQ ID NO: 797743 - DNA, 75 bp, Homo sapiens
gtgatcctttgcaccctgcttggagacggacttgcttccgttttattagctctctgggagtgagctacatgatgt

SEQ ID NO: 797744 - DNA, 95 bp, Homo sapiens
tcgccgtggccaacgcgcaggagctgctgcaggatgatcggctgaatgtaacagaggaactaacgtccaacgacaagacgaggattctcaacgtc

SEQ ID NO: 797745 - DNA, 97 bp, Homo sapiens
gcgaagaagtcggagttcagcagccatcagaaccaaggacatgaagaatgcaaccctctccctgaattctaatgacagtgagccaaaatattaccct

SEQ ID NO: 797746 - DNA, 100 bp, Homo sapiens
tggggcattccaggcaaggtgattttatcaaatgtgtggaacagaagctgcgacaacttctgttcaacaagttgtctgccttaagttcttggaagcaaac

SEQ ID NO: 797747 - DNA, 89 bp, Homo sapiens
cggcgtttacccagcgcagcgttccaccgctcgggtttggctgggcgtggtgtccctcgtggccgttcacccctccaccgtcaacccgc

SEQ ID NO: 797748 - DNA, 97 bp, Homo sapiens
agccattttttaaacttaggtatttaagtactgaaaggtgtgatgttagctgttgatgctgtaattgctgaacttaaaaagcagtctaaacctgtga

SEQ ID NO: 797749 - DNA, 100 bp, Homo sapiens
agatcatgcagagtattacctttacaaaagcaaaaccatccttgatagttgcccatatttgtcaatattggctcttcactggtatcctcagcaaatcaat

SEQ ID NO: 797750 - DNA, 75 bp, Homo sapiens
aggaggcagctgcggtggcagctgctgagttctcggtgaaggatgagcaattcttaggttttggctcagatgaag

SEQ ID NO: 797751 - DNA, 75 bp, Homo sapiens
gagtgagtcacccctttccagccagcaaacaaggtgtcagttgtacccgaggcgttctcagcagcagcaagtacc

SEQ ID NO: 797752 - DNA, 98 bp, Homo sapiens
cgcagcggcgcccgcagccgcagccccctgctccggaggctggtgcagatggatcctgagcttgaaaaaaaactgaaagagaataaaatatctttaga

SEQ ID NO: 797753 - DNA, 74 bp, Homo sapiens
gtaagattgtcttggaaatactaagttggaaccaatttagaacttgaattgattcatcgaggaggcaatttgtg

SEQ ID NO: 797754 - DNA, 101 bp, Homo sapiens
gggtgctcgccctggtcttcgggctgtcgctcgtctacttcctcagcagcaccttcaagcagcctttctgagaaaagtctacagcattctttctctgcagg

SEQ ID NO: 797755 - DNA, 141 bp, Homo sapiens
ctcgggcggcgaagacgaaagtcggcacgacgcgctcgacacgcgggtgcggggcgacctcggtggcccgcaggtactataagatctccgtggtgctcatgtgctttgtggtccccacgctggtgccctggtacatctggg

SEQ ID NO: 797756 - DNA, 83 bp, Homo sapiens
ctcacctggcggtgcccgaggagtagtcgctggagtccgcgcctccctggtacctgatggagggcagctacaacaaagtgttc

SEQ ID NO: 797757 - DNA, 100 bp, Homo sapiens
gtcttatcgaaggatgtgcatgaaggacagcctcttctcaatggagcagtgaggagaatgaataccttccaagaccagagtggcagctccagtaatagag

SEQ ID NO: 797758 - DNA, 100 bp, Homo sapiens
ggggctgaaattgccaagaatctcatcttggcaggagtgaaaggactgaccatgctggatcacgaacagaagatggcagtgaacgtatactcaacgtcag

SEQ ID NO: 797759 - DNA, 96 bp, Homo sapiens
gcttctcctactggttactggtatgctggttggtggtaactgtggcagaagagatgtgtgcacagacccaggccatgcagatactggtgcctctaa

SEQ ID NO: 797760 - DNA, 75 bp, Homo sapiens
cgccgaggaggctttcctgctggtggcaaccgcctacgagacactcaaggtacctgcaaggtgtggagttacagt

SEQ ID NO: 797761 - DNA, 82 bp, Homo sapiens
tagttggagcacggcttattgctcatgcaggtgaaagaacttgtcctggacaacagtcggtcgaatgaaggcaaactcgaag

SEQ ID NO: 797762 - DNA, 90 bp, Homo sapiens
gggaacccttcggccgctgagattctgtcgtgtcgtcgctgctggcacttcaggctctggagggcaactagcatggatctgccaatgccc

SEQ ID NO: 797763 - DNA, 110 bp, Homo sapiens
ggaagttgatgtggagggagccaggtgcctatatctttctccaggattttcagttcccaaacccgcttttatctcgtgggtggaaggagaagtggaggcgtggagcccgg

SEQ ID NO: 797764 - DNA, 80 bp, Homo sapiens
ctgggagtgcagcggcctctcctacaggcctatatgaacccaatagcaatggcgagatcaaggggtccaatccagtcttc

SEQ ID NO: 797765 - DNA, 100 bp, Homo sapiens
ccacccccatcaagatcgccctgcgctggcatggaggagtgacggcaggaactttctgtgctctgacaacccttatgcaccaactagaaaaagaaaattc

SEQ ID NO: 797766 - DNA, 96 bp, Homo sapiens
gcagctctgcggggcgcaggaggcggtgcacagcgccaagttctggacttcagtgaccccttcagcactgaagtgaagccgagaatcctgctcatg

SEQ ID NO: 797767 - DNA, 101 bp, Homo sapiens
cgccagcggcgtcgagaggaccatcctgggtgctggccctgtgctggagctgaaagtacccatggcagacaagcctggtaacacagtgaatttccggaagc

SEQ ID NO: 797768 - DNA, 100 bp, Homo sapiens
atgccagtaattctattgaccaccgaattccaaattctcagaggattataagcgccatggctatggctagtgttaaattgcttgccggtgttttaagaaa

SEQ ID NO: 797769 - DNA, 83 bp, Homo sapiens
tgcaagtaaactgtctgaggacttaaataccattccagaggttcacaagtaactctctctcctttgaaaaggcatattgcgag

SEQ ID NO: 797770 - DNA, 83 bp, Homo sapiens
aagacttcaaccaggcttccttgtacccacaggtgaaaaatgagaatggggtactaagagaaaagcacgaagctgtggatcat

SEQ ID NO: 797771 - DNA, 74 bp, Homo sapiens
agctgtcacaagaccaatatttggtatactgggcacaatccatctggtggcagctgccactgcagagccccgcc

SEQ ID NO: 797772 - DNA, 75 bp, Homo sapiens
aatcaactgagagagatgcttaaaaatcaccagttactttaatgacaagaagatccttataggaagaaaaagctt

SEQ ID NO: 797773 - DNA, 100 bp, Homo sapiens
agtttatggcttccagtggaggcattttggggcagaatacagagatatggaatcaggcgggcgctaatattgacacctgctcagaagaccagaggacccc

SEQ ID NO: 797774 - DNA, 101 bp, Homo sapiens
caaaaagtgattaagcagagaatggagaagaaggttgattccaggactttgcctcccgggccaaactggcagttcaaaaactagtacagaaagttggattt

SEQ ID NO: 797775 - DNA, 98 bp, Homo sapiens
ctaaagtagatgaaaagatcagccatgccactgaagagctggagacctataggcccaagtctgttttggtggtctgagaggaaaaaagatgagcttct

SEQ ID NO: 797776 - DNA, 83 bp, Homo sapiens
ctcttcgtctttgcagcgtagcccgagtcggtcagcgccggagacttcccaagtaagaagcggaagaggagccgctggaacca

SEQ ID NO: 797777 - DNA, 100 bp, Homo sapiens
ctgtggagactatcggttttgactctattatgaaacagcaaagataaacctgaaaattgggatgtatggtatgaaagcaagtttgatgactgtgataagg

SEQ ID NO: 797778 - DNA, 75 bp, Homo sapiens
ccggggtcgggagccgcccggggcagggctcgggagagcggggaaaagaagatctcccggagcagtgccctgaaa

SEQ ID NO: 797779 - DNA, 75 bp, Homo sapiens
tgcgagaacaagcacagtcctgccgggtgctcatggaaacaacctcattgctgttctagccaaatacatctacca

SEQ ID NO: 797780 - DNA, 87 bp, Homo sapiens
ggcttccgcccggcacagggggtgctggagaatctggtaaaagcaccattgtgaagcagatgaggatcctgcatgttaatgggttta

SEQ ID NO: 797781 - DNA, 78 bp, Homo sapiens
gaagaggaggacggtcatctgtcaccaggacatcaggggacccaagtaacagggaggaaagcagatgttattaaggca

SEQ ID NO: 797782 - DNA, 100 bp, Homo sapiens
ggctttggaagtggtcatttcagatgtgattcatctagtggaacgtgtgatcaccattatgcagaatccacgccagtacaagatcccagactggttcttg

SEQ ID NO: 797783 - DNA, 82 bp, Homo sapiens
cagaagccgagttcaacatcctcctggccaccgactcctacaagcaagagtgagccatggagctacgtgtggggaacaagta

SEQ ID NO: 797784 - DNA, 82 bp, Homo sapiens
tccagcgctctcagcaccaagcgtcctttctgaagaacagatccggaagaagaagattcggaaacagcagcaggagtcacag

SEQ ID NO: 797785 - DNA, 50 bp, Homo sapiens
aaaataaactcctatttgtttatggcaagcagcagccgctcttctaaaac

SEQ ID NO: 797786 - DNA, 98 bp, Homo sapiens
agccgggtgggctttgcctcctgctgctgctgctctgccagttcatggaggaccgcagtgcccaggtgtgaacgcaagatttgtgaatgtgagaaggg

SEQ ID NO: 797787 - DNA, 75 bp, Homo sapiens
cggagaagccctcggccccagcccctgaggtggacgagctctcactggtcctgcgttcaatttcctggatgctcc

SEQ ID NO: 797788 - DNA, 51 bp, Homo sapiens
caaacttgttgggcttctcgacggagagagatgatccagtattcctggaag

SEQ ID NO: 797789 - DNA, 75 bp, Homo sapiens
caagaaacaaattggttttctgctccttctgccctaagagtttatgggaagaaggagaaagggccaacccctgaa

SEQ ID NO: 797790 - DNA, 83 bp, Homo sapiens
gccacgcgcccccgacgaccgcccgacgtgcattcccggtgtccctgctccaattcccgttttgtcagtgacacagactttga

SEQ ID NO: 797791 - DNA, 98 bp, Homo sapiens
ctcagctccacattgagagcaaaatctacaagatgatgcagggaggaggttatggaaacaaaggacatgctttacatcgtcactgaatttgctaaaaa

SEQ ID NO: 797792 - DNA, 90 bp, Homo sapiens
gtaacagcagcaatgaccttccctcgggaattccacctctgcgtttttccctccagttccaagaacccagaggaggcagaactagaagac

SEQ ID NO: 797793 - DNA, 75 bp, Homo sapiens
gcggatttgtgaatctcacatttaccaaggcagatgaagcatattccatcggccccgctccctcccagcagagct

SEQ ID NO: 797794 - DNA, 105 bp, Homo sapiens
acgagtgtctcgcagcctgcgagggttccagggagatcaaggacttcaaggatttctacctttccatagcagtgatgtcttggcattgcccattttcaagcagga

SEQ ID NO: 797795 - DNA, 101 bp, Homo sapiens
agcaacgtgcggtgggaccacgagagcgtggtggctaatgccgtagcggcattatctgaaatcagtgagtctcacccaaacagcaacttacttgatctgaa

SEQ ID NO: 797796 - DNA, 100 bp, Homo sapiens
gcctcagcctcctaagtagctgggattacagaaaccccagaaccagcgatgactagtggtgtgtataggcctcctggggccaggttaaccacaacaagga

SEQ ID NO: 797797 - DNA, 75 bp, Homo sapiens
atgcttctgactaagctcccaacaattagtcagagatcctgcagatcattcagctggacctagacctgaagttta

SEQ ID NO: 797798 - DNA, 58 bp, Homo sapiens
aacatgcctatcatagtgctttgtgtatgcctcggccttcatcatcgtcatgctcctg

SEQ ID NO: 797799 - DNA, 75 bp, Homo sapiens
tcatcctcatattatcaaactaaacattgctgaggctcttgtcagcaaaggtctagccacagtgatcagataccg

SEQ ID NO: 797800 - DNA, 99 bp, Homo sapiens
gccggccgccgggagtaacgagccggacggcgtcctcagctatcaggatagagggaggaatcagcagcttggaaattcaagcacgtgatctggcgggat

SEQ ID NO: 797801 - DNA, 80 bp, Homo sapiens
aagggaccaaggtggaaatcaaacatttggtgcttccagatgtgagttatcaggtggaatccagtgaggaggatcagtct

SEQ ID NO: 797802 - DNA, 98 bp, Homo sapiens
gctgatgcaggtgaacgacactctgacttccgaagatgccggactccggaacagcaagaactgcaccgaaccagaccggtaccgggagtaccagtgga

SEQ ID NO: 797803 - DNA, 75 bp, Homo sapiens
caaagatccatttcacataataaagtgccctattacatcaagctgtgggtgagcgtggaggatgctcagatgcac

SEQ ID NO: 797804 - DNA, 100 bp, Homo sapiens
cctgcccttgccagaatttcctgcgctgttccacctcattcaacttcaggtattagaaaactactcggatgctccaatgacaccaaaacagattctgcag

SEQ ID NO: 797805 - DNA, 100 bp, Homo sapiens
aatcaggagtgaagtcccagggatattctgtgctgcaaaacaagctatcgatcagggaagatctccagttataatagataacactaatatacaagcttgg

SEQ ID NO: 797806 - DNA, 99 bp, Homo sapiens
cgccgaacgacaggacgttggggcggcctggctccctcagtgggtgaatttgtaagtgatgtcctgctagttccagaaaagtgccagtttttccacaaa

SEQ ID NO: 797807 - DNA, 51 bp, Homo sapiens
gagtatcaaactctgctgccaagaaaatgcttggacagaagagatgagtac

SEQ ID NO: 797808 - DNA, 82 bp, Homo sapiens
tggtgagcctttttgtcactgtatgtaaagaattcttgaaccgattctacaagtcactgatagacagaggagttaacttttc

SEQ ID NO: 797809 - DNA, 86 bp, Homo sapiens
ggtccttccgaggaagctaaggccgcgttggggtgagaccctcacttcatccggactttgctataaaacacgtgaccctagggaaa

SEQ ID NO: 797810 - DNA, 82 bp, Homo sapiens
ttcttggaaaaccagatccagaaactggaggagtcccgctcgaagctaggttggacgtgataagtatgagcctgcagctgtt

SEQ ID NO: 797811 - DNA, 101 bp, Homo sapiens
ggacctaaatggcgcagcatgattttgttcctgcttggctaaatttctcaacaccacagtcagctaagggggcaatggcggcttcctgtgttctactgcac

SEQ ID NO: 797812 - DNA, 100 bp, Homo sapiens
tatggctgcacagaagccttcctggctgatgcaaagtggattttgcacaactgcatcatttataatggggaaagcataacccctactgtagaactaaatg

SEQ ID NO: 797813 - DNA, 100 bp, Homo sapiens
ggaccacagcggcaaggtctccaagtcccagctcaaggtactccaaagattcaggtttactcacgtcatccagcagagaatggaaagtcaaatttcctga

SEQ ID NO: 797814 - DNA, 75 bp, Homo sapiens
aattacagaaattgagaaaaaacttcctcggctgtacaaagttttaaaggctaactcaggtgagatggagccgct

SEQ ID NO: 797815 - DNA, 90 bp, Homo sapiens
ctgaaaattcttcttgatcgtccaaaagctagaaatgaggtatggtggatattgcccgacagacggttgaatttctctacgaagagaatg

SEQ ID NO: 797816 - DNA, 98 bp, Homo sapiens
gcgggccgaaacctggaggcccggggggcccagctcccgtagggagccgtgggcgctcggtgcccgggccgggcagggagaagtctgttggaacttgg

SEQ ID NO: 797817 - DNA, 100 bp, Homo sapiens
gaagtagttaaaataattgaaaaagatgttatggaagcatttcagaagggtgtaccttgaagctagttttggctatgcgtggcggacctataaatactag

SEQ ID NO: 797818 - DNA, 83 bp, Homo sapiens
cccgcgcgtgctgcgggtctgctcgggggtctacttcgaggctccatttatcttaaagaaattggacagcatatgaagacagg

SEQ ID NO: 797819 - DNA, 80 bp, Homo sapiens
aagaagggcttcgtgcccaacatgcagggaaaaaatgcatttttcaaagacctaacttcaattcagttattacctagtgg

SEQ ID NO: 797820 - DNA, 100 bp, Homo sapiens
ggaatctctatccttacccgaggtgacagcatcggcagcagtaaaggcggcagtgcgggaaggatctccaggccaggcctagttccccgagagcgttcag

SEQ ID NO: 797821 - DNA, 100 bp, Homo sapiens
cggtgaagcgattcctgcaggcgttggttcccctctttgacctgaaatgggacgtcggtcatcagatactgaagaagaaagcagaagcaagagaaaaaag

SEQ ID NO: 797822 - DNA, 100 bp, Homo sapiens
tcagcctcactgtagatgccaagacagagactgcggtcttcaaaagtttcattcttgtcgcccagactggagtgcaatggggcgatcttggctcactgca

SEQ ID NO: 797823 - DNA, 75 bp, Homo sapiens
gcggagccggagggcgggaggaacatgacatcgcggagtactatactggcaattgctggagaagattttgcaatt

SEQ ID NO: 797824 - DNA, 91 bp, Homo sapiens
gcggggaagaacgtgctactgctggcatatagcactttctacattgtgggtttaatattatcaatgcagataccttttgtgggattccagc

SEQ ID NO: 797825 - DNA, 97 bp, Homo sapiens
tccagtcggtgttgagcacggcgagcagtctcaggcctttagtgatgatgggaaatcctcattgacgattcaatttgttgaaggccaatttgtggac

SEQ ID NO: 797826 - DNA, 100 bp, Homo sapiens
cctccttgcagcctcccccagaaagcaatgataattcccaggacagtcagtctggtactaacaatgcagtacctcagccagaccccaaccagcccaagcc

SEQ ID NO: 797827 - DNA, 100 bp, Homo sapiens
tcctctcagcagaagtccaggttcccatgcagcttgccgaactaaagcaagaatgtcttgctcgtggtttggagaccaagggaataaagcaagatcttat

SEQ ID NO: 797828 - DNA, 90 bp, Homo sapiens
agtaaaaacagtttacagtactcagcaaaagaacatggaatgcctgaaaaggcctgatcttttggccagaaggagattaaaaagatgccc

SEQ ID NO: 797829 - DNA, 75 bp, Homo sapiens
tcagaccgtgaagaccctgcgtacacagcgtcctgccatggtgcagacagaggggtcaactgctacatgccggcc

SEQ ID NO: 797830 - DNA, 75 bp, Homo sapiens
ctcagaactgaacaaagacaacattgttcctggaacgccctctttttaaaaaagccatgaatcatcttaatggac

SEQ ID NO: 797831 - DNA, 100 bp, Homo sapiens
atttgaaacttttatctcatctggcttggcgcctgaggttctcccattaggtatcaacttgaactgaaggatgactacatcattagaactaatcgactga

SEQ ID NO: 797832 - DNA, 75 bp, Homo sapiens
gggagcaaaaccaacgcctggctcggagcagcagcctctgaggttagctttatacgtctacgaatatttactgca

SEQ ID NO: 797833 - DNA, 83 bp, Homo sapiens
gtggatcgctgtgatcgtcacttgggaacccgagcgtcatgttagggtgaagcagaggacctcagtgctgaacatgctaagga

SEQ ID NO: 797834 - DNA, 100 bp, Homo sapiens
tatgagcattctccagggaaaggatgacatatttttggacctgaaacagaaattctggaacacctatatgaaattcattgagtttgaagatgctctggaa

SEQ ID NO: 797835 - DNA, 100 bp, Homo sapiens
agtggaaaatgcgctcgggctggaccagcaggttgatccaaaagactacatgttcagtggactgaaggatgaaacagtaggtcgcttacctgggacggta

SEQ ID NO: 797836 - DNA, 120 bp, Homo sapiens
gagtttgaaagcgtgctccacaaatatttacagtcggaggagtactcggtgaaatcctgtcctgaagactgtaagggtcagcctgggccagtgggcccccaggggtacaatgggccacca

SEQ ID NO: 797837 - DNA, 74 bp, Homo sapiens
gatgcctataagaccctcctggcccccctgagcagaggactgtaccttgtaagatggaggagatgtataagaaa

SEQ ID NO: 797838 - DNA, 100 bp, Homo sapiens
cagcaagatgtgaaaaaaagaagaagctatggaaactcatctgattccagatatgatgatggaagagggtcaaaatgcagatcttcgtgaaaacccttac

SEQ ID NO: 797839 - DNA, 51 bp, Homo sapiens
atgtggacgagctgttaaaccaggaataagacgagttggaagaagacctga

SEQ ID NO: 797840 - DNA, 98 bp, Homo sapiens
gctgtgggtgaagatggtgactccactgatcaagaacttcttctgaggacagacaggacgcgctccaggagatatataatcagaagggcatgtttcca

SEQ ID NO: 797841 - DNA, 96 bp, Homo sapiens
atggctgcgagaccctagaggcctgcgtgatccgggccaaggtggtggggaagaagctggtaaaggaggggcccttcggcacgctggtctacacca

SEQ ID NO: 797842 - DNA, 101 bp, Homo sapiens
cggaatgtgatcacagagcctatttacccagaagtagtccatatgatcagtgtactgttacccggacatacctattccttcacaagttctggttcttcagt

SEQ ID NO: 797843 - DNA, 100 bp, Homo sapiens
acgtcacggccatcattttctgtgtcgcgctcagcggctatgaccaggtgctccacgaagacgaaaccacggttgtggcagcactgcctgaaggtatgag

SEQ ID NO: 797844 - DNA, 74 bp, Homo sapiens
gagtgacaccactgatgacgatgatgcactcgctaaagctgttgatggatacgtgaagccacagatcaagcaag

SEQ ID NO: 797845 - DNA, 90 bp, Homo sapiens
gtccaggtgcagcagcaaggagaacattctcagagccaatttcatcatgaaaaggaggaagctcaaactgaagtgagttaaaaacttcat

SEQ ID NO: 797846 - DNA, 98 bp, Homo sapiens
gccattatccccagcaaaaagctccgcaacaagatagcaggattgatgaactcccagagggcgctgtgaagcctccagcaaacaagtatcctatcttc

SEQ ID NO: 797847 - DNA, 50 bp, Homo sapiens
ctcctttagaaaactgatcttaatacaggagaagatggtataaactggtc

SEQ ID NO: 797848 - DNA, 90 bp, Homo sapiens
atgcaggactctagtaacccgcgaaatgatgggatagcgttgcaaatccttaaaagagtcttaacgggctggtgaattaccatatctccg

SEQ ID NO: 797849 - DNA, 98 bp, Homo sapiens
ggaagatatagataagaatgctgatggtttcattgatctagaagagtatattgctgtagaaattcttgctgatataatacaaaacagcacattgggag

SEQ ID NO: 797850 - DNA, 78 bp, Homo sapiens
atgagatcaatgacagagtgaggtttctgcagacaatcaattctcaaaagtctatggccctgtgttcactgtgtattt

SEQ ID NO: 797851 - DNA, 138 bp, Homo sapiens
ctttattaaaagtgaatgtttaaataatattggtgactcctctcctctgattagagccactgttggtgctgctagctgaggaggggatagctcctctttcttctgcaggaccagggaaagaggagaaactcctgtttg

SEQ ID NO: 797852 - DNA, 50 bp, Homo sapiens
tgtggatcgctgtgatcgtcacttgtgacctgaccaacggtgcagatggg

SEQ ID NO: 797853 - DNA, 75 bp, Homo sapiens
ggtggatgacaaggaggcctgagtagaccgcagcagttggaattgatcacaccttttcagttgtacttcaatcct

SEQ ID NO: 797854 - DNA, 78 bp, Homo sapiens
tggctctgtcggcagtgtgtttttgcaacaacaacaaagggtgttagaacaccaaccttacagctctctgcgatgcaa

SEQ ID NO: 797855 - DNA, 98 bp, Homo sapiens
cacagtatggtagccacacccccagcctgctcgcctggattttttaagtttgaggcatctgagagcccctgcttggagtgccctgagcacacgctgcc

SEQ ID NO: 797856 - DNA, 100 bp, Homo sapiens
ctggaagacatggccactccagtcggtgttgagcacggcgagcagtctcaggcctttagtgatgatggatttaagaggggtgcagatcccggaatgcctg

SEQ ID NO: 797857 - DNA, 83 bp, Homo sapiens
gactcaagtacaactcccggcacgaggagccttcacgtaaatgggtccagtcatgcctcccagtaagaagccagaaagctcag

SEQ ID NO: 797858 - DNA, 98 bp, Homo sapiens
gaaactctgtttacgttattatcaacacaggaccagctaaaggtggttatttaagtatttttaaaaattacatgaatatccaggtgaacaatgattta

SEQ ID NO: 797859 - DNA, 100 bp, Homo sapiens
ggcgggtggaggttcgagcgctgttctcgctccggagccgctgcacatttcgtctattcttattctgagaaggaacttatatgccacaatcagttctctc

SEQ ID NO: 797860 - DNA, 101 bp, Homo sapiens
tgcaccctggctcatcagctttgcactatgcagtggaagattcctacaggaagcaagtagtaattgatggagaaacctgtctcttggatattctcgacaca

SEQ ID NO: 797861 - DNA, 83 bp, Homo sapiens
cggggatcctgctggactgcacgaaaaatgttacctggaatgtcagagagctgaaagcagtcatattttgggatcatgcacct

SEQ ID NO: 797862 - DNA, 73 bp, Homo sapiens
acatgtggttcaagaaccttgacaagctcatccggctggtaaatgcgcagggcaattgaaggaacagactaaa

SEQ ID NO: 797863 - DNA, 95 bp, Homo sapiens
cggggtcacccctcagcacatggtgggggccacaccatttgccgtggccaggctagagatttggagcaagaggtggtggtggccttcccccgaag

SEQ ID NO: 797864 - DNA, 100 bp, Homo sapiens
agagagaacagcgtttcagttttggtcatcggaagtggtgccttcagcacagattagctaatcatcagctggataaagagaaagcagaattaatccatca

SEQ ID NO: 797865 - DNA, 100 bp, Homo sapiens
gaggacttccctttggatgtagcaaggaagaaattgttcagttcttctcagtgaaagccctgtgtaaggaatgtgtagtagaacgttgtcgcatattgcg

SEQ ID NO: 797866 - DNA, 100 bp, Homo sapiens
cccctggcagtgcttagagccttcaagcaggtagcatctaaaggaactggtttaaatcctaatgccaaagtatggcaagaaattgctcctggaaatactg

SEQ ID NO: 797867 - DNA, 80 bp, Homo sapiens
catgtctgagactcctgctcagtgtagcattaagaacccagtgacttgattgtaaaaatttacagagcggaatcatatgc

SEQ ID NO: 797868 - DNA, 90 bp, Homo sapiens
ctggatctcagccttgtcaaagatgccagatgtgggagacacgccaaagctcccaaggctgacctctgccttcattgaaactcccattcc

SEQ ID NO: 797869 - DNA, 75 bp, Homo sapiens
ccgaggccagagagaaaagactgcgaggtggccgcagctgtggccggagaggactttctgcagggcgactgcacc

SEQ ID NO: 797870 - DNA, 49 bp, Homo sapiens
cggcattcggggaatctgcagggcagggaagaaggagaaagggccaacc

SEQ ID NO: 797871 - DNA, 87 bp, Homo sapiens
tcggatgaggataaacttaaaattgctgatgaagggccgactcgcgggccgctgcacccaccgccaaggacaaaaggagcccagcgc

SEQ ID NO: 797872 - DNA, 98 bp, Homo sapiens
gctggcgttaactgtgcggaggcaggactggactcgggccatatccgtggtgccgtcaacatgcctttcatggacttcctgactgaggatggcttcga

SEQ ID NO: 797873 - DNA, 83 bp, Homo sapiens
caacgtcatcacgccctttctcttgctcaagaataatgcatatactgccatgtcagattcctacttacccagttactacagtc

SEQ ID NO: 797874 - DNA, 75 bp, Homo sapiens
gtggcgtgggcttcttcaggtgctggtggatccctcaggatgatgttccatttaagcagacctcttccatagctg

SEQ ID NO: 797875 - DNA, 100 bp, Homo sapiens
tggcgcgctgggacctgcacaggccggagagagccgtaggcaggaccccgggacaccctggaagccaggaaatggtggcttgctttggtgaaggtattca

SEQ ID NO: 797876 - DNA, 100 bp, Homo sapiens
ctgcaatgaagagaacccagggaagttcctttttgaagtagttccagtttcctgttttccagcacccaacataacttgtaaggattccagtggcaatgaa

SEQ ID NO: 797877 - DNA, 100 bp, Homo sapiens
cttaaggattgtctttgtacataacaaggaaggagtcaagactgagaacaacgatcatattaatttgaaggtggcggggcaggatggttctgtggtgcag

SEQ ID NO: 797878 - DNA, 90 bp, Homo sapiens
atcatgaaaataatttctgcattgaggtttggtaccatgtatgtagcagccgtggaaaagggtgttataacacaagactcaaggaagatg

SEQ ID NO: 797879 - DNA, 75 bp, Homo sapiens
attttcacatctctcctgaatggatcacagcgtcgcagatgtctttggtaatgcaggtggtgaaggagcaggtta

SEQ ID NO: 797880 - DNA, 75 bp, Homo sapiens
attccagaaaaattacagcacatctcagtgaatttgcaagtggtgacaactgttgatagatttcaaggtcaacag

SEQ ID NO: 797881 - DNA, 75 bp, Homo sapiens
ctggcacccagtgcttatggttgctggcatggtggtattctatggaggtgctgtcctgcagggtgagtacctggg

SEQ ID NO: 797882 - DNA, 98 bp, Homo sapiens
gacgcagttgcagaacagggccatctaccaccgtctatgcatggaacattgaaaagtattgaagggcctccaaacttgggtataaacttgcctttgag

SEQ ID NO: 797883 - DNA, 75 bp, Homo sapiens
gcgcgaatggcacgagctggagggagaatttcaagaactgcagagacggtgctgagataggatcatgaaggaaga

SEQ ID NO: 797884 - DNA, 100 bp, Homo sapiens
agcactcttctcagacggatgctgccaaaggctttgggggcaagtacggagttgagagggacagggcagacaaggaatggtggttgtggatgaattacat

SEQ ID NO: 797885 - DNA, 100 bp, Homo sapiens
ctggtggaggaggagctgctgaagatgcaggtagatgaactctatgaagcttattgtatccagcgacgcctccaggatggtgccagcaaaatgaagcaag

SEQ ID NO: 797886 - DNA, 50 bp, Homo sapiens
gacaacttcctcaccagcaccttacaggctgaccccgcactacatctacc

SEQ ID NO: 797887 - DNA, 75 bp, Homo sapiens
agagacaccacctcctgttgaaccaggcctactgaacttgacgcactggtatttggccatctatacaccattctt

SEQ ID NO: 797888 - DNA, 100 bp, Homo sapiens
agcgacccaagcgccgcggttaaccacgtctcgtccacgacctccctaggccaaccaagccctcgagcagttattcccatgtcctgtataaccaatggaa

SEQ ID NO: 797889 - DNA, 75 bp, Homo sapiens
cgacgcccctgacagggccacgcacctgatcgccgcgcgagctggtcatcatcagatttgaaatatttaaagtgg

SEQ ID NO: 797890 - DNA, 75 bp, Homo sapiens
gacacacctgccaagagagcccaggccgagttccccacctgcgattgcgtcggtgtaccaacagtaccgttattg

SEQ ID NO: 797891 - DNA, 82 bp, Homo sapiens
ggaaaacaagaagactgaatgatattccctggaaataccacacacatttattacagtttgatggtgaaggaggttggcgctt

SEQ ID NO: 797892 - DNA, 100 bp, Homo sapiens
tcgcagcccccgcgctggtgcagccaccctcgctccctctgctcttcctcccttcgctcgcaccatgatgccatggacaatattaccaggcagaaccaat

SEQ ID NO: 797893 - DNA, 75 bp, Homo sapiens
agaacagctgtggaaagaagttgcaaaacactggctgaaccttcacctagccccaggattacaaggaaaagcacc

SEQ ID NO: 797894 - DNA, 100 bp, Homo sapiens
gtgccctctgcagctgaataacccttttaacgagtattccaaatttgatggcaaggagtacgagacccaatctagtgcagaagccaaatttgtgaagcag

SEQ ID NO: 797895 - DNA, 98 bp, Homo sapiens
gacaatgggacagctgaaggccaggtgttctgggatgatggacaaagcattggggtcatgcccaagcacgggctggatgtgtcagcctgcgaggtgtt

SEQ ID NO: 797896 - DNA, 74 bp, Homo sapiens
tcggggcaacccagacgtgcaacaaagtgcgatggtctcctctgagcctccggcctccataagacccaaaacag

SEQ ID NO: 797897 - DNA, 95 bp, Homo sapiens
ggaaatgaggcaagttatcctttggaaatgtgctcacactacacgaatgcagagtttgagtccagatcccaaagcccagtacacaagtatctacg

SEQ ID NO: 797898 - DNA, 96 bp, Homo sapiens
gaaggccctatcaggacatggagtatgaaagacgcgggtgcagcccagaactgtcttctgaggaagaggtgctctcctgggcccccactgtcccca

SEQ ID NO: 797899 - DNA, 101 bp, Homo sapiens
gatatggaacccaagcagtggcgaagggaatcgcaaggctcttccctgaccattttctactgtccctgcgcgagattcacagttaatagaaggatctctat

SEQ ID NO: 797900 - DNA, 87 bp, Homo sapiens
aagatagctcaggacctggagatgtacggtgtgaactactttgcaatccgggtatttgaaatatctcaccaaaaaatatttgaagaa

SEQ ID NO: 797901 - DNA, 96 bp, Homo sapiens
ctgggttgccaagctcgcgccggatgcggagcgcggtgctgccggtggagcttcagttacagaatgtctgaaggggacagtgtgggagaatccgtc

SEQ ID NO: 797902 - DNA, 100 bp, Homo sapiens
acgagagcaagtaattgcagccctgagagccagtttcaacaaccctgacagagcagtggagtatcttttaatggtttagtcccaggaagcaccactctgc

SEQ ID NO: 797903 - DNA, 83 bp, Homo sapiens
ccggctgtatgattaggccacaatcttcaatgagtaaacatattcctagaggtggagaagagcgagtacttgagaaagaagag

SEQ ID NO: 797904 - DNA, 96 bp, Homo sapiens
ggaagctattgctgggattttgaggaggttggtactaagaagtgcctttcctgacgtctctgctgcttggaaccgcttctagagcagtctctgctt

SEQ ID NO: 797905 - DNA, 100 bp, Homo sapiens
agaaggccttgactacggaggggttgccagaaagaagcttccggttctgaggtcctggaggtgccatttccctctctgttgaagcaaaggccggggcaga

SEQ ID NO: 797906 - DNA, 100 bp, Homo sapiens
gggcaaccacctgccgctcctgcctgtgactgtcatgtggcatgggtctctgcccaagctcgtaatgagactatagcaaggcggctgtgggacgtcagtt

SEQ ID NO: 797907 - DNA, 101 bp, Homo sapiens
gcagatttgaaaattcacccttgtagagtcattcctgcctttgagcggactcccttttaagctctggcaggctgccctgagcacgctcaaccccaacccca

SEQ ID NO: 797908 - DNA, 100 bp, Homo sapiens
gttcaaggagctgaaacgcagcaagaaattggagaacttcttgagtcgaaagaggcgacgaaatgcaggcttcagggatgacttcttagggggcagggga

SEQ ID NO: 797909 - DNA, 75 bp, Homo sapiens
ccgcaccgggaccggagaggaagcggaggtgtggacactgccagcggctgcagccgacttggaatgacctgggag

SEQ ID NO: 797910 - DNA, 82 bp, Homo sapiens
cggagaggagatgcacacggcactcgagtgtgaggactgatcctttgaaatactccagccatgactaaaagagaagcagagg

SEQ ID NO: 797911 - DNA, 75 bp, Homo sapiens
taccaggctgtgggtctgcacctctggaaggttgactatagtcaatggggccaatggagccaagtgtatggaaac

SEQ ID NO: 797912 - DNA, 75 bp, Homo sapiens
aggaacgaggcaaggagctaaagcagcgtgcgttcagccctgggggcagcctggacaacatgacctgcatcctgg

SEQ ID NO: 797913 - DNA, 83 bp, Homo sapiens
gtcttcggtggactccttcggcagtccacccaccgccgccgcctcccagtcttccgtgtgtgctaagatcgtgcagctcctgg

SEQ ID NO: 797914 - DNA, 74 bp, Homo sapiens
ccgaccgcccgcacatccgtcggggacttgccatgaggtgttgaagccttgtttcactgagttggagagactgg

SEQ ID NO: 797915 - DNA, 90 bp, Homo sapiens
cagctggagcctcaggcggcagcgcttctagatgttccatttaagcagacctcttccatagctgtagctggagcggtaattggagctgtt

SEQ ID NO: 797916 - DNA, 90 bp, Homo sapiens
cgccgtcctgatctcagaggcccaggccatcaaggcagacctggcagctgtcgaggcaaaagtggttgtgtcaaaccgattggtgacatc

SEQ ID NO: 797917 - DNA, 83 bp, Homo sapiens
atttctctggcccagcttacaaagtttaatggatcgagaagtggcgttgcttgctgaaatggacaaagtgaaagctgaagcaa

SEQ ID NO: 797918 - DNA, 82 bp, Homo sapiens
agagacattacatcaggaagatactgcagagatattctactccatctcattcattgtacagcccagaatgccatcgccgggg

SEQ ID NO: 797919 - DNA, 74 bp, Homo sapiens
tcacccaacatgctggtgtacagaaagatggagatggacacatggatcatttactgccaggctgtgaagataaa

SEQ ID NO: 797920 - DNA, 90 bp, Homo sapiens
gttttagcctagctgttctcaaggcggattaattagcccaagaaacattatattcatcttccatgaggcaggctgaacctgcagatatgc

SEQ ID NO: 797921 - DNA, 83 bp, Homo sapiens
cccaacatccccaactggtggcagagttatgagctacgagttccagggagctctgtcctggtgaccgtgcccgggttatgacg

SEQ ID NO: 797922 - DNA, 75 bp, Homo sapiens
gaaattgtcccgaatccctgcagtttttcagaagaagtgaagtcaagatgaagaaccatttgcttttctggggag

SEQ ID NO: 797923 - DNA, 97 bp, Homo sapiens
ccctggtcatcatagtcagtctgggatatggcatcgtcaataacgaatccagaaaactctggagagcccttcagagcatacacaccacgtctacttc

SEQ ID NO: 797924 - DNA, 95 bp, Homo sapiens
agcactgactttcagctatggaatcgctgagctgactgctgcccactttggaggaggcggtgggctccttcacaagaagactcaacaggaaggcg

SEQ ID NO: 797925 - DNA, 100 bp, Homo sapiens
gtcaaataacctacggagggtcttcctgaaacccgcagaggaaaattcaggcaacgcctcgcgttgggggcttggagtacccataatacagtgagcccac

SEQ ID NO: 797926 - DNA, 98 bp, Homo sapiens
agaagcagctccacgaaaggcagccgcggatcgccgcgctcagcgacaaacaaccatggcaatgacaggctcaacaccttgctcatccatgagtaacc

SEQ ID NO: 797927 - DNA, 78 bp, Homo sapiens
ggagaagttcagctgagtggcttaggagaagaagcaaagcccaggaggacatctatcatggatatccctcttctggca

SEQ ID NO: 797928 - DNA, 97 bp, Homo sapiens
gaaggtggagccaccagcctctccttggctccactttgaggctctgatgaacattccagtgctggtgttggatgtcaatgatgatttttctgaggaa

SEQ ID NO: 797929 - DNA, 100 bp, Homo sapiens
gcgtttattaggggggcggggggaaagagccccagcaccgcccctcctggaagaaggaagaggttgggggccgtcccgctcctaaggcaggaagatggtg

SEQ ID NO: 797930 - DNA, 73 bp, Homo sapiens
atcatgaaggacgtgcccgactggaagctctgctcgccccccatctcaccccccaagcggatactggtcttct

SEQ ID NO: 797931 - DNA, 100 bp, Homo sapiens
ttgacctttaggtgcttttatattcatctcaaaaacaaaattctgaactcaggacttggcaaactttaagaagcttcatgaagctcattttaaggaaatg

SEQ ID NO: 797932 - DNA, 90 bp, Homo sapiens
cctgaggctgccgtgaaatcaacagccaacaaataccaagtcttttttttcgggacccacgagacatgaggagcgggaaggcctcctgca

SEQ ID NO: 797933 - DNA, 98 bp, Homo sapiens
cagccacttccctcccaaccctggtagttagaaacaaacctgtggcaaggcaggctcctggcaaacggaagtgcaattgtcggcaagagatgcggacc

SEQ ID NO: 797934 - DNA, 80 bp, Homo sapiens
acaccgcaatgaaaaaaggggagacactgcgaaagcaaaccgaggagtgagacggtttaagcggaagcatcttactgcca

SEQ ID NO: 797935 - DNA, 51 bp, Homo sapiens
cccaggggacttctccatctctgtcaggaaccaataaaatcacgtgctcca

SEQ ID NO: 797936 - DNA, 75 bp, Homo sapiens
ttggagtgctggtgaatcatttcaagaggtgagcgagtgctgtgctttcatgggcctcttctttatgaagcaaag

SEQ ID NO: 797937 - DNA, 75 bp, Homo sapiens
ttgagaggacaagcccagattccaaaacttatgtcaaggtgataaaagaaaatgtggctgaagttacccgaagtt

SEQ ID NO: 797938 - DNA, 98 bp, Homo sapiens
gtgggagagctgctgaagtcaaaggagcaattgctggtcctgagcctgaggaagatttcgatgtcgatcattttgtgtctgactgtaggaagcgggtc

SEQ ID NO: 797939 - DNA, 100 bp, Homo sapiens
cttaatctgatgcagaattaccgctgttgggtcatacagcagatggaacaaaaaaaattacaacaaggaattcctccatcagggccagctggagaattga

SEQ ID NO: 797940 - DNA, 83 bp, Homo sapiens
gcccggtgcccgaggaggcagccaagctcatggcctgccactgcgtgcgcataatcaccagcaacacccgggacaataatacg

SEQ ID NO: 797941 - DNA, 100 bp, Homo sapiens
ccattcctttaaatccggagggggaaaaaatcccaaggtctgcaaagatctgtctcgtaactgtgtaatcaaggaactagcaccacaacaggaaggtaac

SEQ ID NO: 797942 - DNA, 99 bp, Homo sapiens
ctcggggacccttcgtgtccggtggttgctgttgcttggcctggtgggcccagtcctcggtgcggcgcggccaggtgccagcgagatttcagattcctg

SEQ ID NO: 797943 - DNA, 75 bp, Homo sapiens
gcgagaccaggacggcgcgggaactctacgccaacgtggtgctggggctcggcatggctgcccggggccacagct

SEQ ID NO: 797944 - DNA, 51 bp, Homo sapiens
ctagcgtcctggaattacttcaatcaaagctggtggagttgagatctataa

SEQ ID NO: 797945 - DNA, 101 bp, Homo sapiens
ggagaaattgtatacactggaacagaatcaacccagaacggatagctccctcctggaaaagaatgtttctccatcccagagagatgaagtaattcaatggc

SEQ ID NO: 797946 - DNA, 73 bp, Homo sapiens
gctcggcagtcgcgaagcagcaaccatggtctcagtggcccttagcagcagctccattcgtgtggccatgctg

SEQ ID NO: 797947 - DNA, 127 bp, Homo sapiens
gccggcgctgacggactgggggcgccgcccgcgcccgggaccgacccctctgctcgcggccgcgcctttgagtacctgccatcctggctggacttgaccccagggacattgtggctgtgctgaatga

SEQ ID NO: 797948 - DNA, 82 bp, Homo sapiens
tcaagttgtttggctaaattcttcagcttccaaaggaactgtcttcagagacttttgacaagaccatcttaagagccctgaa

SEQ ID NO: 797949 - DNA, 98 bp, Homo sapiens
acaaagaaacggtgtctaaatgagggaatcatcgcagaagagaacaagaacctgcagccccagggagacgaggaccccgggaagttcaaggaggctga

SEQ ID NO: 797950 - DNA, 83 bp, Homo sapiens
gacggcgttgatatcggtggtaacgacggcctcagcaggcggggaagatgaaaggggaatgacagaggaagaggaagacaaac

SEQ ID NO: 797951 - DNA, 75 bp, Homo sapiens
gccgaggcaccgaggcactcagaggagggctgaaatctctttaatgatggagggaagcaggcagacgcgagtgtc

SEQ ID NO: 797952 - DNA, 75 bp, Homo sapiens
tattacactttggggaatatatatgcaatacaaaagttgggactacaagcaagtgacataaaaagcttctcagct

SEQ ID NO: 797953 - DNA, 82 bp, Homo sapiens
gggtacggaggcaactcggcgacagcaggctacagtggaagttaaacgagctgagcctcgggacagcaagagccaagcgccg

SEQ ID NO: 797954 - DNA, 100 bp, Homo sapiens
ctgcgctggccgcactgggtcgagggagcagctccccgagtcagcctatatgcaccagctcttgggcctcaacctcctcttcctgctgtcccagaaccgg

SEQ ID NO: 797955 - DNA, 100 bp, Homo sapiens
cgtgcccagcaagagattaaagatgcagtacgccacggggccgctgctcaagttccagatttggctgaggccgcggaaggagcagggcacatacgccctg

SEQ ID NO: 797956 - DNA, 98 bp, Homo sapiens
tgcccctgagatccacccaagttgtgttgctctaggtcgtaaccagcctttgaaaaaggagaaaccaaaatggaaaagcgattatcctatgacagatg

SEQ ID NO: 797957 - DNA, 100 bp, Homo sapiens
cgggtgccgagatttgggagagacgctctgaactgactgccccgcatcaccggagcgtcccagctgcgaggaggtacatgtcccagagcaagcacacgga

SEQ ID NO: 797958 - DNA, 100 bp, Homo sapiens
aaatgcgggagacttgagaagaaaggccatggaaggcaccatcgatggatcactgataaatcctacagtggctgtgtttgatgtggacaagaagaaaggg

SEQ ID NO: 797959 - DNA, 100 bp, Homo sapiens
cgacctcagctcccagaggatcaccagcgtggatgccatggacaatattaccaggcagaaccaattctacgatacccaagtcatcaaacaagaaaacgag

SEQ ID NO: 797960 - DNA, 83 bp, Homo sapiens
gtttcagaagtctttacctccacgattccagcggcagcagcaaaccagtccagctacgggggcccagccagccagcagctgag

SEQ ID NO: 797961 - DNA, 90 bp, Homo sapiens
ctcatgcgggcagaaagtatctctagtctttatgggaaacctcagcttgatgatgtatctcagcaaacttccttgataacatgcttttgc

SEQ ID NO: 797962 - DNA, 98 bp, Homo sapiens
cggccctgtattttcccaaaaaatgaggacggggacttggttgccttttccagtgacgaggaattgacaatggccatgtcctacgtgaaggatgacat

SEQ ID NO: 797963 - DNA, 98 bp, Homo sapiens
cggaggcgccggcggagcccgaccacgacggccccagggaggatgacgaacccaacctggtgcccggcccgcagctctatgatcgtcagttatacagg

SEQ ID NO: 797964 - DNA, 100 bp, Homo sapiens
gtcccagaccaccctcctccaccgtcgcctcccactgcaaaaaggcctggactgccttccgggaaaatctggatgcttgccgtttaaaagccaatgaagc

SEQ ID NO: 797965 - DNA, 88 bp, Homo sapiens
gggcgcgtttgaaatctcgccgtcggagattgcagcaaaaattggaggtgatgcagggacatcactgaattcaaatgactatggttat

SEQ ID NO: 797966 - DNA, 90 bp, Homo sapiens
aatgggacaagacccatctttatgcaaagccagcgttacagtaatgttccaggcactgaaggatagcacagaagtagaaattgtggatga

SEQ ID NO: 797967 - DNA, 75 bp, Homo sapiens
catttctgttccgcacaggcctgctgaactgggtgctttatataggccttgcagtctcatcctactcaagtgtgg

SEQ ID NO: 797968 - DNA, 100 bp, Homo sapiens
aaatatgacccaagcattggtatctacggcctggacttctatgtggttcgtgctgtaagacctaaagttcttatgagattgtccaaaacaaagaaacatg

SEQ ID NO: 797969 - DNA, 73 bp, Homo sapiens
gggcaggtggctgcatagtcttggcggagattggagcatatgatcaacaaatatgggaaaaatctgttgaaca

SEQ ID NO: 797970 - DNA, 98 bp, Homo sapiens
ggcccaggaggcagtggagcagcagctccccacgctgcatcatgagtgcagccggctgcaggagcagctagcgcaggctggagtgcagtggcgctatc

SEQ ID NO: 797971 - DNA, 100 bp, Homo sapiens
cccagtcccacttcaaacattcgtctcggaaaccccgcctcttacagtcacgagatccaaaatacggagctggcatatacttcaccaagaacctcaaaaa

SEQ ID NO: 797972 - DNA, 87 bp, Homo sapiens
tgattgttgtccaggactggttcacagacctcagtctctacagcctggctttctccggaccccctgtttctggaacagaggagggtc

SEQ ID NO: 797973 - DNA, 102 bp, Homo sapiens
ggtgcgagtgcttggaggagcgcgccctgcctgagaaggagcccctcgtcagaccccctggttgtggaatacgaggcattgctggtacaactacccctatca

SEQ ID NO: 797974 - DNA, 75 bp, Homo sapiens
agataacaacaaatgttatgcaaaaataatctgtaatactaaagacaatgatgccgcagctgagcctgtcctggc

SEQ ID NO: 797975 - DNA, 99 bp, Homo sapiens
cggcagcggcggcggctggactaaacaggtcacctgcagacccgctacgacttcacctcatgcatgggcgtgctcctggtgagcatggtggtgctcttc

SEQ ID NO: 797976 - DNA, 75 bp, Homo sapiens
ctcagaggacgccttcaacaccaccttcatctccaccatcggtctctctgcaatgcaatcaatgtttacaacctc

SEQ ID NO: 797977 - DNA, 90 bp, Homo sapiens
gtcagcgttcaacaagtgtttgcaaagggaaatgttttgggggatcaggtgacctccgcaggcatgtccgcactcacactggggagaagc

SEQ ID NO: 797978 - DNA, 75 bp, Homo sapiens
cagcaatccttggctcactgaggaggtttgatcaagatattttggaaactatattgatagacagctgtatcttcc

SEQ ID NO: 797979 - DNA, 90 bp, Homo sapiens
catattcctctcctgatctggcctcatctgttccagggaggtgggattgagtactactgagcgagtgtgcttgatccagggaacggttga

SEQ ID NO: 797980 - DNA, 98 bp, Homo sapiens
gtcggtgttaaaaggcggcgccctgaagaagtgcaagagcagaggccttctctagaccttgccaagatggcacagtgtggatgggatcactgctcagc

SEQ ID NO: 797981 - DNA, 116 bp, Homo sapiens
ttgctctgctcttccaacaccagtggaagatgatcacatcccaggtaaaatatacccaggaccataaacagatgaaaggtagaccaagtctgattttagatacacctgctatgaga

SEQ ID NO: 797982 - DNA, 90 bp, Homo sapiens
ttaaatcagtgcttcggggcacttagcacagcgcctggcgcaaggtgcactcctcccagcccagctccagaatggccctgccccccagcc

SEQ ID NO: 797983 - DNA, 50 bp, Homo sapiens
aggtggagccaccagcctctccttgggaggctgccggcgtggaccgcggg

SEQ ID NO: 797984 - DNA, 90 bp, Homo sapiens
cacagttacatgtatggagaatggctggtctcctactcccagatgcatccgtgtcagtgtggatgaggtcaccattgtcaacattttgac

SEQ ID NO: 797985 - DNA, 100 bp, Homo sapiens
ctgggccccacgtgttgcctgaccattcctgagcccaggtaccaggatcatctatgaccggaaattcctgatggagtgtcggaactcacctgtgaccaaa

SEQ ID NO: 797986 - DNA, 75 bp, Homo sapiens
ggagcttctcagaagacagagggttttcttttgagatctcagacaaatacgatgttccccatgacaagattggga

SEQ ID NO: 797987 - DNA, 99 bp, Homo sapiens
gggagaacggatttgaaacacattgttatagatgggagcaatgttgcaattacgatggcaatgattcagatgaattcatgtaaaaggagaaaaggagaa

SEQ ID NO: 797988 - DNA, 100 bp, Homo sapiens
ctgaagtcagtgagaccaagaaccaaccaattccggacacacttggactcgacagactctaaggctgctgagcttcgtgcttatctgaaatctaaaggag

SEQ ID NO: 797989 - DNA, 87 bp, Homo sapiens
cgtccccagccctgcctctccctgggctctggccaagtcatcaaggcatgggacattggggtggctaccatgaagaaaggagagata

SEQ ID NO: 797990 - DNA, 75 bp, Homo sapiens
tatatcttgaagaaatgtcttggaatgaagatggagtcatcagaacccactgtgaggaagtgacttctccttgag

SEQ ID NO: 797991 - DNA, 74 bp, Homo sapiens
gacatgtcaacactgctgagagaaatcaatgacgtgtttgaaggaagacgagtggacgtgatgctgaatccagg

SEQ ID NO: 797992 - DNA, 100 bp, Homo sapiens
tgcccagacggctcacctgtgcgggatggaacaaaaggcattggaatggatacttgtgtcattcctttgaggcacggtgggctttccttggttcaaacca

SEQ ID NO: 797993 - DNA, 74 bp, Homo sapiens
cgaaggaggaggcgttgccgggagttaaagttcctcgtaattttcgcttgttggaagaacttgaagaaggacaa

SEQ ID NO: 797994 - DNA, 98 bp, Homo sapiens
gggaaaaacttaaaatggatatgaaaagtgaagaaagtgatcataggagaaaaccatttcagggaacagaaagaacagcttcaaaagatgaaagactt

SEQ ID NO: 797995 - DNA, 75 bp, Homo sapiens
ctcttcctcccttcgctcgcaccatgtggccacagatgtctttaattccaaaaacctggccgttcaggcacaaaa

SEQ ID NO: 797996 - DNA, 80 bp, Homo sapiens
tacaccggctgttcgaggccttgactgtaggtgacttaagagattaaaattaatttggttgctgttggttctgaacaaat

SEQ ID NO: 797997 - DNA, 98 bp, Homo sapiens
tgtgaaacctcctagtagaaaaagttcttgggacaaacttcatttgagtcagtggcctttcccccttcatgggagacaacgataacgaaaccttggcc

SEQ ID NO: 797998 - DNA, 114 bp, Homo sapiens
cttctctacgcagaacccgggagtaggagactcagaatcgaatctcttctccctccccttcttgtaacaaatgtggcaattattttggatctatcacctgtcatcataactggc

SEQ ID NO: 797999 - DNA, 100 bp, Homo sapiens
cgggctgagcttcctggagaagaggaagggcagctggtggaatttttgaagaaaatggaatctcgaggccccctttcgtgcgacacggttctgaagatct

SEQ ID NO: 798000 - DNA, 98 bp, Homo sapiens
acccttaataaagtgtttgcatctcagtggttgaatcataggcaagtggtgtgtggcacaaaatgcaacacgagactccttcagggtgagcaaaggcc

SEQ ID NO: 798001 - DNA, 74 bp, Homo sapiens
ggtgcagctgaacgtgaagcgtacaaatgacctctccgagcagcactggcagtcccatgtttaaattttcatct

SEQ ID NO: 798002 - DNA, 75 bp, Homo sapiens
tagtgcaaaaaccattcttaagaaaatgtttataggaggccttagctgggacactacaaagaaagatctgaagga

SEQ ID NO: 798003 - DNA, 96 bp, Homo sapiens
ccgcccctgcctgtgctctgcctcgggccatcgctcctccccagggcccagtgcggactcgcctccgtgaagatagccttagagactattttagca

SEQ ID NO: 798004 - DNA, 82 bp, Homo sapiens
tatagagatgtgatgttggagaactacagaaacctggtctccctaggtattaatctctggagaagacacatccacagttagc

SEQ ID NO: 798005 - DNA, 51 bp, Homo sapiens
cggaaatgtgtcatcgaaagccaggtgcacattcaggttcccgagcacaaa

SEQ ID NO: 798006 - DNA, 101 bp, Homo sapiens
gtggaaccatatccgtggacctccatatgctcataagaacccacacaatggacaagtggtactaggttttgacaagcttgcatcatgcgtgagtataagct

SEQ ID NO: 798007 - DNA, 98 bp, Homo sapiens
ctggacctcgttcagcagtcatgtaactataagcagcttcggaaaggagccaatgaggcaggtttggatgcatctgctcagactacttctcatgaact

SEQ ID NO: 798008 - DNA, 99 bp, Homo sapiens
tcggcaccttcggcaaagtgaagagcaccaccttccatggtcaataatgaacaacgccagcatgcagagcacatattcttatcatttaggaaatcaaaa

SEQ ID NO: 798009 - DNA, 88 bp, Homo sapiens
gatggcggatgccctgcagtacctgcagaaggtctctggagacatcttcagcagattcatgatgttgctatcaaaagttgagaaattg

SEQ ID NO: 798010 - DNA, 100 bp, Homo sapiens
aaaacactatcccagggagtgcaagcttagagcgtctggccaagaatcagaggaagtggcacttttccagccattaactccaggctctcgagaatttgaa

SEQ ID NO: 798011 - DNA, 100 bp, Homo sapiens
ttgagcggctggaccacctggagaatgtcatcaagcagcacattcaagattctggacaatcaggaagtccaagccacaatgatcctgccaagaatcctcc

SEQ ID NO: 798012 - DNA, 75 bp, Homo sapiens
agctgttccgtaatctcacaccaagatgcttccacagcgcggcacctgtacctccggggtggcgctggggttggc

SEQ ID NO: 798013 - DNA, 98 bp, Homo sapiens
atgcatcagccgtttgtaaagcacctgtcgtgagccagaaatgggacgtcggtcatcagatactgaagaagaaagcagaagcaagagaaaaaagaaac

SEQ ID NO: 798014 - DNA, 83 bp, Homo sapiens
gcctgcgacctgcccgcctggtatggtttgaagtggtgaacatggatttttctcggcttcacatgtacagtcctccccagtgt

SEQ ID NO: 798015 - DNA, 100 bp, Homo sapiens
gaaacttggatctgaggaatggagaactccagaaatggagaatcagatgagagggaacaatcaaaattggaagttaaagtttgggatccaaatagcccac

SEQ ID NO: 798016 - DNA, 97 bp, Homo sapiens
agccacgacatggaagaatttttgcaacgcgccaaatctaaactggtcatggaaaatggaagatttgcaaaatacaaatattttacccatgtcatga

SEQ ID NO: 798017 - DNA, 100 bp, Homo sapiens
agattattgtctttgctgacaatgtgtttgccctaaaggaatatgccattcgactgaacaagtgaggaattttaaattggaacaagagcaagaaaaaaac

SEQ ID NO: 798018 - DNA, 83 bp, Homo sapiens
gtgggtcctcgcttgcagttcagcgaccacgaatccacattcatctcaatggaaggatcctgccttaagtcaacttatttgtt

SEQ ID NO: 798019 - DNA, 74 bp, Homo sapiens
cctgcccctgctggccgtgtgcgactataagcaggtggagatgcaaccttaaaatcagtgacaagaaacattcc

SEQ ID NO: 798020 - DNA, 121 bp, Homo sapiens
gccagcctcaggccgtccgagcccttcctgaccccgtacctgctggggccggacaagaacctgaccgagagggagaaacatgttccaaatcaagtatagatattgagaatgggtttatttc

SEQ ID NO: 798021 - DNA, 100 bp, Homo sapiens
gaagctgagtccagagcgatgctgctgaagacagggaccctgaagtggctgatggaggagagctggtcctggggggctcagacccggcacactacatccc

SEQ ID NO: 798022 - DNA, 98 bp, Homo sapiens
ccattccgatggcccctgatatgtcaggagagtaccttctccaggcaaattccgttcccctgcagcaccatctcctttggctcttcggcaaccagtga

SEQ ID NO: 798023 - DNA, 82 bp, Homo sapiens
gggatcttcctgagcagagctctccgggttccccggctcgcggggcccggcgaagggcagggtttccaggcctgaggtgccc

SEQ ID NO: 798024 - DNA, 99 bp, Homo sapiens
tctccaaaagcagtgatgtctggagctatgtggtggtaatgcctaaaaagagacaagcactggtggagtttgaagatgtgttgggggcttgcaacgcag

SEQ ID NO: 798025 - DNA, 50 bp, Homo sapiens
atcgcctggtgcccagggcccaccagattctcaaagttggattggtggaa

SEQ ID NO: 798026 - DNA, 100 bp, Homo sapiens
gtagagcccagctcagcgcccggcagccttcgacgcgatgttccgccggagcttgaatcgttttgagcagcagccaagctggacagatgacctgcctctc

SEQ ID NO: 798027 - DNA, 83 bp, Homo sapiens
tgcccgaggaggcagccaagctcgtagcctgccactccgtgcataacgaaggaggcccaacttcattcaataaggagcctgac

SEQ ID NO: 798028 - DNA, 50 bp, Homo sapiens
actttgatgagctgtgtttgaagacagtatcgatcaggatgggatcctca

SEQ ID NO: 798029 - DNA, 75 bp, Homo sapiens
aagctgagaattatccttggacttacataaagcattttggactttattgctatatgggtcatggtttgaccacat

SEQ ID NO: 798030 - DNA, 123 bp, Homo sapiens
tcaggcctttcccaatattcatccacctcagataccagcaactcccccatcgtatgaatctcgtccagaggaccagaggttaatttattctgggaagctgttgttggatcaccaatgtctcag

SEQ ID NO: 798031 - DNA, 100 bp, Homo sapiens
ggtgagaggcccttcagggccgcggcggtggaagtatgcgagacttaagagctcaagtgactagtggtctcctgccatttccagaagtgactcttcaagc

SEQ ID NO: 798032 - DNA, 75 bp, Homo sapiens
ccggtgcccatccagtccggtgccatctgaagcccccttcccagaaatgaatactgcattgagggacggacttct

SEQ ID NO: 798033 - DNA, 101 bp, Homo sapiens
agcgggagaggcccggggcacgtgcagaaaggagccccgcgagtggcgcgccggggatacctgcctagagctggaacgttacctccagagcgagccctgct

SEQ ID NO: 798034 - DNA, 100 bp, Homo sapiens
tgtgggggctttttacgaaagttaagtcttcgtggatgtcttggagtgggagacaatgcattaagggacacggccaacacggtgaaggaaaagttcggga

SEQ ID NO: 798035 - DNA, 82 bp, Homo sapiens
ctgattcaagtgttggcggatggaagggaggagactcctgaccctcagaatggttatcaatactctggctgaccatcatcat

SEQ ID NO: 798036 - DNA, 74 bp, Homo sapiens
ctttcggcttctgagacggcggcagcagcggcattcaggagtctcgctctcagtcaaaatctccaacgggaact

SEQ ID NO: 798037 - DNA, 103 bp, Homo sapiens
ggttggaggaggtagatcaccctttctgcgggggacgatttcgtcggtgttggcaatctgacagctcatacatcctatgagatttctgcctgggccaagactg

SEQ ID NO: 798038 - DNA, 100 bp, Homo sapiens
agaggtcaataatgaaagtggagagtcacagaggggaacagatttcagtgtcctccttagctctgcaggaacggcagagtcgaaacaaacaatgagggcg

SEQ ID NO: 798039 - DNA, 100 bp, Homo sapiens
gtggtggtggaggtccaggagaagaaagttactgtggcccatgtcctaaaaactggatatgttacaaaaataactgctaccaattttttgatgagagtaa

SEQ ID NO: 798040 - DNA, 74 bp, Homo sapiens
ccctgggagctggaggaaccgcggcccgatgagagaaagggaaagttaaggatgctggagcagaacaatggatt

SEQ ID NO: 798041 - DNA, 124 bp, Homo sapiens
ctgtgtccaaccccatcacataggggtttctgttaaggaactcgatttatatttggcatactttgtgcatgcagcaggtggtcctggctctggcaaaggcacacagtgtgaaaagctggtggaa

SEQ ID NO: 798042 - DNA, 99 bp, Homo sapiens
cttcgttgggggtctgaatcctgaagccactgaggaaaagatcagggagtactttggcgagtttggggagctgtggccagaagagctccgaagagacag

SEQ ID NO: 798043 - DNA, 90 bp, Homo sapiens
tgcctggggctgaacgcggctttctgggagaacagatcccattccaatcgttgtcaagtatgatgtcatgggcatgggtcgcatggaaat

SEQ ID NO: 798044 - DNA, 87 bp, Homo sapiens
gaacgccgtccacgtgaaggggcccttctcggtggaggccgacccatccaggacattctcactattctatgccttaaaggcccttca

SEQ ID NO: 798045 - DNA, 88 bp, Homo sapiens
ggggacagcggggacggcacggcgcgcgcagtcttgaatccagataatagttttgaaatactggttgaccaatctgtggtgaatagtg

SEQ ID NO: 798046 - DNA, 100 bp, Homo sapiens
ctcctgggcgcgacgaccctagtgctcgtcgccgtggcgccatgggtgttgtccgcagccgcagatgcagacagacatgctgaactatctggaagtccac

SEQ ID NO: 798047 - DNA, 83 bp, Homo sapiens
aggcggcggcggcctcggctgaagaaagaaggtgggagcggagagcgcaggcgtgccgcggcgagtcctttgcacatgttggc

SEQ ID NO: 798048 - DNA, 101 bp, Homo sapiens
acgtggcagtgcgcacccggcaccccgactgcctggagcacctcatcgagtgtggcgcccacctgaacgcacaggataagatacagaaggtggtcatggca

SEQ ID NO: 798049 - DNA, 88 bp, Homo sapiens
tgccaaggagtcacggatcggattcctcagctacgaggaggcgctgaggagagggtatcggtacagcaatcggagagctgcctccata

SEQ ID NO: 798050 - DNA, 82 bp, Homo sapiens
gctgctcaagttccagatttgaactcccccactggaaaggattctgaaagaaatgaagtcagccctcagaaatgaagttgac

SEQ ID NO: 798051 - DNA, 74 bp, Homo sapiens
ggcaatgctgaaaactgctgagagaagggcgacataccttctgttgaataccttttacaaaatggaagtgatcc

SEQ ID NO: 798052 - DNA, 100 bp, Homo sapiens
atggagagttctacctacgaggaaagcaggcaggatgggagagtcgccgatagaaccacctcttccctgcctcctgggcttgggggaagcttgaatgaca

SEQ ID NO: 798053 - DNA, 100 bp, Homo sapiens
aagaccccattgatgctctctcaggagatctggacagctgtccctccactacagaaacctcacagaacacagcaaagaatgcaaactgcagaccccatat

SEQ ID NO: 798054 - DNA, 85 bp, Homo sapiens
ggcgagcggcgggcggcggaggaggagacggcaggtcgggaggctggcaggatgtacagtttttatcacaggtgcaagccgtggc

SEQ ID NO: 798055 - DNA, 75 bp, Homo sapiens
ctcggtgctgcagacggcgagacctcctgcacaggagaacgtatttaccgggcagtcaaagatctattcctacat

SEQ ID NO: 798056 - DNA, 100 bp, Homo sapiens
ggacgacagggcccggcagctgaagggtctcgaggatgacattattgacgatgtggagagttttgttgctgccgcggagatcctgaaagagagaggcgcc

SEQ ID NO: 798057 - DNA, 83 bp, Homo sapiens
aaatccaggaacaactgtgtcagcagctagcccttttcctcaagatggcccactgcgtgaccttggttcagctgtccatttcc

SEQ ID NO: 798058 - DNA, 75 bp, Homo sapiens
ttcaaacattcgtctcggaaaccccgcctcttacagtcacgaggagctgttgtcaccatcaccacgcccgtgaac

SEQ ID NO: 798059 - DNA, 96 bp, Homo sapiens
ctcagtgagacacaatttatcattgaataagtgttttaagaaagtggacaaagagaggagtcagacctctgtgagtgaaagccttcagagggaagc

SEQ ID NO: 798060 - DNA, 100 bp, Homo sapiens
tcccgagtagctgggattagagagtcctgcttcctgttcgccctcacgcgccagaagttgccacccttttgccagcaggggtacctgaggatgcagggac

SEQ ID NO: 798061 - DNA, 50 bp, Homo sapiens
tcctgggagcacagcagaagtcagccattgtttgatgtcctgtgactgag

SEQ ID NO: 798062 - DNA, 51 bp, Homo sapiens
tggagacaagcccaggaaagcaacatggaaacctcgacctgtctcccagtt

SEQ ID NO: 798063 - DNA, 100 bp, Homo sapiens
caattctgtgagcagcaagaatggcacggtctgcctcagtccaccctgtaccctggtcttccgtgtgtgctaagatcgtgcagctcctggggcagaatga

SEQ ID NO: 798064 - DNA, 75 bp, Homo sapiens
gagggtgttcgactgctagagccgagcgaagctctacgcctgcaagctctcagaccgggaacatccactctacct

SEQ ID NO: 798065 - DNA, 58 bp, Homo sapiens
ccaggcccgcgccgccaccatgagcagcccgacggccatggaggctgaagagacgatg

SEQ ID NO: 798066 - DNA, 100 bp, Homo sapiens
ggcgttctggatctcaaagcgggacccagaccccaggaggcctcaccccacagcaagagaaagaccacgagcatggacatgatggtcgcgctcactccgg

SEQ ID NO: 798067 - DNA, 97 bp, Homo sapiens
ctcgcggaccaccctgctccgaaaactaagaggtgcccacgagtgtattcggggagaagcttcgagaacaagttgaagagcgactgtccttctatga

SEQ ID NO: 798068 - DNA, 75 bp, Homo sapiens
gatgtgatgttggagaactacagaaacctggtctccctaggttacttcttgctgcagattctgcgcaggatcgga

SEQ ID NO: 798069 - DNA, 100 bp, Homo sapiens
gcagaggctagcgagcgagccccaggaccctgcggccgtgtctctgcccacgtcgagcgtgcccgagacccgagatctatgcagttagatcagttgttcc

SEQ ID NO: 798070 - DNA, 50 bp, Homo sapiens
aagcgaaggctctcctgaaaagctagccaacatggaagaagatgccagat

SEQ ID NO: 798071 - DNA, 112 bp, Homo sapiens
cccgccgtcgccatgggccagaacgacctgatgggcacggccgaggacttcgccgaccagacctgcctagagctggaacgttacctccagagcgagccctgctatgtttcag

SEQ ID NO: 798072 - DNA, 98 bp, Homo sapiens
tgagatccatctgcaccacggtgctggctaaccggcctcctgcaaagctcaacctgctaacctgccaggtgaagaccaaccctgaggagaagaagtgc

SEQ ID NO: 798073 - DNA, 109 bp, Homo sapiens
gaagtggtgatgcaagaagtttctaggaaaggccggacaccaggtttggtgcacctcgatttggaggaagtagggcagggcccttatctggaaagaagtttggaaaccc

SEQ ID NO: 798074 - DNA, 75 bp, Homo sapiens
taaaaagaagcgggagaatctgggcgtcgctctagagttcccagtgacctgacagcagaggagcgtcaagaactg

SEQ ID NO: 798075 - DNA, 83 bp, Homo sapiens
gaaggaacgaggcaaggagctaaagcagcgtgcgttcagccctggggacggctgtcctcagcgaggggccgtgcacccgctcc

SEQ ID NO: 798076 - DNA, 98 bp, Homo sapiens
agaggcaccgggatcgtgaccgagaccgtgaccgagagcgtgaccgagagcgcgaatatcgtcatcgttagaaggttcgatacaagaggctgttttcc

SEQ ID NO: 798077 - DNA, 100 bp, Homo sapiens
catgcaaaggcgtatccatggcaacctcaaaaggaaggacacagagatgatgcttcagtggctgcagcaggaaaagacgcccagcggcagcaggatgagt

SEQ ID NO: 798078 - DNA, 50 bp, Homo sapiens
attccaagtaactcttatttgaagtgcctagctgccactccatttatatg

SEQ ID NO: 798079 - DNA, 75 bp, Homo sapiens
cgtggccgtctcctgcctcctgcttgcaaaaactgttttggctgggcctacttcacctataccttctctgggaaa

SEQ ID NO: 798080 - DNA, 82 bp, Homo sapiens
tagaggtggcccatggcaaggcgtcctgcaagctctcccagatgggctacctcaggatcggccacgcccagatttcttctac

SEQ ID NO: 798081 - DNA, 82 bp, Homo sapiens
cggtggactccttcggcagtccacccaccgccgccgcctcccagatcctgaggaggatgaaggggctggccctggaggccga

SEQ ID NO: 798082 - DNA, 100 bp, Homo sapiens
gtgccacaggaggctgtgcgggccccgctccgcttcgaatggttggcccgccacaataaactgttgcagcagatgctcaaaccaggatcggatccagatg

SEQ ID NO: 798083 - DNA, 101 bp, Homo sapiens
gtcaagaacacgatcacgttctagatcacatactccaagaagacagagtgaacatggaaaggtttgcagaagaagcagatgttgtaatagttggtgcaggc

SEQ ID NO: 798084 - DNA, 58 bp, Homo sapiens
aagcatgtcaccaacccggccttcaccaaactccctataaaataccatgaggagtttg

SEQ ID NO: 798085 - DNA, 83 bp, Homo sapiens
tgaagcttctgaaccatccacacatcataaagctttaccagatttgaaaaagggcgcatctatacgttcattggagaagtcgt

SEQ ID NO: 798086 - DNA, 82 bp, Homo sapiens
cgcgcgcagggcctgcagcgggagctggacggcgagcgcgagcggcgcgagaaaattcattggcctgcccctgagccggtgg

SEQ ID NO: 798087 - DNA, 75 bp, Homo sapiens
accagcatttagagctgtttatgaagcactgagaaataatgtgaaagatgttgcagaagtgttccagaagtggct

SEQ ID NO: 798088 - DNA, 99 bp, Homo sapiens
ccgagagcaacaaagcaggcgactacagccacgtgaaggctgaccggttccctgatgtgttacctgcttctgctactgatccaaactgcagaacttctc

SEQ ID NO: 798089 - DNA, 100 bp, Homo sapiens
gaaagatgcatcagatctgtgtccttcaccatgagatcatctggcctgctgggaagagagaagggcacagttacctaagtatcaacgtaatcttcctcgg

SEQ ID NO: 798090 - DNA, 100 bp, Homo sapiens
ggattatatgacttttatctgcctagagaagaactatggatctacaacatggagactggaagatgtcatggctccgatcttcatcttgaagaagagtgac

SEQ ID NO: 798091 - DNA, 100 bp, Homo sapiens
ctggaggccgccgcgagcccgctttccaccccgacctctgcccaggccgcaggaagatgaagtcctcagtacattctgaagaagatgattttgttccaga

SEQ ID NO: 798092 - DNA, 80 bp, Homo sapiens
cttggaatgaatccttctagagacgtccacgacaatgcagatcttcgtgaagactctgactggtaagaccatcaccctcg

SEQ ID NO: 798093 - DNA, 75 bp, Homo sapiens
cgaagaactgaagcaggaatggaaatttgtcagtgaagaagttctagattctgagaaggacttgaaagtactcat

SEQ ID NO: 798094 - DNA, 121 bp, Homo sapiens
gggggctgctgggcgatgccacagaggagttcattgagtccctggactctactacaggtattttgaaggtggcgtctcatctgtctacctctgggatctggatcatggctttgctggagtg

SEQ ID NO: 798095 - DNA, 97 bp, Homo sapiens
gtgaaacactcaggggaggccaccaacactgtcacaaagattaatctgctgaacaaggtggacattgcatctgggatggccattgaagggatgtgct

SEQ ID NO: 798096 - DNA, 97 bp, Homo sapiens
agaagatcggctcccggaattggaacagctggagcgcattggactgttcagtcatgcggagattaagcagcagccacattggcagtgaggccgtggc

SEQ ID NO: 798097 - DNA, 98 bp, Homo sapiens
gaaacgttgaagcacaatgatccttttgctcctggtggaacagttgttgcagcaagcgattcagtgacttctgacagctctctccatggaaggaggcg

SEQ ID NO: 798098 - DNA, 100 bp, Homo sapiens
cgcagttctgcattctgtcgggcggtgggttacgactcactgattaaaaagagggactttttcaaatactttgcacttttgattgtgtattatggatacc

SEQ ID NO: 798099 - DNA, 100 bp, Homo sapiens
gtcataatgcagaagtaagaaaggctttgtctagacaagaaatgcaggaagttcagagttctaggagtggaagaggaggagcatattaatgaaaagtgcc

SEQ ID NO: 798100 - DNA, 98 bp, Homo sapiens
aaactgaaaatagataccaaagaaaagaaagagaaaaagcagaaagtagatgaagatgagattcagaagatgcagaaagaccacagcaagattctttc

SEQ ID NO: 798101 - DNA, 100 bp, Homo sapiens
cgatcctgggctaccggtctgtgggtgctgctacccccgtatgatgatgccactgtgaatggtgctgccaaggagccaccgccaccttacgtgtctgcct

SEQ ID NO: 798102 - DNA, 75 bp, Homo sapiens
ggctgcgtcgggctgcaggagaagatggcggtctccacagatattaaagccatgacagcaaacagcccctttctc

SEQ ID NO: 798103 - DNA, 74 bp, Homo sapiens
ttttctgatggttaccgctttggactggagctcttccccgcagctctgggagacgtggaggcctctgaagctga

SEQ ID NO: 798104 - DNA, 100 bp, Homo sapiens
ctcgatcgaggacgacttcaactatggcagcagcgtggcctccgccaccgtgcacatccgaatgggtggtccagctgctcacctgtgacctgctactgtc

SEQ ID NO: 798105 - DNA, 83 bp, Homo sapiens
gatgtacatcaaggcctccggcagctatgcagaacactctgctccagccaaggtggtgagggcagctgttcctaaacagcgca

SEQ ID NO: 798106 - DNA, 83 bp, Homo sapiens
tgatttatgattccctggattatgcaaagaaaaatgaacccaaacatagacttgcaagaagtcagagctgacaaatttggcag

SEQ ID NO: 798107 - DNA, 100 bp, Homo sapiens
gcttaatgctgtcttaactagtgtaggaaaacggctcaacccaccgctgccgaaatgaagtataaggtgagccctattcccagaggcaggtggtgctgac

SEQ ID NO: 798108 - DNA, 75 bp, Homo sapiens
ggctcgacaatttaccaattcctgtggtgacgtcagaccagtggacaatcgaccagatggctttggggactcccg

SEQ ID NO: 798109 - DNA, 100 bp, Homo sapiens
ctcgcccccacctgtggactctgaccgcaaacaaggagagcctactgagcagcctgagtggaaggacctgggttacctgcagcagtggctgaaggccttt

SEQ ID NO: 798110 - DNA, 99 bp, Homo sapiens
agcaccccagatgggtgagagatgtgatcactggtttcgtggcctgaccaaggacctccaaggtcttgggcgtctttggtactggcttttttaggggtc

SEQ ID NO: 798111 - DNA, 100 bp, Homo sapiens
ctgggcccttagtggatgtttcagacgctcggccgggaacgaagcaatacttcaagtcagctgcaatgaccctaaacgagcggttcacttcgtatcagaa

SEQ ID NO: 798112 - DNA, 100 bp, Homo sapiens
ggaaaggcgcctatcaggaccgcgacaagccagcccagatccgcttcagcaacatttccgccgccaaagctgagccattatctggatattgtggaagtaa

SEQ ID NO: 798113 - DNA, 89 bp, Homo sapiens
ctcaaagaagtttgtccttctgctattgatcctgaaggatctttcgaagatggtttggctgccttggagatttggagatctgatgccac

SEQ ID NO: 798114 - DNA, 75 bp, Homo sapiens
tttatcagaaaaggatcggaaaagaattttgcttttggaaagaacaaacagtggatttgaagaatcagattctgg

SEQ ID NO: 798115 - DNA, 75 bp, Homo sapiens
ttacaacattaatcagatactgcatttaaggaagattatgataaatatggaattcgaattagagtcaaatttcga

SEQ ID NO: 798116 - DNA, 100 bp, Homo sapiens
cgacatggtcatgagcttcgtcaacctcgtggcatccagcagctggagggtctgtcagccatggaggtggaagtcaggtgcagctgcagcggccgtcacc

SEQ ID NO: 798117 - DNA, 90 bp, Homo sapiens
ccgtaaggagcagcttccaggatcctgagatccggagcagccggggtcggagcggtactatactggcaattgctggagaagattttgcaa

SEQ ID NO: 798118 - DNA, 100 bp, Homo sapiens
cattgcctcctttcctggctctttcagggtgcccagggtggaggggaaggggagtcagccagacccccatcctgacaagtttgcagaaaaaacttcagca

SEQ ID NO: 798119 - DNA, 88 bp, Homo sapiens
gtgatctgcctcaacatcttcaggtgatgatcaaccttctgcgttgcgaagacagaatcaagctgtggtccatgctgtggacggcacc

SEQ ID NO: 798120 - DNA, 100 bp, Homo sapiens
gaagaacttccctaatgccatcgagcacaccctgcaggtgggttcagtagaagaattccaaggccaagaacgaagcgtcatcctcatctccaccgtgcga

SEQ ID NO: 798121 - DNA, 82 bp, Homo sapiens
ctcaggtgctgcaggcacagcccgagaaaccgcagcactacacgtcaaaatgcagatcttcgtgaaaacccttaccggcaag

SEQ ID NO: 798122 - DNA, 51 bp, Homo sapiens
ctgagcaccgccaccatggggaaggggggaagaggaagaacgtctgagaaa

SEQ ID NO: 798123 - DNA, 96 bp, Homo sapiens
cagaaacccaggaaatcgagactcatgactcccagagaggatggcatctagaagatatcggaaactggcactgaagtggcatccagataaaaatcc

SEQ ID NO: 798124 - DNA, 145 bp, Homo sapiens
cggtttttgtcttttgatttcaagagttaggagctcgagaaccgtttggcaatatgtacgacgcggatgaggaaaatatttacaccagcagctccagttcataccaataaagaagatcctgctacccaaactaatttgggattta

SEQ ID NO: 798125 - DNA, 98 bp, Homo sapiens
agcaaatcaaacagaaataaggtagactcaatgggtgactattatatggttaaaaagattttggaggaaaacagttcaggtgacttgaacataaattg

SEQ ID NO: 798126 - DNA, 106 bp, Homo sapiens
ggctgcgctggcgcggcttttggcggcctttctgctcctcgcggcccagatgtgaagttcatttccaatccgccctccatggtggcagcggggagcgtggtggccg

SEQ ID NO: 798127 - DNA, 74 bp, Homo sapiens
cccccgcctcggggagggcaccagggtgcaaatagctatgggcaacttggcctcggccataaggaagatgtgct

SEQ ID NO: 798128 - DNA, 88 bp, Homo sapiens
taagggataaagacgggcaggtcgatgcccgattctttggacaacatgacagtcaaaccggcacgatgtccaggcaccagaaccagaa

SEQ ID NO: 798129 - DNA, 100 bp, Homo sapiens
ggaggttttaaacagtataacaggtctctctgaagaggctatcatggagctgaacctgccgactggtattcccattgtctatgaattggacaagaacttg

SEQ ID NO: 798130 - DNA, 100 bp, Homo sapiens
caagttaacccttaccacccagcagcagggcatcaagatatggctcgtggacagcagaaaattcagtctcagcagaaaaatgccaaaaagcaagctggac

SEQ ID NO: 798131 - DNA, 78 bp, Homo sapiens
tggtgagctctccaggccaggtgccgcgcggcctccacctctgcgctatcatggtgaacttacttcagattgtgcggg

SEQ ID NO: 798132 - DNA, 98 bp, Homo sapiens
gaagcaaaagccttgatagcatggatttctgtgagctcactgcaacacttccccagatcaaaaggagccaacacctttcatcatcgagtggatcccag

SEQ ID NO: 798133 - DNA, 100 bp, Homo sapiens
cggggagtcggcgccatgaccccatcgaggcttccctggttgcttagctgggtctcggccacggcgtggagagcggcaaaatttggaatgatgggagatc

SEQ ID NO: 798134 - DNA, 88 bp, Homo sapiens
gtcgcaatcggtaccaaaggtgtgcagtggatggagcttgtcaagattggtcagccccagttgatgctgacagcaggacccagtgttg

SEQ ID NO: 798135 - DNA, 152 bp, Homo sapiens
gcggcggcgcccgaagacgcgctcctggctcggcccgacagcctcgcttggccgccagttcttctgcagccgaaggcgtgcctttgttccattgaatgttcccaataacaaaaattctacagagtgggaaaaagtgaagtccctatttgaag

SEQ ID NO: 798136 - DNA, 100 bp, Homo sapiens
gaacactctctccccagaaatccaacttctcaaggccagaagcggactcctagaagaggggagcagcaaggatggaatgacagccgtgggccggagggga

SEQ ID NO: 798137 - DNA, 80 bp, Homo sapiens
ccatccgcatgaacggcatcatgctcaggacagtcattttgtttactcattcagccctgttgcaggtcccaataaactct

SEQ ID NO: 798138 - DNA, 80 bp, Homo sapiens
accaacaatgagagagtggttgtaaaaatcctgaagacatgtagactgccaaagtgtatgggatgctttcaagggtgcat

SEQ ID NO: 798139 - DNA, 50 bp, Homo sapiens
atgctgtaaggaatgcaaatgggacatcacccagaagggctatgaaaaga

SEQ ID NO: 798140 - DNA, 111 bp, Homo sapiens
gaactcttgggcaccaccacccaatcaggacagagcagcatgattccaggtggctcaatgctgccactgcagagccccgccatggaagacacgccgttggtgatatcgaag

SEQ ID NO: 798141 - DNA, 99 bp, Homo sapiens
cacccgcgagcacagccaaaaattcttcctgggacacaacgacgacattatcaggcgtcttcactcgaggacagctgggcctgatagacatcatcttcc

SEQ ID NO: 798142 - DNA, 100 bp, Homo sapiens
gctctgcctgctccacaagcggcgccgcgccctcggcctgcacggttacagaatgtctgaaggggacagtgtgggagaatccgtccatgggaaaccttcg

SEQ ID NO: 798143 - DNA, 87 bp, Homo sapiens
atgacagcagcattaaacatatatgtgaagagtccccgatgtttgtagaccttataatgttgtaccatctttgggtaggcagacttc

SEQ ID NO: 798144 - DNA, 96 bp, Homo sapiens
tctgggacaagttgcatgaagagcatatcaatgcaggacgtacagttcagcctggacagtttttgacggtgcagtcttgctatatggtgtgagaaa

SEQ ID NO: 798145 - DNA, 75 bp, Homo sapiens
tctgtgtcaaacatccatatcataagtggaattttggagatattcaaaggaaacatgccctgaactgtcacagaa

SEQ ID NO: 798146 - DNA, 80 bp, Homo sapiens
actgggacgtctagtccacaggaagacctgcaccactgtcgccttcacacaggtgtaccaacagtaccgttattgccacc

SEQ ID NO: 798147 - DNA, 75 bp, Homo sapiens
cacagaagtcgcaggcagcctctcagaaaggagtacgaccccagcaaagcgacctttgtgaaggtggtgccaacc

SEQ ID NO: 798148 - DNA, 60 bp, Homo sapiens
gtacaaagcaataagatggacctttctggagcacttttcaggattagaagaggctgtgta

SEQ ID NO: 798149 - DNA, 100 bp, Homo sapiens
cggcggcaaaatggcggcgcctgaggagcgggatctaacccaggagcagacagagaagctgctgcagtttcaggcatagaatgtcaagctaaccaggcgt

SEQ ID NO: 798150 - DNA, 75 bp, Homo sapiens
catgaatggagcaaaatggcggatcatgtgcagcttctcggacaaactatttagtggaaaaggcttacattttca

SEQ ID NO: 798151 - DNA, 50 bp, Homo sapiens
tgggggtgtagcacttgcatacatgcaagaaagcacttcagccaagcaga

SEQ ID NO: 798152 - DNA, 50 bp, Homo sapiens
ttggtgtcctgtaaaatcacagattatgctattgacctgaaaagtggttc

SEQ ID NO: 798153 - DNA, 100 bp, Homo sapiens
cctcggcccctgagctccaggccgtgcgcatgtttgctgactacctcgcccacgagagtcggaggcatgactacggggccccccaggaggcgactctcgg

SEQ ID NO: 798154 - DNA, 100 bp, Homo sapiens
gaggagatcaggcaagatctgtgctgtgcagatcctttggattgaggctgctgtgcacaggaatatggaaatggtggagtcaatgaagaaagtagcaggg

SEQ ID NO: 798155 - DNA, 51 bp, Homo sapiens
gagacgcagctgtgcaccacaagaaattgcatctgatggtctcaagggtcg

SEQ ID NO: 798156 - DNA, 126 bp, Homo sapiens
gtgcgtttctctgttgtctcggtagaaggccagagtcacacacggtcctaagagctgggcaccaggaagcgaaggctgcatcaagatggtgctcatgtggaccagtggtgacgccttcaagacggc

SEQ ID NO: 798157 - DNA, 51 bp, Homo sapiens
gctctccaggacataagaccagaagcagcgagctccgtgtagacctggtgg

SEQ ID NO: 798158 - DNA, 51 bp, Homo sapiens
gccagctccagagccacgtacggaattcgaatttagagtttaatttctcag

SEQ ID NO: 798159 - DNA, 95 bp, Homo sapiens
aaaaatcgccaaaaattacttggagcaaagggcagtcggcggagcttcgccaaggctggcgcagtcgagtttgctctccaaagctcggggaattg

SEQ ID NO: 798160 - DNA, 75 bp, Homo sapiens
gtggagtccgagctgagatccatctgcaccacggtgctggtgcagtacagaaggtttctaaaaaattagaaatgc

SEQ ID NO: 798161 - DNA, 50 bp, Homo sapiens
gcaggcatcatccgctatgcaattggggaaggccaggcccctgaccccag

SEQ ID NO: 798162 - DNA, 75 bp, Homo sapiens
gcatagctgctacactgaagatgaagcaaggcccaatgacccaggcgagtttccaggatggcttctgcatcaact

SEQ ID NO: 798163 - DNA, 100 bp, Homo sapiens
ctccgagacccggacagaggcaagcaggggcgccgtgggtgccagagaggcggaagaggaggcctgatgggaacattgggtgctttctgcttgaagttac

SEQ ID NO: 798164 - DNA, 75 bp, Homo sapiens
gccctagactttttacttctgtgatggcagtacacagtcaaactcagcgaagtccccacatattttatcgccatg

SEQ ID NO: 798165 - DNA, 50 bp, Homo sapiens
tgcagcggtggctgctgaaaatgaagaggggctgaggaagctgccctcga

SEQ ID NO: 798166 - DNA, 83 bp, Homo sapiens
cgatgcccgattctttggacaacatgacagacaatgcagatcttcgtgaagactctgactggtaagaccatcaccctcgaggt

SEQ ID NO: 798167 - DNA, 100 bp, Homo sapiens
gttccctcagcctccggccttgtgtgtccgactcggcagcagtggactcaacgatgactctgaataatgtcaccatgcgccagggcactgtgggcatgca

SEQ ID NO: 798168 - DNA, 98 bp, Homo sapiens
ggatctggacacccagcggtctgacatcgcgacgctgctcaaaacctcgctccggaaaggggacacctgggtcgtgtagggataaaaagaactgtaag

SEQ ID NO: 798169 - DNA, 98 bp, Homo sapiens
ggctttccagttgtttgacaagagtggaaatggagaggtgacatttggtttcaggctctgtataactatactcccaggaatgaagatgagctggagct

SEQ ID NO: 798170 - DNA, 99 bp, Homo sapiens
tgacatgttcatctactggattcacagaggccttcatcatagactggtatataaggtggagctggctctgtgggacacagcagggcaggaagactatga

SEQ ID NO: 798171 - DNA, 98 bp, Homo sapiens
tctcgctcggctgcgggaaatcgggctgaagcgactgagtccgcgatggagcttagcaaagaagcgacttcagaagaagcgatttagtgaaatcgtct

SEQ ID NO: 798172 - DNA, 100 bp, Homo sapiens
tgggagcaccaggatctcgggctcggaacgagactgcacgaacactcctatgccaccttcaccagctgtacaagtgcagggccagcctaacagttctcag

SEQ ID NO: 798173 - DNA, 100 bp, Homo sapiens
tgatagaagaggccaagactgcgttcctgctcaacatccagcgtgtgaaggcaaagaagaatgctgctccattcagaagtgaagtctgctttgggaaaga

SEQ ID NO: 798174 - DNA, 100 bp, Homo sapiens
aaaaacctgagaacttcctgatctctctcgctgtgagacatgtctgagactcctgctcagtgtagcattaagtgtgccggtccaacaaaagcccttgggt

SEQ ID NO: 798175 - DNA, 100 bp, Homo sapiens
ccatcgacaagaaggcacctgaaattcggcgccttcatcagtatgtgaaatttgctgtccaagatgtgaatgatgttctagacttggagtgggatcagca

SEQ ID NO: 798176 - DNA, 100 bp, Homo sapiens
aggaggcgccccgcgcagctggctggcggagcatgagcgccccagtttttggctttcacccccaaccagtgaccaaagacttgaccactcaaagtccagc

SEQ ID NO: 798177 - DNA, 100 bp, Homo sapiens
atttaaccgctctctgcctcccagtgtgctggaattgatgttcgtctgtgtgatgttggtgaggccatccaagaagttatggagtcctatgaagttgaaa

SEQ ID NO: 798178 - DNA, 98 bp, Homo sapiens
taacttctactgacgaagcttggaagttgcagaaggttggattcagatgccgaggacacagtacttcctcagaaagaagacagaatttgcaaaagaga

SEQ ID NO: 798179 - DNA, 100 bp, Homo sapiens
ccatattctaagtgggaaagagtttggcgttgaaagaagtggataacaaagccattgacctttgccgattgtgttggggacgaacttcctttaggatggg

SEQ ID NO: 798180 - DNA, 100 bp, Homo sapiens
cgataattaaagagtaaagttgtgctcaacggacaatgccgtcttctgtctcgtggggcatcctcctgctggcaggcctgtgctgcctggtccctgtctc

SEQ ID NO: 798181 - DNA, 98 bp, Homo sapiens
cttgaattcctggcttcaagtgagagcctcctgccttggcctccgaaagtgctggaattacagggtgtccgcaatgttgccagtgtctgtctgcagat

SEQ ID NO: 798182 - DNA, 100 bp, Homo sapiens
ttataaccaccgtactgaagttccctgatgatcagactcagaaaattttggaaagagaagatgctcggctgatgagaaagtggctcatgccaaagaagaa

SEQ ID NO: 798183 - DNA, 99 bp, Homo sapiens
ccagcaatgagaggacccgcgtgggcaccctgcaggtggtcagacatgtcatcaactcagctggatggagagcaatacatcatcatctttggagaattt

SEQ ID NO: 798184 - DNA, 149 bp, Homo sapiens
agcgaggccggtgccctcccgggcggcgaccggggcctgggtccacgccgagggcaggacgaacttcaccagctgagcttcagtcattgtctattcctggaacttaccaagagaagatcacccacctgggacattctctgatgagttta

SEQ ID NO: 798185 - DNA, 99 bp, Homo sapiens
tttaagaaacatccacagcagcgactggcccaagttctttgaaaaggccaactgtgatttgagacggcagattgatgaacagcaaaagatgctagagaa

SEQ ID NO: 798186 - DNA, 98 bp, Homo sapiens
agatttcaaaacaagtttactggaggcattagaagaattgcgtatgagaaggtataacaagaggattgcctgatccagccaagatgcagagcacttct

SEQ ID NO: 798187 - DNA, 100 bp, Homo sapiens
tcccgtattctcagagtaaaagttgtttctggaattgatctcgccaaaaaggacatctttggagccaggcacattgctgaattaatattttacatggaag

SEQ ID NO: 798188 - DNA, 100 bp, Homo sapiens
atgccctcattaaagcagccggtgtaaatgttgagcctttttggcctggcttgtttgcaaagagggtcaccatgaagttcaatcccttcgttacctcgga

SEQ ID NO: 798189 - DNA, 99 bp, Homo sapiens
agcagtgttcatggagttcattgaattatggcatagatcttgggaaaattgcgactaatctggtagcttctggtgctaatgaatctgaaatctacatat

SEQ ID NO: 798190 - DNA, 100 bp, Homo sapiens
gaatatcgaagaaaggagaacggtgttgtctgcagagtgagattatggcgaagcattttattctttttacaaacctgctttttctcagttttccacattg

SEQ ID NO: 798191 - DNA, 100 bp, Homo sapiens
tctgggggagctcatcggcactctgaacgcggccaaggtgccggccgacaccggtgctggagaatctggtaaaagcaccattgtgaagcagatgaggatc

SEQ ID NO: 798192 - DNA, 100 bp, Homo sapiens
gtagagacgtagcaggagacatttctgggaatatggtagatggatatagagatattgcttgcacacatttagatgtggatttagtctgcataactgtaac

SEQ ID NO: 798193 - DNA, 98 bp, Homo sapiens
gcggaactcgagaggaccaacaagttcatcaaagagctcattaaggacgggaagaacctcatcgctgcgacgaaaacgatgaagaacgatacagatac

SEQ ID NO: 798194 - DNA, 100 bp, Homo sapiens
tcagatcttgaaaaaaaaaggagagaagctgaagcattgcttcaaagcatggggctaactccagaatcccccattggcatttataagacgctgtttggca

SEQ ID NO: 798195 - DNA, 100 bp, Homo sapiens
agaacctttgtaatcaagttgataaggaaagtactgtccaaatgaattatgtcagcaacgtatccaagctccaaagcctgaactgatagctgcagagaag

SEQ ID NO: 798196 - DNA, 100 bp, Homo sapiens
tcagcctgagcgacgtgccccaggcggagatctcgggtggtccagctgctcacctgtgacctgctactgtcgctacggacagcgctctggcaaaaacagg

SEQ ID NO: 798197 - DNA, 100 bp, Homo sapiens
gtcatagctggaaacagtcagagccaccagccaatgatcttttcaatgctgcgaaagctgccaaaagtgacatgcagtggactcccgaaaaattgaccag

SEQ ID NO: 798198 - DNA, 100 bp, Homo sapiens
tctcctgttcctatgttaagggatctgacacagaacactgtagtcaggattctccttttacaaatgcaggaatgggatctaatctaaatctgttaggtga

SEQ ID NO: 798199 - DNA, 98 bp, Homo sapiens
ctcagagatccaagtgcgcgccctggcgggtccggaccaaggttgctgaaaagccaggagtcaaaatgactgagcgctttgactgccaccattgcaac

SEQ ID NO: 798200 - DNA, 100 bp, Homo sapiens
aggttctggaggacaacaagctgcctggtgcaatttgttccttgacttgtggtggagcagatattgggtgtgcaactgaggaacatggctcaagaaacta

SEQ ID NO: 798201 - DNA, 100 bp, Homo sapiens
agaagattacgccacccagtggtacagtatgcccccgtgggtattctcttcctgattgctgggaagattgtggagatggaagacatgggtgtgattgggg

SEQ ID NO: 798202 - DNA, 100 bp, Homo sapiens
cagcctcccaaatagctgggactacaggccattttccaaataaagccatgccctctgcaggaacacttccttgggttcaggggattatctgtaatgccaa

SEQ ID NO: 798203 - DNA, 98 bp, Homo sapiens
ggccttagcgatctatattccctttccagaagatgattccaacgccaccaattccaacctggaattgaatgatctggcacgggaccctccagcacagt

SEQ ID NO: 798204 - DNA, 100 bp, Homo sapiens
tgacagtggacatagaggacaacgcagatatagaacatttcttttatcacagtggagataagtaattaacatttcgaaacaggaaatgaaaggatttata

SEQ ID NO: 798205 - DNA, 100 bp, Homo sapiens
ggctccttatggcaaccctaagaacatggcctacacgggtgatcatggagctcagcttggtctccatggggctggtggtgatggaatacatgatgacaca

SEQ ID NO: 798206 - DNA, 99 bp, Homo sapiens
caccattcgaacctgcagcaatccctttgagtttccaagtcaggatatgtgcctttcagctttaaagagaattgaagtaatttgccatcttccatgtat

SEQ ID NO: 798207 - DNA, 100 bp, Homo sapiens
tgtaaactgaagctgcaggaggaccggcgacagcaagaagttttcatgggctgagctgctgagttcagcctgggaactgaggccaacaagggagtctcct

SEQ ID NO: 798208 - DNA, 98 bp, Homo sapiens
agcgaaaggaagagtttgctgatatgtcaaaagttcattcagtgggaagcaatgggaagatgatccctatgatcttgaagatgtttctgcacagaaat

SEQ ID NO: 798209 - DNA, 100 bp, Homo sapiens
caactgaaatgagacatgcacataatataggcccctagcagtcttcttgatgctttggaacaacatttagcttccttggaaggaaagaaaatcaaagatt

SEQ ID NO: 798210 - DNA, 100 bp, Homo sapiens
atagaatgcttgatatgggctttgaaccccaaataaggaagattgtggatcaaataagataagtacaaggtggactgtgcatgcctcaaagaaaacccag

SEQ ID NO: 798211 - DNA, 100 bp, Homo sapiens
atttaaacaacaagtacctttatattgctgtaacagtcatagagtctacagtcgatctaggtcaaatgaaaggaaatagaagacagtttgcaagagaagt

SEQ ID NO: 798212 - DNA, 98 bp, Homo sapiens
cgcaactacacacaagaagcatccttaggagctctgcagaacctcacggccggaagtggaccaagaggagttgcttaaaccaatgggactaaaacctg

SEQ ID NO: 798213 - DNA, 100 bp, Homo sapiens
gggcctgaagaggatgaatttccccatatttgctgcactgctaggactcaacgatgactctgaataatgtcaccatgcgccagggcactgtgggcatgca

SEQ ID NO: 798214 - DNA, 98 bp, Homo sapiens
ggtgtgtaacgactgtaatcaggttgtcaaaccgcaggcatttcaatcacattatgtgccgcagaatggaattcggcattgttcctacacagcttctc

SEQ ID NO: 798215 - DNA, 98 bp, Homo sapiens
caggcgccatcatcggcatagcccgggagatgcagccagtttacagcattcgcaacgacaggcgcctcctctgccaaccggtttgtcagcatcggacc

SEQ ID NO: 798216 - DNA, 100 bp, Homo sapiens
aaccaccaactgttaggtttttatccaaaatgtttcatccaaatgcatttattgcagcgctgtacattgataaggatttggaatatgttcatactttcat

SEQ ID NO: 798217 - DNA, 100 bp, Homo sapiens
gcacagtcccagggcatataccttctactgtccaagcacagtctcagccccatggggtatatccaccctcaagtgtgagctctgaggaacatgaatacag

SEQ ID NO: 798218 - DNA, 98 bp, Homo sapiens
tgcattctgaaaagcagcaaattgccacagagaaacaggacctggaagcagaggtgtcccagctcacaggagagccttttttagcaaaacttcagtct

SEQ ID NO: 798219 - DNA, 100 bp, Homo sapiens
cgcggccttcccatcaccatcacagagagcgatattggtggaacgagaatgcctacacgcagccacaggaatccagtttccatggaaaccaaaagcagtt

SEQ ID NO: 798220 - DNA, 100 bp, Homo sapiens
gccagccactcggagctaatccacaatctccgcaggctgatcccttatccaacatggttctaaccttcagtactaaagaagatgcagtttcctttgcaga

SEQ ID NO: 798221 - DNA, 100 bp, Homo sapiens
atctgcaaacatagagaattctgggcttccacacaactccagtgctaactcaacaggctcttgcagccaatgccggaacaggatttgctgttgctgagcc

SEQ ID NO: 798222 - DNA, 100 bp, Homo sapiens
actctgcacctcgaaggctgacaagtcatctgggaaccaaggcagcctggcatcctcgctacaacctcattgttgtgggccgatacccagatcctaattt

SEQ ID NO: 798223 - DNA, 98 bp, Homo sapiens
gagaagaacttatcagagattgagaatgtccatggatttgtttctcattctcatatttcaccaataaagttgtcatggatgcactggtagaagatgat

SEQ ID NO: 798224 - DNA, 100 bp, Homo sapiens
gggaaatttggcttgcaattcatcactttgaaaagtgtttctgaaagatctatccagcactccgatggccagcaacaacaccgccagcatagcacaagcc

SEQ ID NO: 798225 - DNA, 98 bp, Homo sapiens
gcaatatgggtacgagtaagcaatgactctcaagcaggcacacgtgtttcacgttgacaggtttgcttgggacgctagtaaccatgggcttgctgact

SEQ ID NO: 798226 - DNA, 100 bp, Homo sapiens
aactggactgtcctctacagaaggaagcacaaaaagggacagtcggatcttttgccagaaatgagggcatactggcctgacgtaattcactcgtttccca

SEQ ID NO: 798227 - DNA, 98 bp, Homo sapiens
agtattgtaacagctgaagtgtcttcaatgcctgcttggaaatcctcattgacgattcaatttgttgaaggccaatttgtggactcctacgatccaac

SEQ ID NO: 798228 - DNA, 100 bp, Homo sapiens
gaggaaatatttccaacatgcgtggctgaagaaaaggtgactggtctcatgagccctgaagaatgaactcagaggaggttgtttacatgaggttctccca

SEQ ID NO: 798229 - DNA, 100 bp, Homo sapiens
ccgagggcggcgggcacgcacggcccgggccggcgctccaaggcccgcccgggagggccggggccgcgctcagaatcaggaaacccaggcccaacggcag

SEQ ID NO: 798230 - DNA, 100 bp, Homo sapiens
ggctctgcaccaggcccggctgctggccctcctggtcatcccgcctgccatcacccccggggtgatcagcccatgacctaaacctccagacaaaataaaa

SEQ ID NO: 798231 - DNA, 98 bp, Homo sapiens
aaagaccaggaagtgctgcttcaaacgggcagggctctaggaaacatatgttacgatagccgttgacagccaaggcagtggccgtgctgctgcccatc

SEQ ID NO: 798232 - DNA, 100 bp, Homo sapiens
tcagacaccagccataaacgtcagtgtgcccaccacccttccctctgccacgcaggtgccgatggaagtccttaaggattggattcagcatcaaaataca

SEQ ID NO: 798233 - DNA, 135 bp, Homo sapiens
cggacactttgttattggagaaacatgcagattatatcgcatcctatggctcaaagaaagatgattatgattcactccttctccagttgcacagccacacccttcagctggccttaatgttgactttgaatctgt

SEQ ID NO: 798234 - DNA, 100 bp, Homo sapiens
gtcaccttgtcccgctgcagccgagatgccgggggagcggggccttccacaccccctccgtgggtgtgtgggcctgctttcttccccgggcgatgtgcag

SEQ ID NO: 798235 - DNA, 98 bp, Homo sapiens
tgggggtcggcaccttcggcaaagtgaagggaaaccaagtgctacctcctggagcttctcttggaaatgggctcacaccagaggcagcaagagacctt

SEQ ID NO: 798236 - DNA, 98 bp, Homo sapiens
gaaggatttggcaacagactttgtttcttggagtccacttccaattccaagtgcactgacaggcagaactcaccagtcacatcaccaggatcctctcc

SEQ ID NO: 798237 - DNA, 100 bp, Homo sapiens
ggggactggcctggcgtgcactccgcacctcggggacattattgcgcgtggaacggctgcttttggaagctgggagtgtccactcgccttccaccagcat

SEQ ID NO: 798238 - DNA, 100 bp, Homo sapiens
gtcatggtatcctgttataaagcaggaaggtgaccatgtttctcagacacattcatttttacaccccaggatggcaatggctatattagtgctgcagaac

SEQ ID NO: 798239 - DNA, 98 bp, Homo sapiens
cagcgacggttcttcatcctttacgagcacggcctcttgcgctacgccctggatgagatgcagccagacccggtccgtttggaatgcctgggatggtg

SEQ ID NO: 798240 - DNA, 98 bp, Homo sapiens
tttattgacctcgactcccatgcgggcttatttcaaaacctttgtccctcagttccaggaggcagcatttgccaatggaaagctctaggaaacaccag

SEQ ID NO: 798241 - DNA, 100 bp, Homo sapiens
ttgggcgtggaagtcccccatgaagtccaggagcacaacgggcacgtgttcgccagctaccaggttagcatcccgcagtcgtgcgagcagtgcctctcct

SEQ ID NO: 798242 - DNA, 100 bp, Homo sapiens
tgggcaaactaagccgattttccggaaaaagatacagcttatcgaaagcatcagcagaaaactttctgtcttgcgggaggcccagcgagggctgctagag

SEQ ID NO: 798243 - DNA, 100 bp, Homo sapiens
ggcttcagacagcatatttgagtcatttccttcgtacccacagtgcttcatgagagacaagttggatggcttgaggactggtactaaaaggaaacgtgac

SEQ ID NO: 798244 - DNA, 98 bp, Homo sapiens
agacataagaccgttggttctgacgaggcacagcgtttcttgcaagaatgggaggggggctttctctgtggtccgacgctgtgtcaagctctgcaccg

SEQ ID NO: 798245 - DNA, 100 bp, Homo sapiens
gacaagataactggagagcctctctacaatgctgtggtactatactggcaattgctggagaagattttgcaattgttgcttctgatactcgattgagtga

SEQ ID NO: 798246 - DNA, 99 bp, Homo sapiens
ctttccttaataaagaagcggtttgctactggttctgggaacactttttatttatgtcttatttatggttgaggaattcagaaaagagccagtggaaaa

SEQ ID NO: 798247 - DNA, 100 bp, Homo sapiens
aagggcatcgccgcctcagccgccgccgccgccgttttcgcctgcagctgctcaccgaaagctgcaggagacacagatgtccaccacctcaaagctggag

SEQ ID NO: 798248 - DNA, 100 bp, Homo sapiens
ggaagatgtaaagcaatatttcgagcagtttggcaaggccgactgcagcagtggcccagggcaaagagtgtgcgtcatcgatgagattgggaagatggag

SEQ ID NO: 798249 - DNA, 98 bp, Homo sapiens
gaccctgcgataacctgcatctctgcaaactcaacttgctgggccggtgcaactattcgcagtccgagcgggactggtgattgcagctggaagtgccc

SEQ ID NO: 798250 - DNA, 100 bp, Homo sapiens
gcccctctgcgttcctgtcatatgcagactggttcaagcaatgccctgccctaaggaagacactcccaattctgtttgggagcctgcgaaggcaaaatat

SEQ ID NO: 798251 - DNA, 100 bp, Homo sapiens
ggggatggagtagatattaataccttacaagagatgtgtatggactcagaaaaacatatgatctacacttttggtggtagaattttgacttgtaatggca

SEQ ID NO: 798252 - DNA, 50 bp, Homo sapiens
cgcgcctgtcgggctgaactgaggccccttcccagctgcctgcctgccct

SEQ ID NO: 798253 - DNA, 100 bp, Homo sapiens
gacggacgtcctcccacgtaccatttagaaggtctgccatcatggatgttctcgcagaagcaaatggcacctttgccttaaaccttttgaaaacgctggg

SEQ ID NO: 798254 - DNA, 100 bp, Homo sapiens
agacgtggtactcagcaagctcgagttaaagttggatgtgctggaacagatgcctgtgaggagccaccaacatttgaagctatggagctcattggtaaac

SEQ ID NO: 798255 - DNA, 101 bp, Homo sapiens
gttaagctggctgtcctgaaatattataaggtggtttctcagtattcaagtctgctttctccaatgagtgtaaatgcagtgatgaaagtgattgacccagc

SEQ ID NO: 798256 - DNA, 99 bp, Homo sapiens
ttcgataaaagtgtgcagaccaaggaaattcgaaatgagtcccatgactatcctcatagagtggccaagtttccagaaaacagaaatcgaaacagatac

SEQ ID NO: 798257 - DNA, 100 bp, Homo sapiens
taggaatgctgttggttccattagcaatccatctgaggttgtagggcccattacttgcatcgattcttatggaatccaagagttttgtaatctccatcag

SEQ ID NO: 798258 - DNA, 100 bp, Homo sapiens
ccggcggctgccggggcggcgaggcgcgaggagctagaaggtgggtgcggctgctatttggacgagagttccccctgcaggaccttctggtggtctggga

SEQ ID NO: 798259 - DNA, 98 bp, Homo sapiens
aacgagtctgaagtgaaccgcggcgacaagtacatcgccaagtttcagggagaagacacggtcgtgatcgcggtgtaccttgaaagacttttaacata

SEQ ID NO: 798260 - DNA, 100 bp, Homo sapiens
cctggtttcactaacatttttacacacagcagagtatcttacatactatggagttaaagaggattgcactgcctccatggaaccttcagcaattgaactc

SEQ ID NO: 798261 - DNA, 100 bp, Homo sapiens
tacaaccacagagctgtcatggctgccatctctacttccatccctgtaatttcacagccccaggaggctaagaagtcccgcttgccaatcctaataaaac

SEQ ID NO: 798262 - DNA, 99 bp, Homo sapiens
gaatctggaggaaagctgaccaggcggcttgtgaacagtcagattgctcgctgtaagcagctcatctgtgaccccagctacgtaaaagatcgggtagaa

SEQ ID NO: 798263 - DNA, 98 bp, Homo sapiens
aggaccccagacaccggagactgggaaatggtgctggagaatctggtaaaagcaccattgtgaagcagatgaggatcctgcatgttaatgggtttaat

SEQ ID NO: 798264 - DNA, 100 bp, Homo sapiens
ttgaaactggaaaaggatgtgttcttttgggagctgaaacaggtttttgagttccagttgactgcagaggacatgaaagccatagatggcctagacagaa

SEQ ID NO: 798265 - DNA, 137 bp, Homo sapiens
ggacactttgttattggagaaacatgcagattatatcgcatcctatggctcaaagaaagatgattatgttgttgatcattatgaaaatcctagaaacgtggggtcccttgacaagacatctaaaaatgttggaactg

SEQ ID NO: 798266 - DNA, 103 bp, Homo sapiens
accatgggtttgaggcagtatatgagctcaccaaaatgtgtaccattcggatgagttttgtcaagctgtatttaaacttgaaacagatagaagtatatggccc

SEQ ID NO: 798267 - DNA, 100 bp, Homo sapiens
gctttcctgaaatcatactgccagataaacgggccttcttcatcatctgcacctccaagctgggcccaccccagatctatgagctggttgcattgacgtc

SEQ ID NO: 798268 - DNA, 100 bp, Homo sapiens
cctctctcaaatagaaaatgtccatggatatgtcttgcagtctcatatttctcctctgaagtgggtgaatttgtaagtgatgtcctgctagttccagaaa

SEQ ID NO: 798269 - DNA, 98 bp, Homo sapiens
tcagtttgtaaaaacatggcggatccagaattctgaaatggtggagtcaatgaagaaagtagcagggatggatgtggagctgacagttgaagaaagaa

SEQ ID NO: 798270 - DNA, 100 bp, Homo sapiens
catttacagagcaacttgatgaaggtacacccaatagagaggatggcactggatctttaaaacgcagtggttcctttagcaaactccgggcttccattag

SEQ ID NO: 798271 - DNA, 99 bp, Homo sapiens
tggctcacttgcatgtatttggaacaaaaaaaggagatgcctggcagccccgctctctgcagtctatcagccacagtctctgcaagtttccaagagcag

SEQ ID NO: 798272 - DNA, 104 bp, Homo sapiens
caagaacgagtcgggcagccgctccaatggtacaccaggggttggaaaaaccacactaggcaaagaacttgcgtcaaaatcaggactgaaatacattaatgtgg

SEQ ID NO: 798273 - DNA, 100 bp, Homo sapiens
cgagacgccaagaaaacaggtgaactgggatcctaaaggactttgtttggagaagctgcctatttcttcttctaccagtaatctccatgtggaccgggaa

SEQ ID NO: 798274 - DNA, 100 bp, Homo sapiens
gtttaatcagacctgctcacacttcagaatagagaagagagagtctacaaggagattgaacaggtggttggcccacatcgccctccagcgcttgatgacc

SEQ ID NO: 798275 - DNA, 100 bp, Homo sapiens
atgcagctgatgcagtccgagagctagatggaaggacgttctcctgctctattacgctccgtggtgcggcttctgtccatccctcaatcacatcttcatc

SEQ ID NO: 798276 - DNA, 100 bp, Homo sapiens
gtaagaaagaacttttgcagagctgtgatgttttggggattccactctccagtgtaatgattattgacaacaggaacagatggagtcggataactgttca

SEQ ID NO: 798277 - DNA, 100 bp, Homo sapiens
tctcgtggcagctcttccagacgctgagtcttcgggaattcatttaccctcccattccaggagaggagagctctctgaggtgggcaggaaagaaatttga

SEQ ID NO: 798278 - DNA, 100 bp, Homo sapiens
cgggctgtgggcatggagcgaaaaggaaattcgaaatgagtcccatgactatcctcatagagtggccaagtttccagaaaacagaaatcgaaacagatac

SEQ ID NO: 798279 - DNA, 99 bp, Homo sapiens
aaaaagatgttccgcagaggttatatagccatgttagccgtggattccaaatacaggagaaatggcattgaatatgacagatacctagcatctagcaaa

SEQ ID NO: 798280 - DNA, 100 bp, Homo sapiens
gtgaataacaccattgtatggactaacagttccctcaaccagaacatgacaaatggaacacgttgtgggttacgtcgctggatttgtagacttggaggtg

SEQ ID NO: 798281 - DNA, 99 bp, Homo sapiens
tttgccaatgttggagccgtctgcaaagtgtccccggcaagaaggactcgctcagcagcagcctgaaaacttgctacaagtatctcaatcagaccagtc

SEQ ID NO: 798282 - DNA, 100 bp, Homo sapiens
cggtcaaagtcaactgcaagcgagttatgtggagtttagacccagccagcaccagcaacaagtggtgcaggctgtggaacgggccaagcaggtgaccatg

SEQ ID NO: 798283 - DNA, 98 bp, Homo sapiens
gtcctccatgtcaagttcctattcctattccttctttacagtttgaagctgcatgggctttgacaaacattgcatctggaacttctgaacaaactcaa

SEQ ID NO: 798284 - DNA, 100 bp, Homo sapiens
ggagtccatgctacctgattgcccccgggtctcagcagtgaacaacgtgggaatgtcgtatgagtatcctgaatactttttggatgttcctgacttggac

SEQ ID NO: 798285 - DNA, 98 bp, Homo sapiens
tcaacgccagttggtggaatatgagagaaccaagttccaggaaattttggaagaaactccaactgtcccagttaaatcagagttggcagttgaaattt

SEQ ID NO: 798286 - DNA, 100 bp, Homo sapiens
tattttacaccggcttcatccactcggacccacatcctggcaacgtcctggtatctgggatagcaaaggtcttcttccctcgccccttctccatcgtccc

SEQ ID NO: 798287 - DNA, 100 bp, Homo sapiens
gcccagtatgaagctaataaagtgaaattatggggcctcaacacagaatatgaatcaaatatggctgagaagcaagcaccagctgaagaccaagtggctg

SEQ ID NO: 798288 - DNA, 100 bp, Homo sapiens
atcacgcggacatcgtctcctgtgtggcgatggtcttcctgctggggctcatgtttgagttctcacaataccttcatgaaaatgcgtcctatgtccgccc

SEQ ID NO: 798289 - DNA, 100 bp, Homo sapiens
ccggagtcagcgatggtgcccggcgaggagaaccaactggtcccgaaagagtatattcggtgctcttcgaactggtgcttatatggtgtacattttgatg

SEQ ID NO: 798290 - DNA, 100 bp, Homo sapiens
gatttggttaagaaccttacaagcaatatgtggcgagttcgagaatccaggcaaggtgcccggcgacgactgcccgctggtgtggggccagtgctcccac

SEQ ID NO: 798291 - DNA, 100 bp, Homo sapiens
ctgggcctcagtgtcttctccatgctctgctgcttctggcctctgggcatcgcagccttctacttgtcccatgagcattcgcaacgacaggcgcctcctc

SEQ ID NO: 798292 - DNA, 99 bp, Homo sapiens
agggtcaaaggagagcacaaccatcgcagttggaagcccatggggcagcttctgaaagttctgctgaagacagtgagcaggaagatgagagaggtgctc

SEQ ID NO: 798293 - DNA, 100 bp, Homo sapiens
ccagctgaaagcaattagagaaataattgaattgcccctcaaacagcctgagcttttcaagagttatggggcactaagacctggaaatggccctgaaatt

SEQ ID NO: 798294 - DNA, 100 bp, Homo sapiens
attgtagataagctgtcctctgcaaaccccaccatggtattacaggaaggtgtgtttcctggactgatcccaattctgaactcttaccttgaaaacatgg

SEQ ID NO: 798295 - DNA, 98 bp, Homo sapiens
agaatcactgaagggtcagagcattttctctgtgccaccagagagtttcgtgtgcgcacccacaacacaagatcagaccccaagttctgctgtttcag

SEQ ID NO: 798296 - DNA, 100 bp, Homo sapiens
acctgagagctacaacttggagaatggaaaagaaccattgaagcttgagagaaaagcccccaaaagcagctattcaggaaaatgcttgtgcacgatgtgt

SEQ ID NO: 798297 - DNA, 100 bp, Homo sapiens
tgccagccacactgacctggcccactgagagccagcagggctagtctatgcagatggtagtatatgtctggacatacttcagaaccgttggagtccaacc

SEQ ID NO: 798298 - DNA, 99 bp, Homo sapiens
ttggattcagcaaggaaccttccgtgtgtggaccagttgacaaagatccaaactgaattacaagagacagtgaaagatttagctaaaggcaaaaagaaa

SEQ ID NO: 798299 - DNA, 106 bp, Homo sapiens
tgctgtccgtagctctgtttcacagatggggaaactgaggcctggcgattaagtggcctgctgaaatcatccagctaggagagccaggctcaatagggctcccagg

SEQ ID NO: 798300 - DNA, 100 bp, Homo sapiens
caggagggtccttgtggacgtggagaggggccgaaccgtgaagggctggaggccccggcggctaggtgctggcatcggccccaccattcagattggggag

SEQ ID NO: 798301 - DNA, 98 bp, Homo sapiens
agaacaaggtgacacatattctgtctgtccacgatagtgccaggcctatgttggaggtcattacacctactctgagaatcgtgtggaaaaagacggcc

SEQ ID NO: 798302 - DNA, 100 bp, Homo sapiens
aaaggcctttctctgctcgaaacacacatcttggcgcgttgcacggagagcttgtttcatatccatatcccactgtattcctgctaatctgctaatgcag

SEQ ID NO: 798303 - DNA, 100 bp, Homo sapiens
aaaatacaaatcacacgcataatggatgaaaggaaccgacaggcatctccttggaaacaatgccatctttgaatgtgagagataaacctagtttcagcat

SEQ ID NO: 798304 - DNA, 98 bp, Homo sapiens
taatccacccaaaatgtgcctggtgctccaaagaggacttgaaagaggagattgatattcgactctccagggttcaggatatcaagtatgagccccag

SEQ ID NO: 798305 - DNA, 99 bp, Homo sapiens
gctaaacagaatcaaaactgaagtaggagataattggaggctaaaggaagtaatgggcctcaaaagttttgcattgaaaaagttggcaaagacacttgg

SEQ ID NO: 798306 - DNA, 100 bp, Homo sapiens
gacagaatcaccagcactggctgaaggagccagtctacttgatgacttatacaagtatttcttcttccatcactcccacggagacaccatgactgtcatg

SEQ ID NO: 798307 - DNA, 143 bp, Homo sapiens
aaagatgatgagaaataaggacaaaagccaagaggaggacagttcgctacacagcaatgcatcgaggacccaaccctggaagaaaagatggaatattttcagaatcaacttttaattctccacagggtgtagccataatgaat

SEQ ID NO: 798308 - DNA, 100 bp, Homo sapiens
cagatcccaaacaactggcagaatttgctaggtgtatgcaacagcgttattgcaacaggctaacgaaaacagacaaaattcaactggaaaagcatgtttt

SEQ ID NO: 798309 - DNA, 100 bp, Homo sapiens
gaagaagcatgatattgagctttacatgcacttgaacagactagaaattgcaccacagatatatgggttgtatggcatttcaaatatagatacaaccatt

SEQ ID NO: 798310 - DNA, 100 bp, Homo sapiens
ggataagctggaacagatctatgaatgcaaatccacattcatctcaatggaaggatcctgccttaagtcaacttatttgtttttgccgggaaagtcgcta

SEQ ID NO: 798311 - DNA, 115 bp, Homo sapiens
gctgaccctaggcctccaccctggcaggaatcccaatttgcctccacttagtgagcggaagaatgcgtctggatggttccatcaagggagaaatccgaaaacaggcactggacca

SEQ ID NO: 798312 - DNA, 100 bp, Homo sapiens
caaaactcagcatgcttagcattcgagagaacaaaattaaacaactacctgctgaaattggtccagtggtttacgtcttggatcttgcagatagactgat

SEQ ID NO: 798313 - DNA, 99 bp, Homo sapiens
gcggattttctgttttcggaagttgctgggttcgttttattcagcggcagtggtgctttcccgaatctcagaatgccagaggtgagaagatgactcgag

SEQ ID NO: 798314 - DNA, 98 bp, Homo sapiens
cgccgccgccgccgccgccgctgccgctgccgctgccgcacctccgtagctgactcgggctgggttacgacccctacaaccctgagctgcccaagccc

SEQ ID NO: 798315 - DNA, 100 bp, Homo sapiens
gatgaagaggtttcagggagcagcaagacaatcactgcagagataccagggccaatgcaggaaaccatctatgacttctggaggatggtgtggcacgaaa

SEQ ID NO: 798316 - DNA, 99 bp, Homo sapiens
ttctaactacgtggctgaggacagaagcctacaggcagagccgaaaaccagtagattcccagacatcgcgaagtgaatctgaaattgtgccaaaagttg

SEQ ID NO: 798317 - DNA, 98 bp, Homo sapiens
tgagagttacgtggcagaaatgatcaaggacacagccagtgtgaagtcctctagtagtcttgaacccaatcttttttgtgatgaagagattcccatca

SEQ ID NO: 798318 - DNA, 99 bp, Homo sapiens
tacaatggaatctggtccaaacaatcatgggaatttccaaggggattcaaacttcaacagaatgtggcaaccaggaaccactcgttttgactattattt

SEQ ID NO: 798319 - DNA, 100 bp, Homo sapiens
gaggactaattttggcagttctaaatttgaatttgaggtagatatagttgtaggtactccgggaagactagatgacttggtgtcaactggaaagctgaac

SEQ ID NO: 798320 - DNA, 100 bp, Homo sapiens
aaccagacgaaagaaagatctctggttcttccctgtggaacagtagagacctagtctgccttctttcacaagataatccttcaattatttgaaggtgatt

SEQ ID NO: 798321 - DNA, 99 bp, Homo sapiens
ggctccttaccagctcacctctcaccgcgcatgtttggaggtcgagatttaatttgcatccagtctatggatgggatgctgatggtatttgagcaggag

SEQ ID NO: 798322 - DNA, 100 bp, Homo sapiens
ggtacattggaggaagtggaccaagatgctggtacagagccccacacaagtgaagatgtgcttagatgagtacgaagatgatgaagcagggcagaaagag

SEQ ID NO: 798323 - DNA, 123 bp, Homo sapiens
ctgagtgtggacgagtagccagtgaagataatgaatgtcgaatgtgactgactagcagcttcattttgaagtgtgatgaatgcagactctgctaccattttggctgtttggatcctcctttga

SEQ ID NO: 798324 - DNA, 98 bp, Homo sapiens
gctgccgggttgcgctccgtgcacctcttgcggacctgtgcaacagacctgcagaccaaagctgaccgattggcacagatgagcatatgttcttcatt

SEQ ID NO: 798325 - DNA, 100 bp, Homo sapiens
gacagtgaatccttggcatatgaagaaagctttcaaagtcatgaacgaattaagaaggaggaaatctctgacatcaaagaggaggggaacctagaagctg

SEQ ID NO: 798326 - DNA, 99 bp, Homo sapiens
gctctgctagtgaatctgacccgactggattcctccatgactcaaggcacagactctccagtgaagttattgccagtggactgtgagagaaaaacagat

SEQ ID NO: 798327 - DNA, 100 bp, Homo sapiens
gattttggagaaaactcccaacaggctcaaacgcatttggaattggagggatggccaggccatgttatgggatctcaacgaaggcaaacacctttacacg

SEQ ID NO: 798328 - DNA, 100 bp, Homo sapiens
cctcccgagtagctgagattacagatcctgactgctgtcatggcgtgccctctggagaaggccctggatgtgatggtgtccaccttccacaagtactcgg

SEQ ID NO: 798329 - DNA, 60 bp, Homo sapiens
acagtggacgaggtgttggcggaaggatctaccgctaccagtctcatgactatgccttca

SEQ ID NO: 798330 - DNA, 98 bp, Homo sapiens
gcgacttgcgcgccttgtcactggagtgcaagaagaaattcccacctgtcaaagaggttccttttgaggatggccacacagacaaccacttacctctt

SEQ ID NO: 798331 - DNA, 100 bp, Homo sapiens
caaacttcagattggagataaacttttagcaggtgcaaatagctatgggcaacttggcctcggccataaggaagatgtgctgttgccccagcaactgaat

SEQ ID NO: 798332 - DNA, 100 bp, Homo sapiens
aatcccagggctacgattggagtgagcccttcagccccggggaagccttgaaaagatcttttgaggtcgaggaggtcgagacacccaactccaccccacc

SEQ ID NO: 798333 - DNA, 100 bp, Homo sapiens
cagatgcttctgactaagctcccaacaattagtcagaaagaagattggcccatgcacaagctggaatgttctcccatggttgtttttggggaaaactgga

SEQ ID NO: 798334 - DNA, 100 bp, Homo sapiens
cctgtcattgcacccaaaaaagcaaggccttctgagactggatctgatgatatgagtgagagtggagaattggacaaaaattgatttttgatctctgaat

SEQ ID NO: 798335 - DNA, 99 bp, Homo sapiens
agagcggtatccctgtctcagcgaagtggtgaaagagcatcagacaatgcagatcttcgtgaagactctgactggtaagaccatcaccctcgaggttga

SEQ ID NO: 798336 - DNA, 98 bp, Homo sapiens
cgaattgtggcagagtgtaatgctgtccgccaggccctgcaggacctgctttcggagtacatgggcaatagccatttcctgcttttaagtcttggcag

SEQ ID NO: 798337 - DNA, 100 bp, Homo sapiens
tggggcggagatgtgcagtggagcgagaacttcctgtgaccgtgacattgtctaggtgtgcaccagagtggaatcacatagacccccggcggaaggaaga

SEQ ID NO: 798338 - DNA, 98 bp, Homo sapiens
cgggcgggagaacggaaaactcccaacttcctgattttaccaaatgttgcaagaactctggagttcttatggtagtaaaatgccggaaagaaaattct

SEQ ID NO: 798339 - DNA, 98 bp, Homo sapiens
tctgcacttcgcattttggcattgacatttaattttagggtcctttatatagaagggagagttcgttaccgtgaacgcatcaccattcttcgagggaa

SEQ ID NO: 798340 - DNA, 98 bp, Homo sapiens
gatgctggagaccttgacacttatatcctccctggggagtgcatccgccccaacccttttccccctcgtctcctgtgagaattccccgtcggatacga

SEQ ID NO: 798341 - DNA, 99 bp, Homo sapiens
tgcccgatggtcttccgtaacctgcgggagaggtttggaattgatgatcaagatttccagaggaggaagatgactatctctttgatgatcctctgccaa

SEQ ID NO: 798342 - DNA, 100 bp, Homo sapiens
ttaactatggtagcccacccagcattgatcagtgtactgttacccggacatacctattccttcacaagttctggttcttcagtgctgcttactattttgg

SEQ ID NO: 798343 - DNA, 100 bp, Homo sapiens
ccggttgccatggtgaaggaaaaaggaaagggtgacattcaaggatgtggctgttgtcttcaccaaggaagagctggcactattggataaagcccagata

SEQ ID NO: 798344 - DNA, 100 bp, Homo sapiens
cttcaatattttcctgcctacagctgttaggagactccaggagcaagaaccactcacgaattcttgtttggtgcccttgctgaactggttgataatgcaa

SEQ ID NO: 798345 - DNA, 98 bp, Homo sapiens
gaaacagtatctcacctccctaaactggttaatagtggcatggaagatccatttgcaattcaattaaaccccagctatatcagggcaatattgaggag

SEQ ID NO: 798346 - DNA, 100 bp, Homo sapiens
ccttttgatgttgtcattgatggtctcaatgttgccaaaatgtttcctaaagttcgtgaatctcaacttattgagaaaatcatgagttctattggagaag

SEQ ID NO: 798347 - DNA, 101 bp, Homo sapiens
tggccagcatcgccagactccgcatcgcaaaggggggcgtcaatgacaatttccaggggttgtgtcaccagaagcagctgctaaggcagctgcaaaggcag

SEQ ID NO: 798348 - DNA, 98 bp, Homo sapiens
atgtccctgcttgtcagggctgagagcgacggattgtcaccagacctgcaatctatggagcagattcggagaattatgagacctactgatgtccctga

SEQ ID NO: 798349 - DNA, 100 bp, Homo sapiens
aaaaagcaatgcaagagtcgctttgttacacctttcaagtgtctcgatacagtttatgtaacttgatggaagaaaatggaattactccaaaaagacaagt

SEQ ID NO: 798350 - DNA, 100 bp, Homo sapiens
cgagagctgaggctaatgaaaaacaggtacaccaggggttggaaaaaccacactaggcaaagaacttgcgtcaaaatcaggactgaaatacattaatgtg

SEQ ID NO: 798351 - DNA, 100 bp, Homo sapiens
ggattgtgatgtgatcgtagctgagattcccaacttcttctggagcctggggatcggtcacactggtgcgtggtggcatactgggaggagaagacgagag

SEQ ID NO: 798352 - DNA, 99 bp, Homo sapiens
cttcctataacttggacgatgaccaggcggcttgggagaatgagctgcagaagatgacccgggggcagcaaaacagttatcaacttattaacacagaag

SEQ ID NO: 798353 - DNA, 111 bp, Homo sapiens
acgctaagctcctctaatcctttctttgttcgctgtatcaagccaaacatgcagaaggcctcccagttcaggccaagaaacatgctacatcagccaagaatacactgttga

SEQ ID NO: 798354 - DNA, 100 bp, Homo sapiens
ctatattagcgacaggagaacttggaactcttactaatgtctataaagccagtatgatagcaatgatggcaggtgtgagatgcacaatgcgaaacctagg

SEQ ID NO: 798355 - DNA, 98 bp, Homo sapiens
acttttcacagaaggactgaagagtctgacagttggtgcttcccgtgctgctgttgatgctggctttgttcccaatgacatgcaagttggacagacgg

SEQ ID NO: 798356 - DNA, 98 bp, Homo sapiens
gatatgctctatgctgcttcatccataaaggcctcaaaaaagaaggtgtatatgctctataacctgcagccagaccggtctgtgactggtggagcctg

SEQ ID NO: 798357 - DNA, 123 bp, Homo sapiens
acgagaagattctgagagattttttattcgttactatgtggatgttccacaggaagaagtgccattcaggtgtcagaacctcaaagataacaccattggcatcgaggagaatgcagtctccct

SEQ ID NO: 798358 - DNA, 139 bp, Homo sapiens
gtcacagtgcttccatcaacgcaacgggatcagtgttgtgataaggcagctgcaaaaagcggcagtctgaggaccaggaggagatccaggaagcagtccgcacgtgcagccgtcttttcggggccttgctggagcgggg

SEQ ID NO: 798359 - DNA, 100 bp, Homo sapiens
gcgatgtcggtggccgggctgaagaagcagttccacaaagccagccagatcaacaggcggtccttcgggtcggagtggacatcggatggtggcctggaag

SEQ ID NO: 798360 - DNA, 99 bp, Homo sapiens
ttagacattggtggaggattcacgggaactgaatttcaattggaagaggatctctatgacgctggagtgaagaggaaaggaactgatgttcccaagtgg

SEQ ID NO: 798361 - DNA, 100 bp, Homo sapiens
gtgatgaagttgaattgaaggttcttccaggacagtcattttgtttactcattcagccctgttgcaggtcccaataaactcttcataaggttgacagaag

SEQ ID NO: 798362 - DNA, 100 bp, Homo sapiens
ccagtggaagcgggaggcagttgcagctttcagaagctgaacatggttatgcctccatgttaccatacaataacaaggacagagatgccttaaaacggag

SEQ ID NO: 798363 - DNA, 100 bp, Homo sapiens
ctactccataaagacttcaagagggagatactgagagtgaaccatatgatgatgaagaatttgaaggttatgaagacaaaccagatacttcttctagcaa

SEQ ID NO: 798364 - DNA, 98 bp, Homo sapiens
agcgacttgcgcgccttgtcactggagtgcaagaagaaattcccacctgtcaaagaggtcactgaactgatgcaggagcagtcatacctgaagtctga

SEQ ID NO: 798365 - DNA, 100 bp, Homo sapiens
tcctactggacaagaatatgctgccaaaattatcaacaccaaaaagctttctgctagggttacttgtggaaattgttgattacccggacgtcttaaaacc

SEQ ID NO: 798366 - DNA, 100 bp, Homo sapiens
ggggagcacgattggatttgccgaagattaggaagaatccactgatagaaatcatttccatcaataccggcttcagaggatgattccgaagaagacggag

SEQ ID NO: 798367 - DNA, 98 bp, Homo sapiens
caagaaaggcagcgaggtggagagcggtcttagtggtgcaatggctagtataagcgtgcgttcgagtaccccaggctctcctacacatgtaagcagtg

SEQ ID NO: 798368 - DNA, 117 bp, Homo sapiens
ctcagatcgactggatggttcctgtcacgttacaactgctagtttggacggagaaactaacctgaagacactcacccacggcactgcagtttgcactcgcacttatgagaaagaggc

SEQ ID NO: 798369 - DNA, 100 bp, Homo sapiens
gactaagagaagtcacaaaacagcagatttcccaagagcagcggaaaatgatccagtcacagctcttctcacagacagttttatcatcttatcatttttg

SEQ ID NO: 798370 - DNA, 100 bp, Homo sapiens
cttgaaccaggtcatgctccaaatttcctattatccttgccgtaaataaatgtgacaaagctgaggctgatcctgagaaagtgaaaaaagagctgctggc

SEQ ID NO: 798371 - DNA, 100 bp, Homo sapiens
tttggcagattatggctttgtccccacccagcactgatgatattataaaattcatgatgttgctatcaaaagttgagaaattgtcagaagaaatcatgga

SEQ ID NO: 798372 - DNA, 98 bp, Homo sapiens
aaaaacacaataccaggcatacatttggcagaataaatgaaccagtctgaaggaatggctcccgtgtcttcatctacggtcagttctgtaacgaaaac

SEQ ID NO: 798373 - DNA, 100 bp, Homo sapiens
actgaagactctctgcttttgccacagcagttcctgcagcttccttgaggtgtggccaaacgtggacaactatgagctgtacgaaaagctggagctggtc

SEQ ID NO: 798374 - DNA, 100 bp, Homo sapiens
tggacgccaaaaagtttgtcactgagctccgaaggccggtagctgtcagagccaaagacatcggtgagggttcagagtatggtgccagtggagaagatgc

SEQ ID NO: 798375 - DNA, 100 bp, Homo sapiens
aaaaatggagaggtacagaatttagctgtcaaatgattcagaatggacagtttagaagaacctcagaaaaaagtctttaaggctcgaaaaacgatgagag

SEQ ID NO: 798376 - DNA, 101 bp, Homo sapiens
agtccggcagccctccccctgatgggccaccgctgcccctgcccacagtggctcctgaaagatggatcactccagccgaaatagaactatttgtgaacaga

SEQ ID NO: 798377 - DNA, 98 bp, Homo sapiens
cgtatccaggcccagtcccgaggtgtgctcgccagaatggagtacaaaaagctgctggaacgtagccatcagagggttctcgcttcagcacaagatcc

SEQ ID NO: 798378 - DNA, 100 bp, Homo sapiens
cgcagttcatcttcctccctgtgtactttccatttgccttcctggctgttgacagtgtcttgaagaggatgacaataattggtgtaattttatccttccg

SEQ ID NO: 798379 - DNA, 100 bp, Homo sapiens
ttatacttggcactgttatctgctgtttctgcttcaaaacctgatgttgttgttaaacgacaagaagctttagcagctgctcgactgaaaatgcaagaag

SEQ ID NO: 798380 - DNA, 50 bp, Homo sapiens
cagcagacacagcctccagcaaaggttgtggtggaattagaaaatgtaaa

SEQ ID NO: 798381 - DNA, 99 bp, Homo sapiens
agcttttgtgagaaaattttgccgtggttggacaaatcagtagatttcattgtgtaagaagaagcttgggaagctgccacctcagtatgccctggagct

SEQ ID NO: 798382 - DNA, 98 bp, Homo sapiens
attctcctggccattgcccttctggaaggaggcaacaccaccatccaggataaacgaagaggctggggacactgagaggacccagtcggcattggcac

SEQ ID NO: 798383 - DNA, 100 bp, Homo sapiens
ttggagagactgccatgaagcaagcacattgcaagcaacccgtgccttgatggtggttggcatcctcctgggagtgatagcaatctttgtggccaccgtt

SEQ ID NO: 798384 - DNA, 100 bp, Homo sapiens
gcatgagaaggcccggcagcttcgccgttctatggaaaacattgagctcgggctgagtgaggcccagccaatggagatcttcgtggatgatgagacgaag

SEQ ID NO: 798385 - DNA, 98 bp, Homo sapiens
gtcattacaatagcaacttctgttgataagttggatgtaggtgcaaaaaactacagacatctctgtgctgtttattacaacaagaatcctgggtttga

SEQ ID NO: 798386 - DNA, 135 bp, Homo sapiens
cctgatcaagatccggggggaccggtgctggcgagacctcacctgcatggacttccactatgagcatcaagatggtgctcatgtggaccagtggtgacgccttcaagacggcctacttcctgctgaagggtgccc

SEQ ID NO: 798387 - DNA, 98 bp, Homo sapiens
agctccacgtgggaggcctgccccccggcagtgcagaggaggctcctcagggtctggttggctgcatccaggtgatgtttgaggcaccatcagagtta

SEQ ID NO: 798388 - DNA, 129 bp, Homo sapiens
ggccgagaccagccagtggagctgctgaatcctgcccgcgtgaaccacatgcccagcacggacaatggcgatgaccactcagaaggaggcctggtggagaaccacgtggacagcaccatgaacatgttg

SEQ ID NO: 798389 - DNA, 114 bp, Homo sapiens
ccgacttcctctcttacctagggactacctagtccaagcaaagggcgttgtgaatacagctgtgtctgcagcagtccaagctgttcggggcagaggaagaggaactctaacaag

SEQ ID NO: 798390 - DNA, 100 bp, Homo sapiens
ctcttcggctgcggaccctgccattccggaggagccctctcaggaagtggtgaaggagatgatacaattctccaaggatacattggaaaagatagacaag

SEQ ID NO: 798391 - DNA, 98 bp, Homo sapiens
tgcacgagtgtggcacccagcctggtccggtaagactttgaccccgacgcaggcttcagtgattgccgcggatcagaagcctgagcactttggctcga

SEQ ID NO: 798392 - DNA, 100 bp, Homo sapiens
gcctcttctgcaagtggggcattcacacagactgaaaaggacttctcagagaagcattcgaccctggtgaatgatgcctataagaccctcctggcccccc

SEQ ID NO: 798393 - DNA, 98 bp, Homo sapiens
agggcggcacgctccggggcatcatcaagagcatgaatgtgaaagatgttgcagaagtgttccagaagtggctgaagatagaaggaaaaaagtgccac

SEQ ID NO: 798394 - DNA, 100 bp, Homo sapiens
aatgaaggaagaaaacacaggagccggagcagaagcaaagaggtaaaataccatgaagattttgaaaaaacaaaggggagaggctttactcccgtcgtgg

SEQ ID NO: 798395 - DNA, 100 bp, Homo sapiens
aaaggaaatcaaaccgaaaatgtgtatatagggtaaaggagctggaagtgcgaaaattgatgcatgtgagaggagatggaccctggtattactatgagac

SEQ ID NO: 798396 - DNA, 100 bp, Homo sapiens
gagccccaccgtcgcctggtgcctcccgcctccgtgtgccctggttgtgagaagacgtctgtgtcgtgcggaccaagaatcgccttcagccctgtctggt

SEQ ID NO: 798397 - DNA, 98 bp, Homo sapiens
gaacaatggataacttcttcaccgaggtgaaaagccatacaagtgtacctgggaaggctgcgactggaggttcgcgcgatcggatgagctgacccgcc

SEQ ID NO: 798398 - DNA, 98 bp, Homo sapiens
atttccagggcagccaggatcacatggtcgggatggacatgctggagaaaaaggggatccaggacctccagatcttatggttggtgatgaggcaagtg

SEQ ID NO: 798399 - DNA, 100 bp, Homo sapiens
ggcccacaagcagatctactactcggacaagtacttcgacgaacactacgagtaccgttcacagccatgaatgaaccacagtgcttctacaacgagtcca

SEQ ID NO: 798400 - DNA, 98 bp, Homo sapiens
gggtccacactgcaatgtttttgtggaacatgaatagcctaacatggcagaccagagacagcgctcactgtctacctctggggagtcattgtaccacg

SEQ ID NO: 798401 - DNA, 100 bp, Homo sapiens
atattatatcagtgaagtgggagcctatttgaccgtctcagatccagcacatccaaatccataatggctgctgctggagtacctgttgtggagggttatc

SEQ ID NO: 798402 - DNA, 99 bp, Homo sapiens
ttctgcctgggctccctcctctatcagctcagcgggggaccccctcgcttcctgctcgacctgcggcagtacttggattctggaacttttcaaagcctg

SEQ ID NO: 798403 - DNA, 100 bp, Homo sapiens
tctcacagttattaaccagactcagaaagaaaacctcaggaaattctacaagttccctgacatcgtggagttctgcgaggccatggccaacgccgggaag

SEQ ID NO: 798404 - DNA, 100 bp, Homo sapiens
attttaccttgacttaccttctgtcaccatatctgaaaaacttcaaaaggacattaaggatctgggaggggatgagagaagctgcaagaaaaatagaaga

SEQ ID NO: 798405 - DNA, 98 bp, Homo sapiens
tcaggttcccgcgggaccctgccaggaatacggttggacagaatgaactgaagattacaagtgatcaagtgataaattcaggattgatttttgaagat

SEQ ID NO: 798406 - DNA, 98 bp, Homo sapiens
tgtggaccctcgtgagcgacccggacaccgacgcgctcatctgctggagcccgggacctcaggatggaaaccagcagcctgcaccgcccgagaaggtc

SEQ ID NO: 798407 - DNA, 98 bp, Homo sapiens
agacttgctaaaggagaagtctggtgtaatacaagatgctttaaagaaggcttcagtgtcatttgaggacgtgactgtggacttcagcaaggaggagt

SEQ ID NO: 798408 - DNA, 100 bp, Homo sapiens
aacgcgaagacggtaacccgtgtgactttgactgggtattgttgcagcatctggcagtgagactgaggatgaggacagcatggacattcccttggacctt

SEQ ID NO: 798409 - DNA, 99 bp, Homo sapiens
ccccacctttcctcaggagtcatttctgttccgcacaggcctgctgaactgggtgctttatataggcttagcagtgtctgcaaaaacgaatcttttcct

SEQ ID NO: 798410 - DNA, 100 bp, Homo sapiens
ggctccatcttcgaccttgatcccctggaagacaatattcagtctagaagtctccatatgctctctgttatttcatgaagatggagaatgctgggtttat

SEQ ID NO: 798411 - DNA, 98 bp, Homo sapiens
gtcatggcggcagcagccgctctgagggcgcctgctcagggaggtatggaaacattggaacttcaaaaggacatcaaagaagaatcagatgaagaaga

SEQ ID NO: 798412 - DNA, 75 bp, Homo sapiens
gccaccgctgccacctccgcgaggatttaagtgccctgtatgctcaaaatttgtatcctcagatgaaatggattt

SEQ ID NO: 798413 - DNA, 100 bp, Homo sapiens
tgaagaatggggttcaacttgacgcttgcaaaattaccaaaggacaagaattttgggcagatttgaatgccatgaacgtgtatgaaacaactgaatttga

SEQ ID NO: 798414 - DNA, 99 bp, Homo sapiens
ggacaatgtattactggactctgaaggccacattaaactcactgactacggcatgtgtaaggagttcttggtttcgactcagaaaacatatggtgctga

SEQ ID NO: 798415 - DNA, 98 bp, Homo sapiens
atcactggctacacatttccagcaggctgcagatacgagtggacaagctaggaattatctgtgaatgtaggaccactggatttgcagtcttcatctga

SEQ ID NO: 798416 - DNA, 100 bp, Homo sapiens
agcctctgaagctagcttatttgaagaggcactggaaaaatatggcaaagacttcaatgacatacggcaagattttgttttagctaaagaagatactgag

SEQ ID NO: 798417 - DNA, 98 bp, Homo sapiens
ctgtggcatctgcaggatggcatttaacggatgctgccctgactgacttggatgttgtgggtgatggtatgcagtgtcctccttcacctttgcttttt

SEQ ID NO: 798418 - DNA, 100 bp, Homo sapiens
ctccagcacccactcctcaggaacatttaaccaaggattttttatcaagcagaaatgcatcgaacaacgagaatcaagatcactgagctaaatccccacc

SEQ ID NO: 798419 - DNA, 100 bp, Homo sapiens
ctcaatctctgcagatggccgtacgtgtgaagccaacaaatggaattttcttgagcatgtttctaatcgttttgccattggaatccatggctcatgggct

SEQ ID NO: 798420 - DNA, 98 bp, Homo sapiens
gctccgcctgacccctatgatgaagagggcgtccactggaggtcgccactgggacactgtgaaccaggagtgagtcggagctgccgcgctgcccaggc

SEQ ID NO: 798421 - DNA, 98 bp, Homo sapiens
gtgccctgcccaacattgaattgacctcgccacgcatgttcacctatgttgttgacctcctgtactggagagacattaagaagactggagtggtgttt

SEQ ID NO: 798422 - DNA, 100 bp, Homo sapiens
gttaccgcctccgtagttacaaggattgtggagaatattgaaagggacccaataattgcaaaacagctctttagcagcttgttttctggaattttgaaag

SEQ ID NO: 798423 - DNA, 114 bp, Homo sapiens
ttcgttaaattgtgaaggcgctggaattacatgaacataccaccctagtaaaggaatctcagcaaatgcttggaagacttattccagaaaaacagatactcaatgaccaattaa

SEQ ID NO: 798424 - DNA, 100 bp, Homo sapiens
aaggatgagctatgacttgctaaacaatctgttggaaaagggtggaaagcaagtcctggaagaatctgcatttgaagaaatggaaagagattttcaggga

SEQ ID NO: 798425 - DNA, 98 bp, Homo sapiens
cgtccctcccagcggcgcgtgagcggcactgatttgtccctggggcggcagcgcggacccgcccggagatgagaaacagaagcctatcagttgctgaa

SEQ ID NO: 798426 - DNA, 98 bp, Homo sapiens
acagggcacggcgtggaggaggaaccagaccgcggccagagcgttcagtggacatcctcatcatggatgatgacgacgtccccagctggcctcccacc

SEQ ID NO: 798427 - DNA, 100 bp, Homo sapiens
cggatataaaacttcaaaaattaccattttatgatttactggatgaactgataaaacccaccagtctagtattgactcggagacaaaaagaggccaagac

SEQ ID NO: 798428 - DNA, 99 bp, Homo sapiens
tggagatcttttgggagaactactgggacgtcagagcttctccgtgaaagacccaagacaatgcagatcttcgtgaagactctgactggtaagaccatc

SEQ ID NO: 798429 - DNA, 100 bp, Homo sapiens
caaaccctgcaggttctaagaagactcttcccggttgatcgtggattatttgaggtgagcatgttagggaaaggatttggtgatgtcggtgaagctaaag

SEQ ID NO: 798430 - DNA, 128 bp, Homo sapiens
gccaaagtgatttcaacagcatgcagccttgaagataagcagtgccttgaaagattcagacctcccatagacagaacaatggcagcccgagtacttataattggcagtggaggaagggaacatacgct

SEQ ID NO: 798431 - DNA, 100 bp, Homo sapiens
gcagttcccaaggaggcttcaagacaaagggccccttacacaccagacagatgggtcatcttactctggaagactatcagatctggagtgtgaaaaatgt

SEQ ID NO: 798432 - DNA, 98 bp, Homo sapiens
ggaggagctgtgcagccgcgaggaggcgcgggaggtgttcgagaacgaccccgagacgaaactggcgatggaatatgagaggagccctctggaaagaa

SEQ ID NO: 798433 - DNA, 100 bp, Homo sapiens
cccgcggccagtgcgggtggctggctttgccattagcgggggcctttcctgaggacggcgtacggagtgtgggtggaatgaatcttacttgttgaatatc

SEQ ID NO: 798434 - DNA, 100 bp, Homo sapiens
gcgcggaaccatggccgatgggggcgagggcgaagacgagatccagttcctgcgaactaatgctatagttatccatgaagtctatgaagaaggggcagca

SEQ ID NO: 798435 - DNA, 100 bp, Homo sapiens
tcgggatcactggattgctgacggcagccctctcagacagaatgttgctgcgggatgtaaaagctcttaccctccactatgaccgctataccacctcccg

SEQ ID NO: 798436 - DNA, 98 bp, Homo sapiens
tcacctgtccttctacattttcgatagagacgttttccggagggattccatcatagtcaccttcaggccattcagaggaggaaagagaggggaatatg

SEQ ID NO: 798437 - DNA, 99 bp, Homo sapiens
tccatcgtgtgcctgatgatcacgcagctggctggcttcagtggaccatatgtccgtggttcagaccctgtattaaagcttttggacgacaatgggaac

SEQ ID NO: 798438 - DNA, 100 bp, Homo sapiens
tgcccagatgctcataaggattgtcctctttctacaaaagctcaacgggacccaggtggagtctgtacagctcaaagtcaacatagcccgaaaacagccc

SEQ ID NO: 798439 - DNA, 99 bp, Homo sapiens
aacgattagtcatgcaataaatgttctggttttaaaaaatacatatctggttttgcttccggtcacccacactgtttcttttgccaccttgaactcggc

SEQ ID NO: 798440 - DNA, 100 bp, Homo sapiens
ttcaacttcaatttttctgcagtggctctgggtccagccccttacttaaagatcaggaagcaccatacctcctgcgaaacctcagtgatcacacagtggc

SEQ ID NO: 798441 - DNA, 100 bp, Homo sapiens
gaccgctcagacgaggcggactgtgacgattaacgtgacagtgtcaggtggacccacagccatcccacctccccctctggggagtgctgagagtgaggca

SEQ ID NO: 798442 - DNA, 100 bp, Homo sapiens
gaccaattcgggaacaaatactactacatcccgcagtacaagaactggagaggtcacgcaatatttaaactcacgtatctaagcaatcacgactataaac

SEQ ID NO: 798443 - DNA, 100 bp, Homo sapiens
gctcgaatgggttcatctagcatgccagggggcagtacgcccgtcagcagcgccaatatgatgtcagggttatgtggtccgaatcagtggtgggaacgac

SEQ ID NO: 798444 - DNA, 100 bp, Homo sapiens
tgactccccggtactggaggtgtacgtggccatctgcagataatgctcggaatatttttcaatgtccattccgctgtgttgattgaggacgttcccttca

SEQ ID NO: 798445 - DNA, 100 bp, Homo sapiens
aaccgcgtagtgagcaacctgctctattaccagaccaactacctggtggtggctgccatgatgatttccattgtggggccatcagcatcagcaaagccat

SEQ ID NO: 798446 - DNA, 98 bp, Homo sapiens
gcaattacacccagaagattacctttgactcttgtcccaggccaagaagcttgagagaagaaaaatttcagaaaaattgtctcaatttgactagaata

SEQ ID NO: 798447 - DNA, 100 bp, Homo sapiens
gacggccccggggagacggacgcgtttggcaacagcgagggcaaagagctggtggcctcaggtgaaaaatatgaatgccacaatacgaaggattgaccag

SEQ ID NO: 798448 - DNA, 119 bp, Homo sapiens
gattatacaagtacaacatatgttggtgtcagaaaccacaggcgaatccataactctgataagccgtacagctctagccggcccggtccttggactgaaagaatgcaccaggggctcgg

SEQ ID NO: 798449 - DNA, 100 bp, Homo sapiens
gaggcgcgagggcgcggagttccaggtcgagcagttaggccgcgagcgactgcggcgccgagccggtattgacctgatggacatggcttcggacatcctg

SEQ ID NO: 798450 - DNA, 99 bp, Homo sapiens
cgggagactagcttggccacaggagacaacgttgaggtacagacagatgttgagcataccggagccaccagtgagttttatgacaagttcacaattcgc

SEQ ID NO: 798451 - DNA, 100 bp, Homo sapiens
tcgattgactccgtccccaagatcctgtagccccacggacctggcgactccaccgtgttcggatagagctttggagccaaacccttctgatgatccaagg

SEQ ID NO: 798452 - DNA, 100 bp, Homo sapiens
aaatagcactttcttattccaagaagttggacttcatagagtctgacagtccctgttcctctgaagcactttcaaagaaagaactgtctgccgaagagct

SEQ ID NO: 798453 - DNA, 100 bp, Homo sapiens
ccctcccctggcagtgtgacggctgggcgacttgcgaggatgagagcgacgaagccaactgtccaggaggtagaggtggaggcggagccggatgtcagag

SEQ ID NO: 798454 - DNA, 98 bp, Homo sapiens
cgcagatgctggagaagtccccttatgaccagctcacccgacgactgccacccatcaaagaagctaagcctcggttacagaagctcttccgagacttc

SEQ ID NO: 798455 - DNA, 98 bp, Homo sapiens
cgaggagaggaggtgaccccgcgaaagggcccatttggaggccagcgctgagaagtggaacaggttgctgatgtccttagaagaactgatcaaatggc

SEQ ID NO: 798456 - DNA, 98 bp, Homo sapiens
gcacaccctgtcctatgtggacgtcggcactgggaagttggagtgcttagtgcagttggtgagagcgggagccacactcaacgtctccaccacacggt

SEQ ID NO: 798457 - DNA, 121 bp, Homo sapiens
ggcgagtatacatgcaaagcttccaatgagtatggcagtgtcagctgtacagccacactaactgtgacagttgcctttccccatcttcctggttctgctccttcgtggcctagtcttgtgg

SEQ ID NO: 798458 - DNA, 100 bp, Homo sapiens
catctgtaacgaggtgttgagacgaggtgctccatacttgcttgcagtgcctacgtggctctggctttgggtgataacctcatggctttgaatcatgcag

SEQ ID NO: 798459 - DNA, 98 bp, Homo sapiens
agaaacaacatgccatgcagtgcgttcagtgcaaaaagctcaaatctaatccaagtgaaaatgaagaaaaggaagcacagtctcaacttataaaatct

SEQ ID NO: 798460 - DNA, 100 bp, Homo sapiens
aaacattatggatctgtggagctggtggtgaagaaggtgaagtccatgcagatgttccacatgcccatcacttcagccatgcaaggagaccggctgggca

SEQ ID NO: 798461 - DNA, 99 bp, Homo sapiens
gcaatttctgaacccagccggctccatctcagcttctggtttctaagtccatgtgccaaaggctgccaggaaggaggtgatggctgtggacacctagtg

SEQ ID NO: 798462 - DNA, 100 bp, Homo sapiens
ttcgtcaccttcgacctgctcttcatctccctgctctggatcatcgaactgaatgccctgagcctgtgcaattatttcgagagtcaaaatgtggatttcc

SEQ ID NO: 798463 - DNA, 100 bp, Homo sapiens
aacaaagccacccagccaatgaagtgagaaagatcagtctaaagaaaaggagaagaaagtgaaaaaaacaattccttcctgggctaccctttctgccagc

SEQ ID NO: 798464 - DNA, 100 bp, Homo sapiens
cctgattacgaggatgtatctgtggcccttccaaataagcggcataaagcaattgagaattcagaaggcaattctcaagttcaactactcagtgcaggag

SEQ ID NO: 798465 - DNA, 100 bp, Homo sapiens
gccttcctgttcacggtgaccttcgcttggtgtcctcctggcctcagcaacctgacaattctgtcgtgtcccggtgttggagcgggccggagagaagtag

SEQ ID NO: 798466 - DNA, 98 bp, Homo sapiens
tttaaaggaagctgcccaaacccgagcccctgaagttatcagtgcccacgactatagccagcagtgtgacatttggagcataggcgtcgtaatgtaca

SEQ ID NO: 798467 - DNA, 99 bp, Homo sapiens
ttgcagcccatccgcgacctcaccaagaactgggaggtggacgtggcggcccagctgggcgagtatctggaggagaagaaagcgatcctgaccaccatt

SEQ ID NO: 798468 - DNA, 100 bp, Homo sapiens
gagataattttgccttaaacagaaagacttgaccctcttaggtgtcatacctaaggtgatggatgtggacacactgtactaggccctgagagtggaaccc

SEQ ID NO: 798469 - DNA, 100 bp, Homo sapiens
gatgtgaaaactctgttactgaagggatatgggggacaatataacatccatcacagagttcctcctactgggatttcccgttggcccaaggattcagatg

SEQ ID NO: 798470 - DNA, 100 bp, Homo sapiens
agaaaatgataagaccgaagaaatgccaaatgattcagtccttgaaaacaagctccgccgcatgcaagagatgattgcaaggatgcaggcgcagatgcag

SEQ ID NO: 798471 - DNA, 98 bp, Homo sapiens
tcaactctgggaatcaaccaagcaacagagaaaaaaacagataccgagatattcttccatctttggagtttaacccttctgccaatccagaggcaagc

SEQ ID NO: 798472 - DNA, 98 bp, Homo sapiens
ctctccactgccaccagaacccaagagcagtggattcccagtgtccccacgagctgtgtggtccatgatgaggattggccatttgatgatggagctcc

SEQ ID NO: 798473 - DNA, 99 bp, Homo sapiens
tccaagaacaatagcttgccctcataaagcgtctgcggtgttgctgtgggctaccccctggacacggtgaaggtgcggcaatagccagccccccaacca

SEQ ID NO: 798474 - DNA, 101 bp, Homo sapiens
tgatgaagaagatccttcaaaattaaaagaggagcagcatggcatttcagtcactggtttgcagagtccaggtgggtttggaggatttgggacaacatcta

SEQ ID NO: 798475 - DNA, 99 bp, Homo sapiens
tcacgtgctccacagcttcatttagagtacagattttataaacagcttggcagtgcagattctgatagttggtggtggtgttgctgggcttgcttctgc

SEQ ID NO: 798476 - DNA, 98 bp, Homo sapiens
tgccttcttggacgcctttcagaaagtggctgacatggccaccaacacacgtgtaccttccactggaagaatctcaaacagcgctacttactcaggat

SEQ ID NO: 798477 - DNA, 99 bp, Homo sapiens
aaatggcgaccggcaactactttggattcacccacagcggggcggcggcggcggcggctgcggcccaatataggtgctgctgttttttcaaacgaagga

SEQ ID NO: 798478 - DNA, 100 bp, Homo sapiens
gagagataaagaaagcgttacctctcatttctctttgtgattcttgacggtgactcttgactcacaccacccggcaagaactgctcactacggctccctg

SEQ ID NO: 798479 - DNA, 115 bp, Homo sapiens
acgcgcttttctatggcgaatgcaacccgacgagggagtggggtgtctttcctgaagactatcttcccgtctcaaaatggacatgatggatccacggatgtacagcagagagcca

SEQ ID NO: 798480 - DNA, 99 bp, Homo sapiens
tgccagatggacaaggagaccaaagagaacaacctctctgaagaaggaatattccctgggcttttgaggcaataaagcaagcaagtgaatgggtaagaa

SEQ ID NO: 798481 - DNA, 100 bp, Homo sapiens
taaatcaagcttggaatgatcatcaaacagctatggtgatgattagagacatactaatgtacatggtgtgaaatctaagaatcccctgccaactcttgag

SEQ ID NO: 798482 - DNA, 98 bp, Homo sapiens
agtcagcccgtcttccttcccctcccttgcatgatggaaacaccatggctgcggcggcccagctctctctgacacagggaagccgtggcggacggagc

SEQ ID NO: 798483 - DNA, 100 bp, Homo sapiens
aacttggaggcagagaagttcgacctgcaggagaagttcaagcagcagaaatatgagattattgctccccctgagcgtaaatactctgtctggattgggg

SEQ ID NO: 798484 - DNA, 99 bp, Homo sapiens
cgagagcgtgaccgagagcgcgaatatcgtcatcgttagaaggactgcctccaagtggaagttggcaggatttaaaggatcacatgcgtgaagcaggtg

SEQ ID NO: 798485 - DNA, 98 bp, Homo sapiens
aagactcgatccgcctgcctgcgcacctgccatcagaggctccttgaaatgctagatacagagaaggaactgttaaaagaaaaaataaaggaagcttt

SEQ ID NO: 798486 - DNA, 100 bp, Homo sapiens
gggcaaacaggattccacagtgtcctctggaaaatggtgatgcaactgtgacaatagctcacagatacacccccaaagagcaactgaagattcatacgca

SEQ ID NO: 798487 - DNA, 100 bp, Homo sapiens
acagatgtccaagctgccaagtgattaaaaattctggccatctcccaagagacagaatagctgaggatttcgtttgggctcagtgggatatgtcagaaca

SEQ ID NO: 798488 - DNA, 99 bp, Homo sapiens
tggccgagaccagccagtggagctgctgaatcctgcccgcgtgaaccacatgcccagcacggtcatatttgatcagaaattggatgaaccttcgggatg

SEQ ID NO: 798489 - DNA, 100 bp, Homo sapiens
acagtacagacagagagaggatttctgtaactagagaagaactctataaaatgttagcgcatgagtggacagaggactgcagaaaatcaacctatcctcc

SEQ ID NO: 798490 - DNA, 100 bp, Homo sapiens
ctttctgcagcagagaaagccacctgttatcccagttctacaagaggcaggtgacaaacattaccaccccagctgtgcacgatgcagcagatgcaaccag

SEQ ID NO: 798491 - DNA, 138 bp, Homo sapiens
gcagatcctggaggatgtgcggggtgcgccggcagaggatccagtgttcaccatcctggccccggaaggaggatttgatgaagatgttaaagcgaaagtggagaaccttctcgggatttccagcctggaaaaaacgga

SEQ ID NO: 798492 - DNA, 98 bp, Homo sapiens
tgagttcggccggtccgagtcactgtgcgtcgcctgggcccgttcctggtcttctcccccaggtttgtaaaagaatggacttggtctgccagagaatg

SEQ ID NO: 798493 - DNA, 98 bp, Homo sapiens
aaagaaaacctaaagtatttgccgttggtgattcaaggtcacagcaaactgtacaatggcagttgagtgggttttgaaaaacgtctgaattgtagtgt

SEQ ID NO: 798494 - DNA, 100 bp, Homo sapiens
taagctataagggaattggccaatatgatatacaagacaaggtgaagcctcggaaggaagagctgaagagagacctgaaaattaagaaagaaaaagacct

SEQ ID NO: 798495 - DNA, 98 bp, Homo sapiens
aaaaacaagactggggctgctcccatcattgatgtggtgcgatcggtaaagtcagtgataaatcttttgtttgctgcatatactggagatgtgtctgc

SEQ ID NO: 798496 - DNA, 100 bp, Homo sapiens
gattgctgctgttttttatgtcagataccgaactcttccaacaccagagtctcgctctcagtcaaaatctccaacgggaactcctgctcgtgtaaaatcg

SEQ ID NO: 798497 - DNA, 100 bp, Homo sapiens
catacaggaacagggcagacgttagcgtgagtgatcactctcaatcccggcaatggtacaacagctccatgaacgtgatctgcacctggttgacggaccg

SEQ ID NO: 798498 - DNA, 100 bp, Homo sapiens
cgaagctatggcctgaagacgggattctttagaggcatcagcttcagtgagacagcagcagccgatgccgcccttggctacatcattgccttcctggtac

SEQ ID NO: 798499 - DNA, 100 bp, Homo sapiens
ctcctacctattaaaaggaccatacgagtcctagatgtcaataaccagtccttcagagaacaagaggtgtcagctgtgatgcatgtttaaaaggaaattt

SEQ ID NO: 798500 - DNA, 100 bp, Homo sapiens
taagttcatgatcaaccttctcaagagattcagcagcgaacggaagctcctggaggtcagaggccctttcatcatcagtgagaaggcaaccaaagtgcag

SEQ ID NO: 798501 - DNA, 100 bp, Homo sapiens
cagctccatgctgtgcctgtgctccgcgtctctcatgcagaggaggaaggttttcctttggaatatggataaatacaccatgatacggaaactagaagga

SEQ ID NO: 798502 - DNA, 98 bp, Homo sapiens
gccttggggggttccccgcgttccatgtcaaccatgttcctgggcacctctgggtactcatggctgtgatggatttgttaaggattccaagtaactct

SEQ ID NO: 798503 - DNA, 100 bp, Homo sapiens
tgtacacccactggaaccgggaccagcccgaaagatagaccttcctccgagggccgtctctcccagccgaacacagcccacccgcccagctccgccgcgg

SEQ ID NO: 798504 - DNA, 100 bp, Homo sapiens
agaaagcacaactcgaactgtccagtaaaattaacaacactctgacagaatgtctgaacctcatcgaaggggcagatccagttcctaatggtttgcgagc

SEQ ID NO: 798505 - DNA, 100 bp, Homo sapiens
gcatatttccctggaactggaaggactgatcaagaaacacagctaggcagtatttggcagtcgtattcagagataaacccctggagctatgggatgttag

SEQ ID NO: 798506 - DNA, 145 bp, Homo sapiens
cccaaggttgccaaatgcacagccaagcctagcagctcgggcaaggatggtggaggcgagaacactgaggaggacagtatttatgatgaaatggaagagaagtggtcaaaacagaaggcgaaatggaagaaggatgagaagttcg

SEQ ID NO: 798507 - DNA, 99 bp, Homo sapiens
ggaggatgagcctgcagagcgcgcagtacctccggtgactaataaaggtaccagaagaatatggctgcacaaataccagaatctgatcagataaaacag

SEQ ID NO: 798508 - DNA, 100 bp, Homo sapiens
gttcccagaaggactcttctatgaggaataactcatatccatgagtacaattatacgccagtcctgtgggtccttgcaaatcactgaaactacccttgtg

SEQ ID NO: 798509 - DNA, 98 bp, Homo sapiens
ggtcttcctctttgagaagcatagccctgtctatcattctggttcgtgctggccttggtctggattcaaagagtctcgctctgtcgcccaggctggag

SEQ ID NO: 798510 - DNA, 118 bp, Homo sapiens
atctggcagtgcaccggatgattcacactggcgagaagccattacaatcgctatggctcagagcaagagtttgtcgatgacttgaagaacatgtggtttgggctctattcaagaggca

SEQ ID NO: 798511 - DNA, 100 bp, Homo sapiens
ggcccctccattatggactgcaagatgggcagcagggtttggaaatcccttgtctccaggttgctgggattgacttcttgctcaattgaaacactcattc

SEQ ID NO: 798512 - DNA, 100 bp, Homo sapiens
ggagtcttccatcctggagacagtcactgctgtggctgcgggaaagcctctctcttgcccaaaccacgatgggaatgttaaagtattgcacaatcagctg

SEQ ID NO: 798513 - DNA, 100 bp, Homo sapiens
gcacccgagcagcgccagcggccgagcgggcggcttcctggcctgggcgctccggtggcggcggagggcttgtcaatgaggcagatcagattcaggttcg

SEQ ID NO: 798514 - DNA, 141 bp, Homo sapiens
catcagcaatgaaatcctgctttcttttcctcagaactactatattcagtggctaaatggctccctgattcatggcttggacttaaggatcagcaggagagagaaatcattcacgttctcatggattgctgccttcaagag

SEQ ID NO: 798515 - DNA, 98 bp, Homo sapiens
aaacaaaagtgagaaagaaggtcatgggtgttctggacatttatggctttgagattttcgagagtccctgtgaagcaggaagagtgagggcaggttca

SEQ ID NO: 798516 - DNA, 99 bp, Homo sapiens
ttgtgagaaaagcgagcctcttctgataactcaggatttacttgaaacaaaaggagaccctaatcttcagatttggcaaaagccttaatgaaggctgtg

SEQ ID NO: 798517 - DNA, 99 bp, Homo sapiens
gaaagtgagcgaggagtcagaaactcagccactggttgccttggtaggcaataaaatgaaactggaacgccaagctgaagaagaacgaatacggaagca

SEQ ID NO: 798518 - DNA, 98 bp, Homo sapiens
cctggatgagacatttgctacagcatcccacattaagtcaacgccctggactttgtctcacaagatgaaatgttgacgcccctggggagattggacaa

SEQ ID NO: 798519 - DNA, 99 bp, Homo sapiens
aaaagcccccaaaagcagctattcagtgtcagagatggctttggattccccgttctgtgtgctgctgtctggctcctgaacccagctgtagaggtgtgt

SEQ ID NO: 798520 - DNA, 99 bp, Homo sapiens
ccctccccactgggctcttcagccgccagcactgccttggaacggcccagcttcttatcccagacaggacacgtggatttggcatgataacatgcagtt

SEQ ID NO: 798521 - DNA, 154 bp, Homo sapiens
gaacgagctgatgctcaactccagcctcatgcggatcaccctgcggaacctggaggaggtggagttctgtgtggaagtgtggacgaatgtggaacctcgctctgtggctgtgttcccttggcactccttagtccccttcctggcacccagccag

SEQ ID NO: 798522 - DNA, 99 bp, Homo sapiens
gacaaccttcccagaaagtccaagctcgtgggacttgccatgaggtgttgaagccttgtttcactgagttggagagactggacctaaatggcgcagcat

SEQ ID NO: 798523 - DNA, 98 bp, Homo sapiens
gcggtccccaccgtgcagcggggcatcatcaagatgtaatctatgccagcaattatgacaatgttagcagaccatgcagctcgtcagctgcttgattt

SEQ ID NO: 798524 - DNA, 100 bp, Homo sapiens
ccgctgtgcccgggcctgcaccatgagcgtcccggccttcatcgacatcagtgaagaagatcagatactgtggcctcatgaataggaatgtctgcccata

SEQ ID NO: 798525 - DNA, 99 bp, Homo sapiens
aatattctacttgattctaatggccatgtggtgctgacagattttggtctgagtaaggagtttgtggctgatgaaaaaatatttacaccagcagctcca

SEQ ID NO: 798526 - DNA, 99 bp, Homo sapiens
gcaacagaactggcccactcccttcgatgctcaggtcacggtctagatcacattctcgatccagaggaaggcgatactctcgctcacgcagcaggagca

SEQ ID NO: 798527 - DNA, 100 bp, Homo sapiens
atcctctcatcttgtcctacctgaagtatgccattagttcccaggcgcagatcaggcctctataaccgccaggaatcacattcagctggtgaaactgcag

SEQ ID NO: 798528 - DNA, 98 bp, Homo sapiens
ggacgtttgcccagatccatgagatgcaggaccttggggacaagctgcgcatgatcgtcatgggacacagaaggtcttgggcgtctttggtactggct

SEQ ID NO: 798529 - DNA, 98 bp, Homo sapiens
aagtgagtgtttctctcaggctttgggatacttttggtgatcatcacaaagacagacgctttgcatatggcagagataattgacgaccttgccaacct

SEQ ID NO: 798530 - DNA, 100 bp, Homo sapiens
cctgggccagtattatcaggcatggagatgctactgatgtcaggcaaaccctcctggggcttgcccatagatgctgttcagtgggatatctgcaatctgc

SEQ ID NO: 798531 - DNA, 100 bp, Homo sapiens
ttacactcttgtgaccatcctcttgccgaaaaaacccagtggatgatgttggagaaaaattagagcatatggggaatacaccattaaaaattggcagtga

SEQ ID NO: 798532 - DNA, 100 bp, Homo sapiens
cattgatgttaatgaatggtgctatacttgaattttctaaggtgtcattagttctacttgtccaattctgaaaaggaacgttatgaaaaagaattcagcc

SEQ ID NO: 798533 - DNA, 100 bp, Homo sapiens
aggaatatgtggagagggccattgaatatcgacttcatgagatggacagacaggaatgtatcctgtcaggtataatgtcagtgaatggcaagaaagttct

SEQ ID NO: 798534 - DNA, 100 bp, Homo sapiens
ttcgtgctgtgcgggatcgacgcggacagcgggctggagcctgacgagctggcgggtttgctgtggaatttgtcatctaatgacaaactcaagaatctca

SEQ ID NO: 798535 - DNA, 100 bp, Homo sapiens
gaggatgaccccttcttctcggttacaagtgtataacaagtgttggaagtttgagcattgcaatttcaacgacgtcacaacccgcttgagggaaaatgag

SEQ ID NO: 798536 - DNA, 99 bp, Homo sapiens
acatggcactgttgcctatcagaagtcaattcaaaggacctgcccccagagagagagcatggggaagtgattgactgtgtgcaggagctgagccactcc

SEQ ID NO: 798537 - DNA, 100 bp, Homo sapiens
agcactccacgagttccctcggattaaacgccggagagagcgtgaatttgcctcggggacgcctctccaggtggcacctctgagcatgagaagctgtgcc

SEQ ID NO: 798538 - DNA, 100 bp, Homo sapiens
agagtgtgcagcggattaaagctaaagacatagttcctggtgatattgtagaaattgctggtcttattgaagttaaaacagatgagtttcctcgccatgg

SEQ ID NO: 798539 - DNA, 100 bp, Homo sapiens
cttatcgatattatgagagcagagcatgatcctcttaagggtgacatctgttcccgagctgttcctgactgcagtgaagctcacccatgatgacacagga

SEQ ID NO: 798540 - DNA, 100 bp, Homo sapiens
ccagaaactgcatgatgccttcttcaagtggcagaccaagccaaagctgaccatccatggggacctgtactatgaggatagtccacatcacaagctgcat

SEQ ID NO: 798541 - DNA, 100 bp, Homo sapiens
tggtgccttaaaaatggagtcagcctcactcctcccaaaggattggccatttgatgatggagctccaccccctaatcagatagtagatgattggttaaac

SEQ ID NO: 798542 - DNA, 100 bp, Homo sapiens
gtgtccacgtcgggtcagatccgacagaagatgggtgagtcaagtgaagacatagaccaaatgttcagcactttgctgggagagatggatcttctgactc

SEQ ID NO: 798543 - DNA, 98 bp, Homo sapiens
gtgtctaggtgagtcgcggtgggtcctcgcttgcagttcagcgaccacggtcgccactgggacactgtgaaccaggagtgagtcggagctgccgcgct

SEQ ID NO: 798544 - DNA, 100 bp, Homo sapiens
catgcctctgacaatctctagtgaacgtcaaggtcgtgggaaataaaaggcagttctacacagactgcagcaacggttgcatctgcatatcctaagagga

SEQ ID NO: 798545 - DNA, 100 bp, Homo sapiens
acggttgtggatcttgaagctttggaaagagattaaaagctgctttgacccagcaacatcctccagttaccaatggtgatactgtcaaaggtcatggtag

SEQ ID NO: 798546 - DNA, 100 bp, Homo sapiens
aactatgctagacagctgcaagctgaaaagtgcctgcaatttgccatttatttgtaataaggtatctttcagatgaaggcattgaagcttgcacaagctc

SEQ ID NO: 798547 - DNA, 100 bp, Homo sapiens
tgggctgtgtgcggcggcggcggcggcggccgagggggatggagcgagcgccgagccgggtcaggattacggggcgctgaaagacatcgtgatcaacgca

SEQ ID NO: 798548 - DNA, 100 bp, Homo sapiens
cgaaaacgcagaattgagcaggatatgttagaaaagaggaaaatacagcgtgaattagcaaaaagggctgaacagcttaacagagcgttccaaaaagagg

SEQ ID NO: 798549 - DNA, 100 bp, Homo sapiens
ctgatgccaacagtgtaccagcagggcgttggctatgtgcccatcacaggagctgctgctcttcctccagaacctgcccacagcccactgggatgatgag

SEQ ID NO: 798550 - DNA, 100 bp, Homo sapiens
cgtctccgttgggtccggccgctctgcgggactctgaggaaaagctcgcaccagaacccagcgggtgccgcttctccacccgaggcttccacctccaacg

SEQ ID NO: 798551 - DNA, 100 bp, Homo sapiens
ttttgggaaagccaaatggagctcagaaagctgtatggacctctgtgtgggcagcacacttctgcttttgttccttcatcaggacgaatttactcttttg

SEQ ID NO: 798552 - DNA, 100 bp, Homo sapiens
gcaagatctatgggcctttctgtgagtgcgacaacttctcctgtgccaggaacaagggagtcctctgctcagggacgactggagtgagcactggcctggg

SEQ ID NO: 798553 - DNA, 100 bp, Homo sapiens
gtttcaatgaggtgctgaaacagtgccgacttgcaaacggtgcactggtggaccaaggtgtctttgaggagctagcacgagactacgtcccacagctgta

SEQ ID NO: 798554 - DNA, 100 bp, Homo sapiens
aagcattcgaccctggtgaatgatgcctataagaccctcctggcccccctgagcagaggactgtaccttgaaggaatcgtgtctcctagtgacctggacc

SEQ ID NO: 798555 - DNA, 100 bp, Homo sapiens
ggtgaaaacaatgaagattatttacaatgctaccctgctttttctggtgtcctgaacctggaagttgtgctttttaaggggcggagaaactcatcatcca

SEQ ID NO: 798556 - DNA, 98 bp, Homo sapiens
ttgttcgtctgctgagactcggctccaaggtcacagctcgtaacactggactgttctgatggctacatgtgcaaaatacactttcaaattaagaatgg

SEQ ID NO: 798557 - DNA, 50 bp, Homo sapiens
tcaagatcaagaccggcgtggtgaagcgtgccggtggtggtgtgcacatt

SEQ ID NO: 798558 - DNA, 100 bp, Homo sapiens
cggtctcccggcgaaagtgagcgaggtttgcccggagcgcgcacgagacaagttggatggcttgaggactggtactaaaaggaaacgtgactgggaggcc

SEQ ID NO: 798559 - DNA, 99 bp, Homo sapiens
tctatcaccagcagtaccaggacaagagccgcgagtatgaccagctttatgaagagtacacacggacctcccaggggaaggcttcaacccaattcgtga

SEQ ID NO: 798560 - DNA, 98 bp, Homo sapiens
ggaaccagactgggggcgagctgagcacctgtagtcaatcacacgcaggatgaagaacaagctgtggtactttgaatttggcacctcggagacttttg

SEQ ID NO: 798561 - DNA, 100 bp, Homo sapiens
accgccaaaaaagtcaccgccgctagggtcgccgttgcatcggtgcagggcaagttggttgaatctggcgatgtggaacccatggatatggagggctgac

SEQ ID NO: 798562 - DNA, 100 bp, Homo sapiens
gatgaaattcagtttgatgacattggagatgatgatgaagatattgatgactaaactgtttcacgttagacctgtaacccaaggagatgtgtatagagct

SEQ ID NO: 798563 - DNA, 98 bp, Homo sapiens
agaatcgctctataagatctgcaagcccatgactgaagagttgctgaaacaacaaaagctgaattcacatgagaccactataactcagcagtctgtat

SEQ ID NO: 798564 - DNA, 99 bp, Homo sapiens
agatgctgcctgtgtgtcccccaggggcaggggggctgcctcctccacaagaaagaccacagcaagattctttcattcgtctcctcctagcctggggga

SEQ ID NO: 798565 - DNA, 133 bp, Homo sapiens
attaaaaacttcagagcaaaacatcactgtaattcttgctgtagaaagcttaaacttccagtggctgagaaaccctggcccccagcatgagaagcggactctgtttggcgacatggtgtgcttcttgtttata

SEQ ID NO: 798566 - DNA, 98 bp, Homo sapiens
ctatctgcggctcactggaaggaagcccaggaaggtgggagtcaatcattttgacaagtctcctgaaaggaacagctagcaggaactgaaaccttttt

SEQ ID NO: 798567 - DNA, 100 bp, Homo sapiens
catgcaggcaagcaggacttccgggaggaccaggatgctgccttcttcaagattgaggtggtgccttctgcctctgccctgatcatcaaagccctcaagg

SEQ ID NO: 798568 - DNA, 100 bp, Homo sapiens
ttggcggccattttagacgcagtaaccgagaaagaagctggcccagcggctgcaggatgccgaggaggccgtggaggctgttaatgccaagtgctcctca

SEQ ID NO: 798569 - DNA, 100 bp, Homo sapiens
ggcaatgatttataccatgaaatgattgaatctggtgttatcaacttaaaagatgccacctctaaggtaccaaccaagaagctgaagaaatatgagaaag

SEQ ID NO: 798570 - DNA, 98 bp, Homo sapiens
gacatgtctgatatgacccctgcagcactaaccaaagaaattgcatctgatggtctcaagggtcgtgtgtttgaagtgagtcttgctgatttgcagaa

SEQ ID NO: 798571 - DNA, 100 bp, Homo sapiens
caacaaccactggttctccaggaaccgaaaaggcgaggagtatagtacggcaaaaaactgtcggtaacagtcctttggacagcccccggaatttctctcc

SEQ ID NO: 798572 - DNA, 99 bp, Homo sapiens
aacgcgcccccggggaggggcggagctgtaggccaaggggcagtttaagaaacagtcagtggccaacggtgtggagatatctgtgcctgtacccagcga

SEQ ID NO: 798573 - DNA, 50 bp, Homo sapiens
caacctcagaggacaacgaagtgttcggttgcatatggccaagtccttgg

SEQ ID NO: 798574 - DNA, 100 bp, Homo sapiens
ccctggtttaactagcctgtttgggaggagagagcgatggcttttttcacccagaaggccagccccagcggcttccccagcctccggaagtgggaccaca

SEQ ID NO: 798575 - DNA, 100 bp, Homo sapiens
ctgaaccaggacctggacccggacccaaagtgccatgtctttaatctgtgccgaagcgagtgccacttgtctgcagggccgtaccgcggaaccctctttg

SEQ ID NO: 798576 - DNA, 100 bp, Homo sapiens
gttcacgtgacatcaagaggaagcggaaaccagtggccacagcatctttgtctagccccagtgcaggtctgataactttggaggaactacatcaacaggt

SEQ ID NO: 798577 - DNA, 100 bp, Homo sapiens
ggaaaggaaattgaagaaaaactaagactcacatctacaagcaatgaactggtgaatgaaatcctgtgccgttcttcagtctggagtgccttcaaagatc

SEQ ID NO: 798578 - DNA, 98 bp, Homo sapiens
accagtcagaccagcgcgtcatcatcaagttgggccatatggtgctcttcccagtctggttcctgtacagtctgctcatgaagctgttccagcgctcc

SEQ ID NO: 798579 - DNA, 51 bp, Homo sapiens
cgggcggccgtgcgcgaggcgaggaggctctgtcggtggtgagcgacgacc

SEQ ID NO: 798580 - DNA, 100 bp, Homo sapiens
catgacagagcgttccttttatcaatggcaaatcgagggaaacataccaatggttcccagtttttcatatgctccaccaactggtcaggcacacagtgtg

SEQ ID NO: 798581 - DNA, 98 bp, Homo sapiens
cataatcctatggtaaatgctggagcaattgttgtgacttcactaataaagcattgctatggcaacaaaagaaaatatgacttcacagagaggaatgt

SEQ ID NO: 798582 - DNA, 100 bp, Homo sapiens
ggaaaaatccagagaccccctgaagattcgcagaaaaagtcctacctggagcgaagcgttaaggaagctgaggacaacatccgggagatgctgatggcac

SEQ ID NO: 798583 - DNA, 98 bp, Homo sapiens
gcgccgccagtggagcccccgcgcgcccggccggcccggagcaccgagctcgcggcacggtaggagatagcctgggctggaagctcttctacgtcaca

SEQ ID NO: 798584 - DNA, 99 bp, Homo sapiens
ggctgccgagcgtgaggagactcagcagaaggtgcaggttcatgtagtattgaaactctggaagagtggattcagcctggataatggagaactcagaag

SEQ ID NO: 798585 - DNA, 100 bp, Homo sapiens
tgggcaagagaagaattcagaagaaacaaaagtgccaccgaagaggtaacactcccaaaccttttcagtgtcattgattattttgtgaaggagactcgag

SEQ ID NO: 798586 - DNA, 100 bp, Homo sapiens
gagcagagaacttctttatccttcgaaggaagcctgtggagctacctgaaaacttttgttcctatgcataaagatgtctttggtggacttgggaaagagg

SEQ ID NO: 798587 - DNA, 100 bp, Homo sapiens
agctgtcccgccctacaggctgcgggtgatcgcagaagcctacgctaccaaagatatggctgtgctggtgctggaagtaatcaccaaacttgatggtctt

SEQ ID NO: 798588 - DNA, 100 bp, Homo sapiens
aatttgggatattactcggtccagccgtgtaggagactcaccaatacctggagctggagcctatgctgacgatactgcaggggcagccgcagccactggg

SEQ ID NO: 798589 - DNA, 100 bp, Homo sapiens
acccagaaacatgcatgattgtatttaaaaaccactgggcacagcatcaattcctgaagattgccaagcccctctccagcctcactccactgattgctgc

SEQ ID NO: 798590 - DNA, 98 bp, Homo sapiens
aaagaattaccactaccaagaagggatctatcacctctgtacaggtactggtgtggcatactcggacagagaagcccaagatgaagcaggaggagcag

SEQ ID NO: 798591 - DNA, 98 bp, Homo sapiens
gaggctgcaaagaatgctttgaatgtgtttgatttcaccaccatagacttgacatctgagactgatgaaattccagatattatagctttggaagagga

SEQ ID NO: 798592 - DNA, 100 bp, Homo sapiens
gcatttgcacctgtggcttatctacgctttttagaattgcacttggaggacaagtaatagttatgcacgagtgcgagctgtggtgatgacccgagatgac

SEQ ID NO: 798593 - DNA, 100 bp, Homo sapiens
catgtgggcatctacgaccgcgccaccagggagaaggtggtcctggcatcaggcaacatcttcctcaacgtcatggacgttggacctctcgaacaaccag

SEQ ID NO: 798594 - DNA, 99 bp, Homo sapiens
atcattcttgcagcatttcgtaatacttcagagagtcagagttgtgccagaagtctcttaatggcagatagaatgcaaatagttgtgattctctcagaa

SEQ ID NO: 798595 - DNA, 100 bp, Homo sapiens
catagagaattctgggcttccacacaactccagtgctaactcaacaggaatcctgaagtgggtaaaactgattgacaactttgaaggggaatatgactac

SEQ ID NO: 798596 - DNA, 98 bp, Homo sapiens
gagttgggaagccatctgaccttgctggccctgttgtggcagagacccgtccagatgagctcacagtgcctgcactttaccccagtagccctgaagtg

SEQ ID NO: 798597 - DNA, 99 bp, Homo sapiens
gattgatcccaggagtatgggaatattaaagatgttcgaagaagaacaatttatgaataccaccgagtagagctacaaatgtcaaaaattaccaacatt

SEQ ID NO: 798598 - DNA, 100 bp, Homo sapiens
cccagcggacagcgaggcgggcctcctggaggcagcacgggcgaccccccggcgcagcagcatcatcaaggaaaaatttgagggactgtttcggacttat

SEQ ID NO: 798599 - DNA, 100 bp, Homo sapiens
gatattcactttgatgatgatgaaaaatggacagaagatgcatcagccgttgatccagaaattatagctcgaggtactgttggcttttccggagcagagt

SEQ ID NO: 798600 - DNA, 98 bp, Homo sapiens
acggacaacatcaccgtgaggcagggggacacagccatcctcagatgcagagccgaaatatctgatagttgtgcgacctgctccacctccaagtcaaa

SEQ ID NO: 798601 - DNA, 98 bp, Homo sapiens
cagagttacattgcagccatcagcgctcgttttgtgcagcttcagcacaatgacattgacaaacgggcagtatttggcagtcgtattcagagataaac

SEQ ID NO: 798602 - DNA, 98 bp, Homo sapiens
gaaaccaacagacaatgccaatttacgtgtcattatggaactacttatgaggggcgacctatctactgctcttgaggtcgccattgactgctatgaaa

SEQ ID NO: 798603 - DNA, 99 bp, Homo sapiens
gattaaattgcttactggtaaacgcgttcaactggcggaagacctcaaatataacaccagcaatcctgacttgttgctagtcatatttcaagtgacagg

SEQ ID NO: 798604 - DNA, 100 bp, Homo sapiens
aacattctcacagacaagcatggagcctggggaaattctgcagtgaggataagttctgaacgtcgaaaagaaaagtctcgagatgcagccagatctcggc

SEQ ID NO: 798605 - DNA, 151 bp, Homo sapiens
tgaaaatctcaaaatcagcattcctcagatcaagctaagtgtgttcacctccaacaagctcccattggatcttaaggccacggcgtatgcctccgaggacggggtcctgaccgaggccatgatggacacccgcgtgcaagatgctgtccag

SEQ ID NO: 798606 - DNA, 99 bp, Homo sapiens
aatacttttgcacctctccagaaactggatgaattgtatcgtcagatcctggaaaaagccattcagttatctggagcagaacaactagaagctttgaaa

SEQ ID NO: 798607 - DNA, 100 bp, Homo sapiens
cgagagcgtgaccgagagcgcgaatatcgtcatcgttagaaggattctccttttacaaatgcaggaatgggatctaatctaaatctgttaggtgaaattg

SEQ ID NO: 798608 - DNA, 105 bp, Homo sapiens
tatgacattaacagacaagacacttttcagaaagacagggaccagttactctccacaagaaaattcacacaaccacagtgctcttcatagttcaaattcacattc

SEQ ID NO: 798609 - DNA, 50 bp, Homo sapiens
tctcgagtagttgggattacagctttttgcccctcaagacaggactgctt

SEQ ID NO: 798610 - DNA, 98 bp, Homo sapiens
cactactggcccctgatccggttcttggtgcccctgggcatcaccaacatagccatcgacttcggggagcaggtgtggccgacgacgatgccctcgct

SEQ ID NO: 798611 - DNA, 100 bp, Homo sapiens
gtccttattattggccctccagatacactttaaattaaacaaccaccatgtcgagcaaaaaggcaaagaccaagaccaccaagaagcgccctcagcgtgc

SEQ ID NO: 798612 - DNA, 100 bp, Homo sapiens
catcctttcaaactcctgtgaatacagaatttgaatacatctggcaagacaacttcaagtacagatggacccaaattccctggagataaaagttcaacaa

SEQ ID NO: 798613 - DNA, 100 bp, Homo sapiens
ttttaagaagaaatgctaatgtcaacctcaaaaaccaggagaaccagcagaaatccaccaatgtagtctatcaggcccaccatgtgagcaggaataagag

SEQ ID NO: 798614 - DNA, 99 bp, Homo sapiens
agagcgtagccgcctggcgggacgaggacgactacacctgctgtgatgcagatccatccgccctagcaaaatatgttctggctttggtaaagaaagaca

SEQ ID NO: 798615 - DNA, 127 bp, Homo sapiens
agagttgatttctctataacaaaaagaccacatacgccaacaccaggaatttacatggggagacctacctagtaaagtggaattgcatgggaaaatcatggaagttgattactcagtctctaaaaag

SEQ ID NO: 798616 - DNA, 99 bp, Homo sapiens
tgaaacgaaagggagccgccagcgcgtttggctgtgacctgacggagtatctggaaagctcgggacaggatgaattaaggaagttcactggagtaaaat

SEQ ID NO: 798617 - DNA, 99 bp, Homo sapiens
aagaggggcttattaactcgtctgctgcaggtcatgaagaaggagccagcagagtcgtctttcaggactggccaaccaagcgcaccaggtgacacttca

SEQ ID NO: 798618 - DNA, 100 bp, Homo sapiens
gcgcgaacgagcgacggcggaacccgtgggcctgtggactgcagcctcggcggtcagcaggacactcatgaggaccatgatacttccactgagaatacag

SEQ ID NO: 798619 - DNA, 98 bp, Homo sapiens
aaatttttgtcttggggcccaaatacagtcctcttgagtttttacgaagggtggaatgaggtaccatctactgtctccagaggaccgagaagaacttg

SEQ ID NO: 798620 - DNA, 100 bp, Homo sapiens
tccgctgttggcaaatcaagcctagtgcttcgttttgtgaaaggccaatttcatgaatttcaagagagtaccattggggcatcttcatgatacagttaag

SEQ ID NO: 798621 - DNA, 100 bp, Homo sapiens
aaagggtggagcctggacaaaatgtttacttgtctgtgaaactggaacgccaagctgaagaagaacgaatacggaagcacaaagcagctgctgagaaagc

SEQ ID NO: 798622 - DNA, 100 bp, Homo sapiens
catcttcaccgtgtacctgggctcgagcctgcacatgaaggatgaattacaaaggctgctggggttgctaagagaccaagatcccctctcagaggagcag

SEQ ID NO: 798623 - DNA, 100 bp, Homo sapiens
cagcgctccacgccagccatcaccctcgagagcccggacatcaagtacccgctgcggctcatcgaccgggagtgcaggtcgtaatctgaaggagtggctg

SEQ ID NO: 798624 - DNA, 131 bp, Homo sapiens
gactactcgcatcgcgcactttttggatcggcatctagtctttccgcttcttgaatttctctctgtaaaggaggacaggcgacactaacaggtgaagatctcgggagaccatgactaagaaaagaattgct

SEQ ID NO: 798625 - DNA, 99 bp, Homo sapiens
agaccggtcctcgtttgtaccgtccctcttcagattgacctagaagctgagaaggtgagcactgtagctggtattggaattcaaggtacagataaagaa

SEQ ID NO: 798626 - DNA, 100 bp, Homo sapiens
ggggttatgtggcgtatagtaaggctgcaacagttactgtgccttatcgcttgcatgcagttcttgttcatgaaggacaagcaaatgctggacactattg

SEQ ID NO: 798627 - DNA, 100 bp, Homo sapiens
gtccagaagatgattgacgtggcggagccaggccagcggaagatcgtcatgcataaggaaaggccattgctgctctggagctgtgtgtgtgtgtgatgac

SEQ ID NO: 798628 - DNA, 50 bp, Homo sapiens
gcctcctgagtagctgggactacagggtctccctctgttgtccaaggctg

SEQ ID NO: 798629 - DNA, 100 bp, Homo sapiens
ctgtttggggagacgtccgccaagcaccagcaggcagctggctccggttttggggtatctgggctccaggcagaagcacagcctccccgacctgccctac

SEQ ID NO: 798630 - DNA, 107 bp, Homo sapiens
cgcaccggcctcttctgtatgtcgtagagaagccttagtacacaatgagaagagcgtgttgtgaatcacatggcagcaaaaattattgaaaatgtctgtaccacctt

SEQ ID NO: 798631 - DNA, 99 bp, Homo sapiens
tacaatcatcctgcttcttgtacatcactggttacgttacagtggatattttgggggtgttactgccctaagcagagagcagtttttcaaggtgaatgg

SEQ ID NO: 798632 - DNA, 98 bp, Homo sapiens
atctctctataaagttatccaggagccacaaagtgagatgcgtttagcccagcccctgctggtaaccaaggtcctcctccaatgatgggtatgaatat

SEQ ID NO: 798633 - DNA, 98 bp, Homo sapiens
cccagagaggagagcgaggaggaagaggacgaggacgacgaggaggaggaggaggaggaaaaagtttgctggaacattatcagatggcttagggaaga

SEQ ID NO: 798634 - DNA, 118 bp, Homo sapiens
cacaggtcacagtaaggccaaaaatgtgcatactcacagagttagagagagggatggtggatcttagaaatgaagttgaaaaattacgcaatgaagtgaatgaaagagagaaagcaat

SEQ ID NO: 798635 - DNA, 100 bp, Homo sapiens
attcagcccaggatcagcctgtgaagtctcagaccagtatccttcaggggttctcttactctgatttgcggaaatttggcatcgtcttgtctgctgtgat

SEQ ID NO: 798636 - DNA, 98 bp, Homo sapiens
accagaacttttggaactagtgccggcggctctccaccccccagatttccatggagaatgattatctgggacctcgaagaattgagagtctacaaaaa

SEQ ID NO: 798637 - DNA, 100 bp, Homo sapiens
tggaggctggcggacaggcgacagcgacctgcggcagaaatccccggcttcctgactgatgaagagtgtcggctcatcatccatctggcgcagatgaagg

SEQ ID NO: 798638 - DNA, 100 bp, Homo sapiens
ccaacttatgaatacataaaatttgtaggaaattttcgctcttacaacaatggattatatgcgtcaggcaggagaagtgacttatgcagatgctcacaag

SEQ ID NO: 798639 - DNA, 100 bp, Homo sapiens
cttcagggtgtgatgaatgtcctggagcacttccacaagtatatggggattccgcagatccggcagctttccgaaagggcaagaagtacaagcccctgga

SEQ ID NO: 798640 - DNA, 99 bp, Homo sapiens
acattttcatgcatcattttttcaaaatagggcctgcactgcccaaagtcttggaaacttgctggatatgatgtaccgggagccagcacgatggtccta

SEQ ID NO: 798641 - DNA, 100 bp, Homo sapiens
gatctatatggagaacttttagaaacttgtatcattaacatcgatgttccaaataggcataaacttggaggaggcagtggagagagcatcctggtatcac

SEQ ID NO: 798642 - DNA, 100 bp, Homo sapiens
acatcgcctaccagctcatgcataacatcagggacattgacgttcgggaagaataccggaagtgggcctgcctagttgctggggggagcaagtactcaga

SEQ ID NO: 798643 - DNA, 98 bp, Homo sapiens
cttcatgaactccaagccaaaatcacagctttgagtgagaaacagggaatttgaagtactgccttgtaattcttaatcagcctttggacaactatttt

SEQ ID NO: 798644 - DNA, 98 bp, Homo sapiens
aacatctccaaagacccatctttagtcttcaggaaccagtattactgtggacatcgccgtcatgggcgaggcccacggcctcattaccgacctcctgg

SEQ ID NO: 798645 - DNA, 100 bp, Homo sapiens
caaagggaatacattgccagaacttggaatactctactggacaaacatttcctccaaggttttagctgaattttgggacatggccactgcttcaccaagg

SEQ ID NO: 798646 - DNA, 100 bp, Homo sapiens
aaggatccagcttccttctgaaaaggcgatcttcctgtttgtggataagacagtcccacagtccaggactcagttgcctttgaggatgtggctgtgaact

SEQ ID NO: 798647 - DNA, 100 bp, Homo sapiens
agttgccaaagaagccaaagatcttgcacatgaagctacaaaactgctaagatatcaacatggactagggactccagacttgcggcaaacccttcccaac

SEQ ID NO: 798648 - DNA, 98 bp, Homo sapiens
gcagatggccagtcacgagaacccagatggactgagctgtgtccaatgattgaagccaggaagaatcatgggctggtatttgtaaaagacaagatatt

SEQ ID NO: 798649 - DNA, 99 bp, Homo sapiens
tccaggtgacagcaatcagctggcctggtttgatactgacctgtaaatcatcctttaggaactgcaagcacatgttgaccagataactgaaatggcagc

SEQ ID NO: 798650 - DNA, 100 bp, Homo sapiens
aatgtagttacagttgaatgggctgaccctgtggaagaaccagatccagaagtcatggctaaggtgtttgatcagagtgcgctttcaactgaagctaaag

SEQ ID NO: 798651 - DNA, 100 bp, Homo sapiens
tgccctcagaaatcaacagaggaggtgaggtcccagcttgaagagaaagaaaacaagaagttccctgtgtttaaggccgtgtcattcaagagccaggtgg

SEQ ID NO: 798652 - DNA, 100 bp, Homo sapiens
gctcaggccagttcgtcggctgccagcaacaatcaccagggtgcaacaccggaggatttcagcaacctcccacctgaacaaagaaggaaaaagctgcagc

SEQ ID NO: 798653 - DNA, 98 bp, Homo sapiens
tgagatccagtttgggcacctgcagcgacctacccactacaatacctcttgggactgggctcgatttgagtcccatgagcgtgtaagcaagcgtctac

SEQ ID NO: 798654 - DNA, 100 bp, Homo sapiens
cggcgagggcgcgcggctggtgtccgccccgcccgaaaggaaactcaagagtatacccgaaatgttgttagatattgccttgaagctcttcaagactggt

SEQ ID NO: 798655 - DNA, 98 bp, Homo sapiens
gccaaagaaatccagtcccgaccaggtacagctcgcagaaagaagaaggtggtacatagaacagccacagctgatgacaaaaagcttcagagttctct

SEQ ID NO: 798656 - DNA, 136 bp, Homo sapiens
agcagtggatggaggtgacggagcaggtgctgccagctctcatgaagaagagccttttgaccaaggtgtagatgcccctgatccaggtgcagacccgctggctagcagtgtgaacggcatgtgcctggatattcct

SEQ ID NO: 798657 - DNA, 98 bp, Homo sapiens
cgaattcctgtgccgaagaggcctgcagtgggagagcaggattttgcaagaacgaggctcaaggatgtgagggacacagtattgacagctgaagaaat

SEQ ID NO: 798658 - DNA, 98 bp, Homo sapiens
ccccacctcctctgcctccacctcccccgcctctgggggctcctccccctcccccaccatcagcacccccggttatgagtccagggacaatatggagc

SEQ ID NO: 798659 - DNA, 99 bp, Homo sapiens
ctgaagcatgccgcatgattcttgaaatcatgcagaaagaggcagatgagaccaaactgaatcccgttctgcttccagaagtggaagtgctcacggatc

SEQ ID NO: 798660 - DNA, 100 bp, Homo sapiens
ttaatgagaggagagaggcgaccactttggaggcaagtgaggcctatctggttggcctttttgaagacaccaacctgtgtgctatccatgccaaacgtgt

SEQ ID NO: 798661 - DNA, 98 bp, Homo sapiens
ataccgatgtcggaatgtggcaaaattactgtatatgcacatgctgggctaccctgctcactttggacaggggatgtatggcattgagaatgaagtct

SEQ ID NO: 798662 - DNA, 100 bp, Homo sapiens
cagtaggctcactgacctgcttccctaagcacgtggttcttccaccttcctttccagaaggaaaatcacctcggcagtgtttgaaggaaggatactgcaa

SEQ ID NO: 798663 - DNA, 98 bp, Homo sapiens
gaagaccagctggggaaacatggtgagaaacaaacaccagggactgctgagatgtcctctattcttgaagagcgtattcttggagctgatacctctgt

SEQ ID NO: 798664 - DNA, 98 bp, Homo sapiens
gggctgtccaacgccttccagctccggctcccgctgcctgcaccatgtccgccagagaatatcctccgaatcctaaatctagagctccaaggatgctg

SEQ ID NO: 798665 - DNA, 100 bp, Homo sapiens
agtcagcccaggcagacctccaggtgaagccaaaaaccttccctcttacccggggccgagcaagatgagggattgctactgcacggtgaacctggaccag

SEQ ID NO: 798666 - DNA, 98 bp, Homo sapiens
cgacctcgtgaagatccgcttcgccgacccatccctggaaggcatgtgtggcactgagcatgcccagttgggagaagatgggcagcagccgccgcggt

SEQ ID NO: 798667 - DNA, 98 bp, Homo sapiens
aagaaccattgttagtgaacgtggacaaagctgttgtctcagggagcacagaactatgatcctggcaggaaaagcctactacgatggagtggccaaga

SEQ ID NO: 798668 - DNA, 100 bp, Homo sapiens
ccggctggctgaggaaatcgcctcccgagaagaagttgaggcgctatgctactgcagcactggggtgtcagttgttggtccgacccagaacgcttcagtt

SEQ ID NO: 798669 - DNA, 100 bp, Homo sapiens
tggaacatgtcatcaaggtagcacatacttgtctccatcctcaggaatcccttcctgatactagaagtgaggtggaagagaaacctgatgtcacatacag

SEQ ID NO: 798670 - DNA, 100 bp, Homo sapiens
cgggctccgcgcccggccggacccgggcccgagtccccacaggagacaaccctgacgggagcatggagctgctgtccacgccccacagcattgagatcaa

SEQ ID NO: 798671 - DNA, 98 bp, Homo sapiens
cagaagaaaatggatttcgttatatcccctttagaatatatcagcctaccaggacatcctcggaaagtatttattctaggccaggctccagtattcct

SEQ ID NO: 798672 - DNA, 98 bp, Homo sapiens
tgcctggaccctgcccagcagaatttgtatagagatgtgatgttggagaactacagaaacctggtctccctagagctttcagcagaggccaaggcagc

SEQ ID NO: 798673 - DNA, 99 bp, Homo sapiens
ggaggaatagtacaacaattatgagccgtcacagcctggtgtcgtttcagtcagatgttgcatccaatttttgaggaagcttccgatgtcattaaggaa

SEQ ID NO: 798674 - DNA, 98 bp, Homo sapiens
tgtcatcacgcagaaggggtgaaagagactcggtgacagatacagagacggtaaagaacaggtccaagaaaagctcaaagaaagcaaataccagcagc

SEQ ID NO: 798675 - DNA, 98 bp, Homo sapiens
aaagttgactgaaaatggggcggaagaaaatacaaatcacacgcataatggatgaaaggaaccgacagactatccccataaatacggtcctcaggggg

SEQ ID NO: 798676 - DNA, 100 bp, Homo sapiens
caagacctgtaggaggatattcttcatgaaggtaccattaggcttctcagctccaccagatggcctcccccaagtcccccacatggcatactgtgctctg

SEQ ID NO: 798677 - DNA, 100 bp, Homo sapiens
agaagaggctgtggattcactgtctccagcgcctcttctttgagaaccaccctgcctccatccctgccaagttgtgcgttattgcagaatgtggagaatt

SEQ ID NO: 798678 - DNA, 98 bp, Homo sapiens
ggagcgctccagccgctggtccccgggagaccctgtgcccctaaatcgcggtccactgcgcgcgtcaggccaagatgctgaattatcagggacacttt

SEQ ID NO: 798679 - DNA, 100 bp, Homo sapiens
atcgttggctatgtaaaaacagtggttggatttcatcccttactggtctcaaccaaaatattcctgttggaatcatgatgataatcatagcagcactttt

SEQ ID NO: 798680 - DNA, 100 bp, Homo sapiens
gggcaccgagagggactacgtgggcaccttgcgcttcttgcagtcggacatggatttgattgacatactttggaggcaagatatagatcttggagtaagt

SEQ ID NO: 798681 - DNA, 98 bp, Homo sapiens
tatccagtcccactaccagctggaactgcagtgctgcatcgactggacccatgtcactgaccccctcatagctatcatggtgaacttacttcagattg

SEQ ID NO: 798682 - DNA, 100 bp, Homo sapiens
aggacatggaatcctggctgaccaaccgggaacagatgcagaactttgacaaaggtagtcagcagagtgcacacagcagctgtcatccctccttcgctcc

SEQ ID NO: 798683 - DNA, 99 bp, Homo sapiens
gaaatcctccccacttatgtttgtaaatgtgagtggaagccatgaggccaaaggcagttgtattgttaagctgaaggaatctgttgttgaaaatcatgc

SEQ ID NO: 798684 - DNA, 99 bp, Homo sapiens
gaaggagctagctgaaataacccttgatcctcctcctaattgcagatcctgataacttaagtgactctctcttttccggtgatgaagaaaatgctggga

SEQ ID NO: 798685 - DNA, 100 bp, Homo sapiens
cggcggcggccgaaagcggagagatgctgggcgtggcggccgggatgacccacaggaaaagagcactggttgccattggtacccatgatttggacacttt

SEQ ID NO: 798686 - DNA, 99 bp, Homo sapiens
gtggtgctgcccgagaaggtggacgtgctggtgtctgagtggatggggacctgcctgctgacgacggacataagaaagctcgaaatgcttatctcaata

SEQ ID NO: 798687 - DNA, 151 bp, Homo sapiens
tctctggcctgtttgattctggcagcagccaccatcattttgtatttcattccactgcggtacatcattttaatctgggatgcaatcttcttaccgcgaagaagccaggggaataggtagccacatcttgtttgcagataagaaaggaagc

SEQ ID NO: 798688 - DNA, 100 bp, Homo sapiens
cttgcttctgagcaaggtagttttgatggtacctagtagaactgggttgtatcaagccgctctgtgatctcctcacggtcatggactctaagattgtaca

SEQ ID NO: 798689 - DNA, 108 bp, Homo sapiens
tccaagctctactgtgacttcagagacactgccaagcagccttagccctagtgtagagggatacagcaggccaggagcgatttcacaccatcacaacctcctactaca

SEQ ID NO: 798690 - DNA, 99 bp, Homo sapiens
agtgactcaaattttcaagtgccaaacggaggaatacctcgtatgcaacctcaggcttcagccataaaggcatgacttcctggcaccacagggaaaatc

SEQ ID NO: 798691 - DNA, 100 bp, Homo sapiens
tgtccctttccttcctggcgctttcctgggttgcttctggcggccatggtgttgctgctgtactccttctccggcatggattccgtgaaggaacaacacc

SEQ ID NO: 798692 - DNA, 130 bp, Homo sapiens
gacgggaacttttcaactgacttttacttttgacgaccaccatgactgagatcactgctgaagctgtctgtggaagcccgtaaagagatgactagaaaggctattaagacagtcaaacattttattgaga

SEQ ID NO: 798693 - DNA, 98 bp, Homo sapiens
ttagaaaggctcaacgagaacaagctatcaggtttgaattttctcggagaaagacaggccggccacgaggaaaacagaaacaagccgcagcaacatct

SEQ ID NO: 798694 - DNA, 100 bp, Homo sapiens
atggacttcggaccctggcctcttgggatgcaaagggttgagaatgcttgcaccaagcttgtccaggcagctcagatgcttcagtcagacccttactcag

SEQ ID NO: 798695 - DNA, 101 bp, Homo sapiens
aagtcttctcatttaaaagctcacctgaggactcacactggtcaacaactacaatatcagcaatgtgtcccataactatgcccgagctgtcctttcccagc

SEQ ID NO: 798696 - DNA, 100 bp, Homo sapiens
ggaatttgattaactcattcaaggttacccagttggttgcaaagaaattatctttgaagatgaatgaggttgacttctatgagccatttatggatgagcc
